United States Patent Application Publication US 2004/0123343 A1 - sequence listing, part 10

SEQ ID NO: 25990 - DNA, 1419 bp, Oryza sativa
  Clone ID: PAT_MRT4530_30822C.1
atggcaagcgatattggcgagttgttgcctccatggacctccccgagcaagatcgagctgccgttccgagtagccgcctacatcaccctttatgaaagctcaagcttcgccttcaacgccctcctgagaagccccttcctcgccaccgcccactgcgcccacaacacccttgcgccaatacagagtggggtgatgaggctaatagccgcctttccccggcggccggcggccggcgacgccatgctccacctccggcagtgcctcctcccgctgctccgcgccgccgccgccgcccatccccacacctccgccgcatcctcctcctctctccacctcagccgccgcctcttctccaccgccgccgggcccgacaccgcgccccccttctccgtcgaggagtacctcgtcgccacctgcggcctcacgggcgcccaggcgctcaaagcgtccaagaagctctcccacctcaggtcgcccgccaagcccgacgccgtgctcgccgtcctctccggcgtcggcctctcccgcgccgacctcgccgccgtggtcgccgccgacccgatgctgctctgcgccagggcgcgcaacgtcgcccgccggctgcattcgctccgcgaccgcgtcggtctgtccgatgccgacgtcgcccgtttcctcctcgccggcggcgcaatgggcctccgcaaatgcgacatcgccccgaggctcgagttctggatcggcttcgtcggatcgttcgacaagctcctaccggcactgaaggggaacaacggaatcctcatgagtgacctggacaaggtcgtgaagccgaacatcgcgctgctccaggagtgcgggctaagtgtttgtgaaattgccaagctgtctacgctcaagtggacggtgctgtcgttgagtccagagcgagtcaaggcgtcggtgctgtgcgtcgagaagttggtcgtgccccgctcctcggatcggttcaagcacgtgctcaagtccgcctgttggatctccgaagatatgctcgccatgaaaatggagttcttgaggagcactcttggttgctccgaggacaagctccgtgccgcggtctgcatttcgccacatattttctacctgtccgacaagaacctttgccgaaagatagacttcctgatctccgaggttggcttggagcgtgagttcattgtggaaaggccttgggtgctcggctacagcctcgagaagcgtatggtgccacggcattctgtcatgaagatcctgaggaccatgggattgatgaaggatgctgttgacttcagcagttcacttgtttactctgagaaaaaattcgttgcaagatacattgatccttacaagcaagcagctcccacgctcgcagattcctacgctgctgcttgtgccgggaaaatgcctgctcatgttcaccgttga

SEQ ID NO: 25991 - DNA, 2341 bp, Oryza sativa
  Clone ID: PAT_MRT4530_30823C.1
atggcgtcgtcgagggtgatcctagcgctgctgctcgcggcggcggcggtgatggcgtcgtcggcgcagctggacgagaagttctacagcaattcgtgccccagcgtggaggccgtcgtccggaaggagatggtgcgcgcgctcggcgccgcgcccagcctcgccggcccgctcctcaggatgcacttccacgactgcttcgtcaggggttgcgacggctcggtgctgctcgactcggccgggaacagcacggcggagaaggacgcgacgccgaaccagacgctgcgcgggttcggcttcgtcgagagggtgaaggccgccgtggagaaggcatgcccgggcaccgtctcctgcgccgacgtgctcgcgctcatggccagggacgccgtgtggctgagcaagggcccgttctgggcggtgcctctcggccgccgcgacggcagggtgtccatcgccaacgagaccgaccagctgccgcctcccaccgccaacttcaccgagctcacccagatgttcgccgccaagaacctcgacctcaaggacctcgtcgtcctctccgctgggcacacgatcgggacgtcgcactgcttctccttcactgacaggctgtacaacttcaccggcctggacaacgcccacgacatcgacccgacgctggagctgcagtacatggcgaggctgaggagcaagtgcacgagcctccaagacaacacgacgctggtggagatggacccggggagcttcaagacgttcgacctggggtacttcaagaacgtggccaagcggcgggggctcttccactccgacggcgagctgctcaccaacggcttcacccgcgcctacgtgcagcgccacgccggcggcggctacaaggacgagttcttcgccgacttcgccgcctccatggtcaagatgggcggcgtcgaagtgctcaccggcagccagggcgagatcaggaagaagtgcaacgtgtacagcttgatcgttgcccgtaacctcccgtggctccgatcccgtctccggcgcggcgcgcggctcggcgttgagacagtttgccgcctcatgtcccgggagctggagctgctgctgtttttgctggccctacgggcgagcggcgaggtcgtcgcgggttcggcggaggcagcggcagcggcagcggcgtggcccgcgctgcaggtggggttctaccatgccaagtgccctgtcgcggaggacgtcgtgctgggcgagatgaggatgatcctcgaggaggatcccacgctcgcgccgtctctgctccggatgcactaccacgactgcttcgtccaggggtgtgacggatcgatcatgctgaggtcgaggagcgggaagggggagagggacgcgacgcccaaccggagcatgcggggctacgacgccatcaatcggatcaaggcgaggctggagaccgtctgcccgctcaccgtctcctgcgccgacatcatcgccatggcggcgagagacgccgtctacctgagcaaggggccgtggtacgacgtggagaccgggaggagggacggcgacgtgagcgtggccgagtacgccgagaacgacctggcgccgccggactccaacatcgtcgacgtcaagaccttcttcagcgtcaagtctctcaacgccaaggacatcgccgtgctcttcggatgccacagcatcgggacgtcgcactgcggggcgttccagaagcggctgtacaacttcaccggaaggatggaccaggacccgtcgctggacgccggctacgcggcgaagctcaagaagctctgcccgccggggcacggccacgaccacgaccacgacggccatggcggcgccggcggcgcggccaaggtgcccatggaccccggcagcggcttcacattcgacctgagctactaccggcacgtgctcgccacgggcggcctgttccagtcggacggcagcctccgcgacgaccccgtcacgaggggctacgtcgagaagctcgccaacgcgtcgtcgtcggaggagtacttcgccgacttcgcggcggcgatggtcaagatgggccgcaccgacgtgctcaccggcgatctcggggcggtcaggccgacgtgtgacagcctcgtcgactagtttattcggcgtcccgccacatttgtgatctgtagaattttatatggttttctctgtaacatatatgtaatttcgatttagattagggaaaggttgagacttgagagaagttgcagtttctacgcttttgaggagactgattggaacagcgtatgaatctagagttaaacacttgtcagttgtcaaactactacaaactaatgaatctgtacagatgggcttgatgacg

SEQ ID NO: 25992 - DNA, 1369 bp, Oryza sativa
  Clone ID: PAT_MRT4530_30824C.1
cctgccagcaacaagcattctcttctagccttagcctagctagctagctttgttgtctagctctgatcgaggttggtggtgatcatggcgtcgtcgagggtgatcctagcgctgctgctcgcggcggcggcggtgatggcgtcgtcggcgcagctggacgagaagttctacagcaattcgtgccccagcgtggaggccgtcgtccggaaggagatggtgcgcgcgctcggcgccgcgcccagcctcgccggcccgctcctcaggatgcacttccacgactgcttcgtcaggggttgcgacggctcggtgctgctcgactcggccgggaacagcacggcggagaaggaccgcgacgccgaaccagacgctgcgcgggttcggcttcgtcgagagggtgaaggccgccgttggagaaggcatgcccgggcaccgtctcctgcgccgacgtgctcgcgctcatggccagggacgccgggtggctgagcaagggcccgttctgggcggtgcctctcggccgccgcgacggcagggtgtccatcgccaacgagaccgaccagctgccgcctcccaccgccaacttcaccgagctcacccagatgttcgccgccaagaacctcgacctcaaggacctcgtcgtcctctccgctgggcacacgatcgggacgtcgcactgcttctccttcactgacaggctgtacaacttcaccggcctggacaacgcccacgacatcgacccgacgctggagctgcagtacatggcgaggctgaggagcaagtgcacgagcctccaagacaacacgacgctggtggagatggacccggggagcttcaagacgttcgacctggggtacttcaagaacgtggccaagcggcgggggctcttccactccgacggcgagctgctcaccaacggcttcacccgcgcctacgtgcagcgccacgccggcggcggctacaaggacgagttcttcgccgacttcgccgcctccatggtcaagatgggcggcgtcgaagtgctcaccggcagccagggcgagatcaggaagaagtgcaacgtggttaactaatcatctctcttaattatcgtcatatatcatcagctgctcgccgagactgtgattatggatttcagcttttgattccggccgtgaccatcttataattaatttccatgtagatcattatcgtaagatttacctgtcccttctttttttttcttgatttcaatcacttcattaattaattgttttgtttatatagcgagccatgcatgtatgtaacaaagttttctccaagtacgtgctcatcatgatcatatgaataaacttcattttttttcaaaaaaaaaaaaaaaaaaaaaaacccaaaa

SEQ ID NO: 25993 - DNA, 3219 bp, Oryza sativa
  Clone ID: PAT_MRT4530_30825C.1
atggcggcgatgctggacgccttcgcgtcgagcctcgcacgcattctggcggagacggcgaaggaggaggtcgaggcgctgctgggcgtgcccggcgagatctccaggctcgaggcgacgctcggcgacctgcgcgccgtcctctccgacgcggagagggcgcgcgaccgcgacgcggccgtggaccggtgggtgcgggagctcagggacgccatgtacgacgccgacgacatcctcgacgagtgccaggccgccgcggggggcgaggccgcgacgcccgttgccatggcgggctgctgctgctgcttccgcggcgtccgcgtccctgccctctcctgcttccgcgaccccgtccgggcacgcgagatcgggaagagggtcagggcgctcaaccggaggctggacggcatcgagaggaggagctcccgcttcggcttcgtctcccagactaggatcatctcctcgtctccctccccttgctgctctcggcgcgcagattcaggcgacggccgccgcaccgcgctgggcctcatccgatccgacgtcgtcggggagaagatcgcggaagacacgaggatgctcgccgacatccttgtcagtaagacgacggacctggacgacgccggcggcggctgcaatctcatccccaccattgccgtcaccggcgccggcggcataggcaagaccaccctcgccaggatggtcttcggcgacgccacggtccaagagagcttcgacgccaggatctggctgttcgtcggccgggacgccgacgaggtcacgatgctgcgcagcgccatcgcccatgccgccggggcggccagctgcgagggcctcgccgtcgccggggacaaggacctgctggagcgcgccctgcagcgcgcggtgacgcacaggaaggtcctgctggtgatggatgacgtgtggagcgacgcggcgtggaacgagctgctcagggtcccgcttagccatggcgccccggggagccggatcctggtgaccacgagaaacgatggcgttgctcacaggatgaaggtgaggtacctccaccgtgttgacaagctgcggcgacaggatgcttggtccttgctcaagaagcagatagttttgaacaagagtgatgaagctgaattggatgagttggaggatattgggatgcaaattgtggacaggtgtgatggtttaccgctcgcgattaagatgattgggggcctcttacttagtaagagcagaacaagaggtgcctggatggaggtttctagacattctgcatggtgtaaacatgaagtgaatgatgaaattaacaaagtggtctgcttgagctatggagagttgccttctcatttgaagcaatgctttgtgtactgctcacttttcccacgaggtgaggtgatcgaatcaagaaccattgtccgaatgtggatcgctgaagggttcgtgcaagatagcacgggttcaggattgccagaggctgtagcagctcagtactacaaagagttagtcttaaggaaccttttggacccaagtgatgggtactatgatcaactaggatgcaccatgcatgatgttgtccggtcttttgcccaacatgtagcgaaggacgagggattgtccattaacgagatgcagaaacagaccataggtgatgcacttggtactctgaagtttcgtcggctctgtatttcaaacaagcaagtcgagtgggatgctttacagaggcaagtatcactaaggacgttgatactattcaggagcatcgttactaagcacaagaatttcttgaataatctttcttgccttcgggtgctacatcttgaggatgcaaatctgatagtactaccagactccatctgtcaccttaagcatttgagatacctaggtctcaaaggcacatacatatctgcactccctaacctcatagggaatttgaggtttctacagcacattgatctctgtggttgcataaatgtgtctgaacttcctgaaagcattgttcgactgcggaagctaagatcactggacatcagacacacaatggtatcttcagttcctaggggtttcggaaagctagaaaatttggttgagatgttggggttcccaaccgatttggatgacagtacacatgattggtgtagcttggaagagctaggatctttgccaaatctcagtgcactacatttggaggttctggaaaaggcaacacttggccaaatggcagcaagatcaaagctcagcagcaagcagaatctcacacaactggagctgagatgcactagcaggatcagcgcaaacggcaccgtgcaaggtggtatcagcgaggaggattgcgagagaatcgagaacgtttttgagcatctccgccctccaccttcaattgaccgtcttacgattgcaggttactttggacatcggctaccgcagtggatggccacggcgaccgcctttcggagcttgaggcggctggtgctagaagactacgcgtgctgcgaccggctgcccggtggcttgggccaactcccttaccttgactacctctggattgagcatgcaccatccattgagcatgtcagtcatgatttcatcctccctccggtaggcattgctgtcgatggcaacgcaccatcgacgacgacaacaacaactaagactgaaggtgcaggcattgcgtttcccaagctgaagcggctgggtttccaggggatgttgagatgggcatcgtgggactgggacgagcatgtccaagcaatgcctgctctggagtcgctcacagtggagaacagcaaactgaatcgtctccctccggggcttgtgtaccacaccagagcactgaaagctttggtgctgacgaacgccgtgagccttgaatccgtagagaacttgcattcgctggttgaactttacctggctgacaacccaaagctagagatggttgtaaactgctcgagcttgacgaagattgagatcctcagatgcccagagctgaaggcgtttgacaggttgcctgcagtccggagcatcgtttgggaggacttggatgctgacacgctcccggggtacttacaggaggcaaaggatgccagctctgaagagtggaggagcgtccggcatgtgcaacaattgaaggttttcgggttcaaaccacagagcgaaacgtctgaatgttacttcctttataccaaagagccatatcacgtcgaaacaaacatctccaaagcctga

SEQ ID NO: 25994 - DNA, 628 bp, Oryza sativa
  Clone ID: PAT_MRT4530_30826C.1
cacagagcaaggggccgtggtacgacgtggagaccgggaggagggacggcgacgtgagcgtggccgagtacgccgagaacgacctggcgccgccggactccaacatcgtcgacgtcaagaccttcttcagcgtcaagtctctcaacgccaaggacatcgccgtgctcttcggtacgtatactaccacgccgtctccttttccccttttgcttctcgcgttggacgacggcgacagcttatcagaaagccgggagtggccattggccgccgccggcggcggcggcggcgtcgtgcaggatgccacagcatcgggacgtcgcactgcggggcgttccagaagcggctgtacaacttcaccggaaggatggaccaggacccgtcgctggacgccggctacgcggcgaagctcaagaagctctgcccgccggggcacggccacgaccacgaccacgacggccatggcggcgccggcggcgcggccaaggtgcccatggaccccggcagcggcttcacattcgacctgagctactaccggcacgtgctcgccacgggcggcctgttccagtcggacggcagcctccgcgacgaccccgtcacgaggggctacgtcgagaagctcgccaacgcg

SEQ ID NO: 25995 - DNA, 396 bp, Oryza sativa
  Clone ID: PAT_MRT4530_30827C.1
atgaaacacggcagtccgtactacgactcacttaaggccttgactagagggtcgatcgcggaccgctggcggcacggcgcagggacgcgcggctagggcgggttacaacaacggcggacggccctggcagcacaggtttctgctgggtgtcagcggggggaggcaggtccagcgttacaggtgtgtgctggcccagcactccggtagccatgggcgcgatgggacgggtggtgggcaggccttgctttagtgcctcctcgtacgagggaggctcatctatttgcgaattcgtggatccagatatcctgcagagaagcttggcgccagccggcttcaattgcacgggccccactagtgagtcgtattacgtagcttggcgtatgcctgtagtcgagt

SEQ ID NO: 25996 - DNA, 442 bp, Oryza sativa
  Clone ID: PAT_MRT4530_30828C.1
tttgggtgagaataacaaaggggaggaaacagatagtaatacaacattctttttcaagacaaatgacaaatacatctagcagaagttcaggctttggagatgtttgtttcgacgtgatatggctctttggtataaaggaagtaacattcagacgtttcgctctgtggtttgaacccgaaaaccttcaattgttgcacatgccggacgctcctccactcttcagagctggcatcctgcaaggatatcaggttgagcaagctcaagttgcagtttatgtgtaacctctttacctttgcctcctgtaagtaccccgggagcgtgtcagcatccaagtcctcccaaacgatgctccggactgcaggcaacctgtcaaacgccttcagctctgggcatctgaggatctcaatcttcgtcaagctcgagcagtttacaaccatctcta

SEQ ID NO: 25997 - DNA, 249 bp, Oryza sativa
  Clone ID: PAT_MRT4530_30829C.1
atgcatcagaaagaggatgtggatgctcaccaggatcccctcccctgctctgctcgccggatggagatcggcgcccctctcctgctcagccgcgactcgtcttggcgcaaggaagcgggggagacgactgagagatgggagatttctcgttctcttacgccaagggaaggaacggggaagatactcgagtactccaccagacaccaggactcgggaaagcaggagccgacccctccttgctggatctag

SEQ ID NO: 25998 - DNA, 432 bp, Oryza sativa
  Clone ID: PAT_MRT4530_30830C.1
atggcggtagtggtaggggtaagggatgctccggtggcgtggctttgcgggatctggcagaaggcggcaatggtcgcactgcagggcaacaaatcttggtttggtttggccggtggtggggcaacagtacggctaagatgcgtgctagcggagtttgttagggtgatggaacctaggggtggcagtggcagcaagaagataagaaaaaaaattacagatcaagcatgggaatttggaaagccaagccagaagaggagatttggctcacaggggaacgaagagaagtatactcgtgcttccacggagccaccggcggttgcagcggcagcggcgaaggcggcggcggcagcggccaaacggcctccgcctagcgttggcgcgggcaatcttccgctgcacctagctgcgatgctgttccgcgtgtggcgatga

SEQ ID NO: 25999 - DNA, 5523 bp, Oryza sativa
  Clone ID: PAT_MRT4530_30831C.1
atgacgaagccgccatccaagacggaggtggaaccagccaatgtgataccggtcacattggaggatttcgaaggagaggaccgcaaagctatggatgagtacatcaacgaactcacacgggaggcgttgatgagggcaagcactaggactcgtcaaggcgtgatcatcaagcccgggccacgtcctaagctcgcccctgatttggtaagtaatgatgaggtaacacaatctatccaacaacaagtagcatctacaatagattcatctatgattgctttcaaagataagttagatgcaacttttgagggtaaatttgatgagtttttaagggttaaattcggccctcttatggccgattacatgtcaaaggataaagcctctaccactgctaaccagcctcctatagatcaaacgggtataagaaccgatggagcgggccaaacggccggtcagaccgggtattaccccggcggtcagaccggtactcaggccggtcccaccgtgcctctggatgccggtcagaccgggccctgggctggtcagaccggcgcgattataccgatacagggaattgatccgatgactaatgctagttatttgtatcatcttagaacatttgatcctcctgtatctactgctgcaaataatccctaagttcccccacatgttcctaatgcttataatgatgttgctagggggtatcctcccgatactagacaaggctaatataatcacattgcgccacaaacacaacctattaggccaccaaatccaccgccaaatcaacatgggcctaataatatggaggatataattagtgagattattaggaatagattcgggattgaaactacgaatcgtgctagggtttacaaaaagccgtatcctgattattatgataatgtgtcgtttccccgtaattatagagttcccgaatttaccaagtttagtggtgaggatggtaagaccacatgggagcatgtaggtcaatttttggtgcaatgtggtgaggctaatagtgatacttttaaattgcgcttgttttctttatctttgtccggtaatgctttacatggtttacttctttaccggcaaattctattcatacttgggctcaattagaagaaaaatttcatgattatttctatactagagaaactgagcttaggttatgtgatttaacatcggttaagcaaaagtataatgagcctgtcattgattatattaagagatttagggatgttagaaaccgatgttatagcttgaatataactgatacagatttggttggtcttgcttttaatggtttaattgctcctcttagagaaagactagatggccaacaattttttgatgttagtcaacttatgcaaagggctctggctcaagaaagtcgggttaaggataataaaaaacttgttagatcatatgacaaaaagcctaatgttaatgtgattgattaccctgaggctagtgatagtgaggaggagggtgatcatgatatatatgttgctgaatagtcatggactaacaaaaacaagccttttgtttgctccaacctaatgccgactcctcgcaaagatcggcaaagtgaggttaaatatagttttgatgtggccaagtgtgataagatttttgattatattttacaagaaaaacaaattatattacctaaaggccatgtcataccatctcaagaagagttgaaacgtcgagcatattgtaaatggcatgattctcattctcattctactaatgattgcaatgtgtttcgacgacaggttcaatcggccatagatgaaggacgattgaagtttaccgatggctccaagatgaagcttgatcatgatccttttctagtgaatacaattactttcaatactaaacaggtgttgattcggccggagccagccgaatctactaaaggaacaggagtaatcattggtgaaccaagaccaaagatgatagtgccaaagaagccggagaactatgagaagcaaggtggtgagaaaattcggaagaaagattaaagaccaagatcagctcctagggagcgatttggtcattcaccaagatggtcgcattcactttcatatcatcatccacaagacatgtcatggggttcttatccaatgccgccgccgggttatccttatccttacttcatgccatggggggcgacgccgccaatgttcaatcatatgcctccaatgcaattcaaccaagggtggggaggaccgaggaggccaattcatgagcatttgtcttcaccaaacaatagccggttttatggtaagaatcaggctaatgaagaaaaaagggaaggaaagcgcgtcaaggtggaggcgaggacttcggaggtgattactatcaaagtagggtctcatgatgtacaaataccttctggagatggagttggagtgtccccaaacaaaaaatccgaagccgatactagctcacgccgacccgacagcggtccgaccgacgcttcaggccggtctgaccgcgcaccaaatgtcagtctgaccagcgcatctagccagtctgaccggtggtctacgtccggtctgaccgggctccagcgccggtttgataggaggattgcaaagggcgatgtgagggcttcatcgtctccaagcaaaatcaatagaggacattatttacctcctggaatagagccgaatcctaggtggatgcctatggatttgacgactactcaaaagagaaggttgcaacgttttcgggctcaagagataagagagaaaaaagccgaagaacaaagagataaaaggtttaatgagttgcgaccaccaccggagaaggaggaacaatcggttgataaaggtgaatcgtctccaaaagaagacatggatatcaacatggtatgtatgttgcctatggagttttgtgctatggatgaagccgaggttgctcaattctcattaggtcctaaagatgtggtttttgagaagcccgatgagtcaaaccgtcacatgaagcctctctatctcaaaggccatgttgatgggaagccggtctctaggatgctagtggatggaggtgccgccgtgaacttgatgtcgtactcattattcaagaagttggggcgtgaggatgatgagttgaagaagaccaacatgattctcaatggcttcaatggtgaaccaacggaggcgaagggtattttttcggcggagctcaccgtgggaaacaggacgctaccaaccgctttttcatcgtcgatgtgcaaggtaactacaatgttattttgggtcgttgttggattcatgccaattgttgtatgccttctaccttgcatcaatgtttaattcaatgggacggcgatgatgttgaaattgttcaagcggatacatcggccgaggttgcaatggccgatgctacttttgagtgcgtcatgggaatatgcaatgcttatcggggagggatctttctgaggctaatttagagtggttacaaaagagggtgcaagaatatcggtttacaaagaacgatattggtgaaaccgttgaagattttgatgaagtagagaagcttggaaaagggtttacatcggccgatcctttggaagaagtagatatatgtgatggaactaaaccaaggccgacttttgtaaacaaaaacatgagagccgattataaggttaagataatcgagctacttaaagaatatgttgattgctttgcatgggagtaccatgagatgccgggtcttagccgtgagctcgttgagcatcggcttacaattaaaccgggttttaggcctgcagaaggggctccgcgctcaggggggcagggaataatggcgagaggaaggaaacgaatctcttcctcggcgtctttatacccttgccaaacgctatgcccggctcctcgcttcccgcgcccactatctcgccccctcgtttctcgcgcccactcctccattaatcccgctcgcccgtttgcggcgcacgagcaaataatcaagccgaatacaatgctttattattcagcttataagttatggagatggttggagctaaatacgtggaggcttttggtgattcggaattggtggtgcaacaagttgccggagtctacaaatgcttggacggatcactaaataggtacatcgattcatgtttagatattattaccaattttgatgattttgctattagacatattgctaggcatgataattctagagcaaatgacttggcacaacaagcatctggctataattttgtgcgaaattggcaaaactggagaccaggggcggtctgaccggccgcatgctgccggtctgaccagcgaccccgagcggtctgactggccctggccggtcagaccgattctgggcagagcgctagggggcacgtttcaatcaatttagaggccgaattaatcctacacttaaggttgatcggaaaattcggcggcaagcattcaaatatacattgcttgatggagatttgtatcgccgaaatatagatggtgtcttgttgaagtgcttagatgaagatcaatctaaagtggctatgggagaggtacatgaaggaatttgtggaactcatcaatcggcccacaagatgaattggttgcttaggagagcggggttctattggccgaagatgattgatgattgcttcaaatattatagaggatgcgaggcttgtcaacggttcggcaatgggcataggttcatgctagttgctacggattacttcaccaagtgggctgaagccgtgcctttgaataatatgactcatacagaggtaattgactttattttgaagcatataatccataaattcggtattccacaaatattaactacggatcaaagtgcttcttttatgtctaaggaagtgaaaagttttaccgaatcttatggtattaaattgttgagttcttctccttactacgctcaggctaatggacaagccgagtcgagtaataagacattgttgaagttagtgaagaagaagattgaggaacacccaaagaggtggtatgaggtgctttccgaagcattgtgggcgcataggatttctaaacatggtgccactaaagtcactccttttgagttggtttatggtcaagaagcccttttaccggtggaggtaaatcttggttctcttcgttatatcaagtaagatgatttgtcaagtgaagattacaaacgttgatgggagacaatcttgatgaagtcatcgacaagcgcttgaaggcattggaagaaatagagaaagagaagaagagggtggccaaggcgtacaacaaaagggtgaaagcaaagttgtttcaagttggagacttggtttggaagacaattttgcctttgggtacacgatccaaggagttaggtaagtggtctcctagttgggagggtccttatcgagtatgcggcattgtttgagggaacgcacattttttggaaacacttcaaggggagcgttttcagcgagcaatcaacgggaaatacttgaagaaatacttcccgagcgtttggcaagacgct

SEQ ID NO: 26000 - DNA, 6108 bp, Oryza sativa
  Clone ID: PAT_MRT4530_30832C.1
atgacgaagccatcatccaagacggaggtggagccatctcatatgataccggtcacattagatgactttgaaggtgaggatcgcaaagccatggaggagtacatcaacgagctcacacgggaggcgttgatgagagcaactactaggactcgtcaaggcgtgatcatcaagcccgggccacgtcccaagctcgctcccgacgtggtaagtaatgacgaggtatcgcaatctatcaaccaacaaattgcatctacaatagattcatctatgcctaattttaaagatagattagatgtaatgtttaaggaaagggttgatgggtttttaaggaataggctaggttctcttatggatgattacatattaaaggataaagcctataccactgctaatcaacatcctatagatctaatagggtctaaaaccgacggagcggcgttcatggccggtccgaccgggcctgacggccggtcagaccgcgacacagctgtcggtccgaccggccagatggccggtcagaccgggtgttatcccaccggtcagaccggctttcaggccggtccgaccgcgcaacctgacgccggtcagaccgggccctgggccggtcagactggcgcaattgtcccgatacagggaattgatccaacgaccaatgctagttatttgtatcactttagaacatttgatcctcctgtatctactgttaccactaatcctcaaattcccccacatattcctaacgtttataatgatgtttctaggggatatcctcccaatactaggcaaggccaatataatcatattgcgccacaaactcaacctattaggccaccaaacccaccaccaaatccacaagggcctaataacatggaggatgtgattagtgatattatgaggaatagattcaggattgaaactaggaatcgtgctagagcttacaaaaagctatatcccgattattataataatgtgccgtttcctagaaattatagagttcccgaatttgccaagtttagtggtgaggatgttgctcctcttagagagaaactagatggccaacaatttcttgatgttagtcaacttatgcaaagggctctggttcaagaaagctgggttaaagataaaaaatttgctagaccattcgacaaaaagcctaatgttaatgtagttgattactctgatgctagtgatagtgaggaagagggtgatcatgatatttatgttgccgaatggtcatggactaacaaaaataaaccttttgtttgttctaacttaatgccgactcctcgtaaagatcggcaaagtgaggttaagtatagttttgatgtagccaagtgtgataagatttttgattatcttttgcaagaaaagcaaattagatttcttaaaggccatgtcataccatcacaagaagagttgaaacgtcgagcatattgtaaatggcatgattctcattctcactctactaatgattgcaatgtgtttcgacgaaaggttcaatcggccatagatgagggacgattgaaattcaccgatggctctaagatgaagcttgaccatgatccttttccggtgaatacaattaatttcaataataagaaggtgttgattcggtcggagcaatccgaatctactaaaggaaaggaagtggtcattggtgagccaagacctaagatgatggtgccaaagaagccggaagttggtgtttggaaggaaaataagggtgaagcttcaacttctaaggcccctaggaagaccaaggtgacttttgatatgcttttggaaaagtatgagaagcaaggtggtgagaagattcgcaacaaagggaaaagaccaagatcaccccctagggagcgatttggtcattcaccaagacgatcgcattcaccttcatatcatcatccacaagacatgtcatggggtccatatccaatggcgccgccgggttatccttatccttacttcatgccatgggggcaacgccgccaatggtggggaggaccacggaggccaattcatgagcgtttgtcttcatcaaacaaaagtcgattttatggtaaaaatcgggttaatgaagagaagagggaaggaaagcgcgtcaagatagaagagaggacttcagaggtgattactatcaaaatagggtcccatgatgtgcctgtaccttctggagatggagttggaaagtccccaagcaaaaaatccgaagccggtaccagctcttcgcagtcggccggtctgaccaggcctccaggctggtctgaccgcagccatgcggtcggtctgaccgggccatcaggccggtctgaccgccaaccagacagcggtccgaccgaggcttcaggccggtctgaccgtgtacccgctgtcggtctgaccggcgcgtctggccggtctgaccggtggtctgcgaccggtctgaccgggctccagcgccagtttgataagagggctgcaaagggtgatgtgggggctccatcgtcttcaaataaggttaatagaggacattatttacctcctggaacagagccgaatcctaggtggatgcctaaggatttgacggctactcaaaagaaaaggttgcaacgtcttcgggcccaagaactaagggagaaaagggccgaagaacaaagagataaaatgttcaatgagttgcgaccaccaccagtatggaggcctaaatccatagagaaggcaaaaccgattgatgtagaggagaaggaagaacaatcggttgacaaagataaatcgtctccaaaggaagacatagatatcaacatggtgtgtatgttgcctatggagttttgtgctatggatgaagccgaagttgcccaattctcattaggtcctaaagacgcggtttttgagaagcccgatgagtcaaaccgtcacatgaagcctctttatctcaaaggccatgttgatgggaaaccggtctctaggatgctagtggatggaggtgccgccgtgaacttgatgccgtattcgctattcaagaagttggggcgtaaggatgatgagttgaagaagaccaacatgatcctcaatggcttcaatggtgaaccaacggaggcgaggggtatcttttcggcggagctcaccgtgggaaacaagacgctaccaaccgctttcttcatcgtcgatgtgcaagagtggttacaaaagagggtgcaagaatatcggtctacaaagaacgatattggagaaaccgttgaagattttgatgaagttgagaagcttggacaagggtttacatcggccgatccattagaggaagtagacataggtgatggaactaaaccaaggccgacttttgtaaacaaaaacattaaagccgattataaggttaaggtaatcgagctacttaaagagtatgttgattgctttgcatgggaataccatgagatgccgggtctcagccgtgagcttgttgagcatcggcttccaattaaaccgggttttaggccttataaacaaccacctcatcgttttaatcctttattatatgaccgagtcaaagaggagattgatcggttgttgaaggcggggtttattaggctatgtcgttatgcggagtgggtttctagcatagttccggtggaaaagaaggggagtggtaagattagagtttgcatagattttagagatttaaataaagctactcgtaaagatgagtatcctatgtctatagccgacatgatgattaatgatgcctcgggtcataaggtgattagttttttagatggtaatgccggctacaatcaaatctttatggcggaagaggatatgtacaagacggcttttaggtgcccggggtttgttggtttgtttgagtgggttgtcatgacttttgggttgaagaatgccggtgcaacatatcaaagggcagtgaatttgatctttcatgatttgctaggtattatcttaaaaatttatattgatgatattgttgtcaaatcggatggtatggaaggccatatagccgatttgagattagcttttgagaggatgcgccggtatggtttgaagatgaacccacttaaatgtgcttttggtgtgtcggcggggaagttcttaggatttatggtgcatgagagaggagttgagattgatcctaagaagatagaaaaaattcgtgatttcaaagcgccgacatgcaagaaagaagtccaaaagttgctaggtaaggtgaattttttgaggaggtttattactaacctagcgggtaaaatcgatgcttttgttcctatacttcgcttgaaaaaagaagccgattttacttggggggcaaaacaacaagaggcgtttgaagagttgaaaagatacttgtctactccacccgttgttacatacatagttacttgtcaagccgatgttattaaacacatgttgcaaaggccaattctaagtgggagaattggcaagtgggcatatgctttgatagaatatgatttggcttatgaaccattgaaaactataaaaggccaaattgtatgtgattttatagtggaccatcatatagatgttgcttatgagggagaggtttgcttagttgaagttataccttggaagatttattttgatggttcttcttgcaaagaaggtcaaggcataggggtagttttgatttcacctaatggcatgtgttatgaggcatcggttcgtttggaatattattgcacaaataatcaagccgaatacaatgctttattgttcggcttacaagtaatggagatgattggagctaaatatgtggaggcctttggtgattcggaattggtggtgcaacaagtcgccgggatctacaagtgcttggatggatcactaaataggtatctcgattcatgtttagatattattgccaattttgataattttgctattagacatattgctaggtgtgataattctagagcaaatgacttggcacaacaagcatctggttataatgtaaagagggggttatttctgatattagaagagccggtgcttgattttaaatttttgtgcgaaattggcaaagttggggaccagaggcggtctggccggcgttgcacggccggtctgaccggtgaccaggggcggtctgaccggctgcatgccgccggtctgaccggcgtccccgagcagtctgaccggccctgtgtggccggtctgaccggttctaggcaggatgctggggacacgtttcaagatacagaagaggattggagaattcctttgattcaatatttgaaagatcccacacttaaggttgatcgaaagattcggcgacaagcattcaaatatacattgcttgatggagatttgtatcgccgaaacatagatggtgtcttgttgaagtgcttagatgaagatcaatctaaagtggctatgggagaaggatgggctttggatttcattggtcaaatttatccttcgtcatcaaaagggcataggttcgtgctagtcgctacggattacttcaccaagtgggccgaagccgtgcctttgaagaatatgactcataaggaggctaatggacaagccgagtcgagtaataagacattgttaaagctagtaaaaaagaagattgaggaacacccgaagaggtggcatgaggtgctttccgaagcattgtgggcgcataggatatctaaacatggtgcccctaaagtcactccttttgagttggtttatggtcaagaagccgttttaccggtagaggtaaatcttggttctcttcgttatatcaagcaagatgatttgtcaagtgaagattacaagacgttgatgggaggcaaccttgatgaagtcatcgacaaacgcttcaaggcattaaaagagatagagaaagagaagaagagggtggccaaggcgtacaacaagagggtgaaggcaaaattgtttccagttggagacttggtttggaagacaattttgcctttgggtactcgatccaaggagttcggtaagtggtctcctagttgggaaggtccttatcgagtttgcggcattgttcgagggaacgtatactttttggagacactacaaggggagcgttttcagcgagcaatcaatgggaaatacttgaagaaatactttccgagtgtttggcaagacgcttag

SEQ ID NO: 26001 - DNA, 541 bp, Oryza sativa
  Clone ID: PAT_MRT4530_30833C.1
acagttggggtcatcagcccttgtaaagcgctggaataacggtcgggaaaaggcaagagcggatcctctctcggaatcgacatatggcaaatccgaaacattaccaaatattccggacttgggggtcatgtgttaatgatcaaatttggtaattcaaagtatcggagattaagataaaatcgaagcggaatccaagagatagatcgttccggaaatagagcaagaatcggctgaagtccgaatcggctgcgaccaggtcagtagagtttgagtcggacaaggtagccgattgagccgatttcgacaatgtgactcgtttgggcaaaagtctgccgtaaagacttatggtatcttagagtttattagagataagagtcatgtccgacaaggacatatcttgatcaaatcaactggcacgctcacgaacctaaaggaaagatttttggacctgcactaaagttaagcagatcttccaggccactgtgtgtttttcgcatcaacaagtacaagaattcaatgttcacctacagagattattgca

SEQ ID NO: 26002 - DNA, 4722 bp, Oryza sativa
  Clone ID: PAT_MRT4530_30834C.1
atgacgaagccgccatccaagacggaggtggagccatctaatgtgatgccggtcacatcggatgacttcgaaggagaagatcgtaaagctatggaggagtacatcaacgagctcacacgggaggcgttgatgagagcaactactaggactcgtcaaggcgtgatcatcaagcccgggccacgtcccaagctcgctcccgacgtggtaagtaatgacgaggtatcacaatctatccaacaacaaattgcatctacaatagattcatctatggctaattttaaagatcgattagatgtaatgtttaaggataaagttgatgggtttttaaggagtaggcttggttcttttatggatgattacacattaaagcataaagcctataccactgctaatcaacctcctatagatcaaacgggtagtaaaaccgacagaacggcgttcacggccggtccgaccgggcctggtggctggggatatcctcccgatactagacaaggccaatataatcatattgcgccacaaacacaacctattaggccaccaaacccaccgccaaatcaacaagggcctaataacatggaggatatgattagtgatattatgaggaatagattctggattgaaactaggaatcgtgctagaacttacaaaaagccatatcctgattattatgataatgtgtcgtttcctcgaaattatagagttcccgaatttgccaagtttagtggtgaggatggtaagaccacatgggagcatgtaggtcaatttatggcgcaatgtggtgaggctaatagtgatacttttaaattgcgtttgttttctctatctttatccggtaatgctttcacatggtttacttctttactggcaaattctattcatacttgggctcaattagaagaacaatttcatgattatttctatactggagaaactgagcttaggttatgtgatttaacatcggttaagcaaaagtataatgaatctgtcattgattatattaagagatttagagatgttagaaaccaatgttatactttgaatataactgatagatatttggccggtcttgcttttaatggtttagttgttcctcttagagagagactagaaggccaacaatttattgatgttagtcaactcatgcaaagggctctggctcaagaaagccgggttaaggataataaaaaattagctagaccatttgacaaaaagcctaatgttaatgtagttgattaccctgaggctagtgatagtgaggaggagggtgatcatgatatttatgttgccgaatggtcatggactaataaaaataagccttttgtttgttctaacttaatgccgactcctcgcaaagatcgccaaagtgaggttaaatatagttttgatgtggccaagtgtgataagatttttgattatcttttgcaagagaaacaaattagattacctaaaggccatgtcataccatctcaagaagagttgaaacgtcgagcatattgtaaatggcatgattctcattctcattctactaatgattgcaatgtgtttcgacgacaggttcaatcggccatagatgaaggacgattgaagttcaccaatggctccaagatgaagcttgatgatgatccttttccggtgaatacaattagtttcaatgataaaaaggtgttgattcggccgaagcaagtcgaatctactaaggaaaaggaagtggtcattggtgagccgaggcctaagatgatagtgccaaagaagccggaggttggcgtttggaaggagaacaaaagtggagcttcaacttctaaggcccctaggaagaccaaggtgacttttgatatgctcttggagaaatataagaggcaaggtggtgagaaaattcacaacaaagggaaaagaccaagatcacctcctagggagagatttggtcattcaccaagacggtcacattcaccttcatatcatcatccacaaaacatgtcatggggtccctatccaataccgccgccgggctacccttatccttacttcatgccatggggggcaacaccgccaatgttcaactatatgcctccaatgcaattcaatcaagggtggggaggaccgaggaggccaattcatgagcgtttgtcttcatccaacaatagccggttttatggtaagaatcgggctaatgaagaaaagagcgaaggaaagcgcgtcaaggtggaggaaagggcttcggaagtaattactatcaaagtggggttccatgatgtgcctataccttctggagatggagttggaaagtccccaagcaaaaaatccgaagccggtaccagctcttcgcagtcggccggtctgaccaggccctctagccggtctgaccgcggccatgttgccggtatgaccgggccattaggccggtctgaccgtcgacccgacagtgatccgaccgacgcctcaggccggtctaaccgcgtgccacacgtcggtctgaccggcgcgtctggccggtctgaccggtggtctatggccagtctgactgggctccagcgccggtttgatgagaggattgcaaagggcaatagaaggttgcaacgtcttcgggcccaagagctaagggagaaaaaggccgaagaacatagggataaaaggttcaatgagttgcgaccaccaccggtatggaggcctaaatccatagagaaggcaaaaccgattgatgtagaggagaaggaagaacaatcagttgataaaagtgaattatctccaaaagaagacatggatatcaacatgatgggaagccggaacttgatgccgtattcgttattcaagaagttggggcgtgaggatgatgagttaaaaaagaccaacatgattctcaatggcttcaatggtgaaccaacggaggcgaggggtatcttttcggcggagctcaccgtgggaaacaagacgctaccaactgctttcttcatcgtcgatgtgcaagaggctaatttagagtggttacaaaagagggtgcaagaatatcggtctacaaagaacgatattggtgaaaccgttgaggattttgaagaagtagagaagcttggaaaagggtttacatcggccgatcctttggaagaagtagacataggtgatggaactaaaccgaggccgacttttgtaaacaaaaatatgagagccgattacaaggttaaagtaatcgagctacttaaagaatatgttgattactttgcatgggagtaccatgagatgccaggtcttagccgtgagcttgttgagcatcggcttccaattaaaccgggttttaggccttataagcaaccacctcgtcgttttaatcctttgctatatgaccgagtcaaagaggagattgatcggttattgaaggtagggtttattaggccatgtcgttatgcggagtgtgtatctagcatagtcccggtggagaagaagggaagtggtaagattagagtttgcatagattttagagatttaaataaagccactcccaaagatgaatatcctatgcctatagccgacatgatgattaatgatgcctcgggtcataaggtgattagctttttagatgataatgtcggctacaatcaaatctttatggcggaagaggatatgtacaagacggcttttaggtgcccgggatttgttggtttgtttgagtgggttgtcatgacttttgggttgaagaatgccggtgcaacatatcaaagggcaatgaatttgatctttcatgatttgttaggtattatcctagagatctatattgatgatattgttgtcaaatcggatggtatggaaggacacatagccgatttgaggttagcttttgagaggatgcgctggtatggtttgaagatgaacccacttaaatgtgcttttggtgtgtcggcggggaagttcttaggattcatggtgcatgagagaggagttgagattgatcctaagaagatagagaagattcatgatttcaaagcgccgacatgcaaggaggtccaaaagttgctaggtaaagtgaattatttgagaagatttatttctaacctagcgggtaaaatcgatgcttttgttcatatacttcgtttgaaaaaagaagccgattttacttggggggcaaaacaacaagaggcgtttgaagagttgaagagatatttgtctactccacacgttgtgcgagcgcctaaagccggaaagccttttcggttacatattgcctccgaagacaaagtcattggtgccattttgacacaagaggaagatgacaaggaatatatcattacatatttgagccgccatcttttggataccaaaacgaggccaattctaagtgggagaattggtaagtgggcatatgctttgatagaatatgatttggcttatgaaccattaaaatctatgaaaggccaaattgtatgtgattttatagtagaccatcatatagatattgcttatgagggagagaagaggcacttagtcctcagaccaaaacagaacgacagcagcggaaaaaggcgatccttgcggggcttcagctccactccacaggcaaaactcaactggggtctgagccttggtcctctaactccatcttcagctcagaagcactacacttctgaaaaagggggaataatagcaagactgagtacaaccaccgtactcagcaagccacaccaacgatgcagacgtgcaaggggatacaaggatggcttgtggctatttgcataa

SEQ ID NO: 26003 - DNA, 1146 bp, Oryza sativa
  Clone ID: PAT_MRT4530_30835C.1
atggtgagcggcggaggagtagcggcggagaacggcgagatggtggggaacggggaggggaggaagggtgcgggggcgagcgtgctggtgacggggggagcggggtacatcgggacgcacacggtgctgcggctgctggagaaggggttcgcggtcaccgtcgtcgacaacttccacaactccgtcccggaggcgctcgaccgcgtccgcctcatcgccggcgccgccctctccgcccgcctcgacttcatcgccgtacgtgactcacccaaacagcacgcgtgttcttcgtcttgcacagttgaattgaaccgagccggcgaggttgagattgagattcatgtttgtgttcgttttcagggggatctcaagagcaaggacgacatggagaagatgtactacgagaacaacgtcgccggcaccatgaacctctactccgccatgaccaagtacggctgcaagaagatagtgttctcgtcgtcggcgacggtgtacggccagccggagaagaccccctgcgtcgaggattccaagctgagcgctctcaacccatacggcaccaccaagctcgtcctggagaactacttccggcaggtgcaggccgccgacccggagatgagggtgatcctgctcaggtacttcaaccccatcggcgctcaccggagcggcgacatcggggaggaccccaggggcatccccaacaaccttcttccgtacatccagcaggtcgccgtcggccgccgccccgagctcaacgtctacggcgtcgactacccaaccagggacggcaccgcgatcagggattacatacatgtagtggaccttgccgatggccacattgccgcactggagaagctcttcgctactcctgacattggttgtgtggcttacaatctaggaacagggtgtggaacaacggtgctcgaggtggtgaaggcgttcgaggaggcgtccggaaagaaaattcctatcaagatttgccccagaagacctggagattgcactgaggtttacgcttccactgacaaggccaagaaggagctcggatggagtgctcggtttggaatagaggacatgtgcagggaccagtggaattgggccaagaagaatccgtacggatacagcgccaatgctgagcagaattag

SEQ ID NO: 26004 - DNA, 222 bp, Oryza sativa
  Clone ID: PAT_MRT4530_30836C.1
tcgcagactcgtgtcggacagcatgggccggatactactatggcaggtactggaccatgcggaagctctccatgttctggtgcactgacaccacccatgcgctcaaggatctcgacgaggcctagaatgcgtcccctgatgcatgcgtccgtatattaggtttctacaacgcaaggcaggtgcatgtcatgagcttcatcgcctacaagcccccattctgat

SEQ ID NO: 26005 - DNA, 624 bp, Oryza sativa
  Clone ID: PAT_MRT4530_30837C.1
atggaaaagttgaaagctcgaagaaaaagtttagaactacactcggcccttgccggaaaaaagcggccagcttctgctggcttcctcgtggttgcagcggacggacggagaaatcaccaagaatcagcggcggagcatcccgacgtcgtcgtcgtcccgtcgcccagtgccgacgtcgtcgtcgtcccggcgctgccgccgtcgtcgtcgtcgtcacggcgccgccattgtcgtcctcacaacgccaaggatggccaccttccgctcagtggtcgtggcagccgcggaggcggagtagtcgcggcggcggcggcggtggctgcgggcctgcggcggagctcctgcgacgtggatctcagcagcgacggcctcatctcggcccgcctgctgccccccgaagccgtccaccgccgtcgcctcgtcgagcagatcggggcgaggttcacaaggccgccggcggcctctagatccggcggggagagggagaacggacaccaccgcgccgtgctgcgccgcatcgtgccacgctgtcgccttccgcctccccgcgccacgccgccgcctgccacctgcccgcgccgcgccgccgcctgccgccttccccgcgctgcatcgcctggttga

SEQ ID NO: 26006 - DNA, 4557 bp, Oryza sativa
  Clone ID: PAT_MRT4530_30838C.1
atggaggagtacatcaacgagctcacacgggaggtgttgatgagagcaagcactaggactcatcaaggcgtgaccatcaagcccaggccatgtcccaagctcgctcccgacttggtaagtaatgatgaggtatcacaatctatccaacaacaaattgcatctacaatagattcatctatggttgcttttaaagatcagttagatgcaatttttaagggtaaatttgatgagtttttaaggattaaattcggccctcttatggacgattacacattaaaggataaagcctctaccactgctaaccaacctcctatagatgaaacgggtagtaaaaccgacggaacggcgttcacggccggtccgaccgggcctgacggccggtcagaccgcgacacagccgtcggtccgaccggccagacggccggtcggaccgggtatcaccctggcggtcaaaccgggactcaggccggtccgaccgcacctctggacgccgagttcccgaatttgccaagtttagtggtgaggatggcaaattctattcatacttggactcaattagaagaaaaattccatgattatttctatactggagaaactgagcttaggtcatgtgatttaacatcggttaagcaaaagtataatgaatctgtcattgattatattaagagatttagagatgttagaaaccgatgttatactttgaatataactgatagagatttggctggtcttgcttttaatggtttaattgctcctcttagagaaagactagatggccaacaatttcttgatgttagtcaactcatgcaaagggctctggctcaagaaagccgggttaaggataatagaaaacttgctagaccatttgacaaaaagcctaatgttaatgtggttgattactctgaggctagtgatagtgaggaagagggtgatcatgatatttatattgccgaatggtcatggactaataaaaataagccttttgtttgctctaacctaatgccgactcctcgcaaagatcgacaaagtgaggttcaatcggccatagatgaaggacgattgaagttcaccgatagctccaagataaagcttgatcatgatccttttccgaagtatgagaagcaaggtagtgagagaggtcgcaacaaagggaaaagaccaagatcacctcctagggagcaatttggtcattcatcaagacggtcgtattcaccttcatatcatcatccacaagacatgtcatggggttcttatccaatgccgccgccgggttatccttatccttacttcatgccatggggggcaacgccgccaatgtttaatcatatgcctccaatgcaattcaaccaagggtggggaggaccaaggaggccgattcatgagcgtttgtcttcaccaaacaatagccggttttatggtaagaatcaggctaatgaagaaaagagggaaggaaagcgcgtcaaggtggagacgaggacttcggaggtaattactatcaaagtggggtttcatgatgtgccaatacctactggagatggagttggagtgtccccgaacaaaaaatccgaagccggtaccagctcctcgcagtcagccggtcaatccaggccttctagccggtctgaccgcagtcatgcgaccggtctgaccgagccatcaggccggtctgaccgtgctccggatgtcggtctgaccggcgcgtctggccggtctgaccagtggtctatggctggcctgaccgggctccagcgccggtttgacaggaggattgcaaagggcgatgtggaagcttcatcgtcttcaaacaaagttaatacagggcattatttacctcctggaacagagccgaatcctaggtggatgcctaaggatttgatggcaactcaaaagagaaggttgcaacgtcttcgggcccaagagctaagagagaaaaaggccgaagagcaaagggataaaaggtttaataagttgcgaccaccaccggtatggaggcctaaatccatagagaaggcaaaaccgattgatgtagaggagaaggaagaacaatcggtagataaaggtgaatcatctccaaaagaagacatggatatcaacatggtatgtatgttgcctatggagttttgtgctatggatgaagccgaggttgctcaattctcattaggtcctaaagatgcggtttttgagaagcccaatgaatcaaaccgtcacatgaagcctctctatctcaaaggccatgttgatgggaagccggtctctaggatgctagtggatggaggtgccgctgtgaacttgatgccgtactcattattcaagaaattggggtgtgaggatgatgagttgaagaagaccaacatgattctcaatggcttcaatggtgaaccaacggaggcgaaaggtatctttttggcggagctcaccgtgggaaacaagacgttaccaaccgctttcttcatcgtcgatgtgcaagtggagaagcttggaaaaggatttacatcagctgatccattagaggaagtagacataggtgatggaaccaaaccaaagccgacttttgtaaacaaaaatatgagagccgattataaggttaagataatcgagctacttaaaaaatatgttgattgctttgcatgggaatatcatgagatgtggggtcttagccgtgagcttgttgagcatcggcttccaattaaaccgggttttaggccttataagcaaccacctcgtcgttttaatcctttgctatatgaccgagtcaaagaggagattgatcggttgttgaaggcggggtttattaggccatgtcgttatacagagtgggtttctagcatagtcccggtggagaagaaggggagtggtaagattagagtttgcatagattttagatatttaaataaagccactcccaaagatgagtatcctatgcctatagccgacatgatgattaatgatgcctcgggtcataaggtgattagctttctagatggtaatgccggctacaatcaaatctttatggcggaggaggatatgtacaagacggcttttaggtgcccgggatttgttggtttgtttgagtgggttgtcataacttttgggttgaagaatgccggtgcaacatatcaaagggcaatgaatttaatctttcatgatttggtaggtattatcttagagatctacattgatgatattgttgtcaaatcggatggtatggaaggacacatagccgatttgaggttagcttttgagaggatgcgccggtatggtttgaagatgaactcacttaaatgtgcttttggtgtgtcggcggggaagttcttaggattcatggtgcatgagagaggagttgagattgatcctaagaagatagaaaatattcgtgatttcaaagcgccgacatgcaagaaggaggttcaaaagttgctagttatggagatggttggagctaaatacgtggaggcttttggtgattcggaattggtggtgcaacaagtcgtcggagtctacaaatgcttggacggatcactaaatagacatattactaggcatgataattctagagcaaatgacttggcacaacaagcatctggctataatatgaagaagggattatttctaatattagaagagccggtgcttggttttaaatctttatgtgaaattggcaaaactggagaccaggggcggtctgactggcattgcacggccggtctgaccagtgaccaggggcggtccgaccggccgcatgccgccggtctgaccggcgaccccgagcgaggatgcgaggcttgtcaacggttcggcaatgttcaattggcgcccgccgccgtgttgaaccctataatcaaaccatggccgttccgagggtgggctttagatttcattggtcaaatttatccttcgtcatcaaaggggcataggttcgtgctagttgctacggattacttcaccaagtgggccgaagccgtgccgttgaagaatatgactcatatggaggctaatggacaagccgagtcgagtaataaaacgtttttgaagttagtgaaaaagaagattgaggaatacccaaagaggtggcatgaggtgctttctgaagcattgtgggcgcataggatatctaaacatggtgctactaaagtcactccttttgagttggtttatggtcaagaagtcgttttaccggtggaggtaaatcttggttctcttcgttatatcaagcaagatgatttgtcaagtgaggattacaaggcgttgatgggagacaatcttgatgaagtcatcgacaagcgcttgaaggcattggaagaaatagagaaagagaagaagaaggtggccaaggcgtacaacaaaagggtaaaagcaaagttgtttcaagttggagatttggattggaagacaattttgcctttgggtactcgatccaaggagttcggtaagtggtctcctagttgggagggtccttatcgagtatgcggcattgttcgaggaaacgcatattttttggagactcttcaaggggagtgttttcagcgagcaatcaacgggaaatacttgaagaaataa

SEQ ID NO: 26007 - DNA, 1474 bp, Oryza sativa
  unsure (1)..(1474): unsure at all n locations
  Clone ID: PAT_MRT4530_30839C.1
ggcgcacacacgaagacgaggcggcgatggtgagcggcggaggagtagcggcggagaacggcgagatggtggggaacggggaggggaggaagggtgcgggggcgagcgtgctggtgacggggggagcggggtacatcgggacgcacacggtgctgcggctgctggagaaggggttcgcggtcaccgtcgtcgacaacttccacaactccgtcccggaggcgctcgaccgcgtccgcctcatcgccggcgccgccctctccgcccgcctcgacttcatcgccgtacgtgactcacccaaacagcacgcgtgttcttcgtcttgcacagttgaattgaaccgagccggcgaggttgagattgagattcatgtttgtgttcgttttcagggggatctcaagagcaaggacgacatggagaaggtgttcgccgccaagaggtatgacgccgtgatccacttcgccgggctgaaggcggtgggggagagcgtcgcgcacccgcagatgtactacgagaacaacgtcgccggcaccatgaacctctactccgccatgaccaagtacggctgcaagaagatagtgttctcgtcgtcggcgacggtgtacggccagccggagaagaccccctgcgtcgaggattccaagctgagcgctctcaacccatacggcaccaccaagctcgtcctggagaactacttccggcaggtgcaggccgccgacccggagatgagggtgatcctgctcaggtacttcaaccccatcggcgctcaccggagcggcgacatcggggaggaccccaggggcatccccaacaaccttcttccgtacatccagcaggtcgccgtcggccgccgccccgagctcaacgtctacggcgtcgactacccaaccagggacggcaccgcgatcagggattacatacatgtagtggaccttgccgatggccacattgccgcactggagaagctcttcgctactcctgacattggttgtgtggcttacaatctaggaacagggtgtggaacaacggtgctcgaggtggtgaaggcgttcgaggaggcgtccggaaagaaaattcctatcaagatttgccccagaagacctggagattgcactgaggtttacgcttccactgacaaggccaagaaggagctcggatggagtgctcggtttggaatagaggacatgtgcagggaccagtggaattgggccaagaagaatccgtacggatacagcgccaatgctgagcagaattagggcgatcatattaccacttatatagtactagtatcaaaattgtccatggtcttatgaactgtgtgactagaaaatgttaataagacatgcgtgcctcttaagtggagtataccaattcttatttagtcgaatccgttgtgattttagatactggcaaatgttaatcaggtttatttaaatactatactagtagcaagatcaaaaaaaaaaaaaaatcnccc

SEQ ID NO: 26008 - DNA, 561 bp, Oryza sativa
  Clone ID: PAT_MRT4530_3083C.1
atggcgggcccgtacgccccgcagctgacgcggtggcgcgccgcggtgggcggcgccgtcgtgcgcgacttcgtcgagcacgccgggagcgtgatcgccctgcgccccgaggactactaccaccgcgccgccgccgccaccggagacgatgacgacgacggcgacgacccgcgggagcgcgtgctgctcggagggaggctgtacccggtggcggacgagacgacgacgatccacggcggcgtgggcggcggcgggaggacgacgctgcggtgcgtggagttctgcccggagcccggggtggcgccgctgcggctgacggtgacgacggcggcggcgccggcggaggaggaggagaagcagcggcaggaggtggccgaggtggtgtcgcccgacggcgcggtgcgtgtgctggggcgcggcgaacgcttcggcggcggcggcggcgagaaggggacggtgcagcacgtggtggacgtggagggggagcgggaggtgttcgtgctgctggtgtcggtgcgcccggagctcgcccgcatcgtccgcgtccagaggctcacctga

SEQ ID NO: 26009 - DNA, 4107 bp, Oryza sativa
  Clone ID: PAT_MRT4530_30840C.1
atgggaaggggaaaaaatcttgaaactgttttggaggagcaagaaccggcgtgggcaggagaagtaggagagctgaggcaaactatggctgagttgcaagagaagatcgaggaagagaacaaggccatccatgagcagatccagaaccaagctgtacaagctcagatccatcgcgatgagatgatgcagtcactgaaggctattcaggagatgctgagctcaacagcgagctgttcagggaaggaagccaaggagaagatcgacgctgtgagaacaccggggactgctcaatctgcaacccaaacagcccacaaaattgaagaagaggtgaagaaaggccctaagaagttcaattttcctgagtttaatggagagcaccctgaggcatggatcaggaaggcaaacaagtatttttccttgaccaagactcctgaagaagagaaggtattggtggctgaggtctatatcactggcaaggctgatcagtggatagacagttatgatattcccacggaaactctgacttggcctgaattttgtacaatggtttgtaaaagatttgctgcaaaatctaaagtggagatcactgatacctttagaaacttgaagcaatatagttctgtggagacttacatagacaaatttgaggaaatcatgccccttgtcaagagaaacaacccaaacctcaatgaagagtactttctggactatttcatctcagggctgaaggaacacatcaaaagaccactgaagtcgatggggattcactctctagttcaggcttatgagcatgcaaggaactatgatagtggtcctcaaacaaacaggggtggtagtggcttccacaggaatgagaaaaagaatgattgggctagtaccagtaaaatggaagttaaggggaaggaagagaaaaaagaagatgggggagaagaggaagaagaggagtatgaatcacctgaaggagaggtagagtatactacaccacctgacagcccaaaagggaagaacaaaaataggggggaaccagaaatagcaatgcatgccattagcaatggagagaagggagccacaactctaaccttgaaggtgaggatggggcaggtaacagcttctgctttagtagacagtggtagtactacaaccttcatatcacctgcactagtgagaagagccaaactggagatcaaaaattgtgagtcaatcccagttagggttgcaaatagggaatttctatatactggggcacaatgccatcagcaagtatattcaatccaaggggaacaatttgtgacaactttcagagttttggagatgaagggatatgatattatttttggctgtgactggattcgccagtacagtcctgtttctctcaatttgaaaacaaaagagatgacagtgaacaaagggggaagtgtagtggtgctttcggatgtgacagtgccagcaagaaacttcatgattagtatgcataaaatggagaagtggatcgatcagggaatggccggtgcagtgttatacatgaaatcagtccagaaggagaaggaaggtcatgggactcttgaatcaattgagaaagtattggcaaattttgaggatgtttttgaggagccaaaaatgttgcctcccactagagactgtgatcataccatacccctagttcctggagctaagcctgttaatgtgaggccttaccggttgccacacaaccaaaagaatgctatggaggagttagttaagcaattgatcagttctaacaccatcaagccaagtatgagtccatactcttccccggctattttggttaagaaaaaggatgggtcttggaggatgtgtattgattataggcagctaaactccaacaccatcaagaataagtaccctattccagttatagaagacttacttgacgagctccatggttcgaagtacttttcaaagattgatttgaggtcggggtatcaccagatccggatggatgtgaaggatgtacctaagacatcattcagtacacatatgggtcactttgagtttgttgttatgcccttcggcctaactaatgctcctgctacgttccaagtcttgatgaacagaattttggcagaacatctgagaaagtttgtattagtgttcttcgatgatattctcatatacagcaagactttgcaagaacatgttgaacatgtgagcaaagctatggaaatattaaggacaaatcaactctttgccaaacgaagtaaatgtgtatttgggcaaagacaggtggaatacttggggtatgtcataagtgatgcaggagtagccacagaccctgaaaagattcgggctgtgagagaatggccaacaccaaccaatataactgagttgaggggattcttgggactagcaggatattacaggagattcatacagaactttggggttatttgcagacccatgtttgattctcttaagaagatgggattcaaatgggaagaaaaacagcaacaatcttttgatgaaatcaagagtagattggcacaagctcctgtactagccttacttgattttactcaaccatttatactggaggctgatgctagtggaagtggaattggtgctgtgttgatgcaggggggcagaccgattgcttacataagcaaggcaattggacctagagcagctggatattcaacctatgacaaggaagctctagctattttggaggcccttaagaaatggaagcactacttcatggggacatcaagaattactgaaggagtacaatataagctgttggttaaattgttgggctacgattataagattgagtacaagaagggaaaggagaatagagctgctgatgctttatctagaaagcctcaagtagagcaattgcaagtagtcacattggtgatacccaaatgggtgcaggaggtaatagaaagctacaaaggagatgaaaagtgcctagtgctggaagcaaaactaagaatagatggtcaggcccaaccaccctactccctgagtggaggaattttgaggtataaagacagaattgtgattgggagtgggggaactttgagagaacaacttaagaaatcgttccatgattcagccttgggaggacattcaggtgaaaggggaacataccagagggtaaaactgttgttctattggcccaaaatgaaggaggatatcaaacagtatgttaagatgtgtgcagtccgtcaaaagaacaagggtgagaatcagttgagtccaaggctcctgcaaccactccctataccagatatggcatggactcatatttccatggattttgtcgaggggctgtctaaatctgaaggaaaggatgtaatctgggtgattgtagatcgattgactaagtatgcacacttcattgctttaagccacccattcacagctgaacaaatcctggagaaattcaaagacaatttttataaacatcataggctgcctattgtgattggaagtgatagagacagaatattcactagccaagcattacatggggttaagcctcctttggttgctgaacacatgttgccatcatcattggtggaaggggcaaggaacagggagcaggctaaggctgcaatctttgaagcggttaaatctaatcttgaaaaggctcaggcaagaatgaagtattttgcagacaggagaaggagtgagagaacactagaagttggggacatggcttatttgaaaatgcaaccgtaccggcataattcattgggattgcacggttccctgaagctacattccaagtattatggaccatttcgtgtgactgagaaggtgggggcagtagcatatagattgttactacaagaaggaagtctcattcatccggtgttccatgttagccagctaaagaagcaccttgggcccaaggcagtacctgaaacagccttgcctctcattgacgctgaagggaatgtactaacagaacctgttgctgttttggaaaggaggatgattccacgcaacaatgagccggttgtgcaatggaaggttcattgggcaaacttaccagcagaagcagccacctgggaggatgcatctttcattgccaaggtttttccagctttcaaaccatga

SEQ ID NO: 26010 - DNA, 544 bp, Oryza sativa
  Clone ID: PAT_MRT4530_30841C.1
ccagcatgatggggactggatcaagctcactatagattggtgtagaagaggggagaagatagaggaggaagaaagaaggcatgggcaatttcgtccaaaaaaattaacaaatgcattggaaaggtaagtagtggcatatcttaattttttataatattgtaatggcatctttataattaattgtaacggtatttttcaaaacgtgcaaatttataatggcatgaattgtaatggcatctttacattgacgtgtgaattatcgagtgctaacataaaaaaaatctcttgtctcaaaatatagctatttttggacatctcccccgcattctatcctagtcacttcatacctagggaaaaacaagaaaaagaacgctgctactactcctaaagtcttaccgctgcaattgggggtggataacgagtcaactcggctcgttaacattaatgagctgaaaagcaatcttgtcttgttaaagctcattaatgagccctatctcacctatatcatatcaatactttcaattttactattttattatacatt

SEQ ID NO: 26011 - DNA, 549 bp, Oryza sativa
  Clone ID: PAT_MRT4530_30842C.1
atatcccattccgatatgattgtctcctactataacaagcggtgtctgtgatgggcgcctaccatgtccgctcaccaccacggaaggcgacgacttccggcagaaggtatggagcatgacgggagggtcctactgccggcccgcgtactgacgccgcaagaccggcttcgccatgttcggcgtctttcttctactgcatccccatcgacatgaagtgcgccgagctcgagcaacgcccacatcacgcgagccggccgatcccatcatcaactttgccgcaacatactgtgcttggaaagagaattgaacgatgtctgaacttgcaaggaggactcctggatttatcgtgctgtggcataagttgatctcggcgagcaatgcttggagaactatgctcgctacgagtatagcgctgtgaggcttcatgaaagctctttccacttatattagtgccctacaagcgcacgatgcctgattgtccacagaatgacaagaaaagaaaaggagggcacgccgctccagatgctgatcttcgcgaagacgctgact

SEQ ID NO: 26012 - DNA, 5529 bp, Oryza sativa
  Clone ID: PAT_MRT4530_30843C.1
acgaagtcgccgccatccaagtcggaggtggatccatccaacgtgatgccggttacgagggagagtcttgatgaggaagcacgcaaggccttcgatgaacacatgaagaagtacgccgacgagcttttgaagacatgtacaaagactcgtcaaggcacgatcttcaagccagatttggtgtcttcatctactattgataaggtaacttttgaggatttatcgcaatctattcaacaacaagttgctcatacaatagatgaatctatgattgttttaaagaataagttagaagcatcttttgaaaacaattgtgaaaattttatgagaaataaactcggccctctcgtggccgattttatattcaaagataaagcctctaccagtgctagccaagctcccgtagatcaaataaatagtaaaaccgatggagcaaagacaatgaccggtcagaccgagtattactccggcggtcagaccgggactcaggccggtctgaccgctcctctggatgctggtcagaccgggccctggaccggtcagaccggcgcaatagtgccgattcagggggtagatccaatgactaatgctagttatttgtatcatcttagaatttttgatcctcctgtatctactgctgcaaataatccccaagttcccccacatattcctaatgcttataatgatgtttctagggggtatcctcctgatactaggcaaggccaatataatcatattgcgccgcaacaccaacctattaggcaaccaaatccactaccaaaccaacataggcttgataatatggaggaattgattagtgggattattagggataaatttgggattgaagctaggaattgtgctaaggtttaccaaaagtcgtatcctgattattatgataatgtgccatatcctcgtggtcatagggttcccgaatttaccaaatttagtggtgaggatagtaggaccacatgggagcatgtaggtcaatttttagcgcaatctggagaggctaatagtgatacttttaaattgcgcttattctctttatctttgtccggtactgcttttacatggtttacttctttaccggcaaattctattcatacttgggctcaattggaacaaagatttcatgattgtttctatactggtgaaactgagcttaggttatctgatttaacatcggttaagcaaaagtataatgaatctgtcattgattatgttaagagatttagagatgttagaaaccgatgttatagcttgaatataactgatagagatttggatgatcttgcttttaatggtttaattgctcctattaaagaaagatttgatggccaacaatttcttgatgttagtcaactcatgcaaaaggctttggctcaggaaagccgggttaaggataataaaaaatttgttagaccatatgagaagaagcctaatgttaatgcaattgattactctgaagctagtgatagtgaagatgagggtgatcatgatatgtatgttgccaagtggtcatggactaacaaaaataagccttttgttcactctaatttaatgccgactcctcgtaaagatcggcaaagtgaggttaaatatagttttgatgtggccaaatgtgataaaatctttgattatcttttgcaagaaaaacaaattagattacctaaaggccatatcataccttctcaagaagaattgaagcgtcgagcttattgtaaatggcatgattctcattctcattctactaatgattgcaatgtgtttcgacgacaggttcaatcggccatggatgaagggcgattgaagttcaccgatggttctaagatgaagcttgatcatgatccttttccggtgaatacaattaatttcaatgataagaaggtgttgattcggccggagcaagccgaatctactaaggggaaagaagtgatcattggtgagcctaggccaaagatgatagtgccaaagaaaccggagaagtatgagaagcaaggtgatgagagagctcgcaacaaaggaaaaagaccaagatcacctcctagggagcgatttggccattcaccaagacggtcgcaatcacctccatatcatcattcacaacacatgtcatgggggccttacccaatgccgccgccgggttatccttatctttactacatgccatggggggcaacaccgccaatgttcaatcatatgcctccaatgcaattcaaccaaaggtggggaggaccaaggaggccaattcatgagcgcttgtcttcaccaaataatagccggttttatggaaaaaatcaggttaatgaagaaaagagggaaggaaagcgtgttaaggtggaggcaaggacttcggaggtgattaccatcaaagtggggtctcatgatgtgccaataccttcgggagatggagttggggagtcctcaagcaacaaatccgaaaccggccggtctgaccgccggcctcaggtcggtctgaccgggccatcaggccggtctgaccaccgaccccatgtcggtctgaccggcgcatctggccggtctgaccggtggtctacgtccggtttgaccggtctccagcgctggtttgacaagaggttttcaaggagtagtgcgggggcttcatcgtcttcaagtaaactcaatagggggcattacttacctcctggaacagagccgaaacctaggtggatgcctaaggatttaacggctactcaaaggagaaggttgcaacatcttcgggcccaagagatgagagagaaaaaggccgaagagcaaagagataagagattcaatgagttgcgaccaccaccggagaaagaagaacaatcagttgctaaagatgagtcatctccaaaggaggacatggatatcaacatggtgtgtatgttgcctatggagttttgtgctatggatgaagccgaggttgctcaattttcactaggtcctaaagatgcggtttttaagaagcccgatgaatcaaaccgtcatatgaagcttctctatctcaaaggttatgttgatgggaagccggtctctaggatgctagtagatggaggtgccgccgtgaacttgatgccgtattcattgttcaagaagttggggcgtgaggatgatgagttgaagaagaccaacttgattcttaatggcttcaatggtgaaccaacggaggcgaaagatatcttgtcggtggagcttaccatgggaaacaagacgctatgaaccgctttcttcatcgccgatgtgcaaggtaactacaatgttattttgggtcgttgttggatccatgccaattgttgtgtgccttctaccttgcatcaatgtttaattcaatgggacgacgatgatgttgagattgttaaagcggatgcatcggccgaggttgcaatggccgatacaacgtttgactggcgtcatgggaatattcaatgcttatcggggagggatctttctaaagctaatttagagtggttgcaaaagagggtgcaagaatatcggtctacaaagaacgatattggtgagactattgaagattttgatgaagtagagaagcttggacaagggtttacatcggccgatccattggaggaagtagacataggtgatggaactaagccaatgccgacttttgtaaacaaaaatatgagtgccgattataaggttaaaataatcgagctactaaaggagtatgtggattgcttcgcatgggaatatcatgagatgccgggtcttagccgtgagcttgttgagcatcggcttccaatcaaactgggttttaggccttataaataaccacctcgtcgttttaatcctttattatatgaccgagtcaaagaggaaattgatcggttgttgaaggcgggagatttgaataaagctactcccaaagatgaatatcctatgcctatagccgatatgatgatcaaagatgcctcaggtcataaggtaattagtttcttggatggtaatgccgtctacaatcaaatctttatggcggaggaagatatgtacaatacggcttttaggtgcccgggatttgttggtttgtttgagtgggttgtcatgacttttggattgaagaatgccggtgcaacatatcaaagggcaatgaatttgatctttcatgatttgttaggtattatcttagaaatctatattgatgatattgttgttaaatcggatggtatagatggacatatagccgatttgagattagcttttgagaggatgcgccggtatggtttgaagatgaacccacttaagtgtgcttttagcgtgtcggcgggtaggttcttaggattcatggtgcatgagagaggagttgagattgatcctaagaagatagaaaagattcgagatttcaaagcgccgacatgcaagtaggaggtccaaaagttgcttggtaaggtgaattatttgagaagatttatttctaacctagcgggacaagcgttcaaatatacattgcttgatgaagatttatatcgccgaaacatagatggagtcttattgaagtgtttagatgaagatcaatctaaagtggctatgggagaggtgcatgaaggaatttgtggaactcatcaatcggcccacaagatgaattggttgcttaggagagcgggactctattggccgaggatgattgaagattgtttcaaatactatagaggatgcgaagcttgtcaacagttcggcaatgggcataggttcgtgctagttgctacggattacttcaccaagtgggccgaagctgtgccgcttaagaatatgactcatacggagttaaatgactttattttgaagcatattatacatagattcggtattccgcaaatattaactacgggtcaaggtgcttcttttatgtctaaggaagtgaagagttttgccgaatcttatggtaacaaattgttgagttcttctccttactacactcaggctaatggacaagccgagttgagtaataagacgttgttgaagatagtaaaaaagaagattgaggaacacccaaagaggtggcatgaggtgctttctgaagcattgtgggcgtataggatatctaaacatggtgccactaaagtcactccttttgagttggtttatggtcaagaagccgttttaccagttgaggtaaatcttggttctcttcgttacatcaagcaagatgatttatcaagtgaagattacaagatattaatgggagacaaccttgatgaagtcatcgacaagcgtttgaaggctttggaagagatagagaaagagaagaaaagggtggccaaggcgtatagaaaaagggtgaaagcaaagttgtttcaagttggagacttggtttggaagacaattttgcctttgggtactcgatctagggaatccagtaagtggtctcctaattgggaaggtccttatcgagtatgcggcattgttcgagggaacgcatattttttggagacacttcaaggggagcgttttcagcgagcaatcaacgggaaatacttgaagaaatgcttcccgagcgtttggcaaaatgct

SEQ ID NO: 26013 - DNA, 3899 bp, Oryza sativa
  Clone ID: PAT_MRT4530_30844C.1
tgttcaatcatatgcctccaatgtaatacaaccaaggatggggaggaccaaggaggccagctcgtgagcgtttatcttcaccaaataatggttagttttatgctaaaaatcaggtcaatgaaggaaagagggaaggaaagcgcatcaaggtggagacaaggacttcagaagtgattactatcaaagtggggtctcatgatgtgctaataccttctggacatgaggttggagagtcttcaagcaacaaattcgaagccagaaccaactcatcgcagtcagccggtctgaccaacctcttaggccggtctgactgggccttcaggccggtctgaccgcctgtcgcaggccggtctgaccgggccttctggccggtctgaccgggcttcagcgccggtttgatgggagaatttcaaagggtagttcgggggtttcatcgtcttcgagtaaaatcaaaagtgggcattatttaccttctggaacagagccgaaactaagaaggttcaatgagttgcgaccaccgcctacaaagatgtggaggcgtaagtccatagatattgaagaattggttgttgtgcaaaaggaggaggaagaacaatcggttgatgaatcatatccaaaggaagacatggatgtcaacatgatgtgtatgttgcctatggatttttgtgctatggatgaagccgaagttgctcaattttcactaggtcctaaagatgcggtttttgagaagcccgatgagtcaaactgtcatatgaagcctatttatctcaaaggtcatattgatgggaagccggtctctaggatgttggtggatggaggtgccgccgtgaatttgatgccgtactcgttgttcaagaagttggggcgtggagatgatgagctaaagaagaccaacggaggcgaaaaggtatcttttcggtggagcttatcgtgggaaacaagacgtccaaccgctttcttcatcgtctatgtgcaagattttgacgaagtagaaaaggttggtcaagggtttacatcggccgatccattggaggaaatagacataggtgatggaactaagccaaggccgacttttgtaaacaaaaacatgacagccgattataaggttaaaataatcgagctacttaaggagtatgttgattgcttcgaatgagagtatcatgagatgccaggtcttagccgtggtcttgtcgaacatcagcttccaattaaaccgggttttaggccttataaacaagcaccttatcgtttcaatcctttgttatatgaccgggtcaaggaggagatttatcggttattgaaagcggggtttattaggccatgtcgttatgcggagtgggtatctagtatagtcccggtggagaagaaagggagtggtaagattagagtttgcatagactttagagatttaaataaagctactccaaaagatgaatatcctatgcctatagctgacataatgattaatgatacctcgggtcatcagaacgcctgtgcaacatatcaaagggtaatgaatttgattttccatgattttctaggtatcatcttagaagtctatattgatgatattgttgtcaaatcggatggtatggagggacatatagccgatttgaagttagcttttgaaaggatgcgccggtatggtttgaacgtgaacctactcatgtgtgcttttggtatgtcggcagggaggatcttaaggtttatggtgcatgagagaggagttgagattgatcctaagaagatagaaaagattcgtgatttcaaagcgccgacatgcaagaaagaggtgcaaaagttactaggtaaggtgaattatttgaggagatttatatctaacctagctggtaaaatcgatgcttttgtccctatacttcgcttgaaaaaagaagccaattttacttgggggcaaaacaacaagaggcgtttgaggaattgaaaaggtatttgtctactccacccgtggtgcgggcgcctaaagccggaataccgtttcggttatatattgcctccgaagacaaagtcattggtgctgttttgacacaagaggaagatggtaaggaatatatcattacatatcttattagacatatgttgcaaaggccaattctaagtgggtgaattggcaagtgggcatatgttttgattgaatatgatttggcttatgaaccgttgaaatctatgaaaggccaaattgtagtacattttatagtagaccatcatgtcgatattgcttatgatgaagagatttgcttagttgaagttataccttggaagatttattttgatggttcttcttgcaaatagggtcaagttataggtgtagttttattttcacctaatggcatgtgttatgaggcatcggttcgtttgaaatattattatacaaataatcaagctgagtatgatgctttattattcggcttacaagtgatggagatgattggagccaaacacatagaagcatttggtgattcggaattggtggtgcaacaagttgccggggcttacaaatgcttgtacggatcattaaataggtatcttgatcaatgcttggatattattgccaatttatataattttgctattagacatgttgctaggcgtgataattctagagcaaatgatttagcatggcaagcatatggttataatgtgaagaagggagtattttttatattagaagaaccggtgcttgatttcaaacctttgggtgaaattggcaaaaatgcagaccgggggcggtctaacctgcgttgcacggctggtctgaccggtgactaggggtggtctgaccggccgtatgccgccggtctgaccggccaacccgggcggtctgaccggccgtatgccgccggtctgaccgattctagacagaaggttggggggcacgtcccgattgattcaaaggccgaactaattgtaatttcggacatttgtgcccaggatacagaagaggattggagaattcctttgattaaatatttgaaagaccctacacttaaggttgatcggaagatttggcggcaaatgtttaaatatacattgcttgatgaggatttatatcgccgaaatatagatggggtgcagttgaagtgcttagataatgatcaatctaaagtggctatgggagaggggcataggttcgttgtagttgcaacggattacttcaccaagtgggcccaagccgtgccgctcaagaatatgattcatacggaggtaattgtctttattttgaagcttattatccatagattcggtatcccgcaaacattgactacgaatcaagccgagtcgagtaacaagacgttgtcgaagatagtcaaaaagaagattgaggaacacccaaagaagtggcatgaagtgctttctgaagcattgtgggcgcataggatatctaaacatggtgccactaaagtcactccttttgaattggtttatagtcaagaagctgttttgccggttaaggtaaatcttggctctcttcggtatatcaagcaagatgatttatcaagtgaagattacaagaatttgatgggagacaatcttgatgaagtcatcgacaagcgtttgaaggctttggaagagatagagaaagagaagaagaggatggccaaggcatacaacaaaagggtgaaagcaaagttgtttcaagttggagaattggtttggaagacaattttgcctttgggtactcgatccagggagtttgattcacgccattcaccaaaacatgttctatggttttagattcacacccaaattcggcacccagggataaaatatggaaaattgccaaagtttggatgtctgacggttttcctctagttggaccggtctgactgcggtgtataggccggtctgaccgccgaaagtgggccggtcagaccggcggt

SEQ ID NO: 26014 - DNA, 347 bp, Oryza sativa
  unsure (1)..(347): unsure at all n locations
  Clone ID: PAT_MRT4530_30845C.1
ggtaagactgctatttttatgctagattatagaatttcaggcttatttgtccttaacatagaaattttcctctctttttgttcctatctattagttttggaagagagaagctgttaacattccaacaatattgttttaagcagaatatgcatttcagatttgcttatacaaggcaagcttcgtgtgcaatgcgcaagagccctgtgagatatataattagagggattacgtggaggattacagacaagacangagcacaggggatcgcagtatcccaaagagtacacatagatttgctaaaaggattaatagcaagaagaacatgtttgatgattattggatgcaaa

SEQ ID NO: 26015 - DNA, 4860 bp, Oryza sativa
  Clone ID: PAT_MRT4530_30846C.1
atgacgaagaagccatccaagacggaggtggagccatccaatatgataccggtcacattggatgatttcgaaggagaagaccacaaagctatggaggagtacatcaacgaactcaaacgagaggcgttgatgagggcaagcactaggactcgtcaaggcgtgatcatcaagcccgggccacgtcctaagctcgcccccgatttggtaagcaatgatgaggtaacacaatctatccaacaacaagtagcatctacaatagattcatctatgattgcttttaaagataagttagatgcatcttttgagggtaaatttgatgagtttttaagagttaaattcggccctcttatggccgattacatgtcaaaggataaggcctctaccactgctaaccaacctcctatagatcaaacagagttcccgaatttaccatgtttagtggtgaagatggctcaattagaagaaaattttcatgattatttctatactggagaaactgagcttaggttatgtgatttaacatcggttaagcaaaagtataatgtgcctgtcattgattatattaagagatttagggatgttagaaaccgatgttatagcttgaatataactgatagagatttggctggtcttgcttttaatgatttaattgctcctcttagagaaagactagatggccaacaatttcttgatgttagtcaacttatgcaaagggctctggctcaagaaagccgggttaaggataataaaaaacttgttagatcatatgacaaaaaacctaatgttaatgtaattgattactccgaggctagtgatagtgaggaggagggtgatcatgatatatatgttgctgaatggtcatggactaacaaaaacaagccttttgtttgctccaacctaatgccgactcctcgcaaagatcggcaaagtgaggttaaatatagttttgatgtggccaagtgtgataagatttttgattatcttttacaagagaaacaaattagattacctaaaggccatgtcataccatctcaagaagagttgaaacgtcgagcatattgtaaatggcatgattctcattctcattctactaatgattgcaatgtgtttcgacgacaggttcaatcggccatagatgaaggacgattaaagttcaccgatggctctaagatgaagcttgatcatgatccttttccggtgaatacaattaatttcaatgataaaaaggtgttgattcggccggagcaagccgaatctactaagggaaaaagagtggtcattggcgaaccaaggcctaagatgatagtgccaaagaagctggaggttggtgtttggaaggagaataagagtgaagcttcaacttctaaagcccctaggaagaccaaagtgacttttgatatgcttttggagaagtatgagaagcaaggtggtgagagggctcgcaacaaaggaaaaagaccaagatcacctcctagggagcgatttggtcattcaccaagacggtcacattcacctccatatcatcatccacaagacatgtcatggggttcttatccaatgccaccgccgggttatccttatccttattacatgccatgcggggcgacaccgccaatgttcaatcatatgcctccaatgcaattcaaccaagggtggggaggaccgaggaggccaattcatgagcgtttgttttcaccaaacaacggccggttttatggtaagaatcgggctaatgaagaaaagagggaaggaaagtgcatcaaggtggaggcaaggacttcggaagtaattaccatcaaagtagggtctcatgatgtgccaataccttctggagatgaagttggagagtcttcaagcaaaaaatccgaagccggtaccagctcatcacagtcggctggtctgaccagatcttctagccggtctgaccgtagccatacggccggtctgatcgggccatcaggccggtctgaccgccgacccgacagcggtccgaccgatgcctcaggccggtctgaccgtgcgccaaatgtcagtctgaccggcgcatctggccggtctgaccggtggtctatgtccagtctgaccgggctccagcgccggtttgataggaggcgtaagtccgtagagaaggaaaaatcagttattgtagaggagaaggaggaacaatcggttgataaaggtgaatcatctccaaaagaagacatggatatcaacatgaagttggggcgtgaggatgatgagttgaagaagactaacatgattctcaatggcttcaatggcgaaccaacggaggcgaagggtatcttttcggcggagctcaccgtgggaaacaagacgctaccaaccgcttttttcatcgtcgatgtgcaagattttgatgaagtagagaagcttgggaaagggtttacattggccgatcctttggaagaagtggacataggtgatggaactaaaccaaggctgacttttgtaaacaaagatatgagagccgattataaggttaagataatcgagctacttaaggaatatgttgattgctttgcatgggaatatcatgagatgccaggtcttagccgtgagcttgttgagcatcggcttccaattaaaccgggttttaggccttataagcaaccacctcgtcgttttaatcctttgctatatgaccgagtcaaagaggagattgatcggttgttgaaggtggggtttattaggccatgtcgttatgcggagtgggtttctagcatagtcccggtggagaagaaggggagtggtaagattagagtttgcatagattttagagatttaaataaagccactcccaaagatgagtatcctatgtctatagccgacataatgattaatgatgcctcgggtcataaggtgattagctttctagatggtaatgctggctacaatcaaatctttatggcggaagaggatatgtacaagacggcttttaggtgtccgggatttgttggtttgtttgagtgggttgtcatgacttttgggttgaagaatgccggtgcaacatatcaaagggtaatgaatttgatctttcatgatttgttaggtattgtcttagagatctacactgatgatattgttgtcaaatcggatggtatggaagcacacatagccgatttgaggttagcttttgagaggatgcgccggtatggtttgaagatgaacccacttaaatgtgcttttggtgtgtcggcggggaagttcttaggattcatggtgcatgagagaggagttgagatttatcctaagaagatagaaaagattcgtgatttcaaagcgccgacatgcaagaaggaggttcagaagttgctaggtaaggtgaattatttgaggaggtttatttctaacctagcgggtaaaatcgatgcttttgttcctatacttcgcttgaaaaaggaagccgattttacttggggggcaaaacaacaagaggcgtttgaagagttgaagagatatttgtctactccacccgttgtgcgagtgcctaaagccggaaagccttttcggttatacattgcctccgaagacaaagtcattggtgctgttttgacgcaagaggaagatggcaaggaatatattattacatatttgagccgccgtcttttggatgccgaaacaagacatattgctaggtgtgataattctagagcaaatgacttggcacaacaagcatctggctataatgtgaagaagggattatttctgatattagaggagccggaagcagaagaagattggagaattcctttgattcgatatttgaaggatcccacacttaaggttgatcggaaaatttggcggcaagcgttcaaatacacattgcttgatgaggatttatatcaccgaaatatagatggtgtcttgttgaagtgcttacataaagatcaatctaaagtggctatgggagaagtgcatgaaggaatttgtggaactcatcaatcggcccacaagatgaattggttgcttaggagagcggggttctattggccgaagatgattaatgattgtttcaaatattatagaggatgcgaggcttgtcaacggttcggcaatgttcaattggcgcccgccgtcgtgttgaaccccataatcaaaccatggccgttccgaggatgggctttggatttcattggtcaaatttatccttcgtcatcaaaggggcataggttcgtgctagttgctacggattacttcaccaagtgggccgaagccgtgcctttgaagaatatgactcatacggaggctaatggacaagccgagtcgagtaataagacattgttgaagttagtgaaaaagaagattgaggaacacccaaagaggtggcatgaggtgctttccgaagcattgtgggcgcataggatatctaaacatgatgccactaaagtcactccttttgagttggtttatggtcaagaagccgttttaccggtagaggtaaatcttggttctctttgttatatcaagcaagatgatttgtcaagtgaagattacaagacgttgatgggagacaaccttgatgaagtcatcgacaagcgcttgaaggcattggaagagatagagaaagaaaagaagagggtggccaaggcatacaacaagagtgtgaaagcaaagttgtttcaagttggagacttagtttggaagacaattttgcctttgggtactcgatccaaggagttcggtaagtggtctcctagttgggagggtccttatcgagtgtacggcattgttcgagggaacgcatactttttagagacacttcaaggggagcgttttcagcgagcaattaatgggaaatacttgaagaaatacttcccgagcgtttggcaagacgcttag

SEQ ID NO: 26016 - DNA, 670 bp, Oryza sativa
  Clone ID: PAT_MRT4530_30847C.1
atggctcctcgcaagccaaaccccgcttcggcgaaagggcccgatcccggccggattgacgacgacaccaccacctttttggggatttctctcatggatgacggcgagctggcgaagttggtcagctctggggcgttggttgaggggcaggctttcgccccggggaaggccgtggtaccgaagctcgtcgacaaccggacggtggtgttcgccgtcttttttgaggcggggcttcggtttccgtgcaacgtgttgttgtcggagatccttcgccatcttcgactgggcgtgccggacctccggacgatggttaccccggtcggaacgaagaagacggtgttcaggagcatgaacttcaacgttcgccccgagcgctccgatctttggccggtgaatgccgccatgtggaagtccgagtcggcgaaggccctccggtgtcggcgcagggcgattgcgccgaaccggaaacccaagatcaccgtggacggcgccatggaggcacggttcgccttgctgcgcaaggtctgctcccgcctcagctgccgcgacttggtggaggagttctgcatgcttcgcttttttcccctctcccggtcgtggcaagtcgcggttgaccaagacgaagaggtcgacggtttgctgaagctggttcctcctgaggggacgaacg

SEQ ID NO: 26017 - DNA, 2727 bp, Oryza sativa
  Clone ID: PAT_MRT4530_30848C.1
atgcctaaggatttgacgtctgctcaaaagagaaggttgcaatgtcttcgggctcaagagataagagagaaaaaagccgaagaacaaagagataaaaggtttaatgagttgcgaccaccaccggtatggaggcgtaaatccatagagaacgaaaagtcggttgttgtagaggagaaggaggaacaatcggttgataagggtgaatcatctccaaaagaagacatggatattaacatggtatgtatgttgcctatggatttttgtgctatggatgaagccgaggttgctcaattctcattaggtcctaaagatgcggtttttgagaagcccgatgagtcaaaccgtcacatgaagcctctctatctcaaaggccatgttgatgggaagccggtctctaggatgctagtagatggaggtgccgccgtgaacttgatgccgtactcattattcaagaagttagggcgtgaggatgatgagttgaagaagaccaacatgattctcaatggcttcaatggtgaaccaacagaggcaaagggtatcttttcggcagagctcaccgtgggaaacaagacgctaccaaccgctttcttcatcgtcgatgtgcaagaggctaatttagagtggttacaaaagagggtgcaagaatatcggtctacaaagaacgatattggtgaaaccgttgaagattttgatgaagtagagaagcttggaaaagggtttacatcagccgatcctttggaggaagtagatataggtgatggaactaaaccaaggccgacttttgtaaacaaaaatatgagagccgattataagaatgccagcgcgacgtatcaaagggcaatgaatttgatcttccatgatttgctaggtattattttagagatctatattgatgatattgttgtcaaatcggatggtatggaaggacacttagccaatttgagattagcttttgagaggatgcgccggtatggtttgaagatgaacccacttaaatgtgcttttgaagccgattttacttggggggcaaaacaagaagaggcgtttgaagagttgaagaggtatttgtctactccacccgttgtgcgagcgcctaaagccggaaagccttttcggttatatattacctccgaggacaaagtcattggtgccgttttgatgcaagaggaagatggcaaggaatatatcattacatatttgagcagccgtcttttggatgccgaaacgaggccaattctaagtgggagaattggcaagtgggcatatgctttgatagaatatgatttggcttatgaaccattgaaatctatgaaaggccaaattgtatgtgattttatagtggaccatcatgtagatattgcttatgaggaaaaggtttgcttagttgaagttataccttggaagatttattttgatggttcttcttgcaaggaaggtcaaggcataggggtagttttgttttcacctaatggcatgtgttatgaagtatcggttcgtttggagtattattgtacaaataatcaagccgaatacaatgctttattattcggcttacaagttatggagatggttggagctaaatacgtggaggcttttggtgattcggaattggtggtacaacaagtcgccggagtctacaaatgcttggacggatcactaaatagatacctcgattcatgtttagatattattgccaattttgataattttgctattagacatattgttaggcatgataattctagagcaaatgacttggcacaacaagcatctggctataatgtgaaaaagggattatttctggtattagaagagccggtgcttgattttaaatctttgtgcaaaattggtaaaactggagaccaggggcggtctgaccagctgcttgccgtcggtctgaccggcgatcccgagcagtctgaccagccctgtgtggccggtctgaccggttctgggcagagcactggggggcatgtttcaatcaatttagaggccgaattaattgtgaatttggacgtttgtgcccaggaagcagaacaagattggagaattcctttgattcgatatttgaaagatcctacacttaaggttgatcggaaaattcggcggcaagcattcaaatatacattgcttgatggagatttgtatcaccgaaatatagatggtgtcttgttgaagtgcttagatggagatcaatctaaagtggctacgggagaggctaatggacaagccgagtcgagtaataaaacattgttgaagttagtgaagaagaagattgaggaatacccaaagaggtggcatgaggaagccgttttaccggtggagataaatcttggttctcttcgttatatcaagaaagatgatttgtcaagtgaagattacaagacgttgatgggagacaaccttgatgaagtcatcgagaagcgcttgaaggcattggaagagatagagaaagagaagaagagggtggccaaggcgtacaacaatagggtgaaagcaaagttgtttcaagttggagacttggtttggaagacaattttgccttcgggtactcgatccaaggagttcggtaagtggtctcctagttgggagggtccttatcgagtatacggcattgttcgagggaacgcatattttttggagacacttcaaggggagcgctttcagcgagcaatcaacgggaaatacttgaagaaatacttcccgagcgtttggcaagacgcttag

SEQ ID NO: 26018 - DNA, 1319 bp, Oryza sativa
  Clone ID: PAT_MRT4530_30849C.1
gcacgaggaaaaaaaggaaagaaaacacttgctgcagaaacttgggaatttcaatggcgggagcaagagccattggttctctcccagtgcctaatgtgcaggagcttgcaaaaacttgcaatggtccagatgaacacatacctgaaagatacatcaggccagaggctagttctgaggaggtcatcagcaactaccatggtgaggcgattccgatcatcgatctcaataagttgctttctccgcaatcatcagaagaatgtgtgaagctgagatctgcctgccagtattgggggttctttcagctcatcaaccatggagtgccagatgaagtgattgcaaacctcaagagagacattgttgatttcttcagccagccactggacgccaagaaggagtacacacagctacccaacagcctcgaaggctatggacagaccttcgttttctccgaggaccagaaacttgactgggcagacatgctgtatcttcatgtccatcctagcgattcaagggacttgaggttctggcccacttcccctgcatctttcaggcgatcccttgatgcatactcatcagagactaaaagcctggcactctgcttgtttgagttcatggctaaggctgtgggcgctaagccagaggctcttttaggcatatttgaagagcagcctcgaggcttaaggatggcctactacccaccgtgcctgcaagctgacaaggtgatgggcctttcgccgcactctgatgtggttggcctaacactgctgctccaggttaacgacgtgcagggcctgcagatcaagaaagatggcaagtggttatccgtagacgctccgaatggtgcactcatcgttaacattggcgacacacttgagatcctaagtaacggaaagttcagaagtgttgaacacagggccgtgataaacccaaataaagagcgaatttcagcatcactcttccactatccgtgtgaaaatatggtgatcagacctctgacggaatttgtgaaagatggtaaagtgaattacagatcaattagttaccttgatttcatgacacaattcttcacacaacagcttgatggaaagaacagactggaggtgttgaagttggactagtagccgcgtccgcgctgcccgtgggatcggcggcttagacggggatcaagccgcttctacgctgtggccttacctgttgctgcgtgtcttgtcccgtggtgcccgatcatcctgtgcttggtcgaggtttgacccaaacacctgaaacaaaaaatggaaataaacattgatgccttgaagaacaaaaaaaaaaaaaaaaaa

SEQ ID NO: 26019 - DNA, 380 bp, Oryza sativa
  Clone ID: PAT_MRT4530_3084C.1
tataatactatactcctatgttatgtactatatgagatcgataggttctgattaaagttagtactcggataatttggatcccggccacaggtagcacccgcccacccggtaacctcgccctgtggccggaaggttgcaccgacccctgttggccacagaacttcgacccacacggcgaggagcgacgacggcagctgccttgtacaccttttaagcacggccggcttgacgcttggctattaattatgttctcccttttatgttttctctttgttctgtgtatcagatcgcgccccagccatactgggcatgacccatttttgtttaataataatataatataaagatatgggctatactaaaaaaaaaaaaaaaaaaaa

SEQ ID NO: 26020 - DNA, 2187 bp, Oryza sativa
  Clone ID: PAT_MRT4530_30850C.1
atggctcctcgcaagccaaaccccgcttcggcgaaagggcccgatcccggccggattgacgacgacaccaccacctttttggggatttctctcatggatgacggcgagctggcgaagttggtcagctctggggcgttggttgaggggcaggctttcgccccggggaaggccgtggtaccgaagctcgtcgacaaccggacggtggtgttcgccgtcttttttgaggcggggcttcggtttccgtgcaacgtgttgttgtcggagatccttcgccatcttcgactgggcgtgccggacctccgggatcaccactggatggcgaggtggttctatcacaccatccccttcgaggctaggtccgagtcggcgaaggccctccggtgtcggcgcagggcgattgcgccgaaccggaaacccaagatcaccgtggacggcgccatggaggcacggttcgccttgctgcgcaaggtctgctcccgcctcagctgccgcgacttggtggaggagttctgcatgcttcgcttttttcccctctcccggtcgtggcaagtcgcggttgaccaagacgaagaggtcgacggtttgctgaagctggttcctcctgaggggacgaacgccagctgctcacacaacaaggccgacgacgatgcagagccttcgcgaaagcggacgcacggacaagtgaaactggcccctaggaagcgaagggtccctgcttcctccgattctgacgccgacgacagggacgacgtcgaagatcgtgacggcgaggaggaaggggaggaagaagagggggcggaggctgcggccagaaaggctgcggacgaggcggtcgaaaaccgcaccaagacccctggctacactcctactccaagtctagggcataacgagaccgaggtggagtcgaatagctccccccttcatcgaaaggatttggagggggcgaaggcgctagttgtgttttcggcgggcaaggtggtgaaggggggtccggttaagaaggccgccaagaagaaaggactcgttgatgttgctcgtgttttcagcgacgatgagtcttctgacgaaaccccaacttcgcccgctagtcgcagcttagatctttcgaccgcccccgttctttcgatcgacgctggcggagcgggtggcagtgccgccgccggggcctcagcctccactgatcgtgtcatgaagccggttgtttcgcctctagtcaagtcgaaggggaagggggcggccgtcgaaacatctgcctcggagtattctctcgcggcgccccacttcacccctggcgatttcgagacttgggtggaacttattccctttgtcgtgggggtaagcaaccttgtctcacctgtcggcaccccgagcctattcaccgagctgaatgagttcgacgaagggtgttctgctattaaaagcttggcggttcagattcttgcggctgactgttcgacagagcgaaccatgcgggcccatcttgacggatttaggagccgtattcgggccaaggatgacgagataggccgcaagagtttggagatggaggccctctccaacaccctcaaggaggcgaaggtggaaaacaagcgactccaagctgaactggagaagggaagaaaggctagagctgaggtcgatcgccttaaggccaaactggagaaggaaaaagcccattccgctgcgctgaccgactattacaatcttactgagccgaagatagaggctcttcgcctggaggccagcaaggctgaggcaagcgttgcggaggagtggcagcggtttttgtgggagatggcgaaagccaccgagtccgcgaaaacggcgtgccaaacgctccgccttgcccttttcgacatgggtgcgagggtgcgaggagtccccgccaaagatgcctctgcctttgacttctcggagtggacgcagcaggctggtggtgtgttcggctgtgagcacgtcgccgagttccctaactatgcgaagggggactgggaggttagtgcgcaggacgtttcgcccgcgctccgcgcatggcggaaacagttctggcagaaggacgtccgatccactgccaaggcacgccttttggagcaactagcgaaggcagaggtggtagaccagggcgaaggcaaggatgcggcggtcggagggggtggaggcgatgcccaggatcacctagaggtgtga

SEQ ID NO: 26021 - DNA, 1173 bp, Oryza sativa
  Clone ID: PAT_MRT4530_30851C.1
atggcaacgccagccaccctggcgccctcaccgtgctgccgtggcactagggctattgtggtagtgttgactgggcggatgggagtgctagccactctggcgccggccctcagaccacagcgccagcgacatattgctagacatgataattctagggcaaatgatttagcacagcaagcatctggctacaatgtgaagaggggaatatttttgatattagaagagccgatgcttgattttaaatctttgagcgaaattggcaaaatcgcagaccaggggcggtctgaccggcgttgcacggccgatctgaccggcgttgcacggccggaaacagaagaagattggagaattcctttgattagatatttgaaagttcctacacttaaggttgatcggaagattcggcggcaagcgttcaaatatacattgtttgatgaagatttatatcgccgtaatatggatggagttctattgaagtgcttagataatgatcaatcaaaagtggctatgggagaggggcataggttcgtgctagttgcaacggattacttcaccaagtgggtcaaagccgtgccactcaagaatatgactcatacggaggctaatgaacaagccgagtcgagtaataagacgttgttgaagctagtcaaaaagaagattgaggaacacccaaagaagtggcatgaggtgctttctgaagcattgtgggtgcataggatatctaaatatggtgccactaaagtcactcattttgagttggtttatggtcaagaagccgttttgccggttgagacgttgatgggagacaatcttgatgaagtcatcgacaagcgtttgaagactttggaagagatagagaaagagaagaagagggtggccaaggcgtacaataaaagggtgaaagtaaagttgtttcaagttggagatttggtttggaagacaattttgcctttgggtactcgatccagggagttcggagctgtttgctgccattttgtcctttacaggtactggaacgtggagctgtggaaaaacctcttctgcacactgttcaacgcgacctccaacagcagcgaagcggctgtgctccggagcctccggatgtctttccaggagtacctgtacaccaacgggcagctcgtcggcaagctgaaccagcaactggccaaatag

SEQ ID NO: 26022 - DNA, 253 bp, Oryza sativa
  Clone ID: PAT_MRT4530_30852C.1
tttatttctcgagcgcccgccgccgtcgagcggggtgcagcgccgtgcgggcagacctgctccttacacctgcctgcatcatcgctgcttgaatcgatccgaagcattgtaaatggctgctgggaggggcatcaattcagctgttgaagaaagcatgtcggccatatagctgatcgccgctgtctcgattctggatacatgacgaagagtcctctggccacactggatcgcgagcattggctattctgggagt

SEQ ID NO: 26023 - DNA, 321 bp, Oryza sativa
  Clone ID: PAT_MRT4530_30853C.1
atggcgaaagccaccgagtccgcgaaaacggcgtgccaaacgctccgccttgcccttttcgacatgggtgcgaggttcggctgtgagcacgtcgccgagttccctaactatgcgaagggggactgggaggttagtgcgcaggacgtttcgcccgcgctccgcgcatggcggaaacagttctggcagaaggacgtccgatccactgccaaggcacgccttttggagcaactagcgaaggcagaggtggtagaccagggcgaaggcaaggatgcggcggtcggagggggtggaggcgatgcccaggatcacctagaggtgtga

SEQ ID NO: 26024 - DNA, 3391 bp, Oryza sativa
  Clone ID: PAT_MRT4530_30854C.1
ggtggttgtactcagtcttgctcaattttccccaaccccagaagaggagttcctggaggatgaaggcttcggtgtctagctcgtgcctgccgtcaagtgccttgcctcctgggacaaggattaatgcacgcacgtaaggaacgcccgttgggttatttccggtcgtgacaatgaacttgatgccgtattcattattcaagaagttggggcgtgaggatgatgagttgaagaagactaacatgattctcaatggcttcaatggcgaaccaacggaggcaaagggtatcttttcggcggagctcaccgtgggaaacaagacgctaccaaccgctttcttcatcgtcgatgtgcaagattttgatgaagtagagaagctagggaaatggtttacatcggccaatcctttggaagaagtagacataggtgatggaatgaaaccaaggccgacttttgtaaacaaaaatatgagagccgattataaggttaagataatcgagctacttaaagaatatgttgattgctttgcatgggaatatcatgagatgccgggtcttagccgtgagctcattgagcatcggcttccaattaaaccgggttctaggccttataagcaaccacctcgtcattttaatcctttgctatatgaccgagtcaaagagaagattgatcccggtggttatgcggagtgggtctctagcatagtcccggtggagaagaaggggagtggtaagattagagtttgcatagattttagagatttaaataaagccaccccaaaagatgagtatcctatgcctatagccgacatgatgattaatgatgcctcgggtcataagaacgccggtgcaacatatcaaagggcaatgaatttgatctttcatgatttgctaggtattatcttagagatctacattgatgatattgttgtcaaatcggatggtatggaaggacacatagctgatttgaggttagcttttgagaggatgcgccggtatggtttaaagatgaacccacttaaatgtgcttttgatgtgtcggcaggaaagttcttaggattcatggtgcatgagagaggagttgagattgatcctaataagatagaaaagattcgtgatttcaaagcgccgacatgcaagaaggaggtccaaaagttgctaagtaaggtgaattatttgagaaggtttatttctaacctagcgggtaaaatcgatgcttttgttcctatacttcgcttgaaaaaataagccgattttacttgggggggcaaaacaacaaggggcgtttgaagagttgaagagatatttgtctactccacccgttgtgtgagtgcctaaagccgaaaagcctcttcggttatatattgcctccgaagacaaagtcattggtgccgttttaacgcaagaggaagatggcaaggaatatatcattacatatttgagccgccgtcttttagatgccgaaacgatgccaattctaagtgggagaattggcaagtgggcatatgttttgatagattatgatttggcttatgaaccattgaaatctatgaaaggccaaattgtatgtgattttatggtggatcatcatgtagatatcgcttatgagggagaggttttcttagttgaagttataccttggaagatttattttgatggttcttcttgcaaagaaggtcaaggtataggggtagttttgtttttacctaatggcatgtgttatgaagcattggttcgtttggagtattattgtacaaataatcatgccgaatataatgctttattattcggctaacaagttatggagatggttggagctaagtacgtggaggcttttggtgattcggaattggtggtgcaacaagtcgctggagtttataaatgcttggacggatcactaaataggtacctcgattcatgtttggatattattgccaattttgataattttgctattagacatattgctaggcgtgataattctagagcaaatgacttggcacaacaagcatctggctataatgtgaagaagagaatatttctagtattggaagagtcggagcttgattttaaacctttgtgcgaaattggcaaaactggggaccaggggtggtctaaccggcattgcgtggccggtttgactggtgaccaggggcggtctgaccggctacatgccgccggtctgaccggcatccccgagcggtctgaccggccctgtgtggccggtctgaccggttctgggcagagcgctggggggcacgtttcaatcaatttagaggttgaattaattgtaaatttggacatttgtacccaggaagagaaagaagattggagaattcctttgatttgatatttgaaagatcctacacttaaggttgattggaaaatttggcggcaagcgttcaaatacactttgtttggtggagagttatatcgctgaaatatagattgtgtcttgttaaagtgcttagatgaagatcaatctaaagtggctatgggagaggggcataggtccgtgctagttgctacggaatacttcaccaagtgggccgaagctgtgcctttgaagaacatgactcatacggaggtaattgactttattttgaagcatattattcatagattcggtatttcgcaaacattaactatggaccaagccgagtcgagtaataagacattgttgaagttagtgaaaaagaagattgaggaacacccaaagaggtggcatgaggtgctttccgaagcattatgggcgcataggatatctaaacatggtgccactaaagtgactccttttgagttggtttatggtcgagaagtcattttaccggtggaggtaaatcttggttctcttcattatatcaagcaagatgatttgtcaagtgaagattacaagacgtttatgggagataaccttgatgaagtcattgacaagcgcttgaaggcattgaaagagatagagaatgagaagaaaagggtggccaaggcgtacaatataagggtgaaagcaaagttgtttcaagttggagatttggtttgacagacaattttgcctttgggtactcgatccaaggagttcgattcacgttgttcatcgaaaaggcaggggggcatgtgtttacaccaaaatttggcaccaagaattaaaataggaaaaattgccagaatttggaaatctaccggtttcctccgagtgggctggtctgaccgccgtgtgttgggcggtcagaccgccagttgagggccggtcagactggcggtgtgtggccggtctgaccggcaggtccgagtccgactgtgtttcgtcaggtctcgaggtttccttgctcgggaaggcatgtttcaggtttcctttagtttctatcccaagttggacatggaggagggcctgtaga

SEQ ID NO: 26025 - DNA, 1953 bp, Oryza sativa
  Clone ID: PAT_MRT4530_30855C.1
atggcgaagtcgtctcccttcgacatacactcttcgccttacatccttcgcccaagaggtctttggctctgcgaggcacccgcgctattctccgcccttcgcggtctttgctccatagtcttcaccatggggggcttcgccccaaccgatcttgacgtcttaggcttgaatccttactggtcgcatggtttcggcaggtttggtcgaagggcctcatgccataccgccaacaagcccctcacgggcaagggtgagataggagcttcggccgagaccgtgcagaccatgtggtatgatgacggcgagctggcgaagttggtcagctctggggtgttggttgaggggcaggctttcgcccctgggaaggccgtggtaccgaagcccgtcgacaaccagacggtggtgttcgccggcttttttgaggcggggcttcggtttccgtgcaacatgttgttgccggagatccttcaccttttccagatggcgaggtggttctatcacaccatccccttcgaggctgggtccgagtcggcgaaggccctccgatgtcggcgcatggtgattgcgccgaaccggaaacccaagatcgccgtggacggcgcaatggaggcacggttcgccttgctacgcaaggtctgctcccgcctcagctgccgcgacttggtggaggagttctgtatgcttcacatttttcccctctccctgtcgtggcaagtcacggttgaccaagacgaagaggtcgacggtttgccgaagctggttcttcctgaggggacgaatgtgttgactctcgatcaggccgacgctgaagcctggaagatgatcggcgatgtgtcggtcatcgagtacagccagctgctcacacgacaggctgccggccgacgacgatgcagggccttcgcgaaagggacgcgtggacaagtgaaactggcccctagaaagcgatgggtccctgcttgctccgattctgacgccgacgacgaggatgacgtcgaagagcgtgacgacgaggaggaaggggaggaagaagagggggcggaggctgcggccggaaaggctgcgaacgaggcggttgaaaaccgcgccgagacccctggctacactcctactccaagtccagggcataacgagaccggggtggagtcgaatagctcccaccttgatcgaaaggatttggagggagcgaaggtgctggttgcgttttcggcgggcaaggtggcgaagggggtagtccggaaccatcttcgggccaaggatgatgagattggccgcaagaatttggagatggaggccctcgccaacaccctcaaggaggcaaaggtggaaaacaagcgactccaagccgaactggagaagggaagagaggctagagctgaggtcgatcgcctcaaggccgagcttaaaaaggaaaaagcccattccgccgcgctaaccgactattacaatcttactgagccgaagatagaggctcttcgcctggaggttagcaaggctgaggcaagcgctgcagaggagtcgcaacggttttcgtgggagatggcgaaagccaccgagtccgcaaaaaggcatgccaaactctccgccttgccctttccgacatgggtgcgagggtgcgaggagtccctgccaaagatgcctctatctttgacttttcggagtggacgcaataggccggtggtgcggtttcggactacgccactgcgtacgtttggctgtgagcatgtcgccgagttccctaactatgcgaagggggactgggaggttagtgcacaggacgtttcgcctacgctccatgcgtggcagaagcagttctggcagaaggatggccgatccactgctaaggcgcgccttttggagcaactggcgaaggccgaggcggcagaccaaggcgaaggcaaggatgcggcagaaggagggggtggaggcgatgcccaggatcacccagagttgtga

SEQ ID NO: 26026 - DNA, 358 bp, Oryza sativa
  unsure (1)..(358): unsure at all n locations
  Clone ID: PAT_MRT4530_30856C.1
cngggctgcaggattctgcacgagctcgtgccgaattcngcacganatcgtcagaaactcatgacatcctctgctggtcagggatcatctcaaaattctgaatgttcagaagacggccaccgatgcaactgacnaaaactttcttcacagctaactcatctaccttatccttgtttttttttccctggtttccattctctcctacaccctgatgtgttccanattgatgtgcccctccctgactttgtatgttcatgttgtaatttgtgaagcaacccanaattgtacgtgttttgttaacttttgagggtaaaaaaaaaggtacttaacggcgaaaaaaaaaaaaaaaaaaaaaaaa

SEQ ID NO: 26027 - DNA, 2430 bp, Oryza sativa
  Clone ID: PAT_MRT4530_30857C.1
atggctcctcgaaagccaaaccccgcttcggcgaaagggcccgatcccggccggattgacaacgacaccacggcctttttggtgatttctctcatagatgatggcgagctggtgaagttgacggtggtgaccccggccggaacaaagaagacgatgttcgggagcatgaacttcaacgttcgccccgagcactccgatctctggccggtgaatgctgccatgtcgaagtgggatcgccactggatggcgaggtggttctatcacaccatccccttcgaggctgggtccgagtcggcgaaggcccttcggtgtcggcgcagggcgattgcgccgaaccggaaacccaagatcgccgtggacggcgccatggaggaacggttcgccttgctgcgcaaggtctgctcccgcatcagctgccgcgacttggtggaggagttctgtatgcttctcattttcccctctcccattcgtggcaagtcgcggttgaccaagatgaagaggtcaacggtttgccgaagctggttcttcctgaggggacgaacggtgagattgcgctttcgctatgcgcttatgtgtttcgctatttttcctggctcgacgcttaatatggctacaccttttattttcacagtgttgactctcgatcaggccgatgccaaagcccggaggatgatcggcgatgtgtcggtcatcgagtacagccagctgctcacacgacaggccgctggtcgggtggaccgggtttacgacggcgaactgcctccccgggcgaacccccacaaggccgacgacgatacagggccttcgcgaaagcggacacacggacaagtgagactggcccctagaaagcaaagggtccatgcttccttcaattctgacgctgatgacgaggacgacgtcgaagagcgtgacggcgaggaggaaagggaggaagaagagggggcggacgctgcggccggaaaggctgcggacgaggcggtcgaaaaccacgccgagacccctggctacactcctactacaagtccagggcataatgacactgggggggcaaaggcgctagttgcgttttcggcgggaaaggtggcgaaggggtgtccagttaagaaggccgccaagaagaaaggactcgtcgatgttgctcgtgtttttagcgacgacgagtcttctgacaaatccccgacttcacccaccggtcgtagcttagatctttcgaccgcccccgttcttccgatcgacgctagcggagcgggtggcagtgccgccgccagggcctcagcctccactgatcgtgtcgtgaaggctgcagctagggtttttggaagccctttgcgtcagccgattgtttcgctgctagtgaagccgaaggggaagggggcggccgtcgaaacatctgcccctgaatattctctcgcggcgccccacttcgcccctggcgatttcgagacccgggcggaacttattccctttgttgagggggtaagcaaccttgtctctcctgtcggcactctgagcctattcaccgagctgaatgagttcgacgaagggtattctgctattaaaagcttggcagttcggattcttgcggctcactgttcgatagagcgaaccgtgcgggcccgtcttgacagatttaggatacatcttcgagccaaggatgatgagattggccgcatgagtttggagatggaggccctcgccaacaccctcaaggagaaaggaagagaggccagagctgaggtcgatcgccttaaggccgaactggagaagggaagagaggctagagctgaggttgatcgcctcatggccgagcttaaaaaggagaaagcccattcggctgtgctgaccgactattacaatcttactgagccgaagatagaggctcttgacctggaggtcagcaaggctgaggcaagcgctgcggaggagtcgcagcggttttcgcgggagatggcaaaggccaccgagtccgcaaaaacggtgtgccaaatgctccgccttgccctcttcgacatgggtgtgagggtgcgaggagtccccgccgaagatgcctctgcctttgacttttcggagtggacacagcaggctgctggtgtagtttcggactgcgctactgcgtacggtgattgctgtgcacgtgtatcggcggccttcactatgggccttctgcaccagtttggctgtgagcacgtcgccgagttccctaactatgcgaagggggaatgggagggtgttcgccgaaaattgtgcactgccccctctgggaattggcgaagcaaaaacgagaaattcgtggtgttgaagggtctgccaaaagtgcgatgcccgtttcggcctatttatcgcgagatgtgcttcgactctcaccccctccaggagttcgagcgacacctcgcgcccctcttcgccccaagagaacatcacccttggtga

SEQ ID NO: 26028 - DNA, 594 bp, Oryza sativa
  Clone ID: PAT_MRT4530_30858C.1
atggagaggaggagggcgccactgccttctccaccgccaccgccgccactgacgtctccaccgcctccgccgtcgtcggatggagaggaggagggcgctgctgccttctccaccaccaccactatcgctgccgtgggaagccgccgtcgccacctcccgggctgtctcaccactgccgcctcccctcccgccgccaagccgccgccaccacctcccgccagatctggcggaggggagggcaccgtcaacaggccgtcggaccaccgccgcatcccctcctaccgccgagccgccaccgccaccttccctcccgccagatctggcggaggggagggtgccgctgccacctcccgagccgtcggaggaggaaaggaggagaaggggacgacagagagggggaggaggaggagggcagtggagaggggaggagggggagggcagtggagaggggaggagggggacggtggagaggggagagaagcgagaacgctcggtgggggagagaaggaaaggataagatcggtgtggttgccggttggccttatctctttcagtgggccatgctacctcggctcggctgttggctcggcttga

SEQ ID NO: 26029 - DNA, 2358 bp, Oryza sativa
  Clone ID: PAT_MRT4530_30859C.1
atggctcctcgcaagccaaaccccgcttcggtgaaagggcccgatcccggcctggttgacgacgataccaccgtctttttggggatttctctcgtggatgacggcgagctggcgaagttggtcagttctggggcattggttgaggggcaggctttcaccccggggaaggcggtggtaccgaagcccgtcgacaaccagacagtggtattcgccgtcttttttgaggcggggcttcggtttctgtgcaacgtgttgttgccggagatccttcgccttttccaggtggagctcccacagttgagcccgtcggtgctagtccggatcgccatcttcgactgggcgtgccggacctccgggtttgagcctagcgccgaactcttcggtgccatatttttcgccaccgtgaattcgaaaacgatgattaccccggccggaacgaagaagacggtgttcgggagcgtgaactttaacgttcgccctgagcgcttcgatctctggccggtgaatgctgccatgtcgaagtgggatcgccattggatggcgagttggttctaccacaccatccccttcgaggctggttccgagtcggcgaaggccctctggtgtcggcgcagggcgattgcgccgaaccggaaacccaagatcgccgtggacgacgctttggtggcacagtttgccttactgcgcaaggtctgctcccgccttagctgccgcgacttggtggaggagttctgcatgcttcgcatttttcccctcttccaatcgtggcaagtcgcggttgaccaaggcgaagaggtcgatggtttgccgaagctggttcttatttttgtagtgttgactctcgatcaggccgacaccgaagcccagaagatgatcggtgatgtgtcggtcgtcgagtacagccagctgcttactcgacaggcggccggccgggcgaaccgagtttatgacggcgaattgcctccccggcaccacgagactggggtggagtcaaatagctccccccttcatcgaaaggatttggagagggtgaaggcgctagttgcgttttcggcgagcaaggtggcgaaggggggtccggttaagaatatctccaagaagaaaggactcgtcgatgttgcttgcgttttcagcgacggtgagtcttctcacgaaaccctgacttcgcccgctggccgcagcttggatctttctaccgctcctgttctttcgatcgacgctactggagcgggtggtagtgccgccgccggggcctcagcctccactgatcgggtcgtgaaggctgtggctagggttttcggaagccctttgcgtcaaccggttgtttcgccgctagtgaagccgaaggggatgggagcggccgtcgaaacatctgcctcggagtattctctcacgacgccccacttcgcccctggcgattttgagacccgggcggaacttattccattcgtcgagggagtaagcaaccttgtcttacctaccggcaccccgagcctattcaccgagctgaatgagttcgacgaagggtattccgctattaaaaacttggtggttcggattcttgcggctcactgttcgacagagcaaaccgtgcgggcccatcttgacggatttaggaaccgtcttcgggccaaggatgacgaaataggccgcaagggcttggagatggaggccctcgccaactccctcaaggaggcgaaggccgaaaacaggcgactccaatccgaactggagaagggaagagaggctagggccgaggtcgatcgcctcaaggccgaactggagaagggaagagaggccagagctgaggttgatcgcctcaaggccgaattgaagaaagaaaaagcccattctatcgcgctgaccgactattacaacctcactgagccgaagatggaggctcttcgcctggaggtcagcaaggctgaggcgagcgctacggaggagtcgcagcggttttcacgggagatggcgaaagccaccgagtccgcaagaacggcatgccaaacgctccgccttgccctttgtgacatgggtgcgagggtgcgaggagtccctgccgaagatgcctctgccttcgacttctcggagtggactcagcaggctggtggtacggtttcggactgcgccactgcgtacggcgattgctgtgcgtgtgtatcggcggccttcaccatgggccttctgcaacagttcggctgtgagcatgtcgctgagttccctaactatgcgaagggggactgggaggcacgccttttggagcaactggcgaaggcagaggcggcagaccagtgtgaagaggaggatgcagcggtcggagggggtggaggcaatgcccaggatcacccagaggtgtga

SEQ ID NO: 26030 - DNA, 363 bp, Oryza sativa
  Clone ID: PAT_MRT4530_3085C.1
atggtgggcgccaacgcgtctctgctgctggagctggagtccatggtggcgcgacgtttggaccaggccacactaggcgtcgtgatgataccgtgcacggcgctgctcgacgtgccgctggtgatgtgcctggtgcgcggcttcctcaaggacgccacaaggatggcgaggctggtcgacgcgtacctcgttgagtcggcgctcgaggccaggctgcggcccgctgagttcgaggagagctcacccgcgccgtctgatggcctgaaatgctatgatcttgttgaagggaagggtccaactgctgtaaagggctcaattgtgcaggatgcctcgattgggtttgctcagtacgtccaagtctga

SEQ ID NO: 26031 - DNA, 361 bp, Oryza sativa
  Clone ID: PAT_MRT4530_30860C.1
ggggggaagcccggcaataaaacattggtttgtttttttaacgataaacccccgaaaccgggtttttttttggggaagccctccccaaaattttgaaaaagttctgaaaccttaaacattatacccattcttgggaaacttgggtgcccaatgacccctcccgaaaatttttaattttgaatgcccttgacggttttttttggtgaaaaggcattttttcccctccttttcttgggggggcttttttcattaacagccaatgggaccgcccttgccagccttgggttttttaaaacattaaactttttatttttacggggagtttcccccctttctcggttgttttcctttttcccaaatt

SEQ ID NO: 26032 - DNA, 874 bp, Oryza sativa
  Clone ID: PAT_MRT4530_30861C.1
gaggaaccagcttcagcaaaccgtcgacctcttcgtcttggtcaaccgcgacttgccacgaccgggagaggggaaaaaagcgaagcatgcagaactcctccaccaagtcgcggcagctgaggcgggagcagaccttgcgcagcaaggcgaaccgtgcctccatggcgccgtccacggtgatcttgggtttccggttcggcgcaatcgccctgcgccgacaccggagggccttcgccgactcggacctagcctcgaaggggatggtgtgatagaaccacctcgccatccagtggtgatcctacttccacatggcggcattcaccggccaaagatcggagcgctcggggcgaacgttgaagttcatgctcctgaacaccgtcttcttcgttccgaccggggtaaccatcgtcttcgaattcatggtgcaaaaaatatggcaccgaagagttcggtgctaggttcaaacccggaggtccggcacgcccagtcgaagatggcgaaggatctccgacaacaacacgttgcacggaaaccgaagccccgcctcaaaaaagacggcgaacaccaccgtccggttgtcgacgagcttcggtaccacggccttccccggggcgaaagcctgcccctcaaccaacgccccagagctgaccaacttcgccagctcgccgtcatccatgagagaaatccccaaaaaggtggtggtgtcgtcgtcaatccggccgggatcgggccctttcgccgaagcggggtttggcttgcgaggagccatggtgaagggtgtgtgcagtggcgaacaaaaagaaccgacggaagatctaaggggtcaaggggcaccatgaaaggaaagaacggcggaagaaagcgcgcgcggtga

SEQ ID NO: 26033 - DNA, 699 bp, Oryza sativa
  Clone ID: PAT_MRT4530_30862C.1
atggcaccctccatctcctccacggctccctccctctcctcctggatcccttcctccccgacacccttgtccaccctggtgcccctcctccccgacgctcctccatctagtgccggcaccatctcctcccaggcacccctgaccaccccggtacctctcctccgctgcgccctctccggtgacgtcccccactttccaaatcaggggctaccgctggagttggaggcattttttggggctgcaacatggcttgaccctaggtgggctaggcaggcgcctccaatccagccacagaggccagggaagattcttgtgtatgaaaggcctgttgaaccgtcatatgaggctgtggtccaagaaggcctggtccaccagaggatgcagaagttatgcctgggtggtgaagtgagggctgaggccgtggatgaagttgaggacaagggtggtgggagcaccgattcttgcgcgggtagcgggatcgtcagggccaaagagatgcctagtgcttgtgtcgatgacgccatgatggcatcttgggccacctatatatgccctggcgagggtggagaggaggttgtcgttcttgccagcggcatgggcagctgcgagcaccgtgatgaggttggccactgtgtcctaggtaaggtaaggaggagggggaacacagtcgatggtaggctgtggagaagccatggatga

SEQ ID NO: 26034 - DNA, 1473 bp, Oryza sativa
  Clone ID: PAT_MRT4530_30863C.1
atggcgaggtggttctatcacaccatccccttcgaggctgggtccgagtcggcgaaggccctccgatgtcggcgcatggtgattgcgccgaaccggaaacccaagatcgccgtggacggcgcaatggaggcacggttcgccttgctacgcaaggtctgctcccgcctcagctgccgcgacttggtggaggagttctgtatgcttcacatttttcccctctccctgtcgtggcaagtcacggttgaccaagacgaagaggtcgacggtttgccgaagctggttcttcctgaggggacgaatgtgttgactctcgatcaggccgacgctgaagcctggaagatgatcggcgatgtgtcggtcatcgagtacagccagctgctcacacgacaggctgccggccgacgacgatgcagggccttcgcgaaagggacgcgtggacaagtgaaactggcccctagaaagcgatgggtccctgcttgctccgattctgacgccgacgacgaggatgacgtcgaagagcgtgacgacgaggaggaaggggaggaagaagagggggcggaggctgcggccggaaaggctgcgaacgaggcggttgaaaaccgcgccgagacccctggctacactcctactccaagtccagggcataacgagaccggggtggagtcgaatagctcccaccttgatcgaaaggatttggagggagcgaaggtgctggttgcgttttcggcgggcaaggtggcgaagggggtagtccggaaccatcttcgggccaaggatgatgagattggccgcaagaatttggagatggaggccctcgccaacaccctcaaggaggcaaaggtggaaaacaagcgactccaagccgaactggagaagggaagagaggctagagctgaggtcgatcgcctcaaggccgagcttaaaaaggaaaaagcccattccgccgcgctaaccgactattacaatcttactgagccgaagatagaggctcttcgcctggaggttagcaaggctgaggcaagcgctgcagaggagtcgcaacggttttcgtgggagatggcgaaagccaccgagtccgcaaaaaggcatgccaaactctccgccttgccctttccgacatgggtgcgagggtgcgaggagtccctgccaaagatgcctctatctttgacttttcggagtggacgcaataggccggtggtgcggtttcggactacgccactgcgtacgtttggctgtgagcatgtcgccgagttccctaactatgcgaagggggactgggaggttagtgcacaggacgtttcgcctacgctccatgcgtggcagaagcagttctggcagaaggatggccgatccactgctaaggcgcgccttttggagcaactggcgaaggccgaggcggcagaccaaggcgaaggcaaggatgcggcagaaggagggggtggaggcgatgcccaggatcacccagagttgtga

SEQ ID NO: 26035 - DNA, 2562 bp, Oryza sativa
  Clone ID: PAT_MRT4530_30864C.1
ctaccttgatgtgaggtcatctgcgtgtctaatccccgcattattggacaacgacgggacgagggtggaccgtagaaaaactgaggcaagcgcgtcgcggtcgcgccatgagcgaaactcatcgccaaggtttggagacgcgacgtactccggtgcctgcgttccgatcaaaatagtgttccctccgagccgctgctgaaagaagagcagcacggccagcgccgccgccccgcacggtatcacgacgtcccacgcgacgctgaagagcccgtcacgaggccccgcgtagacgtcgatgtaggacgggatccacctctgcacgtacccccgagccctgagcccgtcgtacgcgtgaggcgccgcgcggatcgcggtgccgcccacgtagaaccacggcgagatggcgttcaccctggaggccgagaacgcgttggacacgatctggggcagcaggaacccgtccagtatcaggccggcgtaggagaggaggtcgtccgacagcggcggcggcggcggcggcggcacgtggatggcggacttcatcatggtgctgagcctcagcacgaactcgttcagctcgagccaccggcggccgcccctcgccagctcgatgaagtgcctgtttctgctgccgccgtcgtccacgaacatggcctcgtagttgaccacgagagggatcatgtaacccagggccaggacggcgagcatggtgatcgacgtggccgggagcgcgtcggggttcttcctggcgtggcgcagctgcaggacgaggaagacgcaggacagcgtcatggaggtcaccagcatgatgcgctccgtgtccaccctcgagatcgcctgggccgcctctatggcgggctgcgcaccatacgcagcaaaaccaagcgtctcgaagaagagggtgtcactcttcttcctcaggctgctgattgacccagtgccgtcctcgccgcccagcgcagggagttgcacggtcactaggatctgacagtccgacgaactgttgatcactcggcaacctaccatgcacagggtacctgacttggtatcataaacgccttccgccgagacgcgccaccgatcaggcacacgcgacacattccacgccctggatgaattcacgcgacgatagaggtggatatcgaattcgtagctgacactcaggagcctctgcttgatcatctctgccacagcgtggcgagagaacgcgtcgtcggccgtcagcgtgccaccgtcaaccatggcggaaccgagcgtgaccggcgaggcgtacccgtatccgccgtgtgtcgtgatgtacaaactgaacgcgaagtcccggtaggagtagttccccggaaacctgccgttcctctccttgctcagctctgggttggagtggtagtagttcttggcgtcctccactctggtgtaatggtacttgatgtcggagagatcgcccctgaagccagttcttgacaccgatatcgcgccggacattttgttcgtgtcgccgtcgtcgtcgctcctcgtgttccggatcatcccggctacgaagctccgttgctggatcgaccacacggccgggaaccagaagtggatccggatgccgcagtcgctctcgcgcaccgtcgagcgcacggtgcggcacgccctgaggcagagccgtccctgggacggtttccagaacccgtcggcgacgagcgcctcgtccccgtcggcctggaagccacgcctccacggcgcttcgtggatgcctagaagaatggcgtccgatgaggcgtcgtcgaagtcgaacaccatgtacgcgcgcacggcgccgttctcgccgcagtaaatctcgctgatgtgcatgctgcgaaggcgttggcgcagagggaagccgctcggcgcgcgtccctccgcgtactccatggtgtaggagcctcggagcagcgccccgagacggtcgcacgtgaagtttccgtcgaacaccttgctctcggaccgcacggcgccgggcggcgtcgggcaggaggcggcctcaccgtacttgtagtcaccctcggcgtacgcaacgagggtgacggcgccgaagtccgggccctcgaggcggccggtgacgaagggccgcgtgagggtggcggggcgcggcagccggaggcggagggcgacgtccgggatgatgacgacacccaagccgtcgtctcttgcgcgggagcctgacccgaccatgcagagcgccgccgaggcagagtcgttggagtagtaaccttcgaggtcgaacgacacggagtgggcgctaacgttggtgcgccacgagcgcccgccgaagaagcggtagccggagagggtgaccgtggcgacgaggtgggtgatggcggggtcggtggtgcgggccgcgcggcgagtgaagaaggagaaggaacgtgggaggcggtggtcgtcggaggcgaagaggagcttgtcgccgccggagaagtaaccgtcggagggcaagggaagattgagccggtccgcgatggactggtgttctccggcggtgacgacgaggtcggcggcctcggcggggaagctgcagagagaggagtacgacgtggccat

SEQ ID NO: 26036 - DNA, 306 bp, Oryza sativa
  Clone ID: PAT_MRT4530_30865C.1
atggaggatgaaatgatctccttcttccatgatggcctccgtctcatgattctcggtaatgacatgaaggtcatcagaaccgcaatgtcgacaatgttatctgaagtccactatcaaggacgtcaaaggcagaggttccggagacctgctctctcgattgccggtgcacactgcagcggcgcgctcacggtgcgggcgcccggcacaatgctcgaggaggatacacggttggatgatgacttggcgggggcagtgtctgagggtggcggccttggcgcggaggcggcggtggctgagggcgggtga

SEQ ID NO: 26037 - DNA, 318 bp, Oryza sativa
  Clone ID: PAT_MRT4530_30866C.1
atgaagaccatagtcaagcgtgccatggacataccggagaatacgcttgagggcggcaaggtgagaatccctggaatcgtgtatgtggagacatacttgttggacaacataagagatatcaggctgtgtgaatgtcagatactgatcagcaacaggcgtgccatcagaggaggacaacttggaattagtatcaacaagagtggaacaagacttgcattcgtacatgtcagcacgctcaaggatctcaatgttgtattaatgctgactcaaaagaagcccagtaacagtgatcccccaaaaagtgatgtaaactgctaa

SEQ ID NO: 26038 - DNA, 578 bp, Oryza sativa
  Clone ID: PAT_MRT4530_30867C.1
acggacaatcgtttattatatatacagaagaaatgcatattctcattggagttcatctcaaatgtttctgccttcatatatgtacagaagaatttcagtcacacaaatgaggtaaactgccatcatatacaggtagattaaacatcccgaagcaagtagatcaatggtaatcttaacaattcgtcgattcaacttcaggttgtcagcacgtggcagtaatctttcgttttcatgactcttagtacactgcaagagtaccttaacgttggaatctcggtccactgctcctcaacttttaatcttcttttttgttgggtgttttctggggttcatgtcttcatcgatatatttacaaatacgagagacataaaaatgctaaagataacgaagccatagaagaatggataaataatcagtttggaagagaagaaagccagcgctctacaaaattcttgccaccggaaacgttgccgtcggcgagcctaccgcggccgggctcctcgacgcggcaacggccgtggcggtaacacggcacgaggacggcgaagctgccgtcggaatccccgtcgctgtggagc

SEQ ID NO: 26039 - DNA, 2040 bp, Oryza sativa
  Clone ID: PAT_MRT4530_30868C.1
aactttctttgacataatggaacatcttcccttgcaccttccgccgccgtcctctccgccgctatctccaccgtcaccgcctcgacctctccgccaccctctccgccgccatctccgccgccctctctgccgccatctccgccctctctgccgccctctccaccgccgcctcgacctctccaccgccgccctcgccgcctccctctccaccgccgccgcctcactcactctctcgaccgccgccgtcctctccgccgtccgtccccgacctccccgacaccgggatccacgacgccggccacctccacctccacgacgccctctctgccgccctctccaccgccgcctcgacctctccaccgccgccctcgccgcctccctctccaccgccgccgcctcactcactctctcgaccaggccgttagctccccaccacttgtcaagggctagaagtgtgaacgcggcaaggggaaggtcggggagttggcgccggagccaaaaaggggcaaggctgcgacgtcgatgccggtgagcaaagcggggaaggtcgtgagggcgccagcccaatttgagctaggcatgccattggtggaggacaatgtgttagcctccaaagattatgatttcactgaaatcaccaaggccttaaatatggcttggggcccatatgtggaaaagggtggtaggcacaaggagggcaaggacgaactttatcatgacatcaagttcgcatgcgcataacagatcggaaaccaatatctttcgacgagacttttagcccggttgtcaaaccaaccactgtttgcgcggtccttagtctcgtcgtctcttgtcgttggccagttcatcaacttgatgggaagaatgcgtttttacatggcatatttcaggagacagtatattgcactcagccatcagattttgtggatcccaccaagctagacctggtatgtcgcctcaaccggtcactctatggtctcaagcagaccctccgtgcttggtacagtcaatttgccagctacttgctcactcttgggtgaagccaaatccgacacatctctatttcgcggccctgatttgttttacctgctactgtatgtggatgacattcttctgactaagtcttcataagctctccttcgttggactatccaggctttgcaatctgacttttctatgaagaaccttagcagtttacatcactttttgggggatcactgttactgggcttcttttgagtcagcattaatacaacattgagatccttgagcgtgctgacatgtacgaatgcaagtcttgttccactcttgttgatactaattccaagttgtcctcctctgatggcacgcctgttgctgatcctactgattaccgcagtcttgctggagccttacagtatctgacattcacacagcctgatatctcttatgttgtccaacaagtatgtctccacatacacgattccagggattctcaccttgccgccctcaagcgtattctccggtatgtccatggcacgcttgactatggtcttcatcttcggcactcttctacggctgacttagttgcctactctctgacactgactaggccagttgttctgacactcgcatgtctacctcgggatatgttgtgttcctgggagataaccttgtttcttggttgtccaaagtgtcaacacaccgtttcccgttccagtgccaaagcagagtatagggtcgttgcaaatgttgtggttgagacatgctggcttcaccaactactacatgagttacatgctccgtcatcctgagctactctggtttggtctactgtgacaatgttagtgttgtgtatctattgacgacccaggtgcaacatcagcggacaaagcatatggagattgatcttcatttcgttcacgatcgtgttgccgtcagttctgttcgagtgcttcatgttccgatgacgtcacaatatgcgaacatattcaccaagggattacccagttccattttctcggtgtttcgttccagtctaaacgttcgtccagccgacgtt

SEQ ID NO: 26040 - DNA, 801 bp, Oryza sativa
  Clone ID: PAT_MRT4530_30869C.1
atggagaggacattgattgttcgtgaatattttacggacatagatgaaaatgattgggtaaacttctattctactgaggagtacagctaccttttcaagatgctagcgaccgaccaaaaggaccatccaaagatggtctcagttgcaaatgatcttgcagtagtattgggtggatcattgataacagccaatatgatatctgacatgcttagaaggaaccataatgttcacttctggcttagaatattgcgacgcttcgagaggatggtgaagaacaactttttgaaatatggtgagcatccgaaagatatcattgagaaagagcagccagtagatagcaccgaatttatgacatcttatcctactcacgcctgcattcttgtaaagccacctcgagtagaaagggatgatattccaaactataagaaaccaatttcccgcctccttagaaccctagcgccgccgccaactcctccttcgccgccgtcgtcctccctcgccgccaccgccaccgagaccgccaccaccgccgccgagcccgccgcctccactgagcccgccgccaccgccaccgagcccgccgcctccaccgagcccgccgccaccgccaccgagcccgccgcctccaccgagcccgccgccgccgccaccgagtctctacaccgaccggcgtcggccttcctcgtcgtcgccgcctgcctcttcaccgacacgaacagcagcccccaccgaggccggcgacgtcggcccgatgccgacctccccgaccggcatctacaccgaccggcgccgccgccgtga

SEQ ID NO: 26041 - DNA, 270 bp, Oryza sativa
  Clone ID: PAT_MRT4530_3086C.1
atggcgatcaagaggaccaaggcggagaagaaggtggcgtacgacaagaagctctgccagcttctcgacgagtacaccaagggcgactccatcgtcctcatggggaagaacaccctcatccgccgctgcatcaaggtgcacgccgacaacaccggcaacaaggagttcctcgagctcatgcccctcctcgtcggaaacgttggcctcatcttcaccaagggtgacctcaaggaggtccgcgaggaggttgccaagtacaagttttgttga

SEQ ID NO: 26042 - DNA, 1086 bp, Oryza sativa
  Clone ID: PAT_MRT4530_30870C.1
atggctgctggttttgctctgaaccatttccagctaattatatataagggtggctgttctgagatgggaagcaagctttttagagagctgcacaaaaaacacataaatacttcagatggaggtagagtgaaagagtttgttgtattcctagccagatgtgaatgcatgtgtcgccgaccctatgatgcttacctttacaccgataattgtgtgtttgctcatcatgtcgagaagcaggaaattatcaattttttattgcaaaatccaggtaaccagggtgctcgtcttgttcttccaatcattggtggttgcagggtaggaaagaaatccttgatcagccatgtctgcaatgatgagcggatcagatcatacttttcttctattttgtacatcaatggagatagcagctgcggatcaatagcacatgcaaagttcaaaatggagaggacattgattgttcgtgaatattttacggacatagatgaaaatgattgggtaaacttctattctactgtaagtcagatgacagctggaggaagcaaagtggtaatcataagtaggattgaaaatcttgcaaggttcggaacagcaaaggcagttcatctaaatagtttatcacaggaggagtacagctaccttttcaagatgctagcgaccgaccaaaaggaccatccaaagatggtctcagttgcaaatgatcttgcagtagtattgggtggatcattgataacagccaatatgatatctgacatgcttagaaggaaccataatgttcacttctggcttagaatattgcgacgcttcgagaggatggtgaagaacaactttttgaaatatggtgagcatccgaaagatatcattgagaaagagcagccagtagatagcaccgaatttatgacatcttatcctactcacgcctgcattcttgtaaagccacctcgagtagaaagggatgatattccaaactataagaaaccaagtatatcgttcaaagagctttatttcatgacaagaatggatctacaacaactacaaggaagcgccgaagcaccagttgatttggtaacacatagtgatattttatag

SEQ ID NO: 26043 - DNA, 807 bp, Oryza sativa
  Clone ID: PAT_MRT4530_30871C.1
atggaggcaraaggcggaggtggcgccgtcscccggcgcggtgctggargcggargcggcaacagcgcagtggaggtaggaagtggagggcaggtaraggcaggaggcagcgccggcgcagtscggtggargcaggaggcggagggcggaggcggcsccggcgcgggggaggtagagggcagaggcggcgagcgcggtagaggcaggaggcggaggaggcggagagcggagtgcggcacctgtggctgtgagggaggaggtgacgcctgtgaccgtgagtggaggaggcggcgcctaggcgtcgccggcgcggtgaagggcggaggcgtcgactgcggcgcggtggaggacggcgtcggccgctgcacgatggaggacggcggcgtcagccgcggcgcggtagaggacggcggtggcggccgcgcggtggaggacggcgtcggccgcggcgcggtggaggacggcgtcgtcggccgcggcatggtggaggacggcggcggcggccgcgcggtggaggcagaggcggcggccgcggcacggtgtagggtggaggcgggccgcagcgcggtggagggtggaagcggcggccgcgcgggagagggcggaggcgacggacgcgcggtggagggcggagccggcggcggcgacgcggtggaggctagaggaggcggcggcacggtgggggcggagccggcggtgggggctggaggaggcggcgcggaggggttagaggaggaggcggcgctgtgcggcagtgatggccctggacctaaagttgtggctccggttgggtctgtggtggagtag

SEQ ID NO: 26044 - DNA, 228 bp, Oryza sativa
  Clone ID: PAT_MRT4530_30872C.1
gtctccacacctgccatggctccggggctttaaagccccgggattccttggggttggctctcaggaaagggtgtttcaaccaccctcctataccaggattggtgttttttgggtcaccacacaagaaaaccttttctggtagcctggtcccccagcaaggttccatcacactagttacaagacttgtggactataatacccgggattgtttgctgatggaatctgtac

SEQ ID NO: 26045 - DNA, 702 bp, Oryza sativa
  Clone ID: PAT_MRT4530_30873C.1
aaaccctaaaacaaaccctaccatcactgccgcacagcgccgcctcctcctctaacccctccgcgccgcctcctccagcccccaccgccggctccgcccccaccgtgccgccgcctcctctagcctccaccgcgtcgccgccgccggctccgccctccaccgcgcgtccgtcgcctccgccctctcccgcgcggccgccgcttccaccctccaccgcgctgcggcccgcctccaccctacaccgtgccgcggccgccgcctctgcctccaccgcgcggccgccgccgccgtcctccaccatgccgcggccgacgacgccgtcctccaccgcgccgcggccgacgccgtcctccaccgcgcggccgccaccgccgtccaatactccctcacaggcgccgcctcctccactcacggtcacaggcgtcacctcctccctcacagccacaggtgccgcactccgctctccgcctcctccgcctcctgcctctaccgcgctcgccgcctctgccctctacctcccccgcgccggsgccgcctccgccctccgcctcctgcytccaccgsactgcgccggcgctgcctcctgcctytacctgccctccacttcctacctccactgcgctaaatcaaattaaagcgaagtcatatgatggaaacctagagtgttattggctgaacaagtgaacaaggatatccattctt

SEQ ID NO: 26046 - DNA, 568 bp, Oryza sativa
  Clone ID: PAT_MRT4530_30874C.1
ttccgtctccgcctccgccgccgccgcctcctccatcctccagtccctccccctccacgtgtccttcgaccgcggcttctacctcctcgtcaaggcgatccaggagctgcgtgagcgcaaggacggcctcgtcgtcaccgtcggcatcggcgggccaaccggctccggcaagaccagcctggcggagaaggtggcgtcggtgctggggtgcgtcgtgatcgtctccatggaggactaccgcacggtggccggggccgacgacggcagcgacgttgacgccatcgacttcgacgccctcgctcgtaacctccaggatcttgtaaagggtaaagatacattgatgccattggttgattttcaagagaagaaacgtacaggatggaggcaactgaagatttcgccatctggagtggtgattgttgatggtgcttatgctcttcattcaacactgaggtcactgcttgatattcgtgttgctgtggtatggtgtgttcattttagccttctgtctaaagtccagcatgatatggagattcttgctcgtggactattgatggaagcatatttc

SEQ ID NO: 26047 - DNA, 672 bp, Oryza sativa
  Clone ID: PAT_MRT4530_30875C.1
atgctgagccagtccctcgtcctctcgcaagtgggggaggatacttttgggggcggcggaatggtcgagacaggtgaaatcgtcgccgacggctggcccggtgccgggctgccgcagccgtggccgctcgctcccgcccgcctaagcccgccgccgccgctcccgagggcggaggcggccagatccgcgcgctgccggcgctcccgctcccgccaggccgttcccgaggacagagaacactggatccgcgaggagaaggagaagggggaggggcgcaccgacgccgacgcacacgtgacgtcccgtgcaagggcggcaggcgatgaaggcgaagatggtgccgcacctgtcggcctccgccgctccgtcgccagcgcctatcgcggtcatcttcctccgccgcgccgtcttctccggtcgccagatccgacagcggcggcggcggatacagccgagggcgtagccgcctcgccagatccagaggggagggccgccaccgccaccgccctcccccctcccggcggagccgccgccgcgtccaccctacacggcacgcgccgcctccaccatccacctccgcctacaccggatctgggaggagggagggaagccgccgctggctccaccctccgcgcagccaccgccttgagccgcctctgccaccgtcagtag

SEQ ID NO: 26048 - DNA, 526 bp, Oryza sativa
  unsure (1)..(526): unsure at all n locations
  Clone ID: PAT_MRT4530_30876C.1
tttttttatagcaattgtatgcattgataaggactttagtgtacatgctacgttcgtagtaacattcccctcaaaatatttccttgcagcacccctgatacagctcgtcatgtagatgcacaatctttatgtcttgatgctcatagtaaataaacaaagttttcctctgccatgtcgcagtgctgagctatgtagggtcaccgatccatagcatcttcgcattaggatacttcaacagatgagctgcccttgtcttgacattctgggtgctgatgtgcgaaggtgttccagatgcttggtctctgccaccctcagctgcaccacccttgtaatgtggagtgaacacgtaggggaacaattggagggagctcctacatcacggcgtccaacggcggcggcggccgtagcgcgggtcctcaggcancacggcctttgctgcacggccanggtntccntcnanggggccggggannaaanggcggtangtngacggggnntttntcgntggncggnatttttttcnggg

SEQ ID NO: 26049 - DNA, 431 bp, Oryza sativa
  Clone ID: PAT_MRT4530_30877C.1
gtcgacagagccgttgcatccacattcgccagctggtgaggaactacgaggagaccacccaataccgattgagcacctatcctcggattaagacatggactgctactggtgagatgccttctgatcgaaccatgtgctctacctgcccttaatgagcaagcagggctactgctgctagcgaactatgaagactatgctcagcctgctgaggtttaccctagcgtgcatgcactcaaacccaataataagaccatgagcggttctatctctgaatcaaacactgttctaaatgtggctcaactaaactatgctggctggactaacacaccgttggatccagccgcattttctacctacactgcgagataagcatctggatataatttgcatgatcagattgctggtactcctgatcctgccttgggagcatc

SEQ ID NO: 26050 - DNA, 4908 bp, Oryza sativa
  Clone ID: PAT_MRT4530_30878C.1
atggcgaagggatccctggagatggaggtggaggaggtgcagcagctcaacgcctttcttcctaatataggacttgtccacttcacttggaacttggaagaagatgtctctgttgccttcctaattactgcaacatataagcagcgccacccaagtggacgagaagggggctttgcgaattgcaattttgcaatgcttcttgcttgtgattgtgacgacgatgcacaaaccgcagagaatggcaacgccccgatgctcagcaactaccgcgcccagcctgcgccaccgctcgccgagcccctcctcctcgacaagccacagcgcgcgcactggctcaggcagctcaaaccgtggcgccgcaatgccgccgacgaccacctctccgccggaatcgccatcaactggagctctgtgcgttcggcgaccaaggactggatcaccaaccccatgaacatcgccatgctcctctggcttctctgcgtcgccgtctccggcgccatgctcgtcctgctcctcctcggcctgctcgacggggcgttccccacgccggcggcgaggaaccactggatcgagatcaataaccaggttctcaacgcgctcttcacgctcatgagcctctaccagcaccccgtcctctgccaccacctcttcctgctctgccgctggcgccccgccgacgccgccgacctccgcgccgcctacttcaaggacggcgccggcccgcgccacggcgagcgcgcccacatggccgtcgtggtcgcgctgctccacctcaccgtcgcctgccagtacgtgctctgcggcctgtactgggggtacaccaagaagacgcggccggagctcgtggagaatgggttcttcgtgctcggcgtcgtcgcgccggtcgtcgccgtcgtgtacaccgtgtgcagcccgctcggaaaagacaactacggcgagctcgcgtgccccaacgccttcgactcggtgagccaacacaaatgcacgggacacgccgtggtcgagccggagtgggccggcggcatgttcgactgcggcggcgacgcgacggcgtggtggctctccctgtcgtgcaccttctgcgccttcgggtggaacatggagcggctcggattcggcagcatgttcgtgcacaccgccacgttcgtgcttctgtgcttcgcgccgctgtgggtgatgggcgtgtcggcgctccacatccacgacgtggtcatcggcgacatggtcggcggcgccggggccctgctctgcgtgtgcggcctgctctacggcggctactggaggatccagatgagagaacgcttcgggcttccggcgagcacggcgtgctgcggctcgccgtcggtgacggactacgcccggtggctcttctgctggccgtgtgcgctggcgcaggaggtgcgcacggagagcctctaccacatcgattgcgagacgttctacaagaagcttcctgttgtcgatgacgttgaagacgagaagaggctaccgttgctggcgtcacaccatgtccaattccatgaaccaccggacacgatgatcatggcagcatcagagggatcaaatgatcatgtggtgattgttcatgaggagatggttccaccggctgtacaggttgtggtggagcaagtcgtcgttgaaggtgataaatctgaagaagaatgcagtgcagttcatgatgagaagatcatgggttcgcctcttccggaatcggtggtgattgtggatgatgatgagataccggccagtttgtcggatggaagctggacggtggagaagaagcaggagcagcacaagaagcacaaggagaagaagaaggagaggctcctcgacttcctccgggcagcgccgtccaaggcgccatggttctccttctccggcgccgccttcctcacccgcctcgcctccctccgcaccacaaacaatcctgctgcttcccgccgcttgccggcgttcgtccgctccgtcgactggcgcgccctccgcgccaagtgcctcgcgtgggccaagcacccaatgaacgcggctctgctcatctggctcgccttcgtcgccggcggcgtcgccttcgtcttcctcctcatgaccggcgcgctcaactccgccgtgcccgccgcctcgcgccgccgccgatggaccgaggtggccaaccagatgctcaacgcgctcttcaccatcatgtgcgtctaccagcatcccaagctctgccaccacctcgcgctactcctccgatggcgcgccgccgacgtcgccgagctccgtgccctctactgcaagaacggcgccgccggcctgcgccgcgagcgcctccacgtggccgccgtcgtgctgctgttccacgccacgtgcttcgcgcagtacggctactgcgcgctcttctggttcttcggaagagacaaccgcccggacttggccgtcaacctctgcatggcgctcggcctcggcttccccatcgtcgccgccttgtacatggtgtacggcccgctcggccggaagatcgtgctgatcccggcgtccaccgacgacgaggagaacttgaactcgcaggtcgacgaggcgaacgcgatcgcggtgacggcgcagtgtgacagcaacagaaacagggcggtggtcgcgaagccggagtgggccggcgggctgttcgacgtcggcgacgacccgacggtggcggcgctgtcgctgtcgtgcacgttctgcgtgttcgggtggaacatggagcgcctggggctcggcaacatgtacgtgcacgtcttcacgttcgcgctgctgtgcgcggcgccggtgctggtgttcgcggtggcggcgctcaacgtccacgacgacacgctgcggttcgtcgtgggcgccgcgggcgccttgctgtccgtgctgggcctcacgtacggcgggttctggcgcgcgcagatgcggaggcgcttcgggctgccagcgcaccgctggtccatgtgcggcgggcgggccacggcggcggactacggcaagtggctgtgctgcgcgccgtgcgcgctggcgcaggaggtgaggacggccaacctgtacgacgtggaggaggacgtgctgtacgccaaaggtggcgaggaggaggaggaggaggaggcggcaatggcgcctttggagagagaaggctgcatcgtcgccgttgatgcgccgccgctaccgatgagagtcgaagagaaggactatgtcgtgcggctactcctcgccggcgtcgcccctagcaaccgcctcccgccgctcaccgtcaagctcctccacgcccgcctcctccgcctcgacctcctcgctggcctctcctcgctcctcctccgcgccctcacctcctccgcccttcacctccacgcgctccgcgtccactgcctcctccccaacccctcccacctcaccatccccatcgccctcaagtcggcctcccgccttccgcaccctctccgcgcgggcgagcagctccacgcgcgctccctcaagcttccctcccacaccaacccccacgtcctcacctccctcctcagcctatacgcaaaatgcggcctcctacatcgagcccagagggtgttcgacgaaatgccacaccccagcaccgtcccctggaccgctctcatcactgcctacatggatgctggggacctcagggaagccgtccatgtcgcaaggaatgcttttgcgaatggtatgcgaccggacagcttcacggccgtgcgtgtcctgactgcgtgtgctcggattgcggatttggcaactggggagactgtttggagggctgccgagcaggagggcgttgcacagagcgtgttcgtggccactgcggcggtagatttgtatgtcaagtgtggggagatggcaaaggcaagggaggtgtttgacaagatgcggcacaaggatgcagtggcctggggcgccatggttgggggatatgcttccaacggccacccacgagaggctctggaccttttccttgcaatgcaggcagagggaatgaagccagattgctatgcagtagctggggcgctatcagcctgcacaaggttgggtgcattggatctgggacggcaggcaatcaggatggtggactgggatgagtttcttgacaatccagtcctagggactgcattgattgatatgtacgccaagtgtgggagcacggtcgaggcatgggtggtgttccagcaaatgaggaagaaggacattattgtttggaatgccatgatcttggggcttggcatgactggccatgaaaagattgcatttgcccttgaggctcatcaacttgttgatgacatgccaatgccagcaaatgctgttatattgggtgcacttcttggtggctgcaagattcaccgaaacacggagcttgctgaacatgttttgaagcagctcattctactggagccctggaattctgggaactatgtaatgctctccaacatatactctaacagaggcagatgggaggatgcagcgaagcttagattggacatgaaagcaaaaggggtcgagaaggttcctgcatgcagctgggttgagtttgaaggtaaggtccatgaattccgtgtcggagacaagtcgcatcctctttcagatcagatttacaaaaagctcgacgaattaggattggaaatgaaaaccatgggttatgaaccaacaacagaagtggtgatgtttgatgttgaagatgaagagaaggagcacacactagtgcatcatagtgagaaactagcaattgcatttaaccttctcatcactggaccaggggagaccattagggtcaccaagaacctcagagtttgcagtgactgtcacactgcaattaaactcgtatcgaggataactcatcgggagatcattgtccgagataacaatcgatttcattgttttagagatggttcttgctcctgcaatgactattggtag

SEQ ID NO: 26051 - DNA, 202 bp, Oryza sativa
  unsure (1)..(202): unsure at all n locations
  Clone ID: PAT_MRT4530_30879C.1
ccctgcatcagctctcgccagcngcctatctgcgcacgcgctgccccaagctctcgcgcatgctctctgcttggaaatcgcgtgtgcaggatgtgatcaggggaaagagtgtgggaggtttaagaggtgaagagtatattgaggaatttgatggaattatgtaaggggagagatgtgaaatttgtatggaagaagggttggt

SEQ ID NO: 26052 - DNA, 1064 bp, Oryza sativa
  Clone ID: PAT_MRT4530_3087C.1
atggcgatcaagaggaccaaggcggagaagaaggtggcgtacgacaagaagctctgccagcttctcgacgagtacaccaaggtgctcatcgccgtcgccgacaacgtcgggtccaaccagctgcaggagatccgcaagggcctcaggggcgactccatcgtcctcatggggaagaacaccctcatccgccgctgcatcaagggaaacgttggcctcatcttcaccaagggtgacctcaaggaggtccgcgaggaggttgccaagtacaaggttggagctcctgctcgtgttggtcttgttgctcctgttgatgtggtggttccccctggcaacactggtctggatccatcccagacctctttcttccaggtgcttaacatccccaccaagattaacaagggtactgtggaaattatcacccctgtggagctcattaagaagggtgacaaggtgggctcctccgagtctgctctgcttgccaagcttggtatccgccccttctcatatgggctggttattaccaatgtgtacgacagtgggtcagtcttcagccctgaggtgctcgacctcactgaagaggacctgatggagaagtttgcatctggtgtttcgatggttgcctcagtgtccctggcaatctcatacccaactattgctgctgcgccacacatgttcctcaatgggtacaagaatgtgcttgctgttgctgtggagaccgaatactcatacccacatgctgataagatcaaggagtatttgaaggaccccagcaagtttgctgttgctgccgctgttgctgctgctgacagtggcgctgctgctccagctgcttccaaggaggaagagaagaaggaagagcccgaggaggagtctgacggtgacctgggcatgagcctcttcgactaagcccctgctgccaagtcaaaagttttgtttcagttctgaatatcaaattttgtttataatctttagcgtattaagcttgtgctagtcaagaaccatgttggacttagcgtgtatattcaacaatgttatctttattatgcaattcggttgtgcccgta

SEQ ID NO: 26053 - DNA, 4920 bp, Oryza sativa
  Clone ID: PAT_MRT4530_30880C.1
atgacgaagccgccatccaagacggaggtggagccatctaatgtgataccggtcacattggaggattccgaaggagaggaccgcaaagctatggaggagtacatcaacgagctcacacgggaggcgttgatgagggcaagcactaggactcgtcaaggcgtgattattaagcccgggccacgtcctaagctcgcccccgacttggtaagtaatgatgaggtaacacaatctatccaacaacaagtagcatctacaatagattcatctatgattgcttttaaagataagttagatgcaacttttgagggtaaatttgatgagtttttaagggttaaattcggccctcttatggccgattacatgtcaaaggataaagcctctaccactgctaaccaacctcctatagatcaaacgggtagtaaaaccgatggagcggcgcacacggccggtctgaccgggcctgacggccggtcaaaccacgacttagccgtcggtctgaccggccaaacggccgatcagaacggcacaattataccgatacaggggatcgatccgatgactaatgctagttatttgtatcatcttagaacatttgatcctcctatatctactgctgcaaataatctccaagttcccccacatgttcctaatgcttataatgatgttgctagggggtatcctcccgatactagacaaggccaatataatcatattgcggaacaaacacaacctattaggccaccaaatccaccgccaaatcaacatgggcttaataatatggaggacataattagtgagattattaggaatagattcgggattgaaactgggtattgtgctagggtttacaaaaagccgtatcctgattattatgataatgtgccgtttccccgtaattatagagttcccgaatttaccaagtttagtggtgaggatagtaagaccacatgggagcatagatttagagatgttagaaaccgatgttataccttgaatataactaatagagatttggctgatcttgcttttaatggtttaattgctcctcttagagaaagactagatggccaacaatttcttgatgttagtcaactcatgcaaagggctctggctcaagaaagccgagttaaggataataaaaaacttgtcagatcttatgacaaaaagcctaatgttaatgtgattgattaccctgaggctagtgatagtgaggaggagggtgatcatgatatatatgttgctgaatggtcatggactaacaaaaacaagccttttgtttgctccaacctaatgccgactcctcgcaaagatcggcaaagtgaggttaaatatagttttgatgtggccaagtgtgataagatttttgattatcttttacaagaaaaacaaattagattacctaaaggccatgtcataccatctcaagaagagtttaaacgccgagcatattgtaaatggcatgattctcattctcattctactaatgattgcaatgtgtttcgacgacaggttcaatcggccatagatgaaggacgattgaagttcactgatggctccaagatgaagcttgatcatgatcctttttcggtgaatacaattaatttcaatgataaaaaggtgttaattcggccggagcaagcagaatctactaaaggaaaaggagtggtcattggcgagccaaggcctaagatgatagtgacaaagaaaccggaagttagtgtttggaaggagaataagagtggcgcttcaacttctaaagcccctaggaagaccaaagtgacttttggtatgcttttggagaagtatgagaagcaaggtggtgagagggttcacaacaaggggaaaagaccaagatcacctcctagggagcgatttggtcattcaccaagacggtcgcattcacctccatatcatcatccacaagacatgtcatggggttcttatcgaatgtcgccgccgggttatccttatccttacttcatgccatggggggcaacgccgcaaattttcaatcatatgcctccaatgcaatttaaccaaggatggggaggaccgaggaggccaattcatgagcgtttctcttcaccaaacaataggcggttttatggtaagaatcgggctaataatgaaaagagggaaggaaagcgcgtcaaggtggaggcaaggacttcagaagtaattaccatcaaagtggggtctcatgatgtgccaataccttctggagatggagttggagtatcctcaaacaaaaaatccgaagccaaaaccaactcctcgcagtcggccggtctgaccaggccttctggccggtctgaccgcagccatgcggccggtctgaccgggtcatcaggtcagtctgaccgccgacccgacagtggtccgaccgatgcctcgggccggtctgaccgtgcgtcaagtgtcggtctgaccggcatgtctggccggtctgaccggtggtctacgtccggtctgatcaggctccagcgccggtttgacaggggaattgcaaagggcgatatgaaggcttcatcgtcttcaaacaagattaataggggacattatttacctcctagaacagagccgaatcctaggtggatgcctaaggatttgacggctactcaaaagagaaggttgcaacgtcttcgggctcaagagataagagagaaaaaagctgaagaacaaagagataaaaggttcaatgagttgcgaccgccactggtatggaggcgtaaatccatagagaaggaaaagccagttgttgtagaggagagggaggagcaatcggttgataaaggtgaatcatctccaaaagaagacatggatatcaacatggtatgtatgttgcctatggagttttgtgctatggatgaagccgaggttgctcaattctcattaggtcctaaagacgcggtttttgagaagcccgatgagtcaaaccgtcacatgaagcctctctatctcaaaggccatgttggtgggaagccggtctctacgatgctagtggatagaggtgccgccgtgaacttgatgccgtattcattgttcaagaagttggggcgtgaggatgatgagttgaagaagaccaacatgattctcaatggcttcaatggtgaaccaacagaggcaaagggtatcttttcggcgaagttcaccgtgggaaacaagacgctaccaaccgctttcttcatcgtcgatgtgcaaggtcttagccgtgagctcgttgagcatcggcttccaattaaaccaggttttaggccttataagcaaccacctcgtcgttttaatcctttgctatatgaccgagtcaaagaggagattgatcggttgttgaaggcagggtttattaggccatgtcgttatgtggagtgggtctctagcagagtcctagtggagaagaaggggagtggtaagattggagtttgcatatattttagagatctaaataaagctactcccaaagatgagtatcctatgcctatagccgacatgatgattaatgatgcctcgggtcataaggtgattagctttctagatggtaatgccggctacaatcaaatctttatggcggaagaggatatgtacaagatggcttttaggtgcccaggatttgttggtttatttgagtgggttgtcatgacttttgggttgaagaatgccggtgcaacatatcaaaggacaatgaatttaatctttcatgatttattaggtattatcctagagatctatattgatgatattgttgtcaaatcggatggtatggaaggacacatggccgatttgaggttagcttttgagaggatgcgccggtatggtttgaagatgaacccacttaaatgtgcttttggtgtgtcggcggggaagttcttaggattcatggtgtatgagagaggagttgagattgatcctaagaagatagagaagattcgtgatttcaaagcgccgacatgcaagaaggaggcccaaaagttgctaggtaaagtgaattatttgagaagaagccgatgttacttgggggcaaaacaacaagaggcgtttgaagagttgaagagatatttgtctactccacccgttgtacgagcgcctaaagctggaaagccttttcggttatatattgcctccgaagacaaagttattggtgccgttttgacacaagaggaagatggcaaggaatatatcattacatatttgagccgccgtcttttagatgccaaaacgagatatattgttaggcatgataattctagagcaaatgacttggcacaacaagcatctggctataatgtgaagaagggattatttctgatattagaagagccggtgcttgattttaaatctttgtgcgaaattggcaaaactggagaccagggatggtctgaccggcattgcactgccggtctgaccggtaaccaggggcggtctgaccggccgcatgctgccggtctgaccggcgacccagagcggtctgaccggccctgcgtggttgatcgcaaaattcggcggcaagcattcaaatatacattgcttgatggagatttgtatcgccgaaatatagatggtgtcttgttgaagtgcttagatgaagatcaatctaaagtggctatgggagaggctaatggacaagccgagtcgagtaataagacattgttgaagttagtgaagaagaagattgaggaacacccaaagaggtggcatgagatgctttccgaagcattgtgggcgcataggatttctaaacatggtgccactaaagtcactccttttgagttggtttatggtcaagaagccgttttaccggtggaggtaaatcttggttctcttcgttatatcaagcaagatgatttgtcaaatgaagattacaagacgttgatgggagacaatcttgatgaagtcatcgacaaccgcttgaaagcattggaataa

SEQ ID NO: 26054 - DNA, 735 bp, Oryza sativa
  Clone ID: PAT_MRT4530_30881C.1
caagcccttatagatcaaacaaatagtagaaccgatggagtggcgcacacagccggtccgaccgggcctgatggccggtcagaccgcgacttcactgtcggtccgacaggccaaatggcaggtccgaccgggtattaccccggcggtcagaccgggacttaggccggtctgatcgcgcctctggatgtcgatcagaccaggccctggactaatgctagttatttgtatcatcttagaacatttgatcctcctgtatctactgctgcaactaatccccaagttcccccacatgttcctaatgcttataatgatgttggtagggggtatcctcccgatactaggcaagtccaatataaccatattgcgccgcaaacacaacctattaggccaccaaatccaccaccaaatcaacataggcctgataatatggaggaaataattggtgggattattagggataaattcgggattgaaactaggaatcgtgctaaggtttaccaaaagccgtatcctgactattatgataatatgccgtttcctcgtaattatagagttcccgaatttaccaagtttagtggtgaagatggtaggaccacatgggagcatgtaggtcaatttttagcgcaatgtggtgaggctaatagtgatacttttaaattgcgcttgttttctttatctttgtccagtaccggttttacatggttaatttctttaccagcaaattctattcatact

SEQ ID NO: 26055 - DNA, 2380 bp, Oryza sativa
  Clone ID: PAT_MRT4530_30882C.1
atgacaaagcttccatcaaccaaggcagaggtggaaccgggcaatgtgataccagtcgcattggaggagcttgacgagggagcacgcaaagctttgaatgaacatcttaaggcgtatactcaagatctattgacgaaggcgtgcgctaggacccgtcaaggtgtggttttcaagccgggatcattgcctaaacctacttttgacatggtaagtgctgaagagttatcacaatctatccaacaacaaattgcacattcaatagattcatctatggttactttaaataataaattagatgcatctattgaaactcgttgtgaagaattcatgaggactacattcggctctctcatggccgattttatgttcaaagataaagcctctaccagtgctagccaagcccctatagatcaaataagtagtaaaactgatgggaccggccagatggccggtcagactgggtattaccccggcggtcagaccggacctcagaccggtctgaccgcacctctggacgccggtcagaccgggtcttggaccaggcagaccgacgcaattattcctatacagggggtagatcctattacaaataacgcgtatttgtaccatcttagaacatttgatccccctgtatctactgttgttgcttgttcccaagttcccccacatgttcccaatgcttataatgatcctagtaggggatatcccaccgatactaggcatggccaatataattatattgcgccacaacctcaacctattaggccaccaaacccaccaccaaaccaacataggcctgataatatagaggaattgattagtggaatcattagggataaattcgggattgaagctaggaatcgtgctaaggtttaccaaaagccgtatcctgattactatgacgatgtaccatatcctcgtagttatagggttcccgaatttaccaaatttagtggtgaggatagtaggaccatatgggaacatgtaggataattcttagcgcaatgtggagaggctagtagttccgatacttttaaattgcgcttgttttctttatctttgtccggtattgcttttacatggtttacttctttaccggccaattctattcatacttgggctcaattagaacaaagattccatgattatttctatactggtgaaactgagcttaggttatctgatttaacatcggttaaataaaagtataatgaatctgtcatagattatgttaagaggttcagggatgttagaaaccgatgttatagcttgaatataactgatagggatttggctgatcttgcttttaatggtttaattgctcctattaaagaaagattagatggccaacaatttcttgatgttagtcaacttatgcaaatggttctggctcaggaaagccgggttaaggatagtaagaaatttgttagaccatatgagaagaagcctaatgttaatttgattgattaccccgaggctagtgatagtgatggtgagggtgatcatgatatgcatgttgttgagtggtcatggactaacaaaaataaggcttttgtttgttctaatttaatgccgactcctcgtaaagatcggcaaagtgaggttaagtatagttttgatgtggccaaatgtgataagattttttattatcttttgcaagaaaaaaaaattagattacctaaaggccatatcatatcatctcaagaagagttgaagcgtcgagcttattgtaaatggcatgattcttattctcattctactaatgattgcaatgtgtttcgacgacaggttcaatcggccatagatgaaggacgattgaagtttacccatggttccaagatgaagcttgatcatgatccttttccggtaaatacaattaatttcaatgataagaaggtgttgattcggccggagcaagccgaatctactaaggggaaatgagtggtcattggggagactaggccaaagatgatggtgccaaagaatccggagaagtatgagaagcaaggtggtgagaaagctggcaataaagggaaaagaccaagatcacctcctagggagtgatttggtcattcaccaagacggtcggaatcaccaacatatcatcgtcctcaagacatgtcatgggggccttatccaatgccgtcgccgggttatccttttccttactacatgccatggggggcaacaccgccaatgttcaatcatatgcctccaatgcaatacaaccaaggatggggaggaccaaggaggccggctcgtgagcgcttgtcttcaccaaacaatagccggttttatgctaagaaccgggccaatgaagaaaagagggaaggaaagcatgtgtcaatctggtccaaaacctccagaacacatctaggac

SEQ ID NO: 26056 - DNA, 338 bp, Oryza sativa
  Clone ID: PAT_MRT4530_30883C.1
cgcgttatgacgcgtccctcctgccatcctctgctgcgcgatcaccacgatgaggtcacgttcattctgacacggaaaaagcgcgctcgagatgctccactgttcgtcgtgcactgactcctgtctattcagcttgttcttctgggcggctcgatgatatccagacgatccgattgcttgagaaccagatcacgaagactgacagaaaagtacgagaggctctttatctggggatgacagactccggtgtgaaagagcacggcaccatgtgatattggacactcctcctgtgaacctttgcgttgtgcatgctgctcttgtctactacctcaaccact

SEQ ID NO: 26057 - DNA, 7495 bp, Oryza sativa
  Clone ID: PAT_MRT4530_30884C.1
ctaagcgtcttgccaaacgctcgggaagtatttcttcaagtatttcccgttgattgctcgctgaaaacgctccccttgaagtgtctctaaaaaatatgcatttcctcgaacaatgccgcatattcgataagggccctcccaactaggaaaccacttaccgaactccttggatcgagtacccaaaggcaaaattgtcttccaaaccaaatctccaacttgaaacaactttcctttcacccttttgttggacgccttggccaccctcttcttctctttctctatttcttccaatgccttcaagcgcttgtcgatgacttcatcaaggttgtctcccatcaatgtcttgtaatcttcacttgacaaatcatcttgcttgatataacgaagagaaccaagatttacctccaccggtaaaacggcttcttgaccataaaccaactcaaaaggagtgactttagtagcaccatgtttagatatcctatgtgcccacaatgcttcagaaagcacctcatgccacctctttgggtattcctcaatcttctccgtatgagtcatattcttcaacggcacggcttcggcccgcttggtgaagtaatccgtagcaactagcatgaacctatgtccccttgatgacgaaggataaatttgaccaatgaaatccaaagcccatcctcggaacggcatggtttgattatagggttcaacacggcggcgggcgccaattgtacattgccgaaccattgacaagcctcgcatcctctctcccatagccactttagattgatcttcatctaagcatttcaacaagacaccatctatatttcggcgatataaatcctcatcaagcaatgtgtatttgaacgcttgctgccgaattttccgatcaaccttaagcgtgggatctttcaaatatcgaatcaaaggaattctccaattttcttctgcttcctgggcacaaatgtccgaattcacaattgattcggcctctaaattgattgaaacgtgccccccagcgctctgcccagaaccagtcagaccgaccacacagggccggtcataccgctcggggtcgccagtcagaccggcggcatgtggccggtcagaccgcccttggtcaccggtcagaccggccacgcaatgccggtcagaccgcccctgatctccagttttgccaatttcacacaaagatttaaaaacaagcaccggttcttctaatatcagaaataatcccttcttcacattatagctagatgcttgttgtgccaagtcatttgctccggaattatcacgcctagcaatatgtctaatagcaaaattaacaaaattggcaataatatccaaacatgaatcgaggtacctatttagtgatccgtccaagcatttgtagactccggcgacttgttgcaccaccaattccgaatcaccaaaagcctccacgtacttagctccaaccatctccataacttgtaagccgaataataaagcattgtattcagcttgattatttgtacaataatactctaaacgaaccgatgcttcataacacatgccattaggtgaaaacaaaactacccctatgccttgaccttctttgcaagaagaaccatcaaaataaattttccaaggtataacttcaactaagcaaaccttttcctcataagcaatatctacatgatggtccactataaaatcacatataatttggcctttcatagatttcaatggttcataagccaaatcatattctatcaaagcatatgcccacttgccaatcctcccacttagaattggcatttgcaacatgtgtttaataacatcggcttgacaagcaactatgcatgtactcgtttcggcatccaaaagacggcggctcaaatatgtaatgatatattccttgccatcttcctcttgcgtcaaaacggcaccaatgactttgtcttcagaggcaatatataaccgaaaaggcttttcggctttaggcgctcccacaacgggtggagtagacaaatacctcttcaactcttcaaacgcctcttgttgttttgcctcccaagtaaaatcggcttcttttttcaagcgaagtataggaacaaaagcatcgattttacccgctaggttagaaataaaccttctcaaataatttaccttacctagcaacttctgaacttccttcttgcatgtcggcgctttgaaatcacaaatcttttctatcttcttaggatcaatctcaactcctctctcatgcaccatgaatcctaagaatttccccgccgacacatcaaaagcacatttaagtgggttcatcttcaaaccataccggcgcatcctctcaaaagctaatctcaaatcggctatgtgtccttccataccatccaatttgacaacaatatcatcaatatagatctctaagataatacctagcaaatcatgaaagatcaaattcattgccttttgatacgttgcaccggcgttcttcaacccaaaagtcatgacaacccactcaaataaaccaacaaatcccgggcacctaaaagccgtcttgtacatatcctcttccgccataaagatttgattgtagccggtattaccatctagaaagctaatcaccttatgacccgaggcatcattaatcatcatgtcggctataggcataggatactcatctttgggagtggctttatttaaatctctaaaatctatgcaaactctaatcttaccactccccttcttctccaccgggactatgttagaaacccactccgcataacaacatggcctaataaaccccgccttcaagaaccgatcaatctcctctttgacccggtcatatagcaaaggattaaaacgatgaggtggttgcttataaggcctaaaaccttgcacatcgacgatgaagaaagcggttggtagcgtcttgtttcccacggtgagctccgccgaaaagataccctttgcctccgttggttcaccattgaagccattgagaatcatgttggtctttttcaactcatcatcctcacgccccaacttcttgaataatgagttcggcatcaagttcacggcggcacctccatccactagcatcctagagaccggcttcccatcaacattgcctttgagataaagaggcttcatgtgacggtttgactcattgggcttctcaaaaaccgcgtctttaggacctaatgagaattgagcaacctcggcttcatccatagcacaaaactccataggtaacatacataccatgttgatatccatgtcttcttttggatatgattcacctttatcaaccgattgctcctccttctcctctacaacaaccggcttttccttctctatggatttacgccttctcttttgagtagccgtcaaatccttaggcatccacctaggattcgactctgttccaggaggtaaataatgtcccctattaatcttgtttgaagacgatgaagccctcacatagccctttgcaattcccctgtcaaaacggcgctggagcccggtcagaccggacgtagaccaccggtcagaccggccagacgcgccggtcagaccgacacttggcgcacggttagaccggcctgaggcgtcggtcggactgctgtcgggtcggcggtcagaccggcctgatggcccggtcagaccggtcgcatggttgcggttagaccggccagaaggcctggtcagaccggccgactgcgaggagctggtttcggcttcggattttttgtttgaggatactccaactccatctccaaaaggtattggcacatcatgagaccccactttgatggtaattacttctgaagtccttgcctccaccttgacgcgctttccttccctcttttcttcattagcccgattcttaccataaaaccggctattgtttggtgaagacaaacgctcatgaattggcctcctcggtcctccccacccttggttgaattgcattggaggcatatgattgaacattggcagcgtcgccccccatggcatgtaataaggataaggataacccggcggcggcattggataagaaccccatgacatgtcttgtggatgatgatatggaggtgaatgcgaccgtcttggtgaatgaccaaatcgcttcctaggaggtgatcttggtctttttcctttgttgcgaattctctcaccaccttgcttctcatatttctccaaaagcatatcaaaagtcactttggtcttcctaggggctttagaagttgaagcttcactcttattttccttccaaacaccaacctccggcttatttggcactatcatctttggtcttggttcaccaatgattactccttttcctttagtagattcggcttgctccggccgaatcaacacctttttattattgaaattaattgtattcaccggaaaaggatcatgatcaagcttcatcttggagccatcggtgaacttcaatcgtccttcatctatggccgattgaacctgtcgtcgaaacacattgcaatcattagtagaatgagaatgagaatcatgccatttacaatatgctcgacgtttcaactcttcttgagatggtatgacatggcctttaggtaatctaatttgtctttcttgtaaaagataatcaaaaatcttatcacacttggccacatcaaaactatatttaacatcactttgccgatctttgcgaggagtcggcattaggttggagcaaacaaaaggcttgtctttgttagtccatgaccattcagcaacatatatatcatgatcaccctcctcctcactatcactagcctcagggtaatcaatcacattaggctttttgtcatatgatctaacaagttttttattatccttaacccggctttcttgagccagagctctttgcataagttgactaacatcaagaaattgttggtcatctagtctttctctaagaggagcaattaaaccattaaaagcaagaccagccaaatctctatcagttatattcaagctataacatcggtttctaacatccctaaatctcttaatataatcaatgacaggctcattatacttttgcttaaccgatgttaaatcacataacctaagctcagtttctccagtatagaaataatcatgaaatttttcatctaattgagcccaagtatgaatagaatttgccgataaagaagtaaaccatgtaaaagcattatcggacaaagataaagaaaacaagcccaatttaaaagtatcactattagcctcaccacattgcgccaaaaattgacctacatgctcccatgtggtcttaccatcctcaccactaaacttggtaaattcgggaactcggccgtcaggcccggtcagaccggccgtgtgcgccgctccatcggttttactacccgtttgatctataggaggttggttagcagtggtagaggctttatcctttgacatgtaatcggccataagaggaccgaatttaacccttaaaaactcatcaaatttaccctcaaaagttgcatctaacttatctttaaaagcaatcatagatgaatctattgtagatgctacttgctgttgtatagattgtgttacctcatcattgcttaccaaatcggggacgagcttaggaagtagcccgggcttgatgatcaccccttgacgagtcctagtgcttgccctcatcaacgcctctcgtgtgagttcgttgatgtactcctccataactttgtggtcctctccttcgaaatcctccaatgtgaccggtatcacattggatggctccacctccgtcttggatggcggcttcgtcatggcgaagtcgaagttgagttgacgatgaacggatctctttcccagtggaatcgccaaaaatcgtgttggcatctcctcctcgcccgaatttcgccagaacaccgtcgcccgcgccggcttctccttcctcctcggcggcatctcctccggctgcccctttcgccatgcccgtgcgtcagccggcgctgccgtcccctccctcggcacggtgaccggcaaggtcgtcctcggcatcatttcccctccatccaaacccctccgtggtccatcagcgtcgtctccgatcgttctcgtcgtcgacgtcccatcggtcgcccggctcgtcgtctcgcggcgccgcctccgtcgtcggcatcgcagcggcgtggtccgcgccatcctcgcctccgtgcagccgctgccggcagccctcatcgcctcctcgccggccccggtcgtcgttgtcgtcgtcgtcctctcgtcgttcccggtcgtcgtggcacccgtcatcgtcttcgtcctcggctccgcgtcgtcaagcctcgtgccggccgcgtctcgccttcgtccaaggatcgccgctgaagccgtcccctcgccgttcgtctccgttgtgccctcttcgtcgttccggaggttcccgaagcgtggttcgcggccgtcgccgaagaattggaacaacccagcaggggcaaccaacgttcaagtacctacagtccagcaacagtgcaagttatcagaatttctcaaaactgagcctccaacctttgccattgccgtcgatcctatggaagccagtgattggttgcgcacagtcgagaagaagctagggttgattcagtgcaccgaccaggagcgggttggcttcgcaactcatcagttggttggacaggcttcagagtggtgggatagctacgaagcatcacggccagaaggacataccatcacctggaacgagttttcatctgtattcaagagatcacatgttcccgcaggaatgatcacactaggaaaacgagagtttcgctacctgaagcaaggagatttgaccgtcacagagtacctgcacgagttctatcgtttggctcactatgcaccagaagatgtggaaacggatgaagacaaacaagagaagtttctccaggggttaaaagatgagcttgcagtgcaactactcctagaggattatgaagattttgagaaacttgtggacaaagccatgcaacttgaaaatgagcataatcggatgacgaactgcaagagaaggattgtcaacatcccagtatttctaggtggtaaccaaagacagcgcactgagccacttcagatcaccggatcttctgttgtgcatcaagagttcctgccccaagaagatggacgcaatgcagacaccaacactagcaatactaatgatgatgataccaccaacaaccatggttcttgccccattagtgaccactcgaataaagcgtgcaatgtcagtagcattcaccaagatgtcaacgatagtatcaatgttggaacccagaatgacaaccttagcaatgttgacactgagaaagactccaatggtgatagcaactatggtaccactgatgccaatgtcatttctccagagattgtccacagccgaagcgtaacctgcgccatcactccggccattatgcaagaagaagacaagtcactcgccttgtggtcactggagcaaacgccgtacctgtga

SEQ ID NO: 26058 - DNA, 2304 bp, Oryza sativa
  Clone ID: PAT_MRT4530_30885C.1
atgtccggcatttcaacatacgcaaaggtcttgaccgtccacgattacagcatcgagagtgttgaggcagtgttgaactccacaactagtatgattgaaacctttacggctttccaaaagtctgcgaaaaagcattccactgctgccttcgtgttcagttcgatgtgtggtattgtgctgatggtgctcgcgcaaatagtagtggtattcctcgcacttttaattgaagctgtgctgatcatcaatatgcttgggccgatggcatccatggtgatctcaatgacccgcctaatacggcacgattatggtgatgacaatggaaatctcagagcagccttgttcatattttactccctagctctggctcatagtgtgtgcttctactgctggttcctgcttcagtatttccttgagaagttgtccaagtcggcaagcaaagaattcggccttaacaaggactttgggggccaaaaattgctccttcaatacctccgagaaaccaaagccaagtgtgcagatgatctgagcttgcccggtggctggaacatggtcacatatgctgtcggattgctgaaatccgtgtcccgggatgatcatctggatggtttacggatgcttgatgcattcgtcgtcaacaagaggccatccataagactggagctactgtcctccagcgaatccatccagaatctgatcaaaatgcttcagtggactgacccggcactggaggaccaagagatgagagaacgcgccgcaaggatcgtggcagatgttgccacgggtgcattacacattgttcagataccaggtgccctgcagtgcatatcttctctgcttcaagtatctccactaagacaatactgccaagaggttgaaaaaggtccacagaaacaggatcaagacaaggaaggaggagaagaagaaaaagacaagaacatgaatactgcaatagatgagcagataactgacaggcttctaaggatggacagaagagcgaagaaattcttatttgggacgatggatgacaagagctccttcaagccccaaggcactagagagttgattcatcagggcctacagatacttgagaggctcgcatgtgacgaccaaaactgcagagagatctgctgcaaccaacggctgcttaccaagatcattgcgccaatcacttctcctgctttacttcacacagattatgacaatgcatgggttgatatactgagcattttgctgaagctggtgaggctgctcatcagtgctcctggagaagctggcacaagggtatgccatgatatctcggcttgtgaggacgcggtccgcaacttgttggggattcttggccaaaatgcaacttatcccatgcaacttcaggaaaatgccatggagattcttacagaaatagcaattggtagccctgcaatcatggcggaggatttcatcaggaagctgtggtgcatcttcctttccaacagaggaacaagcagattgaggagaaaagcaggagaacaacttgcaaaactgctttctgctcaaggtgcaaatgggcaggtatttgtcaaggatgtattttgtgaaaatgatacagttgttgctcaactcattgatatacttgttcaagacaaggagtgccagataagtgcggcagcaatattggagcacttatgttgccattttgttaggtacaatgaactatcagagctatgtgtggttaaactgttgagaatgatacttgatctaattagtaaaatggaaataaaggaggaaactgtaccaggggcaggggaaagcaatagttttgacgtacataacgatgaagaaagcaagcctccaaaacaatctggtccgaagaagccctgggttccgaaaaatgatgagctatctgaagaaacgaaatttctagcagctctgatgtcccttcttgtggtgatatgcaacaaaatggttgatgcacatgtattttgttatgtcacatcagtggatgcagcactggtgaagaagctcaagaagataatcgaagcaaataacaaaaacacagctgactgtctaagaatagtgaaacttgcctgtcaggtggttatagcgataattcatctcaaacctagctgcatcaaagacttcaatggaaatcatttcgatgctgtactgtccacggctttgaagaacatgtcagacatcgataactgcatgctctttgcagtccaagattgtcagataacaaagcctgccagaactctctcttctcttgtaaaagaagcccagggactcctccagaatgcacaagatgtaacagtcctatctgattaa

SEQ ID NO: 26059 - DNA, 574 bp, Oryza sativa
  Clone ID: PAT_MRT4530_30886C.1
aggagagaacacatggctgtggcgagccaaggacgcgctctgcctccgcctccaccgccgaccgcccgaactcgccgcctccaccaccagtcgcccgagcttgctttgcgttcgccggcggacatggttggacggccacaatgccgacgaccaggacgacggaccgttcgccgcctccaccgcgtcaacgagagaagcagagaagggaaggggaaaaattgcagagctcgagcgtgaggccgtccatcctcgccaacccttcctcgacgacccttccgtctgccccatgcaccgccacagtagcctcatccatggcggcgggggcaagaagtgcggcggcaagcggcggctcggcttggctcggctagctcgctcgggcgtcgccatcacacgccacccaccagacgagggtggcatcggcatggccggacgctggcacgctgctcgcggcgatgacgcgatctacccgtggcaatgtcacggaagaattctgagagaaattgaatcgacgaacggtgagcagcaacgaagcggggaacaccaggagcaggagaagaatcaggtggcatcttaa

SEQ ID NO: 26060 - DNA, 2149 bp, Oryza sativa
  Clone ID: PAT_MRT4530_30887C.1
gactaagtccttaagattccggttttgaaaaaccccattaaataaaaccgtcccttgaaccctttttatttaaaaggtcatgttgatgggaagcaggtctttaggatgctattggatggaggtgccgccgtgaatttgatgccgtactcgttgttcaaaaaatgggcgtgaaaataataagttgaaaaaaactaacatgattttcattggcttcaatggtgaaccaccgaggcgaagggtattttttcggcggagtttaccgtggaaacaagaccctaccaaccgtttttttcattgttgatgtgaaagattttgatgaagtggagaagcttggtaaagggtttacatcggccaatccattggaggaagtagacataggtgatggaattaagccaaggccgacatttataaataaaaatttgagagccgattataaggttaaaataatcgagctacttaaggagtatgtggattgctttgcatgggagtatcatgagatcccgggtcttagccgtgagcttgttgagcatcggcttccaatcaaaccaggttttaggccttattaacaaccacctcgtcgttttaatcctttgctatatgaccgagtcaaagaggagattgatcggttgttgaaggatgggtttattaggccacgttgttatgcggaatgggtttctagcatagtcccggtggaaaaaaaggggagttgtaagattagagtttgcaaagactttagagatttaaataaagctactcccaaagatgaatatcctatgcctatagccgacatgatgatcaatggtgtctcgggtcataagaacgtcggtgcaacatatcaaagggcaatgaatttgatcttccatgatttgttaggtattatcttagaaatctatattgatgatattgttgtcaaatcgaatggtatggagggacatatagccgatttgaggttagcttttgaaaggatgcgccggtctggtttgaagatgaacccacttaaatgtgcttttggtgtgtcggcggtgaggttcttaggattcatggtgcatgagagatgagtcgagattgatcctaagaagatagagaagattcgtgatttcaaagcactgacacgcaagaaggaagttcaaaagttgctaggtaaggcgaattatttgagaagatttatttctaacctagcgggtaaaatcgatgcttttgtccctatacttcgcttgaaaaaataagccgattttacttggggggcaaaacaacaagaggcatttaaagggttgaagaagtatttgtctacttcacccgttgtgcgggcgcctaaaaccgtaaagccttttcggttatgtattgcctccaaagacaaagtcattggtgccgttttgacgcaagaggaagatggcaaggaatatatcattacatatttgagccgccgtcttttggatgccgaaacaaggccaattctaagtgggagaattggcaagtgggcatatgctttgattgaatatgatttggcttatgaaccattaaaatctatgagaggccaaattgtatgtgattttttagtagaccatcatgtggatattgcttatgaggaggaggtttgcttagttgaagttataccttgaaagatttattttgatggttcttcttgcaaagatggttaaggcataggggtagttttgttttcacctaatggcatgtgttatgaggcatcggtccgtttgaagtattattgtacaaataatcaacccgaatacgatgctttattattcggcttacaagtgatggagttggttggagataagcacgtggaagtttttggtgattcagaattggtggtgcaacaagttgccagagtctacaaatgctaggacggatcactaaataggtatcttgactcatgcttggatattattgccaattttgataattttgctattagatatattgctaggcatgataattctagagcaaatgatttgtcacaacaagcatcttgctataatgtgaagaagggattatttctggtattagaagagtcggtgcttgattttaaacctgtcacgaccggaaataacccaacgggcgttcctgacgtgcgtgcattatccttgtcccaggaggcaagactcaacaagacacaccccccagtgca

SEQ ID NO: 26061 - DNA, 3402 bp, Oryza sativa
  Clone ID: PAT_MRT4530_30888C.1
atgacgaagcctccatcaaccaaggcggaggtggatccatccaatgtgctgccggtgatgatggagagtcttgatgaggaagcacgcatggccttcgatgaacacatgaagaagtatgccgacgagcttttaaagacatgctcaaagacccgtcatggcgtagtcttcaagccggatttggtgtcttcatctacttttgacaagaccgggactcaggccggtctcaccgcgcctatggacgccggtcagaccgggctctggaccggtcaaatcggcacaatagtgccgattcaggggatagattcaatgactaatgttagttatttgtattatcttagaacatttggtcctcctgtatctactgctgcaagtaatccccaagttcccccacatgttcctaatgcttataatgatgtttctagggggtatcctcctgatactaggcaaggccaatataatcatattgcgccacaacatcaacctattaggccaccaaatccaccaccaaatcaacataggcctgataatatagagcacttgattagtggaattattagggataaattcaggattgaagctaggaatcgtgctaaggtttaccaaaagccgtatcttgattactatgataatgtgccatatcctcgtaattatagggttcccgaatttaccaaatttagtggtgaggatagtaggactacatgggagcatagatttagagatgttagaaaccgatgttatagcttgaacataactgatagagatttggctgatcttgcttttaatggtttaattactcctattaaagagagattagatggccaacaatttattgatgttagtcaactcatgcaaaaggctctggctcaggaaagccgggttaaggataataaaaaatctgttagaccatatgagaaaaagcctaatgttaattcaattgattactttgaggctagtgatagtgatgatgagggtgatcatgacatatatgttgctgagtggacatggactaacaaaaataagccttttgtttgctctaatttaatgccgactcctcgtaaagatcggcaaagtgagattaagtataggtttgatgtggccaaatgtgataagatttttgattatcttttgcaagaaaaacaaattagattacctaaaggccatattgtcagggttcaatcggccatagatgaaggacaattgaagttcactgatggttccaagatgaagcttgatcatgatcctttttcggtgaatacaattaatttcaatgataagaaggtgttgattcggccggagcaagccgaatctactaaaggaaagggagtgatcattggtgaacctaggccaaagatgatagtgccaaagaaactggaggttggtgtatggaaggagaataggagtgaggcttcaacttctaaagcacctaggaagactaaagtgactttggacatgcttttggagaagtatgagaagcaaggtgaaaagagggaaggaaagcgtgttaaggtggaggcaaggacttcggaggtgattaccatcaaagtgggatctcatgatatgccaataccttctggagatggagttgggaagtcatcaagcaacaaatccgaaattgggaccagctcatcgcagttggccggtctaaccaggccctctggccggtctgaccgtagctctgcggaccggtcagaccgggccatcaggccgttttgtgctatggatgaagccgaggttgctcaattttcactaggtcctaaagatgcggtttttgagaagcccgatgaatcaaaccgtcatatgaagcctctctatctcaaaggtcatgttgatgggaagccagtctctaggatgctagtagatggaggtgtcgccgtgaacttaatgccgtattcattattcaagaagttggggcgtgaggataatgaattgaagaagaccaacatggttctcaatggcttcaatggtgaaccaatggaggcgaaaggtatcttttcggtggagctcaccgtgggaaacaacacactaccaaccgctttcttcatagtcgatgtgcaagaagctaatttagagtggttgcaaaagagggtgcaagaatatcggtctacaaagaacgatattggtgaaactattgaagattttgatgaagtagagaagcttggacaagggtttacatcggccgatccattggaggaaatagacataggtgatggaacaaagccaaggccgaattttgtaaacaaaaatatgagagccgattataaggttaaaataatcgagctacttaaggagtatgtggattgctttggatgggagtatcatgagatgccaggtcttagcctcaaagaggagattgatcggttgttgaaggcggggtttattaggccatgtcgttatgcggagtgggtttctagcatagtcctggtggagaagaaggggagtggtaagattagagtttgcatagattttagagatttaaataaagctactcccaaagatgtatatcctatgcctatagccgacatgatgatcaatgatgcctcgggtcataaggtgattagttttttggatggtaatgctggctacaatcaaatctttatggcggaagaagatatgtacaagacggcttttaggtgcccgggatttgttggtttgtttgagtgggttgtcatgacttttagattgaagaataccggtgcactatatcaaagggcaatgaatttgatctttcatgatttgctaggtattatcttagaaatctatattgatgatattgttgtcaaatcggatggtatgaagggacatatagccgatttgaggttagcttttgagaggatgcgccggtatggtttgaagatgaacccacttaaatgtgcttttggtgtgtcggcggggaggttcttgggattcatggtgcatgagagaggggttgagattgatcctaagaagatagaaaagattcgtgatttcaaagcgccgacatgcaagaaggaggtccaaaagttgctaggtaaggtgaattatttaagaagatttatttctaacttagcgggtaaaatcgatgcttttgttcctatactccgcttgaaaaaagaagccgattttacttggggggcaaaacaacaagaggcatttgaagggttgaagaagtatttatctactccacccgttgtgcgggcgcctaaagccggaaagcctttttggttgtatattgcttccgaggataaagtcattggtgctgttttgccgcaagaggaagatggcaaggagtatatcattacatatttcagctgccatcttttggatgccgaaacgagagcaaatgatttggcacaacaagcatctggctataatgtgaagaagggattatttctgatactagaagagccggtgcttgatttttaa

SEQ ID NO: 26062 - DNA, 517 bp, Oryza sativa
  Clone ID: PAT_MRT4530_30889C.1
atgacgaagcagtcgtcatccaaggcggaggtggagccgaccaatgtgataccaatcacattggatgacttcgaaggggaagatcgcaagtccatggaggagtacattaaggagatcacacatgaggcgttgataagggcgtgcactaggactcgtcaaggcgtgatcatcaagcctgggccacgtcctaagctcactcctgatttggtaagcaatgaagaggtaacacaatctatccaacaacaagatgcatctgcaatagattcatccatggttatttttaaaaataagttagacgcaactattgaaggtcgatttgatgagtttttaagaactaaattcggccctctcatggccgattttatgttaaaagataaagcctctactagtgctagccaagctcctacagatcaaacaagtagtagaactgatggagcggcgcagatggcctgtccgaccgggcctgatggccggtcagaccgcgacttcgccatcggtccgaccggccaaatggccg

SEQ ID NO: 26063 - DNA, 777 bp, Oryza sativa
  Clone ID: PAT_MRT4530_30890C.1
atgggtgaagttcatgaaggaatttgtggaactcatcagtcggcccataagatgaattggttacttaggagagcgggattctattggccgaggatgattgatgattgtttcaagtactataggggatgtgaagcttgtcaacggttcggcaatgttcaattggcgcctgccgccgtgttgaatcctatcatcaaaccatggccgttccgaggttgggctttggatttcaatggtcaaatttatccttcgtcatcaaaggggcataggttcgtgctagttgcaacgcattacttcaccaagtgggccgaagccgtgccgctcaagaatatgactcatacggaggctaatggacaagccgagtcgagtaataagacattgttgaaattggtcaaaaagaagattgaggaacacccaaggaagtggcatgagccgtttttgccggttgaggtaaatcttggctctcttcgatatatcaagctagatgatttgtcggttgaggactacaagaccgtgatgggggataatcttgatgacgtcatcgacaagcgtttgaagactttggaagaaatagagaaagagaagaagagagtggctaaagcatacaacaaaagggttgaagaaaagttgtttcaagagcagcggcaggaaacgcagcagcagctcaccaagaacaaatcaaattggcggcgaaggacgacgacggctgtggcgaccgacgtcggatgcggcagcgatgaggcggggatggggacgatggcggctagcgctagctgctag

SEQ ID NO: 26064 - DNA, 1140 bp, Oryza sativa
  Clone ID: PAT_MRT4530_30891C.1
atgacgaagccatcatccaaaacggaggtggagccatctaatgtgatgccagtcacattggatgacttcgaaggagaagatcgtaaagctatggaggagtacatcaacgagctcacacgggaggcgttgatgagagccactactaggactcgtcaaggcgtgatcatcaagcccgggccgcgtcccaagctagctcccgacgtggtaagcaatgacgaggtatcacaatctatccaacaacaaattgcatctacaatagattcatctatggctaattttaaagatagattagatgtaatgtttaaggataagattgatggatttttaaggagtaggctagattcttttatggatgattacacattaaaggataaagcctataccactgttgatcaatctcctatagatccaatgggtagtaaaaccgacgggacggcgttcacggtcggtccgaccgggcctgacggccggtcagaccgcaatatagccgtcggtccgaccaaccaaacggccggtcagaccgggtattaccccagaggtcagaccggccctcaggccggtccgaccgcgcataatgacaccggtcagaccgggccctcggccggtcagaccggcgcaattgtcccaatacagggtatagatccaatgactaatgctagttatttgtaccactttagaacatttgatcctcctgtatctactgctacaagtaatcctcaagttcccccacatattcctaatgcttataatgatgtttctaggggatatcctcccgatactaggcaaggccaatataatcatattgcgccgcaaacgcaacctattaggccaccaaacccaccaccaaatccacaagggcctaatagcatggaggatatgattagtgatattatgaggaatagattcaggattgaaactaggaatcgtgctagagcttataaaaagccatatcctgattattatgataatgtgccgtttcctcgaaattatagagttcccgaatttgccaagtttagtggtgaggatggtaagaccacatgggagcatttaggtcaatttctggcgcaatgtggtgaggctaatagtgatacttttaaattctattcatacttgggctcaattagaagaacaatttcatga

SEQ ID NO: 26065 - DNA, 657 bp, Oryza sativa
  Clone ID: PAT_MRT4530_30892C.1
tcagatgggcagtcagagtccgccaaccgcgtcattgtcatgtacctgcggtgcctcactggtgatcgaccgcggcagtggctccagtggcttccgtgggcggagtacgtcttcaacaccgcctaccaaacgtcactgcgggacacaccgttccgcgtcgtctacggccgcgatcccccatccatccggtcatatgagcccggagacaccagggtggccgccgtcgccaagaccatggaagagcgggataagttcctcgctgacattcgcagccgccttgaacaagcacaggcgacccagaagcgccactatgacaaggcacatcgccatgtcacgtaccaggtgggtgactgggccctactacgcctcaggcagcgcgcggcatcttcactgccacagaccgtcgccggcaagctgaggccccgcttctacggccctaccgcatcaccgagctcatcaacgacgtcgcggttcgcctcgctctgccaccccgagctcgtctgcacgacgttttccacatcggcctcctcaagaagttccatggctccccgccggatgctccaccgcccctgcctgctgttcaccatggtgccgtggtcccggagccggaacgagccgtcaagacgcgcctcgcacgtggtgtgcgccagctgctga

SEQ ID NO: 26066 - DNA, 990 bp, Oryza sativa
  Clone ID: PAT_MRT4530_30893C.1
atggcatttggtcaagataccatagagcagctgtaccgggagctcgccggcggccgccgcctcagcgccaagctccaggcgctgctcgaaggccccctcgatagccgcggccagaaggaggccgtcgatgttagcagagagctcgggcgagtgttcatggtgtctctctacatgctgaagccttgcagcaacagcagcagacgaccggaaggagtgaccaggacggcgccggagacgaggactgacgatagcatttgcttgcacactccggcgagggttaaacgcgttaggttgtacttcaagtgcacgttcagccgcgagcggagttgcgcggcgaagaagcaagtgcagcagcgggacgccggcgagccgcccatgttccttgtcacctacctcaacgagcacacgtgccagcagccgcaagctgttcccggcacgcccaacactgcaggtagctcgccgacgacgacgagccggcaacgacagtcgtcctcctccccgccggcggaaatgttggacctgacgatgaacggcgccggcctctttagccgtcttcttttaccccacgccgtcggcggcggcggcagcgccgccgaagaggaggccgccatcgtcacgtgcctcgcggcggtcatcagcggaggaggcgccgcagccgctccgccgccgttgatctggccgacatcggccccagaggcggcgttcgtggcgttcgcggcgggacactcggcgagcgccgcggacgagagcgtggcggacgaggcggcggcggcgcagattgccgacatggactactgtttcggccagtacgatcagtcaacgttcggggcggcagcagcagcggatcaccgtgtgttgatcggtgacgacggcgacgtgcagcgcatcgtcgcggcgcggatcgcggacacggtgtgcccgcggtacacgcgcgacacgagtgcatgggagactgctgggacgtcgtcgatgagaggatcgatcgattga

SEQ ID NO: 26067 - DNA, 2253 bp, Oryza sativa
  Clone ID: PAT_MRT4530_30894C.1
atgtcggatgagtttgacaattccatagacccagccgagatttacactacagatatgttcatggcagagcatagtgtccttaactcttttgccgggcggatcgacaaaaggattaaggccagattggaaggaggtacatctaggcgtacaagtggtccaaggaagtacatcaataggaaccatgaaggagcccatgatcaactatttgctgattattttgctgaagatcctctctactctgctgcaacatttcgtagaaggttccggatgagaaggcatgtgttcctacacattgtggatgaactaggcaagtggtcttcctattttacacatagagtagattgtactggacgccttgggcactcaccattgcagaagtgcactgcagcgatccgtatgcttgcatatgggactgctgctgacgctcttgatgagtacttgaaggttccccagagtactgctctagagtgcttagaaaattttgtggaaggtgtcgtcgaggtatttagtagtaggtacctgcgtcgccccacggctgaggatctcgagcgtttgctccaagttggagagtctcgtggattccctgggatgttgggaagcattgactgcatgcactggcgatggaaaaattgcccaaacgcatggaagggacaatatacccgaggtgaccaaaagtatccaactattatccttgaggctatagcttcatatgaccttcatatttggcatgcattctttggtattcctgggtccaacaatgacattaatgtgctcaatcagtcccctctgtttattgaagcaataaaaggtgaagctccccaaatccaatttgctgtcaatgggacataatacaacacgggatattatcttgctgatggaatttatccggaatgggcaacctttgtaaagtctataagatctcctcaactagagaagcacaagctgtttgcaagggaacaagaagggaaacagaaagatattgagtgtgcttttggggtgttgcaagctcgcttcaacatcgtgcatcgtccagcacgatcatggagccaaaaagttcttcgaaaaatcatgcaagcttgtgtaattctccacaacatgatagtggaagacgagggagaaatggcagaagatcctattgacttgaatgctgccccaggaacatcaattgttcttccaccagaagttcatgcagggagtaatgatcacccaagcttcagcgatatgtgtacgatttatgagctagcagttgtcttcaaaggacctttgaaggaggcctaacatggggaagccgaacgttgactgatcgtactggccgaaacagtagtccatgtcggcaatctgcgccgccgccgcctcgtccgccacgctctcgtccgcggcgctcgccgagtgtcccgccgcgaacgccacgaacgccgcctctggggccgatgtcggccagatcaacggcggcggagcggctgcggcgcctcctccgctgatgaccgccgcgaggcacgtgacgatggcggcctcctcttcggcggcgctgccgccgccgccgacggcgtggggtaaaagaagacggctaaagaggccggcgccgttcatcgtcaggtccaacatttccgccggcggggaggaggacgactgtcgttgccggctcgtcgtcgtcggcgagctacctgcagtgttgggcgtgccgggaacagcttgcggctgctggcacgtgtgctcgttgaggtaggtgacaaggaacatgggcggctcgccggcgtcccgctgctgcacttgcttcttcgccgcgcaactccgctcgcggctgaacgtgcacttgaagtacaaccttagataattgctgtcctgaatgttcttttgcccgtattttctccactggtagccatccttgtacggggaaggtgtaataatctccgtcctcgtaaccacctcttctctgccatttctgacaagaacctcttcactcctaacgcgtttaaccctcgccggagtgtgcaagcaaatgctatcgtcagtcctcgtctccggcgccgtcctggtcactccttccggtcgtctgctgctgttgctgcaaggcttcagcatgtagagagacaccatgaacactcgcccgagctctctgctaacatcgacggcctccttctggccgcggctatcgagggggccttcgagcagcgcctggagcttggcgctgaggcggcggccgccggcgagctcccggtacagctgctctatggtatcttgaccaaatgccat

SEQ ID NO: 26068 - DNA, 438 bp, Oryza sativa
  Clone ID: PAT_MRT4530_30895C.1
tttcaaatgagcaaaaaaccagaaacaggagcacgtctattcataggaggatttcctcgctacacagagaaaacagaattagaagaattttgttcaagatttggtaaagttaagcataccgacctcgttccttttagacaagtcgcttttgttacttttacctccaaagaagaggcaactttggctatgtttgggatacaacaacaggtttttaagggttctcatttacgcgtcgattgggcaaaagttcgtcaggataaaaaagatgcaaagtccgaatctgcacctgctgctggtgtgaaggctgatagtcaacctggtgctaaagattctgctaaagatgtcgctcctgctaaagaaagatatatccccggagatacgaaagaatctgctgttaagtctcaagaaaatatacaagttcaagtaacagaagatgtt

SEQ ID NO: 26069 - DNA, 727 bp, Oryza sativa
  Clone ID: PAT_MRT4530_30896C.1
ggctccaaactccaactcccagctccaaactcctactccagttggagctagctcctattggagttacagacccatcaaaagtgtttggcaaacttttagctccagatctgaaaaaaaaaagaaaaaaaaaaggaatccccgccgccaagcggcacgccgccgtcagccggccagcccccgcgccgccgccagccggccagcccccgcgtcgccgccaagcccacgcgctgccgctgagcccgcgcgccgccggccagcccccgcgccgccgccagcccccgcgtcgccgccgagcccgcgcaccgtcggccagcccccgcgctgccgacctcgcacgcctccgccgagcccgcgcgccgccgctagcccgcacgccgccgccgagcccgtgctccgccgccgccagcctgcccgccgccggttgccgccgaatcttgccggagaagatgggagaggagagagaggatgggaggaggaggaggagtttaggggtagttcaatggcatttctgtgtaaatacatcaaaattttaaagggtagtgggtcttttggggtggagtggagctgtggagcagcaaaaacccagctccatccccgtagtacaaatttgtggagctgctctgccaactccgctccaaaaaacaaagaatttgtaccgtttggcacagctccagctctaggtaagttggagttgggagctggagctgtgccaaacggggccttactc

SEQ ID NO: 26070 - DNA, 392 bp, Oryza sativa
  Clone ID: PAT_MRT4530_30897C.1
agctttgctaagaattaaacatgtgtaatggaagtgtcaggaattcagaatggtagttggcgcatatggaatggatttgatgactgaaaattgtgtaccctgtgaagaattcattgctggttttaagttttaacttcataccgttatcatttcaaggaaagaaggtcttgcaatcgatcttctgaagagctgagaaaggggtgtctcgaggggaacaaccagaattttggccaagccaaggatagacattgaccccactggaaaaagcacaaagaacattgtatatcgagatgttttattctgaacagattgtctaaggttgattagagagtaccatgttcagattcttctgaaggcccagttctttatattattcattggactgttgagct

SEQ ID NO: 26071 - DNA, 227 bp, Oryza sativa
  Clone ID: PAT_MRT4530_30898C.1
gggggggttgttttttggaagctcacaacattgaagttttcttttttaaagaattaatggtccagtaggggacaatacaatatagaacgggcttgccccaaatgccgaagcgagtaaacaagataattatttcaagattaattaatctttaatcatgcaactcaagcctttagagccagtcattggatgaggactaattatgcatgcatgggtgagctcaattagca

SEQ ID NO: 26072 - DNA, 676 bp, Oryza sativa
  Clone ID: PAT_MRT4530_30899C.1
ggcctggattaggagcaaaacattattatgctcttgatctattatgtcaggttgacgaaagcaagatggactatagggaccactattattttaacatttaggatttgtggatttctttcattttttgttttttctctgaccatttctgcacttttgtcaattcatatgcaagatggatagacccagtggaagcattgtaggcgtgtgcaagaaatagtgaagggatgcatcgagcacaaatttccttcctgatgaacattcattgttaacagtaggtaattgtataaaattaacttacaattccatttcaatcgccatacaggacttctttggagaggaggaagtttaccagatttgaactaatttttgtaaagtcatatgttccaaagaagcccttaagctaacagatggcaagtttgtgaacccatttatgccttttgaatgcatgatcaaatttttggtcaaataagggcatctatatagttaatgtggactgatggcatatattatatattaataatatttatttggtcagtgtttgacttgacatacactctgcaactgcatgtataatagaacttgtatttgtttatagatctctgtttactgattttagacattcagtggcattttagttcatttttcttatctttcgcggatcatttgaccatatgtg

SEQ ID NO: 26073 - DNA, 426 bp, Oryza sativa
  Clone ID: PAT_MRT4530_308C.1
aaaaacaaagggcccaaaaaacccccggttcgggccggattttaaaccggggggaaaaaccaagggggcccaaaaaaggacagggggggttttttgggcgccccccctaaaaaaccaggggggggcgaccggggaaattaaaaatatccccccccgaaaaaaaggaccaagggtgggggggccccgttaaggaagcggagtcccccccggcccccaacaaggggggcaacaaaaccggggagcaaaagggccccccgttttttaaaaccaaaagggggcggaatattggggggaggaaaaaacccaaaaaaattttcccgggggggaaccccctttttctcccgggggaaaaagcgggcgtctggaaaagggggcaaaaatccttaaccaaaccccatggtttaaagcaatcttgggggccccggg

SEQ ID NO: 26074 - DNA, 345 bp, Oryza sativa
  Clone ID: PAT_MRT4530_30900C.1
atggctaccatgcaggagagggtggaggaggtggcggccgaagctctagggaatttagatccggtggtctccaacttgttggataccagatctggcgtcccattgtttgttggcagcggagaggcggccgctgacaaccttagggcgaagggtaaaagggtcatctatgatgggtctataggtgagcatgtcaaacgtgctatgtgtcgggtgcacatactggcctgccacaactggccccttatgtgtgatgggccacatctagaatgggctccaattgaacccatcacaaatgcgttcacctgtgatgagacactttggcccgttactgataggtcatcatag

SEQ ID NO: 26075 - DNA, 999 bp, Oryza sativa
  Clone ID: PAT_MRT4530_30901C.1
atgagtaatattgggatggggatgggggtgatagaagctgggcgatttatgagaatgagttcagaacgacgagcgaggcacttggtgggcatgggtgttgtgctgacgttgaacacgtcgatcctaatactgggtagcgccacccgtgccccgacgcattgcacccgtggcgtcttcttgtggccctgtatcgcgatcggcctcttcttcatggtcgtcttcatcttgggcctgtgcggcgcgaagaacaacaacgagggtctcttcttctgccacctcctcggcgtgttcatcgccatcctcgccctcatcggcttcatcatcttcggttacgtggccatcggaccaggcatcgacctcagcgatgtgaaggcacgcgagtacaatctggacgactacaagagcgggtggctcagggctcgtgtggacgacgccgcgtactgggcaacaaccagcgcctgcctccgcggcgacaggggcgccgggtgcaaggccatgacgaaactggtccgtgacccacactccggcttgttcgtccccgacggcggccgccggcacgtcgacatgtcacctatccaggagccgggcaccaaagcatcgtcgccggtgatcccaccgtccacgtcggagctcgtcgccagcggccacatcctccaccatccacgccacgtcggagctcgtcgccggtgtcagcgtcctccatcatccaagccccacgccgaagctcgtcgccggcggccgcatcctccaccgtccacgccacgtcggagctcatcgctggcgcccgcgtcatccgtcatccacgctccacgccggagctcgtcgctagcggccgcatcctccatcgtccacgccacgtcggagctcgtcgccggcggccacgtccttcgtcatccacgccacacatcggagagagccccttcctcttctccggcgatttgctccctgacggagcggcgaggtgaggcgaggcgaggcagcgggggccttctccgatga

SEQ ID NO: 26076 - DNA, 929 bp, Oryza sativa
  unsure (1)..(929): unsure at all n locations
  Clone ID: PAT_MRT4530_30902C.1
tcggtaagcactgaagatcaatcagtagggggccggttggatgttaatgatgcaggcactgaaaatgtgggttctattgtaacgcctgtgcgtctaccatttactaacagttctgatatgtcctacagtacacccagcgagtataccatgcctctccaggcagaagatgctcatggagatgtcactaatctcagcgcgtctgaactaaaaaataagcgttctagagagtggtacgcatcattgaccaaagagcaaaaggaagatagaaacaggaaggcacgcgatgccaggaggcggaggaaggatgaatctcaaggtaatgtgcctaaagctacgacgtcaaaattttctactcctactcctacgcttggagatatttctattgtcaccgctggagatcccgcaggaagggaacaatgggttagtaatgatgaattattggacacccctacaacaaagggaacaggttgacaaagcaatatggactatagacgcagtggaagcattgtaggcgtgtgcaaaaaatggtgaagggatgcatctagcacaaatttccttcctgatgaacattcattgttaacagtaggtaattgtataaaattaacttacaattccatttcaatcgccatataggacttctttggagaggaggaagtttactatatttgaacaaatttttgtaaagtcttatgttccaaacaagccctgaagctaacagatggcaagtatgtgatgtgaactttgtgcggtgaaaacaacctggagcctttcatatgcatatgtagctgttgattttatagatnaaacccatctatgccttttgaatgcatgatcaattttttggtcaaataaaggcatctatatagttaatgtggactgatggcatatattatatattaatcatatttatttagtcagtgtttgtcttc

SEQ ID NO: 26077 - DNA, 183 bp, Oryza sativa
  Clone ID: PAT_MRT4530_30903C.1
ttgtgtttttttaaccccccccgccggccttacccttttagggtggagataatttattttattttgtatttacatatcctatagccgggtttgcctataaactgtatgaaacgatcaattaggattgccccaagttggtctatattaaactcaaatttggtaattttgcaaaatcaaatacaa

SEQ ID NO: 26078 - DNA, 555 bp, Oryza sativa
  Clone ID: PAT_MRT4530_30904C.1
atccaaggagaaaataacccagccattggcaatagtctacatctaatacagaagctataatatagcctatacgtgcgcactctccatcaatcgatcgattgatcatggagctaaagcacgcagcgcacacaagaaagtcttcagtctcaaccgctctgccgctgctgctgatgttcctcctcctcgccaccgcagctgcgtcggcgtcggcatcgccatcggcgatctcccatcagccgaatgatcttgaggacttcgcaacgtgcttcagagctagcagctgctatgacacggggtgcgcgataaggtgccgtgacctcggcttgaaccctgctggctcccgctgcaaggtcttgcccggtataggccagtgttgctgctgcggtcgactacctcctcctgcatcttcgtcttctccagtttttccatccattgttgcttgatccattatgtatgcttgcgtagtgatcgcgtgatgtcactaataaagtgctaaaatatgtatgtgtgcctgtgaggataatgtatgaaaaatatattatatatggatggctg

SEQ ID NO: 26079 - DNA, 364 bp, Oryza sativa
  Clone ID: PAT_MRT4530_30905C.1
atgtgatagaaaagtttgaagtttgaagaaaaagttgaaaactaaataaggcgtgatccgtgggatcaaaacgatcagaatatggacggtacactacgtggttttggatcctcttatttaaaatcggagggtggttgctgacacgtctattctactacttctagactgagctcgggaggaggggttctcaataaaacgaagctcgcattattgtattgtatgattaagccggagcccaccgtcgtggagtacctgtacccgtggaattgctagccgccgacgcagcacgtcatctaccaataccccgctagctcctcgtggtggtggtaataactatactaagtataaataaatcaatcgatct

SEQ ID NO: 26080 - DNA, 478 bp, Oryza sativa
  Clone ID: PAT_MRT4530_30906C.1
cccacgcgtccgcccacgcgtccgcccacgcgtccgcccacgcgtccgcccacgcgtccgtccaacaacacatgaacccttcagcaaactacgatcattttgcttctcaatgttcgagatactttctgagggaaaaggagagcggattcttgacctactgtctgatgcgaccgaccttgttctccagcagtcaacaattaaaggtcttaaagaggagtttactctgctttctgtgattccggagcacaaaccatagtcagggggaaggcccattccatttgaactacattagtgctgataccaatgtgcttggtaccatgcaataagttcatttgttctgcaggtatccgttgaaaattttgcggatgctgaggccttacttttttctgggatgctgaagcgtaccacagctgcaacaaatgctaacagcaagtcaagtcgatcgcagtgcattatcactatacgtgctgttcataaa

SEQ ID NO: 26081 - DNA, 542 bp, Oryza sativa
  Clone ID: PAT_MRT4530_30907C.1
cgggctgcaggaattcggacgaggtgacgctgcgtggccgacggggtcggcgtgctctccctgtccctcggcggcggctcggcgccgtacttccgggacaccgtcgcggtgggtgcgttcggcgccgcggcggccggcgtgttcgtcgcgtgctcggccggcaactccggcccgtcgggcgccacggtcgcgaactccgcgccgtgggtcgccaccgttggcgccggcacgctcgaccgcgacttcccagcctacgtcacgctccccaccggggcgcgcctcgccggcgtgtccctctacgctgggccctcaccgtctccccgccccgccatgctccccctcgtctacggcggcggcggcgacaacgccagcaggctctgcctgcccggaacgctcgacccggccgccgtgcgcggtaagatcgtgctctgcgaccgcggcgttaacgcgcgcgtggagaagggcgccgtcgtcaaggccgcgggcggcgccgggatggtgctggccaacaccgccgccagcggggaggagctcgtggcgga

SEQ ID NO: 26082 - DNA, 5235 bp, Oryza sativa
  Clone ID: PAT_MRT4530_30908C.1
cctcctcctcatcgccatcgccgcggaccaaattcccaaccctcgaagcggccaaaccccgcctcccccgccgccggggacctccgatccgggccattcgggccttcccggggcggcggcggccgtgggccgtcgttcgtggctatggaggggttggtggggagggcggtgaggaaggagttcccggggttcggggtgttcgacggggtggtggagtcgtacgacgccgaggcggggtacttccgggtgatgtacgaggacggggactccgaggaggtggagcttggggaggtggtggggttgctggttggtgggtcgccggttggggtggagatggcgcatccgctgccgttgacgcccgggcggcgcccgaagaagcggcggcgcggggatgaggaggggggcgttggcgtgggcgcggtggtggcgatggaggtggattccgtggttctggctgtccccgccggtggcgcggagcccgcgtcgccggtggtggtggtggaggggagtagtagggatgaggtggatggggacgtggtgtcggagatggcggagaagaggcggagggtggtgagtccagggcctgagtcgtccgggaagccgcttcggcggagcgcgcggcaggcgaaggcggccgcgcgggtggccgaaatggaggccgccgccgctgtggcggccgccgctgaggctgaagcagctgctgccgcgatggccgaggccgaggcagaggctgctgttacgccaccgcagtctgggagtaagcgtaagcgtgcaagcggggctggcaggtatcggtctgtcgcgaaggatttggagaaggctgcggtggagaggctgcctccgaagccggagcttccaccctcgtcgcagagtttggatttggaaggtctccctgctctcgacgtctttcaagtgtactcctgcttgaggtcttttagtaggcagctgttcctgagcccgttcctgctggagacatttgtggctgcactgcggtgtatatatgtgaaccctttgattgactgggttcatttttctctcctgcgagcgatgaagagtcacttggaagatctcgccaatgaaggagaccctccggcaatgcattgcattaggaatcttaactgggagcttttggacctagcaacttggccaatctatcttgctgagtacctattgactcgtggttcagaactgaggtatggtatgaagcttacagacctaaagctgttgaatacagagtactatactcagccggcaatggtgaagttagagttactgcgcgcactctgtgacgatgttctggaaattgaggctatacgttctgaagttgtttcaaggatgtctgagttggatgggaatgatgagctttgtaaaagcactcgtacaagaagaaaaaggagggcttctgctgtcaagaacctactgaattcttctcgggctcctgaagattccagtgacactgaagatggtaacagcgatgagtgttatctttgtggcatggatggtaatttgttatgttgtgatggctgtcctgctgcatttcactctaaatgtgtgggggtagtggaagatttattgcctgaaggtaattggttttgcccggagtgtttgatacagaagaatgatggattcaaaaatatggtaaagcctggaagaggagctgaggttctgggaatggatccacatgaccgactatactttggcacctgtggctatattttggtggttgagtcaactgctgaggattctctggactcgacatgtcattactatggcatttttgatcaccattcgcttttcaatgtgctaagaacatgccatccctcgtacagttcaatcactaacatgatatctttgttttggggcactgcaattgattcttttgattccaatggtcgatgtgaaaataacaaggaattcagtatctttgatgccaagatagactgtagtcatttattgccatcgaagcaacacacagaacatgagcagcttaagtcagataagaatggctcctgtgaacaattggcctgtgggaaagctcatgcctcggatccagatcggctggatcatgacacctctcaccacaagttctccttgagatctgcggttatttctgaaaatggaaatgcaactagtgccaagactcagcaagatgtttgttcttatgctaatggattgcctgctgagaataagatagaccaatcacctcacaaaaagataagtgattgttatatccattcgaaccctgctatgtacgtaaactactacagttttggtcaaatagcagcatcagctgctgaagagttgaaggacaagctatcggaaaacaaagaaggaaagaaagttggtcaggatgcagcttcattccagctaaaaacaatatgtaagaaatatgccaatatttttgctctgacagatcaaaagttgtctgtagagctgcgaaaggaaaaatgtggttggtgtaattcctgccaaatcagtggcggtgttgattgcattttcagagtcaccgatggcaaatgcatggagggtcttcagtcagaaaagaatatgaacagccatattattcttgccatacatatcatcttgtcaattgaagaacggctaaatggtctactgattggtccatggaaaaatccccaatttagcagttattggcgtaaggcagttctgaaggcttcagatgtgtcatcattgaagcaacctctccttatgttggagtgcccggtgcgacgtgttgccttctcagtggaatggcaaaaaccagcagactctgttgaagttgttgggtctgcagctcatgtcttggttcgtacatctaataaatcctcgagacatggaagcactagaaagccagggagaaagccatttattgttgaactcaaagttgactctcgtgatgttggtgtttactggcgaaggggtgggagattgtctcgtcaagtgtttcactggaagaggttgccaaagtccttgacatataaagctgttcggcaagcggggcgaattaaaatcccaaccatattatatagtgatggttcacagtttgccaggaggtccaaatacatagcttggcaagctgctgtggaaatggcagaaaatgtggcccagtttattttgcagatcaaagagcttgaattcaatatcaggtggactgagatattgagcactctccctgctagccttgcaacaaaggaaacccagaaaatagcacgtcttttcaagaaagttatagttcgcagaaagcgtgtagatggaacaaatgtggaatatttacttgattttgggaagagggagaatattcctccagttattgctaaacatggaaaaaaacttgacgaaccctctaatgagaggaacagatactggttaagtgaaggacatctccctctgagtcttttgaaggcatatgaagctaaagcattaactcgcttactgaaaaagaaagatattgatcaccttccaaagaagatgattgacttgaaacccccaaagccaaaaaaatcaggatttgatgatctcctagaaaaagcaaaaaagcaagtccttgggctttgtggccattgtgacaaagaagtaaagatcagtgatgctgtgaactgccaatattgtgaagcacttttccataaaaagcacttcaaggttcctagaggtgctactgatgcttattatgtttgcaacaagtgcctatctgagaaggtcttgaatgtgaagtctccacagaaaaaggttgtatcaaagaagaactctctgaaaaagaagacaaagaagcaatcacttaagattgtaacaagaagtaaacagattgttgccaaatccaagaagaagatgggcaagaataagggcaagcgtggccgacctaggaagtacccgctgaatgagtcaaagaataaattgccagagttgcgtgtgaaagaaccagccaatgtgcccaagaatgagccagctaaacgtatatcaaaaagattatattcaaagtacatgaaaggcaattcaaatatatctgagcgttcagcaaagaggaggaggactgcttctcattattcatactggttagatggccttcggtggacacaaaacccaaatgatgatcgggcaatatcttttaggacagaaagagttgtctttccctgcgaagatgctgatctgtctgaagtttttccagtgtgccgtctatgccagaaatgctacagtggagaatctatttatattgcctgtgaagattgtggagattggttccatggagacatctattctattactcttgagaatgttaataatctcataggtttcaagtgccatagatgccgtttgaaagatgtacctgtttgtccgtatgtacaaacagataatatccttatggctcaatctgataaggatgacgtcacaagcagatctatagaggacaaggaagacaggagcccaacagatctggttgcccatgacagtctggaagggtctcatggtcatatcattgagaaagaggttaatgatcatagttttgaaaaggaagttggtgatcatatttgtttgcaagcgcaggaagatcataatgaaaaggagctcgacagtcatagcactgagaaagagctcggtgatcataacaagacggaagagtttgatggcaatatgaaagtgctatttaatcttaacagtacaaaggagcttgatagtactagcactgagaaagagcttggtgatcataacaagatagaagagtttgatgtcaatatggaaatgttcttcaatcttaacaatacgaaggagcttgatagtactggagaaagcatatgtgctggtggagaagcacactgtctgcatgagctcaacaaccatgaaattcttaaggagtgtcatagtcttgacaataacctgggtgaactcgataatcaagactgccaaaaagagtgtcataatcaaaatagtctaaaagagcttgaaaatcatcgaagttcacaagagcttgatagtcataaaagtccagaagagcttgataatattataagtccaaaagagcttgactgtactgaaaataatgaacactctgctgcagtgacgcagtcggatggttttcttgatgaccccttcaacattaggatatctgacaaaggactgatcatagcatcagaaaatggtaagataaaggaatctattcctttgcaaaccaagaataaacctgaggagaatcctgttcctgctgatcatgacattgatcttcaggtggtggtgactttatag

SEQ ID NO: 26083 - DNA, 176 bp, Oryza sativa
  Clone ID: PAT_MRT4530_30909C.1
atgatctttccacgtgataaaataaatacgatacccttggaatactctcgggtgaaatgctataatggtatattcgtgtgcttgcggatgaactctgtaaccataatataccagaagtatttctgcgccattgctgggaattatatttctagtaacgtcgttaagaaataccaaca

SEQ ID NO: 26084 - DNA, 168 bp, Oryza sativa
  Clone ID: PAT_MRT4530_3090C.1
atgcggccgcgggggaattgggttgggatcgaggaggaggaggaggaaggcgaggacgaggatgaccagaagtttggagcggaacggaggaagtaccttgacatcaaggtccaacatctcgacaccaacggtattagcgtcgacaccctcgtcccttataaaagctaa

SEQ ID NO: 26085 - DNA, 679 bp, Oryza sativa
  Clone ID: PAT_MRT4530_30910C.1
cccacgcgtccgtataaagtaaaatgcatcagcggttcttaaatttgtcatgacgtttcacttatatacacgaacttataaagtgcgtatcgagtctcctaaacttggtttattgtatcatccctatctaaattctcgtttgaccgcggtcttacctacgtggcgtgtcgatgacatggtgtttttttttccttttcccccttttcttttttgtcctcttcttttatcttcttcctccgctagagccacttcaagctcccccatgccgaccaccgtcatcgccaagcgtcgttgctgtcggaggaagaggccgaagaagagagaaatgaaagaggaaggagggagaaaaaaaaaataataatgtgccatgtcgtcgtctacatggtatgccacgtaggcaagaccatggtcaaatagaactttagtccgggatgatataataaactgagtttagagatctcgatacacactttgcaagtttgtgaacctaaatgaaacctgcctacaagtttaaggaccgctagtacaatttactcttaattatataactgagatggtacccgtgttgctactggataaaggagttgtgacatgcactttttttaagttaagtagatgaatgtacaattgtggtgtatataactatatatatagagaaagagagtatcagttgtaacat

SEQ ID NO: 26086 - DNA, 591 bp, Oryza sativa
  Clone ID: PAT_MRT4530_30911C.1
atgattttgattcctaccagctataaatcgtacggcgaacagcttattagggagataggccctcgcgtcgccctcccccgggcagctcgcggcgcgacgcgcgcgccgccgctttcctcctcccaccgccccctcctccacctcgccgccgcccgagcgggtgccggcaaagccgcgcagccgcaaggacggcggcggcggggtctcgcctcgcccaccccacgctcggcggctgggggagctgtccggggcggcggcggtggcggccagatccacgccacatccggccggatctggaggggggtggccggcggggggattgacggtgacggtgccgacgacggcggcggacctcggcgactgaaggcaacgtcggcggcggaccacgacgactcgacgtcggtggtggaccgcggcgcgaccaggacgccacggcagggacctccgccgcgtcgtcctggtcgtctcgctccagcccggcaccgaggcgtgctccgtcccctggatccgcgccaccccggccggatctgcacgggcggcggctggtggcagcgaccggtgatggtggcggctggcggccgcggctggtga

SEQ ID NO: 26087 - DNA, 300 bp, Oryza sativa
  unsure (1)..(300): unsure at all n locations
  Clone ID: PAT_MRT4530_30912C.1
aattcggcacgagttgttttccaggtbtcatcatctatgcctgaagctaagagcgtgcagggtttgctcaaatgaaggtagcgccggccacttttttcttctctggcgagctttctgcatccacgttggtcttctattcctcgtctccgatgaaggttttacaaggtgcggttgaggtgtttctccgtttgccttaggtgcttcaacctccatcttagggaggctccttttgggttcgcatctaggmatangcatatgcagctagccatggcttctctgctcctattgtcgtcaccagtg

SEQ ID NO: 26088 - DNA, 468 bp, Oryza sativa
  Clone ID: PAT_MRT4530_30913C.1
atggcgatcgatggttccccggcgatccgcttgccgggacagcagcgctgggccaacggcagtggtggtggtaggggcctggccggcctcgctgccgcaaggccccagccgctcgctgttcgatccgagcgaagcggcaacaaccaacaactacgtaccgagtcccagcttcgtgataagatgaagtctgatgaagattattcgtcgtacagtgggttgatgcagtcaggcatcatcagaaagggatctttcacgtactacctccgctgcgtcgtgcagtccttcgtctctgccgtctgccccggcagcgcgagacatgggcaggacgtcgtacgagtacgacgcgctgttctttggggcacacacacggcccgtgtatacgagccaagcaagtcggcagccgagagagagacgagaacgagcggcgtgaccgtgacgcgtgcgtgggtcggcgtacggcgggcgtga

SEQ ID NO: 26089 - DNA, 2186 bp, Oryza sativa
  unsure (1)..(2186): unsure at all n locations
  Clone ID: PAT_MRT4530_30914C.1
agattattatctgctcctctggatatcggttagaccgggccctggaccggttagaccggcgcaataataccgattcaggggatagatccaatgactaatgctagttatttgtatcatcttagaacatttgatcctcctgtatctactactgcaactaatccccgagttcccccacgtgttcctaatgcttataatgatgttgctagggagtatcctcctgatactaggcaaggccaatataaccatattgcgtcgcaaacacaacctattaggccaccaaatacaccaccaaatcaacataggcctgataatatggaggaaataattagtgggattattatggataaattcaggattgaaactaggaatcgtgctaaggtttaccaaaagtcgtatcctgactattatgataatgtgctgtttgcttgtaattatagagttcccgaatttaccaagtttagtggtgaagattgtagaaccacatgtgagcatgtaggtcaatttttagcacaatgtggtgaggctaatagtgatacttttaaattgcgcttgttttctttatctttgtccggtaccgcttttacatggtttacttctttaccggcaaatttctattcatacttgggctcaattagaacaaagatttcatgattatttctatactggagaaactgagcttaggttatgtgaagaaaaaaatataatgagcctgtcattgattatattaagagatttagggatgttataaaccgatgttatagcttgaatataactgatagagatttggctagtctttaattgctcctcttagagaaagactagatggccaacaatttcttgatgttagtcaacttttgcaaagggctctggctcaggaaagctgggttaaggataataaaaaaattgttagaccatatgagaaaaggcctaatgttaatatgattgattaccttgaggcgagtgatagtgaagataagggtgatcatgatatgtatgttgctgaatggtcatggactaacaaaaacaagccttttgtttgttctaacctaatgccgactcctcgcaaagatcggcaaagtgaggttaaatatagttttgatgtggccaagtgtgataagatctttgattatcttttacaagaaaaacaaattagattatctaaaggccatatcataccatctcaagaagaattgaaacgtcgagcttattgtaaatggcatgattctcattctcattccactaatgattgcaatgtgttttgacgacaggttcaatcggccatagatgaaggacgattgaagttcaccgatggctccaagatgaagcttgatcatgatccttttccggtgaatataattaatttcaatgacaagaaggtgttgattcggccggagcaagccgaatctactaaggaaaaaggaataatcattggtgaatcaaggccaaagatgatagtgccaaagaagccggagaaatatgaaaagcaaggtggtgagagagcttgcaacaatgggaaaagaccaagatcacctcctagggagcgatttggtcactcgccaagatggttgcattcacctccatatcatcattcacaagacataccatggggtccctatccaatgccgccgctgggttatccttatccttattacatgccatggggggcaacgccgccaatgttcaatcatatgcctccaatacaattcaaccaaaggtggggaggaccaaggaggccaattcatgaacatttgtcttcaccaaacaacggctggttttatggtaagagccgggccagtgaggaaaggagagaaggaaagcgcattaaagtggaggcaaggacttcagaggtaattaccatcaaagtagggtctcatgatgtaccaataccttctggagatgaagttagagagtcctcgagaaaaaaatccgaagccggtaccagctcatcgtagtcggctggtctgaccgggccttctagccggtctgaccgcagccatacggccggtctgaccgggccatcaggccggtctgactgccgacccgacaatggttcgaccgacgcctcaagccggtctgaccgntcccttgaaaaatccaactatgttaccgccaaaattagaccaanntcaaacttgggggttaaactttccggaccgccggtcccaaaagaaaaggtattaattcaa

SEQ ID NO: 26090 - DNA, 122 bp, Oryza sativa
  Clone ID: PAT_MRT4530_30915C.1
atggcgcgcggggtgcgcgtcctagtatttgagagaataggaaatgcaagagagttccggttcaggctgggaatgttctgccagatactttcagcatcagctcaatccaggctctgcccaaa

SEQ ID NO: 26091 - DNA, 635 bp, Oryza sativa
  unsure (1)..(635): unsure at all n locations
  Clone ID: PAT_MRT4530_30916C.1
ggcgctgacgagctcgantacggcgcgcgggcccgcgccatgggcgacngacgaggcgctccagccggggcagctctacttcgtgctcnccgtctccgcgntccgccggccnctgtccggccacgacatggccgcgctcgccgtcaaggccagcgcggcgctctccagcatcggcgtgccgacgtcgtcggcaacgcggcgcaaggacgaccgggacggcgcctcggccagcggcaagcggcggcggacgtcccgggtggctccgctcgccgtcgtgagcggcatcnatgcgcacgcgacnccgttgatggcgaagacgagaaagtgtggtcgtcgtcgtgcatgcgtgcgaaggttgagcgtagccagcgagtgatccgtccatccattaattcgacgatctcagcatagctgtgattagcttttgatcacncgagttattgtggatttgtggtttagtttagttgatttttagtcgttcatcccccatttgaggaggaggtagccatgtacagtaagtaagaacgtacaaaaaaacaaagcacattttgaacttttttttcatgtatatttaattgcgatgttccgataatgacnctatggtactaattatcgaatgaaaaaaaaaaaaaaaa

SEQ ID NO: 26092 - DNA, 2467 bp, Oryza sativa
  Clone ID: PAT_MRT4530_30917C.1
atgccagtcgcggttcagccgacctctggtgtcggcgggaggggtggacggcgcacacagccgttccgaccgggcctctggccggtcacccccgtggtcagaccggacctcagatcggtctgaccgcacctctggaggcaggttagaccgggtcttggactgggggaatcctcctgatactaggcaatgccaatataattatattacgccacaaccacaacctattaggccaccaaatccaccaccaaatcaacataggcctgatagtatggtggaattaattagtggaatcattagggataagttcgggattgaaggtaggaatcgtgctaaggtttaccaaaagccgtatcctgattactatgacaatgtaccatatcctcgtggttatagagtttccgaatttaccaaatttagtggtgatgatagtaggaccacatgggagcatagatttagagatgttagacaccgatgttatagtttgaatataactgatagagatttggttgatcttgcttttaatggtttaattgctcctattaaagaaagattagatggccaacaatttcttgatgttagtcaactcatgaaaaaattgttagatcatatgagaagaagcctaatgttaattcaattgattactctgatgcaagtgataaggaaggtgagagtgatcatgatatgtatgttgctgagtggtcatggactaacaaaaataagcctttagtttgctctaatttaatgtcgactcctcgtaaagatcggcaaagtgaggttcaatcggccatagatgaaggacgattgaagtttaccgatggttccaagatgaagcttgatcatgatccttttccggtgaacacaattaattttaatgataagaaggtattgattcggccggagcaagccaaatctactaaggggaaaggagtgatcattggagagcctaggccaaagatgatggtaccaaagaatccggaggttggtgtttggaaggagaataggagtggagcttcgagttccaaagctcctaagaagactaaggtgaccttcgatatgcttttggacaagtatgagaagcaaagtggtgagaaggctcgcaataaaggaaaaagaccaagatttcctcctagggagcaatttggttccttatccaatgccgccgccggtttattcttatccttactacatgcggtggggggcaactattcaaccaaccggaccaatgaagaaaagaaggaagaaaagcgcgtcaaagtgggaactaggtcttcggaggtgattaccatcaaagtgaggtctgatgatgtgccaataccttctggagatgaagttggggagtctttaagcaacaaatctgaagccgggaccagctcatcgcagtcggccggtctgacctcagccatacggccggtctgactaccgacccaatgttggtctgaccggcgcctcatgccagtctgaccgccgacctaatgtcggtctaaccggcacctctagccggtctatctagtggtctacgtccggtctgaccgggctcgaagcgccggttcgacaggaggtttgcaaagagtagtgagggggcttcatcatcgtcaagtagacttaacagagggcattatttacctcctggaatagagccgaaaccgaggagattcaaagagttgcaaccaccgcctacaaagatgtggaggcgtaagtccatagacattgtagaatcggttgttgtaaaggagaaggaagaacaatcggttgctaaagatgagtcatctccaaaggaagacatggatgtcaacatggtatatatgttgcctatggagttttgtgctatggataaagccgaggttgctcaattttcactaggtcctaaagatgcggttttgagaagcccggtgagtcaaaccgtcttatgaagcctctctatctcaaaggtcatattgatgggaagtcggtctctaggatgctagtggatggaggtgccaccgtgaatttgatgccgtactcgttgttcaagaagttggggcgtggagatgataagttgaagaagaccaacatgattctcaatggcttcaatggtgaaccaatagaggcaaagggtaccttttcgatggagcttaccgtggggaacaagacgctaccagccgctttcttcatcgtcgatgtgcaaggtaactacaatgttattttgggtcgttgttggatccatgccaattgttgtgtgccttctaccttgcatcaatgtttaattcaatgggacggtaatgatgttgagattgttcaagcggatacatcggccgaggttacaatggccgatgttacgtttgagtggcgtcatggtaatattcaatgcttatcagggatggatctttctagctatgattttattagtatctccaatggcaaatttgtacccatctctgtaaagctggctagtttagcacggcttggccatatcaatttgtgtaatgag

SEQ ID NO: 26093 - DNA, 1830 bp, Oryza sativa
  Clone ID: PAT_MRT4530_30918C.1
cggacgcgtgggcggacgcgtgggcgccgacggcgcggagagaaatctgactctccaacctcccgtccttggtccttacacgcaattataggggcgtgggtcccacgtctcagtgagagagagagaagctttttttttctacatctgagacgttcgccggagatggcgtcggagctcacgtaccgcggcggcgcgggggccccgggctccgcctccgacggcggggagtactcccccaagccctccaagccgctctcctggctcacccgcgccgcccgctacgccgccgccgagcaccgccccgccttcgccctcgccgggatgctcctcgccgccgccctcttctccctctacgccccttcctccgacgcctcatcctccgccgccaccaccaccaccaccaccttcagccacctctcctcgctcccgtcgtcgtcggcggcgtcgctgcacgagtccgccggggggaaggtgccgctgggcctccgccgccgcgcgctgcgggtgctcgtcacgggcggcgccgggttcgtcgggagccacctcgtggaccgcctggtggagcgcggcgacagcgtgatcgtcgtcgacaacttcttcacggggcgcaaggacaacgtggcgcaccacctcgccaacccgcgattcgaggtgatccgccacgacgtcgtcgagcccatcctgctcgaggtcgaccagatctaccacctcgcctgccccgctagccccacaaccccatcaagaccatcaagaccaacgtggttgggacactgaacatgcttggattggccaagaggattggggcaaaatttctcctcaccagcaccagtgaggtatatggagatcccctccagcaccctcaggtggagacttactggggcaatgtcaaccccattggtgttagaagctgctatgatgagggcaagcgcacagctgaaacgttgaccatggattaccaccgtggtgccaaccttgaggtgaggattgctcggatttttaacacatatggtcctcgcatgtgcattgatgatggccgtgttgtcagcaactttgttgctcaggcactgaggaaggaacctttgactgtctatggtgatggcaagcagactaggagctttcaatatgtctctgatttggtggaagggttgatgagcttgatggaaggggagcacataggaccatttaacctgggtaatccgggtgagttcaccatgctggagctggctaaggttgtccaggacaccattgatccgaatgctcgcattgagttccgtccgaacactgcggatgatccacacaagcgcaagcctgacatcacccgtgcgaaagagctcctgggctgggagcccaaggttcccctgcgtgagggccttcccctcatggttaccgacttccgcaaacgcatctttggcgaccaggaagcctaatctgcagcagctggtggcatgtattaaatttcaacatgacaacggcacacaactcattaaaatcctataacttgtactttatagtaactacatgtggagaagttaaatcgggtagaaatacttggaaaggaaattggtgccttggttctttggttgcttcatacctcacggacaaaatggccatggctgaatacatagctagttctttggacacatggggatgctactaatactatcaatctatcataggcactactgtaagctactgtcttttttggtcttgctcatagaagccatatggtgttatacatgtaatctttattggaaactcgatatatgtttcagtatgaacagaacattccacttgcttacatgaagcatctttttaaacttttttttgacc

SEQ ID NO: 26094 - DNA, 3321 bp, Oryza sativa
  unsure (1)..(3321): unsure at all n locations
  Clone ID: PAT_MRT4530_30919C.1
gggaggggcttggggggtttgtggaagcacgagggcggagagaaatctgactctccaacctctcgtccttggtccttacagcgcaattataggggcgtgggtcccacgtctcagtgagagagagagaagcttttttttttctacatctgagacgttcgccggagatggcgtcggagctcacgtaccgcggcggcgcgggggccccgggctccgcctccgacggcggggagtactccccccggccctccaagccgctctcctggctcacccgcgccgcccgctacgccgccgccgagcaccgccccgccttcgccctcgccgggatgcggttcaaccgcggcgaacccgccggcgcggccctcggctgagccggcggtgagccggcggcagcagcagctgccggcgaggcagttcgtgggcgggaagtgtgccgctggggctgcggcggcgcgggctccgggtgctggtgaccggcggcgccgggttcgtggggagccacctggtggaccggctggtggagcgcggcgacagcgtgatcgtggtcgacaacctgttcacggggcggaaggagaacgtggtgcaccacttgggcaacccaaacttcgagatgatccgccacgacgtcgtcgagcccatcctcctcgaggtcgaccagatctaccacctcgcctgccccgcttgccccgttcactacaagtacaaccccgtcaagaccatcaagaccaacgtggttgggacactgaacatgcttggattggccaagaggattggggcaaaatttctcctcaccagcaccagtgaggtatatggagatcccctccagcaccctcaggtggagacttactggggcaatgtcaaccccattggtgttagaagctgctatgatgagggcaagcgcacagctgaaacgttgaccatggattaccaccgtggtgccaaccttgaggttaggatcgctcggattttcaacacatatggtcctcgcatgtgcatcgatgatggccgtgttgtcagcaactttgttgctcaggctttgaggaaggagcctttgacggtttacggtgatggcaagcagaccaggagtttccaatatgtctctgatctggttgagggattgatgaggctcatggaaggtgagcacgtagggccattcaacctgggtaaccctggtgagttcaccatgctggagctggccaaggttgtccaggacaccatcgaccctaacgcaaagatcgagttccgtcccaacacccaggacgacccgcacaagcgcaagcctgacatcggccgtgccaaggagctccttgggtgggagccaaagatccctctccacaagggtcttcccctcatggtcaccgacttccgcaagcgcattttcggtgaccaagacagcaccgccacaaccaccggaggccaacaagggtagaaggaggaggaggcataagactctggaaattttgatggcctgctttctagctgcttggttaagctccttactgacaaaaggcatggcctcatagttagttcctctggagctgtttgttactaaaaataccttggttgatgatgctgctgctgctgcctgtgatgtcattcttttttcttgtaattttttcttcctcctctcagtctctctcatctatacgaaacttcagttggacataaaagttgtggatcttctgattctttgttgagatgatagcattatatggtataaattacatgttccttcactcatagatagcctatatggtgttatacatgtaatctttattggaaactcgatatatgtttcagtatgaacagaacatctcacttgcttaaaaaaatcattttattaatcttttttttgaccaaatttgcactggattggaggaaaaggaatggtttgtgatacattacattacttggcaagttggcatatgtcttgactcttaacacctctataatacacgaagtcatgcacactgtgccacttattgaccattctaggcaggctggagcctctaatctttacattgttacaaagctacatttccgagtggtgatgcgttcggccggcgagcccggagaagcagccgccgcgccgccgtggagggccgcgcttggcgtcaccgtcgacgtcagcggcgccgcccctctcgccgcggatgaacctgtccggcgacgccatcatcttcatcaggcggtcctccaccgtccaggtgcggctgcgcccgttgagccaggcgacgatgtcggagaagatggcgtcgacgttgtggtcgggctcgccggcggtgaggccgtgccacatcccgggcgtagagcttgatggccttgtcggcgctggcggcgcgctccgtacagcgcccggctccacctccgggctccgtcaccgtgttcggcgtccgccgtgcagcacgaagaacggcagcttcaccttggacaagctgtcctctacgtgcatgcttggtcactgagcatctcaagtgcggtcttgagcctcggcttgtcctgaccaatggactggcggcttcacatttttcggatatcttcagggtccttgaaggcggcgtcgatgacgtccttggtgggaacaatcttccacctggggatgacgtcctctacctgcgtcaggagagagatcaccaccgggtgcggcttcaccttctccgatatcttgcacattggcgcgacgaggatggcgccgtcccagaacgttgggtccttcatgtgcagcagcagcgccaccgcgccgcccatggactcgccgtacaggaaccggctcttgctcctgtactcctccatgtctgcaaattttgcaatgcgagcagcatcagtcacagtgaggcaggcatccatgcaagacctgggaaaatggctggtgattgccgggtagtggtgatcgctgaactggggggtcccgcagatggacttgaagaagcggtggcagtcgtcgacgagacggcggaagctgcggatgtagcagcgggcgcccatcgacttgccgtgcccctcgtagtccatgccgaacaccccgtaccccgccgccgccagccgcatcccacactctctcatgtagccgctgcactccatggcatagccgtggcagaggaagacgagggccttgggcgacgttttggcgggcagccagccgcaggtgaagagctgcacccctctcgagttccgcacgtactcctgctccccccatccatccattgatatctcggccggcctcgagaggaggaggagaatgaggaagaagaagaggaggaacggaggaggcttgtgtagttagtattagtttgnctntgacgccgtggcacggtcgtggaaaag

SEQ ID NO: 26095 - DNA, 243 bp, Oryza sativa
  Clone ID: PAT_MRT4530_3091C.1
taatattaaaattaaataagtatgtcttgtcggtttctgataaggtttaaaataatgttactgtgtgtgctactacacactgctaaataaataggttgatatatatatactaccagtgtgaggtttcggcgtactggtcatcgttgtaacgtacctcagacgtcatggatcccatctgaggtgtgtacctcccgtttaactctcggtggacccgagggactcgaaccccgagtggttgtttcg

SEQ ID NO: 26096 - DNA, 1264 bp, Oryza sativa
  unsure (1)..(1264): unsure at all n locations
  Clone ID: PAT_MRT4530_30920C.1
atgacgaagccatcatccaagacggaggtggagccatctaatgtgatgccggtcacattagatgacttcgaaggagaggatcgtaaagctatggaggagtacatcaacgagctcacacgggaggccttgatgagatcaactactaggactcgtcaaggtgtgatcatcaagcccgggccatgtcccaagctcgctcccgacatggtaagtaatgacgaggtatcacaatctatccaacaacaaattgcatctacaatagattcatctatggctaattttaaagatagattagattagatgtaatgtttaaagataaggttgatggatttttaaggagtaggctaggttcttttatggataattatacattaaaggataaagcctataccactgttgatcaatctcctatagatccaatgggtaataaaaccaacggaacggcattcacagccggtccgaccgggttttatcccagcggtcagaccggctctcaggccggcccgaccgcgcatcatgacgccggtcagaccgggccctgggccggtcagaccggcgtagtcgtcccaatatagggcatagatccaatgactaatgctagttatttgtatcactttagaacatttgatcctcctgtatctactgctacaagtaatcctcaagttcccccacatatttctaatgcttataatgatgtttctaggggatatcctcccgatactaggcaaggccaatataatcatattgcgccacaaacccaacctattaggccaccaaacccaccaccaaatccacaaggacctaataacatggaggatatgattagtgatattatgaggaatagattcgggattgaacctaggaatcgtgttagagcatacaaaaagccatatcctaattattatgacaatgtgtcgtttcctcgaaattatagagttcccgaatttgccaagtttagtggtgaggctaatagtgatacttttatattgtgcttgttttctttatctttatccggtactgcttttacatggtttacttctttaccggcaaattctatttatacttgggctcaattagaacaaaaatttcatgatcatttttgcactggtaaaattgagcataggttctctgatttaacatcggtaaggcaaaaatacaatgaatctttcgttgattatattgaaaggtttagagatattaaaagccgatgttttagtttgaaaataactgacaaagatttggccatcctctgttgtaataaaancgn

SEQ ID NO: 26097 - DNA, 1389 bp, Oryza sativa
  Clone ID: PAT_MRT4530_30921C.1
atgtccagggcaaacagtcgacagacaaaggcacaaagctgtgaagggctgaatgctgaagggatcgccggcggcccagcgtggggtgaacttgcagaggcgccgtggagggcgcagggcgatggaggcggattggcggagactgccgccgcactgtctgtactgttagagaagtgcaagaatgtcgaggtcaatgtacagcaagaagaccaacaaaggagtattcctcttctcttgtacctcactagtcaaagtgacaaaaatgggagcactcctcttcactttgctgcatcgttgaaaactagtattgaaggtttcacatcgagattatgtgaacattttcgcccgaaacaaagcccaacaacattgcttcttggactcaatgaatctgctatatatcagccagacaacagaggatcatatcctatacttgttgctgcctccaatgggatactcaaggttgtcataaccttgctcaaaaggtatccagattgtgccactttgcgtgacatccaaggaagaactttcttccatgttgccgtggagaagaagcggcgtaatatcgttgcatatgtgtgtgaaaggccaggattttctcctatcttgaatatgcaggacagccatggggatactgctctacaccttgctgtcaaagccggctaccacatgttaatctttcagaacccacgatatatgataagtcaactattagcactttctggaggtactgttggttacagtcgccaggaccacttcttcgaaaaatacagcaagaaaagagacgaagtaatcgattcaaacgatatgacaagtgcggcacaggttctcggcatttcttcagcgcttatagcaaccgtgacatttgcagctgcattcacgttgcctggaggttacagagcagatgaccacactgatggtggtacaccaacacttgctgggagctacccttttgacgcgttcattatctcgaacagcctagcattcatttgctctttgctagctaccgtgagtctgctctactctgggatacaatcgagggacatctccatccggcgcaggtactacgcgttctctatgctcttgatgcagagttcaactacgagcttcactgttgccttcgccatgggaatgtacctggtgctagctcctgttactcttaatgcagcagtgtctgtctgcatcatagcatttgtttctctgctacctggaaatatggaaatcggggtatccctagctatcgcaaacacattgaggattagattgggaatttgggcagcgatgtcccaagcaaggccagttctcctgttcacgtggaaaagagtttggtcctgcataattatctttggattgcctggattgatgaagattcatagaaccaaaatggcttga

SEQ ID NO: 26098 - DNA, 492 bp, Oryza sativa
  Clone ID: PAT_MRT4530_30922C.1
ttatctgtgaccgtattaaataccaacatcgtgcttattgtaaatggcatgattctcactctcattctactaatgattgcaatgtgtttcgatgataggttcaatcggccatagatgaaggacgattgaagttcaccgatggttccaagatgaagcttaatcatgatccttttctggtgaatacaattaatttcaatgataagaaggtgttgattcggccggagcaagccgaatctactaagggaaaatgagtgatcattggtgaactaggccaaagatgatggtgccaaagaatccagagaagtatgagaagcaaggtggtgagagagctcgcaataaagggaaaagaccaagattacctcctagggagcgatttggtcactcatcaagacggtcgcaatcacctccatatcatcattcacttgacatgtcatgggggccttacccaatgccgccgccgggttatccttatccttactacatggcatgggg

SEQ ID NO: 26099 - DNA, 1630 bp, Oryza sativa
  Clone ID: PAT_MRT4530_30923C.1
ctttcacctctttctctaatagactttgctttccacttccatatcgagttataacatttcgttaagccttccctcaactagctgcttggtctgttggttggatcaagctctcttctggaatacgaaaggaatgtggaagattgtaatgtagcatggtaggtccaggatcgatgctttgctagaggatagcgcccttttggggggcctgcaggcctccattctgaccttctgggcctgttgctcattgagggcattgcagttcaatttccacactaaagttagctgtgcgactttggatttgggtctgatgctgagatggaattttgattccagtggtgcatatctgacccagtgactcctacctgttttggtaggttttgctatattcactgattttgacactgactgacatgctacatgtatagagtggaacaactatcgtggatcaaattgatcttcttcaagagcaggttaaaatgctggctggggaagttgcactttgtacaagctcactcaaaaggttgtcagagcaagctgcaaacaatcctgatgattcacaaattcaggaacaaattgaaaaattgaaaaatgaaattgacgaaaagaaatcgcatatacgtgtgctggagcagcgtatggcgcaatcattggaaactaccgaagacccagctattaggactgaaatgtcccagaccttttcaaagttaagcacacaattgagcgagaagacatttgagttggagatcatgtctgcagataatagaattcttcaggaccagctacaagcaaaggtatcagaaaatgcagaactcgtagaaacagttgctcaactgaggcaagaaattgataatctgttgaagactgccaaaaacgaggataatgtggctagtatgcagtcaagtgagccatcaagtacaagcagcaatcctagggatctggcaaatgaagttgcaagtcattcaaaaatgccctctagaacaactgaagatcatacggagtcaccactgaaatctcaagtgctcttgcaggctgcagaaatcgagaatttgaagctagacaagctgaggttggcagaagagaaagatgggctggaaattcacagtcaaaagctggctgaagaatcatcctatgctaaagaattggcagctgccgctgcagttgaactaaagaacttggcagaagaagttacgaggctttcttatgaaaatgcaaagctgaatgcagatttagctgcagcaaaagatcaaacaaggatcagtatccagagtgacacaaaacgccgtgatcaggagaatggaatctttgtagaggagctgcagaaagagttggttgctagctgtcagagggaggctgtgttagaggacacattgtcccaaagggcccgaagagagagtgaacttctaaaggttattgaagatgcaaaatgccatgagcatgatttggaaaatgaactggcaaacatgtggatgcttgttgcagagttaaagaaagaaaattctcaggaggacttgttccaattcaaggcaacacaaaatggctatcattcatcgaagagtgatactggcaggatgatgagtggaatggaagcttcagataataggaactgggatggtgtcagtgtcagcactta

SEQ ID NO: 26100 - DNA, 279 bp, Oryza sativa
  Clone ID: PAT_MRT4530_30924C.1
atgcaggagatttggaggacacctgtgccgctgaaggatccctcaatcgacagcgagatgactatattgatgtgggaagcagagaggtccaaaaatatagttatgtggtatctttttgttgaagtgaaagcgtttggtgccgtcgacgctgataggagagatggagactttaggggactcactacttgccaatatccatggaatgtgatagttgcaaatgctgccgcagtgaagacgctcaaggacatggaagccaaccgctgcatcaagcgtctttaa

SEQ ID NO: 26101 - DNA, 496 bp, Oryza sativa
  Clone ID: PAT_MRT4530_30925C.1
cttgccatatcggccaattcaagtttctgtccggtttttagcctatacgatcatctgagagagcgagttgcaattcccatccttcatgatcccactcattatcttctcagtccaatgggtaatccagatccaacgtacttcatcaactcagaaaccaacaggatcccttttagggaaacaaaaccagaattatcccattggctcacagtcttcagatcatgactttccaaacttgatgaatggagagactggtttgtatggatatcggcctccaagcaatccacatggaaaaagatggacatatttcaatgtttgctgctgtctctagccgatatgcccaagagtgagtccatgctatcagctgcaacttactttctggtctgatacattaaatgtcttaatgttcggtcaaggtccaatgacaccagaccaactctcctagaaaattaagctcgccatgccatctgcatcaagataaaatccgataacttgaaca

SEQ ID NO: 26102 - DNA, 770 bp, Oryza sativa
  Clone ID: PAT_MRT4530_30926C.1
agtcgttttgggacgcgacaaaacctttgtgcgaaattggcaaaactggagaccaggggcgatctgaccggcattgcgcggccggtctgaccgctgaccaggggcggtctgatcggccacgtgccactggtctgaccggccaccccgggcggggatgcgaagcttgtcaacggttcggcaatgttcaattggtgcccgccgccgcgttgaacactatcatcaaaccatggccgttccgaggttgggctttggattacattggtcaaatttatcctttgtcatcaaagtggcataggttcgtgctagttgctacggattacttcaccaagtgggccgaaaccgtgccgctcaagaatttgactcatacggaggctaatggacatgccgagtcgagtaataagacgttgttgaagctagtaaagaagaagattgaggaacacccaaataagtggcatgaaattacaagacatatgggagacaaccttgatgaagtcatcgataagcgcttgaaggctttggaagaaatagagaaagagaagaagagggtggccaaggcgtacaacaaaagggacaggagccccgtccactgcagcgtgtggatctccatggatggcattgtcgacctctacctctccatggactccgtcgacctcctccacctgacctctgctccgagccactgccgggtgtcctctggatctggaggccatcattgcgactccgtcaccatcgacagggacccgccacccaccgtccgccaaggcgtttga

SEQ ID NO: 26103 - DNA, 4425 bp, Oryza sativa
  Clone ID: PAT_MRT4530_30927C.1
atggtcgccgccggtgaccaccggcgcggtggagcggcggccgagagaggggagggaagggggaaaggaggcgacggtccacggctcaccccagggcgacggcggcgacggaggaggcagccggagcggagggaggcggtggcgcggctcgggtcgacgggtacggcggcgctccggcggtcggcgaccgaaacggagaggtggacgaggggatatcctcccgatacaagacaaggccaatataatcatattgcgccacaaacacaacctattaggccaccaaacccaccgccaaatcaacaagggcctaataacatggaggatatgattagtgatattatgaggaatagattcgggattgaaactagaaatcgtgctagaacttacaaaaagtcatatcctgattattatgataatgtgctgtttcctcgaaattatagagttcccaaatttgccaagtatagtggtgaggatgttgctcctcttagagaaagactagatggccaacaatttcttgatgttagtcaactcatgcaaagggctctggctcaagaaagccgggttaaggataatagaaaacttgctagaccatttgataaaaagcctaatgttcaatcggccatagatgaaggacgattgaagttcaccgatggctccaagatgaagcttgatcatgatcattttccggtgaatacaattaatttcaatgataagaaggtgttgattcggccggagcaagccgaatctactaaggggaaggaagtggtcattggtgaaccaaggtccaagatgatagtgctaaagaagccggaggttggcgtttggaaagagaataggagtggagcttcaacttctaaagcccctaggaagaccaaggtgacttttaatatgcttttggagaaatatgaaaagcaaggtggtgagaaaattcgcaacaaagggaaaagaccaagatcacctcctaaggagcgatttggtcattcaccaagacggtcgcgttcaccttcgtatcattatccacaagatatgtcatggggttcctatccaatgccgccgtcgggttatccttatccttgcttcatgccatgggggccgacgccgccaatgttcaatcatatgcctcctatgcaattcaaccaagggaggggaggaccacggaggccaattcatgagcgtttgtcttcaccaaacaatagccgattttatggtaagaatcgggctaatgaagaaaagtgggaaggaaagcgcgtcaaggtggaggagaggacttcggaggtgattactatcaaagtggggtctcatgatgtgccaataccttctggagatggagttggagtgtccccaaacaagaaatccgaagccggtaccagttcttcgcagtcggccggccggtttgaccgctcgccacatgttggtctgaccagcgcgtctggccggtctgaccggtggtctacggccggtctagccgggctccagcttcggtttgatgagagggctgcaaagggcgatgtgagggcttcatcgtcttcaagcaaagttaataaagggcattatttacctcctggaatagagccgaatcctaggtggatgcctaaggatttgacggctacacaaaagagaaggttgcaacgtcttcgggcccaagaaataagagagaaaaaggccgaagagcaaagagataaaaggtttaacgagttgcgaccaccaccggtatggaggcctaagtccatagagaaggaaaaaccggttgatataaatgagaaggaagaacaatcggttgacaaagatgcggtttttgagaagcccgatgagtcaaaccgtcacatgaagcctctttatctcaaaggccatgttgatgggaagccggtctctaggatgctagtagatggaggtgctgccgtgaatttgatgccatactcattattcaagaagttgaggcgtgaggatgatgagttgaagaagaccaacatgattctcaatggcttgaatggtgaaccaacggaggcaaggggtatcttttcggcggagctcaccgtgggaaataagacgctaccaaccgctttcttcatcgtcgatgtgcaagagtgggtatctagcatagtcccggtggaaaagaaggggagtgataagattagagtttgcatagattttagagatttaaataaagctactcccaaagatgaatatcctatgcctatagccgacatgatgattaatgatgcctcgggtcataaggtgattagttttttagatggcaataccggctacaatcaaatctttatggcggaagaggatatgtacaagacggcttttaggtgcccgggatttgttggtttgtttgagtgggttgtcatgactttcgggttaaagaatgccggtgcaacatatcaaagggcaatgaatttgatctttcatgatttgttaggtattgtcctggagatctacattgatgatattgttgttaaatcggatggtatggaaggacatgtagccaatttgaggttagctattgagaggatgcgccggtatggtttgaagatgaacccacttaaatgtgcttttggtgtgtcggcggggaagttcttaggattcatggtgcatgagagaggagttgagattgatcctaagaagatagaaaagattcatgatttcaaagcgccgacatgcaagaaggaggtccaaaagttgctagacaaagtcattggtgccattttgacgcaagaggaggatggcaaggagtatatcattacatatttgagccgccgccttttagatgccgaaacaaggccaattctaagtgggagaattggtaagtgggcatatgctttgatagaatatgatttggcttatgaaccattgaaatctatgaaaggccaaattgtatgtgattttatagtagaccatcatatagatattgcttatgagggagaggtttgcttaattgaagttataccttggaagatttattttgatggttcttcttgcaaagaaggtcaaggcataggggtagttttgttttcacctaatggcatgtgttatgaagcatcggttcgtttgaagtattattgtacaaacaatcaggccgaatacaatgctttattgttcggcttacaagttatggagatggttggagctaaatacgtggaggcttttggtgattcggaattggtggtgcaacaactcgccggagtctacaaatgcttggacggatcactaaataggtacctcgattcatgtttggatattattgtcaattttgataattttgctattacacatattgcttggcgtgataattctagagcaaatggcttggcacaacaagcatctggctataatgtgaagaagggattattttttatattagaagagtcggtgcttgattttaaatctttatgcgaaattggcaaaactggagaccaggggcggtctgaccggccgcatgccgccggtctgaccggcgaccccgagcggtctgactggccctgtgtggtcggtctgaccgggtttggacagagcgccggggggcacgtttcaatcaatttggaagccgaattaattgtgaattcggacatttgtgcccaggtgacagaagaagattggagaattcctttgattcaatatttgaaggatcccacacttaaggttgatcggaaaattcggcggcaatcgttcaaatacacattgcttgatggtgtcttgttgaagtgcttagatgaagatcaatctaaagtggctatgggggaggggcataagttcgtgctagttgctacggattacttcactaagtgggccgaagccgtgcctttgaagaatatgactcatacggaggctaatggacaagccgagtcgagtaataagacattgttgaagctagtaaaaaagaagattgaggaacacccaaagaggtggcatgaggtgctttccgaagcattgtgggcgcataggatatctaaacatggtgccactaaagtcactccttttgagttagtttatggtaaagaagccgttttatcggttgaggtaaatcttggttctcttcgttatatcaagcaagatgatttgtcaagtgaagattacaagacgttgatgggagataatcttgatgaagtcatcgacaagcgcttgagggcattggaggagatagagaaagagaagaagagggtggccaaggcatacaacaaaagggtgaaaggaaagttgtttcaagttggagacttggtttggaagacaatttttcctttgggtactcgatccaaggagttcggtaagtggtctcctagttgggagggtccttatcgagtatgcggcattgttcgagggaacgcgtattttttggagacacttcaaggggagcgttttcagcgagcaatcaacgggaaatacttgaagcaatacttcccgagcgtttggcaagacgcttag

SEQ ID NO: 26104 - DNA, 5466 bp, Oryza sativa
  unsure (1)..(5466): unsure at all n locations
  Clone ID: PAT_MRT4530_30928C.1
atgatgaagccgtcatccaaggcggaggtggagccggccaatgtgataccaatcacattggatgatttcgaaggagaagaccgcaagtccatggaggagtacatcaaggagctcacacaggaggcgttgattagggcgtccactaggactcgtcaaggtgtgatcatcaagcccgggccacgtcctaagctcactcccaatttggtaagtaatgaagaggtaacacaatctatccaacaacaagtagcatctacaatagattcatccatgactgtttttaaaaataagttagatgcaacttttgaagataaatttgatgagtttttaagatttaaagtcggtcctctcttggccgattttatgggtaaagataaagcctctaccactgctagccaagctcctatagatcaaacaagtagtggaaccaatgaagcggcgcatatagccggtccgaccgtgactacggccggtctgaccgggtattaccccggcggtcagaccgggactcaggtcggtctgaccgcgcctctggatgtcggtcagaccgggcccttgaccggccagaccggcacaataataccgattcaggggatagatccaatgactaatgctagttatttgtatcatcttagaacatttgatcctcttgtatctactactgcaaatagtccccatgttcccccacatgttcctaatgcttataatgatgttgctagggggtatcctcccgatactaggcaaggccaatatagccatattgcgccgcaaacacaacctattaggccacaaaatccaccaccaaatcaacataggcctgataatatggaggaaataattagtgggattattggggataaattcgggaatgaaactaggaatcgtgctaaggtttaccataagccgtatcatgactattatgataatgtgtcgtttcctcgtaattatagagttcccgaatttaccaagtttagtagtgaagatggtaggaccacatggaagcatgtaggtcaatttttagcgcaatgtggtgaggctaatagtgatacttttaaattgcgcttgttttctttatctttgtccggtaccgcttttacatggtttacttctttaccggcaaattctattcatacttgggctcaattagaagaaagatttcatgattatttctatactggagaaactaagctttggttatgtgatttaatattagttaagcaaaaatataatgagcctgtcattgattatattaagagatttagggatgttagaaaccgatgttatagcttgaatataactgatagagatttggctggtcttgcttttaatggtttaattgctcctcttagagaaagactagatggccaacaatttcttgatgttagtcaacttatgcaaagggctctggctcaggaaagccgggttcaatcagccatagatgaaggacgattgaagttcaccgatggctccaagatgaagcttgatcatgatccttttccggtgaatacaattaatttcaatgataagaaggtgttgattcggccggagcaagccgaatctactaagggaaaaggagtaatcattggtgaaccaaggccaaagatgatagtgccaaagaagccggaggttggtgttaggaaggaaaataaaagtgaagcttcaacttgtaaagctcctaggaagaccaaagtgacccttgatatgcttttggagaaatatgaaaagcaaggtggatggggaggaccaaggaggccaattcatgagcgtttgtcttcaccaaacaacggccggttttatggtaagaaccgggccaatgaggaaaagagggaaggaaagcgtattaaggtggaggcaaggacttcggaagtgattaccatcaaagtggggtctcatgatgtgccaataccatctggagatgaagttggagagtcctcaagcaaaaaatccgaagccggtaccagctcatcgcagtcggccggtctgaccaggccttctgaccggtctgaccgcggccatacggccggtctgaccgggccatcaggccggtctgaccgccgacccgatgatggtccgaccgacgcctcaggccggtctaaccggccaccaaatgtcggtttgacaggcgcatctggccggtctgaccggtggtctacgtccggtctgactgggcttcagcgccggtttgataagaggtttgcaaagggcgatgtgagggcttcatcatcatcaactaaacctaatagggggcattatttacctcctggaacagagccgaaacttaggtggatgcctaaggatttgacggctactcaaaggagaaggttgcaacgtcttcgggcccaagaaataagagagaaaaaggccgaagagcaaagggataaaaggcgtaaaaccatagaaaaggaagaaccggtttttgtagaggaaaaggaagaacaatcggttgctaaagatgagtcatctctaaaagaagacatggatatcaacatggtgtgtatgttgcgtatggagttttgtgctatggatgaagccgaggttgctcagttttcactaggtcctaaagatgcggtttttgagaagcccgataaatcaaaccgtcatatgaagcttctctatctcaaaggtcatattgatagaaagccggtctctaggatgcttgtggatgaggcgaagggtatcttttcggcggagcttaccgtggggaacaagacgttaccaaccgctttcttcatcgtcgatgtgcaagaggctaatttagagtggttacaaaagagggtgcaagaatatcggtctacaaagaacgatattggtgaaactattgaagattttgatgaagtggagaagcttgggcaagggtttacatcggccgatccattgaaggaagtagacataggtgatggaaccaaaccaaggccgacttttgtaaacaaaaatatgagagccgattataaggttaagataatcgagctacttaaagagtatgttgattgctttgcatgggagtaccatgagatgccggatcttagccgtgagcttgttgagcatcggcttccaattaaaccgggttttaggccttataagcaaccacctcatctttttaatcctttgctatatgaccgagtcaaagaggagattgatcggttgttgaaggcggggtttattaggacatgtctttatgtagaagatttaaataaagccactcccaaagatgaatatccttttgatgaagtggagaagcttgggcaagggtttacatcggccgatccattgaaggaagtagacataggtgatggaaccaaaccaaggccgacttttgtaaacaaaaatatgagagccgattataaggttaagataatcgagctacttaaagagtatgttgattgctttgcatgggagtaccatgagatgccggatcttagccgtgagcttgttgagcatcggcttccaattaaaccgggttttaggccttataagcaaccacctcatctttttaatcctttgctatatgaccgagtcaaagaggagattgatcggttgttgaaggcggggtttattaggacatgtctttatgtagaaaccccgggcgcatatnaagggaatgaattgactttaagattgctaggatatcttagagactatttgatgaattgtgcaaacggagnatggaaggcacatagtcgatttgaggaagccggttttacttggggggcaaaacaacaagaggcgtttgaggagttgaaaaggtatttgtctacgccacccgttgtgcgagcgcctaaagccggaaagccttttcagttatatattgcctccgaagacaaagtcattggtgtcgttttgacgcaagaggaagatggcaaggaatatatcattacatatttgagccgccgtcttttggatgccgaaacgaggccaattctaagtgggagaattggcaagtgggcatatgctttgatagagtatgatttggcttatgaaccattaaaatctatgaaaggccaaattgtatgtgattttatagtagaccatcatatagatattgcttatgagggagaggtgtgtatagttgaagttataccttggaagatttattttgatggttcttcttgcaaagaaggtcaagccataggggtagttttgttttcacctaatggcatgtgttataaagcatcggttcgtttggaatattactgtacaaataatcaagccgaatataatgctttattattcggcttacaagtcatggagatggttggagctaagtacgtggaagcttttggtgattcggaattggtggtgcaacaagttgccggagtttataaatgcttggacagatcactaaataggtacctcgattcatgtttggatattattgccaattttgataattttgctattagacatattgctaggcatgataattctagagcaaatgacttggcacaacaagcatctggctataataatgtgaagaaaggattatttctgatattagaagagccggtgcttgattttaaatctttgtgcgaaattggcaaaactggagaccaggggcggtctgaccggccacatgccgtcggtctgaccggcgaccccgagcggtctgaccggccctgtatagtcggactgactggttctgggcagagcgccggggggcacgtttcaatcaatttagaggccgaattaattgtgaattcggacatttgtgctcaggaagcgaaagaagattggaggattcctttgattcgatatttgaaagatcccacgcttaaggttgatcggaaaattcggcggcaagcattcaaatacacattgcttgatgaaaatttatatcgccgaaatatagatggtgtcttattgaagtgcttagatgaagatcaatctaaagtggctatgggagaggggcataggttcgtgctagttgcgacggattacttcaccaagtgggccgaagctgtgccattgaagaatatgactcatacggaggctaatggacaagccgagtcgagtaataagacattgttgaaactagtgaaaaagaagattgaggaacacccaaagaggtggcatgaggtgctttccgaagcattgtgggcgcataggatatctaaacatggtgccactaaagtcactccttttgagttggtttatggtcaagaagccgttttaccggttgaggtaaatcttggttctcttcgttatatcaagcaagatgatttgtcaagtgaagattacaagacgttgatgggagacaaccttgatgaagtcatcgacaagcgcttgaaggctttggaagagatagagaaagagaagaagagggtggccaaggcgtacaacaagagggtgaaagcaaagttgtttcaagttggagacttggtttggaagacaattttgcctttgggtactcgatccaaggagttcggaattgagctccgaaaaatccgagaaaatttcagagagtataattaa

SEQ ID NO: 26105 - DNA, 4743 bp, Oryza sativa
  unsure (1)..(4743): unsure at all n locations
  Clone ID: PAT_MRT4530_30929C.1
gtcatgacgaagccatcatctaagacggaggtggagccatctcatgtgataccggtcacattagatgactttgaaggagaggaccgtaaagccatggaggagtacatcaacgagctcacacgggaggcgttgatgagagcaactactaggactcgtcaaggcgtgatcatcaagcccgggccacgtcctaagctcgctcccgacgtggtaagtaataataatgtatcacaatctatcgaccaacaaattgcaaatacaatagattcatctatggctaattttaaagatagattagatgtgatgtttaaggaaaaagttgatgggtttttatggagtacgctaggttctcttatggatgattacacattaaaagataaagcctataccactgctgatcaacttcctatagatccaatagggtctaaaaccgacggggcggcgttcacggccggtccaacctggcctgacggccggtcagaccgggtattatcccaccggtcagaccagccctcaggccggttcgaccgtgcaacctgacgccggtcagaccgggccctgggccggggataccctcccgatactaggcaaggccaatataatcatattgcgccgcaaacccaacctattaggccaccaaacccaccaccaaatccacaagggcctaataacatggagaacatgattagtgatattatgatgaataaattcgggatcgaaactagtaatcgtgctagagcttacaaaaaaccatatccggattattatgataatgtgtcgtttcctaaaaattatagagttcccgaatttaccaagtttagtggtgaggatggtaagaccacatgggagcataggtttagagatgttagaaaccgatgttatactttgaatataattgatagagatttggccgggcttgcttttaatggtttagttgctcctcttagagagaaactagatggccaacaatttcttgatgttagtcaactcatgcaaagggctctggctcaagaaagccgggttaaagataataaaaaatttgctagaccattcgacaaaaagcctaatgttaatgtagttgattactctgatgctagtgataatgaagaggagggtgatcatgacatttatgttgccgaatggtcatggactaacaaaaataaaccttttgtttgttctaacctaatgccgactcctcgtaaagattgacaaagtgaggttcaatcggccatagatgaaggacgattgagattcaccgatggctccaagatgaagcttgatcatgatctttttccggtgaatacaattaatttcaataataagaaggtgttgattcggccggagcaagccgaatctactaagggaaaggaagtggtcattggtgagccgaggcctaagatgatggtgccaaagaaaccggaggttggtgtttggaaggagaacaagggtggagcttcaacttctaaggctcctaggaagaccaaagaaaccttcgatatgctcttgaagaagtatgagaagcaaggtgatgagagggatcacaacaaagggaaaagaccaagatcacctcctagggagtgatttgggttcttatccaatgccgccgccgggttatccttatccttacttcatgccatggaaggcaatgccgccaataatcgggttaatgaagaaaaaagggaaggaaagcgcaccaaggtggaggaaaggacttcggaggtgattactatcaaaataggatctcatgatgtgcctataccttctggagatggagttggaaagtccccaagcaaaaaatccgaagccggtaccagctcctcgcagtcggccagtctgaccaggccctctggccggtctgaccgcagccatgttgccggtctgaccgggccatcaggccggtctgaccgccgacctgacgacggtctgaccgacgcctcaggccggtctggccggtctgaccggtggcctacagccggtctgaccgggctccggtgtcggtttgatgagagggctgcaaagggcgatgtgggggcttcatcgtcttcaagcaaagttaatagaggacattatttgcctcctagaacagagccgaatcctagaaggttcaatgagttacgaccaccaccggtatggaggcctaaatccatagagaaggcaaaaccgattgatgtagaggagaaggaagaacaatcggttgacaaagataaatcgtctccaaaggaggacatggatatcaacatggtgtgtatgttgcctatggagttttgtgctatggatgaagccgaggttgcccaattctcattaggtcctaaagatgcggtttttgagaagcccgatgagtcaaaccgtcacatgaagcctctctatctcaaaggccatgttgatgggaaaccggtctctaggatgctagtggatggaggtgccgccgtgaatttgatgccgtattcgctattcaagaagttggggcatgaggatgatgagttgaagaagaccaacatgatcctcaatggcttcaatggtgaaccaatggaggcgaggggtatcttttcggcggagactcaaaccgtgggtaaaaacaaatggaacgggcctttacccccaaaaacccccgggcccttttttttcctttttttcccaaattttccgggggctttccccgcgggaaaatatttgggggctagtttagagtggttacaaaaaagggtgcaagaatatcggtctacaaagaacgatattggagagaccgttgaagattttgatgaagtagagaagcttgggcaagggtttacatcggccgatccattagaagaagtagacataggtgatggaattaaaccaaggccgacttttgtaaacaaaaacatgagagccgattataaagttaagataatcgagctacttaaagaatatgttgattgctttgcatgggagtaccatgagatgccgggtcttagccgtgagcttgttgagcatcggcttccaattaaaccgggttttaggccttataagcaaccacctcgtcgttttaatcctttattatatgaccgagtcaaagaggagattgatcggttgttgaaggcggngtttattaggccatgtcgttatgcggagtgggtttctagcatagtcccggtggagaagaaggggagtggtaagattagagtttgcttagattttagagatttaaataaagctactcctaaagatgagtatcctatgcctatagccgacatgatgattaatgatgccttgggtcataaggtgattagcttcttagatggtattatcttagagatctacattgatgatattgttgtcaaatcggatggtatggaaggacatatagccgatttgatattagcttttgagaggatgcgccggtatggtttgaagatgaacctacttaaatgtgcttttggtgtgtcggcggggaagttcttaggattcatggtgcatgagagaggagttgagattgatcctaagaagatagaaaaaattcgtgatttcaaagcgccgacatgcaagaaagaggtccaaaagttgctaggtaaggtgaattatttgaggaggtttatttctaacctagcgggtaaaatcgatgcttttgttcctattcttcgcttgaaaaaagaagccgattttacttggggggcaaaacaccaagaggcgtttgaagagttgaagaggtatttatctactccacccgttgtccgagcgcttaaagccgaaaagccttttcggttatatattgcctccgaggacaaagtcattggtgccgttttgacgcaagagaaagatgccaaggaatatatcattacatatttgagccgccgtcttttagatgccgaatcgagacatattgctaggcatgataattctagagcaaatgacttagcacaacaagcatctggttataatgtgaagaagggattatttctgatattagaagaaccggatacagaagaggattggagaattcctttgattcaatatctaaaagatcccacacttaaggttgatcgaaaaattcggcggcaagcattcaaatatacattgcttgatgaagattatatcgccgaaacgggatgtgaggcttgtcaatggttcggcaatgttcaattggcacccgccgccgtgttgaaccctataatcaaaccatggccgttccggggatgggctttggatttcattggtcaaatttatccttcgtcatcaaaggggcataggttcgtgctagttgctacggactacttcaccaagtgggccgaagccgtgccttcgaggaatatgactcatacggaggctaatggtcaagccgagtcgagtaataagacattgctaaaactagtgaaaaagaagattgaggagcacccaaagaggtggcatgaggtgctttccgaagcattgtgggcgcataggatatctaaacatggtgccactaaagtcactccttttgagttggtttatggtcaagaagccattttaccggtagaggtaaatcttggttctcttcgttatatcaagcaagatgatttgtcaagtgaagattacaagacgttgatgggagacaaccttgatgaagtcgtcgacaagcgcttgaaggcattggaagagatagagaaagagaagaagagggtggccaaggcatacaacaagagggtgaaagcaaaattgtttcaagttggagacttggtttggaagacaattttgcctttgggtactcgatccaaggagttcggtaagtga

SEQ ID NO: 26106 - DNA, 150 bp, Oryza sativa
  Clone ID: PAT_MRT4530_3092C.1
atgaggccgccaaccactgccaccacggtggcgaggagccatgagcataaggcggttcgaggtggcctcaggaatcacggcagcgacatgcaaatgcaaacggctccgcatcacgccatcaggccatggtttaaggagaagggaaagatg

SEQ ID NO: 26107 - DNA, 7567 bp, Oryza sativa
  Clone ID: PAT_MRT4530_30930C.1
ctaagcgtcttgccaaacgctcgggaagtatttcttcaagtatttcccgttgattgctcgctaaaaacgctccccttgaagtgtctctaaaaaatatgcgttccctcgaacaatgccgcatactcgataaggaccctcccaactaagagaccacataccgaactccttggatcgagtacccaaaggcaaaattgtcttccaaactaagtctccaactagaaacaactttgctttcacccttttgttgtacgccttagccaccctcttcttctctttctctatttcttccaatgccttcaagcgcttgtcgatgacttcatcaagattgtcttccatcaacgtcttgtaatcttcacttgacaaaccatcttgcttgatataacgaagagaatcaagatttacttccaccggtaaaacggcttcttgaccataaaccaactcaaaaggagcgactttagtggcatcatgtttagaaatcctatgcgcccacaatgcttcggaaagcacctcatgccacctctttgggtgttcctcaatcttcttcttcactgatttcaacaatgtcttattactcgattcgacttgtccattagcttgagcgtaataaggagaagaactcaacaatttaataccataagattcggtaaaactcttcacttccttagacataaaagaagcaccttgatccgtagttaatgtttgtgtaataccgaatctatggataatatgcttcaaaataaagtcaattacctccgtatgagtcatattcttcaaaggcatggcttcggcccacttggtgaagtaatccgtagcaactagcacgaacatatgcccctttgatgacgaaggataaatttgaccaatgaaatccaaagcccatcctcggaacggccatggtttgattatgggattcaacaaggcggcgggcgccaattgaacattgccgaaccgttgacaagcctcgcatcctctataatatttgaagcaatcatcaatcatcttcggccaatagaacccttcatgtacctctcccatagccactttagattgatcttcatctaagcacttcaacaagacaccatctatatttcggcgatacaaatctccatcaagcaatgtatatttgaatgcttgccgccgaattttccgatcaaccttaagtgtaggatctttcaaatatcgaatcaaaggaattctccaatcctcttcggtcagaccggccgtgcaatgccggtcagaccgcccctggtctccagttttgccaatttcgcacaaagatttaaaatcaagcaccggctcttctaatatcagaaataatcccttcttcacattatagccagatgcttgttgtgacaagtcatttgctctagaattatcatgcctagcaatatgtctaatagcaaaattatcaaaattggcaataatatctaaacatgaatcgaggtacctatttagtgatccgtccaagcatttgtagactccagcgacttgttgcaccaccaattccgaatcaccaaaagcctccacgtatttagctccaaccatctccataacttgtaagccgaataatatagcattgtattcagcttgattatttgtacaataatactccaaatgaaccgatgcttcatcacacatgccattaggtgaaaacaaaactacccctatgccctgaccttctttgcaagaagaacgatcaaaataaatcttccaaggtataactttaactaagcaaacctctccctcatagcaatatctatatgatggtctactataaaatcacatacaatttggcatttcatagatttcaatggttcataaggcaaatcatattctatcaaagcatatgcccacttgccaattctcccacttagaattggcctttgcaacatgtgtttaataacatcggcttgacaagtaactatgcatgtactagataacaaataatgcctatacctcgtttcggcatccaaaagagggcggctcaaatatgtaatgatatattccttgccatcttcctcttgcgccaaaacggcaccaataactttgtcttcggaggcaatatataaccgaaaaggctttccggctttaggtgctcgcacaacgggtggagtagacaaatatctcttcaactcttcaaacgcctcttgttgttttgccccccaagtaaaatcggcttcttttttcaaacaaagtataggaacaaaagcatcgattttacccgctaggttagaaataaacctcctcaaataattcatgttacctagcaactttttaacctccttcttacatgtcggcgctttgaaatcacgaatcttttctatcttcttaggatcaatctcaactcctctctcatgcaccatgaatcctaagaacttccccgccgacacaccaaaagcacatttaagtgggttcatcttcaaaccataccggcgcatcctctcaaaagctaacctcatatcggctatgtgtcattccataccatccgatttgacaacaatatcatcaatgtagacctctaagataatacctagcaaatcatgaaagattaaattcatcgccctttgatatgttgcaccggcgttcttcaacccaaaagtcatgaccacccactcaaataaaccaacaaatcccgggcaccaaaaagccgtcttgtacatatcctcttccgccataaagatttgactgtagccagcattaccatccaaaaagctaatcaccttatgacccgaggcatcattaatcatcatgtcggctataggcataggatattcatctttgggattaactttatttagatctctaaaatctatgcaaactctaatcttaccactccccttcttctccaccgggactatgctagagacccactctgcataacgacacggcctaataaaccccgccttcaacaaccgatcaatctcctctttgactcggtcatatagcaaaggattaaaacgacgaggtggttgcttataaggcctaaaacccggtttaattggaagccgatgctcaacgagctcacggctaagacccggcatctcgtggtactcccatgcaaaaccatcaacatactctttaagtagctcgattatcttaaccttataatcggctctcatgtttttgtttacgaaagtcggccttggtttagtttcatcacctatatctacttcttccaaaggatcggccaatgtaaacccttttccaagcttctccacttcatcaaaatcttcaacagtttctccaatatcgttctttgtagaccgatattcttgcaccctcttagagataggtacaaatttgccatcggagatactaataaaatcatagctagaaagatccctccccgataagtattggatattcccatgacaccactcaaaagtagcatcggccattgcaacctcggctgatgtatccgcttgaacaatttcaacatcatctccgtcccattgaattaaacattgatgcaaggtagaaggcacggaacaattggcatggatccaacaacgacacaaaataacattgtagttaccttgcacatcgacgatgaagaaagcggttggtagcgtcttgtttcccacggtgagctccgccgaaaagatacccttcgcctccgttggttcaccattgaagccattgagaatcatgttggtcttcttcaactcatcatcctcacgccccaacttcttgaataatgagtacggcatcaagttcatggcggcacctccatccactagcatcctagagaccggcttcccatcaacatggcctcttgtagtgagaggcttcatgtgacggtttgactcatcgggcttctcaaaaaccgcgtctttatgacctaatgagaattgagcaacctcggcttcatccatagcacaaaactccataggcaacatacataccatgttgatatccatgtcttcttctggagatgattcacctttatcaaccgattgctcctccttctcctctacaacaaccggcttttccttctctatggatttatgcctccataccgtggtggtcgtaactcattaaaccttttatctctttgttcttcggcttttttctctcttatctcttgagcccgaagacgttgcaaccttctcttttgagtagccgtcaaatccttaggcatccacctaggattcggctctgttccaggaggtaaataatgtcctctattgattttgcttagagacgatgaagccctcacatcaccctttgcaatcctcctatcaaaccggcgctggagcccggtcagaccggacgtagaccaccggtcagaccggccagatgcgcctgtcagaccgacatttggtgcgggtcagaccggcctgaagcgtcggtcagaccggtgtcggttgggcggtcggaccggcctgatggcccggtcagaccaaccacatggctgcggtcagaccggccagaggacccggtcagaccggccgactgcgatgagctggtatcggcttcggattttttgtttggggacactccaactccatctccagaaggtattggcacatcatgagaccccactttgatagtaatcacctccgaagtcctcacctccaccttgacgcgctttccttcccttttttcttcattagcccgattcttaccataaaaccggctattgtttggtgaagacaaacgctcatgaattggcctcctcggtcctccccacccttgattgaattgcattggaggcatatgattgaacattggtggcgtcgccccccatggcatgaagtaaggataaggataacccagcggtggcattggataagaaccccatgacatgtcttgtggatgatgatatgaaggggaatgtgaccgtcttggtgaatgaccaaatcgctccctaggaggtgatcttggtcttttccctttgttgcgagccctctcaccaccttgcttagctccactcttattctccttccaaacgtcaacctccggcttctttggcactatcatcttaggccttggttcgccaatgaccactcctttttccttagcagatttggcttgctccggccgaatcaactccttatcattgaaattaattgtgttcaccggaaaaggatcatgatcaagcttcatcttggagccatcggtgaacttcaatcgtccttcatctatggccgattgaacctgtcgtcgaaacacattgcaatcattagtagaatgagaatgagaatcatgccatttacaatatgctcgacgtttcaactcttcttgagatggtatgacatggcctttaggtaatctaatttgtttttcttgtaaaagataatcaaaaatcttatcgcacttggccacatcaaaactatatttaacctcactttgccaatctttgcgaggagtcggcattaggttggagcaaacaaaaggcttgtttttgttagtccatgaccattcagcaacatatatatcatgatcaccctcctcctcactatcgctagcctcagggtaatcaatcacattaacattaggctttttgtcatatgttctaacaagttttttattatccttgacccggctttcttgagccaaagccatttgcataagttgactaacatcaagaaattgttggccatctagtctttctctaagaggagcaattaaaccattaaaagcaagaccagccaaatctctatcagttatattcaagctataacatcggtttctaacatccctaaatctcttaatataatcaatgacaggctcattatacttttgcttaaccgatgttaaatcacataacctaagctcagtttctccagtatagaaataatcatgaaatttttcttctaattgagcccaagtatgaatagaatttgccggtaaagaagtaaaccatgtaaaagcattaccggacaaagataaagaaaacaagcgcaatttaaaagtatcactattagcctcaccacattgcgccaaaaattgacctacatgctcccatgtggtcttaccatcctcaccactaaacttggtaaattcggaaactctataattacggggaaacggcacattatcataataatcaggatacggctttttgtaaatcctagcacgattcctagtttcaatcccgaatctattcctaataatctcactaattatatcctccatattattaggcccatgttgatttggcggtggatttggtggcctaataggttgtgtttgtggcgcaatatgattatgttggccttgtctaggatcgggaggataccccctagcaacatcattataagcattaggaacatgtgggggaacttggggactacttgtagcagcggccgtttggccggtcggaccgacggctaagtcgcggtatgaccggccgtcaggcccggtcagaccggccgtgtgtgccgctccatcggtttttctacccgtttgatctataggaggttggttagcagtggtaaaggctttatcctttgacatgtaatcggccataagagggccgaatttaacccttaaaaactcatcaaacttaccctcaaaagttgcatctaacttatctttaaaagaaatcatagatgaatctattgtagatgctacttgttgttggatagattgtgttacctcatcattacttaccaaatcgggggcgagcttaggacgtggcccgggcttgatgatcacgccttgacgagtcctagtgcttgccctcatcaacgcctcccgtgtgagttcgttgatgtactcctccatagctttgtggtcctctccttcgaaatcctccaatgtgaccagtatcacattggatggctctacctccgtcttggatggcggcttcgtcatggcgaagtcgaagttgagttgacgatgaacggatctcgtccctagtggagtcgccaaaaatcgtgttggcaacttttttgacaagttgacaagcacgatcacagcaccttaagccttgcggtgatcctagagtcgccaaccacctcgatctagcaaagagctaaacctagatggtcccttatataggggttggtcttgccctctacaggcccttctccacgtccaactcggggtagaaactaaaggaaacccgaaacatgccttcccgagcaaggaaacctcgaaacccgacgaaacacagtcggactcggacctgccggtcagaccggccacacaccgccggtctgaccggccctcaaccggcggtctgactgcccaacacacagcggtcagaccggcccactcggaggaaaccggtagacttccaaattttggcaatcttttctattttaattctaggtgccaaatttgggtgtaaacaaccacatcatcatcccttctcggttgagtttttctgtccggcgccatggctgctgtcggtgacatggggccgggggtatcgtgactagaggcttgggtagccgcggtcacccacgtggcctgaccccctcggggggggtcgggcccgagggtgacgtggccacccctccctctgtctccccgaggggtcgggccgctcccgtttcggccccgagggttggggcgccccaaccccctgtggttttggcgccacatgtgtgggtta

SEQ ID NO: 26108 - DNA, 4239 bp, Oryza sativa
  Clone ID: PAT_MRT4530_30931C.1
atggaggtggatgaagtcgggggtcgatggacattctccagggcaaatgaaggctacacgagctgcggcccggtagtcgagatgtcatggcacagggccggtgtcctgctgctaggggctcagtcctgcctgcctgtcccgggggttccggccgtaggtgggattgggtcggtactcttgtctatggctaggatgggttggaaactatgtcacgtcttccgtctgtataccgtggtggttcaatcggccatagatgaaggacgattgaagttcactgatggctccaagatgaatcttgatcatgatccttttccggtgaatacgattaatttcaatgataagaaggtgttgattcggccggagcaagccgaatctactaaaggaaaaggagtaatcattggtgaagcaaggcctaaaatgatagtgccaaagaaaccggaggttggcgtttggaaggaaaataggagtggagcttcaacttctaaagcccctagaaagaccaaagtgacttttgatatgcttttggaaaagtatgagaagcaaggtgggtggggaggaccgaggaggccaattcatgagcgtttattttcaccgaacaacggccggttatatggtaagaatcgggctaatgaagaaaagagggaaagaaagcgcatcaaggtggaggtaaggacttcggaagtaattaccatcaaagtggggtctcatgatgtgtcaataccttctggagatgaagttggagagtcttcaaggaaaaaatccgaggccggtaccagctcatcgcagtcggatggtctgaccaggccttctggccggtctgaccgcagccatacagccggtctgatcgggccatcaggccggtctgaccgccgacccgacagcggtccgaccgacacctcaggctggtctgaccgtgcgccaaatgtcggtctgaccggcgcatctggccggtctgaccggtggtctacgtccggtctgacccggctccagcgccggtttgataggaggtttgcaaagggcgatgtgagggcttcatcgtcttcaaacaaggttaatagagggcattatttacctcctggaacagagccggatcctaggtggatgcctaaggatttgacggctactcaaaagagaaggttgcaacgtcttcgggctcaagagataagagagaaaaaagccgaagagcaaagagataaaaggttcaatgagttgcgaccaccaccggtatggaggcataagtccatagagaaggaaaaaccggttgttgtagaggagaaggaggaacaatcggttgataaaggtgaatcatctccaaaagaagacatgaatatgaacatggtatgtatgttgcctatgcagttttgtgctatggatgaagccgaggttgctcaattctcattaggtcctaaagacacggtttttgagaagcccgatgagtcaaaccgtcacatgaaccctctctatctcaaaggccatgttgatgggaagccgatctctaggatactagtggatggaggtgccgcggtgaacttgatgccgtactcattattcaagaagttggggcgtgaggatgatgagttgaagaagaccaacatgattctcaatggtttcaatggtgaaccaacggaggcaaagggtatcttttcggcagagctcaccgtgggaaacaagacgctaccaaccgctttcttcatcgtcgatgtgcaaggttttgatgaagtggagaagcttggacaagggtttacatcggccgatccattggaggaagtagacataggtgatggaaccaaaccaagactgacttttgtaaacaaaaatatgagagccgaatataaggttaagataatcgagctacttaaagaatatgttgattgctttgcatgggaatatcatgagatgctgggtcttagccgtgagcttgttaagcatcggctttcaattaaaccgggttttaggccttataagcaaccgccttgtcgttttaatcctttgctatatgaccgagtaaaagaggagattgatcggttgttgaaggcggggtttattaggccatgtcgttatgcggagtgggtttctagcataatcccggtggagaagaaggggagtcgtaagattagagtttgcatagattttagagatttaaataaagccactcccaaagatgagtatcctatgcctatagccgacatgatgattaatgatgcatcgggtcataaggtaattagctttctagatggtaatgctggctacaatcaaatctttatggcggaagaggatatgtataagacggcttttaggtgcccgggatttgttggtttgtttgagtgggttgtcatgacttttgggttgaagaatgccggtgcaacctatcaaagggcaatgaatttgatctttcatgattcgctaggtattatcttagagatctacatttatgatattgttgtcaaatcggatggtatggaaggacacatagcagatttgaggttagcttttgagaggatgcgccggtatggtttgaagatgaacccacttaagtatgcttttggtgtgtcggcggggaagttcttaggatacatggtgcatgagagaggggttgagattgattctaagaagatagaaaagattcgtgatttcaaagcaccgacatgtaagaaggaggtccaaaagttgctaggtaagattgtatgtgattttatagtggaccatcatgtagatattgcttatgagaaagagatttgcctagttgaagttatgccttggaagatttattttgatggttcttcttgcaaagaaggtcaaggcataggggtaattttgttttcacctaatggcatgtgttatgaagcatcggttcgtttggaatattattgtacaaataatcaagccgaatacaatgctttgttattcggcttacaagtcatagagatggttggagctaagtatgtggaagcttttggtgatttggaattggtggtgcaacaagtcgccggagtctacaaatgcttggacggatcactaaataggtacctcgattcatatttggatattattgccaattttgataattttgctattaaacatattgctaggcgtgataattctagagcaaatgacttggcacaacaagcatctggctataatgtgaagaagggattatttctgatattagaggagccggtgcttgcttttaaatctttgtgcgaaattggcaaagctggggaccaggggcggtctgaccggcattgcgtggccggtctgaccggtgaccaggggcggtctgaccggctacatgccgccggtctgaccggcgaccccgagcggtctgaccggccctgtgtggtcggtctgaccggttctgggcagagcgctggggggcacgtttcaatcaatttagaggccgaattaattgtgaattcggacatttgtgcccaggaagcagaagaagattggagaattcctttgattcgatatttgaaagatcccacacttaaggttgatcggaaaattcggcggcaagcattcaaatacacattgcttgatgaagatttatatcgccgaaatatagatggtgtcttgttgaagtgcttagatgaagatcaatctaaagtggctatgggagaggagaaaaggttcgtgctagttgctacggattacttcaccaagtgggccgaagccgtgcctttgaagaatatgactcatacggaggctaatggacaagccgagtcgagtaataaaacattgttgaagttagtgaagaagaagattgaggaatacccaaagaggtggcatgaggtgctttctgaagcattgtgggtgcataggatatctaaacatggtgccactaaagtcactccttttgagttggtttatggtcaagaagccgttttaccggtggagatgttgatgggagacaaccttgatgaagtcatcgacaagcgcttgaaggcattggaagagatagagaaagagaagaagagggtggccaaggcgtacaacaagagggtgaaagaaaagttgtttcaagttggagacttggtttggaagacaattttgcctttgggtactcgattcaaggagttcggtaagtggtctcctagttgggagggtccttatcgagtgtgcggcattgttcgagggaacgcgtactttttggagacacttcaaggggagcgttttcagcgagcgattaacgggaaatacttgaagaaatacttcccgagcgtttggcaagacgcttag

SEQ ID NO: 26109 - DNA, 1753 bp, Oryza sativa
  Clone ID: PAT_MRT4530_30932C.1
ccccccccccttttttttttttttcttgggtgccagaaaggggcaaaatatttttggcgcaaacagatgatcagtcgaagataacttggttagttaaagggacaccatgttccaacaaatagtgcaaaagttagggtaaaatacgatgtttctagccgagaccactactgcacatttactaaaagcttccaaaacatctttccaacaaatagctttccctggtggccagcctccaactatcactcgtcacatgaaatcagtgtgacggtctggcaaaagaagaatctatatgaatgatttaatggcaaaaaagggcccccatataccattcaagatgggattaagcctgaactgtgcttcgctccgacactgcctcaagcatagaaaggaggttggaaaccacattgcaagtaggaacatgcacaaggcggtcactgaaactattaactgctgtcttagacagcactgaaacttcagaacagaatgaacttgcttcaatcaactcgctccacggcgtatcgtcctcattgatattggattctctcaagagttgtaatactttatccaggtgagcaacattccgacctgccccacagccagtggcagttgcagcacccactgcatttgctagtgtcagtgtgctaactgctggcaagttgtggaggaacccaaaagctatagcagcagtaaagctatctccacatccaacggtgtccacaacgtcaatcttaaatgaaggtgcactggagacagcactcttcgtaaccatgattgatccctttgagcccatttttatgacaacccactttgtgcgaatccccctcttcagcaactcttgccctgcctggattgggtttctgatgttcgtcagggactcagcctcgtctgatgttaaaagcagaacatcactgagcctcagagaatgctcaagtgccctctgttcatcaagggtaccatgtaagagagattttcctcgaggaccaggatcaaaaaatactgctgttcccgcatcaattgcgcaatcaatagcggacgagatcacatcagggaaaagttcatcaaaagcatagccattacagaacaatattttggagtgatgaatagctgtcttggtttcagctgggagtttacgtatccaactgaaagctggctcatcactaaagtctgctcggctgcaaaatccatgtctctgaaatgggtctacaagaacccagcaaagaagggtctcataggcatttcggcatgcaccagaatcagagttatcaagcatcccaacaacactaatgccctcctcctcaagcacatcaagaagaaacttcccataaatttcctctcctacatgccccagtgtggaacagcgaagcccaagcctagctgcagcaaaggccaagttgcagtttccaccagcctcccaaaatttctggtcaggcggcgacgcggcgaggcgctccatgtaagcctcccgctcctcgcgcggcgccggcgggagctggggcacgctgagcacgacgtcgacgcagaggttcccgagcgtggcgaggtccgtctccttcccctcctcccctcccccctccgccggcggccaccgcctcctcgcctcgttgacagccaccgccacggcccgcggccgcgccgccccctcgagcctccgtcgcggaggcggcgggcggtggagcacgcggggccgcggcgcgcgccgccgaggcagcggcagcggcagcacgtgccgcgggtttagggtttggagcgccat

SEQ ID NO: 26110 - DNA, 649 bp, Oryza sativa
  Clone ID: PAT_MRT4530_30933C.1
ccggccgggatcatccttaacacaattgaaacatcattgtggaagcatagttaacaatacctacagaaaaaagaaattttcgtatcagctctacttgctattgccgtgtgcaacgcattctgtactgtcttgatgctcttatacaaggttatacgacatatataactacaatcgcatcttctgctactagaacaagtgcatcaccccatgcagggacgtgcataaggcaacagcatatcatagggtccacccccttctggaaaccagatacgatgcaattgataaacaaccaatgcatgcagcaacagcgatgccaacagcttaagctgctatggcaccactctcactaccagaccattagtatccgttcaggctatttgtgcatgaactacagctgcagcagatgaggagttagtgtactttgatcagactaaatctgaaacttaagctttgctgaccttaaacttgccatccatatgtggtatctatcctaactactacattggtactatgagcattcccaccggcgtactagtctgggcctgcactgtaatagaataccgtttcatatgttataaatatagtcatgcctcgtcatgcgtgacagttgaaacttgatgtcatatacatctaaataaaatcacctatt

SEQ ID NO: 26111 - DNA, 374 bp, Oryza sativa
  Clone ID: PAT_MRT4530_30934C.1
ctcaaaccctttctataagtagagataaccggagctcccatatatatcatacaaatatgcctcacccaacaacatatagacgtagcacataccactctaacatcaagacaaagagagatcaggtcaaacaaaaacaaaagcagagcacggccggtaaaatcaaaaaacgatgaacaaactgggaacacacgaaacaaggtgggagacatcatctaatcagagatgaacaattaaacaaggctatatatgacaataacggctaaattaccaccagactcctaacagaccgggggcttgtaagcaatgaagctgatgagctacacctgcctgacgttggccaagcccaaaatacggaccaatgcatcagggtaccc

SEQ ID NO: 26112 - DNA, 830 bp, Oryza sativa
  Clone ID: PAT_MRT4530_30935C.1
gtggtctctccatggcaagatggctctggtcaccggggtgcacccgcgggattgggcgtgcggtggtggaggagctggctggctgctggtgggcggccgttgcatacctgggcccgcaatgaggcggagctaggggagcgcctcaaggagtgggaggccagtgggttccgcgtcaccatctccgtctgcgacctctccgcgcgggaccagcgggagcgcctcatcggcgacgtcgctgaccgcttcggcggcaagctcgacatcctcgtaaacaatgtggggacaaacataaggaaacctactactgagtattctgcagacgaatactcatttttgatggctacaaatcttgaatctgcgtatcatttgtgtcaacttgggcatcctcttttaaaagcatctgggtcgggtagcattgttttcatatcatcagttgctggaattgtagccctatttagtggaactatctatgctatgactaaaggtgccatgaatcaattaaccaagaacttagcatgtgaatgggcaaaagacaacataagaaccaactgtgttgccccagggtacatcttaacttcgctttcagaaggaattttggcaaacaaggagttcgagggctctgttaagagccggactcctcttaggcgtgtcggagaaccagcagaaatctcatcgttagttgccttcctttgtatgcctggttcaacttacattactggtcagacgatcgccgtcgatggaggtatgactgtgaatgggctttaccccagttgaggagggagtcatggatgatggatgttcttgctgccaggaaacagcgcgtcttgata

SEQ ID NO: 26113 - DNA, 644 bp, Oryza sativa
  Clone ID: PAT_MRT4530_30936C.1
ccattttgtacccaagcaaacaccacttgctctccgcggctccaccattaggcctaaataatgctactgaagatcttgttaagtaaccggctctgagatagtttatttgggatgagttaatctatatgccctgtgctacgtacagatcgattgacttgcatcaagtagtaatagttaaaagtgttaaacgtgaccagaattagctagaattgcgatcaacgtggtcagtatgtacggtcactgtatatttagctttaaactagttcggcagagaaacgggttttttttgggggaccaggtctagagtactgttagtaggttgtagttatatatatactctgcttaatcccttttaagtttcaacgctaaaagtaaatgccaaagcccagaaccttctcaagcaaattagtagttcaatatagtaccaaaatcaaaatatttgagccatcggcgtcttcgttgattgaaaaaaaaaaggaagagttcaagacttaagccttagcaagagcaaaacgtttttcgaagactgttccgtagtcgtaacatagttctccttttaccttgtttagttaattttttcccctgctatagttaatgaaattggtacaccttatattggttcgttaaaaaaaatctgaatgttt

SEQ ID NO: 26114 - DNA, 1492 bp, Oryza sativa
  unsure (1)..(1492): unsure at all n locations
  Clone ID: PAT_MRT4530_30937C.1
ctagtggatccccgggctgcaggcccaaacactgtgactttgggtgagtgagtgagtgagtgaagaggaggaagatggggaagggagggaaaggagccgaggcggcggcggcggcggtggccggagccggtgaggaggagaacatggcggcgtggctggtggcgaagaacaccctcaagatcatgcccttcaagctcccgccagttgggccttatgatgtccgtgtccggatgaaggcagtgggcatctgcggcagcgacgtgcactacctcagggagatgcgcattgcgcatttcgtggtgaaggagccgatggtgatcgggcacgagtgcgccggcgtgatagaggaggtcggcagcggcgtgacgcacctcgccgtcggcgaccgcgtggcgctcgagcccggcatcagctgctggcgctgcaggcactgcaagggcggccgctacaacctctgcgaggacatgaagttcttcgccacccctcccgtccacggatccctcgccaaccagatcgtgcaccctggtgatctgtgcttcaagctgccggagaacgtgagcctggaggaaggcgccatgtgcgagccgctgagcgtgggcgtgcacgcgtgccgccgcgccgacgtcgggccggagacgggggtgctgatcatgggcgcggggccgatcggcctggtcaccctgctggcggcgcgcgcgttcggcgcgccgcgcgtcgtgatcgtggacgtggacgaacaccgcctctccgtggcccgatccctcggcgccgacgccgccgtgagggtgtcggcgcgcgcggaggacgtcggcgaggaggtggaacggatcagggcggcgatgggcggggacatcgacgtgagcctggactgcgccgggttcagcaagacggtggcgacggcgctgcaggcgacgcgcggcggcgggaaggtgtgcctcgtcgggatggggcacaacgagatgacggtgccgctgacgtcggcggcgatcagggaggtggacgtggtggggatattccggtacaaggacacgtggccgctctgcatcgagttcctccgcagcggcaagatcgacgtgaagccgctcatcacccaccgattcgggttctcgcaggaggacgtggaggaggcgttcgaggtcagcgcccgtggccgcgacgccatcaaggtcatgttcaacctctagatcgatccatccatcgatcgatcgacagcaaaatatgtgacgggtttggaacgtatgtcgatcggacaaaaaaatgtgtgcttgctttgctggttgccgtgtctgtctgtctctacatgaataaaaggcggcaacgttctgtcctcatggactaagcgtgtgcattgtctgtttcaattcaaaacaaaattcgccctatagtgagtcgtattacaattccacctgacgcctaagggtagtctctctgtcgggggttgttatcgtgtagagaagttgataatggttgtaattgttccataatcgctctn

SEQ ID NO: 26115 - DNA, 449 bp, Oryza sativa
  Clone ID: PAT_MRT4530_30938C.1
gcagtgcctgcagcgccagcagctgatgccgggctcgagcgccacgcggtcgccgacggcgaggtgcgtcacgccgctgccgacctcctctatcacgccggcgcactcgtgcccgatcaccatcggctccttcaccacgaaatgcgcaatgcgcatctcctgcacgcactcaaacaacaaacatatataagccacattatctttcattctttctgtgagcgaacaacagatcaccctgaggtagtgcacgtcgctgccgcagatgcccactgccttcatccggacacggacatcataaggccctgaaaatggtcatctatctcagtgttgtttcatccaacatttttactgaatttcacactcacatttgtagccatatacagcagacgaatgcaaatgcttgacgcttataaagaaacaaatatcataaaaaacatatcaaaattcag

SEQ ID NO: 26116 - DNA, 316 bp, Oryza sativa
  Clone ID: PAT_MRT4530_30939C.1
tgattgggtaaacttatggaatgtaaaaatggagggacaccctgcctacagcctgcggccctcaatagtggaacccttaaatagatgcaatgcgtttatactttgctgccttgaatttgcacactctgtctgcccgatctgctgccctgcactcgtgatataattgtaagccaccgcccaccgtgacacaagacaaccgcgacaataatgattacttacaacacatgcctgtacaacactgactgcctctgttaatgctactgtcttatgacacctgccctgctggtgaacctgttggatgttgcctctgacgtgc

SEQ ID NO: 26117 - DNA, 681 bp, Oryza sativa
  Clone ID: PAT_MRT4530_3093C.1
atgcaggaatcagatgagagagatggactcaaagtaaatgttccaagagacgacgccgacaagctgggaggggacggcggtggaccggtggtgggcgcggcggggagcttgtgccgcacgggtggccgcagcgagcggaggcggcagccgcggcgcgcgggggacagcggccccggcgagccgagacggcgggccgcgccgcgcgtgggacggcggtcgcgggggacggcggccgcggcgagccgagacagcaggccacgccgcgcgtgggacggcggccgcggcgagcgggggcggcgcgccctacgccgagcgggggccggcggcggcggcgagcagaggcggcgggctacgccaagcggcggccagggctgcggcgcgcgggggccggtggttgcggcgagcggagaacggcgggccgcgccgcgcgggggacggcgaccacggcgagcggaggcggcgggccgcaccgcgtgggggacgacggcggcgagcggaggcctgcagccgcggcgagcggaggtggcgggctacgccgagcggaggatggcggtcgcggcgagcgcctcctcctcgtgcagtcgtgctccttccgtgcctggttgtcgtgtggggatggaggagatgggctgtgtggggcccaccattggccagccaaatggagtggctaaatttggctag

SEQ ID NO: 26118 - DNA, 648 bp, Oryza sativa
  Clone ID: PAT_MRT4530_30940C.1
atggcaacgacagatccactcctcgtcggcctcgtcctcctcgatagtcgccggaggaggagaggagggcgctgccgccgcaacaggacaggcaaggtcgcccgcgagctccccaagcttgccggcggcgggcggaaccaccccgcctcggcgatgctcccgctcaacctctgcaacctgacccgtggcgccgacccggagccggaggtgatcatcccgctgctggtctcccatctcgccggcggcaacgaagcgacggcgatggcgagcttccttccccgtggtggcggcaggcacgagcggatcgggaggaagggcggtgcggcaaaaggagggagggcacgggcagggatggtgcggctggtggggagagagaggaaaaagttggctaaggaaagactcgatcagatcactgtccacaaatccctgggccgcacctacgctcctgccgtcagtacagaatgcccgccactgcgcgtgggtaaggttgccaacgctcttgatgtaatcagcgaggacaagctgcagcttctcgaggaacatgatgcatgtccagattcaaacccaaggtttgtcttttttgggacggagggagtaatgtggaagagaggcaatgacaccgatggcgccactggccgtgccgaatgt

SEQ ID NO: 26119 - DNA, 2209 bp, Oryza sativa
  Clone ID: PAT_MRT4530_30941C.1
ttgcaggatcaaatcaactggcacactaacatacccgaaggcgagttttggacctgcactacagttaagcagatctcctaggcatcatgtttttcatcaacacgcttttggcatgcctggtgggacccattagaagtcagaatcacaacagcagttccccatggccgagaaactgccagcatcgccgtcctcggctggtcctggctctgttaaagaaaagatcccggagctaggtttatctgagattgatgaagccaacattgtgcccatcactctggataaattgacacctgagcagcaaaaagaccttgatacaatgatgcagcaagcatggaataagttcttgagctcattcacggagacctgcaaggggacattggttcagaaatacaaagtgaaggtagttgctgatgttcctgggaccggttcttctaaggatggagaagtgaaacaagctctagatggtgcggctcaaccgagtgataaaggtgctgcagatggctttcaaggaaatcaaggtgatggctctcaaggagtgtagggtgtcgactctcaaggaattcaaggtgatggtgttcagggagttcaagatcatgttgattatgctgtgcaccatgctttgatcaatcagtctggaatattagtcaacactttgtcaaacatagtgaaaacaatggttgatggttcaatggctgagtatcaggctaaaggaccggtttatctaccaggagaggtgttcccaaattatcggccattaatcactgataatcagccagctgtccattcaattcctcttaatgcaccatcggctcagccgacggcgccagtatcggctcctgcacctgctgcaccaccatcggcaccgggccagttagttaatccccggttgttggtgagagaacaaccacagcatagtggatagaatgtgaatcggctaacacaagatcaggttgcggctatgttcttacctcctcaacctactgttgatccgacccagcagcagccgattcagcaaacaccaccaaggcagcagattgtgcaaccgagtttacaacacctggtagtcagcttgggcagcatgctgcaaatcaagttgtcccagagcacttggttcatcaggtacaaccagatcaaacgatgtgatgaaggagaagtttgggcttaggccgaaagacgctggaaatttgtaccggtagccttaccctgaatggtttgagagagtccctctacctaatcagttcaaagttccagatttttcaaaattctcagggcaggatagtacgtcaacttatgaacatgttagccgatttttagctcagtgtggtgaagcatcggctgtggatgccttgagggttcggttgttccggttgtctttgtctggatcggctttcacttggttttttttctttgccatatggatcgattaacagttgggctgattaggagaagcattttcacagctatttctacagtggggtacatgagatgaaattgtctgatttaacagcaatcaagcaaagacatgatgagcctgtgcatgagtatattcagagattgagagatgaggaataagtgctacagcttgagtttgactgatgcccagttagccgatttggcttttcaaggtatgattactccaatcagggagaaattctcgtctgaagactttgatagcttgtcgcatcttacacagaaggtaaccttgcatgaacagaggtttacagaggccaggaagaactctagaaaggttaaccatatctgtccttacatatatggatcggataatgatgatgatgatgattctgaaatagcagcagctgaatgggtgagaagcaaaatggttataccatgccaatgggtaaagaattctggaaaagaggagaggtatgactttgatattaccaaggccgacaagatttttgacttgctactccgagagaagcagattcaaccttctactggtcatacaattccatcggctgaagaattgggcaagaaaaagtattgcaagtggcataattccgggtctcatactaccaatgattgcaaggtcttcaggcagcagatccaagcggctattgagggaggaaaaatcaagtttgatgattctaagaggccgatgaaagttgatggcaatcattttcctatcaatatggtgcatacagctggccgagcagccgatgggagatgagcaaggggtgtcaggatt

SEQ ID NO: 26120 - DNA, 328 bp, Oryza sativa
  Clone ID: PAT_MRT4530_30942C.1
ggggggggggttttttttttttttttttggagccaaggcaaccaaggcaggcattacaacccaactagacaggcctacgagccaagggggggtttcggaggacaaaaccagttacaacgcgcaagggcctagtatcccgggcccttccaaaaagcgaccagctgctatccctaaaagcagggcaaccggtagcacaagcgggttcacttctggaccccctcggacccagcccctggagcctgctcgcctccgccctgagaacccccgggctctgaaccgcctgcgccaccaccaccaccagacatatgcgtgcccaaatctttgaaac

SEQ ID NO: 26121 - DNA, 2304 bp, Oryza sativa
  Clone ID: PAT_MRT4530_30943C.1
atgccacaggaacactacgacacacgattgctgccttttcctcaacggagtaggaaaccgtcagtggacgagcagttcgctcattttgttgaagtaatccagaagattcacatcaacgtgccgttgttggatgctatgcaagtgctaacatatgcccgttatctaaaggatatcctcaacaacaagagatcgctcccaacaacggaggtggtcaagctgacagagcaatgcagcaatgttatactccacaagctcccggaaaagaagaatgatccggggtgtcctacgatcacctgcttgatcggggcacagcaattcgaccaagctttatgtgatctcagagcaagtgtcagcgtcatgcccaaagacatctttgacaaactcaacttcatagtgttgtcagcaacattgatgcggctacaactggctgacttgtcagtccgttacccggcagggatagcggaggatgtgccggtcaagatacgggatttcttcatcctggttgacttcgtggtgctggacatggacacaggaaaagaaacgccgcttatcttggggcgtccattccttagcaccgcaggagccaacattgatgtagggacgggaagtatccgtttccataataacgagaaggaagagaagtttgagtttcagccgaggactgaacaacactccatggtcagaataaagtacgggccaaacccgcagaatattcaagtggtcaaagtggagccgcccaagatggatagcctggaatcgttattagaagacgccggtaaaatcaagcgcaccggccaagaagctagagcagctggcttagaggaagccgtctcccgcaccaaaaacaaaaagggtgtggagggaaaagcaaaagacgcccgctccatcacctccggagacgggtggaaaatttgcgaactgaacagtaaggagtggggccggttaggcccaccaggggttcggccaaacccactggttcagccgaaccggccaggaaccggccacctgccacttttggcaagaatgaggaggcgattgtctcgtctgttcaaggggtcgggctctccatcaagtcgtcatgacgagtctagcactcattcatcagctgatgtctcgatggaagacgctgataaaccagtgattggtgctctaattgctgttctgtctttcaaccgccaaggcaaggagaagcagtgtctcatgggaatcaggggtaaggataagccactgtgccaaagattttttaatctgagagagagtacatataccttgcacctgtacctttaagatatacagcatagtagcaactcctgatcaacaatcaagtttttgttttctttcgtccttcactcgggacgagcaaaggttcaagcttgggggggtttttttgacggtcgttatcgatcagtttcgaccgtcaatattaccaaaatagaggagaactaattatgcttgcaatgcatcaatgcatatacatgttagaataataatattccgccaatattaggttcactaaccttttgcagagaatgatcattaaatggaggagaatcggcaccaactaagacgataaatcaatcggacgatgtcgaggatcagacttatgtatgaatgagccaagaactcagaaatgacatgaccaattgggccaaaattcacaagtctgcataaaggagcaatagaggaggccgccagccgaagatgggctggggatggccttgcccatggttcggccggaggtcatcacttttgctgcgggtttgtggcgtgcgtgggcggggcgtcggggcgaggggtgggctgcgcggtttataagtctgtcggattgggggtggtgtggggccgttgtgggggatggtactggtccgttggctaggggcggtgtcggtcgcttggatcgagcggttgtccgtagtttgcctggggctccggttttttctgtgtcgccgtgcttgcttggctttccttttactcccctcctttttgattgggtccgcttttccgtgttgcctttcccggttttgctgcgcgtttgcgttccggtattttgggttcttttttgtccgttttttgtgtttttcccccttttcacttttcggccgctttacattttgggggagagcggtcgcctgattcttggtttttgttcccgtgttttgatttttggtttcctcggtttgttcgcttgttcgtttttccccccggtccctttcggtttgggggatcgggtgtttcccttgccgccggcccctttttccgttttttcttccgccgcgtttgtcccccccctttttttttgtcccg

SEQ ID NO: 26122 - DNA, 203 bp, Oryza sativa
  Clone ID: PAT_MRT4530_30944C.1
gaagctttaaccttgaaggaggttactcattggtcgaacgattcaggaattcagaataatggtggtccttgctatcctgtaatttaaaatatgcggccggggaggaaacgttttgttgcttctgaaatcgtaggataatagttactggatttatatcgtggcagcgaaattataagcattgttcgtgggtcaaaagcggaaga

SEQ ID NO: 26123 - DNA, 216 bp, Oryza sativa
  Clone ID: PAT_MRT4530_30945C.1
gcacagccaagggagagatgcatatttaggtgcacaactctacgagtcggacggggcaggcatgaacatctgaccacataaaatgtcgagccactgtacactgagcattgacagtagtagcgttcacaacataccgagtacgtctccaggaagtaaaactctacgagattcacagcataaccaaacaccgacacttgggtagacccgtgaattaca

SEQ ID NO: 26124 - DNA, 4434 bp, Oryza sativa
  Clone ID: PAT_MRT4530_30946C.1
atggaggatatgattagtgatattatgaggaatagattcgggattgaaactagaaatcgtgctagaacttacaaaaagtcatatcctgattattatgataatgtgctgtttcctcgaaattatagagttcccaaatttgccaagtatagtggtgaggatgttgctcctcttagagaaagactagatggccaacaatttcttgatgttagtcaactcatgcaaagggctctggctcaagaaagccgggttaaggataatagaaaacttgctagaccatttgataaaaagcctaatgttcaatcggccatagatgaaggacgattgaagttcaccgatggctccaagatgaagcttgatcatgatcattttccggtgaatacaattaatttcaatgataagaaggtgttgattcggccggagcaagccgaatctactaaggggaaggaagtggtcattggtgaaccaaggtccaagatgatagtgctaaagaagccggaggttggcgtttggaaagagaataggagtggagcttcaacttctaaagcccctaggaagaccaaggtgacttttaatatgcttttggagaaatatgaaaagcaaggtggtgagaaaattcgcaacaaagggaaaagaccaagatcacctcctaaggagcgatttggtcattcaccaagacggtcgcgttcaccttcgtatcattatccacaagatatgtcatggggttcctatccaatgccgccgtcgggttatccttatccttgcttcatgccatgggggccgacgccgccaatgttcaatcatatgcctcctatgcaattcaaccaagggaggggaggaccacggaggccaattcatgagcgtttgtcttcaccaaacaatagccgattttatggtaagaatcgggctaatgaagaaaagtgggaaggaaagcgcgtcaaggtggaggagaggacttcggaggtgattactatcaaagtggggtctcatgatgtgccaataccttctggagatggagttggagtgtccccaaacaagaaatccgaagccggtaccagttcttcgcagtcggccggccggtttgaccgctcgccacatgttggtctgaccagcgcgtctggccggtctgaccggtggtctacggccggtctagccgggctccagcttcggtttgatgagagggctgcaaagggcgatgtgagggcttcatcgtcttcaagcaaagttaataaagggcattatttacctcctggaatagagccgaatcctaggtggatgcctaaggatttgacggctacacaaaagagaaggttgcaacgtcttcgggcccaagaaataagagagaaaaaggccgaagagcaaagagataaaaggtttaacgagttgcgaccaccaccggtatggaggcctaagtccatagagaaggaaaaaccggttgatataaatgagaaggaagaacaatcggttgacaaaggtgaatcatctccaaaagaagacatggatatcaacatggtgtgtatgttgcctatggagttttgtgctatggatgaagctgaggttgctcaattctcattcggtcctaaagatgcggtttttgagaagcccgatgagtcaaaccgtcacatgaagcctctttatctcaaaggccatgttgatgggaagccggtctctaggatgctagtagatggaggtgctgccgtgaatttgatgccatactcattattcaagaagttgaggcgtgaggatgatgagttgaagaagaccaacatgattctcaatggcttgaatggtgaaccaacggaggcaaggggtatcttttcggcggagctcaccgtgggaaataagacgctaccaaccgctttcttcatcgtcgatgtgcaagagtgggtatctagcatagtcccggtggaaaagaaggggagtgataagattagagtttgcatagattttagagatttaaataaagctactcccaaagatgaatatcctatgcctatagccgacatgatgattaatgatgcctcgggtcataaggtgattagttttttagatggcaataccggctacaatcaaatctttatggcggaagaggatatgtacaagacggcttttaggtgcccgggatttgttggtttgtttgagtgggttgtcatgactttcgggttaaagaatgccggtgcaacatatcaaagggcaatgaatttgatctttcatgatttgttaggtattgtcctggagatctacattgatgatattgttgttaaatcggatggtatggaaggacatgtagccaatttgaggttagctattgagaggatgcgccggtatggtttgaagatgaacccacttaaatgtgcttttggtgtgtcggcggggaagttcttaggattcatggtgcatgagagaggagttgagattgatcctaagaagatagaaaagattcatgatttcaaagcgccgacatgcaagaaggaggtccaaaagttgctaggtaaagtgaattatttgagaaggtttatttctaacctagcgggtaaaatcgatgcttttgttcctatacttcgcttgaaaaaagaagccgattttacttggggggcaaaacaacaagaggcgtttgaagagttgaagagatatttgtctactccacccgttgtgcgagcgcctaaagccggaaagccttttcggttatatattgcttccgaagacaaagtcattggtgccattttgacgcaagaggaggatggcaaggagtatatcattacatatttgagccgccgccttttagatgccgaaacaaggccaattctaagtgggagaattggtaagtgggcatatgctttgatagaatatgatttggcttatgaaccattgaaatctatgaaaggccaaattgtatgtgattttatagtagaccatcatatagatattgcttatgagggagaggtttgcttaattgaagttataccttggaagatttattttgatggttcttcttgcaaagaaggtcaaggcataggggtagttttgttttcacctaatggcatgtgttatgaagcatcggttcgtttgaagtattattgtacaaacaatcaggccgaatacaatgctttattgttcggcttacaagttatggagatggttggagctaaatacgtggaggcttttggtgattcggaattggtggtgcaacaactcgccggagtctacaaatgcttggacggatcactaaataggtacctcgattcatgtttggatattattgtcaattttgataattttgctattacacatattgcttggcgtgataattctagagcaaatggcttggcacaacaagcatctggctataatgtgaagaagggattattttttatattagaagagtcggtgcttgattttaaatctttatgcgaaattggcaaaactggagaccaggggcggtctgaccggccgcatgccgccggtctgaccggcgaccccgagcggtctgactggccctgtgtggtcggtctgaccgggtttggacagagcgccggggggcacgtttcaatcaatttggaagccgaattaattgtgaattcggacatttgtgcccaggtgacagaagaagattggagaattcctttgattcaatatttgaaggatcccacacttaaggttgatcggaaaattcggcggcaatcgttcaaatacacattgcttgatggtgtcttgttgaagtgcttagatgaagatcaatctaaagtggctatgggggaggggcataagttcgtgctagttgctacggattacttcactaagtgggccgaagccgtgcctttgaagaatatgactcatacggaggctaatggacaagccgagtcgagtaataagacattgttgaagctagtaaaaaagaagattgaggaacacccaaagaggtggcatgaggtgctttccgaagcattgtgggcgcataggatatctaaacatggtgccactaaagtcactccttttgagttagtttatggtaaagaagccgttttatcggttgaggtaaatcttggttctcttcgttatatcaagcaagatgatttgtcaagtgaagattacaagacgttgatgggagataatcttgatgaagtcatcgacaagcgcttgagggcattggaggagatagagaaagagaagaagagggtggccaaggcatacaacaaaagggtgaaaggaaagttgtttcaagttggagacttggtttggaagacaatttttcctttgggtactcgatccaaggagttcggtaagtggtctcctagttgggagggtccttatcgagtatgcggcattgttcgagggaacgcgtattttttggagacacttcaaggggagcgttttcagcgagcaatcaacgggaaatacttgaagcaatacttcccgagcgtttggcaagacgcttag

SEQ ID NO: 26125 - DNA, 591 bp, Oryza sativa
  Clone ID: PAT_MRT4530_30947C.1
atgagtgaagaggacaccaatgctgctgctgggcagcccaggcgcgcccctaagctcaacgagaggatcctgtcctccttgtcgaggagatcagtagctgcacatccgtggcatgatcttgagatcggccctggtgctcctgctgtcttcaacgttgttgttgagatcaccaagggaagcaaagtgaaatatgagcttgacaagaaaactggactgattaaggtcgaccgtgtcctatactcatcagttgtgtatccccataattatggtttcattccaaggacactttgtgaagacaatgatccaatggatgttctggtcctgatgcaggagcctgttattcctggttccttcctccgtgctagagcaattggccttatgcccatgattgaccagggtgagaaggatgacaagataatagcagtatgtgctgatgatcctgaataccgtcattacaatgacatcaacaagaagaatgagaacaaggaggttgctgttgatgcattcttgcctgccaacactgctcgtgacgccattcagtactccatggacctgtatgcgcaatatatcttgcaaagcttgaggcagtag

SEQ ID NO: 26126 - DNA, 822 bp, Oryza sativa
  Clone ID: PAT_MRT4530_30948C.1
tcatgcatcggcaggaggagccccagcagcagcgttgttgctattaccgttgttgatggcggcgccgttgccgttgctggcgatgttgccgccggcaggtggcgacggaggcgcctgttgctggtggtggcgacggcggcggcggcgaatgtaggtgtggagctgggcgaagagcgttgatctcctggtgtttgcacggttgatcctcccaatgatcctcagcagcacagcagggcccgggttgtctgcttgggtgaacctgaacagctgctcaagcctcctgatcgtctcatccaacaccctgatcgcggcggcagcatcgaactcgtccttcccagcgacagcggcgttgaagcaagcggcggcggtagcgaactcgtcgttcccagtggcggtggcgtcgatgtcgtccttcccggcggcagtggcgtcgatgtcgtcctccaagagtcggcggcgtcgatccaggaggcagcggcggcgtcgatcgatcgagaatcgcagcacttctagggttcgagctgcccgtccatccctcccgatccggttattgcacacgaagttacgtttttgcccttccacctcagttctccgcgtggtactgcacagggacagaattggtaccgcccggtaccaaactctactagccgttggatcgggccagatccaacggccaggattttggtaccgggcggtaccggtaccgaccgctgtaccgtaacaacactctatgtatagatatgttacagaaacgtcgccctgcaggccatgatggttgccgttgctgttgccgttaggagcggcggcggcggcggcggccat

SEQ ID NO: 26127 - DNA, 3734 bp, Oryza sativa
  Clone ID: PAT_MRT4530_30949C.1
atgacgaagccatcatccaagacggaggtggagccatctcatgtgataccggtcacattggatgactttgaaggagaggatcgcaaagccatggaggagtacatcaacgagctcacacgggaggcgttgatgagagcaactactaggactcgtcaaggcgtgatcatcaagcccgggccacgtcccaagctcgctcccgacgtggtaagtaatgacgaggtatcgcaatctatcaaccaacaaattgcatctacaatagattcatctatggctaattttaaagatagattagatgtgatgtttaaggaaaaagttgatgggtttttaaggagtaggctaggttcttttatggatgattacactttaaaagataaagcctataccactgctgatcaacctcctatagatctgatggggtctaaaaccgacggagcggcgttcgtgaccagtccgaccgggcctaacggccggtcagaccgtgacacagccgtcggtcagaccggccagatggccggtcagaccgggtattatcccgtcggaccgactggccagatggccggtcagaccggaacatttgattcccctgtatctactgccaccactagtcctcaaattcccccacatattcctaatatttacaatgatgtctctaggggatatcctcccgatactaggccaggccaatataatcatattgcgccacaaaaccaacctattaggccaccaaacccaccaccaaatccgcaagggcctaataacatggagaacatgattagtgatattatgaggactaaattcgggatcgagactaggaatcgtgctagagcttataaaaaaccatatccggattattatgataatgtgccgtttcctagaaattatagagttcccgaatttaccaagtttagtggtgaggatggtaagaccacatgggagcatgtaggtcaatttttagcgcaatgtggtgaggctaatagtgatacttttaaattgcgcttattttctttatctttatccggtaatgcttttacatggtttacttctttaccggcaaattctattcatacttgggctcaattagaagaacaatttcatgattatttctatactggagagactgaacttaggttatgtgatttaacatcggttaagcaaaagtataatgaatctgttgttgattatattaagaggttcagagatgttagaaaccgatgttatactttggatataactgatagagatttggccgggcttgcttttaatggtttagttgctcctcttagagagaaactagatggccaacaatttcttgatgttagtcaacttatgcaaagggctctggctcaggaaagccgggttaaggataataaaaaaattgctagaccattcgataaaaagcctaatgttaatgtagttgattactctgatgctagtgatagtgaagaggagggtgatcatgatatttatgttgccgaatggtcatggactaacaagaataaaccttttgtttgttctaatttaatgccgactcatcgtaaagatcggcaaagtgaggttcaatcggccatagatgaaggacgattgaaattcaccgatggctccaagatgaagcttgatcatgatccttttccggtgaatacaattaatttcaatgataagaaggtgttgattcggccggagcaagccgaatctactaagggaaaggaagtggtcattggtgagccaaggcttaagatgatggtgccaaagaagccggaggttggtgtttggaaggagaacaagggtgaagcttcaacttctaaggctcataggaagaccaaagtaaccttcgatatgctcttggagaagtatgagaagcaaggtggtgagagggatcacaacaaagggaaaagaccaagatcaccccctagggagcggtttggtcactcaccaagacgatcgcgttcacctccatattttcatccacaagacatgtcatggggttcttatccaatgccgccaccgagttatccttatccttacttcatgccatggggggcaatgccgccaatgtacaatcatatgcctccaatgcaattcaacaaagggtggggaggaccacggaggccaattcatgagcgcttatcttcaccaaacaaaagccgattttatgatggagttggaaagttcccaagcgagaaatccgaagccggtaccagctcctcgcagtcggccggtctgaccaggccttccggccagtctgaccgcggtcatgtagccggtctgactgggccatcaggccggtctgaccgccgatctgacgacggtctgaccgacgcctcaggccggtctgaccgcacgccacacgtcggtctgaccggcgcgtctggccggtctgaccggtggtctacagccggtctgactgggctccagcgtcggtttgatgagagggctgcaaagggcgatgtgagggcttcatcgtctccaaacaaggttaatagagggcattatttgcctcctggaacagagccgaatcctaggtggatgcctaaggatttgacggctacgcaaaagagaaggttgcaacgtcttcgggcccaagaattaagagagaaaaaggccgaagaacagagggataagaggttcaatgagttgcgaccaccaccggtatggaggcctaagtccatagagaaggcaaaaccgattgatgtagaggagaaggaaggacaatcggttgatgaaggtaaatcgtctccaaaggaggacatggatatcaacatggtgtgtatgttgcctatggagttttgtgctatggatgaagccgaggttgcccaattctcattaggtcctaaagacgcggtttttgaggaacccgatgaatcaaaccgtcacatgaagcctctctatctcaaaggccatgttgatgggaagccggtctctaggatgctagtggatggaggtgccgccgtgaacttgatgctgtattcgctattcaagaagttggagcgtgaggatgatgagttgaagaagaccaacatgattctcaatggcttcaacagtgaaccaacggaggcgaggggtatctttttggcggagctcaccgtgggaaacatgacgctaccaaccgctttcttcatcgtcgatgtgcaagaggctagtttagagtggttacaaaagagggtgcaagaatatcggtctacaaagaacgatattggtgaaaccgttgaagattttgatgaagtggagaagcttggacaagggtttacatcggctgatccattggaggaagtagacataggtgatggaactaaaccaaggccgacttttataaacaaaaacatgaaagccgattataaggttaagataatcgagctacttaaggagtatgttgattgctttgcatgggagtaccatgagatgccgggtcttagccgtgagcttgttgagcatcggcttccaattaaaccgggttttaggccttataagcaaccaccttgtcgttttaatcctttattatatgaccgagtcaaagaggagattgatcggtctattgaaggcggggtttattaggccatgtcgttatgcggagtgggtttctagcatagtcccggtggagaagaaggggagtgatggtaatgccggctacaatcaaatctttatggcggaagaggatatgtacaagacggcttttaggtgcccagggtttgttggtttatttgagtgggttgtcatgacctttgggttgaagaatgccg

SEQ ID NO: 26128 - DNA, 285 bp, Oryza sativa
  Clone ID: PAT_MRT4530_3094C.1
atggaagaagacaggatgatctacgcggaggatttggggtacatgtctaccccatgcctttctccaccttcagatgtcaacgacctaaatccgcctgaagaccccaacaacataagtgttctgcacccagctttcatcgacgacgactcctccaagagatgctcagtcaccggcaacccgcatgcgtaccacggcctctacccttgcctgttccccgtggcctgcctctctttcccttaccccttcttgaaatttgtaggattcttcgggcaagtatccgcgtag

SEQ ID NO: 26129 - DNA, 1549 bp, Oryza sativa
  Clone ID: PAT_MRT4530_30950C.1
ccggccgggagtgcagtgcagggtatcatttcatttcttcttcttcttcgccgccgccgccaccttccaccccttcagccgccactccaatccaaggaggatgagtgaagaggacaccaatgctgctgctgggcagcccaggcgcgcccctaagctcaacgagaggatcctgtcctccttgtcgaggagatcagtagctgcacatccgtggcatgatcttgagatcggccctggtgctcctgctgtcttcaacgttgttgttgagatcaccaagggaagcaaagtgaaatatgagcttgacaagaaaactggactgattaaggtcgaccgtgtcctatactcatcagttgtgtatccccataattatggtttcattccaaggacactttgtgaagacaatgatccaatggatgttctggtcctgatgcaggagcctgttattcctggttccttcctccgtgctagagcaattggccttatgcccatgattgaccagggtgagaaggatgacaagataatagcagtatgtgctgatgatcctgaataccgtcattacaatgacatcagtgagctgtctcctcaccgcctccaagagattaaacgcttctttgaagactacaagaagaatgagaacaaggaggttgctgttgatgcattcttgcctgccaacactgctcgtgacgccattcagtactccatcgctgagactgcatatgaggttttcatggtgcttgtaaatatgtacaaccaaatttgcaagtcgggttgcagcaataagacctccgcgacactccgtctccgacgcgagggaggctacgtggagcttgggaagccggaggggctacgacagcgaactctggctaccacgtggagaactgaggtggaagggcaaaaacgtaacttcacgtgcaataaccggatcgggagggatggacgggcatctcgaaccctagaagcgctgggattctcgatcgatcgccgccgccgccgccgccgccgggaacgaggacatcgacgccgccaccgccgccgggaacaacgagtttgctgctggcgtcgcctgcttcaacgtcgccgccgctaccgccgcgggaaggacgacatcgacgccgctgccgccgggaaggacgacatcgacgccgccgccaccgggaacgacgagttcgctaccgccgccgcttgcttcaacgccgctgtcgctgggaaggacgagttcgatgccgccgccgcggcctgcttcaacatcagggtgttggatgagacgatcaggaggcttgagcagctgttcaggttcacccaagcaaacaacccgggccctgctgtgctgctgaggatcattgggaggatcaaccgtgcaaacgccaggagatcaacgctcttcgcccagctccacacctacattcgccgccgccgccgtcgccaccaccagcaacaggcgcctccgtcgccacctgccggcggcaacatcgccagcaacggcaacggcgccgccatcaacaacggtaacagcaacaacgctgctgctggggctcctcctgccgatgcatga

SEQ ID NO: 26130 - DNA, 462 bp, Oryza sativa
  Clone ID: PAT_MRT4530_30951C.1
atggcgatgtgtgacattgagaacggaaacaacgggcggtggccgctccttccgccggtgaagaagatgaaaactcggagagaggcatgctcggtgccaccgtccccttggatgcccgccgctgctccatggatgccggaggacaagctcaccgccgcgaagagcggcaaccggatccaccgccgcatcgtctcccgcccacagtcacccgtcgacaccgcacatgccaccatcgtgcctatccatgcacctcagcgccaccggatccgccgctcctccttgacgcgggtcctcctcatcctcgaactgccaccgctcctcctgtcgccaagccatcactggaactgcctcgccaccaccactcatcccctaatcgccatcgccattcctcctctctgcacaaggaaccacaagtcgtcgctgatccataaaatgtggagaggaacaggaaagagtgggtag

SEQ ID NO: 26131 - DNA, 206 bp, Oryza sativa
  Clone ID: PAT_MRT4530_30952C.1
gtttttgcgacggggtgggactaacacgttactgggctttttttgctccatgatggagactcacatcaactgatcctctattgcctgaatctctcgcacctatactggaagcatgcgttttcggccagaaatcttcacagtctgacgactaacctcgctgcagctgtggtcgctgtggtcatggaggcgatgtgcatgagaagaaa

SEQ ID NO: 26132 - DNA, 720 bp, Oryza sativa
  Clone ID: PAT_MRT4530_30953C.1
atgggtcaagccaatttcgcactacaggtgatcagcggcaacccgggcgccctgagggacatgctgcggtcggccagcggaagctgcccgccggcgaactaccgcaactccgtcgtgctcgaggacggcgacgccgtgctgcagtcgcgtctcgcggagctcggcgcgtcgacgccgacgtgcgtctacttcgggcaggcccccaggggccagcagaccagcctcctgctcggccgcctgggcctcgccaggggctccgtcgccgcccggcacatcacggaggccttcaccgacggcgagcgcaacctcgtgatcggcgacggcggcgacgggcggcacgggatggaggtgccggtgttcgacgccgaggggcggcggtacggcctcacgtgcggctactccgactacgccatgtgctaccgtctcttcggcgccgccagggagtttggccgattcagggcgaacaacagagaggtgcgcgacgtcgccgtcggcaaggacaagctgatgaaggttttcaccttccgctcgccggcgctgcggccggtagaagtagacctcgacgacggccacccggacggcgctctcggcatgatcgttctgttctacgacctcgacgccaaggaggccgtcaagaacgagttgctggacaccgacactctgaccgtgaaccagataatgaagcattatccgaaactagctcaaatgatgttaaactag

SEQ ID NO: 26133 - DNA, 7539 bp, Oryza sativa
  Clone ID: PAT_MRT4530_30954C.1
taagcaaggtggtgagagggctcgcaacaaagggaaaagaccaagatcacctcctagggagcgatttggtcattcaccaagacggtcacattccccttcatatcatcatccacaagacatgtcatggggttcttatccaatcccaccgctgggttacccttatccttacttcatgccatggggggcgacgccaccaatgttcaatcatatgcctccaatgcaattcaatcaagggtggggaggaccgaggaggccaattcatgagcgtttgtcttcacaaaacaatagccggttttatggtaagaatcgggctaatgaagaaaaaagggaaggaaagcgcgtcaaggtggaggtgaggacttcggaggtgattactatcaaagtggggtctcatgatgtgccaataccttctggagatggagttggagtgtccccaaacaaaaaatccgaagccggccggtccgaccgcccaaccgacaccggtctgaccgacgcttcaggccggtctgacccgcaccaaatgtcggtctgacaggcgcatctggccggtctgaccggtggtctacgtccggtctgaccgggctccagcgccggtttgataggaggattgcaaagggtgatgtgagggcttcatcgtctctaagcaaaatcaatagaggacattatttacctcctggaacagagccgaatcctaggtggatgcctaaggatttgacggctactcaaaagagaaggttgcaacgtcttcgggctcaagagataagagagaaaaaagccgaagaacaaagagataaaaggtttaatgagttacgaccaccacaggagaaggaggagcaatcggttgataaaggtgaatcatctccagaagaagacatggatatcaacatggtatgtatgttgcctatggagttttgtgctatggatgaagccgaggttgctcaattctcattaggtcataaagacgcggtttttgagaagcccgatgagtcaaaccgtcacatgaagcctctctatctcaaaggccatgttgatgggaaaccggtctctaggatgctagtggatggagatgccgccgtgaacttgatgccgtattcattattcaagatgttggggcgtgaggatgatgagttgaaaaagaccaacatgattctcaatggcttcaatggtgaaccaacggaggcgaagggtatcttttcggcggagctcaccgtgggaaacaagacgctaccaaccgctttcttcattgtcaatgtgcaagaggctaatttagagtggttacaaaagagggtgcaagaatatcggtctacaaagaacgatattggagaaactgttgaagattttgatgaagtggagaagcttggaaaagggtttacattggccgatcctttggaagaagtagatataggtgatgaaactaaaccaaggccgactttcgtaaacaaaaacatgagagccgattataaggttaagataatcgagctacttaaagagtatgttgatggttttgcatgggagtaccacgagatgccgggtcttagccgtgagctcgttgagcatcggcttccaattaaaccgggttttaggccttataagcaaccacctcgtcgttttaatcctttgctatatgaccgagtcaaagaggagattgatcggttgttgaaggcggggtttattaggccgtgtcgttatgcagagtgggtctctagcatagtcccggtggagaagaaggggagtggtaagattagagtttgcatagattttagagatctaaataaagttaatcccaaagatgaatatcctatgcctatagccgacatgatgattaatgatgcctcgggtcataaggtgattagctttttggatggtaatgctggctacagtcaaatctttatggcggaagaggatatgtacaagacggctttttggtgcccgggatttgttggtttatttgagtgggtggtcatgacttttgggttgaagaacgccggtgcaacatatcaaagggcgatgaatttaatctttcatgatttgctaggtattatcttagaggtctacattgatgatattgttgtcaaatcggatgcttttgagaggatgcgccggtatggtttgaagatgaacccacttaaatgtgcttttggtgtgtcggcggggaagttcttaggattcatggtgcatgagagaggagttgagattgatcctaagaagatagaaaagattcgtgatttcaaagcgccgacatgtaagaaggaggttaaaaagttgctaggtaacatgaattatttgaggaggtttatttctaacctagcgggtaaaatcgatgcttttgttcctatactttgtttgaaaaaagaagccgattttacttggggggcaaaacaacaagaggcgtttgaagagttgaagagatatttgtctactccacccgttgtgcgagcacctaaagccggaaagccttttcggttatatattgcctccgaagacaaagttattggtgccgttttggcgcaagaggaagatggcaaggaatatatcattacatatttgagccgccctcttttggatgccgaaacgagtagaccatcatatagatattgctatgagggagaggtttgcttagttaaagttataccttggaagatttattttgatcgttcttcttgcaaagaaggtcagggcataggggtagttttgttttcacctaatggcatgtgtgatgaagcatcggttcatttggagtattattgtacaaataatcaagctgaatacaatgctatattattcggcttacaagttatggagatggttggagctaaatacgtggaggcttttggtgattcggaattggtggtgcaacaagtcgctggagtctacaaatgcttggacggatcactaaataggtacctcgattcatgtttagatattattgccaattttgataattttgctattagacatattgctaggcatgataattctagagcaaatgacttgtcacaacaagcatctggctataatgtgaagaagggattatttctgatattagaagagccggtgcttgattttaaatctttgtgcgaaattggcaaaactggagaccaggggcggtctgaccggcattgcacggccggtctgaccggtgagcaggggcggtctgaccggccgcatgccgccggtctgaccggcgaccccgagcggtctgaccggccctgcgtggccagtctgaccggttctgggcagagcgctggggggcacgcttcaatcaatttagaggccgaattaagtgtgaattcggacatttgtgccaagggaacagaagaggattggagaattcctttgattcgatatttgaaagatcctacacttaaggttgatcggaaaattcggcggcaagcattcaaatatacattgcttgatggagatttgtatcgccgaaatatagatggtgtcttgttgaagtgcttagatgaagatcaatctaaagtggctatgggagaggggcatatgttcgtgctagttgctacggattacttcaccaagtgggccgaagccatgcctttgaagaatatgactcatacggagttggtttatggtcaagaagccgttttaccggtggaagtaaatcttgattctcttcgttatatcaagcaagatggtttgtcaagtgaagattacaagacgttgatggaagacaatcttgatgaagtcatcgacaagcgcttgaaggcattggaagaaatagagaaagagaagaagagggtggctaaggcgtacaacaaaagggtgaaagcaaagttgtttctagttggagacttagtttggaagacaattttgcctttgggtactcgatccaaggagttcggcggtgtgctcctttcaccacggagatacttcacggattgcgatgattacagttacaccgacgacgatgacgattatgatgacttcgtcgtctccacacccacacccacgacgacgacgacctcaacaacgtcgtcggtgaacaacggtgaggggtcctcgcgtcgcagctggtggccgccgcaaaggcagcacctgtacgttgtgctcgacgactggagcaggggattcagcgtgcacaagatggaccttgacggcaacgaggccgacgcagacgatcagctcgtcaccgtcgccgccacggactatctgccggcacggacctacaggcgtcttccggcgccggctgtccgattcgagtacgtgcactcccggttgaagatgatgggcagcagcgcgcagttcgccgcgctgggcagcaacatcgtggccaagggctacccgttcagcgacaaagatggcctcgctgtcgtgtacgacaccaagacggcggcgcaggccttcgtgcaccgcctcccggaggcgctggagcggtgggacgccgccgggaacaagctgtacgcgttcacgccgtccgaccggtcagtggactgggaccctcgcatcgacgcagggatgcaccgcctcgaagaggatccgttggcgacggagcggtggtcttggagccacgacccgtcgccggtcccgttcgacaacgaccacgcgcaccggcggatcacatcgcacgccgtgcgccccggaggcagcgccatcttcgtctccatagagaattggagcgtgccccgccccgggcacggtgatgaccacgtcgccgcgcaggcggcggaggcggaggcgaagaagatggcggggaccttctcctacgacaccgagcgcggcgagtggacgcgccacggcgactggctgctgccgttccgtggcgaggcgcactatgacggcgagctcgacgcgtgggtcggcctccattgcgactctcaccgccacggcaaactctgctcctgcgacatcgtcgccgccgggagccacgaggaggagcccaactggaagctgtgcgagatggtggtgatgacctcgacagtcgaggacgacgcgacgctcgtccctatgggcggcggcggcaagttctgcctcgtcgagggcaggtcgcattgtcgctggtgggatgcaagtttgaccggcggtgatggcttcaccgtcgtaggaggcggtggaatctgcgctggcggcagcgccgccaatgccgaaatggattccgaaagggatgcatggtttggtggatctgatttgggatcccctttttctcttcatttgccgttgcattgtaggatggatccgaactctgcatgcagagttgtggttagggttgttgcttatgttgagtatatggataatggtagccaagattatcatgtatcatctccacataagtgggttgtagataaagacacaataagcttgatagatttgatgaaggacttggatgatgaaatcatccgtggtagtgcgcaggagcttagagtgactttctgggacaagagagtgggtagggatgtagaaatttgttctgatgctgtgttattagaggcatttaaccaatactgggatgttaggaagcttccattgcaagtgacacaagtcaggctgacaatgttcctaccagagatgctaccacaaaaaaggttcccaccaaaaaaaaatagcaagtccagggacaaagctactgatcaatcaatgccaaatccagatccatggggtgagtttgatgaggttgagtatgtaggagttagtgatgagagggagaattacaatgagctggtgtcagatgatgaggctaatgatccaaattacactcctgaggaatctgatggtgatgaagagaatgatgatccagtagatgatttagaagtcaatgataataggggttgtgagcctctaatccatataactgataggtgtatgagacaatatgctgtcctgaaagaggttgagcttgcagtgccctactctgaggccacaagatacagagcttattgcaaggcaaagaagtgcaaatggaggatccatgcttctaggttgccagatggtagaacttggcagataaagaacatgccatatgagcataggtgtgctagcacaggcaaattggagaataattgcatggccagcaattcttgggttaaagacagggttatcaacaagcttagagaagatccaaccataggggctgctgctctaaagaagactttggaggagaagtatttaatcaccctgtcatactatgtagtatgggatggtaggcagatggctttagatgagatacttggtggctgggagcaaagttttgaggtagtgtatagttttaaagctgagattgagaagagatctcctggtagtatagtggagatagagtatgatgtgattaatgagaagcataggtttagtaggatgtttattgctttgaagccttgtataaatggatttttgaatgggtgcaggccatatttaggcattgattcaactgtgttaacaggcaagtggagagggcagttggcttcagctattggtatagatggccacaattggatgttcccagtgccctatgctgtctttggatctgaaacaaagaaaaactgggaatggttcatggtttgtttgaataaggcaattggatctccagaagtcctagtactgtctactgatgcaggcaagggcatagatgctgcagtgacaagggtgttcaacaatggagtagagcatagagagtgcatgaggcatttgtacaagaattttcagaaaaggttccatggagaagtgaagtcagtggtgcaaaaaagggacttgacaacatggagacacactgtggacttgaccaaacaagaatgtagttgcaatgaatggcagctaacaggcctcccatgtaggcatgccatctcttttattggatccctgagagaagtggagctagaagactatgtcagcccctactattcagtggccatgttcagggttgcctattccacagttgtgcctccaatgccagacaagagcctatgggagaaagtggacacaggattcaagatgtggccaccaatactgaagagatcagctggaagacctagaacaaggaggttcattggtgttgaagaaggtggttcaggaaagaaaagaaggagatgcaaggggtgccatggctttggccacctacaaaagacatgcaatgaacctgtatatgacccagatgcccctcccccagctccacccaagcctaagagagttagaaagaagaaatccaagcctaaacaagtgcctactggtggtaacaacactatgcctcctcctgctgctgctgatagtgctgatcaagccacatctactgctgcccctgctgctgatcaagcccatgctgatgttgctgatcaaggccctgctggtgttggtgctgctgctgatcaagctcatgctgctgctgctgatcaagcccctgttggtggtgctgcttgtggtgatcaagcccctactggtgctggtgatcaagcccctgcacaagttgctatgcaggtggatgacatccctggactagttacaaggagcaagagtgttgcatccccagaacatgcaagtccatttaaagccaacaaaaggaaggctgtggttaccaggactgcaaagaagctgtaa

SEQ ID NO: 26134 - DNA, 5964 bp, Oryza sativa
  Clone ID: PAT_MRT4530_30955C.1
atgtggaccccacggcagtggctcaagggggaagaggaggtggcgcccggttggctcggctcggcttcaaagccgaccggcgaccagggcgaccggcggcggcgcgcgagcgccggcaacggcaagcgacggcgcgggagacggtggcggacggcgcacaggccggcggcggcggccgaaggcgatggcgagcgcagggagcggcagcgcgtgcgggacagaggaaaggatggaggagaggagctcctcaccgtgagcacggcggccggcgcgaaggatgaagacggcggcgatgaccggcgatgcggaggcacggacgggcggcggcgacaccctaggagaagatggggaggcgttaggagaggagatgatgaccacggcggcttgaattgccggccggagatggaggggagggaaaaactcaccggctcgcgaggggagaggcgctccggtgggattctggcaacgagaggcggtggccaggaaagctcttgcggcggcgaagctaacggcggtggtgctgcgatcgtgcttgtcaacttgtcaaaaaagttgcgaacacgattttttgcgactccactggggaagagatccgttcatcatcaactcgacttcgactttgccatgacgaagccgccatccaagacggaggtggagccatccaatgtgataccggtcacattggatgacttcgaaggaaaagatcgtcaagctatggaggagtacatcaacgagctcacacgtgaggcgttgatgagagcaagtactaggactcgtcaaggcgtgatcatcaagcccgggccacgtcccaagctcactcctgacgtggtaagcaatgatgaggtatcacaatctatccaacaacaaattgcatctacaatagattcatctatggttgcttttaaagatcggttagatgtaatgtttaagggtaaatttgatgagtttttaaggatgaagttcgattctcttatggacgattacacattaaaggataaagcctctaccactgctaaccaacctcctatagatcaaacgggtagtaaaaccgacggaacggcgttcacggccggtcagaccgggtattaccccggtggtcagaccgggtctcaagctggtccgaccgcacatcttgacactggtcagaccgggccctgggccggtcagaccggcgcaattgttccaatacagggaatagatccgatgactaatgctagttatttatatcactttagaacatttaatcctcctgtatctattgctacaagtagtccccaagttcccccacatgttcctaatgcttataatgatgtttctagggggtatcctcccgatactagacaaggccaatataatcatattgcgccacaaacacaacctattaggccaccaaatccaccaccaaatcaacatgggcctaataatatggaggatataattagtgatattattaagaatagattcgggattgaaactaggaatcgtgctagaacttacaaaaagccatatcctgattattatgataatgtgccgtttcctcgcaattatagagttcccgaatttgccaagtttagtggtgaggatggtaagaccacatgggagcatgtaggtcaatttttggcgcaatgtggtgaggctaatagtgatacttttaaattgcgcttgttttctctatctttatccggtaatgctttcacatggtttacttctttaccggcaaattctattcatacttgggttcaattagaagaacaatttcatgattatttctatactggagaaactgagcttaggttatgtgatttgacatcggttaagcaaaagtataatgaatttgtcattgattatattaagagatttagagatgttagaaaccgatgttatactttgaatatagctgatagagatttggctggtcttgcttttaatggtttagttgctcctcttagagaaagactagatggccaacaatttcttgatgttagtcaactcatgcaaagggctctggctcaagaaagccgggttaaggataatagaaaacttgctagaccatttgacaaaaagcctaatgttaatgtggttgattaccctgaggctagtgatagtgaggaggagggtgatcatgatatttatgttgccgaatggtcatggactaataaaaataagccttttgtttgctctaacctaatgccgactccttgcaaagatcggcaaagtgaggttcaatcggccatagatgaaggacgattgaagttcattgatggctccaagatgaagcttgatcatgatccttttccggtgaatgcaattaatttcaatgataagaaggggaataggagtggagcttcaacttctaaagcccctaggaagaccaaggtgacttttgatatgcttttggagaaatatgagaagcaaggtggtgacaaaattcgcaacaaagggaaaagaccaagatcacctcctatggagcgatttggtcattcaccaagacggtcgcattcaccttcatatcattatccacaagacatgtcatggggttcctatccaatgccgctgccgggttatccttatccttacttcatgccatggggagcaacgccgccaatgttcaatcatatgcctccaatgcaattcaaccaagggtggggaggaccacggaggccaattcttgagcgtttgtcttcaccaaacggtagccgattttatggtaagaattgggctaatgaagaaaaaagggaagggaagcgcgtcaaggtggaggagaggacttcagaagtgaatactatcaaagtagggtcttatgatgtgccaatacctatcggagatggagttgaagtgtccccgaacaaaaaatctgaagccggccggtctgaccgccggccctatagcagtctgaccgacgcctcaggccggtctgaccgtgctccggatgtcggtctgaccggtgcatctggctggtctgactggtggtctacggccggtctaaccgggctccagcgccggtttgacaggaggattgcaaagggcaatgtggaagcttcatcgtcttcaaataaagttaatagagggcattatttacctcctggaacagagccgaatcctaggtggatgcctaaggatttgacggctactcaaaagagaaggttgcaacgtcttcgggcccaagagctaagagagaaaagggccaaagagcaaagggataaaatgtttaatgagttgcgaccaccaccgttttgtgctatggatgaagccgaggttgctcaattctcattaggtcctaaagacgcggtttttgagaagcccgatgagtcgaatcgttacatgaagcctctctatctcaaaggccatgttgatgggaaaccggtctctaggatgctagtggatggagatgccgccgtgaacttgatgccgtattcattattcaagatgttggggcgtgaggatgatgagttgaaaaagaccaacatgattctcaatggcttcaatggtgaaccaacggaggcgaagggtatcttttcggcggagctcaccgtgggaaacaagacgctaccaaccgctttcttcattgtcaatgtgcaagaggctaatttagagtggttacaaaagagggtgcaagaatatcggtctacaaagaacgatattggtgaaaccgttgaagattttgatgaagtaaaaaagcttgggaaagggtttacatcggccgatcctttggaagaagtagatataggtgatgaaactaaaccaaggccgacttttgtaaacaaaaatatgaaagccgattataaggttaagataatcgagctacttaaagagtatgttgattgctttgcatgggagtatcatgagatgccgggtcttagccgtattatcctagagatctgtattgatgatattgttgtccaatcggatggtatggaaggacacatagccgatttgaggttagcttttgagaggatgcgccggtatggtttgaagatgaacccacttaaatgtgcttttggtgtgtcggcggggaagttcttaggattcatggtgcatgagagaggagttgagattgatcctaagaagatagagaagagtcgtgatttcaaagcgccgacatgcaagaaggaagttcaaaagttgctagttatggagatggttggagctaagtacgtggaggcttttggtgattcggaattggtggtgcaacaagtcgccggagtctacaaatgcttggacggatcactaaataggtacctcgattcatgtttggatattattgccaattttgataattttgctattagacatattgctaggcgtgataattctagagcaaatgacttggcacaacaagcatctggttataatgtgaagaagggattatttctgatattagaaaagccggtgcttgattttaaatctttgtgcgaaattggcaaaactggagaccaggggcggtctgaccgacattgcacggccggtctgactggtgaccaggggcagtctgaccggccgcatgctgccggtctgaccggcgaccccgagtggtctgaccggccttgtgtagccggtctgaccggttctaggcagaacgctggggggcacgcttcaattaatttagaagccgaattaagtgtgaattcggatatttgtgcccagggaacagaagaggattggagaattcctttgattcgatatttgaaagatcctacactcaaggttgatcggaaaattcggcggcaagcgttcaaatatacattgcttgatggagatttgtatcgccaaaatatagatggtgtcttgtggaagtgcctagatgaaaatcaatctaaagtggctatgggagaggggcataggttggtgctagttgctacggattacttcaccaagtgggccgaagccgtgcctttgaagaatatgactcatacggaggctaatgggcaagccgagtcgagtaataaaacattgttgaagttggtgaagaagaagattgaggaatacccaaagaggtggcatgaggtgctttctgaagcattgtgggcgcataggatatctaaacatggtgccactaaagttactccttttgagttggtgtatggtcaagaagccgttttaccggtggaggtaaatcttggtcctcttcgttatatcaagcaagatgatttgtcaagtgaagattacaagatgttgatgggagacaatcttgatgaagtcatcgacaagcgcttgaaggcattggaagagatagagaaagagaagaagagggtggccaaggcgtataacaagagggtgaaagcaaagttgtttcaagttggagacttggtttggaagacaattttgcctttgggtactcgatccaaggagttcggtatgtggtctcctagttgggagggtccttatcgagtaaatacttcccgagcatttggcaagacacttaggaggtactacggccgactgccggttgagggccggtcagactggcgttgtgtggctggtctgaccggcaagtccgagtccgactctgtttcgtcggagggcaagaccaacccctacataagggacatggccggttcattagccctagcgtcgtgtgacctagcgccgccgtcgtcgccgtcgcttcagccgtgcgccgccgccgttccagtcgtcgccgtcgctcggggagatcgccatcgtggtcgccaagtcgccgccgtcctcgtccgccccttcgccgtcgctgtagaccgccggagcaccgtcgccgccgtcgacccgatcttctccgccgcttcgatctcgccgccggtgccgtccgttgcttttccgccgcttctttggtcgccggtgagttcgccgcgtcgccctctacccgttggtgccctccgttcgtgccgaagcgccgtcattcgccggcgagcatgcgccacccgagctgctgccggtggtgacgtcaccgctgacgtcatcgggaccgtccgccgtgagccgccgtag

SEQ ID NO: 26135 - DNA, 1732 bp, Oryza sativa
  Clone ID: PAT_MRT4530_30956C.1
atgttgggggaccagcgcaggaaattcctgctagagtcagcgagctcatcatctgaagaggttgtttcaagaagccggaaccttgcggttgagagctcggcggtggcggtgacggcggcgggggtgaggaagggagaagaggtggaggaggaggagctcttgaaccgtagaagcaagaagaataaggttgccagtgattcggggaattccggtaccggagtttgggactcagaaatgcaggatgctgatcagaatggtgaagccaacacaagcgagctcataggcgcgatcgggcgggagctggccattacatgcctgctccataccccccggtcttattatggtatgatagcatgcctcaaccggtccttctgctcccttatgaggtccgggcagctgtatagattgcggcgggaggctcgcattgttgagcacatgatctactgctcctgcaatgtgcttgagtgggatggctttgatccgtgccgccagcgctggttcaacatcccttccatgcctcccatagagtgcttcacgcttgctgataaggagtcccttgctgtgggaaccaatatccttgttttcgggaagaaggtggaggcccatgttgtgctgaggtatagcctcctaagtaactcttggacaacaggagatatgatgaactcgcccaggtgcttgtttggctcggcaagctttggtgagaaggcaatcgtagctggtggtatcggtgataatggtacattgagctctgctgagctctatgattctgaagcgaagacatggaccactctcccaagcatgaatagggcgcggaagatgtgttctggtttcttcatggatggtaaattttatgttattggcgggaaagctgataaccataatgagatccttaattgtggtgaggagtttgatttggagaagggcacctggcgtttgatcccagatatggcatctggccttaatggcggcagtggtgctccaccacttgttgctgttgtgaataatgaactttatgctgctgattatgcagagaaggaggtgaggagatatgacaaggttaataatgcatggatcactcttggatcattgcctgagaagtatacatcagttaatggctggggtttggcatttcgtggttgtggagataagctcattgtgattggtggaatgagtgcacctggtggtggagtgattgaaatttgttcatggatacccaataatggacagccagattggaaaatcattggcagccgccgttctggaagctttgtgtacaattgtgctgtgatgggctgttgacataccagggctattacattatcgactgtacatcttgaccaaaaggaaggataaaagaggcaaattcttctgagcttgtttagtgattgtgctcgatgggtaatttctgccttctctggcattttaggctgagctgaagattgggtagaatttctcatgtagcttcttacttgcttatgtctaatctcttcattttaattccatttggagggcctgcaaatggtttccagaaagtgggacatgcagcgcagcattagattaataatttggtgcaacctcaacattttgatctaccttggataccttcatgaaagttttttagctccagagagtagtgttacattggcaaaccatttgcccatagattgtaagaaataaaggaagaaagaaaaaatgtccttgttgacgattattgcctaaaaaaaaaaaaaaa

SEQ ID NO: 26136 - DNA, 253 bp, Oryza sativa
  Clone ID: PAT_MRT4530_30957C.1
ggtacccttatttggcactttgattaaatttgaataaacccaacatattgtgtccaaaatcacaagggagaaccacaggtagcactagggattaccgtctttgagtagaagaaaatgatatcaaatcggccgtttgaaaactttggacgcgctaaagaagtttcttctacaaagagagagaaacacgccggggacagtgataacagatgcgattgccccccccctcttggttcccgagatttagaaacatttc

SEQ ID NO: 26137 - DNA, 903 bp, Oryza sativa
  Clone ID: PAT_MRT4530_30958C.1
ccggccgggagctgaactgaaccccagccagcgaaccaaggcggcggcggcggcggcggcgacatgcagttcctccgaggaggcggcggcggtagcggtggcggcggagctggagggatggcgtgggaggtgctgaagaggcacttctcgcggaagcgggcggtggacgtgcggcggatcaaccccaaggtgcccaaggaggaggccgtcgccatctccggtcgcctcctccagatcttcaccgaccatggccccctcaccgtcggcaacacatggaaccacgccaaggatgctggtatcagtggcctgaatagcaagactcacatgaagatcctgctgaaatggatgacggggagaaggatcgtgaagctgaactgcgttggcacgggcaactcaaagaagttcctgtattccccgtattctgcagatgcagataaatccgaagaagcagcagcagaagagctgagtaaggctgctgcttcacaagggggaaaagctacaaaagggcaacagaagaaacgtgccacagccctacactgattgtcgctcatcacaatcttattgttacgcttctgggattatttttgtttttaatcttagtggttaggcagggcgaaattctgttaagatgattccatccaaaactgtgatgaacctttctcattgatgatgcagttatgctggcaggccagcattttgttgtagtagcactgtctgtatgttcgctaaggagcagcaataatttgatgatgcttctatagtttgagctacggctaataagccctagaagatatgaagcaactaagttatatttatgtgtaaaacttttatacatgtgttattgatggtttagaagtcaatgattgaaaaaagactatggtaagaaaaaccccaaacaaaacc

SEQ ID NO: 26138 - DNA, 189 bp, Oryza sativa
  Clone ID: PAT_MRT4530_30959C.1
atggcgggcggcggacggcggcagcttggcaccgctgccgacaaggacgagcacggctgggagcaagcgacgtacgggagggggcggtggcggctattgacgcggcgccacagccaccggcgaggcaacgactgggagtggcgccatccccgtcccctgccgtgtgccgccgacaaggaggaggagtag

SEQ ID NO: 26139 - DNA, 210 bp, Oryza sativa
  Clone ID: PAT_MRT4530_3095C.1
atgctcggcctctccatgtttgacccggagctctgcagcaccacgaacgagttgttgcgccacgtcgatgtgcgattagaggggaagctgctggtgacgctgctggactgggagtggcacctggaagagggcgtggccgcgatggtgaagaagggaaggaagccggttgacatatgggtcccaccatgttattattatttttttatgtaa

SEQ ID NO: 26140 - DNA, 691 bp, Oryza sativa
  Clone ID: PAT_MRT4530_30960C.1
gcccgtggcgccacgggtgcggcagcggcagccgaatccgaggagaagagagagaaagcgcgtggccggcggcgagaggagcggcggcgatgggcggcggcgggcacggcggcggcacgacgtacaaggggtacaccatcccccacaacaagcgctggcacaccgtcgccggcaagggcctctgcgccgtcatgtggttttgggttttctacagggctaagcaggacggtgctgttctcttgggcatgcgtcatccttgggatggtcatgatgatcactcacatggtcatgggcatgagcatgagggatcatcatcaacatcgtcgtctcactaaatcaactgcttcttggcggctgagggagactcgctgctttggttgtcgcgatgaaatcctcgaagataataaagtttcacactattaattttattaagatgggttcatgttgttggcaactgtttaaggcaaactggttatgtattttgcttttgagatagcctccctcgatggaaaacccatgtatgttgttgcttattaggctgtgtacatccttttggatgtagaggctgggtttttaatccattatctaaaaaaatgttgttgcttcttgtgatcaaaaaaaaaaaaaaaaaaattccaaaaaaaaaaaaaattcctcttccctagttctctctctccaaaaaaaaaaaaaa

SEQ ID NO: 26141 - DNA, 294 bp, Oryza sativa
  Clone ID: PAT_MRT4530_30961C.1
ggggggggggggttttaattgttttcttttttttttttggggtttgggtttttttttttttttttttttttttttttttttttggggttcaaaacaattcaatattcaatattgggtttgaacaccatcccggggcttgccacacaacaacggtttgatggcccccccccttgggggaagcccgctaaacccaggaccggccgggggggaaaaagccgccccggggggggtcaacccgggacaatgacgggagctgccccccgtactggcccgccctgggcagaccccacccgg

SEQ ID NO: 26142 - DNA, 190 bp, Oryza sativa
  unsure (1)..(190): unsure at all n locations
  Clone ID: PAT_MRT4530_30962C.1
gaactccgaatctgggacaggtgcttggcccaaaatcgtagtactaggatatcccacatctcgtactaaatgaactnattatggagaccggagggagtgtctactngtgcccttactggggatcaatatacatgccggcttatctgttcncccatacagtggataagctttctgagaaaaaaaaaaaaaa

SEQ ID NO: 26143 - DNA, 960 bp, Oryza sativa
  Clone ID: PAT_MRT4530_30963C.1
gcgcccccgagcgaagcagccgagcacccacccgccgccgccgccgtcgccgattcatggccaagttcaacgtggtgcagaagaacaggcgcgagtggaagcaggaccgcaagcgccaggcccatggcgaccccaagaccggcaagctcaagcagcgcacggcgcccgtctccgtctccggcaagcgccagcgcaagctcctgcgccgcctcagccgggagcagaaggaggctgtgatggccaaggcgctggagaacaacatgggcgacgtcgagatggtatctgcggaaggctcttcagaagctgcaaaggacaagtcacaactgaagtttaatgtgaaaaagaactcaagagtacagatcaaaagattaaaaggcaaaggcagaaagaaagccaagaatgcaaagccgccgacaaaggacaaagttgacgccatggtggagtgactggatgtggttgataacactcagcttctacattgttgaagggatccgcaaggattgaaaataccatgagctatcaaagcatctttactgtcttaatgtttagtacaagctagttagctttctaatcaatgtatcctactaaatacgatgatcaagacctgagaggttaaatgcatggtttttggaatatttgtatgaaaaaaaaaaaaaaaaaactcgagactagttctctctctcatcaagaccaagcgcaccatccagttcgtggactggtgcccgacggggttcaagtgcggcatcaactaccagccgcccagcgtcgtccccagcggcgacctcgccaaggtgcagagggccgtgtgcatgatctccaactccaccagcgtcgtggaggtgttctcccgcatcgaccacaagttcgacctcatgtactccaagcgcgccttcgtccactggtacgtgggtgagggcatggaggagggtgagttctctgaggcccgcgaggatctcgccg

SEQ ID NO: 26144 - DNA, 662 bp, Oryza sativa
  unsure (1)..(662): unsure at all n locations
  Clone ID: PAT_MRT4530_30964C.1
ggccgatcgcggtcgtacctccccacgcgatgaagtgaggtgcaagctgatctgaataagcacaaaattattgaaattcttgtatgtcctgaatttactccaaaacaaacgaatatatttgaaacatgtataataactcatccttcattgcgactacaaacaaatatagtaacaaaattcgcaggtaaatggtcttctcgatgaccttattgaaaatataaacagatagctgcaagcctgcaacagcaatactaggcctgatccacgtcatgaatatgtaactgcagctcaaaatcagtcatcgagaatcaaaactggcaaactggatggaagtatttgtcccttcgatcccattctatcaaagatggctcttaacccatctgcagtatcatcgggaaacaatatatcataataatttaccagtatggcttaagccaatcatattgtttcaattttagcagactattaggaaagggtctttaccttcaaaggccgtaaacttgttcaggttgaagagaatggtgaagaaatcaagaaatgcccaaacagtttgcaccanaaaaaaaaaaaaaaaaaaaaaaaaaaaaaaaaaaaaaaaaaaaaaaaaaaaaaaaaaaaaaaaaaaaaaaaaaaaaaaaaaaaaaaaaaaaaaggggcggccg

SEQ ID NO: 26145 - DNA, 305 bp, Oryza sativa
  Clone ID: PAT_MRT4530_30965C.1
aagcaacaacaacaactttttgggtaggggggataattttttacaaaagcatcaaaaccctaaaaaatcaacaaaaagggggcccctcccttgggaaaacaaggaggggaagggcggggatcaagcccaggaattcccacccccgaagattttttatgtttttaggaggggaaaccaaccgggaaagccaaaattgcatatttttaggaaaagcttggtgcaaaaactggaacccaaacatgtccctgggttaagcgggcggccaacttttgtccacaatcttggggactttgggggtggacccc

SEQ ID NO: 26146 - DNA, 626 bp, Oryza sativa
  Clone ID: PAT_MRT4530_30966C.1
ccaaccggggtataaagattggaaagtacccctagagctttaaaaccgggactaaagatatttttaaaatatgtatctacaaatgtaaatgcaataaataaatgagacaagagacaaggagtatttcaccgaggttcgaaaactcgccggtttcctaatccccgtagaggcgagcccaactccaccgctcaaccacgaagccaccgcacgcctccttcgtcaaggggtgggcaaggcagcagccggcccacggagaggactacccaagcctcgatcactaggggtagttcttcctttactccgaagaccgtgctactttgcgacggctagaaaactagtcgttataggcaataatttgaacctatcattgggggccggtcagaccggagtgtagtggccagtcagaccggcaagggctcggtcagaccgctaccggctcggtctgatcgattacggctccagcggctcgggttttccacccaaggagcacccaacatggccactgccgaaataccctaggccggtcagactagggtacacccaccggtcagaccgaccgacctatgccggtcagaccgcctttaggggcccggtcaggccggccctgcctggccctaccttatcac

SEQ ID NO: 26147 - DNA, 644 bp, Oryza sativa
  Clone ID: PAT_MRT4530_30967C.1
cgacagttttcccgactggaaaccggcacgttgagccaaccccaattaatgtgagttagctcactcattaggcacccaggctttacactttatgcttccggctcgtatttgtgtggaattgtgagcggataacagtgcgctcggcttcccgcggcgcccctcctgccgccgcgccgcgacgggactccctgtgcgaaccccgcgtacgcctgcgggcggccgccccgacttcgcgggggaggggaggctgctggtggagaaggggaggaagctggcggcggagggcgtcggcgaggccgccgccgaggtgctcgtcgtcgtccggccgcccagggacgaggacgacatgatcagcgacgacgagtgggactgaggattttgagagagggttttttcttctcggtaatgcgtaattttctcttggtaaaaaaacaccaaatctctccctaattctcatcatttcatagttcatgaatggattattaggggaaatcagttgtttctttttattacagtataaactcatagggaacctggcagatgcgatgctctggcctttgtcttgcttaatttcttcaaataagatgatccaaataccataatgttacatcaataaaaaaaaaataaaaaaaaaaaaaaaaaaa

SEQ ID NO: 26148 - DNA, 1208 bp, Oryza sativa
  Clone ID: PAT_MRT4530_30968C.1
cgcgatgaaggggaagggatggttcgggctgtgggagaacaacacggagctgcaggcccacgactacgcggagtgcttccaggagcagatggccctggtctacgaccccgccgccaacgagtaccggaacctgcccggcgtcgacacccgggtgcccaacttcggctccgtacggtcgtttggcagcaaggactctgcgtgcagagaatggtgccttgcgagtcttataggggcgctggaggagatgggataccgtgacggagacaacatgtacggagttccttacgatatccgttacgctcctccaatccctggccaggcgtcccaagtctactcgcgccacttcagggagttcatggagctcgtggagacagcaagcgagaagcagcatcacaacaagaaggccatcatcctcgggcatagcctcggtggaatggtggcgctagagttcgtcaggaacacaccgtcggcgtggcgagacaagtacattgagcatctcttcctcgtcgcacctacgctctccacggggttcgtgcccaccgtgaggaacctcgtctccgggccgaaagatctcctccacgtcgcgaacacgacggccttgtctctgaggccaatgtggaggagcttcgagacgagcattgtcaatgttccatctcccggggtgtttgggcacgagccgatcgtggtcactaagcggaggaactactccgcgtacgatctggaagatctcctcgccgccattggtttcagcgatggcatcgagcctttcaggagacggacgatcgcacggatgaactacatcgaggcgcccatggtgccgctgacgtgcatcaatgcagtggggaagaggacaccacggcaattcgtatactgggatggtaacttcgacgatgaaccgacagaaatagtgtatggtgacggagatgattccatcaacctggttagcatgttggcgttcgacgaggaaatgcgtcggcagcccggacagaaggggcgattcaagtcgatcaagctcaataatgcttctcatggttcaattcttacggatgaatgggcactaaggagggtcatgcaagagatcttcttgaagtgaattggaattcttcgtaggctcttgtggctataaacttctgttcgaagtcatttaattacaagcatatatacggtggttctcggaaaaaaaaaaaaaaaaaaaaaaaaaaaacaaa

SEQ ID NO: 26149 - DNA, 336 bp, Oryza sativa
  Clone ID: PAT_MRT4530_30969C.1
atgctggatggggaggagcgcatgcgtgtggctggtgacggcgctacctggcgctgctccctcttctacgcgctcgccgacggcggttgtcttgccagctacgtcgtgctgctcccgaacaaggcgccgcactggctccccgctgtcgggatggtggacgggaacaccattgcctcgccgctgccaggatccatcctggcaaggctagatcccactacgccaagtaatcaaggatggaggtccctcatcggcctgaacaccttctccctcaacgatgacgccatcacgtggcacagcagcgcggcctcctcaatgggagacgtcttcgcctcgtaa

SEQ ID NO: 26150 - DNA, 1374 bp, Oryza sativa
  Clone ID: PAT_MRT4530_3096C.1
catgatctctgcttccaaaatattacttacaaatagttgatgtattaagtagaaaatactgaaaagggatctctaattatgggtaatactaatatatgtacaacccatgcagggtactctcagttgcaatatttgatcaaattgtataattcattttgtacattcaatacacaagcttatccaagtctacagtaactcaaatgactatcattatttacaaatcaaacagttaattacgacttatctccctcctatgcaacatagcgatagaatttatgattgaaaatacaacgccaccgggtggagtttattgaattcactttgtcctgatacaattaggccagtgccgtttcatgcgttaccagacgattgataaagtctctctcggggtggcactctcagcaaattcttcatcatgtcatatgttgtgaaaccaatagcaaccgaagggacgaccttcacatagttaaggcttaggccagcgaagagttgcctccacccctggcacctaataatgagtgctagaccctgaaatgtccctcttatacggaaggcatcgttcgcattatggggctgcttattctgaacctgcatctgtcttcggacaacatccagtggataagtgagggtttgcccaaaaagaccagctaaagcaccacaagagagtttcaatacaacagatctcttgtaatcctctggaactcgcgatttcaggtcttcatatatatagaattttagtccagcatatggtaggataccgatcagagttgggcctactccacggtataaagctcgtgcgcctccttccttgtaaacagttttgaaaacgtccttgataccaccatatgctggctgtctaccagcatttcccaaagcattgccaggttggcccacatttgaaacctgatatgccagctttgtcctagcaaggtctaatgggtaggtacatagaactgcagtcccacctgcggctgagccagccaatagatcaaccacaggccctgtacccactgatggagcaaaattattcaatatccagcaccgatactgctcataagtcatgtaatgcaatgccgcatatggaacaatccgaagcacactggcgccattccccttgtagaagcctcgaattccctcatactgccacagcttcctcaatgattggaggataccaagggattgaaacccatgagttctggtctgcagtaagatcttgaccctctccagcggcgctaccgcagtctttgcgaatgcaccggctgcacccccggcgataagctccttggcgtataccgggagcaagtccagcgcgcaggcattcacctgcgcggccgttgaggcggaggaaaaagtggattcctgtgaggaacccat

SEQ ID NO: 26151 - DNA, 2146 bp, Oryza sativa
  Clone ID: PAT_MRT4530_30970C.1
ctatctaactgttgtcgacatggcggtctgaaggtctgactcgtagtcgacaacagggtagtcttcctcctcgaatccgtgcccggcgagatcagagatagcgctttcgtctttccatttcttcattccgtattccttgtcgatatccaccaaccgttctcgagcaatcgagaaggcgtagagtctgcgacggagctttgtcaacatttgtcgtactcgccttagtcgatcttggtatagagccatagagacatggagtcttcgataatgccgaatagaattttcatggtctttcgtttctgaaggatccgacaaagccttatccgctttgggcgtccccagccgaagttcccttaggttcctcagaggctttgtcaagatggcgtaaagggacatgaggatatgtttcaacgctagatgtcttttgtggtaagggatctctgggtaaaacacttggcaatattgtgcacctgatatcaactttgttgaagtaaaggtaatgggagaattgctacacctctggtcaagaactaggtagtagtcgtaactcaaccatgttgtcgacatggcggtctgaaggtctgactcgtagtcgacaacagggtagtcttcctcctcgagtatgtgctagccgtgcttatccctgaagtcgatatccggcgtcttgtcttggcgtatgttggcttgtatgttgtggcttctgttgttccatagattgtgatggttctgtcgatcgtgggtgtctcccatggtgggtgtagattgtcccctctcctcctagggggtcttgtatttatacctataagtgttcccttctccaagtagaaatggtctttcgtctctgaaggatccgacaaagccttatctgctctgggtgtccccagccgaagttcccttaggttcctcagaggctttgtcaagacgacgtaaagggacattaggataggtttcaacgccaagtgtcttttgtggtaagggatctctgggtaaaacacttggcgatattgtgttcctgatatcaactttgttgaagtagaggtaatgggagaatcgctacaccccctggacccatatcaccgacagtagccccccggagttagccttgaccaaaaccttccccagatggccagggttgacgccactctcctagtctaatgatatgtaggcccgcaatcttctcctttctttgctagcactagggcccatgcgcctttttcgcctcagcttgagggcgactctccagccgtaccttaggttgtgaacttattttgagcctgcgccccacactacacattttgttcgctctctcctttcggtggcctccttccaatctcttttccttctacatggacgattactttcgcacgagtgtgagagccaaaaaactctaaggccagcaatccccgtccacagttgagccgggctgggcaccgtagcaagccagcgggaccaaagccagccgttgaaacttaaaaggatgatcaatgcttgaaagacagatgcctttactgcaagagtcctctcaggagtggaccgaggcgggcagcaggttcatgagccaaccccacgcttggcccctgagggccatggggaagaagctcgctatgacctagtcttcaccccaccccacccccccggcgcctctatgattgtcgtgcaaatctggagggactcggaggggttgacgccaccgtcgtacttctcggtgaggttgggcccgaactttgggggccatcggacattccgaagactcgccacaaaggtctgtccgttatccttttccagtgaggatgtaggggcctagccccctgcctggggtggcgcggttctcctgaggaggctacgccttcccccgcattggcggcgcgacgatcatcacgccggcgctcgaaagtacctcaaaaatcacgaacacgccccctacctggcgcaccagatgtcggaaggtgaactcctccaccagggaaccgtgagacccccttttgttttttggttcggctgggggcagcgggtgagattcgaggacatttaagggacgaagacttctgggctcctgtttgactagagcggataaactgactccggctatgatgagagactcgggcccgatccctcctggggggagggccacgtggtgcctggggca

SEQ ID NO: 26152 - DNA, 1026 bp, Oryza sativa
  Clone ID: PAT_MRT4530_30971C.1
atggaaggcagccgcggtgacaagggcaaggtagtggtggtgatgggcgccacggccaccggcaagtccaagctggccatcgacctcgcattgcggttcggcggcgaggtgatcaactccgacaagatccaggtgcacgacggcctcgacgtcgtcaccaacaaggtcaccgacgaggagcgcgccggcgtgccgcaccacctcatcggcggggtgccccccgacgccgactacggcgtcgacgacttccgccgcgacgccgcgcgcgccgtggcgtccgtcctcgccaggggccgcgtccccgtcatcgcgggcgggtcgaacaggtacctcgaagcgctgctcgacggcgagggtgggtcgttccgcgagcggcacgagctgtgcttcctgtgggtggactcccgcgcgccggcgctgcacaggtacgtgcgccaccgcgtggaccgcatggtggagcaggggctcgtcggcgaggtgcgggggctgttccggctggacgacgccgactactcccgggggatccggaggtccatcggcgtgccggagatggacgcctacctccggcaggaagccaccggcgccctactgacgcacggagacaagtacaaggtcgcgctgttggcttccgccgtcggcgagatcaaggcgaacacgtggagtctggcacgccgccagctgcggaagatccaccggctccgcggcctgcccggctggagcctccgccggctcgacgtcaccagagtgctggagttgaaggtggaggcccgcagcgaagcggagtgcgccgccgcgtgggaggcagacgtcatcgcgcctgcggcgcgggaggtggggatgtttctgcatggaggagggaatgtggtggagagcggtagggaggagcagccggtggtggtagagaagatggaggttgcggcagtgggtggtgccggtgcggcggcggccgcggagaagtggtgtggtcggcggttgctggagacgacggcggcgtaccatggaatggaggcggccgcggcagtttga

SEQ ID NO: 26153 - DNA, 291 bp, Oryza sativa
  Clone ID: PAT_MRT4530_30972C.1
ttcgtctttggcgccgccgccagccgcgtaggtggtggcggcggcgggtcgacccgggtgagcttaccgtccggacgcgtccagcgcctaggagcgctggggatgctgacgcggtcgtcggtggccgatcgagaaggagacgcccgagagcgagccgacgacgacgttcctgcggtaggacggctacggggcggggtcccggtcgatgcgggagcggatagtggccgtgatccggcgtgatgcagggggaggtgtgcgcggagctggacgaggcctacgggagcgggcccc

SEQ ID NO: 26154 - DNA, 306 bp, Oryza sativa
  Clone ID: PAT_MRT4530_30973C.1
atgccgctgtcgtccccgtgccggagcctctccgtcctcatgctgcagcacaacccggtgctcggcgacatccccagtggcttccttctcggacggccggtgagctatttccttgtgcgcggacggccggcgagcttctcccacgtgcggacggccggcaagctcctcccccgcgcgccgccggccgacgatgccccggcgccctcccgcctcctctgcgtgctcgagccgggccgctccctcacgcgcgcggcgcggccagccgacgagctcgtcccccatgcgccgttgtcgccgccctgctga

SEQ ID NO: 26155 - DNA, 394 bp, Oryza sativa
  Clone ID: PAT_MRT4530_30974C.1
ggtttgtttgtttaattacgacttttctattgagttgtccactttgctagatatgattggtttatcatttttacatttgggaggcacaacaggatacaaaacaggggacacactgagatgacatagggaccaaaaattgattccagtaagccgtcgctcaatacaagcttgggaggggagggatctggacatggacgggatccctcgagaaccattggggcatgtggtgtaactacaggcagggtggaggaacacacaaatgcgacatattcctataggggctcccaagattgcaactgagtgccagttggagagaaaaccctcggctttggacttaagcaagagaccgacctgcagagcggggggggggggcaaaaaaaactacaggaaaaac

SEQ ID NO: 26156 - DNA, 592 bp, Oryza sativa
  Clone ID: PAT_MRT4530_30975C.1
cccgggctgcaggaatcggcgagggagagaactagtttcgagttttttttttttttttttggaacacgggaattcaaactcgtgctgttgagtttttttttttttttttatgaaatccatgtcttataaatgaatcttgcaatgtacaactacgcaatatggtaatagtaacattcatccaacatatcactactatgtacaagttgtttttgtttgcaacgtacagcagggcagtaaaacactcaaaaagagcatatgagtgacaaaaggaaaaaaaaaaactgagagactccagtaagccaatgaatgatttcatctgtttttttaggaggatgctgttgtacactactttcactctagcagcagctgtctaatctcatcgaattcatcgttttcatgagggagtactcctggttcgtcatgttcaactactgctagttcatcgcgacgtactcccgtcttctcgtagaaagcctccttctgtgcatcccattctttgacgatttcatctaccctgtcgcccagcagtttgtcattctgaacaatgtgcctagcatcttcaacatcgataatattgcttgcctctgcaaat

SEQ ID NO: 26157 - DNA, 384 bp, Oryza sativa
  unsure (1)..(384): unsure at all n locations
  Clone ID: PAT_MRT4530_30976C.1
gtgatttttatattaaaatccattacaatcaatatttcttttagcttgcataggcatgctagtgtaatctaccatagaatgaactgtagtgtagcaatcgaagttcacgtgatactgtaagggcattgacattgaaacaggaagctgacaccttctgattcagaatatgaaaaagaaaagcacaaacaacaacctatattctggtacagcacctaactaagcaagaagccagatagataacaaagggactagtatttgatggtaccaatttttatgaggtcaccaagttgtcaccaagcttcaccaaagccaaacttngccgagcacngctgtcgttttcctggcnttgaacttcccatcngtcaatatcttgtagactcctgg

SEQ ID NO: 26158 - DNA, 212 bp, Oryza sativa
  Clone ID: PAT_MRT4530_30977C.1
aaaagcaatatcgcaagcggccaaaaagggtcttcgcaggcggggcggatgtccgcttgtaagccaacgactgtgacgatcgccgatcttcacaggcggggtggccgtccacctgcgaagataattttcgcaggcgaacgttggctagtccggtccgcctacgaaaataggaaccggccgcctgcaaaaaaaaaaaattccgcctacgaaga

SEQ ID NO: 26159 - DNA, 536 bp, Oryza sativa
  unsure (1)..(536): unsure at all n locations
  Clone ID: PAT_MRT4530_30978C.1
ggaattcngggcgacccacgcgccgaccgacttttaacttctcccgcgacgcacagcagcagaagggccgcgcttgcgcgtatcaccgccttcgccgcaaccggcctggcgcgcgcgccgncgccccggcgccggatctccggtcgagctccgcgtgggcaacaacggcggcgccggcgagatggcgcagacgctggcggcgtcggccaagacgttctccgggcgctggcgctgtctcgggctgctctctgagggcacgaagcagccccgccgccgcgacatcgcgggctgacgccgtgcaaggagtccaagcgttccgaagcgggagaagagtccatcaagaagctccagacagtcctcaagaagtacgcgccgggactccgcgccggcgctcgccataaacgccaccattcaaaagacaaagcgccgcttccagaactaccgcaaggaccggcctgactgctgcgacgaacggctcccgcacctaatcgataagggcgaccagcggcactggggcgagttcatcaccccgggct

SEQ ID NO: 26160 - DNA, 543 bp, Oryza sativa
  Clone ID: PAT_MRT4530_30979C.1
atgaaggcagcacgggacgagggaacaggaggcaagcaccatggacgcgaggttgccatggccacccggggacgaatcccacacgcggccttggctatcagccaccggggcaagagctgcgtccgcgcccgcggccgtcgaggaagaatcccacccgcgcccttgaccgcgggacacgaatcctgcttggtctcggctgttcctctgtcggggaccctattcctccgctcaggcgctcgggagctcccgcttgcagccagcaatggaggaggggcgcagagatgggcggtggagatcgcgctcctggtcccacgccctcccgccccgtcaccggccatgggaccaaggggatgggggagccacgccgccacggggaggggaggtgaagaatctcgcgccgcaatggtcctggactcgccggagttggggcaacgaaggtccggtagctggctcgggcaggtctggaggacctcgacgacgggtagcgagtggcagcggacgcgatgccgaagggggcgacagagcggacgcgatgcggaatag

SEQ ID NO: 26161 - DNA, 668 bp, Oryza sativa
  Clone ID: PAT_MRT4530_3097C.1
gccacagatttggtttatatcagtaaatggccatgtttttttcccaagttatgtttctaaatatgtagactgtggtacgatatttataaagttcaagttgtctttgtttcccagaaaatcttaggtctagcagacttacttagtttctgtttacaaatgaataatcgggtagtgaatactgtacctgtatatttgtactactctcttatttagtaatgtatctaaaataatgtagactgtactacaatatttatttagatgcatatgctcaatttttatataagtatatgctgcttttacattacttttgtttgaatgtacatgctgatatgaaatttggagagctttcttggaatgtacgctgttaagaaaatttagataaattaaatccttatgccttatatggtttcttaaacacacctataagtttgattggagaaggggacattaaccaattgcttgaaaaaggtgttttgttagctcaagatatggtggaatatttacaactgttttagtaactcccagataatctttctctacatacatgcataactaatttctctaggataatgacacatttctgattcgttaagggcaaactctgaagtacatctgttatgcgcgagatattcagtttatatttctaaacttgggtgcactttgaatca

SEQ ID NO: 26162 - DNA, 354 bp, Oryza sativa
  Clone ID: PAT_MRT4530_30980C.1
ctagacgttactcacaagtttgaactggaaacctgccaggaggttccgggtaaaagtgccaggaacttccgggcagcacttaggaaaattttcaacctcacctcggcgccaggaagttccggacagaaccttcgggtgggactctctgtcccgagtagagccattttcaaaaatagctcctgggactaatacaccactaagaatgtcatcttcttgcttcaccttgagggttgtcaacgtcaacgccagttcgctattgggactattctcacctttgctttgatcaatgcccactttggattttgacttgatgttcatcgaagaaccacatcctcttgatcctcgacattccat

SEQ ID NO: 26163 - DNA, 874 bp, Oryza sativa
  Clone ID: PAT_MRT4530_30981C.1
ctagctccttcccggcttcccttcttcctcctccctccttccctctctcccccagcgtttctcttcaccccggccggagcggcggtggggagtggcggcggtggcggtggggacagaggaagggagcggcagcggcctggtcgacgggaagcagccagtggtctgctcgtgtaggccggccttgctggtggtgtcgtggtcgctgttgcccatggccacggacgccgccgccgcctcccgacagacgcccccaccggcgctccctaacaccggcgagctccaagccctcccctgcgcacagacgcccggcgagcctctcccccacgcgcggatggctggcgagcctctccccagttcgtggacggcgggcgagcctatctcccgtgcgtggacggttggcgagcccctccccatgcgcggacggccagcgagcgccttccccatgcgccaacggccggagagcacctcccctgcgcgcggacggccggcgagccactcccccgcgcgcggacggccggtgagttcctcccccgtgcgctatcgttgtcgccgccgccacgacgcctcagcgcatctcccattacctcgcgcattcttctactgggccgcctcctcgtcgccgtcgtcgtcgatcccccactccctccgcgcctactacctcctcgtccacctcctctcccgcgccgccctcgttcgccgccgctccccaccgcctctccacaccgtcgtcttcccgaggagagaaaggccggggaggagagagagacaagggagagaggggcaggaagagggaagaagagggaggatgacaggtgggtcccacatatgccacgtaagcgccacgtaggagaaagacttagtcaataccaccaca

SEQ ID NO: 26164 - DNA, 1209 bp, Oryza sativa
  Clone ID: PAT_MRT4530_30982C.1
ctagctccttcccggcttcccttcttcctcctccctccttccctctctcccccagcgtttctcttcaccccggccggagcggcggtggggagtggcggcggtggcggtggggacagaggaagggagcggcagcggcctggtcgacgggaagcagccagtggtctgctcgtgtaggccggccttgctggtggtgtcgtggtcgctgttgcccatggccacggacgccgccgacgatcccgacagccggccccaccgacgatccctaccaacggcgagctccaaacccatcccccgtgcaagtgggacaggttggcgagcccctccccatgcgcggacggccagcgagcgccttccccatgcgccaacggccggagagcacctcccctgcgcgcggacggccggcgagccactcccccgcgcgcggacggccggtgagttcctcccccgtgcgctatcgttgtcgccgccgccacgacgcctcagcgcatctcccattacctcgcgcaccatccgagagcgacatgggaggcgctctccaccgccttccccactgccgaccaagtcgacgtcgtcctcctctcccttgccaagcaccgccactcctcctcctccccggagctcgttgctaggaatgcgctcaccttcttctactgggccgcctcctcgtcgccgtcgtcgtcgatcccccactccctccgcgcctactacctcctcgtccacctcctctcccgcgccgccctcgttcgccgccgctccccaccgcctctccacaccgtcgtcggtttgcctcttgcttgattgattgcaatgatcatccttcttgtgcggacaaaatccgatttcatgccccttctcattgcaaccgtagcacttccttttgttgattcttgatgtctttcttggaagtgtggcttcatcatcaatcttgcaaggacaacttgaggcaaagtgtccctctttggtggatttgaagaacttatgagcaagatcctcattcttgctcaacttcctctctttcttccaaggaacttccgggcagttgtgaattgctcggcgccaggaagttccggacagaacctccgggtgggactctctgtcccgagtagagtcattttcaaaaacagctcctttgccttgatcaatgcccactttggattttgacttgatgttcatcgaagaaccacatcctcttgatcctcggcattccat

SEQ ID NO: 26165 - DNA, 296 bp, Oryza sativa
  Clone ID: PAT_MRT4530_30983C.1
acgacgggaacaaccataaggtctagatcgagttacgttagagaaaatccttacatgtctaagataatgtgtttagggaacatattaaaaactaccttacacggagataacgggattcacaacttttgactttgcagtgttatgaattgaggattagtctaataggctgacgcccaggcaaaaatttgactcgtccaaaggcctctggctttttatttttctgcttgaacaaccatggagaaggggggccactgttgcttctctagggctcagctgctgcgaacttagaggggggc

SEQ ID NO: 26166 - DNA, 363 bp, Oryza sativa
  Clone ID: PAT_MRT4530_30984C.1
ggcactgaagattatcagctcataatctgacaaccaaccgagttattcgctgcacacatatacagtgactagctgagtgcccgtgcgttacaacggagaaaataattcacacctaactacgactcaatatataaatgatgcaaaattgtgaaaaatgcaaaagagaaaggaacagcttacgccctaaaatctcttatttctaacatgaacattagagagaaccatgcagtgatacttggcttgattcttgaattttttgctgaatttcacgaatagcaggaccaatgaaggtccgtcgatcaatgcggcttcctgaattcttttgcagttgttcatgaagtaagcaaagaacatggagtgatc

SEQ ID NO: 26167 - DNA, 1841 bp, Oryza sativa
  unsure (1)..(1841): unsure at all n locations
  Clone ID: PAT_MRT4530_30985C.1
ccccttccgcagccactgcagatggttggtgatcataggttattcaacactcaagtcctgaacttcccttttccttaattgacaataccagggttggtgccgatattggcttttacctaatttaagtatctccgccatgtgtggcagggatttctcttggttaggattaacctaattaaccatccggcatgatccatgcatggcacagcttgtgggtctcctatttttggggttgatcttcctccttcctccccttggtattagaggacatcatctcccggtcccgcctccgcgctcccatctccttctccttcctcctgcagcagctgtcgtaagtcgtggcacgacagctgctgcgatatctatcgcaccaggaaggatccttccgaggaggaaaggcaaacggcgggacgcttgagccaacacacaccattgacaaaaacattaattagatcgtgatagaggaatataacaatcacagaagccatggcaagcagcggcaaggagcaccggcgaggtgttccacgcccaccgccgttgtcgctctacatcgagagggagcaaggtgaggtcatcatggctggtcaggcgctggcgacgacgaggatgctccagcaggtcgccaccagcagcagtggcaagaagaggatactgtccaagcagctgtccatgaaggagacaacccgggaggtcaagtgggagaagcggcgcaggcagatacaccggcagaggagcagcatggcccttcaggatgttgaggaagaagcgagtgccaacatgttcgccgccaccactgacagcgaaatgggctccagcaccgagcgggtgcccaagaggctgaccgatggagacctcgatgagctgaggggatccatggagcttggctttggattcgacgaggagaatggtgggcagaacctctgtgacacgctccctgccctcgacctctacttcgccgtcaaccggcagctctcggagcccaagatgcgtttgtccactagctccttgccatcaccgacatcagcgacgtcgtcctcctctaccctcggtggcacatcgaacccgggtagccccgtcgcaccttcttctttcatggactcgtggaagatttgcagtccaggtgacaaccctcagcttgtgaagacaaggcttaggcactgggctcaagtagtggcctgttcagtgaaacactccagctgatcagtgctgtaaccaccataatatatatatatatatatatatatatatatatatatatatatatatatgcacatccctgcatgcattggttagatggcgaaggatgagaaaattaaacttcgatggtataaactgaacgtaaccttttttccctctgatgatgacgcccatggttgtgtttgtatatatacagattttagtatacaaatatgtatgtgttggcaaacattaatgttctacatattgcatatatgtgtcctggttttgcaagaatatttttcatgccaattaatctctggccgatctctaattgatacaaatacagccttcactaacataacatgttggttgatttcagtaaaaccatatggaacagaactacagttacagaaacagaaaccagagactatcttagttgtaccagagtcacaaatgattctatgaggacttcatagaggtagagtgtgcgtgtgtattcataggaatgagtgtgagcgcattgtgagcgcctgtgtttgtattttacttataaaaaaaattgctccaaaatgcatatacattttatgttaatatacttggtgagctttgccacaagaaaaataccgcccagaaagnnnnnnnnnnnnnnnnnnnnnnnnnnn

SEQ ID NO: 26168 - DNA, 1170 bp, Oryza sativa
  Clone ID: PAT_MRT4530_30986C.1
gcacgaggcttctttctctcgctagctccggggtccacccgaagaagtcgccgtgcgccgtctccctcctccgtgcaggccctcgcctcccctcggcggggccaagggcgcagcttccctccgcccagatcggcacggtggccctccaccccgtgcggcggagtccccgtcgacgtagggcgtcgccggccggtcctccgtccagggcagcgccggccacctcagctgtccagtgtcttccgaatccagggccaaaggttctgcttgcttcccctcaatccaacatctattcctccccgacgtgaacgtcgccggtttccctctggccaagtactgaagtctgaagatctgtttcatccaccctcctattttttttttctaataatggaacgggtaatggaatgtgattacccggcttcaaagaagaacaaagtggttcatccaatggattgcgagatgaaggaagagccaaccaatgcagcaagcatgaatcagcattctctctggagccagtggcagctcctggattccatcctcccaactggcgggttcgcgcattcgtatggccttgaggccgcaatgcaatcccgcatggtgaacaacccagaggagttgaggtcatttgttgtccaggtcttggagaacactggcagcctgttgcttccatttgtgtgctgcgctaacaagtctcctgatgccgcaacgtgggtgaagctcgatcagttgctggaagctatgttgacgaatgaagttagcaggaaggcctcgatgtcgcaaggctcggctcttctgagagttgctgcttctgtattcactgagattcagtcgctgcaggatcttcgacaaacattccttggttccaagattgtgtcgtttcaccatgcaccgatatttgggttgatatgcgggctggttggattcgacagcgagacaacgcagcgtgcctacatgttcgtcacaatgagggacgtgatctctgctgcgacgaggctcaatttgatcgggccgctagctgcttcggttctgcagcaccaggttgcggaagatgctgaaaggatggtgcagaagtggaaggatcgcggtgtcgaagaagcaacgcagacatcacctctgcttgatgcgttgcagggttgccatgcttacatgttctctaggctgttttgcacctga

SEQ ID NO: 26169 - DNA, 1560 bp, Oryza sativa
  Clone ID: PAT_MRT4530_30987C.1
atggccggagatggggaggatggcggcgagaaggtgcggctgttcgtcgaccgcgggagacggagcatggcgggggaggagatcctcgctgttcgccggcccggcgccaggcaccatgacggaggcggacatcgtggccgtggtccccgccgccgcacgggttgatgactcgaccgtcactcgcggcggcacgaccggcacaacgccagggtgctgtttcgcggtatgttcgtcgaccgaggaatcggacaaggccctcgacccgttccacaacaatggaacactaccaggagcgtccatgccaatgtaggaaaaatacgcgtacggcgagctggaacattaagccgccaagcagaagcttttgattggcatgagccctaggtatgcaaaggtcaatgaagtttctgcattgatgtcgctgtacggaaatattagacaactgaaagtactgaaaagttcaaagaaaacaaaaaaagctggaaactgagaaatccctgagcttgcctggaaagtgcatgctaagaccgtgctagaggcgccattgaagctttgagttgcacacgagttttgttctgtggttcaggtgcgaatttggttgttaagttggatgacactgaaagggaaaagcaagctagaaaggcacagaaagctcaggctcaaccttctaagcccttaagattttatctcttcccccagctgctatcaatatctggagcaccacagatgagctttcttcctccatataatgtattggattacaagactgaaggaacaacggatccagaattgaaagatctaatgaagatgacaaacgacaaacttgagatgctagtgactgagctcaagagcgtggtgaacttattagagaatcgagttacatataatgatccaatacagccaattcagcattctctcttacctgtagagcatgacgagaagcaatataagcctaatgagtgtgattccaaaacgttagaggtaccagggcattatggacacacgaagaacccattggcattgtacagcactatgtacccacatgtcaatcaaggaaatttactccagggactcaacacaaatatatttccaggaacagatcctaaaatttcgaacctgattcaatctgctggatacatacaacctccttaccctgatttgtcaggtcttcattacccagtatcatatgcaggtgccttagtgggagatacaccacagtatttctctgatggtaaggtaaacataccaaacagtcatagcaatcatgcctcatctgcagcaaacacaaagatagggagtaagattgaaggacctcctagggctaatttatttgtctatgacatccctcaagaatacggtgatgaagatctggcaaatctatttcaagaatttggtaggatcttgagtaccaaggttttcattgacagagctactggtgtcagtaaatgtttcggctttgttagttatgacacaccagcatcagctcaggctgctatcaggaggatgaatggctcacagataggtggcaaaatgctcaaggtacagctcaagagggaaacatga

SEQ ID NO: 26170 - DNA, 681 bp, Oryza sativa
  Clone ID: PAT_MRT4530_30988C.1
atggcaggcagcgggcagcggcagtatcccgagcgcagcggcgcgggcgacgacgagaccaccgcgtcacgcgtgagcgttgcggatttgttgggattggtcgatgttttggatgcatttcgggggcgctcctgtgccgccggtattattgcgcaggcacagcacatcatccgctccgcaacaaggctgctccgcagcagcagcctctgcacctgcactacgtctgcgtctctcaaagtcgccaaaagccgagactgccagatcaaagctcatgaactggaaacaggcacatgcacgcgtggaagtgagggggtcaaactgtgcctcgcctgcacgacggcacgagcaacgttcggtggaaagagctcatctcctgattatctaaccgaaaaagcaccccaacaccagtttgatactgttcgaaatcactgcaacgagtgggtgacacaatacagcaacaccatagtgcaccgcaaagcaaattttggttcgaaatttccgaaatcctctccccccccccccccaccggctagtccactacctccttcgacccacaaatggagctgtaagcccagctcgcaccgtatcgtccactatcatcttcaaccttccaaacatagtcacgtgctaagcgtaaaacctgggataaaaatgaccggggaagatggccgtcatcatcgg

SEQ ID NO: 26171 - DNA, 655 bp, Oryza sativa
  Clone ID: PAT_MRT4530_30989C.1
atgacgacgcagcaagcttctggtgcagatgcagagtcgggcatggatctggacggggtcaccactgaagggaacactgcactccatgttgtggccacctgcggtgatggcccgggctacttgaggagtgcaggcgtcatctacagcaggtcccaacatctcatgttagtgcagaacaacaacggtgacacacctctgcactgcgctgtccgggctggccattccaaaatggttgatcatctaattgatctggttgaaactaaggacaactcccctagcagcgcgagactggaggaactcctgagaaaggaaaactgccgtaaggagacggcctttcatgatgccgtctgcattggaaataaggatataatcaccaaccttcttaaatattattcagaattggccggcttccttatggatgcaacaggtacttcaccgttgtacctagctgtcttgcatcaacaggtcgacattgcaaagttattgcatcaaatgacagacgggaatctttcgtactctggcccaaatagacaaaatgcattgcacgcagccgttctacaagaccaaggtgcgtatgcaatttatatttgctgttttgaatttcattctagctatattccatacttattttgaatcatatatttgcttttatcat

SEQ ID NO: 26172 - DNA, 2905 bp, Oryza sativa
  Clone ID: PAT_MRT4530_3098C.1
acgacttcaccgccggcccgcctccgtcgccgccgactggtgtcctcgcctatgcggttggttggtcacaccaccgttcatgggcatccacgtcttcaccgaccggctggcctacgccgccgccgactgatgtttccgcctgtacacggctggcctattatgccgccgctgttgggcgtctacgacttcaccgccggcctgcctccgtcgccgccgagtggtgccttcaccgccggcccgcctccgtcgccgccgagtggtgcctccgcctacacggctggcctattatgccgccgctgttgggcgtctacgacttcaccgccggcctgcctccgtcgccgccgagtggtgcctccgcctacacggctggcctattatgccgccgctgttgggcgtctatgacttcaccgccggcctgcctccgtcgccgccgagtggtgcctccgcctacacggctggcctattatgccgccgctgttgggcgtctacgacttcaccaccggcccgcctccgtcgccgccgagtggtgcctccgcctacacggctggcctattatgccgccgctgttgggtgtctacgacgtcaccgccggcccgcctccgtcgccgccgactggtgtcctcgcctatgcggttggttggtcacaccaccgttcatgggcattcacgtcttcaccgaccggctggcctacgccgccgccgactgatgtttccgcctgcacggctggcctattatgccgccgctgttgggcgtctatgacttcaccgccggcctacctccgtcgccgccgattggtgcctccgcctaaacggctggcctattatgccgccgctgttgggcgtctacgacttcaccgccggcctgcctccgtcgccgccgagtggtgcctccgcctacacggctggcctattatgccgccgctgttgggcgtctacgacttcaccgccggcctgcctccgtcgccgccgagtggtgcctccgcctacacggccggcctattatgccgccgctgttgggcgtctacgacttcaccgccggcctgcctccgtcgccgccgagtggtgcctccgcttacacggctgggctattatgccgccgttgttggatgtctacatcctcaccgttggctcaccttcgttgccgtcgactggtgtttccgcttacacggctgacctattatgccgccattagtgggcatctttgctttcaccgtcgaccgccttcgtcgccgccgactggtgtcttcattgttatagatggacgactttgttcccacattggccacttctgccatcaccaaggggaatattacaaagctaagatccagatccagatatgcacaaaagggattcatggctttaagcttatctcttacgctccaggaatggatcagtcagaacatcaccaccggcttgccttcgcagccgccgactggtgttttcgcctgcacggctggcctattatgccgccgttgttgggcgtctacgtcttcaccgaccggcttgccttcgtccgtcgccgactggtgcttccgcctgcacggctggcctttatgccgccgttgttgggcgtctacgtcttcaccgaccggcttgccttcgccgccgccgactggtgtttccgcctgcacggctggcctttatgccgccgttgttaggcgtctacgtcttcaccaaccggcttgccttcgccgctgccgactggtgtctccgcctgcacggctggcctattatgccaccgttgttgggcgtctacgtcttcaccgaccggccgtctcgtccgccgccgactggtgtcaccgcctgcacggctggcctttatgccgccgttgttaggcgtctacgtcttcaccaaccggcttgccttcgccgccgccgactggtgtctccgcctgcacgactggcctattatgccaccgttgttgggcgtctacgtcttcaccgaccggccgtctcgtccgccgccgactggtgtcatcgcctgcacggctggcctttatgccgccgttgttaggcgtctacgtcttcaccaaccggcttgctttcgccgccgccgactggtgtcaccgcctgcacggctggcctttatgccgccgttgttaggcgtctacgtcttcaccaaccggcttgctttcgccgccgccgactggtgtctccgcctgcacggctggcctattatgccaccgttgttgggcgtctacgtcttcaccgaccggccgtctcgtccgccgccgactggtgtcaccgcctgcacggctggcctattatgccaccgttgttgggcgtctacgtcttcaccgaccggccgcctcgtccgccgccgactggtgtttccgcctgcacggctggcctattatgccactattgttgggcgtctacgtcttcaccgaccggccgcctcgtccgccgccgactggtgtttccgcctgcacggctggcctattatgccactgttgttgggcgtctacgtcttcaccgaccggccgcctcatccgccgccgactggtgtcaccgcctgcacggctggcctgttatgacgccaactgatgctatcttcttcacggctgctacatcgccgtcaccgctaataggcgtcagcatcgtcaacacaagtgccctcgcctctacgtctggtttataccgctaccactactgatggacatcatcgtcttccgtcgccgactggttatgccgccgccgactggtgctttcatcttcacaactgcgcgtcttcactaccagtttgcttctgttgccgccgactcgtgttcacttcatcacggcgatgcaactttgtcatcatggatttctacttggacatcttcaacacatatcttcaatcaagcaatgactactcgacgacaagaagctataattctcgactctatgttcagttgtttcccaac

SEQ ID NO: 26173 - DNA, 160 bp, Oryza sativa
  Clone ID: PAT_MRT4530_30990C.1
ttctgtttcaacgacggctgctcggaattcggagggagggaggaaggaatcggagtgctcggtaagcttcgcgaagcgggatggaggctcctggcctactcctcctgttccttctactggcggcccttgtttgtttcgtcgccatgcttctttctttctt

SEQ ID NO: 26174 - DNA, 256 bp, Oryza sativa
  Clone ID: PAT_MRT4530_30991C.1
gccccgagagttcatggcgcgccacctaacccgagtatgtcatctaggaaactcgtcattgggtcaccaatcaacgtcgtcgcccaaggtgttgcccggtaaatttttggaccccaagatgattgtgctctgtttccccttccccgaacatgaagatagtgaagctgattgttacacccctttacccgggctgtatccccttgtgtttgcgacttataaaatgctactcgtatctagttatactggctacgtgttg

SEQ ID NO: 26175 - DNA, 1004 bp, Oryza sativa
  Clone ID: PAT_MRT4530_30992C.1
tgtcagcggcatcaatggcggcttttgaacaagatccaaatcctggcgattggaggcaccattcaagccttgttcggttaatgcccatgagggaggaattggagaggatttattccccacctattgtggtgtggaattattccccctcaatcccctccaaaccgaacaaggcctcaccggggaaattagggggatttaaagagaaatcaatgggtattaaaacccccaattaatttggatttaaccggcttgaatggagcgaatttgagggagagataggctagggtttatgggagagagaggaggccggcgggaggaagaagacgaccggctgcctagcggcttgggctgggcgaggcaggggtggcccagggcagggcaaggagaggcccgagagagaaggaagagaaggaggggacttcggctgcgggccgagggagaggagagcgactttgggccagggggccgaggtgggggggaccggaccggcaccaggggggtggacggggtggggggtggctagggcgaggggatcgggtgcgggtggggcccgtggcgcgggcgcggtgggcggccgacttgaggcgggcgggggaggggcgattggggggtggggtggggcgcggccgtggggaggggaagggggtggaggggcgcagcgagggggggaggacgggtgggggggggggggggccagaggaggagctaggcaggggggggggaggcggggaggggggggagggggggggggagagaggggtggcgagcggcgggagagggggggtgaggaggggggcggggagggcggatgcggagagggggcggggatggggtggtggcggcgaagggcagagaacgagtggggagggtggggggggaggagaggatggtcgaggaggggcgtgagaagcaaggtggagaggggagaggggtggggagcgggggggggttggtgggcggcgggggggggggggtgcagtgagggtagaggggtgcgggtggtg

SEQ ID NO: 26176 - DNA, 189 bp, Oryza sativa
  Clone ID: PAT_MRT4530_30993C.1
ttttatttttttatattaattctactattaaagacaagcggagatattatctagtagcattgggctcaccatccaccattacacaacataatattataaaaggaaacctaattacattcaattttgaatgaacgattatacaaacactctaaccctatataaattgttctaaaatacacccaaatcttc

SEQ ID NO: 26177 - DNA, 332 bp, Oryza sativa
  Clone ID: PAT_MRT4530_30994C.1
caggttgaacaactgtgaaaattatagtcgtacactttaccggaccttgcaaaggagacgcagaattgcgggagaaatcgagaacagtagacacatacactgttattccgtggagagatgtaaaaaggctataaaacaggatgtcataaggaaagtgcatgccttgccccaaaagccttctacaaagacttttgaaaagtttatgtcatgacggtggcagcggatgggacagtgaactctagcatatttgacagcttctgggtaacatcaaccaaaggagcggggggatcctgcgattccctgcttggtcttggaagaatccttctaatact

SEQ ID NO: 26178 - DNA, 431 bp, Oryza sativa
  Clone ID: PAT_MRT4530_30995C.1
ggagtttcagtgatgaacccaggctaatgttccattttatttcagtaatatgctcaacactttatttattgtggtgttcctgaacctgaaggatagtatagcctactgggaatcaatagtttgtgcctgcagagctaatgatgaatagccaaactaattctagagctcccaatttgcatgtttccaacattgaaacaagacttatccattcattggtacaacatatccgtagatgatgttcaaggtgagcaggggcgccagtagatgtctagctagcactgtggttcttcagtattttgtaacccatgttgtcattccttttatataataagatttcattgtaattttagattaaattcgatcaatgttgcctatataaaattatgtatatgtattctctaagttgttcgtttacagtatagtttgtttcc

SEQ ID NO: 26179 - DNA, 489 bp, Oryza sativa
  Clone ID: PAT_MRT4530_30996C.1
cgggttttctgtcagcggcgactacttgggtcccgagacatgatgagagcgacggacatcccgatccccgcgcatggtgacggcccccgtccgattcctcatcgggaaggcctgcaccaggtcctaccacatcggccgtctcctgctacctcggcctcgacttgttcaacgccctaccgtatcattcaatcataataatacagccgagttgcgtcgcagctgggccggaaacagtctagcgattgctattacctgctgctctgctgcctgcaattctactagtgtctctttaattatttatctgctgctctctctgtctattaattaattatgcatgtaaaatcctccatcaaaccaatgtaaggtatattttattttctgatttttctaaatgagatggatatatttgtagtctctctatgtactaaactaaattattgatcagtgtaaaatcaagcgtgttttgattaaaaaaaaaaaaaaaaaaaa

SEQ ID NO: 26180 - DNA, 384 bp, Oryza sativa
  Clone ID: PAT_MRT4530_30997C.1
atgaggccgtcatcccttagcaccgtagtcctttctgtcatattcaccgctgcgttgcttgccgttgccaaagcagatggcggcagcgtcacggccgccgccgcggcgccgccgccggcggcgtggacggcggtggcgaacgtgaacgacaagagcatccagcaggtggggcagtcggcggtgcgcatctacgggctgagcacgaacaagacgtacctgcggttcgtgaacgtggtgagcggccagacgcagccgtgcaacggcggctacaactaccgcctgtggtcaccgtggccggcccgggcgccaccacggcgcgctacgacgccctcatgtggggcatcctcggcaccaccaactggaagctcttgtccttcactctag

SEQ ID NO: 26181 - DNA, 398 bp, Oryza sativa
  Clone ID: PAT_MRT4530_30998C.1
acacgaatacacacatgataaatttaactgagagtagcacgcatgcagtacatcacacaaatccatacgtagagacacgcatgggtgccccagcgaccagctgtttaatcaatttacaacacgcggcattaatacaaaactagtgagatcacacacagaccagactcatatgggtggtggggatcgcggactaattcaggtaggtgactcgactgcggcaggagcgccgttgactcgtgactacacaaggcgtacttgtaaaggagcacctgactctaagcgcccatggcgcctccgatggcatctgaaccgtctgaaagccaatcaagtacgggtcacgggataaccacctttgaacttgtttccttgcatggagaacagttttaatggaacccatg

SEQ ID NO: 26182 - DNA, 1671 bp, Oryza sativa
  Clone ID: PAT_MRT4530_30999C.1
tttttttttttttttgatcaacggaatttctttcacaacagctcatatcatcatctgttacagtcagttgcaactatcatcaacacactcgctctattcaggaaaattggcaacacagcaaagaaaaaacccgagtcaacagacctccaacgctccaatgaaataacaaacttacttcactgttccttgatctatacctcatcatccccccccccccttcaccgaaaatggccaaggcaaacaaatctacatcgtctgcaagctgggcgccgaggctttttcggcgagcacttactcaagtaaacaggtggccctgttcggtggtctctagctctcttccaagctgcatgtgcacaaatttcctgtgcttctgcttgttgatcctggcgcttaaccttctcacctgtgattgaacccagaaaatctttgcagagaaccattgccaccaatcatatgtgactcaatccttctttcttggcctaaatgcattctttcaggccaaacagaattcaacctccttgcgaagtcctccacttctctgtcaagctcttcctgcattgcaggatcaagtccatcatcaaggtcagcatcttcaaaggggtactcaacatcatcttgcacatctgagctttggcaaggtgttctagaaatattaccagtacccgcattgaatggaactccacgagtagcttcctccttgtttacaggttcaggattagcttttggggggttcttagaatggtcctttcttctcttgttctttttcttattcttagaagctttcccacctccagaacctccatccccatttataaaacatagtatctcatccagtgaccgctcatctttttgctcttcttgtacttgaacatccttcagtttctggcgctcctgtagttctttccgcttctttgcatataatcgattcaacaaacggatcctgggatcatcatttatatttttcaggggttccaatttctcttcctctgttaagtcatctggcaaatggaaaatatcacgaatttcctcaggtgtctttccttcaattattcgagcaagtgctcgactggtaagatcaaccaatggctttaattggagactatcagccgccgatgtcagctcacatagtctttctgtatctattctgacaaacttttcatcaaatgattttcgctccttgtttgagcgccctgggacttgatgaaaccgacaatagtcaagaatcaaactcaaacttgtagggttaactctttctgggagagcaattgcatgattttttgatgatcctgttccattttttactatctctcgacatatcatagggcaaaacatggcaacctcctcctccacttgttgtatggaaccatcaaagcactgaagccaaatataactcttcaacgcctgtgagttcacaatgaaattaaattggaaccaaatgaatagctgataaggctggagaacaattgtttcccctcgtggcggagagaaggagaggctggagagggagaaggcggcggtgacggcggcggcggcggcgccggcggcgaggagaggagaggagagggggaggttgtggttttttggttggtgggggtgcgcctgcggtttgggggaagcgaagcgaaatgggggaacccggccggtggagtccttatctatcccgcaacccat

SEQ ID NO: 26183 - DNA, 3150 bp, Oryza sativa
  Clone ID: PAT_MRT4530_3099C.1
atttgacttcccgaggtggaagaagaagacgacgacggcgaattgggcaatggatggtgatcttttccgggtggcgtctcagctttccggtcgatcggccgcgagtccactccgccggcttgtcctcgccaccgccattgctgatagcaacaacgacttcaccgtcggccaccaccgttgatgggcatcgtcatctacgccgccggtctgcctccgtcgccgccgactggtgtccccgcctatacggtcggttggtcaccccaccgttgatgggcatcgtcatatacaccgccggcctgcctccgtcgccgccgactggtgtcctggcctatacggtcggttggtcacaccaccgttcatgggcgtctacgacttcaccgccggctcgcctccgttgccgccgagtggtgcctccgcctacacggctggtctattatgccgccgctgttgggcgtccacgacttcaccgccggcctgcctccgttgccgccgagtggtgcctccgcctacacggctggtctattatgccgctgctgttgggcgtccacgacttcaccgccggcctgcctccgttgccgccgagtggtgcctccgcctacacggctggtctattatgccgccgctgttgggcgtccacgacttcaccgccggcctgcctccgttgccgccgagtggtgcctccgcctacacggctggcctattatgccgccgctgttgggcgtctacgacttcaccgccggcctgcctccgtcgccgccgagtggtgcctccgcctacacggctggcctattatgccgccgctgttgggcgtctacgacttcaccgaccggccgcctcgtccgccgccgactggtgtctctgcctgcacggctggcctattatgccgccgctgttgggcgtctacgacttcatcgccggcctgcctccgtcgccgccgagtggtgcctccgcctacacggctggcctattatgctgccgttgttggatgcctacatcctcaccgttggctcaccttcgttgccgtcgactggtgtttccgcttacacggctgacctattatgccgccattagtgggcatcttcgctttcaccgtcgaccgccttcgtcgccgccgactggtgtcttcattgttattgatggacgactttgttcccacattggccacttctgccatcaccaaggggaatattacaaagctaagtcatcatttattttattctttatatgatatttttccttttcctctgcctcactacaccaattggtcttccattgagtagtgagtcgggtgctacagatgttatatcatattttttataatatttatcttgattgcttgcgacataatctgagtacaaaagtacctatcgagttatggagttctatcttcctatgctttccgtttggtttgccaatggatggttgcctttgggccgattcctagcacccgggggctcgttggatggaccgaaaagtacccgaatagtaaactccgatccgtgaaactttgttccattaatgacgaactcatgtcactcatatgcatgtttgggaagtgcttaggccgactcccagtgcttggtggctatgactagtcgggcagagtgtttaaacgtaatgagtcatctgctcggggaaatcaaaattgacaagaggagaaatacatatttataaatattttaaaatacttgattttttctcgagtattatatttatatcagatactactcatcctatatgtttgttctgcaggatccagatccagatatgcataaaagggattcatggctttaagcttatctcttacgctccaggaatggatcagtcagaacatcaccaccggctcgcctcgaccgccgccgactggtgtttccgcctgcacggctggcctttatgccgccgttgttgggcgtctacgtcttcaccgaccggcttgccttcgccgccgccgactggtgtttccgcttgcacggctggcctattatgccgccgttgttgggcgcctacgtcttcaccgaccggcttgccttcgtcgccgccgaccgatgtcctcgcctgcacggctggcctttatgccgccgttgttgggcgtctacgtcttcaccgaccggcttgccttcgccgccgccgactggtgtttccgcctgcacggctggcctattatgccgccgttgttgggcgtctacgtcttcaccgaccggcttgccttcgccgccgccgactggtgtttccgcctgcacggctgccctttatgtcgccgttgttgggcgtctacgtcttcaccgaccggccgcctcgtccgccgccgactggtgtttccgcctgcacggctggcctagtatgctgccgttgttgggcgtctacgtcttcaccgaccggccgcctcgtccgccgccgactggtacttccgcctgcacggctggcctattatgctgccgttgttgggcgtctacgtcttcaccgaccggccgccgcatccgccgctgactggtgtcatcgcttgcacggctggcctgttataacgccaactgatgctatcttcttcacggctggctacatcgctgtcactacttataggcatcagtatcttcaacacaagctgcctacgtttgccatggctgccgactggtttcttcacttccatggctgcatgattctgccagtgttgattggccttaccatcttcatcgcctttcgtctcgtctgctgctgactagtgccctcgcctctacgtctggtttatacagctaccactactgatggacatcatcgtcttccgttgccgactggttatgccgccgccgactagtgcttttatcttcacaactgcgcgtcttcgctaccagttcacttcatcacggcgatgcaactttgtcatcatggtggagcgacttcatctttattatcttcggcactggcaaactctattgctgctacttcgcaagttttactacttcaccaaccacgacgtctttgtcatcatgcctcgacatctcggcatgcgatgccatgttattttactacaataagaggctctccaacattcatgatttctacttggaaatcttcaacacatatcttcaatcaagcaataactattcgacgacaagaggctacagttttcgactctatgttcagttgtttcccaac

SEQ ID NO: 26184 - DNA, 348 bp, Oryza sativa
  Clone ID: PAT_MRT4530_309C.1
acgttcaacacacgcagcgaattccacgaagagagaatcagtcttacatggcgcccaaggctgacaaaaagccgacggctgattaatcccgcggaggaggagcccgtgggggagaatgccccgtctgcatgcgaagaagcccaaggcggtgaaacggctcggcggggagaagggcaagaagggcggagccagataggggaagaaggacgggaggaagaaggggaagaagagcgtggatacctacaagagctacataaggaaggagatgaaggaggatccccccatcatatggatctgctccaaggccatgtacataatgaaatccttgattaacgacatgttggagaa

SEQ ID NO: 26185 - DNA, 258 bp, Oryza sativa
  Clone ID: PAT_MRT4530_30C.1
aaccagcagctccaactgttggtggggtgatttcagaactagcagctccaactgttggtgtagaacaaccaccaattcattatgttgattgggatagcttggagatagatggaacattagatgatgagggaaggattcacgtcatgaatgatgaccaatttggtcctggagtccttgagggcatcgagggtgcaacaattcctgtcgacaatatagtaccgggtgagcttgttataatctacgacaagaataaccctt

SEQ ID NO: 26186 - DNA, 1821 bp, Oryza sativa
  Clone ID: PAT_MRT4530_31000C.1
atgagagccagctccttctcctccttgatgctgccttgctcgcatggccatggcggcggcagggccaccgcctcgacgtgcgccgcggcggcggcggcgtgccttgcgcttgtggccttggtgatcttggtggtttcaatggatccgagggcacaagcttcttcttggttcttcctttcttcttcttcttcgtcttcgtcttcgtcttcgtctaccttggttcgtcctgcagctagctctcacgctgcctccttgcgtaagccgagttcttggggcggcggcaatggcggcggcggcggcggcgagcacctcctggtcacctctagtagctttggtagtggtggtggcgctcgtggaagctggagccggaacagcacgagcaaggaggtgctgtttcagggaggaggcggcggcggcggtgatgagatgacgtcgacggcggcggcgccaacgccggcgttgatcatcggttctagctccggcgatggcgtgtcgccgtctcgcgtggccgtcacggcggcggcagctgaacctacaccggcactggctccggctcctgctccggaatggggtgttggtgatgctgctagtggagatgatattattcaagtaatgccgcaagcgcaaaggcgaagggatgtgaaattggagctattagaactcggtcttgctaaagctcgggcgacgataagggaagccatccaaaacaaggataacaagcccccattgacagacaaagattatgtgccagttgggccagtgtacagaaatgcctatgcatttcacaggagctacttggaaatggagaaggttttcaaggtcttcgtctacgaagaaggcgagccaccggtgttccacgatgggccgtgtcgcagcatatactcgacggaaggcaggttcatatatgccatggagatggagaaccggatgcgcacgagagacccggaccaggcccatgtcttcttccttccattcagcgtcgtcaagatggtgaagatgatctacgagccgaactcgcacgacatggatccgttgcggcggaccatctcggactacatcaacgtggtgtcgaccaagtatccacactggaaccggagccttggggctgaccacttcatgctctcatgccatgattgggggccgtatgtctcctcggcgaacggtcatctcttttccaactccatcagggtgctctgcaatgccaacacatcggaggggttcgacccgtcaagagacgtgtccctgccggagatcaacctgcggagcgatgtcgtggaccgccaggtgggcgggccatcggcatcgcaccgtcccatcctggccttctttgctggtggtgaccatggccccgtccgccccctgctattacaacactgggggaaagggcaggacgccgacatacaggttagtgagtacctgcctcgccgccacggcatgtcgtacaccgacatgatgcggcggagcaggttctgcctgtgcccaagcgggtacgaggtggcaagcccccgggtggtggaggccatctacctggagtgtgtccccgtggtgatcggcgacgactacacgctaccgttcgctgacgtgctcaactgggcggcgttctcggtgcgcgtggcggtgggcgacatcccgcggctgaaggagatcctcgccgccgtgtcgccgcggcagtacatacggatgcagcggcgggtacgcgccgtgcgccgccacttcatggtgagcgacggcgcgccgcggcggttcgacgtgttccacatgatcctccactccatctggctcaggaggctcaacgtcagggtcattgcacgggaggactga

SEQ ID NO: 26187 - DNA, 225 bp, Oryza sativa
  Clone ID: PAT_MRT4530_31001C.1
gtccattaccagcgagtgcttaagcgaaaatggtaaggtccacatagcgtaatttagggcccgattgcccgtggcagcgaacccctgctggtgcacgcacgtcacaaaaaacactgcgactgattaaacggatatgctcagcatggcttatttggaaaggtggtataccttaaaaaagtgtggtgatgctgcctaaatcacagctcgactatacatacatattga

SEQ ID NO: 26188 - DNA, 360 bp, Oryza sativa
  Clone ID: PAT_MRT4530_31002C.1
atgggcgcgaccagcaaaaccatgcacccacagcccaccattgctgacgtcatcaaggcggggcgcggcgccggcaagcgggccccaccggtcagcggctcggggagggcggtccatggcggatcgggtccacggaccggggaggagcggcgcgccacgcggcggccacgcgacagccgaaccgacggccccgatctacccaagggtagatcggacggcggcgggagctcgcagccggtgcgcgcgggcacggcgcaaaccggcccggcgaccatggcgcgcgacggcgcggcgcgcatgcggcagcggcgcaagacggcggccgatggcgaccgaccggcggcggagagcggcggctag

SEQ ID NO: 26189 - DNA, 432 bp, Oryza sativa
  Clone ID: PAT_MRT4530_31003C.1
atggctaagcaatccctagtcctaactctaaccatgttagaaccccaagttgacaaagaaacaaggtacaacaatagcatggctacggcaatagggctgacgtcatcaaggcggggcgcggcgctggcaagcgggacccgcatggcagtgactcggagagggaggaagggcgccgacaagcgggccccaccggtcagcggctcggggagggcggtccacggcggatcgggtccacggaccgggaaggagcggcgcgccacgcggcggccgaaccgatggctggtgcgcgcgggcacggcgcaaaccggcccggcgaccatggcgcgcgacggcgcggcacacatgcggcagcggcgcaagacggcggccggcggcgactggccggcggcggagagtggcggcgtcgcggcgaagcggcagctacgtggctaa

SEQ ID NO: 26190 - DNA, 2705 bp, Oryza sativa
  Clone ID: PAT_MRT4530_31004C.1
ctagtaccaagcttttaactttggtatagattgaaatatcctgtacaaatgaaaataactataatttcaccttgctaaaataattacaaattacaaagatacaccaggcctgacttcgaacaaaatacaaataattttgctaaccaaattcaaaattggggaactgattttacagcgggggttacaagtgcattgtgcatatcattgttgtcgggtatcctctcttcgtaacctttcatcttttttgggcaatgcattgatctgctcctcgagctgagtgtttttgagctttaatctctgaacttcctcagcaagttcggtgacactttgctgcaagttggcgatgtacgactgcagttccttctctctgaaatgcactccagatggctgagatgaaccagttgtacttgcatcagcagcatcagatatttcctcaattgaagaaatcagtctacttatcacttccttttgagcaatactatctgatgtaacctgaaaacgcccccttcgctggataacttttccttcggattgctcctcaggttcaacaggcagatgtgcgcgtggatctttcatttggcggaataaaggcccactgcggttcctgttgcatgtatttttctgatgacactcattccttgctgggtcattgccaacattcctgtaaggagaaagaacatgttcaggtatcagggaaccacttaagaacttgtgggacccactattgaccaaatttgatggtacagaggcacttctttccaaactttcaccattacagttggcacttttatgattctcaatttgttggaactgctgcataggtgatgtagattccatatttggttgctccctcaaatcagtagcagtagggggatcatcatccccacaaacatcaaagcaagattttagtgcctcaagggggcggctggggaaagaagaggcgagagcaccatccagatcttcgacctcttgtatctcatcctcaggccttgcagaagcaacaaggttagcccgtccctggtaaatattttctggttcattagcttcttgtaaaccatccttgaatttgctgttaacaccatctaaatggcacgttccgtttgtattgtctataagggcggctgcatttttcaagtcctccagattgaagttccaaccactgattcctcgtatgtactctttctgtgatagttgctccttgctctctgaaccaagcttattactaagaagcaagtcagcctcttttcccttcaatgtcctaaagcgttcacccagcggggggaggccgtcaagaatacttcgtgcaagaaattcagctgtacgtgcatgcttaaaaaaagaatgcttcaagagcttttctgaagatggacgcttgcgtggatccttgactaagcaagttgcaaccaaatccttgaaagactttgaaaatcgcttgtccctctcatagtctagacctggtggtgcattttgcaaggtcataagcaataccttcattggagggtactttgaaaatggagcatgaccatgtgctagttccaatgccgttataccaaaggaccaaatgtcagctttgtaatcataaccatgcagttgttgcataacttctggagccatccagcaaggggtccctacaaaagtgtttcgtgctctttgcctattcccagtatcaaacatgcaggctgacactccaaagtctcctagcttgacagctccatttgtatctattaggatatttccagcctttacatctctgtgaatatgcccttgggagtgtaggtagacaagagctttaagaacctcccgcaaaagagttgcaatgactggctcctcaaacccatctggaaaagaagttttcataatgtgcagagcagatccagcggccatgtaaggcataataacccaaagctgatgaccatttgtaaacgagcaatatgctcgaagaagatttggatgatcaatcaagctcatggtttgtacttctcgtcttatcccatccaggtcattactgcacttctcaaggtcaagaactttaatggcaacttcaatattaagtgggatacaaagagctttgtacaccgtagcactaacaccatctccaacttcctcacataatttatattctttgggatctgttggaaatctccttgcatgctccatggctcaaattcaaagagcatcatgcgcaataaccacagagttacaattaccatagcacacagaagcagaaggcaatagcacgaacaccttgtagcagcgacagagaacaaccagcagcatgactaagtctataggcgaatgtacagtccaatatagttcttaattatccagtctatctttcaagcatcctttggtccaaggtgttgtattgccaaacacgatagttaagtagaaaccacaaaagctaccaaaatggctagcagcaagcgtactttggcagtccggcagtagtacacgctgcaacgcgcttcggggcggcggggttccccaccggcgaggggggaggaggaccgcagagacggcggcggcggcagcggatctcgggtgccacgagctggatgaaaagcaagggggcggatctgagcagaggagaagctacagaatcgggggcgatcgagcagatccaggaggaggtggagtccccttctgcggctgctgcggcgggcggcggcggtggcggagggggacgacgccgacgagagggaggc

SEQ ID NO: 26191 - DNA, 175 bp, Oryza sativa
  Clone ID: PAT_MRT4530_31005C.1
ctgccgaggacattcccacccgttgtggtctctgcgtactgaattgtaatagtataatggtccaaatgatagaaaataatacgtcacgcatcatcatgcagtgacatgattggaaaccttgatgtcatatcaatttcaataacatcacctatttcaattcaaaaaaaaaaaaaaa

SEQ ID NO: 26192 - DNA, 1059 bp, Oryza sativa
  Clone ID: PAT_MRT4530_31006C.1
atggctaccgtcttcccctaccgttggactaaaaccaagcatctcaccgagcgtccacccacccacggccaccctcccgacgctcacccatggatcgtcctcgacgtccgcgcctacatcgccgaccgccagaacgccaccaccgccaccacctctctcaccagcggccgcaagctccagatcaccatctgcgccgcgccgccgccgctcgtctcctacgtctgcgcctggtcccccaacgccgaccccgccctcgtcttcgccaaggaacccgtcgtcgcctgcgtcaacgccgacctcgtcttcctccgagtccacagcgatcaagtctaccacctggtctaccacgccggcggcggtggtgacagccgccgccgccgcccttcgctcacgcttgtccggcaccccgaccgccccttccatcgctgtcattaccttagtgagctcggcagcattgccatcctctcccgccgccgtgccggtgccggtgacgaccacgacgacgactccaccggcttctatgtctgcagtcttgatcaggagctatggtatgggttacctggacaacgtggccacttcaagctctgcctctacgactccatcgatggcgaatggagccaggagacccttcgtctcgaccagctgcgcaatccgcaggacaaagacaccgttttccattacacggagaaggtgattactctgcacgatgaacaggtagtggccttcgttgatctgtggcgaggcatggtcatctgcaatgtcaacgatggcacctgcaacaacgtcgagctcctgccgaagctgaacggtctccctgccatggataagctgcggatagctcgtcctatgctcagcttgatggattcgcatgtcgtttacatcatgggcaaggtcaatctctccggcgagaaggcggtggtgctcactgttgacatggccaacaagaggctgcaaggggtatctctgcgtgacgctgaaaggatcgtctacgatgataacggttgcagctacaaacagtataccatctcccaatatttcactacatctgcaggtgattga

SEQ ID NO: 26193 - DNA, 390 bp, Oryza sativa
  Clone ID: PAT_MRT4530_31007C.1
gttcataaaaaacattttttttttttggtgttttattattacaaaattaatttttttgataaatttttttcacaaaaaaaaaaaaatacataaaacaccacttgtgatgataataaaacaaaaaatgaaacaaaacagtttttggcttttaagaaaaaataacattgatgagctaatgcaaaaaccatgccttaattgcatgaatactattagattatattaatactatatatgtaactaaataggtattttgccttgcgggagtaaaatagtaagcagcaagaaccttcatttcatcttcaatgaaaaaaatgggttactgaagtacatgaagctcaagtttctgaaatgaatttgaccatataatacaaaatgtaaatttgcacatca

SEQ ID NO: 26194 - DNA, 1090 bp, Oryza sativa
  Clone ID: PAT_MRT4530_31008C.1
tggatccccgggctgaggagtccgcctcgtcgtcccgacgcttcatacagttgcctcgtcggcgtgcacgatcccccgccgatcaagctagccggccagccagcgaagcagctccggtgctacttcttgcctatacctcgcaacttctctcatggccgcggcggggaaggagcggagcagggttctggtcatcggcggcacgggctacatcggccggtacatcgtcgccgccagcgcccgggaggaccacctcacctccgtcctcgtccgtgacccggcgccggcggaccctgccaaggctgccgtcctccagggcttccgggactccggagccaccctcgtcaagggagatctttatggccatcaaagtttggtggcagccatcaaatctgctgatgtggttatctcggctgtgggttacgcgcaactagcagatcaaacccgtattatttctgctattaaagaagcagggaatgtgaagagattcttcccttcagagtatggtaatgatgtggaccatgtacatgcagttgagcctgtgaaatcagtgtatgctacaaaagctcgtataaggcgtgtaattgaggctgaggggatcccatacacatatgtctcctcgaacttctttgctggtcgtttcttgccaagtctggcacaggcctggatcaagggccttccaaccgacaaggttatcatccttggtgatggaaatgtaaaaggagtctttgccacagaggaggatgtgggtacctacactattaaagctgtcgatgatccaagaaccctgaacaagatcttgtatctcaggccatcaagcaacattttgtctcacaacgagctcgtctcactctgggagaagaaggttggcaagacatttgatagggtgtacatcccagaagatgaagtcctgaagaagattcaagaatccccagcaccgttgaatgtcgtactgtcaatcaaccattctgtctgggtgaagggggatcacaccaactttgagatcgagccttcatttggagttgaagctactgaactttaccccgatgtgaagtacaccactgtggatgaatacctgaacaggttcctttga

SEQ ID NO: 26195 - DNA, 779 bp, Oryza sativa
  Clone ID: PAT_MRT4530_31009C.1
ggtccggattcccgggtcgacccacgcgtccggaaacattgctcgacatctccactttgtccctggaggaggtcactggacgcctcaaggcggctgaggactctggccagtcgtcgtcctcgtccttaccaggtggcagcggcaagctctatctcaccgaagaagagtggcttgaacgtcacaagaaaaaggaacaggaggcgaagaagggcaatggcggaggcaacacccgtggcaagcgccgcggcgggcaagggtgcaatggtagtggtggtggcgacaacgctagcccggtgcgcaagaaggacaagtgccgtaattgtggcaaacttggccactgggccaaatattgcaggagcaaaccaaagcaggagcaagcgcacgtggcccaggaggaggattagcccacgctcatgctcatgacgggcggctgcattgatgtggtggaggagacgggcgcgccgtgcgcgacaccgtcgccgcccgcattgcggcctcgcccagacgtcatcgagtttgtggagcagaaggtgatcgccgcgctggacgacgccaccgaccacgacaacaagcgctagatcctcgacaccgacgcgtcgaaccacatgaccggctcaacaccaacgtcaccggcaatgtccgactcggggatggctcgctcgtccacatcggagggcgcggcaccatcctattcgcctgcaagaatgttatattgacggtcgaaactgatcgataacgaccgtcaacaaaaccccccaagctttgacctttgctcgtcc

SEQ ID NO: 26196 - DNA, 1263 bp, Oryza sativa
  Clone ID: PAT_MRT4530_3100C.1
atggcgcatgtcgaaaagagctacgtccacggacgcctagccgccggcggatcccctcctgctggatccggcggagggaagagcgccgccgctgctaggacgccgacgggccaccgccgcctcccctcccgctcgatccgccgccggtggtgggggagggcgccaccgccgctgccggtggtggggaagggcgccgccaccgctcgtgggaggaggggcgccgtcgccgctgctcggggggaagggcgccgccgccaccgccactcggggaaagacctcccaccggagctgctcccctgcatcgccggccacctccacgccgccgtcgacgtcgtccgcttccacgccgtctgcagggagtggcgcgacgcgctccgctatctgccgcggcgccctagcttcctcccgtggcttctcgcgccatggccgacgcccgacgacgacaccgccgccgccggcggcgcgtgccgctgcgtcttctccaggacgacctaccacgcccccggcctcggcatccgggacaagagggtggcccactacgacggcggggcctcctggttcgtcggcggcctcttcgtcaaccctctcaccggccgcgccgccgcctgcgccgtcgacgaccctgacgaacgcgcctgcgccgtcgcctaccacgacggcgccgccgtgtgcgtggacttggcgagatgctacgtccacgagatcggaggtccagcagctggggatcaaaccacgtttctgccgctgcctgatgagcccggcaaggtgcgccggcgcagctacctcttggagcttcgcggcgagctgctgctggccagcgttctacaagacgccggctgcaccgacgacgacgacgacgacgacgacgaccgcctctcggtgtccgtgcacgcgttcgatctggtggctgcccttaacgctctcgatcagctagatgcagctgtggacggcgccggcggcggcgacccgccgtcgccgtcagtgtgggagaagatggacggcgcaaccggtgaccacgtcctcttcttgggctacccgagaagcttcgccgtggaggccgcgaggtacggcggggaggtgcccggcggaagcgcctacttcgtcggaaggtcgaagccgtgccgcgtgtacaggtgcagcttcgaggacgacggcacggcggcgacgctggtggacacgctgcccgccggatggaacgacgagaggtgcatgtggttcttgcccgagccggacattgctccggtgatcggagcacggacctag

SEQ ID NO: 26197 - DNA, 3657 bp, Oryza sativa
  Clone ID: PAT_MRT4530_31010C.1
atggacgacgacggcgagacgccgatgccgtcgctcgagctccacaagctccccaccctcgccggcgccgccatcccgaacccgatcgcgcgccacccgctgtaccacccgtcgccgagcttcttcatctcccccaccgacgtcgtcctccgcgacatcctcttcgacgcctcgccggcgtcggccgccggtgagcggcggcggcggcatgtcgcggcgtaccaccgcgcgggccctcgccgcgaggtcgcgttcgacccagcgacggtgcgcgcggccatcttcacctgcggcgggctctgccccgggacgaacaccgtcgtgcgagagctcgtcgtcgggctgtccgagctctacggcgtgcgcggcggcgtgttcggcgtgcggaacgggtaccgcggcttctactccgacgaggtcgtcccgctcgacccggcggcggtggagcactggcacaaggccggcggggcggcgctcggcacgtcgcgcggcgggttcgacctcgccaggatcgtggacgccatcgagcggcacgggttcaaccaggtgtacgccgtcggcggcgacggcacgatgcgcggcgcggcgaggatccaccgcgaggtccggcggcgggggcggctcgccgtggcggtggcggggatcccgaagacggtggacaacgacgtcggcgtcgtcgaccggtcgttcgggttccacacggcggtggaggcggcgcagcaggcgatcgccgccgggcacgtggaggccgagagcgcggcgaacggcgtcggcctcgtcaagctcatgggccggagcgccggccacatcgcgctccacgccacgctcagcagccgcgacgtcgactgctgcctcatcccggaggaggacttctacctccgcggcgccggcggcctcttcgacttcctctaccgccgcatcaaggacaacggccacgccgtcgtcgtcgtcgccgagggcgccggccaacgtctcatcccaagaaccaccaccacctcggcctccggcgcctgcgccggcgccgacgagtcggggaacgagacgttcctggacgtgggggcgtggctgaaggcggagatgagggcgtggtgggaggaggagcacgccggcgaggtgttcacggtgaagtacatcgacccgacgtacatgatccgcgccgtgccggcgaacgccggcgacaacctgtactgcacgctgctggcgcacgcggcgatccacggcgccatggccgggtacaccggcttcgtctccggcacgatcaacggcaactacgcctacatccccatggacgaggtggccgaggcgaagaaccccgtggacaccaaggaccacaagtgggcttggtcgtttgttgtctacctcggcggccactcgcatggaaggggaggagccgccttggcctccagccaagaacgcgccaagaactcccaccacgagttcttgggctctttcctgggaagcaaggagaaggcgagagatgcgatcttctactcctacaccaagtacatcaatggcttcgctgctactctggaggaggaggaagcaatggagatatcaaagcatccaagtgtcatctcggttttcccaaacagagggcataggttgcacaccacccgttcatgggagtttcttgggatggagaaggatggccggattagggccaactccatctgggccaaggcgagatttggagaaggcgtcatcattggcaatctagacactggggtgtggccggaggccggcagcttcagcgacgacgggatgggacccgcgccggtacggtggcggggaatctgccaggaccaggcctctgacgacgcccaggttccttgcaacaggaagctgatcggtgcgaggtacttcaacaaggggtacctgtcgacggtcgggcaggcggcgaacccggcgagcaccagggacaccgacggccacggcacgcacacgctgtcgacggcggcgggccggttcgtccccggcgccaacctgttcgggtacggcaacggcacggcgaagggcggcgcccctggggcgcacgtcgcggcgtacaaggtgtgctggcgccccgtgaacggcagcgagtgcttcgacgccgacatcatcgcggcgttcgacgcggccatccacgacggcgtggacgtgctctccgtgtcgctcggcggcgcccccgcggggtacctccgcgacggcgtcgccatcgggtcgttccacgcggtcaggcgcggcgtcaccgtggtgtgctccgccgggaactccggccccggcgccggcaccgtgtcgaacaccgcgccgtggctcgtcaccgtcggcgccagcaccatggaccgcgagttcccggcctacctcgtcctcggcaacaacaagaagatcaaagggcagagtctctcgccggtgcggctcgccggcggcaagaactacccgctgatcagctccgagcaagccagggcggcgaacgcgacggcgtcacaggcgaggctgtgcatggaggggtcgctggagagggggaaggtggaggggaggatcgtggtgtgcatgcgcgggaagaacgcgcgggtggagaagggcgaggcggtgcggcgcgccggcggggcagggctcgtgctggcgaacgacgaggccaccgggaacgagatgatcgccgacgcgcacgtgctcccggccacgcacgtcacctactccgacggcgttgcgctgctcgcctacctcaattccaccagatcgccgtcgggcttcatcaccgtgccggacaccgcgctggacacgaagccggcgcctttcatggcggccttctcctcccagggccccaacaccgtcaccactcagatcctcaagccggacatcaccgcgccgggggtgagcatcctggcggcgttcaccggccaggccggaccgacggggctcgccttcgacagccgccgcgtcctcttcaacgccgagtccggcacatccatgtcgtgcccccacgtcgccggcgtcgccggcctcctcaaggccctccaccccgactggagccccgccgccatcaagtccgccatcatgaccaccgcgagggtgaaggacaacatgaggaggccgatgagcaactcgtcgttcctccgggcgacgccgttcagctacggcgcagggcacgtccagccggggcgcgccgccgacccgggcctcgtctacgacatgaacgacacggactacctcggcttcctctgcgcgctgggctacaactcgtcggtgatcgccacgttcatggcctccggctccggcgcccagccgccgtacgcctgcccgccggcgcggcggccggaggacctcaactacccgtcgttcgcgctgccgcacctgtcgccgtccggcgccgcgcgcaccgtgacgaggagggtgaggaacgtcggcgccgcgccggcggcgtacgtggcgagcgtcgccgagccccgcggcgtgtcggtggccgtgcggccgagccggctggagttcacggcggccggggaggagctggagttcgccgtcacgttccgggccaagaaagggtcgttcctggccggggagtacgagttcgggcggctggtctggtcggacgccgccgccggcgggaggcaccgcgtcaggagcccgttggtggtgagggtcgtggacaagaaggggaagaatggcttgcccatctcttga

SEQ ID NO: 26198 - DNA, 457 bp, Oryza sativa
  Clone ID: PAT_MRT4530_31011C.1
agggaaatggttttgccgggggaaaccccccgaaaaaaaacgacattttccaataacatgtctttccaattttatttaaaattcccccccggccgatggtaccaaaaattttttaaggtgtccaaacttttttaaaaaaaccctacaacttggctgacaactgacaaagcttcctaaataaccccccctttgaaaaaaataaaatttagctccctgacaggccaaaccatcccctggggctacttatttgtccctaatcttttttgttcaggctttgggatcctgattactactacccccccgtttttttgcccaacccttcccgtggggtcgggccaaaaaacactgaatccctgatccctaccctttactgggtcaacacttaacaaagcttaaaaacacaggtttttttattcggtcttcattttcaggtcggaatcctaacggccttttttcc

SEQ ID NO: 26199 - DNA, 395 bp, Oryza sativa
  Clone ID: PAT_MRT4530_31012C.1
attgtaaagggcctttcgcaccgcaaaagctagccattgaggtgaggggctctcccacttatatcttaggtcctttgcccttccacaaccaatgtgggactattcaacaatctcccccttcacacattggtgtccctcagcccttcaccgccccttcaccgtgtatagaccccacagaacaggtccacggtccatcaatatcgtaaaggggctttcacacttcaaaagctagccattgaggtgaggggctcccccacttatatcttaggtcatttgcacttccacaaccaatgtgggactattcaacaattagatcacgtccgtgtgtccagtgccagctcatgtgccatgctgtgtgaccatcctggtccacaccagccatgcgcaccatgcct

SEQ ID NO: 26200 - DNA, 417 bp, Oryza sativa
  Clone ID: PAT_MRT4530_31013C.1
gcacgaggtgacacttcggagccgcctccaccatgcgtgcggttgcctggatgctcatccatggccgttcctcgtgtgatgggggcctgggaaccgtatgttggtattgtctgatgtggcatctgtgccatggcatgagctcctgtcagtgatgaatggctattttggactttcggtctcgattttgcaaagttcgctgctaacgctagcttgagctctagtttgcggttcaaggacgattttgtagctcgatgacaagttgagggaccttcggtgtactttttcctatcggactcgtctgtctcgtctcctcttccttctcccccagcaacactcccaatctcactcttctcctctaatcgctaggccgccgcggcgggtgggtggcagagagctgactaaccgcgagccgagcga

SEQ ID NO: 26201 - DNA, 1398 bp, Oryza sativa
  Clone ID: PAT_MRT4530_31014C.1
ctcgacgaaatttctcccatttttaataaaagcttccatccatccatcgcggttgcatccacgagctcgcgagcggagattttcccccacgatttttgctgttcatccgtgtgggggaggagagattccgcgtcgattggtggtcggatcggagcgaggagaagcccccgtgttcttggctttttttcccccgatcgaatccggtggaaagcgagcaataaaaaccacttcttttctttttcgtttctggttttctttttcttgttgggtttctcttcctcctgctcgagtttgatctcttgattcgtgaggagtgtggcgaagatgagcgcgagtttcctcgagatccagccttcggagctctcattcccctttgaactactgaagcagagctcatgctccatgcaactcaccaataagaccgaccattatgttgcatttaaggtcaaaacaaccaacccaaagcaatactgtgtgcgccctaatattggcgtcgtattgccggggtctacatgtgatgttacagtgacgatgcaagcacagagggaggcacctccggatatgcagtgcaaggataagttccttgttcaaagtgttgcagctgagaatggtgcaacaactcaagatattagtgcagaaatgttcaataaggtggcaggaaaggttgttgaggaattcaagctacgtgtagtctatgtgccaacgactacatcctccgcaatgcctgaagactctgaacaaggaagttctgctcggccatttgcacaagaaaatggtatccataattcaacaatgccacaacctgtttttagatcatctgctgaaccaacaaaggagaggcccacagagccatcgtccatgatctccaaactaaatgaggagaatagggttgctattcagcaaaaccagaagttacgacatgagctggagctcctacggaaagaaagcagcaaaagcagtggcggtttctccctcaccttcttggccatcgttggtcttctcggcatcatcgtgggctacatcctcaagaagacatagaagaggtagaggttcccaacaaaagttatactcccaggaaaggatacccctcatattggtatgccgcgcatcgtgtttttttccctcctaaaaggagcacctgtcctaacttgtaacaacaatactcctcctagatgccatggtttgtgtacattatggtggttttacgcttcgctgcggttttttttttttttacattgactaggcttgatttttaagagttttaactggtgcaactgtttgacattctccataatcttttattctttctttctgatcaatttatcatcatactgttaaactttaaaaaaaaaaaaaaaaaaactcgagactagttctctctctctctctctctcctcg

SEQ ID NO: 26202 - DNA, 559 bp, Oryza sativa
  Clone ID: PAT_MRT4530_31015C.1
tatatgcttggtgttagaggcagcgaagtagtccttgacggggagctcagactatgtcaaacattaatgcagaacgcagcaaacacaaaatcgatggggtgacagaagagccactatagacagtactctggggtaacagacacgagaatctattgctcaccatacatctcacagtcaggtgcacgatggggaaagaacactcacatacagaaacatgaagatcatgcttgagatttgggtgcacgatcaatgttctgtatgacctttacaggggaaggatcacgaattactccttcacattctgcacaagacttcaaagtggaatgactatggtctcatggttgtcagaaatgagcaggagatgttcaagattgaggctgcacattatatgatctctatatgtggaaattctgtacttagggagagatcttcttcactaaagagcgggagggtctttttcctagtacaaggatggcgattcatgatcaaaactttagggaaatttgaagtccaggatcttttgaccaatgcttgccaaaatttattaccattcatggtc

SEQ ID NO: 26203 - DNA, 244 bp, Oryza sativa
  Clone ID: PAT_MRT4530_31016C.1
ccgtcctcctgccaccgtggcgcacgcgaaccgacgtggcaggaggagggcggcgctagcatggcgccgccccagggaggagggcgccagcatggctggcgccgccgcctccattcctgtttctctgtatggagttgcaacgaaaaagttacatccgattctccccggcctcgccgggttcggcgatactaaaacctccaaattccgcttgcaagattgtgttttcgaggagagaagtttttcg

SEQ ID NO: 26204 - DNA, 1122 bp, Oryza sativa
  Clone ID: PAT_MRT4530_31017C.1
atgcgcggccgcctcctcgccgacgcggcggtggcaggaggcggcggcggcgtcgtgccgatctactggtcccagccgctctacatggcgaacctcaccatcggcacgccgccgcagccggcgtcggcgatcatccacctcgccggggagttcgtctggacgcagtgctcgccgtgccgccgctgcttcaagcaggatcttcccctgttcaaccggtccgcgtcgtccacctaccggccggagccgtgcggcacggccctgtgcgagtccgtcccggcgagcacctgctccggcgacggcgtgtgcagctacgaggtggaaaccatgttcggggacacgtccgggatcggcggcaccgacaccttcgccatcgggacggccacggcgagcctcgccttcgggtgcgccatggacagcaacatcaagcaactgctgggagcttccggggtcgtcgggctagggaggacgccgtggtcgctcgtcgggcagatgaacgccacggcgttctcctactgcctcgcgccgcacggcgcggccgggaagaagagcgcgctgctcctcggcgcctccgcgaagctcgccggcggcaagagcgccgccacgacgccgctcgtcaacacctccgacgactcctccgattacatgatccatctggaagggatcaaattcggcgacgtgataatcgcgccgcctccgaacggcagcgtcgtcctggtcgacaccatctttggggtgagcttcctggtcgacgccgcgttccaggccatcaagaaggcggtgacggtcgccgtcggcgcggcgccgatggcgacgccgacgaaaccgttcgatctctgcttcccgaaagcagctgcggcggcgggggccaacagcagcttgccgttgccggacgtcgtgctcacgttccagggcgccgccgcgttgacggtgccgccgtcgaagtacatgtacgacgccgggaacggcacggtgtgcctcgccatgatgagctcggcgatgctgaacctgacgacggagctgagcatcctgggaagattgcatcaggagaacatccacttcctcttcgacctcgacaaggagacgctctccttcgaaccagcggattgcagctcactctcctaa

SEQ ID NO: 26205 - DNA, 546 bp, Oryza sativa
  Clone ID: PAT_MRT4530_31018C.1
ctacctctgaacccaaggctggatgatgacgagtcgacgcagctgctcttgcctcgcagcctcgccggattgtgtgtcaccgaaccatttcctatctatccgtgccatctcctccctctcctccacctcgctgctgctggagctcgccgccggaaatatagcggcgagcgaggacaacagtggtgggcttcgatgacctctcaattcaggcgcgaagaacgggtggcgcaaggcagcgacgaagatggtgcggcagtagcgacggcacgcgacgcggtggcttcccctcgaccttggcagcgccagatccaacgtctccttgccgtgacaacaaggttggcggttgcggcgacaagtcacaatgcacggaacttcctggcagtgatgagcagcccggaacttccggagttcttgggccagggcccggaacctcctggtgaagaacaccggaacttcctggcagtgatgagcagcccggaacttccggagttcttgggccaggaactggggacgaaatccatatatataacggctaggtgacgtcat

SEQ ID NO: 26206 - DNA, 1159 bp, Oryza sativa
  unsure (1)..(1159): unsure at all n locations
  Clone ID: PAT_MRT4530_31019C.1
tccggattcccggggcgaccacgcgtccgcccctttacccttcccctggctcctcctcctgcaattccacttccatccgtcggcacaggaggaaggttgctaaggggggatcggctccattcctcattcttcattccatttgcgcgcgtgattcgggtttcttttccttcttgtcacctgtttcttggtcggtttcccgccttctcagaggtcggtcgattggatttggagcccggggcccagccttgcctcaacgtctgtgttgtcgtgttcttattggattcttgaccggattggattttggcggttccaatttttgttggtttgctccgattcttggttgatttggtcggaagatgatcaagtggggcatcggtagcagcgggacgccggcggattcgtattatgaggtccgctcggattgcacggatgacgtgcccaagagcaagttcaagatcaaggcaggaaaaacattgagtgtccggaaatggcaggctgcatttagcactgatggttgtcttgatattgcctcagtcctaagccggatacaaaaaggaggtgtgcatccaacagtaaggggagaggtttgggagtttttacttggatgttttgatcccaggagtacctttgatgagagggaggaaatcaggcaaataagaaggctacaatatgctagatggaaggaagactgccgagagatggattctcatgttggtagcgggaaagtgatcacagcaccattaatcactgaggatggtagacccatcaaagaccctttggttttactcgaggctacttcatccgaaaacacatcagacggtacttcaacaagcagcacaaatggaaatgaaatagatgaatctgcaagccgtattacagataagctcattattgactggaagcttactttgcatcaaattggacttgatgtgctacgtacggaccgcactatggcattttatgagaacaaagaaaatctttccaagttgtgggatattctagctgtgtatgcttggattgataaagatgnttggttactgtcaaggaatgagcgatttatgctcgccaatgatcgtgctactcaaggatgaagcagatgcctttttggtgctttgagaaattgatgcgtagattgagaggaaatttaaatgcacggatc

SEQ ID NO: 26207 - DNA, 2712 bp, Oryza sativa
  Clone ID: PAT_MRT4530_3101C.1
atggaactttgtgccggcatctttggccgtgatcttctcaacaaaagggcagggtcttcgtcgccaaaaattctatctggatctggtcaatcaaccaggagattaatcaccgatcgaatcgatctacaaccagcttgttatcgtcaattttacctctgtcaaattaattcacagatcactaattattatttgatcactaattatgccgccgctgttgggcgtctacgacttcaccgccggcctgcctccgtcgccgccgagtggtgcctccgcctacacggctggcctattatgccgccgctgttgggcgtctacgacttcaccgccggcctgcctccgtcgccgccgagtggtgcctccgcctacacggctggcctgttatgccgccgctgttgggcgtctacgacttcaccgccggcctgcctccgtcgccgccgagtggtgcctccgcctacacggctggcctcttatgccgccgctgttgggcgtctacgacttcaccgccggcctgcctccgtcgccgccgagtggtgcctccgcctacacggctggcctgttatgccgccgctgttgggcgtctacgacttcaccgccggcgtcgccgccgagtggtgcctccgcctacacggctggcctattatgccgccgctgttgggcgtctacgacttcaccgccggcctgcctccgtcgccgccgagtggtgcctccgcctacacggctggcctattatgccgccgctgttgggcgtctacgacttcaccgccggcctgcctccgtcgccgccgagtggtgcctccgcctacacggctggcctattatgccgccgctgttgggcgtctacgacttcaccgccggcctgcctccgtcgccgccgagtggtgcctccgcctacacggctggcctgttatgccgccgctgttgggcgtctacgacttcaccgccggcccgcctccgtcgccgccgagtggtgcctccgcctacacggctggcctgttatgccgccgctgttgggcgtctacgacttcaccgccggcccgcctccgtcgccgccgagtggtccctccgcctacacggctggcctattatgccgccgctgttgggcgtctacgacttcaccgccggcccgcctccgtcgccgccgagtggatccagatccagatatgcataaaagggattcatggctttaagcttatctcttacgctccaggaatggatcagtcagaacattaccaccggctcgcttcgaccgtcgccgactggtgtttccgcctacacggctggcctttatgccgccgttgttgggcgtctacgtcttcaccgaccggccgcctcgtccgccgccgactggtgcttccgcctgcacggctggcctttatgccgccgttgttgggcgtctacgtcttcaccgaccggcttgccttcgccgccgccgactggtgtttccgcctgtacggctggcctttatgccgccattgttgggcgtttacgtcttcaccgaccggcttgccttcgccgccgccgactggtgtttccgcctgcacggctggcctattatgccgccgttgttgggcgtctacgtcttcaccgaccggccgcctcgtccgccgccgactggtgcttccgcctgcacggctgacttattttgctgccgttgttgggcgtctacgtcttcaccgaccggccgcctcgtccgccgccgactggtgtttccgcctgcacggctggcctttatgccgccgttgttgggcgtctatgtcttcaccgaccggccgcctcgtccgccgccgactggtgtttccgcctgcacggctggcctttatgccgccgttgttgggcgtctacgtcttcaccgaccggccgcctcgtccgccgccgactggtgtttccgcctgcacggctggcctattttgctgccgttgttgggcgtctacgtcttcaccgaccggccgcctcgtccgccgccgactggtgtttccgcctgcacggctggcctttatgccgccgttgttgggcgtctatgtcttcaccgaccggccgcctcgtccgccgccgactggtgtttccgcctgcacggctagcctattatgctgccgttgttgggcgtctacgtcttcaccgaccggccgcctcgtccgccgccgactggtgtttccgcctgcacggctggcctattatgctgccgttgttgggcgtctacgtcttcaccgaccggccgccgcatccgccgctgactggtgtcaccgcctgcacggctggcctgttatagcgccaactcatgctatcttcttcacggctggttacatcgctgtcactactaataggcatcagtatcttcaacacaagctgcctacgtttgccatggctgccgactggtttctgcacttccatggctgcatgattctaccactactgatggacatcatcgtcttccgtcgccgactggttatgccgccgccaactggtgcttttatcttcacaactgcgcgtcttcactaccggttcacttcatcacggcaacataactttgtcatcatggtggagcgacttcatctttattatcttcggatttctacttggacatcttcaacacatatcttcaatcaagcaataactattcgacgacaagaagctatagttctcgactctatgttcagttgtttcccaactaatcaaagagtcgggggctacacaaatacaaggctcaaaatttga

SEQ ID NO: 26208 - DNA, 549 bp, Oryza sativa
  Clone ID: PAT_MRT4530_31020C.1
atggatccggccggcagcagcttggagcgtggcgacggatcctgcgacgcagctcggggcacatgcggcggctcggttgtaggccatggattcggccggcgacaccttggggcatgggtggcggctcgggttgtgcgtggcggttgctccgggcacggcccacagatccagccgtcggcagtagtttcgggcacgggtggcgggttcgggcgtgggcggtggagctcggggcgcaggcggttgatccggtggaaggcgggcgcaaatccagctaagtcctccctctcccactccactgacaactaccagcacggcagcgctacgacgataacaatcggcagggtgacggaaagaactaacatggatgcttcaaagcgtgctgcatatgtgaagaagattcatgaaaagactaatgaagaaattgaaaagaaggtgcgcagtaatgctggaaaggttgtgttggttgtggtgaccgaaaatggtgtcaacacgatatttggcgactccgctagggaagtctacatcaacatcatgagcaagcccaaggag

SEQ ID NO: 26209 - DNA, 807 bp, Oryza sativa
  Clone ID: PAT_MRT4530_31021C.1
gggcacgcgagctcgtcggcgctagagacatcggcggcgagattggagggcaccaacgcgtagcgggcgacgagacgaactcattggtacccaccccgacacgagacgatgcacgacggcggccggcgacgaagaagaaggcggcggcggctcgggtcgacggcgtcgagcaacctccggtggtcgacggcgaaaacggaggggcggccaagcttcttctcctcacggcgcaccttttggcgacgacggcaggcggcggcgacggcggagacggcacggcggcgttgccgaagatggcctgcgacggcggcggacttgcgacgcgtcgcggcggcgctaggaggcacgggaggactcgggagagagggcaaacgaaagaggagatcacagggaacatttatatgagctcggattgaagagatcgaatcacaaacgggaggaattgaatcgggaagaactcggactcgtttttggagataaactcgaaaacgaattcaaatctcatccaaacctcaaccatttgctttgattcttgggggaaaaggaagaggagaccgagaggaacaaaacccctcaatcaattggaagagatcgaatcggatttggccggatttggagcgggaagcggcggctagggttcggctcggcggcggcggccggctggaggtcggggacgaccctgacaggtgggccccacctgtcagcctccgggagagagggcgcgggcgcgggcggcttgggccggcttgggccgcgcgcggggaagagagagaagagaggagatgggccggaatcggcccaaagacc

SEQ ID NO: 26210 - DNA, 278 bp, Oryza sativa
  Clone ID: PAT_MRT4530_31022C.1
gggattcgggaacaggaaaaaaaaatttccttgaaaaagggccaatttattattacaagggtacaaaattattacaaaaaccaaattaattgggggggcaaaattggtaaaaccggcttcttccataaaaaaacccaagggttacaaaaattgaaaaaaaggtttacaaaggggaaacccaatgaaaataaggggggcttaaaggaaaccggcagggggtaaaaaaaatggggaaagacccgggggtttttagcccttgccaaagaatgggtgaaaaa

SEQ ID NO: 26211 - DNA, 315 bp, Oryza sativa
  Clone ID: PAT_MRT4530_31023C.1
atggcggtggccggcgagcggtggccggcggcagttgaggtgaaggcactacttcgggcctcgctaccggacgctaggcagcaccataaccagcaaggaggcctcaacgtccacctcattgtgttgccaccaccgcggcaaggcattcaacctcaccaccaccttaggccgccagtccgtctcaccctcgcctcacctcattgccatttgccatcgctggatctcctcctccccacagccgcccccatggacggcctctcgaagacctcccgcccagcccgcgtcatcggcaaagcacaacagctctcatcgtga

SEQ ID NO: 26212 - DNA, 1031 bp, Oryza sativa
  Clone ID: PAT_MRT4530_31024C.1
cgcgatgtactccgatagggtctccgggcggaagcgctccgtcatggaccgcctcggatcgggcggcggtggcggtggcggtggcggtggcggtggcggtggaggcggcggaggctctcgcccgcggcctgactccgtgaagaggtttcgtcaggcagatgggacttggagacgtgaactttatatggactctgtgggagttcaaagttcatctggagttccttccagaaatatccaaggaaaccagaaaccacatttgcagcaaaacactcaggttatgaggaaatcatcagttccagatcttcgtgaaaaattgtctggagttcagcggcctcagttgaatagtactgtacagatcccaaagtctgtaccggagatatcaacgagcgctaaacctgttcaaaagagggaacctgtccaaaagagggaaccccctgttaatgcggcccttcctgctactaagaaagtgaacgaaccatctgcaccaaagcaatgccaggaaaagactgattcctctcttgatagattactgaagtctcttgatgtagagaagtactcaataaattttcaggctgaagaggttgatatgaaggctctgcttcacatgaatgaggaagacatgaagtctttaggaattccaatggggcctcggaaaaagatattgtcagcattggcttccaagaagaagaaattatcaaaatcattacctaccagttgaatagttgatgcatctttaaacgtagtagctagatgacatgttgatttggatgtgtgcactgccaggatcaacccaagtaaccccattttttgtataagatttccatcgagatgatgtacaaatagagaactgtgatctaccagtgctgttgtgaggcaattaacagcttgtcaataggagttatgttttgatattatgcggatatttagatgccaacatatgatgcatcggaattattttcccgtatcatgtaaacccagcccattattagcgtgcccagctagggagataaggagattttatttgtatcggc

SEQ ID NO: 26213 - DNA, 792 bp, Oryza sativa
  Clone ID: PAT_MRT4530_31025C.1
atgtactccgatagtgtctccgggcggaagcgctccgtcatggaccgcctcggatcgggcggcggtggcggtggcggtggcggtggcggtggcggtggaggcggcggaggctctcgcccgcggcctgactccgtgaagaggtgcgacttcgagctcgctataggctcaaatcgtcgcttgctttttgtctctgtacatgcgctgctagatgttacgggcttgcgactcgtggttggatcgtatggggatcgaggtttcgtcaggcagatgggacttggagacgtgaactttatatggactctgtgggagttcaaagttcatgttatgaggaaatcatcagttccagatcttcgtgaaaaattgtctggagttcagcggcctcagttgaatagtactgtacagatcccaaagtctgtaccggagatatcaacgagcgctaaacctgttcaaaagagggaacctgtccaaaagagggaaccccctgttaatgcggcccttcctgctactaagaaagtgaacgaaccatctgcaccaaagcaatgccaggaaaagactgattcctctcttgatagattactgaagtctcttgatgtagagaagtactcaataaattttcaggctgaagaggcatgtttgacttatttgggtattcaagttgatatgaaggctctgcttcacatgaatgaggaagacatgaagtctttaggaattccaatggggcctcggaaaaagatattgtcagcattggcttccaagaagaagaaattatcaaaatcattacctaccagttga

SEQ ID NO: 26214 - DNA, 237 bp, Oryza sativa
  Clone ID: PAT_MRT4530_31026C.1
atggcgtcgaggaggcacggcgagatgagggacgaggcccgagccaaagagtgcgagaagtctcgaggaggagaggccgagggcgaggacgaggggagctcccgcttctgccctccccggggcgacgactccccggcgcacacccgaccgacgagggcggcgagccagagtggcgcagcaaggggaggcgagctcgagggcgaccccgccgagggttggccgacctcgccgacgtag

SEQ ID NO: 26215 - DNA, 297 bp, Oryza sativa
  Clone ID: PAT_MRT4530_31027C.1
atggcgacggtgaaggaaaatgatgtggcaaatctgtcgcctaaccttgttgttcaccaacttccttgtcgtgtcgccgtcgacaaatccgttggcgagaaggaagggagaggcgcccgctactgccgccgtggcgtcttctcccatgcggcgcaggcgaagcgggggagggcgagcggcgccaacgatggggaaaggggagagcaacacaggattagggaagaagagccgtcatcagatctgcaccacgagtcgaatgagaggagggggcaggtgggacgccgccatgggagctga

SEQ ID NO: 26216 - DNA, 199 bp, Oryza sativa
  Clone ID: PAT_MRT4530_31028C.1
agggaaagctggacgcctgcagaccggccggaatcccgggcgacccaccgtcgcgagccaacacaggctgccgcgccgacccacaactctgatgccactctgtccactggcggtgcttctctcgactcgggtgcccgaatcgactgcgctgttctctccacgtatgagtccgacgcctcgcgtgcttggtctactcttg

SEQ ID NO: 26217 - DNA, 263 bp, Oryza sativa
  Clone ID: PAT_MRT4530_31029C.1
ctctcctttaggcggctagcttgctgagcgcggagagctgccttgccatggcggccaccaccatccattcctctccttctcctcctcctggacgcccccgtccccggcggcgcttgcgcactctgcgtgtgccacgtcgagcacccctggccgtctggcccgctcgcttgcatcgtcgggctcgcgcgcgaccgcgacgcccgccaacggttcctctgctacgaagaagacgcccttggcgtgcgctccggcgcttgccactc

SEQ ID NO: 26218 - DNA, 1122 bp, Oryza sativa
  Clone ID: PAT_MRT4530_3102C.1
atgccgccgctgttgggcgactacgacttcaccggcagcctgcctccgtcgccgccgaccggtgtcctcgcctatatacggttggtcacaccaccgttcataggcgtccatgtcttcaccgaccggctggccttcgccgactggtgtttccgcctgcacggctggcctattatgccgccgttgttgggcgtctacgacttcaccaccggcctgcctccgtcgccgccgactggtgtcctcgcctatacggtcggtactactcatcctatctgtttgttctgtaggatccagatccagatatgcataaaagggattcatggctttaagcttatctcctacgctttaggaatggatcaatcagaacatcaccaccggctcgccttcgtcgccgccgactggtgtcctcgcctgcacggctggcctattatgccgccgttgttgggtgtctacgtcttcaccaccggctcgccttcgtcgccgccgactggtgtcctcgcctgcacggctggcctattatgccgccattgttgggcgcctacgtcttcaccgaccggcctgcctccgtcgccgccgactggtgtcctcgcctgcacggctggcctattatgccgccgttgttgggcgtctacgtcttcaccaaccggcttgccttcgtcgccgccaactggtgtcctcgcctgcacggctggcctattatgccgccattgttgggcgcctacatcttcaccgatcggccacctcatccgccaccgaccggtgtttccgcttacacggctggcctattatgccgccgttgttggacgtctacgttttcaccgaccggccgcctcgttcgctgccgactggtgtttccgcctgcacgttggcctattatgccgccgttgttgggcgtctacgtcttcaccgaccggccgcctcgtccgccgccgactggtgtttccgcctgcacggctggcctattatgccgccgttgttgggcgtctacgtcttcaccgaccggccgcctcgtccgccgccgactggtgtcaccgcctgcacggctggcctgttatgacgccaactgatgctatcttcttcacggctggctacatcaccgtcaccgctaatagctaccactactga

SEQ ID NO: 26219 - DNA, 3367 bp, Oryza sativa
  Clone ID: PAT_MRT4530_31030C.1
gactagttctctctctctttctctctccttgtttctctctctagagcggcgcaaatgtggcggcggcggagggggggtggtggtggcggaggaggagggggtgtggcggtggcggtggcgctggcggtgatgctggtggtgggggcggcggcgggggagacggcggcgtcggacgcggcggcgatgcgggcggtggcgagggctctgggcgcggacaaggcgctggggtggagcactggcgacccctgctcgtcgcccagggcgtgggccggcgtgacgtgcgactcggcggggagggtcaccgccgtgcaggtcgggaaccgcagcctgacggggaggctggcgcccgaggtccgcaacctcaccgcgctcgcccgcctcgagctcttcgacaactcgatctccggcgagctcccgtcgctcgcggggctctcgtcgctgcagtacctgctcgtccacaacaacggcttcacccgcatcccgccggacttcttcaaggggctcaccgcgctcgccgccgtctcgctcgacaacaacccgttcgacccgtggccgctccccgccgacctcgccgactgcacgtcgctcaccaacttctccgccgtccccgccaacgtcaccggcgcgctcccggatttcttcgggaccgcgctgccgtcgctgcagcggctcagcctggcgttcaacaagatgtccgggcctgtgccggcgtctctggccaccgcgccgctgcaggcgctctggctcaacaaccagattggggagaaccagttcaacgggtcgattagcttcatctccaacatgacctcgctccaagagctttggcttcactccaatgacttcactggccccttgcctgacttctcggggcttgcaagtctctccgatttggagctccgtgacaaccagctcaccggtccggtgccggacagtcttctgaagctcggatctctgaccaaggtgaccctgacgaacaatttgctgcaggggccgacgcccaaatttgccgataaggtgaaagcagatgtggtgccgactacggagcggttctgcttgagcacccctggacaaccttgtgatccccgtgtaaacctgctgctggaggtggcggctgagttccagtacccggcgaagctcgcagataattggaaagggaatgatccgtgtgatggttacattggtgttggatgcgatgcagggaacattacagtgctgaattttgccaggatggggttcagtgggagcatctccccagctatcgggaagattacaacacttcagaagcttattcttgcagacaacaatattactggcacggtgccgaaggaggttgctgctttgcctgctctgacggaggttgatctgtcgaataacaatctttatgggaaactccctacctttgcagcgaagaatgtgctggtgaaagctaatggcaacccgaacattggcaaggatgctcctgcaccgtctggatcaggtggtagtggcggcagcaatgcgccagatggtgggaatggcggtgatggaagcaatgggagtccctcttcgtcttctgctggaatcattgctggctcagtggttggtgctattgctggagtaggccttcttgctgcattaggtttctattgctataaaagaaaacagaagccttttggaagggttcaaagtccacacgctatggttgttcatcctcggcactcagggtcagatcctgatatggttaaaatcacagttgctggtggcaatgtcaatggcggtgcagctgcaagtgagacatacagtcaagcgagcagtggtccaagggatattcatgttgttgaaactggaaatatggtaatttcaattcaagtcctccgcaatgtgaccaacaacttcagtgatgagaatgtccttggccgtggtggctttggcactgtgtacaagggtgagcttcatgatggcacaaaaattgctgtgaagcgaatggaggctggtgtgatgggtaacaaggggctaaatgagtttaaatcagagattgctgtgctgaccaaggttcgccatcggaacctggtgtcactgcttggctactgtctcgatggcaatgagaggattctagtgtatgagtacatgccacaggggacactgagtcaacacctgtttgagtggaaagaacacaatctgcggccgttggaatggaagaagagacttagcattgcgcttgatgttgcaaggggtgttgagtatcttcacagccttgcacagcagaccttcatccacagagacttgaaaccatcaaacatactcctcggtgatgacatgaaggcaaaggtggcagactttggattggtccggcttgcaccggctgatgggaagtgcgtgtcagtagagacaaggcttgctggcacttttggataccttgctccggaatatgcagttactggacgagtaacaacaaaagcagatgtcttcagctttggtgtcatcttgatggagctgatcactggacgcaaggcgcttgatgagactcagcctgaagacagcatgcacctggtaacatggttccgaagaatgcaacttagcaaagacacattccagaaagcaattgacccaacaattgacctcaccgaggagacacttgcaagcgttagcactgtcgctgagcttgctggtcactgctgtgctagggaaccacaccagaggcctgatatgggtcatgctgtcaatgtgctctctactctttcggatgtttggaaaccgtctgatccagattcagatgacagctatggtatcgatctagacatgacactgccgcaagcattgaagaaatggcaggcctttgaggatagcagccattttgatggcgcgacgtcttcattccttgctagcttggataatactcagacaagcataccgacgaggcctccaggatttgcagaatcattcacctctgctgatggaagatagggtagcttgtgtgaaatctcaagcttgacggaagcagaacatccaagtgatcctttttgttcattcctttagtctcctcactcccctgctttttaatgtttcttggtttggctatgtgctgccttgtagctgtcctttgatcatgtatcttgtgatcttgactcaaagaattgcctggaagtttgcaaatttgctaactgttctgttctgccataattctgagcttaaaacaggagcggtgaagggctgctgggctgtatcaacactactccctgctccttaacatcatctcagttgtagtcattgttgctactgtattcttttagttctatgatgatcatgattgtaccagaaccatctcaattattggagaccgtggtcagggcgtcaggccgtctcctaactgtcaaaattattaaccgat

SEQ ID NO: 26220 - DNA, 687 bp, Oryza sativa
  Clone ID: PAT_MRT4530_31031C.1
aaataaatatccgagttagttggaagtgcacaaaaagcttggtttttctgtttctgttacagatataggaattaggaaagcattgcaaaagggattctcacatcacattatgccaatttgaagtaacatccttggtaaaaagatcagaaagtattctccagctattctatgtgaactagatatggcattaggtacaaataatcatgttgactttgcttcctccggctgcaattcttgcactgggatcctatggaagcaagcaagaaactctttgttcccttccgcgccctttatcggagattcaatccagcccttgttgcagaatccaaactgctctacgcctgaaattatcctatctagcacctctttatgaaccagagggtcccgaacaatcccaccacctcctacctgagatcgacgagcttcaaattgaggtttgataagtgtaatcaatgtcgagtctgtcttcattactttgactacagcaggcataaccaagagaattgagatgaatgacagatccagggtcaccaagtcaaccagctgtggcagttcagtaagatatcttaaatttgtacgttcaattactgaaacacgttcatgcactcgaattttttcagccacctgtccatagccaacatcaacaccatatacacctcgcgccgaattcggcacgaggcctcgtgc

SEQ ID NO: 26221 - DNA, 624 bp, Oryza sativa
  Clone ID: PAT_MRT4530_31032C.1
cgggctgcaggaattcggcacgaggcacattcgcctcttctctcgatctttctgctccggtccgtgctgagttttccggcggttctatctctcctccaagacaaatggaatcctctcccctatgcactctctatcctcgcggtggagttctccaataccttgatcatcacctatgcccacccttgccttctcttttcgcccggtctgtcggatctgagaatgatggtgtttggggatgtccaatccactcagtggcggtggttcttggggccgacagatctatgcatgagaaggcataggcttggcagatccatattcttcctgccgcccctttcttgctctgagctcaaagcctgcaggaatgcaggatgaggatgccaccgaggcaacttctgtaggggatcatgggctcatggcggtggcagatctggtgggtagaggacattgtggaataggagaaataggatagggaagcggtggccgagatggagaagggagagggggaggcacagtcgcgcagatgttggatgactgatgacgcatcagtaggcggttgcttggccatggaactgcacactctcttgttttatcaacctacgttttttgttgcactcctgtggttcg

SEQ ID NO: 26222 - DNA, 429 bp, Oryza sativa
  Clone ID: PAT_MRT4530_31033C.1
atgtctgccacctacgaccgcgaagccgagcaccgcgcgctcaacgccaccttgtccggagtccacggcctcgtcgcctcgggcgtcaccgccgtccccagcatcttccgcgtcccggaccccgaaccaccgccgccgccgccgagcagcagccaagaatcgccgccgcttccaccgtccatcccggtggttgacctcggtggcacgggcggggacagggaggcagtggtcgtgaccatccggcgcgccgcggtggacgagggcagcgacaaggcgcggctctactcgcgtgacccggcgagggccgccaagtacaactgcaacttcgacctgtaccagtcgccggcggccaactggcgcgacatgctctacctccgtatggcacccgacccgccgcccgccggtgacctgccggaatactgccggtga

SEQ ID NO: 26223 - DNA, 357 bp, Oryza sativa
  Clone ID: PAT_MRT4530_31034C.1
atggcgcagcagcggtcaaccagccgccaagcggagaagggagactgggggggaggggacgtgcgcgctcaccggggctctggcggcggatcggccgcacggtggaacccgtcgcgtcgagccgcgtcgtgcgtgcgtgggatccggcggggcgaggggctccgcgggaggagtgggggagcagagagccgcggggcgctcgcggttttgcaggaaggaaggaaggaggcggaggcagaggcagcgggtggggtggagtggagtgtgcggaacgaaccaagtcaccaactgctggagacgttgccgatttggggaggagagcaactggacggtataattcggggaatcaggagctga

SEQ ID NO: 26224 - DNA, 574 bp, Oryza sativa
  Clone ID: PAT_MRT4530_31035C.1
cctttctaacattaaaattgcccctggataataaggaccacaccatgaatgcatgcacttttggtctttgataaaatatttgtattgttttgagggtaaagctagctatggagcaacatgcacagattagaaaaaatgtaaaagtgcttgggaagacatgttgaatactgagcatgcagatgcaggtaatcgaaagaaaagttgaaatggatatattatgcttcctaaggtattaagaaaacatctgttttgttctaacccatgtatgccctatgtcagtgacattctgaaagagcatttggctatatacgattcaaaaaaaaaaagatgctaccgaatttttttggtgcaaacatgcttacatgcttgaagagcgaaccatttgcatcttgcagctgcgctgaagtggtttgaacatgtttgcagacaaaattgtggtttgtaatgagctcttcccacttgtaatcctttatggtggagaagaatgccaatcagagcatccacctaaatgaacacccatttgaaagtgtttgtcctttttgttaataaaaattatagcccaattcactttttt

SEQ ID NO: 26225 - DNA, 3077 bp, Oryza sativa
  Clone ID: PAT_MRT4530_31036C.1
atgcctcgcaagaagccaacttcgctttcgccgggaacatcccggtttcctccaagccctggaatctacaagtttcgaccggctatcctttgggactccgcgaggcacaacagattcagcgcacgcaacagattcagcgtactagaagccatcagcgacgaggacgacgattcgttgacggagcgagactccaccacttcagacagctgtggcgaggacaattcgcggaaagacccaccgctgatggaggatggagagattgtgaatcccttggtgaggacattgctcgagctgttcagcgaggaacaaatttctgaaatcccactcatggaaacatatattcgcagatgtggtatcagtgaaggaatgggatctcatcttattgaagagaataactttctctttggagctttcacttctatagtggcttgtccatggattaaaaaagatacaatactgctttccagcatacttctccgtttatcagaaatatggaaccaatcagaatgggtgacaaatctattggacttttttgaagatgctcagttcaggacatctgtgtacaatgttgttgcatttttcgaggatcagctcacaatgtccacgacagaaaattctaatggaatcgaccataaggagaaattaagctattcaactttgtttgcccttcttccactgttacttcccttactcttaaagcttcttcagtatgtgcattcactttggacggatgaagttgcttctaacgtatcagaaaaacttgaaggagctaaatttattatacaagctgagaagccatttggtattattgaagaaactactgaaatgctagatatgaatgaggaagagttgctggaaaatgagataaggaagtggctaaaaaagatccgccaaactggttttttgtacaaggaaacaatgctcgttcctgataaattctgtcatatttctttcacggaagaaaagattgaggaattaggaaaggatcatctttttgaggtgactcgtgaaatatcatatatgcttgctgtaatggcactgcctgaattaaatggtggaatagcaaatgagcatcaatctattgtcagcatagtagaaacatctgcagatttggaatctacttgttcaagctcccttgttgggtatctcttataccatgatgatcttagaccttcaatactaaggctaatcaataatattattggctattggaaagatagtgaagcaaggattaaagttgtgtcattttgtcatatgctgatccaacttgctatttctacgcacaatgataaacttatatcttttgttcaagataatttaattccaatggttgtccgatgcttaatatttgagccaatatcaaacaataatgatcttcttcttctttgtgaagatgcataccgctgcatacaaagagaggaatcagtaagtgaaggtcaacatgatggaaatagtgcagaaatatttgaaaactggttgtcaaagcaaatgatagtggctcattatgaacactcacctcctgatgaactcgaagactttgtgtgcatctgggagattgaagaagaatttactgcttatcttcacacctatactgaaatgttgcataaagtggatggaatcggtgatacaatagaggatgtttatcttaggtgtcctatcccatttgtgtccaagcatgacaataattgttgtccaatttctaattcatgggccatgtcatctatgctgtcatgttctggttatgatgagagtgtgcaagagcttgtggatgacgattcagaggtttggtctgcacttcctggatgttgtaggcaggagacacttgagctcttttgtagaatattagatccctgggagcctcaattccatcctctgatacgtgaggatgacaaggaaatgctacgtgaaatagcttacctattaacttcccgggaagatattcattgtgtgcagtccttccagcctgtctccagcgactttttgctgcatttacaaccttatgcccagaattatattgaggtcaagaacgcaagttctgggtatgacagggtaaaagaacaaataaggttgcatgaagcatttgatacacatttggcctctggtgcattggatgatcatgttcgtcagattagttcttcaaaggataatttcgtgaagattatgcttgatgatgatactttgcatagtcagtttatagatctggattatgatctcctgaaattgtcacatgagcgacgagctaaacttcttagtaaacaagatcaattatgcttatattacaaacacatgaaatgtgctgtcgtaaatttgcagcatagagatagacttgaaagtttgatatgtgagctcgagtcagaaggtttcttccgtgtggatgatgattctattgaatgggaaaaggaacacttttcagaacttgtggacgaattcaatgagcatatttttgctgggattcaccttccaaaatattatgttattcgtggagttatggattatcgggaaatgttacatatgaaggatagcacttgggatgatgctttcacagtggttgttggtggagcattctgtagatggatggaagatcgtgatctgttttggatggagacaagatactataggcatcgttactatgacatcattcaagagccagtaaaaatggtattgacccatattacctccatcttctttcttgctccagagaacctggagacaccattctaaggcaacggagaattcaccgccggaatgaactagacttggctcaagactgctgcaacacgaaatcaaggagtacctgtctgtcaatcttctaggactctagggcgacaatagtaggcatacaaagttatcaaccaaacctccatggttccagtctcgcacaccaagttttgtgatcacctggaattaagcagagctggatgcttttgattaatcaagtccacctgtaccacaaacacacttgcacatgtgtatatatcctaattttcatcatgttaccaggctacattttgacatatacagacacacccacaacgtgcaaaaaagttcaagcaacagacaaaaaaaaaaaaaaaaaa

SEQ ID NO: 26226 - DNA, 568 bp, Oryza sativa
  Clone ID: PAT_MRT4530_31037C.1
acatggcgcgacccacggtatgcatgtccgttgaccccagggagcccgatcgggatctcctggtacaaccacagcgtccggctacagacacggggatgaaattaagatatgattataagttttatatacttgggtatgtcactgcttctgaataaatatggtgctggtctcaccataattaattaaggggaccggccaacacattttagcttatcggtctcacaatcgtggaccttagtccattcccaacctaatggaatggtgtccatagcattaaataatctgccacctaggataaaaaaatgatgtgacaagtgaataaatgaagaaagataagaaaatcatgttttgcatgagacatggtttatacacaacatccaatacatcatgtgagataagtagcattaaatttaagtatggaatggtggtgtttgcattgtaagagtagtgtctagtactagtttcttgatgatgaggagtttataaaaactatgtctattgtcttgggttgagaatgaccttacaaaattcaaatcaataatcattattgtccaaaaaaaaaaaaaaa

SEQ ID NO: 26227 - DNA, 879 bp, Oryza sativa
  unsure (1)..(879): unsure at all n locations
  Clone ID: PAT_MRT4530_31038C.1
cggnaattcccgggtcgacccacgcgtccgcatgttccatgtcatctatgctgtcacgtaaaataacttcaatgtattgcaagagagagactgaacaaaaattcaagtttctttgtaaacttatcacatttaaaccctacattaagtgttctggttatgatgagagtgtgcaagagcttgtggatgacgattcagaggtttggtctgcacttcctggatgttgtaggcaggagacacttgagctcttttgtagaatattagatccctgggagcctcaattccatcctctgatacgtgaggatgacaaggaaatgctacgtgaaatagcttacctattaacttcccgggaagatattcattgtgtgcagtccttccagcctgtctccagcgactttttgctgcatttacaaccttatgcccagaattatattgaggtcaagaacgcaagttctgggtatgacagggtaaaagaacaaataaggttgcatgaagcatttgatacacatttggcctctggtgcattggatgatcatgttcgtcagattagttcttcaaaggataatttcgtgaagattatgcttgatgatgatactttgcatagtcagtttatagatctggattatgatctcctgaaattgtcacatgagcgacgagctaaacttcttagtaaacaagatcaattatgcttatattacaaacacatgaaatgtgctgtcgtaaatttgcagcaagggaaaaggaacacttttcagaacttgtggacgaattcaatgagcatatttttgctgggattcaccttccaaaatattatgttattcgtggagttatggattattcgggaaatgttacatatngaaggatagcacttggggatgatgc

SEQ ID NO: 26228 - DNA, 258 bp, Oryza sativa
  Clone ID: PAT_MRT4530_31039C.1
atggggcctcgcctcctgctgttcgccggggcaccgaggacgacgctcgtcaccggcctttgctccactccacagctggtcgccaccgtcgaccttcgctcggccgggcgcggtccactcctgcgtcggcacggcgggagcgggagcggcaacaggggaaccaccttaccccgagcggccacggcgggtcagggaggtgggcagtgccgccggtggccgggctgcggcggcggttggggtcgtgtcgtcgccttgtcg

SEQ ID NO: 26229 - DNA, 1843 bp, Oryza sativa
  Clone ID: PAT_MRT4530_3103C.1
gcaattgtaatacgactcactatagggcgaattgggcaccgggccctccttcttttttttttttttgtaagaattattgtcgaggattagctcattttggtatataatacggcaggctgtaataattgtagtgaggccgcaacatcattatgactaatagcaagctccttaatcttaagacaacaaaaatggtagcataacatttcccacaaaagagaaatcataacatgcatcagctactttaggtgggggtacattaaaaaaaagaatagaatgaactcagtagctaccgcggtctttggatgataagagacgctaaatcgtctagtccgaatggcatcgaattgttcttactgctgggcacactgtacccttggtccagctccagcatcctcgtcgtcgtcttcatcatatgcttcctgccgcctgtgctgctgcctgcgcctcatctcctcttctatgttgacatcatgcatggtggtctcctcacattgatctagctccatgtctgacaattgattcctgggtcgtggtggcaaaatcttctcaagcgatcggcattggccaggagtgagtgcaccaggctcaggaaactccacgttgaattcaacaaaaagacgacctttcatgaaagggcggccatgctggggcatgccttcatcattgatggccttgtgttgaccaggttttataacctcccctggattagatttgattaggagttgccgaccatcaagatgggttagaacaaactggaagccacacagagcctcggtcagggagattgtgtgctcagtaaagaggtcatcaaacttcctcttaaattttgggtggtctttaagttgcaagacaaaaactatgtctcctgtcactgtatcaggagcttcatcagcttcaccctggaatacaatcttttggccatgttgcattcccttctcaacatgaacctccaagaccttcttctgctggactactttgtttcccttacaactcgggcatttatccttgtcacttatcatctcacctgatcctctgcattcagggcaaacagtgttcatctgttggatcatgccaagcccaatttgtcttgttattgttctcattcctgcaccatgacaaccatggcaagttgctgctgccccactcttggatcctttacccttgcactttgtgcacagagcattccgtgacaaagacagttttttggtagtaccattatacaggtcttctaaagaaaccttcatagtatgtaccacatcttcgccacgcttttgtctgtgtcctctacccccaaagccaccacgattctgaaaaatttgctcaaataaatcgaagggactatggaaatcactgctgctgcctcctcccattccttctttgagtgcatcctcgccatattggtcatagatttccctcttttcaggatcattaagaacctcgtaagcttgagccaattctttaaacttctcagggtctccacccttatcagggtggtttttaatggcagctttacggtacgctttcttcagctcatcctgggttgctgtcttagatacaccaagcacctcataatacttggtattgttactcttctttggcatgcgtccgtacatgactgataaaaagggcttccggaagaggaagaagcgaccgctcctagatcagatccagacgacggcccggtggagcgggacgacgccgcgcagccgccgtggaggagaagaggagctctctccctcgcgctcgcgccgaggcggttcggtgcgaggaggcggaggcgtgtggggagggggggtggggggggtgtgttcggcggcggcgcggcgagggagagagagaggcc

SEQ ID NO: 26230 - DNA, 1059 bp, Oryza sativa
  Clone ID: PAT_MRT4530_31040C.1
gattgttatcttagttctcctattaaatttgtgtccaagcatgatactgattgttgtgcaatttctcatgcatgggccatgtcaactatgctgtcatgttctggttatgatgagagcgtgcaagaacttgtggaggacgattcagaggtttggtctgcacttcctggattttgtaggcaggagacacttgagctcttctgtagaatattagattcctgggagcctcagttccatcctctgatacgtcaggatgacaaggaaatgctacgtgaaatagcttgcctattaacttctcgggaagatattcatcatgttcagtccttccagcctgtctcaagcgactttttgctgcatctacaaccttatgcacagaattacattgaggtcaagaacgcaagtttggccaccgttcttgtcctgaaagtgttgtttctccaccagtatgacagggtaaaagaacaaactaggttgcatgaagcatttgatatacatttggcttctggtgcattagatgattttgtccgtcggactagttcttcaaaggatgatttcattaagattattcttgatgatgatattttgcgtagtcagtttacagatctggattacgatctcctgaaattgtcatatgagcatagagatagacttgaaagtttgatatgtgagcttgaggcagaaggtttcttcagtgtggatgatgattctattgaatgggaaaacgaacacttttcagaacttgtggacgaattcaatgagcatgtctttgctgggattcaccttccaaaatattatgttattcgtggaattatggattatcgggaaatgttaaatatgaaggatagcacttgggatgatgctttctctgtggttgttgatggagcattctgtagatggatggaagatcgtgatctgttttggatggagacaagatactatagccattgttactacgacatcattcaagagccagtaaaaatggttagtaaacttactctggtattgatgcatattagctccattctcttccttgctccagagaacctggagacaccattctaa

SEQ ID NO: 26231 - DNA, 379 bp, Oryza sativa
  Clone ID: PAT_MRT4530_31041C.1
atccttttgagacattggtgttgtattggaagttacatgaacaatatgcaaatagctccatattttaacaagtgaaaatggggatgtagatatataggattaaatggcattgatgtatcaggatggataggcttgatagctgtgactctctaggttctacagtggattgcattacagatacttccacttgtggtgtgctgtaactcatcatacatgacctccaattatgaatgcttgcacagtttcagctgttggaaatatatcgctgtttatataacatacaacaatttggatatataatattcaacaattggatcttgtgacttagcagctgatcaatgttttgatgcccgtgcaaaaacaaaaaagcaccttggat

SEQ ID NO: 26232 - DNA, 2209 bp, Oryza sativa
  Clone ID: PAT_MRT4530_31042C.1
atttacagcatcatacaaatacaattcctctaatttctggaagcacaagtgttgcgcctaaatttcttcgaataaccacagcatcaagaatctgtgagatgtggaattcagggcccatagtcaatgagaatgtaaccaaacccttagactcctgaacatttgatcttggtttagaccagcagggtctaatctcctcagcagtctcctttgggagatccactccagccttgttgaccttagtcatttcagtagtatctgcaattttaatttggctgccaccctagtcgctcagcatgcgcgctggggctccccggccgcctggccccccctttgctttggttgggttccgtctgctcttttcagccgaccggtggctacgctgaccacagatcttttctttttattttttctattggggccatcttaaacgatgccacgtctgttaagtttttattcttagttaatttatttagcattaaaaagtactgtagcagtagacattttctgagcatgtcacaacgtacaacttcatcttacaaggttctgagctcactcacattgcaattctaatgaaccgagaccattgtttggcctgcgtcaactgtgtcgcaaacttgcaatctatgctgatttctatttccctacgatagctgaccttcctagcacatcttaggagaaaactcggtctatgacaaacacggccaagtaagccatgcaatttctgtttcttggcctaaaaacgacgtctatctgacaaaatttcccaatgtgttctgtacaaggctcatgccgaatccaacttgttctgcttgagaaattccaggtccttgagttgccgctgcgctgcttccttggacacggtcttgacgccggggcccttcctctcgccggcagccacctgcttcgccatggaggtcactatcctctcgaccgcctgcctcccgacggaggggaagacggcgttcagcattttgcacagcagcttcacgtccacgtcttccaccatgtcctgcccgaagcagcacacgtagatggcctccagggccttctccgcccgcgcttccattggtatctgtggcgccggagccttcagctttgctcttttctcctttgccgtcttcatcatgtcgaggaacgtctcctcctcgaactcgatgtcgttggagaggcggagccgcgcgacgccttccaagatctcctccgttttcagcagcccgccaccaacggcggccagccagcagcacagcagaacgtagaagggatctcctgccttgccgcggcgttcgttgaaatcgtagaaggcctgggagtccatgacggtgcacttcttgctgacgcggcggcggaactcggcgaagtcgatcatgtcgccgccgacgccaccctcgtcgctcaggatgcgcgccacgaggcccaccacggggagagccccgatgaggcggcccgcgatggaggacggcgagttggggttcggctccatgtacgccaccaccgttccatgccgccggcgccggttgggggcggacggcgatggccggcggtggcgcggcaggaaggccgaggcgagcgagaacctgtgggcgacgggtaacgtccccattgtgtgtggtggacggggcgcgcgccacggccagcgggcagggtcgcggcgcaggaggcgaggtggcggcgaggttctctctccacctcgttccctctctctttctctgtggtgccgtcgggagagccgagcaaggaggaggcggcggatcctaacaggcggtggaggaggcgaggcgaggtggcggcgaggttggctctgcaagcgtagtggaggaggtgaggcgagcgtgacggcggagaagtcgaggcggttctgctcgccgccgtctcgagatccctcggcgaccctcccacgactctcccggcccgcgcggcgctgcagcgcgccaggtcgtccgtctttatccgtcccttgcctcggcaacttggtgcgtttcccgtcgttggcgtcaaggtagccgcaggtgcggtagatatccgaccagcgaagcgctccaatcgccgaacaatccggcggtaacgttaaatcgtagtaagaggaagctctcacggaggaagtggtcaggctcgccgtggcataaacaaagagggaaacgcccaggtgtctcgccaccaggcgcgactcgacacaagcagtgatgcaagctgccccctgcttttcccccat

SEQ ID NO: 26233 - DNA, 252 bp, Oryza sativa
  Clone ID: PAT_MRT4530_31043C.1
aagcttctcaacgctgatcggaaaatccttttcgaacttataagagatttggaatcaatgtttacacacgttataatctatatataaccaagtaactaaataaccaaaagatgattgtagctcataaaattattgcttcttataactcaaaaaattctttatgactgcatgcataaaaagcaccataattttttgtaaaaatggaagaaactctctgattaatttattatcctttccaaaaaaaaaaagctt

SEQ ID NO: 26234 - DNA, 1053 bp, Oryza sativa
  Clone ID: PAT_MRT4530_31044C.1
atgaagctaagcaacatgacagcctttttgtcacttttgatcttcatccttctggttgcgatagaggctagaaatttggtgggagtggaacgggtagagctgccaaatcctgcatctatggtaacagcatactggcagaagatgcttccccactctccaatgccaacagctatactcgagcttttgaaccctcctactgatgttaatcaaggtgttcatggcaatggctatgatcaagtttatggcaacggatatgacggcggctacattaatggatatagtcattcctacagtaatggctattccaatggctattttcacaaggcaaacctccatttcctagaggatgccttgaaaccgggatccataatcactccctacatcacggggatagccacgcgtgctccctttcttcgccgggacattgcggattcaatcccagtgagtacaaagaactttgccgacattctggcaatgttttcgcctatatccctcgtcatggccgacggtatacaatcggcgttggacacttgtgagcaccaccgcccgatcaagggagaagaacgtgcgtgtgccacgtctatcgagtcggtggttgagttcgctatgtctgtgctcggaacacgtgacctccgtgccttctcccccgatgtccccccagaggggatcatgccaggaaacatgtacaaggtggtagcggtaagaacagtcgcgggcttaaggggggacaccgtgacgtgccacaccatgaggttcccattcgctgtgttctactgccacgcgatcaaccctacccgagtgtacgcagtggtgctggagagcgaggaggatggcagcggcagcggcagcggcacaccggagaagatggaggcgctcgccgtgtgccacctggacacgtcacgatttgaccccaagactccattgttcgtcgagcacaatctcaggccgggagatgcgtcggtgtgccacttcgttagcagggacagcgtgatctgggcacctgtagctgctgtgataacacatggagatgaacaagtctcaattgccgagtag

SEQ ID NO: 26235 - DNA, 294 bp, Oryza sativa
  Clone ID: PAT_MRT4530_31045C.1
aaacaaacggggcgtaaaaaaccctgcctttgccccggggaaaagattgatataaccgctacaaaaaaaacttaggacaaaaggaaaaggcttaacatataccacacatttggccgagctcaccctcacagaattggggttcaaaaaagggacggacaaacaacacaggttcagctaaaaattccaaaaaacaggggagttcagggggaaactaaaaaagaacacatgggatttgggggggtcattccggccccggaaaatatttaacttaagcgggggaaaacatctcaaagg

SEQ ID NO: 26236 - DNA, 2480 bp, Oryza sativa
  Clone ID: PAT_MRT4530_31046C.1
ggcgtgccgaactgtaaagctcacgggttgggcgaatctccactcctcactcgccccccactgaaatcgccaaaaacccaactgacaaacccccccaccggaatcctcacgcacacacctcgccgcggaagctgtggcgtccgcgtaggagcagctgtttcttttttggatccaatccaatcggataagcagccatggctgtgaaggcgagttctgcagataacaggaccagaagcaccgtgtcactatgcatagtgattggcatgtgctgcttcttctacatccttggggcatggcagaagagcggatttggaaagggggacagcattgcgctggagatcacgaagcgaacggactgcacaatcttgcctaaccttagcttcgacacgcacctcgctaagcaggcaaggcctcgcgatctcgtttcgccggcgaagaagtttaagccgtgcccggatcgctacacggattataccccttgccaagatcagaacagagcgatgaagttccctcgggagaatatgaattacagggagcggcattgcccaccgcagaaagagaagctgcactgcctgataccgccacctaagggatatgttgctccattcccatggccgaaaagtcgggactatgttcctttcgcgaattgtccctataagagcttgacagtcgagaaagcgatccagaattgggttcagttcgaaggcaacgtcttcagattccctggtggaggaacacaattccctcaaggagctgataagtacatcgatcaacttgcatcagttgttccaatcgccaatggaactgtcaggactgcattggacactggctgtggggtggctagttggggagcttacttattaaagagaaatgtcttggcgatgtcatttgcgccaagagattcacacgaggcacaagtgcagtttgctctggagaggggtgtcccagctgttatcggtgttcttgggacgataaaactcccttacccatcaagagcctttgacatggcccattgttccaggtgtttgattccatggggagcaaatggtggaatatacatgatggaagttgatagggttctaagacctggtggatactgggtgctttcagggcctccgattaattggaaagtgaactacaagggttggcagcgtacaaagaaagatcttgaggcggagcagaataaaatagaggaaattgctgaccttctttgttgggaaaaagtcaaagagattggtgagatggcaatatggaggaaaagattaaacactgagtcttgtccctctaggcaagatgaatcaagtgtgcagatgtgtgactcaacaaatgcagatgatgtctggtacaagaagatgaagccttgtgtgacacctattcctgatgtaaatgatccaagtgaagttgctggaggtgcaatcaagcccttcccaagcaggctcaatgcagttcctccaaggattgctaatggcctgattccaggtgtttcatctcaggcctaccagaaagacatcaaaatgtggaagaagcatgtcaaggcttatagcagtgtgaacaagtacctcctcactggaagatacagaaacattatggacatgaatgcaggttttggaggatttgctgctgccattgagtccccaaaatcttgggtgatgaatgccgtgcctacgatttcaaagatgtcaactctaggggctatttacgagcgaggattgattggcatataccacgactggtgcgaagctttctctacttacccaagaacgtatgatcttatccacgctagtggccttttcaccctgtacaaaaacaagtgcaacatggaagacatcctactggagatggaccgcgtcctgaggccagaaggcgccgtcataatgagggacgatgtcgatatcctgacgaaggtgaacaggctcgccctcggcatgaaatggaacacgaggctggtcgatcacgaggacggccccatggtgcgtgagaaggtgctgtatgctgtgaagcagtactgggtaggcggaaaccagactgcagcagctgcagcatgaagcaggcgtaaatcctaacacaaaagatggaagaactctgcaatccatcctgaactgacttccaggaaaggtaagatacgggagtcatttagtgagaggccaggtgatcttgtcggagtggcgatgaagaagcaacccgggctttcttggttgctctgatgatcggctggcgtatattgttgtaacaattttgtaatttcatttgtcactctctagtgttaactggttacgatgcttaattcaaggtttgcttgtcagttgtcacggtgatttcttggtttcgcgtcttctgtaagccgctatgtaatcagtttgcctacagaagagaagagaacgtccaggttaagagtagtctgcttatagtagcattgttgcagcagccagcaagatagatgaaagattttgcttcagaattaataaaacgtctcataggtg

SEQ ID NO: 26237 - DNA, 676 bp, Oryza sativa
  unsure (1)..(676): unsure at all n locations
  Clone ID: PAT_MRT4530_31047C.1
atgcccacctcgctcctccccaccacctccggcggcgggcacctctgcccctcaccgcctccgtctcgccgccgacgattctgccaggtcgccgccgcggcgggtggaatcggccgccgcgccgtctccctcgccggcgtcgcctcctggctcaccgccactgctgccggccgggcagacgcgagcccgtttgacaaatacgtcaagaagaagaagctggagccattggagacctacgttccggcagtactgttgactcaggaccaattcagggatctagagaagtcattagaatttgagaagccaagatatgatgagagcagatcattacttcgttctggtccagcatcttctctgcgtatcaatattcgagcagtggcgcagtatgcttctagcagtggtcaaggcaaagctgcctctgatgcagtggacgaatgcttacgcctccttcagactgtgccatcagcagtgctggacaaagggaaggccattgccgatgcataccggactcctacggatgattatgaaatgggcgatgcaacagagttggatccaagattgaaacaactacaggatattctttgatgctgaatttgttaacacatactgaaagttttgtcaatgtgactgtantatatgtgaattgtgaagtgaagtacagttcgtantttttgcc

SEQ ID NO: 26238 - DNA, 323 bp, Oryza sativa
  Clone ID: PAT_MRT4530_31048C.1
cttcgttctggtccagcatcttctctgcgtatcaatattcgagcagtggcgcagtatgcttctagcagtggtcaaggcaaagcgcctctgatgcagtggacgaatgcttacgagcattggaagatcttgactcactgctactacaagcatcacggaacaacccatcagcggctgtcgatgtcatgaggagcaaaatcagtgtagcccttggagctttagacaaccttcttcagactgtgccatcagcagtgcttgacaaagggaaggccattgccgatgcataccggactcctacggatgattatgaaatgggccgatgcaac

SEQ ID NO: 26239 - DNA, 418 bp, Oryza sativa
  Clone ID: PAT_MRT4530_31049C.1
ttacaagtacagaatgtagatcagtaggggaaagcatgctaggatccacgggtggaaatcgacctcgaggttccacgggtggatcttcgagttgatctcgtggtcgacggggaaccgcgacacgccacggcccccgaccacatcggccatgccgtcgtcagcgaacgagaggaaggacgaggcggggctctcgtcgaatccggcggcggtgcgggaagaggaggaggagaggcgctggtcggggtcgctccaccgcggcacctggtcgagcgtcacggccggctccaccccacccacgcccgtcgccgccgccgccgaggaggccgaggccgacgcagctgttggcgagcgctggatcagagccgcgagcgtgagggtttggggaaagagatcccgtcgttcctcgggagccggctag

SEQ ID NO: 26240 - DNA, 4087 bp, Oryza sativa
  Clone ID: PAT_MRT4530_3104C.1
ctacgcggcactattgaggcgattgatgctggtcatggactcgaggcgtctcagctttccggtcgatcggccgcgagtccactccgccggcttgtcctcgccaccgccattgctgatagcaacaacgacttcaccgccggcctgcctccgtcgccgccgagtggtgcctccgccaccgttcatgggcgtccacgtcttcaccaccggcctgcctccgtcgccgccgattggtgtctccgcctacacggctggcctattatgccgccgctgttgggcgtctacgacttcaccgccggcctgcctccgtcgccgccgactggtgtctccgcctacacggctggcctattatgccgccgctgttgggcgtctacgacttcaccgccggcctgcctccgtcgccgccgagtggtgcctccgcctacacggctggcctattatgccgccgctgttgggcgtctacgacttcaccgccggcctgcctccgtcgccgccgagtggtgcctccgcctacacggctggcctattatgccgctgctgttgggcgtctacgtcttcaccaccggcctgcctccgtcgccgccgattggtgccttcgcctacacggctggcctattatgccgccgctattgggcgtctatgacttcaccgccggcctgcctccgtcgccgccgagtggtgcctccgcctacacggctggcctattatgccgccgctgttgggcgtctacgacttcaccgccggcctgcctccgtcgccgccgagtggtgcctccgcctacacggctggcctattatgccgccgctgttgggcgtctacgacttcaccgccggcctgtatccgtcgccgccgattggtgcctccgcctacacggctggcctattatgccgctgctgttgggcgtctacgtcttcaccgccggcctgactccgtcgccgccgattgatgcctccgcctacacggctggcctattatgccgccgctgttgggcgtctacgacttcaccgccggccttcctccgtcgccgccgactggtgtcctcgcctatacggttggttggtcacaccaccgttcatgggcgtccacgacttcaccgccggcctgcctccgtcgccgccgactggtgcctccgcctacacggctggcctattatgccgccgctgttgggcgtctacgacttcaccaccggcctgcctccgtcgccgccgactggtgtcctcgcctatacggtcggttggtcacaccaccgttgatgggcatcgtcatctacaccgccggcctgcctccgtcgccgccgactggtgtcccagcctatacggtcggttggtcacaccaccgttgatgggcatcgtcatctacactgccggcctgcctccgtcgccgccgactggtgtcatcgcctatacggttggtcggtcacaccaccgttcatgggcgtccatgtcttcaccgaccggctggccttcgccgccgccgactggtgtttctgcctgcacggctggcttattatgccgccgctgttgggcctctactacttcaccaccggcctgcctacgtcgccgccgactggtgtcatcgcctatacggttggtcggtcacaccaccgttcatgggcgtccatgtcttcaccgaccggctggccttcgccgccgccgactggtgtttccgcctgcacggctggcctattatgccgccgctgttgggcgtctacgacttcaccaccggcctgcctccgtcgccgccgactggtgtcctcgcctatacggtcggttggtcacaccaccgttgatgggcatcgtcatctacaccgccggcctgcctccgtcgccgccgactggtgtccccgcctatacggtcggttggtcacaccaccgttcatgggcgtccacgtcttcaccgaccggctgaccttcgccgactggtgtttccgcctgcacggctggcctattatgccgccgttgttggatgtctacatcttcaccgttggctcaccttcgttgccgtcgactggtgtttccgcttacacggctggcctattatgccgccgttagtgggcatcttcgctttcaccgtcgaccgccttcgtcgccgccgactggtgtcttcattgttattgatggacgactttgttcccacattggccacttctgccatcaccaaggggaatattacaaagctaagatccagatccagatatgcataaaagggattcatggctttaagcttatctcttacgctctaggaatggatcagtcagaacatcaccaccggccgcctcgtccgccgccgactggtgttctcgcctgcacggttggcctattatgccgccgttgttgggcgtctacgtcttcaccgaccggcttgccttcgccgccgccgactggtgtttccgcctgcacggctggcctattatgccgccgttgttgggcatctacgtcttcaccgaccggccgcctcgtccgccgccgactggtgttttcgcctgcacggctggtctttatgccgctgttgttgggcgtctacgtcttcaccgaccggcttgccttcgacgccgccgactggtgtttccgcctgcacggctggcctttatgccgccgttgttgggcatctacgtcttcaccgaccggcttgccttcgccgccgccgactggtgtttccgccagcacggctggcctattatgcagccgttgttgggcgtctacgtcttcaccgaccggccgcctcgtccgccgccgactggtgttttcgcctgcacggctggtctttatgccgccgttgttgggcgtctacgtcttcaccgaccggccgcctcgtccgccgccgactggtgcttccgcctgcacggctggcctttatgccgccgttgttgggcgtctacgtcttcaccgaccggctcgccttcgtcgccgccgactggtgtcctcgcctgcacggctggcctattatgccgccgttgttgggcgcctacgtcttcaccgaccggccgcctttgccgccgccgactggtgtttccgcctgcacggctggcctttatgccgccgttgttgggcgtctacgtcttcaccgaccggcttgccttcgccgctgccgattggtgcttccgcctgcacagctggcctattatgccgccgctgttgggcgcctacgtcttcaccgaccggctcgcctttgccgccgctgactggtgtttccgcctgcacggctggcctattatgccgccattgttgggcgcctacgtcttcaccgaccggctcgccttcgtcgccgccgaccggtgtcctcgcctgcacggctggcctattatgccgccgttgttgggcgcctacgtcttcaccgaccggctcgcctacttcgccgccgactggtgtccacgcctgcacggctggcctattatgccgccgctgttgggcgcctacgtcttcaccgaccggctcgcctttgccgccgccgactggtgtttccgcctgcacggctggcctttatgccgccgttgttgggcgtctacgtcttcaccgaccggcttgccttcgccgctgccgattggtgcttccgcctgcacagctggcctattatgccgccgctgttgggcgcctacgtcttcaccgaccggctcgcctttgccgccgccgactggtgtttccgcctgcacggctggcctattatgaccggccgccgcatccgcagctgactgctaccactactgatggacatcatcgtcttccgttgccgactggttatgccgccgccgactagtgcttttatcttcacaactgcgcgtcttcgctaccagttcacttcatcacggcgatgcaactttgtcatcatggtggagcgacttcatctttattatcttcggcactggcaaactctattgctgctacttcgcaagttttactacttcaccaaccacgacgtctttgtgaacctcgacatctcggcatgcaatgccatgatattttactacaacaagtgactctccaatattcaggatttctacttggacaccttcaacacatatcttcaatcaagcaatgactactcgacgacaagaagctataattctcgactctatgttcagttgtttcccaac

SEQ ID NO: 26241 - DNA, 390 bp, Oryza sativa
  Clone ID: PAT_MRT4530_31050C.1
atggcgccggtagatcctgctcgccattgtttggttcgatttttgctaaggtttgggtgcgggctttcgttgtgggtcttaccgggggctaggggatttgtgcacagcaaggaggaggaaggcgagtgcaagtacatccgattgaagcgccacgcattgccaaggtcgttcgcacacaagttctgtctgccagaggactcggacaccggcgacatctccacacattgtgagaatggcctgctcatggtcatcgtcaagaaatggatgctgcctgagaagaagaccacgtctgcagcccttctccccatcggccgccaccttggaggcctagacaaagatggggaagagagaaagagagagggggaagaagattggtttgctgacgtatga

SEQ ID NO: 26242 - DNA, 219 bp, Oryza sativa
  Clone ID: PAT_MRT4530_31051C.1
atggatgaggaccgacaactgcttctctcccctgccatcgcactggcaccggcagcgtctttctaccgccatccggagaagacccctgagaaggcgatggttacgagattcttggcccaagtccagcctgccaagcccaagcttgcaaacgggaaaaagaagaagagaagaaaattaaagcgtgccagcgaaggctgtgtgaatgaagtcaaccaatga

SEQ ID NO: 26243 - DNA, 501 bp, Oryza sativa
  Clone ID: PAT_MRT4530_31052C.1
atgcggctggcgagcgggtgcacgttcaccaccggctggatgcaacacctcgccgcctccgtcctccggcgaccgccgagaggcagtgcgagaagggaggaggagagctcgcccgagggggtcgttggctatgttgagctcattggtggcgacagtagcagctcagcagcaatgggagaagacacgcaggaggccaaagccttgatgattgccattgttccccacctccaccggtggtactctcgcctgcgctggccgctcctggctgggcgcttgcgccgtgtgggctgcttgccagtgttggttgacaaatgtgcattgcgaagattaaggagtaccaccttcttgcatacaaagacgttcactcctgactttgggatattatggttcaaggcttccaggcttctagctgagtggtcctctttggtaacactccatctgccactgctttatattcttgcattttcctcaaggaaagaattgtttttgacatctcattga

SEQ ID NO: 26244 - DNA, 473 bp, Oryza sativa
  Clone ID: PAT_MRT4530_31053C.1
cggacgcgtgggctattttgtcacaccctatcctggcaccatcatatagatagtgccaaggaaggtgtcccacaggggaatggtgaatcatttcttgcagaaccacgatgttagtaccaattccagaatatagttgctgatacacacggtaattaaatgaatcattgcaatactaataattaatgatacctttagattgcatcttcaggtaaccctagaataaaaccctgaacctaaaacagcaataacagaacgtaacgtagctagaacgtaactaaagaaatgctatatgttcgccggatttaatctatgttccgatgatcgtttttatcccgagttttgcgcaatcgggcatgcgatgatttgaatgcggattcactccgattatagagaaaacctaaagaggagatcgagaaagattcggtcgcatttgattggggggatcggcctcagcatcatataagcatgggact

SEQ ID NO: 26245 - DNA, 1590 bp, Oryza sativa
  Clone ID: PAT_MRT4530_31054C.1
attcccgggtcgacccacgcgtccggccctctcttttttttttttttaaacatgcaaggaatgctgttttttaacaaaatggtaaaagctagcctacaaaattagaggctaattctgacaagcaactccggtatacaaagtagaccaacacacgatggaaaaaaggcacaggcaacaccattatttgttccgattaaccgtgacaatatgattcaactgcgggcaaaatttaaaggtgacaccagtaaaaacaatgctgcgatgctcttagaccgttcacgcacgcggcttcccaccaagggttgggaactgagcctgatcttcaatggatggtgcagatgtagaatatgggccacgttggtaaccaccaccatatccacgaccgccacgatctccacgcccccttccacgaccacggccgccatagtacctttctccttccgcaggcttcaggaactcattgatgctcacagacttcttggcacgctcatcgcgctcagcattttccttcttcttatccttgtcagaacccagcttaatgaaaatttcatcatttcctttcttggtagaaagtggctgcatagactgcaggtccttatcgacctcaaccttcctctcttcagccttgaaagcaagaagagctttccgcttttcctcccttaatttctcaaactcctcaagagtcatctccttatcctcttccttctcttcttcctcatttgcagcaccctccttgttatccttctctccagttggagcatcatcctgctcaccctgtttctcagcaataggagcactctcctcaaccttcaaggcttcctcagtctcctgtgcgggcaagagcctcatcagtagcagttccccagttcccacgccctgcaccatcacgcttcatctcataaccacggccagtaccactgtggcgctcataatttctccggggcggcctctcagaatcatccccatattcaccatttcggtagccaccacgcctacctccatggaatggagctcgagggcctctctccctgtcaccttctccaccagcagcaacagccccatctccatagcctccaccgtaaccaccctggtagccattggcattgtctccaccaaaatcacggttctggccatatccccgtccacctctgccacggccacgctcaccacggccaaatcctccgcgtgagggtgcaccaccaccccgtgactccctcacggcctgtgaagggggagccggcttggtggggaacttggcggcggccgacgcggcctgggccgcccttcccggcggccggagccgccgccgccgccgcggccttcttcgcctcggccttctgcgccgcggccgccgccgcggccagcagctgcgcggggtcgtcgttgtcgtccgcaccgaggatgtcgaaggggttcgcggtcgccataggtgcgagttcgacggcctacaaaaaaaatcacgctacaagctcgctatcttcgtgtgtggggtgggtgactggggaactgacccctcctggctacgaggctcgcctgccggactgcatcgccatggctctccagccgccaagatcgagggcgtgaaaaggc

SEQ ID NO: 26246 - DNA, 379 bp, Oryza sativa
  Clone ID: PAT_MRT4530_31055C.1
acagtaaaccaattgttttattaggccacaaaattggcatgatatcatttaactgtgaaacaggggacatgatactatattaaataagacaagaaattgccacctcgttgtttccagaaacgaagagattagacaaattttacatgagactattgatttaccacacaaaaaggttttccacaagcacgatcaacttctttaaacacgcgccgcgtgggaacatctctggctcatgaaaggttagtgcggagcttgatcttctggacgaatatgggaaagacacacgggaggggtggaccgccaagggctacttgcaaagataggacacattggacggtggatttgggcctgtcaaaaggcatgggccaaccagaaattg

SEQ ID NO: 26247 - DNA, 380 bp, Oryza sativa
  unsure (1)..(380): unsure at all n locations
  Clone ID: PAT_MRT4530_31056C.1
tttttgngngtgaatggtgcacattgcatagatgtacacntnagatgcattttttttggtacattgcataattggggggacacacnataatcgcctagtggttatgcctaaaccaaaattcatttgatttgacacgggaaaaactattagctacaggagggcatcatatactggtgagcctgaatcattacaaatttatatgcaaaggttcacaacttacaaggttatcagtgccttgcatatatataaacagatcagttttgatggacagtgaggctcagattcagtgtttgttcatgtactgggaggtngatcatattanttgtggtcagcgcagacctcaggttcccattctccacaacttngtttacanatagngc

SEQ ID NO: 26248 - DNA, 175 bp, Oryza sativa
  Clone ID: PAT_MRT4530_31057C.1
caacactgctgcaagcaagaccactgaaaaggctcccagaaatgtatcactgaacaatatggtcagacaatctcctccgaggaagacgacgccggcgacgatcggcgcctcctgggagtcgcttccatcagatctccagagcattgggctggaagtcatgagttaccgggatgct

SEQ ID NO: 26249 - DNA, 847 bp, Oryza sativa
  Clone ID: PAT_MRT4530_31058C.1
tcgttcgtttacgtacgttcaaatacaacgttaagttcacgttcgttcatgttcacgttcgttaacgttcgttcacgttcacgttcgttcacgttcacgttcgttcacgttcacattcgttgacgttcgttcacgctcgttcgttcacgttcaattctcgttcacgtacgtttcgttcgttcacgttctcgttcacgttcattcgctcgttcacgttaattcgttcgttcacgtggcggcagcggagcgccggtgtggcggcagcggagtggcggcggggcggcgcggcggcggcgtggcggcgcgcgcggcatcggtgtggcgtgcagcgcggcggcagcgcagcgcgcggcgcggcggcagcgttgcgcggcggtggcgttgtgcggcggaggcgtggcggcgcggcggtgccgtgacgcggcggcgtcgtggcgtcccggcgtgtcgtgccgccgcggcgtcgtggcgcggcggagtcatgttcagccgcgacgacgtcggcgtcggcgtcggcaacgaggcggccggcggcaaccgagagagagagagagatcgagatcggagagagagctagagagggaggcggcggcggctctcaccccagagatgcggcggtggcggaggaggcggaggcggcgatgacgacgcgcgcgagacgacggcgagatacgacggcggcgtcggcgcggggatgccctaggcagtggcggcgaaggagaagccgagagagatcgatcggggcaaaaacttctaagtgttgatggagaagacgagggcgcgcattgggaatatatatacccctagatctttagtcccggttgatgagaacaaccgggagtaaaga

SEQ ID NO: 26250 - DNA, 543 bp, Oryza sativa
  Clone ID: PAT_MRT4530_31059C.1
aagtatgacgtcgcatgcacgcgtacgtaagctttgatcctctagagcggcgcgggccggggggccccgtggaggatcactaccggactctgcagctgccgcgggggccaccaagggcgaggtcaagagggccttccgccgctcgcgctcacgtatcatccagaccgtttcaaaggacgacgcgactacgcggcgtccatttccagcggactcaaccgtggcctaccagactggtgactgggcacaccactgacgggacggccgacggacgaggctggacgatacctggacggctcaagtaccggcctcgaccgaccgacggaccctggaccaacgtacccggacacccacctcaacgaccgaacgaccgaccgactgacactggttcgaccgtctacactctgacggactcgtgacactcgctgcctggacctgaccgggactcaacgacgacacccgactgcaaaccactctcggtgtgactctgcccacgtcactttggactacctacgacacactttacactactgtgggtttactacg

SEQ ID NO: 26251 - DNA, 132 bp, Oryza sativa
  Clone ID: PAT_MRT4530_3105C.1
cttattaaaagaacctttttaatacactttttttatatcaaccacgatctacatagaacccaccccgtcacccaactataacgccctaccataccccaccgcttttccaaacattgcaaaatttcacgtaca

SEQ ID NO: 26252 - DNA, 549 bp, Oryza sativa
  Clone ID: PAT_MRT4530_31060C.1
atgggcgcggcgcagagggtgggcggcgactgcggatgcggcggggagggccggctgcgatcacggatgctacgcacgagggtcggtggccacgtccacggcggcgacgcacgagatggagccgcacaggagtgcggaggcggtgggcggggaagaggagacggcggcggtctgggaggagaaggcgacgacgtcggcggtggtccggacagacaaggtcgcaatgggggagggcgggtggtaggcgtggcgggagggcaggcgtcggtcaccacctgggcgtgctccacgtccaacaccggccgcctggtcatgttccgccttagtcgcccgctgcccaggggatctctatctcagtcgcccaccgttggccacccggtccgcctcatccgccgctggtcgcacgggcgagcttcgcctcagccgctcgtggtgcgggcaatctccacctccgcagccggacgctcgggcgagctccgcctctgccaccggccatccaatgcgtgcgcctcctccttggcagccggccgtccgagcggatgggcatga

SEQ ID NO: 26253 - DNA, 2733 bp, Oryza sativa
  Clone ID: PAT_MRT4530_31061C.1
atgtcgacctccgccgatccttcgagcgcgccaactgccgagtacgtcgagatttgccaaccccgatttaagtctctggaagaataccttcaaatcttggccctcagccgaaaaaagctagccagcttggtatatgagggaccgatgactcccactctcctagatgtcacaatgataattggcctagatataacttcatcggctaacccggtcagcttgaatacaacatccacctttgagttcaaaactcagaacataggtggctggtcaggttttgttgcaaaaaacatgggcaatgggccaccaaatctcatgttctctttctccggcgatcccctcggtgcacaaggcgacttcgaagcaatctcccctccggccagacttccgcccgcagagatgtcgtcctccgccagtccgtccatcgcgccatcggccgagtacacagaacacttgtccaatctggtagcaattccaagtttgtcacatgaaaaccactattttcttggtccaatcggcaatcttgatcctactgaattcatcatcgccgaaaccaatagaatcccctttagattagccaaccctaatcaagctactaagcaagttcaccgggacgaactcggaattagccaggcactcgccctcaccacagcaaattcggctaaagatgaacccttgatggccgctgccacctatttctggtccaacaccatcaatgccttcctattcaaccaagggccaatgacccccactttgctcgacatcaccatgatcacaggtttggatgtgacctcatcggctaacccaatgagcttgaacaccaagaaccagtttgacttcagaactaagagcataggtggttggtctggttatgtagcagcatatatgggcaaaggatccgtcacctcccgagaacatgtagccttcttactgatgtggcttgagaaattcctcttttgtggatcaagttgcggccctaccaccaactggcagttcttagctgaagcccttgagacaaagaggcaattccctttgggcaaaatccttctcggctatttgtaccaaatgttaaacaacgcatcggctaagattgctgtcggctcaatcgttagcgcaggccggccatggtggttgctgcaaacttggctaaacttggtagccatgaaagctgtcaatcagccagccgtaacagaagctgaatttccgagattagagccgatcacaaatgatgatggagaagagcgcacccatcacagatgtatgtccgatggggagtatgcctccacaccagccgatgctggagcaaagttatcagccgaactgctcaaagactgggtctgcagtttctatgagggtttccaaagagatgctcgagtctggtttccatacgaggacttaataaactttgatctcccaggagactttagatttgaagacctcaactctgaaaaatggtggggagaatggaagcaaaacatattccatcagtcgacttctatgtatatgacagatctattcccagatgtcatctctcagaaaacagaatcttctcctccacgcaagagcaacagtggcagggatatagagtatgccccaggccttttgccaaacggtggtggattagctcctccagtcatcggctatcatgcccccaagacctcaagtctgtttcaagggcagatgagagaaccagccgatgttggcaggaagagaaagaccaaggcatcggctatagatccattggctctggctcccaaaaagaagaccaagaagaataagcctacgccagccgatgacttgcctgccttagatccatccatcgagcaagccttggacgaagaaaagattgaagaggatattgatcaagctgcagccgaaaaaaagaagactgttgtgaggaagaaatcggcagtaacaacgcttaaaccggctccaccacctcctcctcctccttcaccacctatgcaacagatgtcaagtgaccgtaccccattggctacgggaagccatcatgttgaagaagaggaacaaccagccgctaatgccatcccagtcctggccgatctgttctcttttgatatcaaggattactttgatgaagaagtagaagaagaatccacaagcaaggctctagcgcctctggatgaaactgtcaagaaaacacttgaagacatatccattcggctagagtcatcattggataatctggtggccgactgtggttcgattcgggcacgatttgcagaaatccaagccctagtcccagacgatctagcaaacaccattactctagctgtgtacctcgagcaacatcaattcaagctggagaaggctaagcaatggatagccgatcggcgggagcggaaagatatcgaagccactatccaagccaattgggaactcgtgcatgaagagaaagctaagttagatcagctctccgccgggccgattcagtcaaacatagataagcttgaagctcgcaagattgatcttatagcccaacttgaagaatgcaatgccgagttgaatcttgaaaggcagaagctagccaatctcccaagtgctgttgaagaacataagtctagattgagatcggctataaaaaatgtggctgacatgaccaagtccctcaaattcatctctggaactgacacccaagacattcaagctattgaagaagtagatcaaattagacaacgggctgtgtcggctatccagcgttacttgtctagatga

SEQ ID NO: 26254 - DNA, 131 bp, Oryza sativa
  Clone ID: PAT_MRT4530_31062C.1
aaatattgtaccggtgaaaatatttacagaagtagaccctgccgccctccccgagagtggcaggagggcggcaagggacctcagtgcaaaatgcgcacaccttgccgccctccatttggttggcagggatg

SEQ ID NO: 26255 - DNA, 324 bp, Oryza sativa
  Clone ID: PAT_MRT4530_31063C.1
ctataagccttttggaaacaaaatatttccttttgagatgttagacttccctgatctttgaagatttgaaccccaagtgtacaacaattagatcctactttcaaggggaggggatatgaccttctgcagatttaggtgaactggtactccttttaaaatgaaatggacactcctttagcttttattttaaggcgaatgccctgaaaatctgaaacctaaaggcaccaaatttaaaggatgctagtggtttaccacctacttctaaaactggtttggccatttaaaaaataggcagagttcacttggatgctttggaaatagccg

SEQ ID NO: 26256 - DNA, 240 bp, Oryza sativa
  Clone ID: PAT_MRT4530_31064C.1
gcgccggcgccggcgcaggcggtggccgccggaagaccaccgcgcagatcatcgccgagatcaagaggatggagatacgcgcgtgccatggcgacatcgtcggcggcggtggcgtgtctcccggcgctcgcgagcatcctcgaggagcagcaccaccactcgccgtgccgtagcctcggcgtgcatcaggtggctgtagaggttacatactcacatggttatatgtgcctacacgctctg

SEQ ID NO: 26257 - DNA, 297 bp, Oryza sativa
  Clone ID: PAT_MRT4530_31065C.1
atggagaacaatgaaggaggcaaggggagtaatgaaagagtcaccgagagactctgccaagctgccatatctgtcgagcttttcaacctactagacgagaagattcacatggacactacagagggcgaggccatgaggaaagcggttgatttattttatgataaagaaaattgcttttatcttgtttttacttatttcttcgatttgcttgaaggaataagtttgatctgcaccggcaagatcaacaacccacggagaggtgtatcgatcgctaaggtgcaacacaacaacgtttag

SEQ ID NO: 26258 - DNA, 296 bp, Oryza sativa
  unsure (1)..(296): unsure at all n locations
  Clone ID: PAT_MRT4530_31066C.1
nacaggtttgcnatcgatgagcaaaagtggtgctctcagcatgaggctgcactgtccagatacaaaagtcccagcacctattgccatccacttcactgataaagcacgacgcaaaantcaagcttccaagggaacagggacaaatgtntttaagtcatcaactaaacaacatggttacaactgttgtttgacaaaagcttaactgtatttntnacaagagagagacatatggccactacttgtcagcactattgttacaccttcaggggaaagntgaggttgaccagaccaaggtt

SEQ ID NO: 26259 - DNA, 160 bp, Oryza sativa
  Clone ID: PAT_MRT4530_31067C.1
atgccgtggtgctggatgctgaagccgcatcccgtgctgtatggagaagcaggggcgctctccattgatgtgggggtgtacactgatgcgcctattggtttggcaaggcggtcctcggaattcttgatgccaccggcaagccacttgcgggcttatgccg

SEQ ID NO: 26260 - DNA, 1640 bp, Oryza sativa
  Clone ID: PAT_MRT4530_31068C.1
ctggaaagagagagagagatgggtgcgtcctctctataaatccacctcgtgttgctgctcccacaccccccctcctcgatcatctcctcctccctaccaacaaccaccaccatcctcttcttggcacttggcatcaagagacacatccagacgcctcgagttgtagctagcaccagtggctcagcttgcccagtgctgctgcatcgatcagtggcagtagctagctcagctctagccttttgccaccgaccgctccgatcgaatccggtgctaggctagccagcctcctcgctctttataaccccagccgccattggagagggagggagggagctagagctttgttcttgttcttgcatgctgttcttgttgatcgagtgagagagggggaaggaagaaaggagggaggcacatgcttataccgttcgtgctggagttcctgatcgatgtcgcctgtgatcagtgagatcctcctctcggggtttatgatcaactccacactccggcgccgcacccatctcgtccagtctttctccgtcgtcttcctctactggttctatgtcttctcataagctactcgccatccatttccctctcctcctctctctctagcttccttctacaataatcgatctcgtgttcgtcgtcgtcgttcttgtcgatctctgtgtgtgttcttcgtcgtcgtcgtgttcgttttggattttggtttcagtttagtatatgcacttcttgttcttcactgctgctgctgctgctaagcttgtagcaatctagtggtgcttgttgttcttcttctcccgaaatctttgcgatcgattgattgatggcatcgtcaagcgggagcggggggagcgcggtgtcggcggcgacggcggcggcgggggggtcgtcgtcggcggcggaggaggagctgagggcgcttatggagcagcggcgggcgaagaggatgctgtcgaacagggagtcggcgcggcggtcgcggatgcggaagcagcgccacctcgacgacctcaccgcgcaggtggcgcacctccgccgcgagaacgcgcacgtcgccaccgcgctcggcctcaccacccagggcctcctcgccgtcgacgccgagaacgccgtcctccgcacccaggccgccgagctcgccgcgcgcctcgcctccctcaacgacatcctctcctgcatcaacaccaacggcgccgccgccgccgccgccgccgccctcaccgtcgccgccgccaccgacccgctcctcgccttcgactccgccgccttcgacgacctcttcagatcctcccccgagctgttccagctttgctagctcaaacactgaagctgaagctgccatggcagagaccaagaagaagatgaagaaaattacagtacttgccactgggggtaagcaactaagcactgcacctaacgaagctaagctagctgctagggctaattaatggcctaattatcttgtgtaattggtaaatcaagtgatggttaagttaagccttctgcatgcatcatcatcatcatgtactccaactatgtaaggattaatgaggcagtaagctttctgtttctctgtcaaaacaaatcaaggaagtgcaatatataattactactactattactctcaaaaaaaaaaa

SEQ ID NO: 26261 - DNA, 241 bp, Oryza sativa
  Clone ID: PAT_MRT4530_31069C.1
atgcggtctcacgcgggggagagcggccagtcgccggatctgggcagggacggccactgccaccggatccgtgcgcggacggccgcgggccgcccgtcgtcgcccgcccacgcgctcccgtcgccgcctgggaggggaggggaggagccctggcagctcgtcgtccgcgcgctcccctttgccggggaggggaggggagggcatcccggttcctgcgccgggatccggggcgtgggggagg

SEQ ID NO: 26262 - DNA, 1092 bp, Oryza sativa
  Clone ID: PAT_MRT4530_3106C.1
atggccgccgctgccagactcgtctccaccactctcgcgcgctcctcctcctccctcgccgccgccgcgcgccgccccgaccttctcgcctcctcgccgcgtggtttttcaagcatggcagattcaattcaaaggagcggctctggcgatattacgcgggttgatgaagtaggtctagaggaggtacctgatgttattcaaaattaccacttatgtgtagtgaaaaatcgacgtctagactcagataccattgccaaggcaagtcagatgaagatcattatgcaatatggtgttggattagaagtggcacaactacctccttggatattgagcatacaactgttcgcaggtgtcgatgtaaatgctgctacagaacacaagattaaagttgcacggatacctgggagtacaacaggaaatgcagtctcttgtgcagaaatggcaatctatcttactctgggtgtcctaaggaagcaaaaggtgatggatactgctgtgaaacgtaaggacctgggcattccagttggagatacaatatttggaaaatcagtccttatcttgggatttggagccattggagtagaaattgccaagaggctaagaccctttggagtaaaaattcttgctaccaaacgaaattggtcatctgatacattgccatgtgatatagatgaattggtcgataagaaaggtggaccagaagatatgtatgaatttgctggagaggctgacatagttataacatgcttgctattgacaaatgaaacagttggaattgtggatcataagttcctctctgcaatgaaaaagggatcatatctggtcaatattgctagaggacgtctactggactacgacgctgtgtttaatcacctgaaatcaggccatttaggtggtttgggcattgatgttgcttggacggaaccatatgatccagaggatccaattctgaagttctcaaatgttattataaccccacatattgctggagtcacggaatactcttacaggacgatggcaaaggttgttggtggtgttgccctgaagcttcattcaggggagccaatcactgaagtggaatttgtgaactaa

SEQ ID NO: 26263 - DNA, 945 bp, Oryza sativa
  Clone ID: PAT_MRT4530_31070C.1
atggctcaccgccggatcgcgctcgccgtcctcgtgacgctgctcttgtcggcgttccgcccttgcctggcgcaacagagcaacgacgacacgagcaaacaccaccggagcgccacggccggcgggttcacgccgaccaccgtcgtcgtgctcgtggctctcatcaccgccttcgtcctcctcaccgtgttctccgtcctcatcaaccgctgcgcccaggcgcgcgctcccccgcgccgggcgttccgcagcacggcgtcccatcagcccgtcggcggcgccgccgccgcgtcccgcgcctcgcgtggcctcgacaaggaggtcgtggaggcgttccccacggcggtctacggcgacgtgaaggcgcgcatggcggcgaagtcggggccgctcgagtgcgccgtgtgcctcgccgagttcgcggacagcgacgagctacggctccgcctgccgtccgacctgacggcgccggaggaggcggtgcaggaggaagagtcggaggagctcgacgaggcgtccctgatggccaccttcacgccggaatccgtcatcgacttcggcgcgacgcacgaccatgaattcgacagagcagggtaccctcactaccggaggacgcagtcggccatggacgccgcgccggaccggcacacgctgaggctaccggagcacgtcatgaaggagctcgccgccgaccgcaggcaccggcgcgccgcgagcctcgccgggtacccggacagcgtggagaggacgccgaggtggctgacgtcgctctggcgatcggtgtcgtggcagaggcagagccgggcggactgggacgccggagaggagcacggcggcagcaaaagggttcacccggtcgccggagctcaggacgagacacccagcgggtccggctccgatgggagcaaggagaactccgattctgacgcgttaaaccgagtttga

SEQ ID NO: 26264 - DNA, 388 bp, Oryza sativa
  unsure (1)..(388): unsure at all n locations
  Clone ID: PAT_MRT4530_31071C.1
caggcacgcgacgaggttggttccctagattgcgcgccttnttttttttttttttgtgttttaagcaaaaaggggaagccctttacccagggacggaagattccatggaggggataaacaagaaccatgggtcagaccaaatacatatttgttagcataaagaaaaagaggggtgctttttccggggaaataaaaagtgttagtttaacagggtgctgggttatccgcgctccaaattacaacggacgcaagggggataaaccgaggaccgttatcaaatggttatcagagcattttatagggtgaattttgattagcttcggcttggagcacaaagtttttaagatacaggggtggcacgagtgccacaaatttttttcgaatactg

SEQ ID NO: 26265 - DNA, 1204 bp, Oryza sativa
  Clone ID: PAT_MRT4530_31072C.1
atggctcaccgccggatcgcgctcgccgtcctcgtgacgctgctcttgtcggcgttccgcccttgcctggcgcaacagagcaacgacgacacgagcaaacaccaccggagcgccacggccggcgggttcacgccgaccaccgtcgtcgtgctcgtggctctcatcaccgccttcgtcctcctcaccgtgttctccgtcctcatcaaccgctgcgcccaggcgcgcgctcccccgcgccgggcgttccgcagcacggcgtcccatcagcccgtcggcggcgccgccgccgttgtcccgcgcctcgcgtggcctcgacaaggaggtcgtggaggcgttccccacggcggtctacggcgacgtgaaggcgcgcatggcggcgaagtcggggccgctcgagtgcgccgtgtgcctcgccgagttcgcggacagcgacgagctacgggtgctcccggcgtgctgtcacgtgttccacccggactgcatcgacccctggctcgccgccgccgtcacgtgcccgctctgccgcgccaacctcacggcgccaccggtgtcgctcgccgccgccgagagctccgacctgacggcgccggaggaggcggtgcaggaggaagagtcggaggagctcgacgaggcgtccctgatggccaccttcacgccggaatccgtcatcgacttcggcgcgacgcacgaccatgaattcgacagagcagggtaccctcactaccggaggacgcagtcggccatggacgccgcgccggaccggcacacgctgaggctaccggagcacgtcatgaaggagctcgccgccgaccgcaggcaccggcgcgccgcgagcctcgccgggtacccggacagcgtggagaggacgccgaggacgtggacgcacagcgcgacgccggacgccgcggcgctggcgaagttcttcatctggcactgcaggaatcgctgcagcgggaagaggaaggcgaaggagaggtgcagcgggatgaaccagacggagacgcggccggccatcgccgacagctccggcggctgacccgtcaggagcagcacgtcctcggcgtagatgtacatgggcagcagcagcaccgcgcacgccagcagcacgatccacgaacgctgcatgtacacccccatcatgtggtacttcttcgcgccgaacgcctgcccgcacagcgtctccagcgcgctcgccatgccaagc

SEQ ID NO: 26266 - DNA, 326 bp, Oryza sativa
  Clone ID: PAT_MRT4530_31073C.1
gggggggaacaaaccgggttttttgaccgaaccgaaacttggttttacaggttggcccgactcctaacttaagcccctttgacggggatccctttgtcccaaagttttgacccccggaaaaaagatctaatttccctacatggataggtaggtaggaactttctcatgtcaagggggggttgccaaaaagggggtccaacttggcattgtcaccttcggacaagaacctggtgcaaatgggggccccggcccccatgagtgtcaacatggcccgcaagattgagcctaccccttttccccaaattaacccccactccaaaccccga

SEQ ID NO: 26267 - DNA, 192 bp, Oryza sativa
  Clone ID: PAT_MRT4530_31074C.1
cagagcagcggcaaggcggctcagcgcggcacgggtggcgaccgcggcggcgatcgcgcatggaactcaaaaacgcggcggggagcttgccggggatggagcggggagagagaacgagagagggggatagtgctcggctcggcgtcggctcacgcgtacacgcacgctcacgcgtgtgcggcgcactggtag

SEQ ID NO: 26268 - DNA, 416 bp, Oryza sativa
  Clone ID: PAT_MRT4530_31075C.1
tttcttgaccttattcaccggtagccggactcgggggggatttcatgatctactcgggatgatataccagttacacgtgaaatatcaggcagtgctattggcttatcaatgcactaccctgatgcacacttctgcactgatgctaacggaaaatacatacagaccaacttgatatcctcgggacactgcatagtgatcagttgatcagaacagatcatatcaacgctgtaaccacagtcagggtccttggaccgctacaaccctacaggctgcactgccagtgattgcctccaaagttgcactcaccaccttaagggttcacgtgacgttgctccacatagaagtactggcttgagaagccttttactaggaggaaccgtctcaaagacaatgggagtgacgccttcgggaatatt

SEQ ID NO: 26269 - DNA, 183 bp, Oryza sativa
  Clone ID: PAT_MRT4530_31076C.1
atgaagacgtggcatcctattaatttcgtgcgatggctgcacaccaactgtgctacccctccaaagtcgccccgccacacacagccgatcatcggggaagaccttgctgcttggcccctcccctttgccgcaccccgcgtcggctacggtgatcgaatttgtgaagcatcagacatgcagaat

SEQ ID NO: 26270 - DNA, 413 bp, Oryza sativa
  Clone ID: PAT_MRT4530_31077C.1
catatcaccccacgcttgaccttatattctatagagccgccccccttttttttttttttttttttttttcattacaagaggcaagctagcctcgctttatttttatcacgccataacatcatacacatttcacaaaaatatttctacaaattataaattactcccacattcactacacaatatctctggacaagcccataatatctctcaacaccctaagactgcccattgctcaacaccctaatatttcagcaccattcatggatccaatgattgcaatgccccaataccatccgcgaaaaagcatttccattctccaaaattggaataatcatttaccataaacaactctgaaatttacctagtcatttctcaattccctatgaatctttattcatattcttccctttata

SEQ ID NO: 26271 - DNA, 154 bp, Oryza sativa
  unsure (1)..(154): unsure at all n locations
  Clone ID: PAT_MRT4530_31078C.1
cccacaggcgtgtcgctagttccacgcccgttggtatacgtcgtncttagtgacccaagngtgctgttagtacccgtatgtttgctgtatggtgtggtctatgatttgaagtatgcttggagactgattcaaataaaaaaaaaaaaaaaaaaaa

SEQ ID NO: 26272 - DNA, 498 bp, Oryza sativa
  unsure (1)..(498): unsure at all n locations
  Clone ID: PAT_MRT4530_31079C.1
cccacgcgtccgcaggcgatggctagcccgcagtgctgcgcgaacccaccgacgctgaacccggccggcggggaggggaaggtggtggagagcttctttgggatcaaggcgtacgtcnccttctcctctgatttcaagttctccgttattctcatttccgatgtcttctggttttaagctctgtaccttatgaagattgcctactaagttgtcttttttgtatactttgttgtggttccatattttttacatgttgatcctttaataccttgatttatcttattatatcgtttcaattgttgttttaataacattgtccttacaaatcttttttttgatgctacatccatttttttctcgttctttattatataagatttgttattcattgctattattatctcttttttttacttctaaattttatttttttaattttattttttgttttcttattcttaacctttttttttttttttatccctccttttttctctc

SEQ ID NO: 26273 - DNA, 2301 bp, Oryza sativa
  Clone ID: PAT_MRT4530_3107C.1
tgatagtcattcgtacctacacattcaccagggcacactgctgttgccgactgatgtcctcgcctataaggttggttagtcacaccaccattcatgggcgaccacatcttcaccgaccggcttgccttcgccgccgccgactggtgtctccgcctacacggctggcctattatgccgccgttgttgggcatctacgacttcactgccggcctgcctctgtcgtcgccgactggtgtcctcgcctatacggttggttggtcacaccaccgttcatgggcgtccacgtcttcaccgaccggccgcctcgtccgccgccgactggtgtttccgcctacacggctggcctattatgccgccgttgttgggcgtctacgtcttcaccgaccggctggccttcgccgccgccgactggtgttttcgcctgcacggctagcctattatgccgccgttgttgggcgtctacgacttcaccgctggcctgcctctgtcgccgccaactagtgtcctcgcctatacggttggttggtcacaccaccgttcatgggcgtccacgtcttcaccgactggcttgccttcgccgccgccggctggtgtctccacctacacggctggcatattatgccgccgttgttgggcgtctacatcttcaccgaccggctggccttcgccgccgccgactgatgtttccgcctgcacggctagcctattatgccgccgctgttgggtgtctacgacttcaccgccggcctacctctgtctccgccgactggtgttctcgcctatacggttggcggactccgccgccgttaatgggtttcatcatctacaccactggcttggttccactggcgccgactggtctttttgtcaccattgatggactgtttcgttcccacatcggctacttctgctgccaccgagggaatacgacaaagctaagtcatcatttatttttcgggcagagtgtttaaacgtaaggagtcatctgctcggggaaatcaaatttgacaagaggagaaatacatatttataaatatttaaaaatacttgcattcttctcgagtattatatttacatcagatactactcatcctataagtttgttctgcaggatccaaatccagatatgcataaaagggattcatggctttaagcttatctcttacgctctaggaatggatcagtcagaacatcaccatcggcttgccttcgccgccaccgactggtgtctccgcctgcacggctggcctattatgccaccgttattgggcgtccacgtcttcaccgaccggccgcttcgtcgccgccgactggtgtcttcgcctatacggatggttggacacaccaccgttgttgggcgtctgcaacttcaccgaccggcttgccttcgccgccgccgactggtgcctccgcctgcacgctgccctattatgccaccgctgttgggcgtctacgtcttcaccgaccggccgcctcgtccgccgccgactggtgtttccgcctgcacgctagcctattatgccatcgttgttgggcgtctacgtcttcaccgacaggccgcctcgtccgccgccgactggtgtttccgcctgcacggctggcctattatgccgccgttgttgggcgtctacgtcttcaccgaccggccgcctcgtccgtcgccgactggtgtttccgcctgcacggctgacctattatgccgccgttgttgggcgtctacgtcttcaccgaccggccgcctcgtccgtcgccgactggtgtttgcgcctgcacggccggcctattatgccgccgttgttgggcatctacatcttcatcgccggtcgtctcatctgttgctgactagtgcccttacctctacgtctggtttatacagctaccactactgatggacatcatcatcttccgtcgccgactgattatgccgccgccgacttatgcttttatcttcacaactgcgcgtcttcaccaccggtttgcttttgttaccgccgacttgtgttcacttcattacagcaatacaactttgtcatcatggtggagcgacttcatctttattatcttcggcaccggcaaactctattggtgctacttcgcaagttttgctactttaccaaccacgacgtctttgtgaacctcgacatctcggcatgcgatgccgtgttattttactacaacaagtggctcttcaatattcaggatttctacttggacatcttcaacacatatcttcaatcaagcaatgactattcgatgacaagaagctatagttctcgactctatgttcagttgtttcccaac

SEQ ID NO: 26274 - DNA, 434 bp, Oryza sativa
  unsure (1)..(434): unsure at all n locations
  Clone ID: PAT_MRT4530_31080C.1
tttcctcttctaccggcngtgacaaccccnactattatcctgttcttccctttttgcaagagctggcgggttgggtctttttcccttccgaattcctgtgccatcttttcctctaccttttcctctatctcaatgatcctttatttgatcttttcaatgggcctgtttttgacatgtgtgaccaataggttggtgatcttgttggtcaaccttgcaaaggcatggtagatgtgttgactctatcgcatcaaacaatcttgttaagcagcttgctttaatggaacctctatttgacctggtatggccaatttatcatttggcaagcggttgatgttagttggaaggaggtttacgttcatgggacaatacgggatgggagagctgtagaagattgtttaaacaatgagcaaaaccggtaggctgttatctaaacg

SEQ ID NO: 26275 - DNA, 455 bp, Oryza sativa
  Clone ID: PAT_MRT4530_31081C.1
gactgacatgtgggtcccacatattttgtttaattattttatatttcaattttgctatgccacgtaagagccatgtcaaagatgccatgtaggcgccacgtcgcctaagacctaggcaatgggacctcgtctgcattggttttgtatgttataggataggttgtatctggttttccagaccgaggatgaaaatcagactagatgacaaattaagagacctaaagttaacttattccgagggagaatggctaatagcattactgagcttgagggattttttttatttttttattaaaaactagaaagaaaatgttagtgcgttgcaatgggtaaaagtgttttctcggagatacgaatagctattacaagcggagcaatagattgaacaatagattgaaacattaggatcgtatacacaagtagagccataggcccaactatcacagccacggatg

SEQ ID NO: 26276 - DNA, 1832 bp, Oryza sativa
  Clone ID: PAT_MRT4530_31082C.1
gtcccatcgctatcgcatctttctatcatcattttgtgaaggattttaataccattgccgcaccattgaatgagctatcggataaaggcgctctgttccaatggggacaatcccaagaagagactttcaacttgttgaaggataatttgacacatgcgccactactccaactcctttagtttggtaagacccttaaacttgattgtgatgctagtggatttgggaccgaaggtgtgctgattcaaaaaggtaaacttgttgcttattttagtgataagttatatgggcctagtttgaagtactctaattatgataaagaatcatatgctttagttcaaactttagaaacctagcaacattatttatggcccaaggaatttgttatacattctaatcactaatctttgaagcatattcgaagccaaagtaaactgaatcatatagtaattgtgaatcttttccttatgtcataaaacaccataaggataaggagaatgttattgctaatgctttcacaatttgatttcaatttttttttggtttgggagcgaagtactctaattatgataaagaatattaaagatcattatgtacatgatgttgattttaaggttttttattgtactgtatggaaggaaaaatgtggaacaaaattgtaattactaatggttttgtatttagatctcacaagttatgcattccagctagctccgttcgtttattgttattataggaagcccatggaggcagcttgatggcatattttggcatgaaaaatacggaggatgtgttggctagccacttctattgctcaaggatgaggcgagacattgagcactgcgtttcccattgtaccacgtgtaataaagctaagtctcgactaaatcacatggtttgtacatgcctctttctgttcctagcgttctgtgggaggatatttcaattaattttgttttgagattatataggactaagagggggagggatagtatatatttgtagattttctatgatgccacatattatacattttcatatgagcgatgatgctacacaaatcgatgagttattttttagggaagccgttcacttaaacgaagtgatgtctacagttgtttcagactgtgacacagtttgagttatttttggagaactttgtggaacaagttggggaccaagctgctattttccacaataaatcatcgctaagcagatggacaaacagaagtggtcaatctcacattatcaacaatgttgcggccttatatggaaaagaatttgaagatgtgagaagagtctctaactcatgtggagtttgtatacaatcgctcattgcactcgaacccttttcacgtggtatatgatttcaatcctcatgctcctgttgatattttacctttgccaatttctgaaaaagtgaactttgatgcttctaaacgtgttgaatttgtcttaaagctgcatgaaaccactagggagaacatagaacgcatgaatgacaagtataaggtcactagtaatcagggtcgaagggaattaacttttaaacttggtgatctcgtgtggttgcccatgagaaaagaaatatttccatacttgcacaggtcaaaattgatacctagagccgatggtccttttaaagcaattactaagattaatgataatgcatacaagatttagttgtttgtagattacattgttagcgatgccttcagtgtggctgatctaaagtcgtagttgggcggagagcatgagcttgagtcaaggatgacttcaattcaaacaatgggaggataataaggacatctctaccatggatactgttgacagtc

SEQ ID NO: 26277 - DNA, 140 bp, Oryza sativa
  Clone ID: PAT_MRT4530_31083C.1
tagctagtacaaatatgaactgtttctaatcttcctggttactctagtgcagcgaagctatacatttgcgaacttaagaagaagttagctacatcagtcaaaatgagcatgatagttaccaagtttggtccatggggagg

SEQ ID NO: 26278 - DNA, 442 bp, Oryza sativa
  unsure (1)..(442): unsure at all n locations
  Clone ID: PAT_MRT4530_31084C.1
gggaaaaagggggattttttttggggggttaataaataaaaccaccctgggattaaaaccgggggggggcctttaatacaaccaaaatcgcaaacccaagtccaatcgaaaaagtaagggggccccaatttatcttgcttggggggggggaatataaaaccccccccctttgacaaaaaaaaaaaaactttgctagcggggggttcgttggttaaattaaggcccccaaaaggggggggcccttaaacccgggaggggggggcttgccccaggggaaaaacacctcgagccccacggggggggaaattttttattttaaaaaggccccccccaatgggggtccaaaagcaaaacccggntttaaagtccccccccccctgccccaaggggaaaaattttgccctcgctttttgcccgaaccccaggggggttagccccccaa

SEQ ID NO: 26279 - DNA, 234 bp, Oryza sativa
  Clone ID: PAT_MRT4530_31085C.1
atggtggtgatgctctaccttagagcgctcgcacggggtggcgtcggttgcggcggagatgccgtcgcgctctcacggggtggcgtcgagcgcagcggagatggcaaggacggcggccggcggagtggagcggggcggcggcggcggtggatgaacgtgcggccggcggagcgggagcgtcggccgagcgaagtggcagcggcggcgagcgagcgcacggtaggcggcagctag

SEQ ID NO: 26280 - DNA, 237 bp, Oryza sativa
  unsure (1)..(237): unsure at all n locations
  Clone ID: PAT_MRT4530_31086C.1
ctatttcttcgtggactcttgggcagagtgcggagaccgcagtgtggagcancagatctatccatccatcccatcctcgatccttgcttcctgcccggcggcgtgcgtgtgagaggcggtggagatccgtgatggcggggagcgggtggtggtggctcccggcggtgagggggccgcccgtgtcgcgcccggcctcggtctgcctttggttcgtgctcgtcgccgttcccctggggc

SEQ ID NO: 26281 - DNA, 600 bp, Oryza sativa
  Clone ID: PAT_MRT4530_31087C.1
atggccaaaaatgaatcaatgttaatagttgctgcccacttctggtctgacgccatgaacgcctttctctttggacgtgggtcgatgactccaaccttgatagatgtcatcatgctaacatcacttaacatatcggctctggacaatcctttccacctcatgaccaaacccacttatcaactgaaaaccaaggacgccggaggttggaaaggttacatggctcaccacatgaagacaagcaccgtcactgatagggatcacgttgcattcctcaacatgtggctagaacgcttcatatactgtggaaaaactgtcggcccgaccacaaatccccaggcgataacagaagcacttgtgtctggccactccatccctctgggcaagcatctgctaggctcagtatattcgttgttgcacaatgtatcggctaagctagctactggtcagccgatcaccaatcctggaggaccttggtggttgatcaacttatggctcaatctttatatgcacaagactctccagcaagaccccacttctatgagtttctgtcacaccctgaaaatttctattttgatttgcgaaattgaaaattcgggataa

SEQ ID NO: 26282 - DNA, 149 bp, Oryza sativa
  Clone ID: PAT_MRT4530_31088C.1
aaccaaaatgctacaatacagcaaaaactacagcttacaaaagctggaggattcactttaccaatcaagagaatcttggctgctgataggggaaagaaacactgttggtgaggcacacaaaataaccggtgatgatcttccacattgag

SEQ ID NO: 26283 - DNA, 409 bp, Oryza sativa
  Clone ID: PAT_MRT4530_31089C.1
gacaggccaatctttcagctagcccagctttgaggaattctgctttgtttcatacataatcaatcaagatcttacatgccaatatatcgaggcaataaaagtatatataaaactaaaattacaaaaggtaaaaaaaaactgcactttgccccagattcatggagaatccaatggcccaatcaaatcgaatcaaagcatacaaaatcacccggtggatcttgtcacctccgggcgtcgggctcgtcgcgccgccgcctcgccacccggccgacgacggcgtcgacggcgacgtcgaacgcgtccctgaagtcgacgcggctcgacctcgtgtcggcgtacaccaccgtcgggatgagccggatcacctccttccgcatgctcctaaccttttccggcgagatcgccgcca

SEQ ID NO: 26284 - DNA, 879 bp, Oryza sativa
  Clone ID: PAT_MRT4530_3108C.1
atggcaggctcagtcggcgggggcggttggccggctggtggatccgctacccccgccctcaggagcaacggatcggcggtgtgtatctacaaagacatgttttttacttatccaataaatttgtacgagctcaatatattactcaaaattctggttgatgaagtaggtctagaggaggtacctgatgttattcaaaattaccacttatgtatagtgaaaaatcgacttatagactcagatatcattgccaaggcaagtcagatgaaggtcattatgcaatatggtgttggaatagaaggtgtcgatgtaaatgctgctacagaacacaaaattaaagttgcacggataaatggcagtacaacaggaaatgcggtgtcttgtgcagaaatggctatctatcttactctgggtatcctacggaagcaagtccttatcttgggatttggagctattggagtagaaattgccaagaggataagaccgtttggagtaaaaattcttgccaccaaacgaaattggtcagctgaaacattgccatgtgatatagatgaattggtcgataagaaaggtggaccagaagatatgtatgaatttactggagaagctgacatagttataacatgcttgctattgtcaaacgaaacaggatcatatctggtcaatattgcaagaggacacatactggactacgatgctgtgtttgatcacctgaaatcgggccatttaggtgggttaggcattgatgttgcttggacagaaccatatgatccagaggatccaattctgaagttctcaaatgttattataacaccacataccgctggagtcacagaatattcttttagggcggcagctaagattgttttgacctacagctaa

SEQ ID NO: 26285 - DNA, 349 bp, Oryza sativa
  Clone ID: PAT_MRT4530_31090C.1
ggggccaaaacaaaataaagctggaaaagcccggggcccccccccaattaacaggaccattaccccggccaaaacacaggcccctaggcatcggaaccccaaagggggatgggtccgggggaccgggtaaaagaaattgaatggccgaggaacggggcccggacccccatgtttttgggggcggggacaaccccccccccaaagagggggcccaggggccccaaggccaacggggcgggggggggaaccccggggggggcccccgtctgaaggccggaatcgcgccccccccggtaaagcccccggggaaacctctcggttccccgcggggccagcccaaaccccccgg

SEQ ID NO: 26286 - DNA, 2541 bp, Oryza sativa
  Clone ID: PAT_MRT4530_31091C.1
atggctagttcctccagtggcgtgatgaactcactcctcaccaagctcgctacactgataagggaggagtgctacagcaagctcaaaggggtccgaaacgaggtggtgtctcttgagggtgagttgagaagcatggaggctctgcttgagaagctcgcatgcatggatgagcttgatgttcaggttaaagagtggagggaccaggtgagggagatgtcctatgacattgaagattgcatcgatgatttcgttcaccgccttggcaagtatgatgtgagatctgggcttatcaagaaaactactgaacttccgaggaagctaagggcacgtcatcaaattgctaagaagattgaagagatcaagaatcatgtcaaggaggtgaacgagcggcgaatgaggtacaaacttgatgagtacacttccaagtctagttgtgagccaattgatccacgagtggtcactatttatgcaaacacagctgatcttgtgggaattgacatcccaagagatgacgttgtcaaattgttgatgggtgatgatgagcaacagctgaagggatttgggggtctaggtaaaaccacactcgccaatgaagtgtaccgcaaattggatgggcattttcattgccgagcatttgtgtcagtctctcagaggtctgatataacaaggcttatgagtaaagtattatcagaacttacagggcagtacaatcttcacattggcgagttagataaccttctgaaggttatccgagaatatctacaagacaagaggtaccttttcatgtgtcgatacttcatcgtaattgatgatttatgggattcatccgcatggaatgttattagatgtgcttttcctgaaaataatcacggcagtagagtacttacaactacgaggatttactctgttgctattagttgttgctctaataagaaagaatatgtttataacatgagtccacttggtgaggtagactcaagaagattattattcagtagaatatttggcactggagaagcttgctctgaagtatttgaagagatttcaggtgatattctaaaaagatgtggaggtttgcctcttgccattatgagcatatccagtcttctagctggtcaatcaaagacgaaatgggagtatgtaaggaattcattgggatccatgttcgaaagaaatcctactttagaagacatgaaacatatactggactttagctacagaaatcttcctcaacatctgaagacatgcctgctatatcttagtatttatccagaggaccacacgatagagaggaatgatttggtgaggcaatggatggctgaaggttttgtcagtagaacccatgggttagattcagaagatgttgcacaaagctacttcaacgagctcatcaacaggagcatgatccaacctgtgcaggtggactacaatgatgaggtgttgtcctgcagagttcatgatataatgcttgattttatcagatcaaagtctgcagaggagaattttattgttgtactagatcatccacaagtcgtggtaggggcacacaaaaagatccacagagtttctgtccaatacgatgctgatgaagagcatggcattatatcgacaacaatccttgggtcactatcgcaagttcgatcaatcgcagtgttcagaagctctttcaggccttctctattggagttgaagcatttacgagttcttcatcttgaacttccgatgagagaagtgatggacctgaccggcatatgtggattgtctctactacgatacttaaagatccgtggctactacgcatgtttcaagctaggtatgaaaattaggcagcttctacatttggagacatttgatctaggtgaatcatttgtaccaaggatagccattccatcagatattgttcacttgccctgtttgttgcacctggttattccttgcggtacaacgttgcctgatgggattggaagcttgaaatctctacgcaccttgacctcgttggatttggcactaaactcggtgaacaatatcgagtgcctcggtgagctaaccaacatgagacatctcggagtccatttgggcgatattggtctattggcggatgcggatgtggccaggcgcctggatgcattgtgctcttctcttgaaagtctatctcgttcttccagctgcctcaggagccttgacctggacagccattttattctagtgtcattcgatcgcttgagcgacttgtgcccttcaccccgccatcttcgcagactcaatctgtatggttgccggctacccaggatccccagatggatttctcagctacataacctctacagcttggtacttttggttagggaggcgtggtgcctattgaatttgaaggcgatgatggaatttgtattcttgcaaagttgccctcccttgtccaacttgaccttggtattcgagaatgtccaaaagagaggatcgtcgtctctggcgccggcacggcatttcgagctcttagggaccttacattcagctgccctaagcctcgcctggcctttctag

SEQ ID NO: 26287 - DNA, 114 bp, Oryza sativa
  Clone ID: PAT_MRT4530_31092C.1
atggcgatggcgcggtggaaagcgtcggccaccagaaggcattggcggagaccgctcctcgtcctagcttcgctccgccgccactccgtctcaaggccgagccaccgctcctag

SEQ ID NO: 26288 - DNA, 1407 bp, Oryza sativa
  Clone ID: PAT_MRT4530_31093C.1
atgaccttccttaatgttcacgaggtgcttcccaatcacgtgatgaaatatctgtccgggagtaaggtagtagctgtaggacgtgatatctctggcaaattaatcaccacagatgggatgctaattagcgattcaaatggatctgaagatgctgaagagtttatgttgtccacatgtaaaatctctgagggttgggaaggtggggcactgtttgattctgatgggaaccttattggcatgaaccttttatttcttgtgggaagatcccttttcctgccgatcagtataattattgaacggttggagtattttcggacatcctaccgaaggaggaaattttttgcattggcaacaaaattgaaggcaatcagggttggaggaagactctcaattgagatgcctaagtcccttctagaagatgtttgtgatgaggatcaatttgagtgtctagactccatgggttatcccatgccatcaataagtatggccaacgatggcatggttttggtcaacacttttgaagagacttttggcgacttgtatgatgaaggtgtctggagtgagctcagcaaaaatgtttcttcaagaatatctcgaaatgttgtctcgcttgcttcattcaatggagaaacaagatattttgcatgcacaggtttttttattgaatggaacggatgtacatctattctgacttcagcgagcttagttagaaaatctggcgatcgtagcaagattgttgaaaatttgagggtagctaacgttgtgctcatattattctgtgatccttgttcttctaagattgaagtgttgcttccaaacaaaaaacgtacagaagggacactagagcactgtaatttacattacaatgttgctattgtcagtgtgaaggatttccgtgctctttgccctgcaaatcttcatcatgagcaggaaagtgtatgtgaggatgtattagctgtggggcgctgcttcgaatcagacatattaatggctgcaagtggtcatttggttggctggtcaggcacacttgattgcagaatgcttcggtacgccaattttaaaatcaccaaggctgggattggagggcctcttattgattttgatgggagatatgttggtatcaacttctttgatgacatagtaggaaccccattcctatcatgcaccgttatcctccacgttctgtcacgttttgatgaagaaaggactatcaataaagttggcaatggtgacacttcatctggtgtgcttgattggactatgactggagatcgtagtgttcggccaaatagctggcccgtgcccaagccattttggtgtcatccggacgatctgccccgtaatgaaacccggactcgccacaaatacggatactacaatggacagaagttcaagtacatgtgttag

SEQ ID NO: 26289 - DNA, 529 bp, Oryza sativa
  Clone ID: PAT_MRT4530_31094C.1
cccatctggaaaaaatcccaaaatttcaccaacaaaataacaaggaccaattaaggcttcattcatttttaaaagggctaacaaaaacccgtaaccaacagcaaaaaggccggccgcggcagggaattacccggacaaatgggggaccaactggctagcaaagccctaaaaagggggcccgggaaattgggctttttttcggaaaaaaataaaccaaagggaggcttttctatttcaacgggattggaccaggccctgggcaggcccccaaacaaggaaaatctcatccccgaccctaccgaaaaaatccgggttccggggccatccccaaaaggaaggggtttggtttttcacctaaaaaaggccagggccaaacctgctcccccggaaggcgctgaattcgggcggccggccccaaaaaaaactgccggggggggggccggagggaaatttaaacccgcaaaaccccccccccatgaaggggccccgcgggggacagggggtcagggaacccccccggctcgggggg

SEQ ID NO: 26290 - DNA, 351 bp, Oryza sativa
  Clone ID: PAT_MRT4530_31095C.1
tatttaaagctgctcgcctgctggaccggcccggacttaacttgctcgacccacgcatccggtttgttagcatgccaatcatgccattaaaaacgggggattttttaaaacacaagggggttaaccacacaggatcaccctatgatgagtactggcaaaaactgaacatgccccagacagggatgtaaaagccctatcgccagtataggcggtgtacatcagattatttcaaacattaccctcagccagctatagatcttatagataatttgcttgcattacaaccagaaactcgtggaacagctgactcgacttttcatactgacttcttcagaagaaagccttgcttgc

SEQ ID NO: 26291 - DNA, 447 bp, Oryza sativa
  Clone ID: PAT_MRT4530_31096C.1
atggcgacgaggcgagtttccggtgctgcccggcccgctggatatagcgtcctctccgcttgtcggaggcaccgccagccggagatcgcgttgctccctctcgtcggagacgccgagaacgccggccggagcgccactactcggtgcctgcaaggcatcatcagctctagctgtgtcccaaaccatctcgctggagttgccgtggacaccgctgagccgcctaaatccatagatggcgaggcgttgccagctaacgctagtccccatcatcatccgctgcccgccggagaaggccattgccaggtcgccaaggtgctagttgtcgatatccggaagtcgttaatatatcatccacaagttcgcgatgggtatcgtcggacccctgttgccggcacctgtcatgatgcgcccttgctgggcacggatgtcccactgagactctactaa

SEQ ID NO: 26292 - DNA, 1008 bp, Oryza sativa
  Clone ID: PAT_MRT4530_31097C.1
atggcggcgcggcggaggcacgtggcggcgggggcgggggcgccggcgccggctgcgagggagtgggcggcggtgacagccggtggcggggctgcgtgggcgttgtcgccggtggaggagcatggcatggcggtggggatggacgggagcatctcgccatcgcaggcgagccgcggcggcgaggaggccgccggcaacggcaaggatggagaagctctgggaggaggtgacaaggctctgccgttcgagttcagggcgctcgaggtgtgcgtcgagttcgcctgcaagtctctcgaacatgagacttgcacattggagaaagaggcatacccagctttagatgaactcacctccaaagtcagcaccctcaatcttgagcgtgtgaggcaaatcaagagccgactcgtcgcaatatctggcaaagttcaaaaggtcagggatgaactggaacacttgctggatgacgacatggacatggcagcattgcacctaacggagaagctcgcttaccagtcatcaagattcgacatcgataaagaagcaagcgagctcgaagatcacagcagcagggatgaagaaggagtcgagggaggcggcggcggcgacggcgacgacgagacgatcgccggcggcggcagcttcagccccaacaccgacgagctggagatcctgctggagtcctacttcgtgcagatcgatggcaccctcaacagcctctccaccctgagggagtacgtggaggacacggaggactacatcaacatgatgctggacgagaagcagaaccagctgctgcagatggggatcctgctgtcgacggggacgctggtgtccagctgcgccatcgccgtcacgggggtcttcggcatcaacgtccacatctccctctacgactcccccgcctcctccgccgccttcccgtgcgccgccgccggcatcgtcgccggcagcctcgcgctctacctcgccgccctcctctgctacaagcgcgccggcatcctccagtga

SEQ ID NO: 26293 - DNA, 400 bp, Oryza sativa
  Clone ID: PAT_MRT4530_31098C.1
tggaccggccgccggaggggtggccgcgggtggtggacagcgggaggatgaggaactgggttgggaccgaggtggcctgcgcgacggcatccaggacctctaccgcttctacctgcgtcacgagtccgcgccaagctcatcatgcataggcgagttttattgtgtaccatattaaaccacgcactccctccgtcccggtaaaaattcaaaataaatctagtaccagacatattttactataataaatttagatagagatatgttcaaatccatagtagtagtagatatagttggttttttatagaacggataagtacgtgcgcacacaatgtgtagtacatctggttcaataaagttggcaatgagattgtatggagcccaaaaaaaaaaaaaaaaaaaa

SEQ ID NO: 26294 - DNA, 1415 bp, Oryza sativa
  Clone ID: PAT_MRT4530_31099C.1
atggcggcgcggcggaggcacgtggcggcgggggcgggggcggcggcgccggctgcgggggagtgggcggcggtgacagccggtggcggggctgcgtgggcgttgtcgccggtggaggaggtcgggacgaagcaggagctgatgcggcggacggggctgccgccgcgggacctccgcgcgctcgacccggcgctgtcgtcggcggcgtcggcgtcgtcgtgccgcccgtccgccatcacggggcgggaccgcgccgtcgtcgtcaacctggaccgcgcccgtgccgtcatcaccgcgtccgaggtgctcgtcccgtccccgcgcgaccccgccgtcgcgccgctcgtccgggagctccgcgcccgcctcgccctcgccgcctccccaacccccgcgccgtcgccgtcgccgccgcagcatggcatggcggtggggatggacgggagcatctcgccatcgcaggcgagccgcggcggcgaggaggccgccggcaacggcaaggatggagaagctctgggaggaggtgacaaggctctgccgttcgagttcagggcgctcgaggtgtgcctcgagttcgcctgcaagtctctcgaacatgagacttgcacattggagaaagaggcatacccagctttagatgaactcacctccaaagtcagcaccctcaatcttgagcgtgtgaggcaaatcaagagccgactcgtcgcaatatctggcaaagttcaaaaggtcagggatgaactggaacacttgctggatgacgacatggacatggcagcattgcacctaacggagaagctcgcttaccagtcatcaagattcgacatcgataaagaagcaagcgagctcgaagatcacagcagcagggatgaagaaggagtcgagggaggcggcggcggcgacggcgacgacgagacgatcgccggcggcggcagcttcagccccaacaccgacgagctggagatcctgctggagtcctacttcgtgcagatcgatggcaccctcaacagcctctccaccctgagggagtacgtggaggacacgccggacgtccgcaacatggtgggggacgagaagcagaaccagctgctgcagatggggatcctgctgtcgacggggacgctggtgtccagctgcgccatcgccgtcacgggggtcttcggcatcaacgtccacatctccctctacgactcccccgcctcctccgccgccttcccgtgcgccgccgccggcatcgtcgccggcagcctcgcgctctacctcgccgccctcctctgctacaagcgcgccggcatcctccagtgacgttattactagtactacatgtaaaagaaacattgtttttagtattaactgtgaccatgagtgattaagaacgagtaattatgcgtgtgatagtgtgattacggtgttct

SEQ ID NO: 26295 - DNA, 693 bp, Oryza sativa
  Clone ID: PAT_MRT4530_3109C.1
gaatggatcagtcagaacatcaccactggcttgccgtcgccgccgccgactggtgtcttcgtctatacggttggttggtcacaacaccgttgttgggcgtctacgtcttcaccgaccggccgcctcgtccgccaccaactggtgtttccgcctgcacggttggcctattatgccgccgttgttgggcgtctacgtcttcaccgaccggccgcctcgtccgccgccgactggtgtttccgcctgcacggctggctattatgccaccgttgttgggcgtctacgtcttcaccgaccggccgcttcactgaccggccgcctcatccgccgccgactggtgtcaccgcctgcacggctggcctgttatgacgccaactgatgctatcttcttcacggctggctacatcgccgtcaccgctaataggcgtcagcatcttcaacacaagctgcctacgtctgctgccgactggtttattcacttccatggctgcatgattctgctagtgttgattggccttatcgtcttcatcgccgctaccactactgatggacatcatcgtcttccgtcgccgactggttatgccgccgccggctggtgcttttatcttcacaattatatgtcttcactaccgctttcctacttcaccaaccacgacgtctacaggagcttcgacatctcggcatgcgtcaccaaat

SEQ ID NO: 26296 - DNA, 1400 bp, Oryza sativa
  Clone ID: PAT_MRT4530_310C.1
agcgagcgagttgattccggccggggagacggagacgccgcctgcctaatctcctcgactcgatctttccttcccaggaggcggaggagggaggaggaagaggagctatcgcctctctcgctgacgcccgcaccacgacacggcgatagagacagaggtgggagatcggagatgaggaagctggtcccctcgccgtccctgccgacggcgacggcgctcgcgggtacgccggagatggctgccgtggcgctggcgctggcgctgcggggttggtgggaggaggtgaacgggtcgccggcgtggcaggacggcgccttcttctccctctccgccgcctacgcgctcgtctccgccgtcgcgctggttcaattgatcagaattcagttgcgagtgcctgaatttggttggactacccagaaggttttccatctgatgaactttgttgtaaacggagttcgtgctgtcgtgtttggatttcatgctcaagtgttcctttttcaaacaaaagtgtatactttggtgttattggatcttcctggtcttctatttttctcgacatacacgctacttgtgctgttctgggcagaaatataccatcaggctaagaatcttcccactgacaagctaaggattatatacatggcagttaatggtgttatatatgtaatccaggtttgtatttggatataccttgggacaaatgatagtcctctgctagagcctgtgagcaaaatttttatatcagttgtctcattcttagctcttttgggattcttaatttatggtggaaggctatttttcatgctgaggcgttttccgattgaatcaaagggccgcagaaagaagctctatgaggttgggactgtgacagcaatttgcttcacatgtttcttgataagatgcattgtggtggcgatgtcatcatttgatcctgatctatctcttgaggttttggatcatccaatactggatttcttttactatatgttaacggagatactgccctctgctcttgtcctattcatcctccgtaagcttccaccgaaacgagtatcagcacagtaccaccctattcgttagaagggctggttttgtcgtcacaagcattccaaaaacttgtttcagagcgagaattgtgatatttgagctgagcttcaagtagttttgatgggtcatctatgtcatgcttctgatgtggaagaggtttttttgtcctctcctgacccatttttctgggctttatatttcttgagaccagaatattatcagatgatttatactttgttctgcctaacaaaacttaccgttgggagttaattacatcagtaacttataaatttgaataggtgatgttgataaaaaaaaaaaaaaaaaaaaaaaaaaaaaaaaaaaaaaactaa

SEQ ID NO: 26297 - DNA, 838 bp, Oryza sativa
  Clone ID: PAT_MRT4530_31100C.1
gcacgaggggaggaaagggtagagccatggcgtgcagcttcccgccttcgtccgccacgaggctccaggccgtggacgcggcggccgtgaggagcagcagggtgccgcctagggcggcgaccgtatccccggtgcagagatcgctgggcgccggctgcaaggccgcggctgccgcccggcaggaaggcgcgacgcaggaccccgccatctcagtttcttcggcgcgcacccagttggatctcctggagcagctgacaacccctacatctgatggcattggcgtggagaacggtgctcctacagaaccccgtgtgcaaactactattcgtgagcaactttcagcggttatcggtgacagggacggtgagtacaccctcccgttgggcaagaagctcaaggaaggtctgaagaaactcaactccctgaccgtctcccagaggaggaacatcaagaggcaggccctgctcaccaaggtcagtggacggaatgactcagtgttcttcgccaccgttggcgcatttgtcctagtgccgccattggccatcttagctattgcagtcctgactggttatgtgcagctcttgccgtgaatatatatgaaggtgtgtgttttttagtactcatcttcagacctttaatatataggaacatacttttgctctgcaagagaaactgtatatatatatggtcagatttgtatatgggtaagtaggtttggtccattttgatctgcttgctacggtatatgtgatgctgtaacttgtaagaatttgatgtgccataaatctagcacaagggagcatcgatagaatggatctaaaaaaaaaaaaaaaaaaaa

SEQ ID NO: 26298 - DNA, 354 bp, Oryza sativa
  unsure (1)..(354): unsure at all n locations
  Clone ID: PAT_MRT4530_31101C.1
gtccgcaagaactttctctccgccatcatgcgcgtcgtgggcaccaaaacaacancnncttcttcctacggcggctacagctacntcngcaagtactgccgcgtggggaaggcggtgtcccggaacccggtcccatcgtgccggaactacatcgcgcggtggtgcgcctttttctggggccggggtggatccnncaancatcctccgcggcagatactaaacccntgctgccgggagctcgccgcagtgccgatgcagtgcctttgctactcgttgagcgtgctggtgcgtggcgtgttcacggaggagggcgaccgcttcgccgtgatgatctctcatcactcggcgcccggg

SEQ ID NO: 26299 - DNA, 553 bp, Oryza sativa
  Clone ID: PAT_MRT4530_31102C.1
tttcaggaacttcttctgaagcttaatggtgaccgtgcaatttgggagtatccatttgctgtggctggtgtaaatataacattcatgctcatccagatgcttgatcttcaatcagttaaaccaaggtcgttcatcggagcagtttttctaaagctactttctggtaaagcctatgtttcataatcccttaggatctacaggagatgcttattgtttgtttcttttttgaacctaaactgagtcatgcatttgttcctttgcactccattagtgacctgtgatcaggctttagggtgtatgattgtacagatgttgcagctacaagaatttgtgtttcagtatatttttgttatataaaccagctctattgattttgcaaatagatgactattgtgttatgactattgatagtctacgtttgctaaattcactctaatggtctaaggtataccacactagtcatacttcttgaaacagacaacatatattagattggtgaaggatttagtaataattccctgaatatttgtttcatactatagtgctactaaaa

SEQ ID NO: 26300 - DNA, 370 bp, Oryza sativa
  unsure (1)..(370): unsure at all n locations
  Clone ID: PAT_MRT4530_31103C.1
tcgcgatgctagaactagtgttctagatcgcgagtggccgccctttttttttttttttttttttttttttttttttttttttttttttttttttttttttttttggaaataaaacctgtttttttttttaccatacccaacattttttttctggggggggggggggatactacccatnacaggttttaatttttaaaaaggacagggttaaattttttccacaaaagttttttatacccctaaaaatggaccctttttagccaaaccacacttaaaaccctaaattttcattccgaggatgtccaattggatttttaacccccaccaaaaacagataagtttttttggtctttaacctgaagggttttaa

SEQ ID NO: 26301 - DNA, 319 bp, Oryza sativa
  Clone ID: PAT_MRT4530_31104C.1
cccacgcgtgcgattgctaataccgactctgtgaaattaagatatgctgcctataaaggatggatgaatgttatagatgacttacatctatcagactttgtatatcgtttaggaggactatatgggcctgcaagaagtgctgtgcacacactagccaagagcacatattatgatcgaagacctaaattccatgaatccagacagtccactgcactaatacatgtggttgacaattgtcaagctatacatgctagcatgagcatcagaagtgcaacgaggatatacaacgcagttgatgaccaccctgccccaacatctg

SEQ ID NO: 26302 - DNA, 459 bp, Oryza sativa
  unsure (1)..(459): unsure at all n locations
  Clone ID: PAT_MRT4530_31105C.1
cttatatgcaatctcatttgtttgccattgccggtgtgattaataaatatatggaatccctgtgattcagggcttcctgatttgaattttcaaggaaagcattgacattaggtggttaatactatccagcttaactctctaatcagtcacgcgcaggctcgatttagagtgtgtttggttactgccctgagaatcacgcctgactcaggcatcgatctcagcgttcgacttcggcggctggatcgacctgcctgagagtactcaggtgagggcaacaaccaaacaacctcttagaaatttgtgcttcgtatgttcttagttcaatctatgtttttactttgtcttgcgtttttacaaaatgttgtgtataagttnttagttcagaataattaaacgaacatgactacttctaatgttactgacaaattcagtggcaccctatgttgattgttattcttt

SEQ ID NO: 26303 - DNA, 236 bp, Oryza sativa
  Clone ID: PAT_MRT4530_31106C.1
tttggtagcaatcgtctccactctcccaccaccagagatcctttattcacacactctgaagctgagtcatggcggagcgcggtggttagcgtggctgtgagcgcggtgggttcggccgcggcttcggacgcggcggtggtggagaccgcggagggcgccgtggcgggctccgtcgtccgtatccaggaggaggagaaaaggttgcccttaaccaagtttggacgtctcgagaagga

SEQ ID NO: 26304 - DNA, 438 bp, Oryza sativa
  Clone ID: PAT_MRT4530_31107C.1
tttgatgcacgaagctttgtttgacataaacctcttctcaatactcactatactgtcatttctgctgtctttgcctctgatgctgttctcagaaggggtcaagttcagcccaagatacctccggagcactgtgagtgtttgaaaaattcagataaacagacactattcccaaaaatatatgaacaaatggaatgtcctgtttggcttgcagggccttaacctccaagagctgtgtgtaagagcagcactagctggcttttgcttccatggctaccagaaggtgaggactgaggaaacagtcacctcttctttgggtcaagaaagatttgtgcttgatgattcattgacctgtaaacaaaaggatcattctgtgttcttttttgaaattggcagctctcctacttgatcctggccagagtgtcacctgtcacccacttg

SEQ ID NO: 26305 - DNA, 310 bp, Oryza sativa
  Clone ID: PAT_MRT4530_31108C.1
gggaacaaaactacatttaaatgatcccagacggcctggagttcattcctggttgaacaacaaagggacagagatcatcctaaacccccagaacactgaagcacttgccctgccggccgcactttacctttatgaaaagatgatacacaccattactagccgtggtccaccaccaccgtgtacaaccaccgggcaccgaaacattatcctatggcaaagctgtgaggattgcaagggggctctcaaccctgaaggggggcccccaaaactttttttcaattgggggaacaagggccaccctggtctttgg

SEQ ID NO: 26306 - DNA, 252 bp, Oryza sativa
  Clone ID: PAT_MRT4530_31109C.1
atgggcggagctgggtactgctggaattgggtccggtcggaccggcggtatgcgcacggtcagaccggccagcccgcggtgactcgatgtctcgggagagtatttgcggtgatggaccgggatcagaccggcggcaaggcgacggtcagaccggcgggagtgaggcggtcagatcggcggcggcaacaggcgcgcaggcgacttcagcggtcagaccggttgacctataccggtcagaccgacggcatctga

SEQ ID NO: 26307 - DNA, 1083 bp, Oryza sativa
  Clone ID: PAT_MRT4530_3110C.1
gcgcgccccccctccccctgccatgtgacctagcgccgccccgctgtcttctctttcgagccggggggtttttcaaacatggcagattcaattcaaaggagcggctctggcgatattacgcgggttttattctgtggaccttattggcctgcttctaccagcttcacgaaggaggtatttgcatagctatccatttattcaagttgatgaagtaggtctagaggaggtacctgatgttattcaaaattaccacttatgtgtagtgaaaaatcgacgtctagactcagataccattgccaaggcaagtcagatgaagatcattatgcaatatggtgttggaatagaaggtgtcgatgtaaatgctgctaccacacaatactctaaagttgcacggataactgggagtacaacaggaaatgccgtgtcttgtgcagaaatggcgatctatcttactctgggtgtcctaaggaagcaaaaggtgatggatactgcatgcgaagggcacggacgtggcattactattggttgattcaaaattagaaaaaaaaatcgttttgttggagtttgaaactttcgttgcccaaatggcaataattgatcattgaatcgcctatcttcaagatataataataagatggttgctctgtaatttgttatggtactgataattcatccaccaataccattttgttctaaaagataaatatgaatttactggagaagctgacatagttataacatgcttgctattgtcaaacgaaacagttgggattgtggaccataagttcctctccacaatgaaaaagggatcatatctggtcaatattgcaagaggacacatactggactacgatgctgtgtttgatcacctgaaatcgggccatttaggtgggttaggcattgatgttgcttggacagaaccatatgatccagaggatccaattctgaagttctcaaatgttattataacaccacataccgctggagtcacagaatattcttttagggcggcagctaaggtttgcactaattcttcgaaatgcccatagccacttgactcatgtaattctctacttctatggt

SEQ ID NO: 26308 - DNA, 477 bp, Oryza sativa
  Clone ID: PAT_MRT4530_31110C.1
atggcggcggccggcgacctcaccgacgaggagcgccgcgcgctccggggcagcaagttcgcgccgcttccagcgcctactgccccttcccgcccccagcccaggatggctcatcctggaggaccactaactacaaacaaggctgctgctttagcaaaattccttgagagaaagcttcagcagcctgatgggctggaatctctgaacccagaccttgtcaaattggctgtgagaaatgcaaaagaaacaataaaggctagcaagggtgaaccgtcaacttcaggaagaatagtacggcacgtttcatcattcggagattcttctgagtcatatcatattgctcagaaggataagagttttcaaaacggaggagaacagagcaagaaaaagaagaaaaataaaaagaaaaatctaaaggctgctaaagattccaagtcccaaaaagcatcgaagaagaaaaagttgaaatccctatga

SEQ ID NO: 26309 - DNA, 1024 bp, Oryza sativa
  Clone ID: PAT_MRT4530_31111C.1
gcacgaggccaaagaaggtcaagagcccaactgaaccggaggagtcgagccgccccttcctcttcgcacacctccaccgaccgccgccgatcgtgcggtgcggccggcgtcatggcggcggccggcgacctcaccgacgaggagcgccgcgcgctccggggcagcaagttcgcgccgcttccagcgcctactgccccttcccgcccccagcccaggatggctcatcctggaggaccactaactacaaacaaggctgctgctttagcaaaattccttgagagaaagcttcagcagcctgatgggctggaatctctgaacccagaccttgtcaaattggctgtgagaaatgcaaaagaaacaataaaggctagcaagggtgaaccgtcaacttcaggaagaatagtacggcacgtttcatcattcggagattcttctgaggattctgatgattcaaaagatggagaagaaaccaagggggtcaaaagaaaaaggaagaataagaaggataagagttttcaaaacggaggagaacagagcaagaaaaagaagaaaaataaaaagaaaaatctaaaggctgctaaagattccaagtcccaaaaagcatcgaagaagaaaaagttgaaatccctatgattctttaacttctctggtattagggagctgaaggcgttgctgttgtcatttttcttgatttcacttttttgtgagtcccatttcttgtaagcattgtaagcacttgctcttcctggcattttgacactggaaatcccatttgcgggctgcatgcctgtcacatgatgaccggaagccacatttgtcgagagaggcaagacctcaagactagcacttgtatacaatttacagtgaacaatacaaaacctgtgaaatccagtgctgcaaaactgaattatgggtgctggcttgctgtttcctcacctggggcattgaactcagtcaaacacgaatttcgttgtattctatacgattcttctttcttttggttgtaaaaaaaaaaaaagcggcc

SEQ ID NO: 26310 - DNA, 1420 bp, Oryza sativa
  Clone ID: PAT_MRT4530_31112C.1
tctgcaccaaccgatttcgcagcgccagcccactgattcctcaccgaattttttcattttttttctctctttccattctccccggcgatcgagtagccggcttctgctcgccgcccgcgcgccggagggaggcgaggtccaaagccggcgaggcgccatgcaccacgaccccaaccccttcgacgagggcgccgacgagaaccccttctccaatggaggaggtggtggagcacgtcgtggtggtggtggcggcggtggtggtggcggtggcggaggcaagtctcagttctcgttcgggttcggcggcctcggcggcggcggcagcaagggcggtgccactgtcgacatccccctcgacaacatgagcgattcgaagggcaaggggaaggagctgttgcaatgggaggcagatctcaagagacgagaggcggatatcacgagaagggaggaagctctcaagagtgctcgggtgcccatggaggagaagaactggccaccattcttcccaattatccaccacgacattgccaacgaggatacctgccaatgcacagaagttgcagtaccttgcatttgcaagctggcttgggattgtactttgtctcttctggaattttattgctgcattgtctgttggatcagaggaggagattccaagctctttttcctggctactatctacggtatgcttggaatgcctctgtcatacttgatgtggtataggcctctgtaccgcgcaatgagaactgatagcgcattcagctttggatggtttttcctttgctacatgcttcacattgccttctgtgtatttgctgccatcgctccaccagttatatttcgtggaaaatcattaactggtatattggctgcaattgacaccttctctgatcatgcaatagtcgggatcttttactttgtcggatttgccttgttttgcttggagacacttgtgagcatttgggttcttcagttcaattttacggttgattggtctgttggcctacgacaagagccatgctcgttggaaccagaagacagcaacccatctgtctggggatctcatttgtgctttgagacttggaaggaatcttgcactccttggagattcagcttccgccgaacttgggatcaggtgcagtcccaactacaactgctgaacttgggatcagcaaatacagaaccaaatgaggctgtttatcatatttttcccagtgacgcggctgctgatgaagtgatgaggtgctcacctgctgccacgagattacgcgtggactgcgttggtgggctagatgtacatatatggtgcacagcaaacagcaaggttgaagggagcagcatcagcgatatccagcctccagtttccagcctccattccctcatcctcagccagccatccctgcgctgccacgtggcataa

SEQ ID NO: 26311 - DNA, 213 bp, Oryza sativa
  Clone ID: PAT_MRT4530_31113C.1
atggcgtcccacctcgacgcggccgcgcttcttcttctctgcctcgcggtcggctgcgccggcttcctgggaccgattatcgaggccctcgagaacggctccttcacgggcaaccgtgccgttgacgccgccgccggcgacctcctccgcctcgccctccccgccgcctatttcaccggcataatccttgtctaccgccgagtggctctctga

SEQ ID NO: 26312 - DNA, 541 bp, Oryza sativa
  Clone ID: PAT_MRT4530_31114C.1
tctgtctcgtggctctctccgtctccccgtctctacttctccactcactccccagcgacggcggcgtcgcttctctctctcacatcggtgggcgagcggggtctgcctcaccgcgagcaccggcggcacttcccaaccatgacaacaacgacggcgccctccccaccgtgagcagcggcagcgacggcgccctctccaccctcaagatcaccacgagcggcagcggtggcggcgacgccctcccccaccacgagcggcagcgatgacggcgtcaatggcttcccctggtggatccgatggcgacgccacgtcggcggcttcacgcaacagatcctgtcggtgtcgacggcttcccccaacgagattggattttttttttcatgggatttcagtattttgttttttgagattggattggatttattggagaggagtttaggatttgtctcgtgtgtcttgagattggatttggggggattttacgatttttccgtgtgtgtttggggaatcagactcggattgaacgcaaaaaaaaaaaaaa

SEQ ID NO: 26313 - DNA, 460 bp, Oryza sativa
  Clone ID: PAT_MRT4530_31115C.1
aagtgcagctaaatacctcactaagggaatagcttgccgttctgttcttcctttttttgagtaatattgtaagattcatgcttaactgcgttgccaaccgacggtacagacgctgatcgcgattattgaacagcgctctgggatgtcatgactgcccgcggtgactggacccgacgcacgatgtgtgcacgacggacgaggacgtggctctggagctctgccggacccgcattttgtttcggtcatttgctagccacggagtgccatggggatagaagaagacccctgccgtgactcctcttcctgctgtgcacgcgtgacacgccgggtgattgccgagcctggtagactcgggagtggacttggacgtcgtgtcttcttgagtcttcctatcttgtagaaccggtgtacgttgagtcacgccgatactctcactggaatcgcgctttgaattctggtc

SEQ ID NO: 26314 - DNA, 2398 bp, Oryza sativa
  Clone ID: PAT_MRT4530_31116C.1
atgggccgcaaagatacttcctcgtcgtcctccgccgccggcggcaagaaggacaagccgatgtcggtctccgccattctggcctccatggacgcgccggcgtccaaggccaagccatccaaggcggcgtccaagcccaagccctccaaggcgcccgcgtcgtcttacatgggcgacatcgacctgcccccctccgatgaggaggaggacgacgccgacctcgttgccatggccacgaagcccaaggcggcccgcgccaccgtcgacctcaacgccatcgcgccctcgcagaaggacgcgaagaagaaggacaagcgcgaggcgatggcggccgcgcaagccgaggcggccaagcaggaggcgctccgcgacgaccgcgacgcattctctgtcgttattggcgcgcgcgtcgctggatccgccggggcctccgagggtgactccgccgccgccgatgacaacatcaaggatattgtgctcgagaacttctctgtttctgcccgcgggaaggagctactcaagaacgcctcgctccggatctcgcacggccggcgctatggcctcgtcgggcccaacggcatgggcaagtccacccttctgaagctgctgtcatggcggcaggtcccggtgccccggagcattgatgtcctgcttgtggagcaggaaattattggagacaatcgttcagcgctcgaggctgttgttgctgctgatgaagagctcgcagcgcttcgtgccgagcaggcaaagctcgaggcctctaacgatgctgatgacaatgagcggcttgctgaggtttatgagaagctcaacctccgggattctgatgctgcccgggctcgtgcatccaagatccttgctgggctggggtttgatcaggctatgcaggccaggtccactaaatcgttcagtggtggctggaggatgcgcatctcgcttgctcgtgcgctgttcatgcagccaacattgttgctgcttgatgaaccgactaatcatcttgacctccgagctgttctttggttggagcaatacttgtgctcacagtggaagaaaacactgattgttgtgtcccatgatcgcgacttcctgaacacagtttgcaatgagatcattcatttgcatgataagaatctgcatgtttatcgtggaaattttgacgactttgagagtgggtatgaacagaagaggaaggagatgaataggaagtttgaggtgtttgaaaagcagatgaaggcagcaaagaagactgggagcaaggcagcgcaagacaaggtcaaaggtcaggcactatcaaaggctaataaggaggctgccaagagcaaggggaagggaaagaatgtagcaaatgatgacgacgacatgaagccagctgatcttccacagaaatggcttgactacaaggttgagttccacttcccagagccaactttgctcacaccaccgctccttcagctcattgaggtgggcttcagctaccctaataggccagatttcaagctgtctggtgttgatgttggcattgacatgggaacacgtgttgcaattgttggtcccaatggggcaggaaaatctacacttcttaatttacttgctggtgatcttaccccaaccaaaggagaggtaaggaggagtcagaagctgaggattgggcgatactcacagcattttgttgacttactgacaatggaggaaaatgcagttcagtatttgctcaggctccatcctgatcaggagggaatgagcaaagcagaggctgtacgtgcgaagctcggaaaatttggtttaccagggcacaaccatctcactccaatagttaaattatctggtggacagaaggcccgtgttgtgttcacttcaatatcaatgtcacatccccacattctcctgctggatgagccaacaaatcacctagacatgcaaagtatcgatgcattggcagatgcactggatgaattcactggtggtgtggtcttggttagccatgactcgagattgatctctagagtgtgtgacgatgagcagaggagtgagatatgggttgtagaagatggcactgtgaacaaatttgatggaacatttgaggactacaaggatgaacttttggaagaaatcaaaaaggaagttgaagagtaatgtgtttttatagttgcaggatactgcttattctttatagactgggctggtaaacttaatgtactagtacttattttctttggtttgcagagtatttgtatggttgagtccgaaacacctattcgagctgttcttgctttttgcatgatctaaaaggttccaggatgagtctgataaatatgttttctatgattttgctgccatatctctgtactaagacttccatgatatacatccataataaaaaagtaaaaaaaattaaaaa

SEQ ID NO: 26315 - DNA, 314 bp, Oryza sativa
  unsure (1)..(314): unsure at all n locations
  Clone ID: PAT_MRT4530_31117C.1
aacccttcgactaacccatccagcaaaaatggccgctgatacccccgcgagtccgggtctggccagttggcctcaacaagggccacaaaactaccccccgtgttgtcaagccccgtgtttcccgaaccaagggtcacctgagcaagcgcaccgctttcgtntcgcgagggtgtcagnngaggttgctggcctcgccccctacgagcgcgaggtcatcgagttgctccgcaactccaaggacaagcgtgcccgtaagttcgctaagaaaagactcggtaccttcggccgtgcgaaggcgaaggtcgacaaactcc

SEQ ID NO: 26316 - DNA, 1025 bp, Oryza sativa
  Clone ID: PAT_MRT4530_31118C.1
cagctcgcagcaagccggatggtgaatccgcggcggtcgtctccgaggctaggaacggcgaggccaccgccgcgacaaagattgagctggcatctgatggagctcggcaagaaaagttttgcattgatctcatggctcctcctcctgggaagtctcctgatagagatggtgcttccgaccctgatgtggataagaatgttttggattctgagatggacatggctgcgagaggaaattccgaaaagaaagacgcagagaggccacggagagggctggagatcaatttggaggatgataagatggtgcagaggatgccagcggatgaggttgctccaaagaaactcacgctgcaattggatttggagaagcccagccttggtgacgaaaagtccccatcagaacgacggccacagccggcattgcagcaacagaaacctaagaatgagataaagcatgaaaaatctgcaatgcctgctgttacaccacctatgccgatacctgttggaagttggctggggagttttccaccatttggttacctcggtcctgtaccggcactatcagctgctggtcttcatcatcctatggatgtcaagccagggtcttctgctggattacagcatgctgcattgctacctccagtacggccaaagcgctgtgctacgcattgtttcatcgctcagcagatcaggtacaaccagcaagtgacagcaaagatgcagaacttctggacaccggcgacggcagcagcggcagccgccgccgccagtagatcggcggcgccattctatggtccacgaccattcaacatgggtgtggtgccgccagcggaggctgcctcccttcttgtgaatccaatgcaggggagctaccctgtgagggcccacgcccccctgcaagaagccaaggctccttcaatggctacctctcctttccaggggagtctatcaaaggataaagcagcaatgaacaatgctgctgttgctgagtcaagccaaagaaagcaacctccggctcatgaagca

SEQ ID NO: 26317 - DNA, 291 bp, Oryza sativa
  Clone ID: PAT_MRT4530_31119C.1
atggaggtaaggcgctgccagtgccaggagtcactgcgtctagcccgccttaccatattgtttatggcgtccgccttatgcccaaggcgtcgctatgacgtcgatatcacgtccttagggagaaaacaacagaaagagggtcgctggagcctgaggctgtggcgatggcgatccatccctggtgacttctccatccctagcggcaatcccagctgtcacatgtgcctatcctgtgcctgcgccatcatcctggtcctcggcacctgcgccatcatcctggtcctccattga

SEQ ID NO: 26318 - DNA, 2184 bp, Oryza sativa
  Clone ID: PAT_MRT4530_3111C.1
atgtgggttcctgcagcttgcatgggttcaccaagagagaagcagcggactggtgtctccgtctacaagactagcctattatgccgctgttgttgggcgtctacaacttcaccgccggcctgtctccaccgccgtcgactggtgtcctcgcctatacggttggttggtcacaccatcgttgatgggcgtcttcgctttcaccgaccggcttgcttccgccgccgactagtgttttcgcctatacggttggcggactccgccgccgttgatgggcctcgtcatctacaccggcttgccttcgccactgctgccgactggtgtcctcgcctatacagttgggtggtcacaccgccgttgttgggcgtctacgtcttcaccgaccggccgcctcgcccgccgccgactggtgtttccgcctgcacggcaggcctattatgtcgctgttgttgggcgtctacgtcttcaccgaccggccgcctcgcccgccgccgactggtgtttccgcctgcacggctggcctattatgccgctgttgttgggcgtctacgtcttcaccgaccggccgcctcgcccgccgccgactggtgtttccgcctgcacggctggcctattatgccgctgttgttgggcgtctacgtcttcaccgaccggccgcctcgcccgccgccgactggtgtttccgcctgcacggctggcctattatgtcgccgttgttgggcgtttacgtcttcaccgaccggccgcctcgcccgccgccgactggtgtttccgcctgcacggctggcctattatgtcgccgttgttgggcgtctacgtcttcaccgaccggccgcctcgcccgccgccgactggtgtttccgcctgcacggctggcctattatgtcgccgttgttgggcgtctacgtcttcaccgaccggccgcctcgcccgccgccgactggtgtttccgcctgcacggctggcctattatgccgctgttgttgggcgtctacgtcttcaccgaccggccgcctcgcccgccgccgactggtgtttccgcctacacggctagcctgttatgccgccgttgttgggcgtctacgtcttcaccgaccggccgcctcgtccgccaccgactggtgtcaccgcctgcacggctggcctgttatgacgccaactgatgctatcttcttcacggctggctacatcaccgtcaccgctaataggcatcatcttcaacacaagctgtctacgtctgctgctgactagtgctctcacctctacgtctggtttagacagctaccactactgatgaacatcatcgtcttccgtcgccgactggttatgctgtcgccgactagtgcttttttgcttctgttgccgacgactcgtgttcacttcatcacggcaatgcaactttgtcatcatggtagagcgacttcatctttattatcttcggcactggcaaactctattgctgctacttcgcaagttttgctacttcaccaaccacgacgtctttgtgagcctcgacatctcggcatgcgatgccatgttattttactacaacaagaggctctccaatattcaggatttctacttggacatcttcaacacatatcttcaatcaagcaatgactactcgacgacaagaagctataattctcgactctatgttcagttgtttcccaactaaccaaagagtcgggggctacacaaatacaaggcgcaaaatttgacaaattttatgtcaagctgaagaaatcaattcatcaaccaacgagtcaactccaggagtcattatcttcatctttgataatatatagagcagacattctacttcaacaacttgaaatatttcgagggacttaggcacttttcgcttaggccaaagtgcgcgtgatcaagtgcccaataccttaaaatccttttataccgcagttactcgactttttaggagttggtacaatgcatcttaaaaggtgtcaaacagtaaagctttatatagctgccctgctgatttttttatatagtcaaggtgttgtttgggattatcaagcaattgattggatacaatatcattgctttttgccacccctccacagtcttctgatttggaaaaagtactcgggagatcatggcgaagatgattgaagcactcggctttggagtaatctagttcgagagaagattttcttttcgact

SEQ ID NO: 26319 - DNA, 544 bp, Oryza sativa
  Clone ID: PAT_MRT4530_31120C.1
ctcattcagaacttgtacttattgtagtaatacagtaagagtagagcaagaccttagcctaaaactggacaccccaacaaccagactctatgttatcaaaacacaaccaatcgacaagtaactaatcacctaaacaattgtgatattatccaaagtttcgagctctcctaagctcctacgagcagcaaattccccaaccttctatagctctatgcatcctacaccctcaccaaattcagtacagtttcctccaaaggcatctccctttaaaccttcctacagctcacaatccccaacccaaaggctcccagcaccaaaatctccaccaaaaatctcctcctggaagaaccacttcacttcacctcctccaatccacccaaccccaaagccatggccagccaaaaacaaacgaaatctaaatcgagacgatgaactcgctacaaaatgtatatccaagcgaatcaagaatcgccaggacggggctcacctgaagccgcttcagcctcgatcggaggagcaagggaggcaaggagagccgggggag

SEQ ID NO: 26320 - DNA, 414 bp, Oryza sativa
  Clone ID: PAT_MRT4530_31121C.1
aaagcatccaaagctcaatatatgattgctgcgcgatgaaacatcaatgcgcattaagaaacacactccacgaatggctggcgagctcagactgcgctacagttcaatcgcattgttttacaagggagcacccattcctaccgacttaacgaaaaaggatgccttcatttaaccagatccattaaagaccggactcaacagaaacaggaattttctggagcggcctctgattgctttaacttggatcgaatttagagctcaactgctgtaagtcttcgcatttagtaggcttctttgggaggtggggtgtttacattgcttcttcatcaggactctcaggctcaaacttatccatgctagccatgcgatctatgccgtccataccaccgatgccaccgattatatcagctatgc

SEQ ID NO: 26321 - DNA, 530 bp, Oryza sativa
  Clone ID: PAT_MRT4530_31122C.1
gcacgagggttgaaactaaaaaaagacttccagtgattaccttcatggtgtatacaagctattgcctgaaaattttggttgatcctaactctcttcaatgtttttttctcttttggggcactatctcatctaaaatccctgcgattcaagtacctctctcaggcattcgatccttcggcatttgcgtgctcatctaactatatacagacacaaactcacagccctttaatccactggtggtatatgtatttgacaccaaaatgttgttagttctcattatcgaccaaagttaggaaatgtgatttttatcatttatatttaatcatctcaaggggtactttgaatgactacttaagtaatttttttgttattacacattgatgagacatcaaactatgctgacttggataccagagtggcagttggactgctataggcaaattgaaattagcatgcagctctggggaggaaacatcactcacggtttatgtaatgccttaagatcacacattgacttatttttgtgccag

SEQ ID NO: 26322 - DNA, 219 bp, Oryza sativa
  Clone ID: PAT_MRT4530_31123C.1
atgaagggcgtttttgcaaaatcgccagcgacgacgcggacgcccgagaactcgcaaaaaccacccgccatccagcgcctcgctgacgcgtcggcacacgccggtggccacgccagcgtaaaattctctggagggggcaaattcccggaggggtcaaagcttatcatctttcaaggttcagacttgcaggaaggagaggactctgaagaacacacttag

SEQ ID NO: 26323 - DNA, 304 bp, Oryza sativa
  unsure (1)..(304): unsure at all n locations
  Clone ID: PAT_MRT4530_31124C.1
nnaaacagngggttgttccnnacgncgnccaagtnncgggggnnccnatgtattaangnttccgcccgctccgggggtaccangagnacccatgtttgggcantacttntgaaaaacnanangaccgncccgccccangccncggaccccncntagggaataangggnggangaccgggaccacacnntggtcccngnagngggcntgnnccatccnaattancnangntcncgaagacgtncccgnnaacccccancancccttttttttttttttttgccccganaancccccccccccnnt

SEQ ID NO: 26324 - DNA, 1072 bp, Oryza sativa
  Clone ID: PAT_MRT4530_31125C.1
cccacgcgtccgcgggaggggatcaccgcggccccacttaccttctacaagggcgccgagaaggtccacgaggaggaggggatcggccccgaccagctcgccggcgacgtcctctactacggcggctacgtgctgacccaggaggtgatggacagcatggaccgctacatggccaccgccgccgactccgtcgtcgccaaggcccgcgacatctgcaccgccttccccaatgtgaaggtggagacgcgggtggagaaaggggacccgagggatgtgatctgcggggcggtggagaaggccggcgcggacatggtggtgatggggagccatggttacggtttcctgcagaggacgctgctggggagcgtcagcaaccactgcgtccagcactgcaagtgcccattcagcattagcaagagacagggcaccgattgtcaccatatatagtagccatcaattgaaaccacataagagatcagagagttaattaatccggcagccatggagaacgtcaccggaggaggaggaggaggatcgccgcggcgggtggtggtggcggtggacgagagcgaggagagcatgcacgcgctgtcgtggtgcctctccaacgtggtctccgccgccgccaagtcccccgcggccgcgccgccgccggccgtggtcctggtccacgcccggccggcgcggccgctctactacccggtgatcgacggcggcggctacgtgctgacccaggaggtgatggacagcatggaccgctacatggccaccgccgccgactccgtcgtcgccaaggcccgcgacatctgcaccgccttccccaatgtgaaggtggagacgcgggtggagaaaggggacccgagggatgtgatctgcggggcggtggagaaggccggcgcggacatggtggtgatggggagccatggttacggtttcctgcagaggacgctgctggggagcgtcagcaaccactgcgtccagcactgcaagtgccccgtcgtcgtcgtcaagaggcccggcaccaacgccaaggcctcttgatgcgccaactccgcggtccaggatgcaatct

SEQ ID NO: 26325 - DNA, 327 bp, Oryza sativa
  Clone ID: PAT_MRT4530_31126C.1
tctattcgcgccgcaccgaccgctcaactcttggttcgcgcaggctgcggcggtggcgcaggcgacgtcttcctacacctgatccacctacactttctccggaccggacaagaattagaagacgatgaagtgcaggtacggcgcaagtgcagacccaattgcgagctcacctgctctgccctgcccactaccaagtagtaggctgcttgtggttggctttctccccgacatactacaccatatcaaaggctactagactagagctgggggtgatgctcaagatagggctgaggccctgcgacctgaccatgcctgtcgagaccatca

SEQ ID NO: 26326 - DNA, 1158 bp, Oryza sativa
  Clone ID: PAT_MRT4530_31127C.1
aaactggcagcgacaggcaagactccatgaatggtttgtccagtaggtttttattggccagtagccatgcacccagcatcacagttgattttgagctcttgtggagactgcggaagtaccttgtaatgcttgcaatcttagcagtcagtgtgacatataatgctggattaaccccaccgggtggatttcggacaaaaaacacgactaatggacgtgatgctggtgaacctctccttcgtgtttacttcttcccacggtatgaggtattcttttactgcaatgcaacagcctttgctgcatctcttgtcttaatcatattgcttctaagtaagagtgtgacgaggcagaatttgtggctccgttcaatgcaatttaccatgatattagacctattcagcttgatgggagcctatgctgctggaagctgcagggcagtaaagtcttccatttatatatgggtcctagttgttgctgttttcatatatgttggaattcacattttgttatgcacaaggatatttccaaaatggttgaaagagagagtacaaatgctgctacagaaaattcaagcaaagtggggtgtacatgaggagaacaggagcaacgatcaaaaaagaaacattgaggaggctcgcaagttcattttgacacttgcaactttttctgcaactatcacttaccaagcaggattaagtccaccaggtggtttttggactgaaggcagcagtcatccagcaacccctattcttcggagtaactatcttcttcggtataattttttcatgagttgcaatgcaacttcatttgtggcatctttggtcacaatcatgttgcttcttagcccagaattgagcatgcatggaataagatctaaagcagttattgtgtgtgtggtagctgacctattgggcctgataggtgcgtatgctgcaggaagctgtagagatatagcagtttctttctatgttatgtctgtttccatcatactatacgtatgttattgtatactgacgtgggtcaagttggtgcgaacgtgtactcggatatggagtttctttattactcatgtgcaggtgtgtcttgaggccatgggagtatagctggtgatggatcgaaactagacttgggagaagttaaggaccagaaagtcaaggatat

SEQ ID NO: 26327 - DNA, 805 bp, Oryza sativa
  Clone ID: PAT_MRT4530_31128C.1
gcacgaggtccaaatcaagccaatcaaattaccaagtcaggtagtgctaatggaggggctcatcccgttcatctacaaggcgatcaaggagaggaggagcaggacgtactccctgtgcagctccgacatgtcggcggcccgaaggttcgggagggtgggggaggaggaggaggacgtcgtcgcctgggaggagcagaagcagtgggcggtggacggcggcaagttcgccggcggggagagggagatgacggcgcaccgccggcaccgatcgctggaggagcttgccggcgagcggctcaagctggtcaagcttaagataagccagagagacgaagagcagtgctcgaggaagaaggcgttggcaatggaggcaatgtcggcgtttgctccgccgcctccgccgacgcagctgatggtgccggtggtcgggtacggcggaggaggaggaggaggcgcgggggaagggacgacgacggcggtgagggggtcttacggcccggtgatcgccatgctggccgtcctggccgtgctggcggcggcggccgtcgccgtcggccgcctctgcttcggccgccgcgtgcatctcggccaggccgccgccggccacgacctcgaggcctgggtggagcgcacgtgcggcccgtgcgtcggcgccagaatcttctccacggccggtggcgcgaaggaggaaggtggcgaggcatcagctgcaccggcggagccgccgccgccgccaccgccggcggcggcggcggaaggaacggagcgaggagaagatagttgcattgttagtggtgggtcctga

SEQ ID NO: 26328 - DNA, 423 bp, Oryza sativa
  Clone ID: PAT_MRT4530_31129C.1
aaagttcataccttcaaggttagtttttcacctctatggaaattgcaaggggactatacatttggcagccttacttggcacaatgaaaagaagtcggtgagaattccaatagcagtccggattaccattcaagatttctatgcagatgttgcataacctgggtccagggtgaaacatgcaggaaataacacagcgctcatagaaacaatagagtctacaggagataccaatttccacagaactacagaagtattggttttgtgtatttctttattaccagaatacaaaaatgttcaggtctatgtttgccaacttttgaaatatcatgtacctgcccctcccaaaaaaaaaagataaaaaaacaaaagaataaagaaaaaggatcatttgacagaaaaaaaaataaataaaaaggggcggccg

SEQ ID NO: 26329 - DNA, 914 bp, Oryza sativa
  unsure (1)..(914): unsure at all n locations
  Clone ID: PAT_MRT4530_3112C.1
tttttttttttttttttttaaaaataattttctctaatatgtatagatagattgatcaaaacaggattaaacttccacaaatttccttttggaagtcgatcatgcttgtcgtagtttccaacaatttacaccaaatgttcattacgacaacctctagtcacataaaaagtacaaaaataagtactatttggttctcggttattcggttgaaatgctcagttaaaagggctactcgttttttgacaaaccattttgccctaggcatgaccaaataccaatgtgagaggagccaatgcccnccatctcttttagcggggttaacgagtacacacaggtatatccctcgtttattccattattttttcggacctctgtccatatgataggaggtatcatatagtgtagtgaaatcacaaattacagacagaaaaacaaaacatgtaaagtagtacaacagttttggtgaggctgacaaactcaactttgaggggataatataggatgaggcctgctccacagaaccttttgaagtatgaacattctgtagttctatgcttcttcagagatctgcataattatcggatactattggtcgaaccgcaattggaatcctgacatagtgagggcctccatcataccatgctaggctcccaaataggtagcccccttgaaatttgcgggtcatgctgaaaatgaccttaaagctctgcttctttttgctctggctgaattggagaacagatgggtccactgatatcttcataccgggaggggatttcacaacagccttggaaactgcatcagcttggccaacatttgttactgttctaagcacagctgttggttcttttagatcaggaattgcaaatgatggaaggtttatatttatgggttcaaacttgcagcttgggttg

SEQ ID NO: 26330 - DNA, 299 bp, Oryza sativa
  Clone ID: PAT_MRT4530_31130C.1
acatagcaatgttaagaataggactcctttgcggcaaccgggctctgccggcgagtgtagtgcggcgccctccgctgggatgtcgtcgagtggagagggcgggcctgcccaatgattgtcctcggtggtgtggggagtccagctcgcgcaacaaggctataagctggatgcttttgctacaaccaggctcagccaacgagcgcggtgtggtgccctccgccaccaccgtggagacaggctcggggttcggcaagattgatgccaagatttacgagctagaaggaattataagtcactag

SEQ ID NO: 26331 - DNA, 726 bp, Oryza sativa
  Clone ID: PAT_MRT4530_31131C.1
ggcgttttcgtactcgcctctctccgcgccctcctccgccgccgctcgccgccgttcgtctccgccgccaccgccgccgccatgagggagtgcatgtcgatccacatcgggcaggccggtatccaggtcgggaacgcgtgctgggagctctattgcctcgagcatggcatccagcctgatggacagatgcccggtgacaagaccttgatgcttatcaaacggcttgctgataaacaacatgctagagcagtggttttagtgctagtattatgtctttggctgtcagctcatttgactgtcctgcggccgattcgagtcatccccttggtcttgggagttggaattcttataaatgaacggaaaatggaaaaaacaaattgattggtgccacttcaaagttaaatatgccaagacgaattgatatgtttctgctgttggtttatgctcttgattagttgatgcgcatgttcaatgatttatgatgtttgtctttgtggaaagattacatgtaaagagtatagtagaacccctaaaagctagccagcgatttcgctctttttttccaggtctccatgatatgtctacccctaaaaggggtatatttatgtgatagttacaatacatagtggcaccacgattgattatgcgattatgctgattccggcagaaaattgttagattccttgcgctctatacctgcttgttgcgctaggagagaatattaca

SEQ ID NO: 26332 - DNA, 224 bp, Oryza sativa
  Clone ID: PAT_MRT4530_31132C.1
ctctttctcaagtcgacgaacgctcaggacacatgggttattagacacatgtccggcttcttctacttccactgagttatgacactgcacccatttcgtcattgtaaacggcctgaaagtcgtacattacacaccgaggcgcctgcccagtcttccctaccagacagaagagcacgtccatggatcaggatgcgtggcattacagctgttgtactacatgtaca

SEQ ID NO: 26333 - DNA, 406 bp, Oryza sativa
  Clone ID: PAT_MRT4530_31133C.1
gttctaaattaaaaccaatttaaaaaaaaaaaatagtaattattattaactaaaataaagctattcagactcccttctgcttatcttaaaaaagaatttgtgtgttctttcctattcttcaacaatcatttgcatatgaaaatcttttcttctctttttctaaatctctctactaatttgattaaaatcttttaactttgtaatttcttccgttttaaataaaaagtgtactacgcatcttattccttaatttgaaactgtgtgtgtgtgtaaatgggactaatattagaattcattatacaaatccagatatcattttgaaatttagaaataggaaacattctatgacacaaaaattcactttcgcttttaattaacgaattattagaggaatcctttctataat

SEQ ID NO: 26334 - DNA, 387 bp, Oryza sativa
  Clone ID: PAT_MRT4530_31134C.1
atggcagcagctcgacgaagaggaggagtggcggcggcggcggcggctcgacgacgaggaggaggggcgacactggcggaggggcgcggatccgcgccggcgccggctcgtgggggaggaagtggcggcgacggcggcagaggaagcggatccgcgccggcgctggctcgtcgagggagcggcggcggtggtggaggggcgcggatccgctccagcgccggctcgtggagggagggagcggcggcgtcgggacacggtggtgcacggatccgcgtcggtgccgactcgtggagggagggagcggcggtggcggcggctgagcggcgtggatccgcgtcggtgccggagaagaccacggggtcgaagaagttgttgttgtactattaa

SEQ ID NO: 26335 - DNA, 402 bp, Oryza sativa
  Clone ID: PAT_MRT4530_31135C.1
gcggtgactggggagcggctggcgtgcaagtcgatcaggaagcggaagctccggagcagcgtggacgtggaggacgtgcggcgggaggtggacatcatgcggtatctgccggggtactgaaacgtggcttggcttcctaaggctttgggtgatctttctcttcatcatttttgaataagatgtctcgtttttctttttcattttttactgccattatttatttcctgttgaaattcaaatctatttgtaaatccccttaatgaggttttttttcattttcttaaatcccccctttgagttatattctactccttgcatggagctgggaaccagatggggcgaaatagcttggacctaaaagggaacccaaattttcctcttttaaaaagaaaatctttttaa

SEQ ID NO: 26336 - DNA, 1593 bp, Oryza sativa
  Clone ID: PAT_MRT4530_31136C.1
atggctgatgctaggggctcctcttcttcttccggcgatggcggtggcggcgagggcaacggcggagcaggccatggtgactttgtggggggcggccagcacaactggtaccatgggatccttggggccgtgccgccgcccaacgttgggcgacaaaacatcgtgcaccatcagtaccctgctgctagcttgatccagcagcaccaccagtcgccaacaatgccgctaccgatggcgcagctcccctacgtgccccaatacaccgtgctgcctacgcccgccgtgctcccgtcgcaccaccaccaccacggccagtcgcagatatctcaagaaaacttccaagactgggttccctccaacaatgttgcagctccgcatgttcccagcgcttttcaggattggaggcaaatgtgcaatgggtcggcattcatgccttttggccaaactgctgccaatagcaatgttttttaccagaatctgaccttcaattcatggactagcaataacatgccgaggaaccctgtctacactagtttccaccctgctgcaattgaggatcaccatgctcctctattccatagcaacaatcatgacatagacccagagtttttgggaaaccgacacttgcatggagttgacatcgccggagctccacccgcaaaagccacctcacctgccaccgccggaggtctgctcacgaacacagcccctgccaccgtgtcacagatccatgcgagatgccgccgtcgccaaatctaccgctgctgtggccttcttccgcgagcacctccaccatcagatccgtgcgcgttcgcgagggccgccatcaccgctgccagatccgcccgcggcctcctctctcatttgtacggtggcttggtgttttggcttgttgggaaaaggaagctgggggagaaacgagagaggaagagaaaagtggtggctgggatggatccaccaattgtcttcagaaggagcgatatggagagcgaaaaaaacgatgataatccagatcaaactccggttagtgagcctccaagcatgaatcagaacggtgaaaatcttattattagattcaactgtagagaataccgtgttatcttgcgcaaggagttaacaaacagtgatgttggtaatattggaagaatcgtgatgccaaagagggatgcagaggctcatcttccagcattgcatcaaagggaaggtgtgacgctgaaaatggatgacttcaagtttgaaactacatggaattttaagtataggttctggcccaacaacaagagcagaatgtatgtcttggaaagcaccggtggttttgtgaagcatcacggtctccagacaggcgacatattcatcatttacaaaagctcggagtctgggaaatttgtgagctccgtgccatttacttccacaacgtacggagaatccgacggtgaggactacaacggtgatagaagcggccccggtgccggagaggtggccgacgaagatttcagaaagcctgagtttggttggtattgttgcgcgaagataaacaggaaagaaagtgagatcagggaacaagtgtctaaggagaaagtgaactccaactga

SEQ ID NO: 26337 - DNA, 107 bp, Oryza sativa
  Clone ID: PAT_MRT4530_31137C.1
gattaccgtgcgctgtggcgaacgcgcgtgggatctcaagtgcccgtactgtgtgactcgagtaggaagaaggactatatggcaccaggagtagtgtccgtccccag

SEQ ID NO: 26338 - DNA, 251 bp, Oryza sativa
  Clone ID: PAT_MRT4530_31138C.1
atcacgagattaattaagtaacaagcctatagagaaatagagtggtggcggttgatgagacatctaaaatatattaataaaacaccaaatagaatccaaatgacgattaaaaggaaggacgacgggcaggtcgtgaagcaatcagtcaaagcggttgtgacaagaaagaagggcggcagcgggcgaaccgtagaggagtatagtgacaaagtccctgacttttagcagaacttctagaaagtaaaaacacg

SEQ ID NO: 26339 - DNA, 298 bp, Oryza sativa
  Clone ID: PAT_MRT4530_31139C.1
caattaaacctaattttttatgccaacaaagccggattttaaaactacctgaataatgcattatgcataggaggatattataaaaacaaggggggagggaaccaattaatgaaaatgattgtccatgtgtaatcgtcatccgacaggcgatagacactccaattcgctttgttagttacaatacagactggaaacaactttgcaaggaagcggcagcttaccaagcagttgctgttaaacggaacggtccggtttttaacttgatcccctccctctagcccttgaaacaccttcccga

SEQ ID NO: 26340 - DNA, 3096 bp, Oryza sativa
  Clone ID: PAT_MRT4530_3113C.1
taccaccctactaaaattttggcaactttaatagtagcaagtggatctttgcgacttcaccgccggcctgcctccgtcgccgccgactggtgtcatcgcctatacggtcggttggtcacaccaccgttgatgggcatcgtcatctacaccgccggcctgcctccgtcgccgccgagtggtgcctccgcctacacggctggcctattatgccgccgctgttgggcgtctacgacttcaccgccggcctgcctccgtcgccgccgagtggtgcctccgcctacacggctggcctattatgccgccgctgttgggcgtctacgacttcaccgccggcctgcctccgtcgccgccgagtggtgcctccgcctacacgtctggcctattatgccgccgctgttgggcgtctacgacttcaccgccggcctgccttcgccgccgccgactggtgtttccgcctgcacggctggcctattatgccaccgctgttgggcgtctacgacttcaccaccggcctgcctccgtcgccgccgattggtgcctccgcctacacggctggcctattatgccgccgctgttgggcgtctacgacttcaccgccggcttgcctccgtcgccgccgagtggtgcctccgcctacacggctggcctattatgccgccgctgttgggcgtctacgacttcaccaccggcctgcctccgtcgccgccgattggtgcctccgcctacacggctggcctattatgccgccgctgttgggcgtctacgacttcaccgccggcttgcctccgtcgccgccgagtggtgcctccgcctacacggctggcctattatgccgccgctgttgggcgtctacgacttcaccaccggcctgcctccgtcgccgccgattggtgcctccgcctacacggctggcctattatgccgccgctgttgggcgtctacgacttcaacgccggcttgcctccgtcgccgccgagtggtgcctccgcctacacggctggcctattatgccgccgttgttggatgtctacatcctcaccgttggctcaccttcgctgccgtcgactggtgtttccgcttacacggctgacctattatgccgccattagtgggcatcttcgctttcaccgtcgaccgcctccgtcgccgccgactggtgtcttcattgttattgatggacgactttgttcccacattggccacttctgccatcaccaaggggaatattacaaagctaatcgggggctacagatgttatatcatatttttcataatatttatcttgattgcttgcgacataatctgagtacaaaagtacctatcgagttatagagttctatcttcctatgctttccgtttggtttgccaatggatggttgcctttgggccgattcctagcacccgggggctcgttggatggaccgagtaacgcaaggtgctaagtattattcggaataaatcaaaagcatagagataagataatttattttctgctcttaataattgcaaaagtacccgagtagtaaactccgatccgtgaaactttgttccattaatgacgaactcatgtcactcatatgcatgtttgggaagtgcttaggccgactcccagtgcttggtggctatgactagtcgggcagagtgtttaaacgtaatgagtcatctgctcggggaaatcaaaattgacaagaggagaaatacatatttataaatattttaaaatacttgattttttctcgagtattatatttatatcagatactactcatcctatatgtttgttctgcaggatccagatccagatatgcataaaagggattcatggctttaagcttatctcttacgctccaggaatggatcagtcagaacatcaccaccggctcgcctcgaccgccgccgactggtgtttccgcctgcacggctggcctattatgccgccgttgttgggcgtctacgtcttcaccgaccggcttgccttcgccgccgccgactggtgtccccgcctgcacggctggcctttatgccgccgttgttgggcgtctacgtcttcaccaaccggcttgccttcgccgccgccgactggtgtttccgcttgcacggctggcctattatgccaccgttgttgggcgtctacgtcttcaccgaccggcttgccttcgccgccgccgactggtgtttctgcctgcacggctagcctttatgccgccgttgttgggcgtctacgtcttcaccgaccggcttgccttcgccgctgccgactggtgtttccgcctgcacggctggcctttatgccgccgttgttgggcatctacgtcttcaccgatcggccgcctcgaccgccgccgactgatgtttccgcctgcacggctggcctattatgctgccgttgttgggcgtctacgtcttcaccgaccggccgccgcatccgccgctgactggtgtcaccgcctgcacggctggcctgttataacgccaactgatgctatcttcttcacggctggctacatcgctgtcactactaataggcatcagtatcttcaacacaagctgcctacgtttgccatggctgctgactggtttcttcacttccatgactgcatgattctgccagtgttgattggccttaccatcttcatcgccggtcgtctcgtctgctgctgactagtgccctcgcctctacatctggtttatacagctaccactactgatggacatcatcgtcttccgccgccgactcgtgttatgccgccgccgactggtgcttttatcttcacaactgcgcgtcttcactaccggttcacttcatcacggcaacacaactttgtcatcatggtggagcgacttcatctttattatcttcggaaccagcaaactctattgctgctacttcacaagttttgctacatcaccaaccacgacgtctttgtgagcctcgacatctcggcatgcgatgccatgttattttactacaacaagaggctctccaatattcaggatttctacttgaacatcttcaacacatatcttcaatcaagcaataactactcgacgacaagaagctataattctcgactctatgttcagttgtttcccaac

SEQ ID NO: 26341 - DNA, 451 bp, Oryza sativa
  Clone ID: PAT_MRT4530_31140C.1
cctgttaataatatttgtatgtcctggaatatcaatgggatcagttgtggtgggaagcatgatctctatatgactttataaggtgatgaaatgaaatgttgtttgctttgaatgaagaaacattattaacttgtatagaatagttagcttgaaacgttatgagatttgtggtctattttgtctccttgaaaaccgtgtgtataagtggtacttctgttctagatgccctggtacttcaaaataataggaataaaaacaacaatttaattatcttttctttgttatgagccttgattccagatttcaggacttgggagcattgccgtggcaaactagtactaagtatgcccagagtttaacgaatcttagtttgtactcattgtcccatacaattcatgcaactgataaccaatatgcttgttgaaatctgtcgaatatacagctggctctt

SEQ ID NO: 26342 - DNA, 914 bp, Oryza sativa
  Clone ID: PAT_MRT4530_31141C.1
gcacgaggccccccccgcgtccgaacggattcactgtgtcaaacctccgatctctgcaatggcagcaacggcgcagggcggcggcggggcggtgtccgtgcagcacgtggcgagggcgtcgtcggacgagctcctgcgcaagttcgccgacccggacgcgcacgccaagcagatcacgccgccgcggcgcagcctcgcgctgcggcggaagcggtcgtccaggagggtggcgtcggggctctccgcgagggatttggagtcgggggcggagctcgcggcgcccaagcggaggcggagcatcggcgggtccaccgagtggaaggccgggctgctgctgccgacgaccaccacggcctccgcccgcaagggatccgccgcgagccactcccaccggggcggggccgcgcgcctcgatgacgccgccgggatcggcctcctcctcgccgcgttggagcggacatggaggaagacggtggcgggggcgtcgaagatgttcgtggagaggcaccgcaccaaccacgtgctgctcatcagcgacatggtctgagctctgaactctaaactgtaagcctctgccatgacaggtggccgagctgtgactgattcttctctcgtcatcgagctctcctgctcgggttggttaattggtttccttcgaattgaattcgtttatgactgatcgattctacagtttagctagaataaaatggcagaaaagaaccaccccaaattgaactagctgtgtagttcaggtagagtaggttctttgactcctgcctctgtgtttgcttttattcactcgttgtttctttatactcggttgaatcatcgtctcggcgaccacgttgtaaattcaagtttgcaatatcaataccagtgctgttcttctcagagaaaaaaaagagtgaaaaaaa

SEQ ID NO: 26343 - DNA, 349 bp, Oryza sativa
  Clone ID: PAT_MRT4530_31142C.1
agttgatctatactcatgttgtaatctatagttgaaattaatcaaggaaaaaaataataaatatcaacaaaatttgttttggtttgtctctgatctgtctgtgtatggtagtgctgaccactgagcactgatgactggtggatgaagacgacgcagaggaggcaattaagcagggtgtcttcatttgtcgggcgagaccgactgcttgggactatgtttgggaagcttaagatttcgggaagtagttggttaatagccagcttcttagaatcttaaaaaactgggttttttagcttttagcttctagttcaattttttattctacaactatattctcagaatatgaatc

SEQ ID NO: 26344 - DNA, 1020 bp, Oryza sativa
  Clone ID: PAT_MRT4530_31143C.1
atggtcatctcggcggccgggacttcctcctctaggccggatccatcttggacagaggcggatccggccatctcggcggcggcggctctagggccgaagtgctggtcactgaagaccatcacctttgacaggtattacgggatgccgtcatcgtcacctctgacaggtttaagccctaacccgtttgagggttctagcgttgtctctgatgtcgctggacacagattcgaggaggaagactaccctgttatcgactacgtgatgatacttcaagccaccataggctggcaagagggatctagtgccatctctgatctcgacgagctcatattcgaggaggaagactaccctgtcgtcgactacgagttggatctagatgccccccatgctccagcagtcgcctccttctccctcaatcccaaggtcaccggccaccgtctctccgccgtctcgagctccttggcgccagatctggtctcaaggtggtcgaagaccactatatctggacggccccaagctgtagccacctcctccttcgccctctgccccaaggtcccagcagccaccacctccagatccgctcaagcgacgacgacgacgaccgccaacagtggctttaggatttcatcatcaatggaaagtcccaactcggacccctcacagataaggattaccatcaacgagttaaaatatttacccgtcacatatgaaggttacatgcatcgggccatcgccgctcaacccgcacctggcgccgccgccgctcgacccgccccgccgcctagtgccgccgcggctccggccgtcccgccgctcgacccgctcgccaccgcccgggccaccctgccacctagcgccgccgccgccgctcgacccgctcgccgcctggcgtccggcgccatcgcggcttgggccgccccgccacctagcgccaacgccgaccggtgccaccgccgccgctcgggacgccctgccaccgccgcccggtgtcgtcgtggcttgggccaccccgccacctag

SEQ ID NO: 26345 - DNA, 756 bp, Oryza sativa
  Clone ID: PAT_MRT4530_31144C.1
ctacagaccaacccccctaacaagaatcttgaccccgagattcagcacgtaagggagcagctccggaaactcggcgcgaagatgatcttctcgttcccaggttgcttcatcttcggaatggttgctccattggaccttgtagaacttgatggtctttcgtcgagtctgacgttctgccttttcaagaactctgatcggcctttctttgtaggtcagattcttttccagctcgatattgcctaggggaacttgttcttctggaacacgaagacatttcttcaactgagacacgtgaaacacgttgtgcacatctgcgagaccttcaggtaacacaagctgataagccacttcgccacgtgtagcgcccgttccgtcgtggcgcctagagggaaaatgtaattccgcccggccgtcatcgccatcgtcatcgacttggccccgcccctcctcgcgcgtgcttccaagggacggaggcagagctccctccccctctgccgcatcgccctctctccctcctccttttcgccatagtggcaagggggcaagccccctttctctccctctttttccctttttcctcccgccggcgtcatcctcccctccccctgtcgccgtttgggccgcgaccgccgagcgctggctcgctcccttgaccgcccaaggtcggtttccaaatcgacattgccgctctataaacctaggcgctctcccttcctttttctcctcccaatctcccccatttttcacccacgccat

SEQ ID NO: 26346 - DNA, 2478 bp, Oryza sativa
  Clone ID: PAT_MRT4530_31145C.1
ttttttttttttttttatgataaggacataaccacctctctccattacccacatagagtacttcaattactatacatagcgcatatatatacaccgtacgttgtactaaccgtatccggtacagcattctgaaataaaccaataatcaaatccgccgtcacaaacgaaccttctagaagcttccgagcggtacaaaagggaataaaagtgcatgtgtttcaggacagctagctagtgtcgtgttatctacacgggcccacctagctacgcgcttcatgacatcatctgacgacgacaagcctgcctgccgcctgccgccgcccttggacacggctgacgtagttgaacggcgccgccgccgacagccgcctcgcaccgccgctcctgaagaactcgccgcagtgccccgcgcccgatccggccgccgccgacgaccgcggcctgaagggatcagccgcgccgccgccgctgctcccgctggacccgctgctgctgcgcaccgacggcggcgcggcgtcgaccctcttccggctcatgttgcacggctccgtcgccctgccgaagctgctgccgggccttttcaggtgaggcatcgcctctttctcgctgaacagagtgcgcagcttcttctgctcccggaggcgcctcctctcttcttcctgcctcagcctggcttgcttgtgctcttccaacacggcgaccaagcgagccccgtcatacagaaaaggcttgtttctttcggtctcccagactagtgttcgactcatcaggttgtcgatcattgctggaatcttgttgatgataagccttgccttttcggcgcgtttcaggttcagacgcgctattcttccagtattgaatctgttctcttccaaattgtactcctcgagccatttctcttcctcacacgccagcagccacttgttgatcttgtccatgatttctttcctggactgctgctcctccttcgccttcgcgatctgctcgtcgatgctggccatgagctcagaaggattcacaaggccagaatcaatcaacgcgatggacttctccggcacagtgctggtgtcaggctcgacgtgcatgctcctgcagatgctctccagctccaacctcctcttgagcacgagctccttcatccggccagccttgagcctcgtcaacctctcgacctcctcctccgtcttcttgatggttgcgatggacagcacgccggaggacagagcctcctccctcgccggcctcagaacggccgtcgccttcctgaagctccgccgctcctcctccggcaagtccatcaggtcccagagctcgaccagtggcaccacggcctctcgcagcatggctgctcgcttggtcttctccgacgtgagcatcgcgacgacctgggagaggctggccagcgtgctgtcgctgatgctggtgggcttgccgggatccgccgtctcgtgcagccccgggtggacctcgttgacgatggcgatgaagtcctcgccgagcacgtcgcacagggagtgcacctcggtgacgtgctcaagaaccctgtgaagccggtcagacttctctttctgaagactcgacaggcgtgctctgtactcgttgagcctcctgatggtcagatcatgttcatcgaactcactggctcttggggaattgtcatagccgtagctcctccctgagatttctgttgatatcttgtcgatttctgatcggatggcagtgaactgtttgctccgttctgctttcattgccctcagctcttccagcaggtttgttgctgctgacacccggtcgttcagcgacatggtccatttgttcacctctgctttcgacgtcctgcaccgggaaaaggcggcaataaggtttttgggaagcgcttcgcgcgactgctccctgttcgtccgcgacggctcgccttcctctccgctcgcgtgcttcgtaccttcgtcgacgcttgcaaccgcgagtagttcctgccgagcaactggtatttccgccacctcggtacgtgttcgacatgttgcgcatatttgatctgttcgtgttttattgcttagtttacatgtgtagatcttgagctgcgggctgctgtcggcgccgagggcggcggtgagcgcggcgatctcgccctcgccggcggcgagcgactggtgcagcgacgcccgctcggcggtggcctcgtcgaccttgcgtcggtacacgcgcatgcactccatctccagctcccgcaccgtccgctccctctcctccctgctcttccctatctccccccacagttgcctgagctccgcgagcagggcgccgcagccgccggcggcctcggcgccgccgccgctgattccgtcgggccccggccatgaaagccgcatcgccggcatgccgtacaggagctccgcggcgacttctcccatggcggatggcgagcgagcgcgcgcacgcttgattgcgaggtcgagaggggttcttttcgcggtgaag

SEQ ID NO: 26347 - DNA, 291 bp, Oryza sativa
  unsure (1)..(291): unsure at all n locations
  Clone ID: PAT_MRT4530_31146C.1
attatnaattgtaacttatttttgtggggtttttttttccacagtttctttctttctttttgnggaaaggaaattaaactgatttattccttgtcccattaaaaccattacactcgggtacgtggtgaacccgttaaagttaaaaaacaaaccgtcttcttagaggggggccctgctcccttttccattagaggtgcacgaaaaaccagctcactagcagatcttctccccacccccattaagaaaacggtagggatgccccccccaccgccggccgatccgccccccgga

SEQ ID NO: 26348 - DNA, 1395 bp, Oryza sativa
  Clone ID: PAT_MRT4530_31147C.1
atggcaaccgccgccgcaggcgatgatccaccgtcaccgccgccgccagcggagcggcccggagggtggttctccggcctggtatgcggcgccggccgcctcctcgccgccgtgctcggcccggactcccccgactccggcaccggcggctccgcttcctcctcgcaggagtcgtcgtcccagtctccgccgcctccgcgcggccaccgcggcagtggcgataatactgcgcactttgcttctaacaatcagttcaaccagagcggaaaggagattactctaaaagacagtggtgtgggatccttagcacttgtctcagagatagatcccaaggatgctatactgcagatgcttttgcaagaaacgtactcaagatcggaatgtgatatactgataaagataattcacgagcgggttgtggactcagaccctgatgtggttgaaccttctattgttcttccaattgcttggcaaactagccaacagcaagatcatgttccatactcttcatttcgtccaaacacttgctctgcgagttcaaatgttcatgattgtagccaacagcttgacaacaacattgttgagaacggatggcttgaagagagtcagcatgctctgaaaagaagtaattcttgcactggacataacctcgatgagtctcactcccgaagtgtcagaccaaagctaaatgatttgaacatttcaaataggcaggatggtattcttaagagtcattcagatatagcttcatttgaagaggcaaccaccaagtaccctaatgcattcagggggataccagaagatacaaagaagctgttcaaagatatcccccttctcgggacggacaacctaatattttccaacattgtttcatatgatgacactgataatgacatatcagctctccgtggtaagcgtcctgctgtaactgcacggacctttgcttcagccactagtgaagccaaccgggataaccgttgtcctaccatgctctatccatactctgatcgggacctgacaaatacctttcctattaaggtggaacctttggatgatattgttccttttgatcctgaaatagtagtcctttcacgcaaaaaccgtaacacaggcaccatctgcaatgacccttgttctgtttcaaaacttatgtttcaagaggacaaggaggctgcgcccaggcgaaccgatagcggttggccaggagccagacttggctccaacccaggcgaagaaaccggttgggaggccaaggaagtcaagaaggtactggaaggccagcagaagatgaagaatgcgcaagatcagaactgtaaaaggctcactccagttagtagtcactgcacagtcctacctccgagcagtggcgtattaagaaataacagaagggtctga

SEQ ID NO: 26349 - DNA, 483 bp, Oryza sativa
  Clone ID: PAT_MRT4530_31148C.1
atgcttagcggtgacagatcccttcgagaagggagcgccgccgaccgagaggaggaactgaccttgacggtgaagtcgtggacggaggtggcggacggcgcggcggccatgctggagcgagcggcggccgagcggtctccggaggaggaagcgggtggttgcgaaacgcgtgtggcccacgcggaggaggatgctcgttgccgccgcgttctagggaacggcggctcgtggagacgggtcccgccgcgtgttgggaggaggaaccaaccgtacgtggcgcggccggtcaactcgctgtgcctgcgtcactgcgtcgcgcatcggttgggttgggttgttcactcgtgcacggacacggatatgaggggagcggggcgcacacattatcgccacgcggcccacgcccatcgcgtttggggggcctgctcaactgtcgatggttgcaaaggcttgcagcacgatgggtcgggctggggtaactga

SEQ ID NO: 26350 - DNA, 160 bp, Oryza sativa
  Clone ID: PAT_MRT4530_31149C.1
ggagaaggtggctagtgcgttccacgaggcgcacgactgcctcttcctctgggtggacgtcgcaccggaccagatgcgctatgcagtgagatgcacgagtacccgcttggctagcgtgatggtgctggagatggtgatgctgaggttgcggacatgctag

SEQ ID NO: 26351 - DNA, 1812 bp, Oryza sativa
  Clone ID: PAT_MRT4530_3114C.1
ctcctcgccgcggcccccccctcgccgccggccgcctccgcgcgccgtctgccggccatgccgcccccttccctcctgctcctccatccacgcacgccgctgccgcaccaccaccgctcctccttccggacgagctctccgcggccatccaggatggtctgcgccgctgccgaggggtttatctccgcggcgccgatcctcctccccgacggcccgtggaagcaggtggaaggcggcgtcacggcggcgaaggggttcaaggcggcgggtatctacggcggtctgcgcgccaagggcgagaagcccgaccttgcgctggtcgcctgcgacgtcgacgccactgtcgcgggagcttttactacgaatgttgttgctgctgcaccagttttgtactgtaagcgtgtccttaattcatcaaaaacagctcgagctgtgttaattaatgctggacaagcaaatgcagcaacaggtgatgcaggatatcaggatacagtggatagtgctgatgctgttgccaagcttcttaatgtgagcacaaatgacatactgatccagtcaactggtgttataggtcagagaatacgggacgaggcacttgtaaattcacttcatagacttgtgggctcactgtcttcatccattgagggtgcaaattctgcagctgtggccattacaactacagaccttgttagcaagagcatcgctgtacagacagagattggaggagtgcctatcaaaataggaggaatggccaaaggttctgggatgattcatccaaatatggcaacaatgcttggtgttttaacaactgacgctcaagtcagcagtgatgtttggagagaaatggtccgaacatcagtgagtagaagcttcaatcaaataacagtggatggtgatacgagtaccaatgactgtgttattgctctggctagtgggttatctggtttatccagtatccttactcatgatagcactgaagctcaacagttccaagcatgcttagatgctgtaatgcaaggtcttgcaaaatccatagcatgggatggtgagggtgcaacatgtctaattgaggttaagcgcttagcatttcattcacttcgcaccatcagcatagttactgtagctggtgccaataatgaggctgaagcagctaaaattgctcgttcagtggcatcttcctccctggttaaagccgctgtatttggaagagacccaaactggggacgtattgcttgttctgtcggttattcaggcattcagtttgatgcggaccagcttgatatttcccttggagctattccactaatgaaaaatggtcaaccactcccatttgacagatctgcggccagcaagtatctgaaagatgctggagacatccatggtacagtgaacattgatgtatcagttgggaggggaggaggaagtggaaaggcctggggctgtgatttaagttataagtatgtcgagataaatgcggaatacacgacgtgaaagtcttacactgtctatgaagaacggtctccgcttgatggaaatggaacgctgttcggatgcagctaggcatctgagcgatctgtatcatattgagactcgccctttgttgtatcaatcggctgaacgtgcattcttttgtaagtgtaaggaatgcgctatacaatgttacggcacaataagtaagctgtctgccatgccatctgattcaattctaatttataacagtgacaggggatgtttgggcgcacgccgaataaagtttgtatttttgtgccccagcccggaaaaaaaaaaactcgagactagttctctctctcc

SEQ ID NO: 26352 - DNA, 448 bp, Oryza sativa
  Clone ID: PAT_MRT4530_31150C.1
gcacgaggcctcacaacctaacttatcacacccttccctttgcaggctggaccacggcagcaaccggggtgggagatcagtcgagtggagtcggcgaccaagtcacagcggggttgcaccgctgcaagcacggaggtgtgagaagcgggaatcccttgtgcggcgtcgtggccgtacgggacgaacgtgccactacaccggccgggagccctagctaggatggctgtcgacaacctgaaactcaggcccgagccctattgacaaaggggcaacaagaaatttcgtcgagacatgaggaccatatgattctaagaattatgaggattatgtctataaggtttgaggaaaactggtttagcaccgggtatgagagggatgtgatgatcacaaagtctctttgggggtaagcctgaaggttccaggaaatcttcctgaaaagagtcaagaa

SEQ ID NO: 26353 - DNA, 346 bp, Oryza sativa
  Clone ID: PAT_MRT4530_31151C.1
gcgaaaacacgaggcctgggagatctgcttaaatccagtgcaggtccaaaaaagcttgcctttaggttcgtgagcgtgccagttgatttgatcctgcaatcaacaagaaataaagacaaaaaaaccatggttaaatccataaatgatagccgatcggccaggactcaatctgtgcatggcaatccatatgaagcacttcaacctaacccgatgacgtgcactgagtcatattgtcggactcgactcaatcggctaaccttgtccaactcggattccgccaatcctggtcgcagccaattcggactttagtcgatccttactctgtttccggaacgatttccatttt

SEQ ID NO: 26354 - DNA, 568 bp, Oryza sativa
  Clone ID: PAT_MRT4530_31152C.1
gggagctcgcgcgcggcggcgttggcagcggcgtgagcttgcgccttgcgccggatggggagagcggagtagtcgagtagtacaggagagagaatgaagtgagagagagagagagtgaagtgagagcgagagcaacaggatagggttgggatcgcttttctataggtttttagcctatgctgttttagtctgtttaagtccctcccgtttggtagtttagaggctaaaagggacttatcataagtccctccaaccaaacaccacctgatccaggcctagttgccgctgccgcatcctcctgtcccggccaccacaggtgcgtcatccacctttccgggcgcagctagcgaaggtgcgcgtggtggggtagagggaagaggtataggttattgagagagcgaagtatttggtagtggggcggcgctggctgcttgtcataatggcatggcctgacactaggatcttgtcgatcggtgtgggttcagttttgctgtaagagcaggtacaatagcgctattagcccgctataaacatatttttagtaggataaatggttataaggcaagta

SEQ ID NO: 26355 - DNA, 2660 bp, Oryza sativa
  Clone ID: PAT_MRT4530_31153C.1
gattctgaagttttctcaatcaaatgcagtgaaaagatggtgtgattacagagttatgacgaaatcaatgcatgtcctggaagcacatctacatcactggctgagcaatcaacaaattgaggtggctgatattctttaaagatccatcccaaaatcatttaaccaactctacaccatcatgtaattaaccaaatggttggcccaaaggggaggaaaaagaaaagaaaaccaaaagtcctaaccatttgtaccatatccccactaagttgagactttttaatcttggcggtgccaattgctacatgtcacaggagtaaggaagggctaacaagaacaaagagatttacatgcgcggaagcgcaggtaacgggcgctaccctcgcccgtcagaggaatcggcttgggatgacgtcatgcaccctgatcgggaagctgtagaactcgtcgtttctaggatctgagtaacctttccgacggtgcaggaacggcatgaaccatggaagcccccggtcgttttcgtagcctctaaactccagtgtgttgtccaggatcgatgcgacaatcagtgacactgtcgggccagaggcgaagactgtgtttatgatgtcattgaaccatccagcatttgttcgggcaggtccagtgctagcagaagcagtatactcatggaagtattgaggaaccgagatgcctaggaacagcgaaagtccaatgatgtatatgttcctcatcgaatttttgtttacaaattgcatgtacgagactcccaccgcagcaacaataccaaataagatacagaaaattgctgcgaagattggcaatggaatagatgcaaagaaagcaccaaacttcccaaatatggagaagaaaatcataaatccagttgatatctggatcactctcctgcttccaacttttgttagtccaagaagcccaatgttttcaactgatacagatgaaccagctggagcgccaaagataccttctaggaacattccaatgccctgcaaaccaacactcctactaaggacactagctggaggtggtgtcgcaccagctagacgtgcagttgcaaagtgtgcaccagtggactcaaaagcagaaacaagtacagcacccatcattccaaatgaatgacctgcagtgaagattggtgtaccccattggaaggggtatgggattttgatccatggtgccgatgatatgagataggacttgtcagtgcggcagtgctgctgggtcttgagtgaaacatggttgtatgcaccagcagcagtaaggatagctgcaaaggcccacacaatcccaatacaaagaagcaacgaatacctctcaaacaagaaggtgattcgctcatggtaatgatggaagtaatatggcacatactgttgcacaacaactgcaaggattagcattggtagcccgatctccacacactttccaacctggggaaagccaagtgcaaatagcccaagaccaacaacgcaaacaacaggggtcattattacaggactaaatttcctggcgaatgccccccaaattgtgctgaacccaagaatcatgttgaggatagaagcaacaatcagagccccttgagttgctctcattgtgtgagtaaatctctggtgactgctcgcatagttattttgttcaaagtctttggctattgacagtactgggacgacaaatgcaaaggaagcattcataactgtagggagccgcgttccaacaagtgtttggaggagagtattgatgccactcataaataggaaggattgaataacacgagccttatcccctggggtaccacccattgcaggaacaatagttgatgcaagcatgacagtagaacccagcatcacaagatagtggaggaatgcaagtgcggccacctgaacccaggaagggttggagtggacgcagtaggcgagatggtggaactgctcgtgcggcgggaagacggcgccggtgccgacgggcggatgcatgattggctgcatcaccatcggcggcggcacggccaccggcggcggcggcggctggttcatctcccccattagttacaccgactgaaattcagaaagctcaagctccaagcttcttctgcttcttcttcttcttctttccagagagtgcagatggaggagaaaaaattatatatatgtgcaaaaatatcagcagaaagtcttcttcaacttttgtttctcccttttcttggtttcttcttatctcctttctatggctttctctagtatggtagagtctatcaccagcggcagtggcaacaagacaaacacaagatttgtaatcttgcgtggagcgacccgggaagattgcaaacttgaagacttcacctttattgccacacccacacacacttatctttccccactatttcttcttgattactccactaatcacacaagcaagcaaaacacaacacctgcgaggggggggagtgagtactaatgcactcttgaaaatgagaggagttcagttcacttcagctactgggaggagccaaacagtgtttttggagccttggatggatctagctaggacaacattaaatcttgttttcttttttcttttagttttttgagagctgtattgaatgcaacagattccaaggatggggagagtgtcctagcattaaaact

SEQ ID NO: 26356 - DNA, 255 bp, Oryza sativa
  Clone ID: PAT_MRT4530_31154C.1
atggagtcgcgggcggaggatcagggcgtcaagcgcagggagccgtgcaagaagaggatcgggagaaccgcgggcgccggctcggaagccggcaatggcagcaggcatcaggcatcctgctcgccgccgccgccgccgtcgtcgtcgttcccgcgacggtgcgcgcgtctcgtgaaggagcagcgcgcgcggctctacatcgtgcgccgatgcatcaccatgctcgcgtgctggcgcgacgtcgactacctctga

SEQ ID NO: 26357 - DNA, 283 bp, Oryza sativa
  Clone ID: PAT_MRT4530_31155C.1
tttggcaggaactgacccccggttgccccttttacccacccccaaactttccttttccacaagaacacatgtttgtttaatttaccggaaaccccttcctctcctggtttaaaaggaaacggcgctacataacatggccaggccatcacccctagggccaattacaagctccatacccataccggggggtttccccccccctttcccaattctacaggtgggccctggggaaaaaactctttttttttcactttttttcggcccttggccgcccccctggtgt

SEQ ID NO: 26358 - DNA, 1119 bp, Oryza sativa
  Clone ID: PAT_MRT4530_31156C.1
atggctaccccacaattggacaagagaattcttagcgaacttgaacttatgggattccctactgctcgttcaattagggcactccatttttctggtaattccagtcttgaatctgcaataaactggcttctggaacatgaaaatgatccagacattgatcagctaccactgattccaagagaaatcaacattgaatgtggtgatacaccaaatgaagcgagaaatgacattcaaggaatgagggctgatgcccaggagagtaaaccagaagagtcaacagcagctggaagacagaagccagtgctttatactttcataaactgttgtcacacctcacacctgaacttcctgtatcaggaaacatcacaggtagaaagagaacttaatgcagatcaaaacgaggacgaagtcagaaggaggatcatagaattgttcaagtcaaaacaggatggtcaagaaagagaaagaggtagaatccggaatcaattacaagaggataagagggagaggattcgagctgctaaagatcttatggaagcaaagaggactcttgaggaaaatcaaagaaaacggtttgtttcatatgcaacttgcagaaagaaggcgaaggcttggtttgccaatggaaaacccagtagcttcagtcccaaccttaactccaacgaaggtctaaaatttccagagcacctctatttttcatgcgaccttgaaacaacatttctcacctttttagctcctcagataaaacctgttgaacctgctgtgtcaccagaacaactgagagactgcctacgaaatctgaaaaagaattacaaggatgacactactaaagtcacaagagcattccaaatactgctgaagataattgccaacatagtgaagaacccagaagaggagaagttcaggaggattcgactaaacaatcctgttttcaaggaaagagtgggcaatttgcaaggaggcgtagaattcctggagctgtgcggattcatgaagctcgcgatcagcggctacctggtaatgccgagggataatatcaacttggcacttctcaatgctgctggagttgaggtagcatctgcaatggaaaacccctactttggcctactctccaagtga

SEQ ID NO: 26359 - DNA, 105 bp, Oryza sativa
  Clone ID: PAT_MRT4530_31157C.1
atgctgctccgggtcaagcagctgcgggtcagccaagccacgacacgaatgcacgactcactcgacccggcccacaggctacaagcttctcgaactgagttctaa

SEQ ID NO: 26360 - DNA, 408 bp, Oryza sativa
  Clone ID: PAT_MRT4530_31158C.1
ttcggcacgaggaagacagacaaacgataccgtctcaatggcgataaagatatgagccgaaaaccagcaaaagcctgtctaaatcgagatttttcacaatatgttgcctacacagctccacaattgccgagcaaagtcgatcttcgaccttggatgacatcaattgaagatcaatctgatacgaacagttgtacggcaaatgcaatggctggaatctacgaatacttgaattatcgaactactggtcgccttgaagacgtcagtcgtcttttcatctattataatagtcgcattaaggataatgaaggagatcccgatatcactgatgaaggtacaagtattgctacgacaattgaagttgttgaagagcaaggtgtctgtcttgaatcactgtggccatacaatatc

SEQ ID NO: 26361 - DNA, 603 bp, Oryza sativa
  Clone ID: PAT_MRT4530_31159C.1
atgcagccgatggatccaagtaatgtcattaagaaataccaacagcaggaagctaaatcatattcttgttcatcacttaagccgactcaaaagaatcggaaagaagaagtccgttttacctttgatgtttctaagtgtgatcgcatatttgatgagttggttaaaaaggagaacatcaagctatctgatacaataccgttgcttgaggagttaaagcgtgcatattgcaaatggcataattcttcttctcatgcaagtaatgaaggacggttggttttgtatgagatgcaagttgacaagataccattcccagttcataccattgatctgaacaacgccaagatgctcattcggccggaacaagccgaaggagctaaagggaagaatgtgatcatttgtgaggagaggttgaaaacctcagaagataagattctggccaggaaagtggtggttgagaagactcctgatgggaaggagtcactaaaaattactgtgaaagcttctagactcgggggcaagaagttccccgtgaggctctggtcaccctactgctcaggtgctactagtcagaccggtcaccctacccgatcaggccggtcctag

SEQ ID NO: 26362 - DNA, 2068 bp, Oryza sativa
  Clone ID: PAT_MRT4530_3115C.1
acaccaccgttcatgggcgtctacgacttcaccgccggcttgcctccgtcgccgccgagtggtgcctccgcctacacggctggcctattatgccaccgctgttgggcgtctacgacttcatcgccggcctgcctccgtcgccgccgactggtgtcctcgcctatacggttggttggtcacaccaccgttcatgggcgtctacgacttcaccgccggcctgcctccgtcgccgccgactggtgtcctcgcctatacggttggttggtcacaccaccgttcatgggcgtctacgacttcaccgccggcctgcctccgtcgccgccgactggtgtttctgcctacacggctggcctattatgccaccgctgttgggcgtctacgacttcaccgccggcctgcctccgtcgccgccgactggtgtcctcgcctatacggttggttggtcacaccaccgttcatgggcgtctacgacttcaccgccggcctgcctccgtcgccgccgactggtgcctccgcctacacggctggcctattatgccgccgctgttgggcgtctacgacttcaccgccggcctgcctccgtcgccgccgagtggtgcctccgcctacacggctggcctattatgccgccgttgttggatgtctacgtcctcaccgttggctcaccttcgttgccgtcgactggtgtttccgcttacacggctgacctattatgccgccattagtgggcatcttcgctttcaccgaccggctcgccgtcgtcgccgccgactggtgtcttcgcctatacggttggttggtcacaacaccgttgtcaggcgtctacattttcaccactggtttgctttcgccgccgctgattggtgtcaccgcctacacggctggcctattatgccgccattgttgggcgtctacgtcttcaccgaccggcttgccttcgccgccgccgactggtgtttccgcctgcacggctggcctattatgccaccattgttgggcgtctacgtcttcaccgaccggccgcctcgtccgccgccgactggtgcttccgcctacacggctggcctattatgccgccgttgttgggcgtctacgtcgtcaccgaccggccacctcgaccgccgccgactggtgtttccgcctgcacggctggcctattatgctgccgttgttgggcgtctacgtcttcaccggccggccgccgcatccgccactgactgatgtcaccgctagcacggctggcctattatgccgctgttgttgggcatctacatcttcatgcccttacctctacgtctggtttatacagctaccactactgatggacatcatcatcttccgtcgccgactgattatgctgccgccgattggtgcttttatcttcacaactacgcgtcttcactaccggtttgcttctgttgccgccgacttgtgttcacttcattacggcaatacaactttgtcatcatggtggagcgacttcatctttattatcttcggcaccggcaaactctattgctgctacttcgcaagttttactacttcaccaaccacgacgtctttgtgaacctcgacatctcggcatgcaatgccatgatattttactacaacaagtgactctccaatattcaggatttctacttggacaccttcaacacatatcttcaatcaagcaatgactactcgacgacaagaagctataattctcgactctatgttcagttgtttctcaactaaccaaagaacattctacttcaacaacttcaaatatttcggtttagacgagttgggcaacaacatcaactctcctccaattatttgtcttcacggttggcctactacgcaactgccgatagaggatctcatcgttatcatcggctgctacatcgctattgactggatcaccgacatcgtcatcttcatcaacatcttgtcaagcctcatcaacatagccaactctgctgccgttgatgggaaacttcgtcatcatagtcggctatctctgttgccgctaatcatcattaccgtcggatgcgtttgtcgccgccgattattttcttcatcttca

SEQ ID NO: 26363 - DNA, 531 bp, Oryza sativa
  unsure (1)..(531): unsure at all n locations
  Clone ID: PAT_MRT4530_31160C.1
gtttcaatagtgattaatttggtgatttttatggggatggatgcataatattttggggtgcattgattatagatgcacgtaattattacaatactgtctgctaaagtaagttgaaattcaaaagaaaaccaaaatctaaaaaaaaaatgttcactaacatattgccatggaatgtatggctagctgaaaggctaaactaaatgacaaacatctttatatgcatggaatgcctctaaataaaccaaaagacattataatctatccactaccaggttcaattgcgaaatggcacgtagactagtggctgcagtgacctgactagcatcccaagttccttaattcaaatcttcatagaagcaaataccagattaggttatttgaggggctaagttcctaatttaaaaaggttgcatacatccaaatacctttctctctaaaaagaaataccggggtcaatcatatatacttnctctgtttcaaattagttgtcactgtaggtttgttctaagtgaaacatatctacctttgatc

SEQ ID NO: 26364 - DNA, 251 bp, Oryza sativa
  Clone ID: PAT_MRT4530_31161C.1
tgtatataattcgcgaaagctcagctgcttctgcttgttcttcttctttcggattcgagaggaggatgtccatctcgctgcgcctcgcggacccgacggcggagccgcccgtgctgccgccgctgcggcagtcggcggtgcgggcggagggcttccccgccgtcgccgatttgcggacgggcgcgcttaggggaagcgcctcgctgctcgtgaagccgtagccgctgctgggggcgggacacgcggctagc

SEQ ID NO: 26365 - DNA, 252 bp, Oryza sativa
  unsure (1)..(252): unsure at all n locations
  Clone ID: PAT_MRT4530_31162C.1
ctnccggggaggagacagggtgcacaactgaggacagatcgtgtactcgtacgtggccggtgcatgtgtacattgatactantgccatgacgtcgtgtgcaaagaattaagaaagtagtagtccatatttgcccaaatattgtcagtccaaaaatataatgggccgtatcagccctaaaagtaaaattttagcccaaacagtagtatgggccgggtcaaaaaaaaaaaaaaaaaaaaaaaaaaaaaaaaaaa

SEQ ID NO: 26366 - DNA, 2016 bp, Oryza sativa
  Clone ID: PAT_MRT4530_31163C.1
atgcagcctcgagagcgcctttcccgccaactcggagagctccacgcccacttcctccgccgcggccaccccttcccgccggcggctcaccccgaccctgacctcgaccgcgcctacatctccgtaatccgcgcggccgccgcgccgcgtctcgcactcgcggccttcgcttgcctccgccgcgtgggcctgcccgcgccaggacgccgcgcgctcccatccctgctccgtgccatcgcgttcgcgcgctcccttggcaccgcaggggccgcgcacggtctcgcgtttagggtcggggcagaggtcgatggcttcgtcgggaccgcgctggtccgggcctacgcggcgtgcgggcgtgtggaggacgcacgcagggtgttcgatgggatgcctgaccgggacctcgtcgcctggggcgtcatgcttgactgttattgtcaggcccgaaactatgaagaagccctgttgctttttcatagcatgaagagatcaagagttgttcctgatcaagtgattattgctactgtcctttcaacttgtgctcatacaagaaacttgagatttggaaaggctatccactcatacatgttggtgtcagatactcttattgatgctcaagtcagctgtgctctcatgaacatgtatgctagttgtgcagacatggaaatggctgaaaagctgtacaatagggtgtcagaaaaggaaattgtattatcaaccaccatggtgtatggatacgccaagaatggaaaagttgagattgctcactccatattcaatggaatgccagcgaaggacgtggtatcttggagtgctatgatagcaggatatgctgaaagcagcaaacctatggaagcgctgaatttgttccatgatatgcaacggagtggtgtcaaacctgatgaaattaccatgctgagtgtaatatctgcatgtgctaatgttggtgcccttgaaaaagctagatgtatccattccttcgtggagaatcatagcatgtgtaagatattacccatcggaaatgctcttattgatatgttctccaaatgtgggagtttaactcttgccttggatgtcttcaatgcaatgcctcaaaagaatgttgtcacctggacaagcataattactgcatctgctatgcatggtgatggaagatccgccttaaccctttttgagaacatgaaaagtgaagggattcaacccaatggagtgacatttcttgggttgctctatgcttgctgtcatgctggtttagttgaagaaggccgtttattgttcaaaattatggtccagcaatacaggattgagcccatgcatgagcactacggttgtatggtggatcttttgggaagagcaaaacttcttggacaagctgctgacctgatacagtccatgcacttaagaccaaatgtggtcatttggggatctttgttagcagcatgccggatgcatggtgatcttgagctcggcacgtttgctgcaaagaaaattttggagttggaccctaatcatggtggagcacaagtgctcttatcaaatatatatgcagaatatggaaactggaatgatgttaaggaggtaaggggagtaatggaagtccaggggacgtggaagaagaaaggttgcagttggatggagctgaatggcagtgttcatcagtttgcagttggaggattcctcgagatctccgcagatttgagtaattttgagcagaagattgagttctctctgtacaaagttcgtctaaggaagcagcaacagctacgttatcagcagcttcttgagatgtgcaaccggcactgcagctttcacctcagcttcatgagtagtacaaagcttcagccactgcagcccaacctgcaggaggccaacctacagggctacgttcttggttgtgaactaatggtttctattaaggtgtataacggttatgtacaatcagtaaccaccatagatttagagtgcataaccaaatcaaatatgattaagggtttacagacaggcgttaaggaatag

SEQ ID NO: 26367 - DNA, 1539 bp, Oryza sativa
  Clone ID: PAT_MRT4530_31164C.1
atggagaaatttctaaggaaccgttttgaccgcccacctggtcgcccggtgaccgtgtgcgttgatgctgctgcttctggcttctggcgtgcacgcgttcggccgaaggccgtccgtggtaagcctccaacaagcccctcacgggcaagggaggccgacttagccgagttggtttccttcggtgctcttgtggagggccaaggatcgtgtgggggtgaagccgttgtcccttcgcccagtgatgggcgaacggttgtctttgcagcctacttcgccgccgggcttcgtctgccatgtgacgatttcttgtcgtctgtgcttgcgacgtacaatgttaggcttccccagcttagtccattggcattcccgaagctggcggttttcgcctggatgtgtcgaacctgtgggttcgctcccgccgccgagctgttcgccgttctatttacggcatgcgccaagaccaaggatgtggagacgccggctggaccaaaaaaaactgttttcgactgcgtgaacttcatgctgcggccggaacgctcagacgcttggccgcgttccgccgtctccatcatcgcgaagccaaatgtggagatcgatgggaccctcgagtcccggctcatactcctccgcaaggtcgcacagtggctaagcacccgggacctttgtgaggagttttgcctccttcggatctcccccctcgcctgtgtctgggacgtttctgtgaacgagggcgaagaagttttcgggcttccctgccttgctctccccgccggggttgaaacccggacctgggaagacgccgaaatggaggcgtcgaagatgataggggccctaacgacggccgaattcgctcgcttgcttcagcgccaaaccgacggccgggtgaaccgggttcatgctggcgaattgccaggtcggtcgaacccctccagggccggggatgacgaagtcggtacctcgaagaaacgcaagcgtgcggtcgcgaagggtggccagattcgaactcgtctcggcgcgaaaggtacggttgacggtgacggggaggaggaggaagaggaagaaggggaggctggatctgaggatgatgggtcccacggctactccactagtccgactcctgcgaaatctagagcagcaaggcgactccattccataggcatccttgacggcagcgacgaagccaacttcttcgagacatcttcaactgagaaggacttcaactctgaaatccgcgagaaccttgagaggatctcgagagacgaggaagccgctgctgccaacaccagacgagaccctgggctgtcggaatcggccgccgggcacgagggcgaagacgacagaggccaagaccaccctgaggcttgtggccgaaaggtatgcgttcgacctctagctaaaaatcggcgaaacaagaacgagaaattcatggcggtgaaaggcctactgaagattaagtgtccctttcggcttgtttaccctttgctcttccattttcggcttgtggcaggcgtgctatcgagcatcgtggcctatgcgtga

SEQ ID NO: 26368 - DNA, 414 bp, Oryza sativa
  Clone ID: PAT_MRT4530_31165C.1
aacaagggggggcaaaaattaaaaatttgggggggttttatattaaaaaaaacccccatgcaaggggccattaaccaccaacccagttttcctaatttaaggggaaaaaaaaaaaagggggacctttcctttttcaaaaccctcccaggtggttgggaataaaaaaaataaaaagggggcgggaacccacaccaacgcattgatcccgtttaaattgcccccaaaaaaccttaaattaaaaggatgaggaaaaggggtcaaaaatggggggggggaccgggtccctaagggggggggcccaattgttggggggccccttgccgggggggggggcctgcacgggaaaaccgaggaagggcaccatggggaggggggcgtgtttgatctcccccaggtgaagccgttcttttttta

SEQ ID NO: 26369 - DNA, 879 bp, Oryza sativa
  Clone ID: PAT_MRT4530_31166C.1
tcatgatgacctcatcaatggccggaccaagatggcgacctcgccggagattggatggtcggctgcgactttggaggacatgtacacgtagaggacgacgagacgaacccaacggtactcaccctcgaaccaaacgacgaacgacgacggccggcgacggggtctagcggcggcgcggcttcggtcgacggcggcgacggggctccggtgatcagcggcttcgggggtcaggcggccgggcttctccaccctcccgcgcacctaacggtggtgacggcgaccgttgatacaaccgttgctcacatcaaagataaaattgtctaagttctggaatccaattcagtcgcttgcaacaatgatttcaaacgactgccaaatgtgcatacgacctccgttctagattcatgagtacttgatagaaagcttttgaagtcctctttccaatgaatccaaccttgtccccaaattccatctcagtcgacgacaaccaaagaaacaaggtgttgtgtcaccagtaatgggcctatggacctttaacgttgtctggggagctcagcccaagtggggtgcgccccaatctggtggagcacgaccctaggaccctcttggtcgtccaaccacctctttaaatagcttggaataaggttgatctacatcagctagattaacaaccaacgaagaggtgtatcgatcgctaaggcgcaacacaacaacaattatcattaactcactgaaagatcgggctaatcatagccgtgagtgcctcaagtagaactcagggtttatcattactttttattgttggtcatgtgcaattctcttgagatgtatgaagtattgctcctgttgttattgttaccattccatcgcatcaaatat

SEQ ID NO: 26370 - DNA, 268 bp, Oryza sativa
  Clone ID: PAT_MRT4530_31167C.1
ctgcaggatcggcacgaggggcagcaattgtagataccaagtcttttggattcttgggtttgtgaaattgcgattaattgtctgtcctttctagcagtgtgtgtgtgtgccgttgccatggttctgtcatctgtgacatgacgatggtgtttggttcagtaatcagtacacaaccttttagcaaaaaaaaaaaaaaaaaaaaaaaaaaaaaaaaagaaaaaaaaaaaaaaaaaaaaaaaaaaaaaaaaacctcgagggggggcccggt

SEQ ID NO: 26371 - DNA, 530 bp, Oryza sativa
  Clone ID: PAT_MRT4530_31168C.1
aggcaaaaaaccaaccaatttattatttggaaacagtacaaatcggggggacacaaggaaaggaaaaaccccaaagcaacgggtttttaagtcacaaaaaggaaagcgcccaccatggagggtggtccatttgaggatggcaaagaaaagggactgaccataccaaactacaaaaccacaaaaaatgttatgctaggaaagcataacctgtttttacccacataaggaggaaaaaaactttttgcctaaccggcaaaacaggaaagcaaacggggagctaaatttggggaaaaaacgacccctagggttcatccaaaaaaggaaaacacggacagggacggggtccaccaaaatgctaaaccagcgcaatgcttttttccccgccaggaggcttggggttcccgctaaaaaactttcgggggggggccgggccttccggaaatatggggctcccaagaatttttttaaacttcggggggctaaaaagcttttccgaaaaacaggggccccggcttctttgaaaatggggg

SEQ ID NO: 26372 - DNA, 339 bp, Oryza sativa
  Clone ID: PAT_MRT4530_31169C.1
atgatcgcgaggcgcctcaagatgctggtgctggtgtcgctcgtcccgctcgcgctgcgggcgacctcgctgctcgccggccatgtcgcgccgccgtgctcgccggagtcattgcggcctgagcaccagcccgccggcgccggcgacggcgtcaccatgggcggtggcggcgcgtctgcgtcgagttatcggaggaaccggaggaggatggagggcggtctcgccgccgccgccgtcgccttccacgcgaggaggttccggccgcacggcggcggcggatttgaggccgacaagaggctggcgccgacgggctccaatccgctgcacaatttgcgatga

SEQ ID NO: 26373 - DNA, 447 bp, Oryza sativa
  Clone ID: PAT_MRT4530_3116C.1
aaagggggcaacgggccaagcccaattcatatatacaaaaggacaaggcccccctaccttgaggcacgggaaaacggcccagggcttacaaagaaaaacttaaaaaaagggtttgattcatcaacccatgaaaaatggggttagcgggacaaaggcctttttttattgaacaacatttataaaaaaaaggcccatgctttccccctgggcccaaaaaaaaaaccacttgcccagggagcccccaataaccggatttataatagggaagcccccccaaacctttttacatttggaaaaggaagctggctaaggaaaacaacaccccaaaagggaggactttttacgggggggtaaaccaaatttttgggaaaccccccaagggtaatgaggggaccagggcaaaaagccactttcgcaaccttttgaaagggaggctaaagaaccctg

SEQ ID NO: 26374 - DNA, 227 bp, Oryza sativa
  unsure (1)..(227): unsure at all n locations
  Clone ID: PAT_MRT4530_31170C.1
ngtttggccgacgactcctaaactcaacaaaccggctttttagagttgtacaagcgctttattacaacgctaacaattcatcaactaacttccgtgcgccgactccaggtcgacgacgccggggccctattcaatccgataaattgtcctcccttcgccttcggattagggttttaggataatacactgatgggcatctcaaccattactgtattacataacctaaa

SEQ ID NO: 26375 - DNA, 476 bp, Oryza sativa
  Clone ID: PAT_MRT4530_31171C.1
acccaggtgggtatacaccgggcccagttgctttcagccaggattgggttacccgatgtacccgctcccgctgttcccgggctttgttgaagcccagtgcttcgccgtgcacgcccccgccgccgaccagtccggcgagactgctgccagccagctcaccagccgtcgacgacagttggtccagttgcgagccgatcaccacatgctgggaggcatctacagggagctcggcgcccccgatgtcggcaccccatgtccgaggtgttccgcgctccggagagggacttggagcgccgcggcgacctcccggcgttgcaacgtgaacatccccaacgcggagtgttctttactgctgcgagatctgtatattagttacttatactgccatttattggtgggaataaaaaataggttcctttttggaacatagtgtggtgaatcaatgatgacgccgagtcctctctataaaaaaaaaa

SEQ ID NO: 26376 - DNA, 643 bp, Oryza sativa
  Clone ID: PAT_MRT4530_31172C.1
acggataaactcggccatggagatggatggagtgaagcaattcaggctccaaatcgacatgcagtgccgctgcatgggttgcatcaggaagatcgagaaggcaatgggttgcatcggaagcgtcactggagtcgaaacttcagtagcagatgttgatacagggattgtggcagtggccgggaaggtgaatccaacaatgctttgtcactggctcaagaggaggataaggaaagacgtcaaaattgtgtaccctgatcaacaagttcagaacagcaagcagaaactgataatggttctagggagcagttccaatgctaagggtgcacataatacaccatcagctctaccaatacaagatcatatgtcctgggactcagtaccaccaatagttcaatcaaaccatcagagcttgcctttgatcgagcagaagatcagggaactcgagaaggtcagggacatgctgaagattcagaacctggagacagagctgggtgctgtcaggtgtgagcttaaacagtcgcgggaagctatcaatggtagtaagaaggctgtgatggatagtgctctgaatcagctggaagcctatcataaactagaagcactaagtcactcaccatatgagtcatgctaccctagtcaataa

SEQ ID NO: 26377 - DNA, 231 bp, Oryza sativa
  Clone ID: PAT_MRT4530_31173C.1
atggtcctaaagcttcttgatggtggtggcggcggcggcggcgacgacggattcaatccctctgctgccgagcacaagcgacacgagcagatcggcaacctcgccgtcgagctcaagcaccagcgccttgcttctaagccatcagctatggtacggagtgaaaataagtgtcatattgctgaatcggtctcccttgatgcaacccttgactttgttgagtcattaacatag

SEQ ID NO: 26378 - DNA, 174 bp, Oryza sativa
  Clone ID: PAT_MRT4530_31174C.1
atgaccgtcccacagtatcatgttgatacccaccctgacagtatctctgatctatctaccttcgtgatacccagcaatatctctggaacaatggaggggacaaggagacacttggagaaggacttagagccatggaggatcatcggggacgtccaagtcaaggtggaggcctaa

SEQ ID NO: 26379 - DNA, 229 bp, Oryza sativa
  Clone ID: PAT_MRT4530_31175C.1
gaaacgcaacacaggactactacaacgagctgtgcaacaaataagacgcgggcccagaacaaaactaaaacaacgatatgggcattcttttgatagggaaaactaactgaacaccaagaccactatccaatcaagcaatgttcccacagaatcttataaagaacgaactagtataggtctttctccttagaggagagaatgacgaaatccgccttacggtacgaaatgc

SEQ ID NO: 26380 - DNA, 645 bp, Oryza sativa
  Clone ID: PAT_MRT4530_31176C.1
atggactccccagcgacccccgtgggcttatctccgccacttctcagtctggtgccccaaaatgaaccacactatacaaaagggaaaaatgatttattgcatcagcgggctcgggttcacggtggaccgggtgcacggaaacggtctacggaacgaacggctaggatctaatctagacaaaacggacggccgagatcgacctaatccaccacgggtctacggctgacgtggcgctgacgtcgacgatgacgtcatcacaggcggcggctcggcatctcacgctcaccgacgaacgacggcgcggcggcgcaaacggagggcatctacgcgtagagggcgacgcagcgaactcacagagggctcggacgatgacggacggcaaccgacggcgacggcggcgaggtcgaagcggcggaggtgttcgggtcgacgacgacagcgatgctccggcgatcctcgacagaaacggaggacaggactaggacggcgatgacttggcgaacccgacggcggccttcccgagcgacgacgatgaccagagcggcggcggcgcacggctggacttgcggcggcgacgacggcgcagacgctaacgcggctagagctctaccggcgatggaaggctaaggcgaaggtggcggcgga

SEQ ID NO: 26381 - DNA, 324 bp, Oryza sativa
  Clone ID: PAT_MRT4530_31177C.1
tgtacatatgggatcttacggtatgggcgtaggttagaagtcgcttgggcattgcctgtgacacatcctctggtgacatactgagctggtggtgcgaggcacgtaaatcggttcacaagacggatcgaaagccatttgatgcgggagttatcctggtgacgtggttagtttggaaggaacggaatgcacaggtgttcgatggaaaggccacttcagcggtgcatctttgtgctaccatcgctgacaagtgggaaacatggaaagccactggtttgctgtgcgcgatctattacggttagatagccgagagtccctcatgtgcct

SEQ ID NO: 26382 - DNA, 399 bp, Oryza sativa
  Clone ID: PAT_MRT4530_31178C.1
tcttttatggacccttttattaaccatagaaccacccatatatactgccataggacctttagtgcacggctttgtatagtctagggtgaagatttctggttttgtatttaagggacctaaaaaaatctcgctgtatatactgccataggacctttagtgtatggttttgtatagtttaggggtgaagatttctggttttgtgtttaaggacctaaaaaaaattaagttgaggtacctccggtgaacttattcttttatatatcaacatgccctcgaagtctcgaactggaaacctgaaaggcgaaaagaagctagtccaaattaagcggcggcgtggcccaaccggtccacaacgacccagacactctcgccgttgccgactcctcgccttcgcttact

SEQ ID NO: 26383 - DNA, 624 bp, Oryza sativa
  Clone ID: PAT_MRT4530_31179C.1
atggcgtctgatcttggaaagctcgtcttggggtatggtttctatgaaaaagaaaagaagaagaagatgacaagagcatcagccaccggcttcctcgccgccgtcgcgatggccttagccgtcgccgccgtggtggtggacggctgcgacaacgtgccatcgatgagcatggacgacgcatgcctgaaggcgtcgacgtcgcagccgctgctcgcgctgtgccacggcgagctcctgaacgcgccggagagcggggaggtgacggtgtacgcggtgatctcggcgaggtgggcgcagtgggcgtacgaggcgacctcgcgggcggcggcggggctgctcgggaataacaacgcgtcgctcgccgccggcgagcgggcggcgtacgaggcgtgcgtggcgcggtacgcgtcggcgaaggcgcgggtgatggcggtgcagacccagctgctggagtgctcgtacgcgtcgccgaagcaggagctgatcgacgcgagggtggacgtggaggcgtgcggcggcgagctgtcgaggttcgcggcgtcgccgctgcacgccatgaacgccgacgaccagctcaaggccacgctcgcgtacgagctcaccggactcatcatcggcaagtga

SEQ ID NO: 26384 - DNA, 502 bp, Oryza sativa
  unsure (1)..(502): unsure at all n locations
  Clone ID: PAT_MRT4530_3117C.1
tnggccttgggggcggtggcggacttggtggaggcggtggtggaggtggtggaggatttggtggcggtggaggcagtnggattggcggtggttttgggaagggtggtggatttggtttcggtgttggcggcggaggtttcggcggcggtggaggtggcggcggtggtggcggagggatcggtggcaagcactaatacactggtacctacttcgtttcagttctcttgcactccatgggccatcatggtatttagcttgagcgagtagctgcaatattatgtaggcttttgttgtggagcttatagcagtactgttgcgtttgatggtttctccccttcggacgtttggataagtctgttggtaccctatatgttgttattaatttgtgacggtgataccatattatatatgtacttaagtacttcaagtgttaacatatcatatgtttcgaacgattggaggtatatatataaacttcagattaaaaaaaaaaaataaaaaa

SEQ ID NO: 26385 - DNA, 1326 bp, Oryza sativa
  Clone ID: PAT_MRT4530_31180C.1
atgagcctctcgtggcgatttctgaatctgattgtgggcgacaatatgcctcaaaccagatcaatttgctgcatcgaccttacacgacaacaattctttcagccgtcaccaccagaatcagcggtagcgcaagactcgactgctcagacaccggtggcagcttcaacgatggagcggcttcagcttccgaatccgatcttgcgcctgtggaatagatacttctttccgctctcagagcacaagatactcagcgtggacaagtccgggtgctccttgctctttgatgccaacacacgccacttggtgaccatgccattccttaacaagcccaaacgggatcccatctccctcttcgtcccaaacggtgatggtgacgatggcggcagcatctttgtcatggacagggttccaaaaccagagataggcagccgcgcgcaaaccagcgatcaattcgaggccttcatctatcgcaagaattttgtcgactgccaactcctcccgccaccgccatacctccgtgattacaagcactgtgagaggcgccacaagatcaatgcttatgctgtggtcgatggcggctcacagatatgcatatctgtggaggacgttggcacctattgccttgacacggcgagccacacttggagccaagtcggcgactggacattgcccttcgacgccaagctcgagtatgtacctgagctcaagctctggtttggtttctctgctggtgcccagcactttgctgcttctgacctctcctccatggattgtcagtcccagccacagctagttggtccttggaaggagcttgaaccacccatggaatggcgggaaacgtatgattctcaacttgtcaatctgggctctggcaggttttgcatcgcaaggttcttccaaactaagcgagagggctgttatgacgaagacgatgtatatctttggcaggatgttacggccttgaccggtgtggagatactcaaaggggttcttcaaaagattgattattatagatcacggttcttttggcaaggtgatgatcataagaaaaagtacagacttactagatgggatattatttgccaacctaaggatcagggaggccttgggattcataatttggaattacaaaataaatgtcttttgaatggaattatcatcagaatggtaattttcagggcaacgcactggctccggttttgggcacagctacaaaggtgtgaggatggtggggagtttctaaaggttgcatgccgcaagttggagtcgatggttatgcaattatttgccaattatggatggaggttcacaaatagacttcaataa

SEQ ID NO: 26386 - DNA, 1645 bp, Oryza sativa
  Clone ID: PAT_MRT4530_31181C.1
tcatcgtcctccctgcatcgcgtcgtcgccggcctcctccgcctcgcgacgttgccgttcaggggcgaaagatccagcgccgtcataggcggatctgccaaacccccccctcccaccggctaggtcgggatggagcggcactggccatgctgcatcgaggaggaggcagaggtggtggcgggagcggtgccgacggaggaggtcatgatggtggctgtagctgtgtgcaggctcatcttgctccactccaccggatggaggccttgtcggcggctgaggcgagaagggcaagaaggaaaatccaaaagggatgaggcagggaagacgggaccatgagccgtggcttaggaaaagggagtggaggccctcgttcccctcgtgggggtcacgcctccctccaggggcatggcccggcgacggaagcgggacggcgtttacgaaggaaagtgtagtgtacttcactccgaacacacttcctgacacaagactactttcttgcagctgcctcgcgcccttctctctctcctcgacctcattcgcctcgcctcgcgtctcgtctcgttcgcccctcgccaccacgcgacacgccatgggcgcggccgacgacgccaaccaccgccacgaggaggccagccccctcctgccaccgggcggcggcggcgtgggcgtgagcagcaagttgcactcacagcatccacctccatcgactcaggtggcagccataataacatctcgattttagtcgcgtcgatcactgcaacttcatctccatgatgctcttggcctttggggcgtacagagagtacaccaccgcctgccgctttgccacctccagctgcttcttcccgtccgcgaacactgccgccgcggcaaccgcatcgccgagggcacggttctcacggaaggcgtccgcggcgcggcggcgcgcgtactcgcggatgttgtagtcagagaactgccttgccgtgcggaggagggaccggaagagggacagcgcctccgctctcgtcggtgctgccgccatggatgcgcttcgtcacggatgctgttcgtgcgctagagaactactccagaatccagatagctgcttgggctaatggcggcaagggaaagaaaagaggagatgcccctgaaccaggatcccctcccctccgctgctctgctcgccagatggagatcgccacccggccctcccctgttcagccgcgactcgtcttggcggcggcgcaaggagcggaggagacaacgagaacgagaccaaaacggggccattcatctgctctgctctatttgcacttgagctattatgtgatgaatgttctctactgccttggtgaaactctgtatgttcgtcggtaaatatgagtcttgtgtgatatgggatcatgatggacaatggaaactccagcctgtttctctgaattgtgttgatcgtcttcggtctttctgttccgtatggaccgcttgtgtattctgtcattctgaataacattgtaatactgtatcacgtttgtgttggcaatccacttttaaacttatcgatgtgaagcagatgtgtcaaatgggcacccttgcggccttgcctatttgaaactgccactcaatgtgtttataaatctgctggaagttgtgaaaaaaaaaaaaa

SEQ ID NO: 26387 - DNA, 204 bp, Oryza sativa
  Clone ID: PAT_MRT4530_31182C.1
atgaggaggggtcgcgtaggaggaggaggaggaagaaaggacaaagtcctgggcccaccatcccaggccggtcagaccggctatatgcggccggttagaccgccggggtgcggccggtcaaaccggctatatgcggccagtcagaccgccggggtgcggctggtcagactgggccctagaggccgttcagaccgccgctactag

SEQ ID NO: 26388 - DNA, 277 bp, Oryza sativa
  Clone ID: PAT_MRT4530_31183C.1
gctgcttttctcctgctatcaccatttcttcacactactaactaatattacatcttctttactatatctatctttaactataccgatgttagacacctatttattaacataatactttttcacactaataataccccactatatcattttaactctctaatacttccaacatcttttaactcttttaaatatataaacttactagtttctctctaacattacacagatactaatcttaaccctcttactctcaaatatatattcatcattattatta

SEQ ID NO: 26389 - DNA, 389 bp, Oryza sativa
  unsure (1)..(389): unsure at all n locations
  Clone ID: PAT_MRT4530_31184C.1
gtggagtttttattgtggtaacaatcttgtgatatttgtcgaaatcactttagctaagtaaaaaaaaaaaaaaaaaaaaaaaaaaaaaaaaaaaaaaaaaaaaaaaaaaaaaaaaaaaggaaaaaaaaaaaaaaggagggangccgannggagaggtgcaagaataaagaagagttattacaatagtgaggagtaatttaattttgttgacaaaaaaaaaaaaagcgagggacaggaacaaccttgtcaaaatgaaaattattggcttccgcaaaattccgcctttgggaaaacagacggaattccggaaaattgcccaatggtgaaaaagtcctaaaaaggaagcggaccacccaacgttttacaacaaaccttgactttgtaaaaag

SEQ ID NO: 26390 - DNA, 1445 bp, Oryza sativa
  Clone ID: PAT_MRT4530_31185C.1
ctgcaggatcggcacgacccgcgccgccgcgtccccgctctgagctgtgccatagctgtcctcctctccactccactcacctctccacctcccaagaactcccaaatcccaccccgcattgccatttccagctgttgttcttgattccttgttcttcggcgatcatttcggcttcttttttgtggtggtatgagagtttcgcgatgaggaaggaggtggtgttagtggccatggtggtggtggtggtggtgagctgggtcgttgctgccggcggcgaggcggcggcggcggcggcggtggtggtggacccggcgtggaggtttccgagcgcgaggctgcgtgacgcgtacgtggcgctgcagacgtggaagcagacggccatcttctccgaccccaagaacctcaccgccgactgggtcggccccgccgtgtgcgcctacaccggcgtcttctgcgcgccgctccccggcgccggcggcgcgccgggggaggtcgccgtcgccggggttgacctcaaccacggcgacatcgcggggtacctccccgccgagctcgggttgctcaccgacctcgcgctgctccacctcaactccaaccgcttctgcggcctcgtcccggacgccctccgccgcctccgccgcctccacgagctcgacctcagcaacaaccgcctcgtcggcgccttcccctccgccgtgctcgacctcccggcgctcaggttcctcgacctccgctacaacgacttcgagggcgccgtcccgcgccagctgttcgacctcccgctcgacgccatcttcctcaaccacaaccgcctccgcttcgccctccccgacaacttcggcaactcccccgcctccgtcatcgtcctcgccggcaaccacttcggcggctgcctcccggcgagcctcgggaacatgtcggccacgctcaacgagatcctcctcatcaacaatggcctcgactcctgcgtcccgcccgaggtcggcttgctccgggaggtcaccgtgttcgacgtcagcttcaactcgctcgccggcccgctcccgccggaggtgaccgggatgcggaaggtggagcagctcgacgtcgcgcacaaccgcctcgccggcgccgtgccggaggccgtgtgcgacctgccccgcctcaagaacttcaccttctcctacaactacttcaccggcgagccgccgtcctgcgcgcgcgtcgtgccggcggccgacggcgaccgccggaattgcctccccaaccgcccctaccagcgcacgccgcggcagtgcgccgcgttctacgccgcgccgcccgtcgactgcgccgcgttccagtgcaaaccgttcgtcccctcgccgctattgccgccacctccgccgcccgcataccccggcccattgccgccggtgtaccccgtcccatacgcctcgccgccgccaccgccgctttaccgatga

SEQ ID NO: 26391 - DNA, 231 bp, Oryza sativa
  Clone ID: PAT_MRT4530_31186C.1
tttcctttccgttatggccgggtcgtcccactcgtccggtgatactgaatatcggttcaagccatgtcttattaggtctgagcaatgcattaagggctcagaggctgcagagggatcaaggcatacatcgcttgttagtgtcacaagaatggtatttgcatttgagaagggtagctttaagttggaagagcgttatgacgcatttaatcatcataccatctctgtaatagt

SEQ ID NO: 26392 - DNA, 244 bp, Oryza sativa
  Clone ID: PAT_MRT4530_31187C.1
ccaggcaaaagcccaaacaaaccatccataaataacattagcggccttagtaacttttaaggcataaaattggaggatgattccacccgggggggcccaaaaaacgaaacactggctacgggaaaaggggttcgatcagttgttaaacaacggggggtacgcggtgttagaacacgaccttatccacacaaggggcatttacaaataacttagggggggcgcccgtttggggtttccccccaaa

SEQ ID NO: 26393 - DNA, 394 bp, Oryza sativa
  unsure (1)..(394): unsure at all n locations
  Clone ID: PAT_MRT4530_31188C.1
ggttcccttgtgccttnaaaccactaacatggcagacaanagctagccagntaaagaagacctatacatgaggctgggatnccgaggggattggccccaacatccgaactcccggctgggancctgactccgacgcaccacccaccaacatatgattttcatactcagtactcactagtagtagtatatatacagtacatgattctcattctagcctcttcgtcgtcgcttttcttctctctggaggcgcttcagttccatggaatccacattcacggggcatttcccagattcagctttagctgtgtcatggcatcttttctttgcagccagctactacacgagattcttactgctagtaaaatactcttgtgttactaaaaaaaaaaaaaaa

SEQ ID NO: 26394 - DNA, 266 bp, Oryza sativa
  Clone ID: PAT_MRT4530_31189C.1
ccattgcaaccaggacctgcatcagcaaacttgcagcgtccgaccccgtgccatgggcccaatcgagggtggtgcctggactcgcggcccacccgtcgacatgctcacgtggcctgccacacgccgatgtgtcgtggcgcccaggagctgccgggctagtgcatgacgtgagagtggagataaagatgaatgctacaaggggagcttcgcatgcttgttgaccgtgttggtgcacgagagtagtgtatgcgggtgcgtgactgtct

SEQ ID NO: 26395 - DNA, 3909 bp, Oryza sativa
  Clone ID: PAT_MRT4530_3118C.1
atggaggcggcggcggtgagcgcgtccaccggggcgctgaacaccctcctccccaagctcgccgacctcctcctcctcgtcgccggcgagcaccacagcagcaggcgcgcggtcgaggacggcgtcgagcacctcgagagcgagctgaccagcatgcgcgccgccctcgagaaggtgtcggcggcggcggcgccgcccgaccagctcgacgggcaggtcaggctctgggcgagggacgtccgcgacatgtcctaccacatcgaggacgccatcgacacctacctgctccgcgaggccgccgccgccggacgacgaccaccaccaccaccgtgctgctccttcgtcgtcggcttgaccagctcggctcgccgccggagccgagccatcgccgccgagatcgagcgcatcaagaaggaggtggaggaggtgagcaggcgccgggaaaggtacaggatcgacgaccacgtcgtcgccgtcgtcgatgacgctccggtggaccgccggctgccggcgctgtacgcgaacttcgcaagcctcgtcggcgtcgacgcctcagtggaggaggtgatcaagctgttatccatggaaggatatcaaggtgcagtgatgatgaggcgaaagctcaagctgatcgccattgttgggccaggaggaatcggaaagacaaccctagctaatcttgtgtatcagaagctccatggccaattcgaatgccaagctttcgtctcggtttctcaaaagccaaacgtcaaggctgttcttagcagcatactctgtcaagtgagccaactcaaatatgaaaatttcagttcttggggtgagaaggaaatcatcgacaaaatcagggatgttctcaaggatatcaggtacttcattattattgatgatatatgggataaaccaacatggcaacttctaaaatgtgttctcatcgacaatgatcatggtagcaaaataatcaccactactcgcaacatggatgttgcaaagttgtgttgctattctgatgatgttgatggtaccatacaaatacaacagcctctttcagttgctgactctgaaaaactactatatcacaaagtattccataatgaaagatgccctcctcagcttaagggcatatctcagaaaattttgaaaagatgtggtggcttaccattagctataattactattgctagcttatttgcaaataggcagacacaaactgaggaccactggaactcgtgttcgacgtcggatctaccgaaaaggatctaccggttatccctacaaaacagcaaggatgatattacaatacctgatgcaaccgagagattttcccatgtgaggtcactttggcaaggtattgatttgaagatgcccctttcgggctttcgagttttgcgtgccttggatttaggagattgcagcagtcaaaatattgataatataggtaatttggttcacctgaggtatctaaggttgcgtggtacacattataataagcttccaaaagaaattggaaacctaagatttttgcaaacattagatattaagcagacaagaataaaagaattgccatcaactgttgtacatcttacacaacttatgcgtcttatggtggacacatggacaaagttgccaaatgggattgggaatatggaatgtctagaacaactgtcagagattgataccagcatgtatccaagtcttatgaaagagctaagcgatctgcccaatctacgggttctagaaattttgataagcacatgggagcagaccaaagaggaacaatttcttgattgtttaggctctatgaagaaacttcaaattgtccatatttttgctccagatatatcccttgatttcatgttgaataaagattggacccttcatgaactccaaaaacttacagttggtgttcgccgagaaagcgaagacatatttaagctcaacccattgtctgggtgggctgagtttagcccattctctatcctaccaaggtggatcaattcatcactcaccaatctctcatacttatcgatcattgtcaagatactacaacaaaaagatcttggagttcttggggacttgcctgcactttgttctctatacttgagcgtgacaggcgctttaaaggaaagattgatgataataggtcatagtagaggtaatggtcaggcaatagcattccaatgtctggctaacttcaactttacaagtcctgcaatgatgctagtttttagacatggagccatgcagaggcttcaaatgctttccttttgttttcaactaaaggagacaaaagtttttcacagtgatttggacatgggcttggagaatctcacctccctcaagactgtacattttcagattgactgtcgttacgctaggctctgggaggtgcaggctgcagaggttgcactaagaagtgcaaccaacttgaatctcaactccccaacccttgacttgagcaaacattttgaaagattgatgtattgggatggaatggaagagatccctgagatgaaaatattcaaagaagaaaatgttgggattgtcaagattggaccatggggtggaaatagagggaggcgttatgatattgaggtggctcctcaccatctagaaagcatcagagttcacagcgatttggctgtacattcatttgaatttgaatatagcgaccgtaatggacagaaacatgttgcgggtccttggggaggatatggtggtagtaatgttcatatgattcaacttgaatcttcagaggttcttgtggaggtttctggaacatttggtcgatttgctggatttcaaaatatcataacctctcttacatttgttacaaatactcaaagctatggaccttttggacaaagagagggaacccctttccacataccagtgcagtgtggtggccgcattgttggattcttcgggcgtgcagggtggtgttttgatgcaattggtatctatgtgaaccctgatctccaaacaataaaagacaagggcaaagttgtgcttgccaagattgggccatgtggtggaaagggaggggaggcttgtgacatcatggtgcctccccatcatttggaaagtgtgacaatttgcagtaacattgtgatacactcactcacattttcttacaatgaccataatggagatcatcacttggcaggtttgtggggcagccatggtgggagtaatcagacgattcaatttggcccttcagagttcataactagagtttatggaacaattggttcatacaatacaccatctgatgttgtaacatctattacattggttactaatgctggctgctatggaccttttggtcaagaaaatgggatccctttcgactttccagtccagggtaatggcagcattgttggcttctttggacatgcgaacctttatgttgatgcaataggtgtctatgtgacaccttccatgggaacaaggaaagaagaagaaaatgttgggcttaccaagattggaccattcggccgacgtggagggaacccttttgacatcaaggtcacaccacaccagttggaaagcataacaattagtagtaacattgtaatcaattcacttgcattttcatacataagccatgacaaacaacaacacattgtaggtccatggggcagtggtggtgagagcaattatacgatccagcttggtccttcagaattttttgtcaaagtttcaggaacatttggtccatttggtgaattccccaatgtcataacctctcttacctttgtcaccaatactcatcatcagtatggaccttttggacaaggaggaggcactccattccatgctccaatgtcgggcaatggcagcattgttggcttttttggccgtgaagggttatgtattgaagcagttggtttttatttttgcgcattatga

SEQ ID NO: 26396 - DNA, 384 bp, Oryza sativa
  Clone ID: PAT_MRT4530_31190C.1
cgaaatccaaacgtaatttgctatatatttctatcttctactatttaaattcataaatatttgatgagtttcagcaattaaatttgaaaacctgcagtagagaggctgttgacgaggatggttggttacacactggagacataggtttgtggatgcctggagggcgtctaaaaattatagataggtaaaactgaatgatctagtgtttcatgtttaagaatttccttttgaattgagatggccttgtgcctttgtttcattatatagagaaaaaatgtatatctgatcaatctacacttttaccttcgctgcagtttcgtaatgatacctaaaattagtcagttgctaaattaaattgttaagatgcatacttgaaatcttaag

SEQ ID NO: 26397 - DNA, 246 bp, Oryza sativa
  Clone ID: PAT_MRT4530_31191C.1
cgcccgtcgcgtcgccgtcgtcgccacgccgagccccgtgccaagccgcgccgagccccgcgccgcgccgcccgctcagagcccgagggagttgcggatccaagtgaaggccaagacccgcaagactttgagcaaggcaagttatcactattccttgaacatgttgatcctaattgcgaaattgttttgtttacaaataaaattgcatgcaatgatgaacgtcctacttgtgattatgccgtgcct

SEQ ID NO: 26398 - DNA, 901 bp, Oryza sativa
  Clone ID: PAT_MRT4530_31192C.1
ccactgcgtccgctcaacgaccatcgttggcagctgctggcaatccggtacttgctcttctgtttctactgggttcttagctggggacatgtaacggcggaaattgatatcgccaacatgacggcgctacagaaacatgtttcgttcttcgaccggaacaaggatggcattattactccgtcggagaccattgaaggggttgttgcaatcggttgtgacttcgcatttgctagagaccttgccgccagtgtgcatgctggtcttggtcctaaaacaagccccaaggatgcaccattacctcacttatcgatatacataaacaacatctatagaggaatgcacaggagtgacacaggtgcactagatgctaaaggaaggtttgttcctgcaaagtttgaggaaatattctcgaaacacgcaaaaaatagaccagatgcattgacatccttggaggtcaaagagatgattctagcaaatcgagatccaaatgacccacaatcatggggtgcagctataaaggagtgggggctaatttatggtcttgcgagtgataagaacggatattttcccaaggatagtgtgagaggtatatacgatggtagtgtgttcgtcaagttggagaaagagagggaatcttcccaaagtacagtttgccggagcttatcatttcggagttctgtataaagtaattgggaaatgaagttataatcccaaatacattgtattgcatcataggtattgttcgtgtacatgcaaaatgccatatttggagaagccctggtatggtagtagagttatggttgcatgactttaatcgttatgattcaaatctcgatttatatgaacattatgtatacatgggtgcactcttaataagatttgagaaaactaattttatccc

SEQ ID NO: 26399 - DNA, 485 bp, Oryza sativa
  Clone ID: PAT_MRT4530_31193C.1
ctcgaaacacgcaaaaaatagaccagatgcattgacatccttggaggtcaaagagatgattctagcaaatagagatccaaatgacccacaatcatgggctgcagctataaaagagtgggggctaatttatggtcttgcgagtgataataacggatattttcacaaggatagtgtgagaggtatatacgatggtagtgtgttcgttaagttggagaaagagagggaatcttcacaaagtacagtttgccggagctctgtataaagtaattgggaaatgaagttgtaatcacaaatacattgtattgcatcataggtattgttcgtgtacatgcaaaatgccatatttggagaagcactggtgtatggtagtagagttttggttgcatgactttaatcgttatgattcaaatcttgatttatatgaacattatgtatacatgggtgcactcttaataagatttgagaaaactaattttataaacaaa

SEQ ID NO: 26400 - DNA, 428 bp, Oryza sativa
  Clone ID: PAT_MRT4530_31194C.1
caacgaccatcgttggcagctgctggcaatccggtacttgctcttctgtttctatgggttcttagctggggacatgtaacggcggaaattgatatcgccaacatgacggcgctacagaaacatgtttcgttcttcgaccggaacaaggatggcattattactccgtcggagaccattgaaggggttgttgcaatcggttgtgacttcgcatttgctagagacctagccgccagtgtgcatgctggtcttggtcctaaaacaagccccgtactctctcattccctcccataactctaatccaaaatcatataaaaataatgacttgtttattatgaatttggtccaaaatagagtaactagatatgctatttaatttattgtacacaagggaaaaattcacccggtattggttccgcattcaaatgcgc

SEQ ID NO: 26401 - DNA, 1390 bp, Oryza sativa
  unsure (1)..(1390): unsure at all n locations
  Clone ID: PAT_MRT4530_31195C.1
cttccctcctcgttgcctccgccgccagccacgacgcgcgacgacaacggctcgcatcctcgccgcttctgccgccgccgccggctcccctcctcgtcgatgcgacgatgacgacgaagaacgcgccgacgcgacgatgaccacattgaggcgacgacaacgtcgatgactgccgtgacgatgatggcggcgacgcgacgatgatgacaatgacgcctgtggaggccggcagaaggaggaggagaggcggtggctcagatcctccctctcctatgtggggtggcggacggaggagagccgtcagccggagggggaagctggtagcggtgcccgtgggtagggctgccgccggtggaggggtggnnggggttttttttttttaatttgctgagatganttttngcaggcgggcacgttggtccccgatggctatcccacccaccacggatcgattatcgcatttagtgggtcaagttttgttgggattgttgcaatcggttgtgactatgcatttgctagagactttgccgcccctgtgcatgctggtcttggtcctaaaacaagccccgtactctctcaatccctctcataaccctaattctaaacaaatcatataaaaataatgacatgtttattatgaatttggtccaaaatagactaactagatatgctatttaatttattgtacacacaaggaaataattgaccagatattgtttccgtattcaaatgtgcagaaggacgcaccattacctcacttgtcgatatacataaagaacatctataaaggaatgcacgggagtgacacaggtgcactagatgctaaaggaaggtttgttcctgcaaagtttgaggaaattttctcgaaacacgcaaaaaatagaccagatgcattaacatccttggaggtcaaagagatgattctagcaaatcgagatccagatgacccacaatcatgggctgcacctatacaggagtgggggctaatttatggtcttgcaagtgataagaacggatattttcacaaggatagtgtgagaggtatatatgatggtagtgtgttcgtcaagttggaggaagagagggcatcttcacaaagtacagtttgccggagcctatcatttaggagtactgtataaagtaattgggaaatgaagttatcccaaatacattgtattgcatcataggtattgttcgtgtacttacaaaatgccatatttggagaagcactggtgtatggtagtggagttatagttgcatgactttaatcattatgatttaaatcttggtttatatgaatattatgtatatacggatgcactcttaataagatttgagaaaacctattttatatcaaaaaaaaaaaaaaagggcgcccactaaagaggct

SEQ ID NO: 26402 - DNA, 563 bp, Oryza sativa
  Clone ID: PAT_MRT4530_31196C.1
ccggccgggctacccaaacacacttaacaacaagtctgcatcattcttgtccctctaaatcagcatggcttccataggattcagctatgcacagattcatgtgcagcaggacaggtgcaggaggaccaatgaagagaagatgaagaagatgatggcagaagaggaggagaagagcaagaagggcatgtgtgaaggagaagaggaggagaagaacaagttcatggctgctgatgagaagagttgccactcatggaccagtgagagggtgcacccatgctcatctccggcttcaaagattggccggtgaggtcgatcggctgttggccatggagctaagctagtaaagccgtgcaggagtctaactttagtttgtgcttgcgtgtgaggtttctttttctaaaaaaaaaaaagcatttccttcagtcttgttaaggaaataaagatggtttttgtttgaccttactgtcttgtccttgggtgtaattgtcattggaaggaacagagaaatggagaaaagactgttgggaattgagacatctaaaaaaaaaaaaaaaaaagcggcc

SEQ ID NO: 26403 - DNA, 165 bp, Oryza sativa
  Clone ID: PAT_MRT4530_31197C.1
atggcgaaagcagtaacatggagcctacaagctttgccaaagacagacctcgccatggggagacacggccgctggcccattctcttcccctccccgctgggccggctgaaggccaaggcccagcagccggccgccttcttccttcttcctttgggtcgccgacag

SEQ ID NO: 26404 - DNA, 654 bp, Oryza sativa
  Clone ID: PAT_MRT4530_31198C.1
atggccgggccgcttgtcgcgggaggcgcccgctcgccgccgccgctgccgatgaggcggcggccgggctgctggcgaccgaggcgcaagaggctggtgcggctgctgccggaggcatcgcggtggccgccgtcgatgacgatgccaatgaggagacggctgccgggagcggcgccgtcaccgtgcgccgacgaggaggcgcccgtcgcggctgctggcggaggtagcgcggtggccaccaccgacatcgaggaggaggaggcagcagccgtgagcggcgccgccgccgacgacgacgacgaggaggcggacgggaacagcgccaccctccccacatcatgcggccaccgccgacgtcggcggcggcggccaggagcggcgccgccctccccacgcaaggatccggcggtggcggctgcccttcgcccggatctggcggcggcgacagtcccccgcctggatccggcggcggggagcagcagatctaggttagatgtagagaccggttgcctccacttcctggggcaccggtggatccgagaggagggcaataggctcaccggtggcgcgacgatggcctcgtccacgcttcctcgtccccgacggtggcccgacatggagcagaagggggatgagggggtggcactgatttga

SEQ ID NO: 26405 - DNA, 495 bp, Oryza sativa
  Clone ID: PAT_MRT4530_31199C.1
atggcagaggttgcagatttaactggggatggaggtgttcttaagacggtggtcagaaaagcaaaggatgatgctatagctccaactgatagtcttcccttggttgatgttcattatgaaggcacactcgctgaaaatggtgaagttttcgacaccactcatgaagacaactctattttctcatttgaaattgggcaaggagctgtcattaaagcatgggatatagctttaagaactatgaagctttgtctttgcagtgcaacactcatttttgaggtggagttagtggcttgtaggcctaggaaaggttcaagcctgggcagtgtttctgatgagaaagccaggctagaggaactaaagaagcagcgagagctagctgctgccaccaaggaggaagagaaaaagaagagggaagaagcgaaggctgctgcagcagctcgtgtccaagccaaacttgacgcgaagaaggggaagggaaaaggaaagggaaaatag

SEQ ID NO: 26406 - DNA, 281 bp, Oryza sativa
  Clone ID: PAT_MRT4530_3119C.1
atcaaacaaatactccaatcttagagcccatttaaaaacactgtctatcataactcaaacaaagtctatagcctttcttatcaccacaaaagaaacaccccaactcttccacttcctaacaaaatgcaagatcaactcattatttcgctacttgacttgcgaacactgcactcatctcatcaaaacacgcgctagatcttataacgagttgtattacaactcaggctccgcacacccattatcgactttcatacacaccatcctcggttcccaacccttgc

SEQ ID NO: 26407 - DNA, 528 bp, Oryza sativa
  Clone ID: PAT_MRT4530_311C.1
ctgccgcgcctgctgccgtcgctggtctgaccgcccgtatgccaccggtctgaccgccgcttgccgccggtctgaccgccaccacggacgtcgtcttgtccccaagccgactcccggtccatcaccgcaaatactctcccgaggcatcgagtcaccctcgaaatcgatggagatcggtctgaccaagattgatctgccggtctgaccgagtggatgccgccagtctgaccggtgttgaatctccggtctgaccgccgagatcccttgccgcgccgcgggctgcgccagtctgaccgcgcaatacacgccggtctgatcggcagcaccagcccggtcatctcgatctgcatcaacagaaccctcggccgacgaccctggccggtctgaccacacctcctgtgccagtctaaccggaggtgtgccggcggtctgaccggcctggcgcccggtctgatcggccgagtcgacctcgtcgtcgtcgtcgtagtcgctctcgtcttcaaaaatacaaccattctccccctgaac

SEQ ID NO: 26408 - DNA, 1045 bp, Oryza sativa
  Clone ID: PAT_MRT4530_31200C.1
cgcgaataatcgagagagagagagagagagagagagagaggcgacgagacggcgattgctcggttctcccgcgggcggcggcgagccggcgagggcttctccggtggggggcggcgagctatcctagcgcccgccttgggagcgctctcgcggatctcctttggagctttgatagcatagcaaggtcatggcagaggttgcagatttaactggggatggaggtgttcttaagacggtggtcagaaaagcaaaggatgatgctatagctccaactgatagtcttcccttggttgatgttcattatgaaggcacactcgctgaaaatggtgaagttttcgacaccactcatgaagacaactctattttctcatttgaaattgggcaaggagctgtcattaaagcatgggatatagctttaagaactatgaaggttggtgaagttgcaaaaataacatgcaagccagaatacgcatacggaagtgcagggtcgccgccagagattccacccaatgcaacactcatttttgaggtggagttagtggcttgtaggcctaggaaaggttcaagcctgggcagtgtttctgatgagaaagccaggctagaggaactaaagaagcagcgagagctagctgctgccaccaaggaggaagagaaaaagaagagggaagaagcgaaggctgctgcagcagctcgtgtccaagccaaacttgacgcgaagaaggggaagggaaaaggaaagggaaaatagatgactagtatttgcttctgactactgtaacctagaaataatccgcaacaaatcatcatctgcaagattgcttgttggctactgttcatcagatgctgcgttgttgctcctgtttgacaccatggctgtactgatagaacaaaattgtagttaacgttttcacaaatcatcacatgcaatcattgaccggttattggttaatgattgcatcttcatatctgatgatataccgcgtctctgtaagttaatgctcaacttacacgattttatcggatattgaggagttgccctttaacc

SEQ ID NO: 26409 - DNA, 474 bp, Oryza sativa
  Clone ID: PAT_MRT4530_31201C.1
acttaaaatttttgaataaaacgaatggtcaaacacgtacttaaaaaaatcaacggtgtcaaatattttgaaacggagggagtatattacaaagagagggaggggaaggacactaacgaaaatagccggtgctatttcctagttaaccacacaactacaattacattaaccacatatttctttgaataaaattccaaattcaaagaagggatctactcacgggaaatcttcaatcttgataaaaggatgaacaagcttcactgtttccttgccacgtagataacgaaagacatgccacgtacgttgtaggcctcctcacagattacttccacattgggttgtgcctgtgccttcgaggtaagaggggaaccaagtgcatctctaatatattgatcctgcgattgcaaaatcttttcgagagagctatcactgctatcctgtgaactgtagtaaacatcaactgggtcggtcagt

SEQ ID NO: 26410 - DNA, 722 bp, Oryza sativa
  Clone ID: PAT_MRT4530_31202C.1
gaattcgagctcggtacccccgaatgcaccagaggatgtccggaccgacgccgataaacaagaaacgttcatgtctttttctgatgacgagctcaccaatcaactgatatgtgaagactacaccgactatgagaggctgtttgacacggcaatccgccacgaggatcaacgcaacacgacggctacgaagaggcaagctgcgcaacttactgcccatcaaggaggtaaccataagccagacttgactcaccgtcagaaggctggacctaccaccatgagtgttggtcaacaccgcacattcaaccacaccaacttgcaccatggctccagtggcagctagaatgaccatggaagtcagacgaaccgctgtacagctccacgctcaccgatggcaccggcacagacaggccagaccgcacaagccaataaggagacgggagcaaaaccaaagtcctgcttcaactgtggtgagcttggccacttcgatgacaaatgcccgaaacataggcgtgccggaccaaggtttatacaggctgacgtcaaccactcatatggggaagaggcacaagcaccaccacaggacctactggatacgattgctgataactcaatccctgcaacagaactatgtgattctggtgcaacgcattctttcatctccaagaaatttgtcgggatgcatgggttaataagagaggaacttaacacaccgatgcgggttc

SEQ ID NO: 26411 - DNA, 585 bp, Oryza sativa
  Clone ID: PAT_MRT4530_31203C.1
cgcgcagctgaagccactggggacgggccctcgtcgcagttcttcgcgggatgccttgctggcctgctcgcgctagagctccgtgcttgtcgctccgtctctgaccacgtcctcctccttgctgctgatcgctgccgtgtgctcaagtcactcctggtgtacgatggcggcagccgggaggccctccaccggttcatccaccagcgtggcgcagcgttgcacacgttagacctccgcctccctctcgacttgcacaatgaccacctcctagcgatcggtgccgaggccgagcaaggtcagcaaagccagaatggcgggcatagcctcgctgcgctccggcttcagagctgtgtgctcatcactggcgacggactccggtccctcgcacgcacaaccactggagctggtatcgaagagcttgccttggtgaactgcgatgtggtggaacgggagcctggactgcttaccttcctcagccagagcatgcgccggcttcgccgtcttgatttgtcatacaacgagactctcagtgaccaggaggttggtgccatgctatcgtcctgccataatctaattgatatcagg

SEQ ID NO: 26412 - DNA, 816 bp, Oryza sativa
  Clone ID: PAT_MRT4530_31204C.1
atgcggcagcggcgacacgggagaagaggagggaaggcggcggcaggagcacgaggtgctaaagcagcctccattaaaatcgagcagacgaagccgaggcggatttcgcaagagctagcgcaagcgtcggccatggaggaggtcgtcgtcggcaaggagcgcaagcgcccgcgctgcgcgctcgtcggcgtcggcggccacgacagcgacgtggcggatgagcccggtggcgtgcgggcgagaaggacaagcacagcaagactgtcggtgccaacgtccatcgcgttctacgacatccaggaccgcctcggcgtcaaccgaccaagcaagtccatcgagtggctcatctgcgccgctctcgtcgctcgactcctccttcgtcctccccaacgccgcccagctcctcacccgcggaggccgtcgagcgggcagccttcggaggaacaggcgcgcacgaggaaggctacggtggcggtgtcacctgggaagtcgggggagaagaggcggaagacgaggtcggggtgtgcagcgcggaaggcggagcgcatcgcgaagttgagagtgtggagggaggggtggatgccgaggcgcgaggcgagcacctcggcgacgtcgggcggccagagctggatcaggaagccgtcgacgccagggagcggcgactcgtgctcgtgctccgatgcgaagccggggaagcggcggtgggcggagaaggccggggaggtggtggcgcgggaagccgatggcgcggagcggggtggtggcggacgacgacgatgacgatgatggcagcccgcgcgcgcagctcctcccccg

SEQ ID NO: 26413 - DNA, 654 bp, Oryza sativa
  Clone ID: PAT_MRT4530_31205C.1
atggccataatcgaggctatatggccccgcttaggtgacctacgcagtgctgaccaacgtcgtcgaaggatgggtcactgtcaaacagggttcatcggggtgaacacgacgaccccaccgttggatccgaagccctctccactgcttccttcccctctcactagatctaggggatgccgccatcgatccatgccctccggtcaagaaaccctagccaccaccgctgctagcaatcggaatcatcgacccggggccaccttctcaggatccggctgtcgcgagcccgccagcgccggatccggcctttgcaagcctgccagtggtagtggaggaggagctgccaaggcgctcggtggctgctcccgctaccattacgcgcaaacagtcggggtcatcgtcattgttgaggggaacctcgtgctaactggcccatcttttgccatctcggtgtatgtcggcattgacctgatcaatctccatgacggtagccaagaagaagaagatgacgatgaggaagataacgttggggagatattctgcaatacctgcacctgtgacttcaccgactacaacagtgccatagtcgagacggtcatcacatggtatggcccagctgaggtgacctatgttgtgctgaccaacgccttccaatga

SEQ ID NO: 26414 - DNA, 425 bp, Oryza sativa
  Clone ID: PAT_MRT4530_31206C.1
catctctctctcaggccgtcgcgtcgccgccgtgtcgggctccgcagccgcagggggccgccgatcagacgcggtctcgcggtcgcgccgagccgttgtccgccaactcgccaacccccgcccgccttcgcgccttgctcccgcctcgtgcaatcgcgtcgccttgagaagccgagaggcgagagccgcagtcgccgccgcgcccgacgccaaatagccaagcccggccagcttcgcgccgtcgcgcggtgccgccgccgccgccgccgacgccctctgcgctgccccgagaggccgagaagcccaaggactacccaaggaaaaattcctagctataccactgtttgccatggcgcctgccggcttcttcgacctcagcatccctcccgacgactccaaatctaccaccaccaacactagcgtag

SEQ ID NO: 26415 - DNA, 2417 bp, Oryza sativa
  Clone ID: PAT_MRT4530_31207C.1
gcacgaggactcaccccccctcattccccccctacaccgcgacggccgacgaggtctcgggctccccgaagcttccacaacaatggcgaggctactcgtcctccgctcggcgccgtaccaccgctcccacctctccgccaccgccacgttcctcctttccccctccaactccaagcacccacactccgcctccgcctccgcctcattcccctccaccgcgcgccgaatcctactcccgtcgcctctccgcgtcccggcccgcgccatcgagtcctcccccggcaccacaaagcaggagccgactccggctgccggtgagggtgaggcccaggagccgccgccccccgctgcgtcggcgttcgaggtggaggagctcgggtgggggacccagctcgccgtgaagctacgcatgctcgtggccccgccatggaagcgcgtccgcaagggcagcgtccttaacatgaagcttcggggcgagatatccgatcagttgaagacacgcttctcttccgggctgtcattgccacaaatctgcgagaattttgttaaagctgcatatgacccgcgaatatcggggatctatctgcacatagagcctctgagatgtgggtgggggaaggtggatgagatcagaagacacattgtcgatttcaagaagtccgatgatgagcaggtgctgcatgactttgtaggtaaatttgttgttggttatatgcctgtgtgtggggagaaagagtactaccttgcttgtgcgtgtggtgagctgtatgcaccgccaagtgcttatgttgctttgtttggtctaactgttcagcaaacatttctcagagtttcacttctccttggaaccaattttagtaagcttgatcatacactttcattgctgttccacaaaatcaagctaattgaatgtagcaagttcctttctgggtatctaatgcttttgaactcaattgggaagaaaaaagaagaaatcgaggaattcattaattcaggagtctatcaggttgccagacttaaggaagaaggttggataacagatttactttatgatgatgaggtcatggcaatgttgaaggagagagtagcacagaaagacaagaaaagtctgcgtatggttgattacagtaaatattcacgtgtaagtaaatggactcttgggttacaaggagggggtgaacaaattgcagtgatcagagcatctggaagcataacacgtactcgcagcccattgagtgttcctagttcaggcatcattgctgagcagttgatcgagaagatacgtactgttagagagtcagaaaagtataaagctgttatcctccgtatagacagccctggtggtgatgctcttgcttctgatctgatgtggcgggaaattcgactcctagctgacaccaagcctgtggttgcttcaatgtctgatgttgctgcaagtggtgggtactacatggcaatggctgcaccggtcattgttgctgaaaaactcacgctaacaggatcaattggagttgtaacagggaagttcatcctgcaaaagctatatgagcggattgacttcaataaagaaattatatctaagggtagatatgcagagcttaatgctgctgatcaacgccctttaagaccagatgaggcagaactttttgaaaagtcagcacaaaatgcttatgcattgtttcgagataaagcagccatgtcacgctcaatgaatgttgatcagatggagactgttgcacaaggtcgggtgtggagtggccaagatgcagcttcaagaggattggttgattcactgggtggattctcacaagctcttgctattgcaaaacagaaagccaatataccccatgataggaaggtccagctagttgagatctcaaagccctcaccaacattaccagagatcttgtcaggaattggcagttcattgcttggagttgacagggcagtgaagggagtgctccaggatgtcacttccctaaatggagtccaagctagaatggatggaatattgtttgaaagattggaagatttgtctggagaaaatcaactcttattgctcgtaaaagatattgttaattattttgattgattccaccagtcagtaccctatgttttacaaacagttatacatagaagaagaaaatgtcaacatgtcaataataattcaccttacctagaggctagaagcaggtagacttgggatccgttcagtacttttggcactgtatattctattttgttcttttcatactgctgcctatggaaatgttgtacatgccttactgaaaattcaagcgatcttgattttctagttcgcttgaactggaacccaatagatcacatttactctttgtttatgagattttatctatgttacaatatgtatcgatattctagttgattccagatttttg

SEQ ID NO: 26416 - DNA, 1203 bp, Oryza sativa
  Clone ID: PAT_MRT4530_31208C.1
gcacgaggttttttttttttttttttttggaacaaatataatttcattcaattttatccactgatgggaaactaccattttccagtattcacagtgaataattgaagaaacaaaaacttgaaaactgaatgtttctgatacattcagtttaccaagaaactatatatatggatcagttaagcgtgataccacggacgcaggcaacatgcaaaaaccattggattaatatacaaatggcctggaacataaagccaaggtaaatcaaaaggttacccttacgggtgaagttctttctatagcttgaactacaaagatcagttcccttctggttatatatgaagcatcaagttgctgaattcagcttggtacggcaaatttcataacttaagcaaataccagtagtgtgtgcttcagcacagttgctgcgcagattttgctaccacgctcacgagatatcaccaagcggacatgtggaacagttttccagctctcaccaagagcaggcttgggagctccattcccagcaaccatatggttagtaaccagaacagatagattatgctcatatgctagcttctttagaatcatagccactgatatcatcatcgatcgccctcgtggatacttcccaccgttgatgggagcaagtatagacgatattgagtcaatgataagcaagcatatcttgttacccccattgtttaccttgctcttcagtgacaattcaagttgatgtagcacttcaaacaaatcgaatatatcaaagactgacttacaaatgatgctgctcatgaccctctcgagtcgcacattctttggctctctgaccaaagagatggggaatccatcaactattcgagcaatgcggctaggggaaaaggaattgctagtatccaagtacataacaacacccaactgcctggctgccacatgtgaagcagaacaaagacagacctgtgttttaccggaggacgattggccggttatttcagtgagctgaccttggcgcaggccgcctccaagaagcgcgtcgacgccttgaaggcccgtggggaggaagcgcttgttctccgtcgcatccttgagcaagtccattccatccagaaagcattgcccctcctcatcttgcttcttctcctcgccgccggagggaggaggcctggggaagcagccggcgccgccgctcgccgacgtcgccgccat

SEQ ID NO: 26417 - DNA, 2638 bp, Oryza sativa
  Clone ID: PAT_MRT4530_31209C.1
aatctgaccaaacttgacatggcatacaacatgctagaagcaaatgactggagctttgtctcatcactctcaaattgctccagattgactgaactgatgctggatgggaataatcttcaagggaacctaccaagttcgattggtaacctttcgagtagtcttgagtacttgtggctaagaaataaccaaatttcctggcttataccaccagggatcggcaaccttaagagtttgaatatgttgtacatggattacaattatttaactggtaatataccaccaacaattggatatttacacaacctcgtattcctgtcctttgcacaaaacagactgtctgggcaaatccctggtactataggtaaccttgttcagctgaatgaactgaatcttgatggaaataacttgagtggaagtatacctgagagtatacatcactgcgctcaactcaaaacactcaaccttgctcacaattcacttcatgggactataccagttcatatcttcaaaatcttttctctttctgaacatttggatttgtcacacaattacttgtctggaggaataccacaagaagttggcaatcttattaatcttaacaaacttagcatctcaaacaataggttgtctggtaacatcccatccgctcttggtcagtgtgtgattcttgaatctcttgagctgcaaagtaatttccttgaagggataattccagaatcttttgcaaaattgcaaagcatcaataaattagatatttctcataacaagttgtctggaaaaatcccagagttccttgcgtccttcaagtctctaattaatcttaatttatccttcaacaatttttatggaccacttccaagttttggtgtttttctggacactagtgtgatctcaattgaaggaaatgatcgtttatgtgcaagggcaccattgaaaggtatacctttttgttctgcattggtggacaggggaagggtgcacaggttattggttctagctttcaaaatagttacaccagttgttgttgttgttatcaccattttgtgttttctaatgattcgttcaaggaagagagtgcctcaaaattcgaggaagtcaatgcaacaagagccgcacttgcgactattcaatggggacatggagaagattacatatcaagacattgtgaaggccacaaatgggttttcctccgctaatttgattggatcaggatcatttggaacggtttacaagggcaatctggaattccgacaagatcaagtagccatcaagatttttaaccttagcacatacggagcacataggagctttgctgcagagtgtgaagccctaaaaaatgtccgccatagaaatcttgtcaaagtcatcactgtgtgctcttcagtggattctacaggggcagaatttagggccttggtatttgaatacatccaaaacgggaaccttcaaatgtggttacatccaaaggaacatgagcatagtcaaagaaattttctgacattatgccagaggatcaatatagctttagacatagcatttgctctggattatcttcacaaccgttgtgcaactccactcgtacattgcgacttgaagccaagcaacattcttttaggccctgacatggttgcatatgtcagtgatttcggtctagcaagattcatatgcacaagatcaaattcagatcaagatagtttaacaagtttgtattgcctaaaaggatcaatcggatacatcccaccagagtatggcatgagcgaagagagatcaacaaagggtgacgtctatagttttggagtgcttcttctggaaatggtcacaaatattagtccgacagaagaaatatttaatgacggtacaagcctgcgtgatcttgtcgctagtaactttcccaaagatacattcaaggttgttgatcccaccatgctacaagatgagatcgatgcaactgaggtgctgcagagttgcgttattctgttggtcagaataggactctcttgctccatgacttcacccaaacaccgatgcgaaatgggacaagtttgtactgagatccttggaatcaagcatgcgttatcaaagatagatggtgaatgatctgaggcatgtagagaggtatttttttttttttttttttttttttttttttttttttttttttggcaccaactggctgcactttattgatacaagacaattgtctacaattgcacagcctgatctgcattatccctagcagtaactagcctaacgccagtggggatttattccctgatcatagtgtctgaaattatctgaaacaacatcacaatctcacggtgcacagtacacgtaaggcagttccggacattcgatgtaggagaacggttttaacacgtccctgtgcccagtgtatttaatctttacccccgggaagtggatgcccagaacccatacgctcctctttgctaggatcgatcaccggaacagctggagaggcttcttgagacttggcggccggagcagctggaagatcactgcctggaacgggcaccggcgtcgcagacggaggatcaccggatgaataggccaccggaatgggggaggcggcggagctgtcagccattctcccgatctaggtaggccgcccacgcgtccg

SEQ ID NO: 26418 - DNA, 438 bp, Oryza sativa
  unsure (1)..(438): unsure at all n locations
  Clone ID: PAT_MRT4530_3120C.1
tatttgttagagaatctgctagattttcatctgggaggacctccacaggtgctggaggcttcaatgagtccttcaaacgtggttcggaggggaagaagacaccttctggaactggtgtagacatcgaagctgaagtgaaggatgccgagtgattcttctgcaggaatgtgctaagaatctctgcctcgttgacatcagttttgcagctcttcatgggcaatttttcagagggctattaaatctggtagcagtgtcatgggtgtaccaaccgttcgctagatttgttgatatgctaggtccaggatatcaagacgaactgacacttgattccataagtgacgacatgtagcgccttcttctcgttgcaacttgtaaattgcaattacctctgcttgttaaaagtaacaacagaaaangtggatgtgaatatttacttct

SEQ ID NO: 26419 - DNA, 582 bp, Oryza sativa
  Clone ID: PAT_MRT4530_31210C.1
ccggccgggacaacaccattcatgttcattagtactactacaacatggcatccatagatcgccccatagttttcttccaggttgcttgttcctcttgtgcatggctctctaggccagcatctattacgccacataactatctcacatgacatagtgtctcgtcgagcaagacccagagaatgcaagtttgataggttgcaagcatttgagccaattcggagtgtgaggactcaagctgccacaactgcatgtctctcaatgtctcataatgagctgcttcaatgtaccggagctatctgttgtccgccgagtgtattgaacctatagtgctactactaccccattactctaatgatgcatctctaacatatatcatccgagggagaggcataacaggaccgactctcccaggatgtactgatacctaccagtagcaggtccaatcatcagggcaagtccaattgaccgaccgtcaaagccgaatacagtaagttcaaggatgaacatcataatgattcaccggttcacacgaggagtcgttatcgcgctgcctgctgctgtacctcattgccgctacatgat

SEQ ID NO: 26420 - DNA, 105 bp, Oryza sativa
  Clone ID: PAT_MRT4530_31211C.1
tcgacccagcgttcggcgaccggtggggcgatcgacggcagttcatggagggtacgtcatggcgtctgacaagacgtcacaccctggcggcgtccctctactgtg

SEQ ID NO: 26421 - DNA, 747 bp, Oryza sativa
  Clone ID: PAT_MRT4530_31212C.1
atggccgccgcgctctccttcttcctcctcctcctcctcctcccggcgccgctcctgcttctccccctcgccgggaacctcccggcggccgttctcggcgaggtgcgagtcgagcgcgacctgatcttggtggacctccaggactacggcagcggcgtggggacgctcgccgtgaggcccgacgtcttctccgtcgccggcttcgccaaccggaccggccactggcacgccctgcgaggcaacgaccacctgttccgcggcgacctcgtggcgacccctctccctttcggcagcagctacggcgacctcgtcggcggcgtcaacaacctgctcggcctccccctggggtcgcccttcacgagctacgccaccgtggtgctctccggctacgacggcggcggcggcggcgaggcggcggcggtgaagcgggcgctggcgacgctggcggcggtgatctgcgaggggcagcggctccacccgatcctggagaccatcctgacgcgggggcgaggggcgcgcgtcgccgccgagcacctgccgtacatcgagcactgggacgccatgtgggaggagctgaagcggtggaggcggaccggcgagtggggcggcgggccgttcgccggcgagctgagggagcgcgccagcatcggcagcgcggaggaggcgctcgccgtcgtcgggtggacgttccggcagctgctgctgggcgacggctccattccggcgatgtgccgtgctgagctctaa

SEQ ID NO: 26422 - DNA, 2154 bp, Oryza sativa
  unsure (1)..(2154): unsure at all n locations
  Clone ID: PAT_MRT4530_31213C.1
atggatagggaggagcacctgacgccgagccatcgcccatgccgtttgaaccccgcgcccgtgancctatccctccctcacgaagctcccttgccccagtaccgctccgaggtcgcttcggagcccaaagatccgcagtgcgaggatttcaaggatcaagctcaagatctcgagcaaggcaagctcggctcgagctcggctcgagcttatatcgagctcgagcctatgcaggcgagctcgctcgagctcggctcgttgacagccctagctgcagatggattcgtcttgggcggcggcggcaatggcaccggcggggacgacctgtcggcgctgctggctttcaaggcgcagctctccgatccgctcggcgtccttgccacaagctggacgaggaacgcgtccttgtgccgctgggtcggcgtgtcgtgcagccggcggcggccgcgggtggtcgtcggattgcgcctccggagcgttcccctccaaggagagctcacccctcacctcggtaacctctctttcctccgtgtcctcgacctcgccgccgcaaacctcactggccccatccccgctaatcttgggaggctgcgtcgtgtcaagattcttgatcttgcccataacaccttatcagatgctattccctctgcactcggcaaccttacaaagcttgagactctaaatctctatgacaaccacatctcagggcacgtaccaatggagctgcaaaatctgtacagccttagggtcatggctcttgatcaaaattacttgactgacagcgttgcctccttgtccatgctccgagttctttcgttaccaagcaatcagctctctggtccagtgcctcctgccattttcaacatgtctaggcttgaaaccataagcatcaggaagaacaatctaacaggggctatacctactaacgagagctttaatctcccgatgttgcgaaagatagacctatacatgaacaaatttacaggcccaatcccatctgggcttgcttcatgcaagcaccttgagatgatttctctaggagggaacctctttgaagacgttgtgcctgcgtggctcgcaaccttgtcacagttaaaatcactctcattaggcggcaatgagctcgtcggtccgatcccgggacagcttggaaatctgtcgatgctaaatatgcttgatctctcattctccaacctaagcgggccgattccagtggagctaggaacgctgtcacagctcacatttatgagtctttcaaataatcagctcaatggtacctttcctgcttttattggaaacttatctgaattatctcacctggagttggcatataaccagctgactgggcatgtaccatcaacgattggaaacaatatcaggcctctgaagcattttgaaattcgaggtaatcacctccacggggatctcagctttctgtctagcctttctaacagtcagcgacttgaggtcctcatcatatcagaaaacctttttactggctgtatccccaactctgttggaaacctctccactgacaaccaactcagcaaaccaatactgccagcttccctcatgacgttggagaatctgctgggatttgatctctccaagaatagtatagctggacttttgccatgtccggacaagtcactgtactcaactagtgctcaccacttcctgaagtttgtactccctgccatcattgtagctgttgctgcagttgctatttgcttatgccgaatgaccagaaagaaaattgaaagaaagccagatattgctggagctactcactataggttagtatcgtaccatgagattgttcgtgccactgaaaatttcaacgatgacaacaaactgggagctggaagttttggcaaggttttcaagggtcgactgcgtgacggaatggttgttgcaattaaggttctcaatatgcaagtggaacaagctatgagaagctttgatgtcgagcggctggcgagcaagcttgatgatcttgtcgacaacaatcaaagtgccttcatccgcaaacttcgagcacacaggtgttgctcaatgggacgccggggagaaaaatctggaacacgcgcggagtgcggcaagggactgctacccatccccaaccgtctgtccctctacgccgatgtcacagcttga

SEQ ID NO: 26423 - DNA, 285 bp, Oryza sativa
  Clone ID: PAT_MRT4530_31214C.1
atggcgaagactatggaacagggacggcgagaggcgagggattgcgcgggtgctttgccaagccagaggcctcttgggcgaaggatgcagggcgaagaatatatgccgaagggagacgacttcgccatagcaagttcgccccagcgaggaccgaagaagcttttccggcccatcaagcctaggggctattgggccgatgatcgcccgacggcccatcaggggcccatgaacctcaattacactatgtacccatgtaaatgtccctttataagggcaaccatgtaa

SEQ ID NO: 26424 - DNA, 687 bp, Oryza sativa
  Clone ID: PAT_MRT4530_31215C.1
gcacgagggtgctggcgatggaggccccacgctgccgccgccgccatggggcccccgcctccgccgggcgccgcgacgtcggcgtcgaggaagcggttccggaccaagttcagcccggagcagtcgccggagaccgaccgcgtgcgcgggcccgggcaccaccacgacgacgacgccgccgccgacgatgatgattccgaggactccgagatgtccgactacgacgacgaccgctccgcctcgccgctgcaggcgccgccaccggtgctctctccggggtacctcccctccgcgacgcacatgctgctgtcgcttggctccgcgtccgccccggccgtggcggcgtcgaggccccacgccgccgccgccgccatggggcccccgcctccgccgggcgccgcgacgtcggcgtcgaggaagcggttccggaccaagttcagcccggagcagaagcagcggatgcaggcgctgtcggagcggctcgggtggcgcctccagaagcgcgacgaggccgtcgtcgacgagtgctgccgcgagatcggcgtcggcaagggcgtcttcaagggacaattagtactaccactaagtacagtgattactagctttgttcttgagctaatctgggtgtgcatggataatgatgatgatgatgtgctaatcggagtcctaggtggggtagtgttctag

SEQ ID NO: 26425 - DNA, 159 bp, Oryza sativa
  Clone ID: PAT_MRT4530_31216C.1
atgcagctcatagccatctacaagacaaacatgccaatggaatttgccgggacagccgaaagaggtcgcccaaattgtattaagaagaaagagggtgtcacgaagattgctgaaagagctggatcactgaatgagtataacattagattaaaggaatga

SEQ ID NO: 26426 - DNA, 2697 bp, Oryza sativa
  Clone ID: PAT_MRT4530_31217C.1
tttgttttttttgtttgccagtgatcttttttttttttttttttttttttttttttttgcaagaaactctatcagtccagttattccagatagagccatcgcgtaagaaagaattgcattacttttggggtctgcgatactataagcaacagagttttgtaccagtctaaaagcagccttcttttactcttgccacataaacatattcagtttaactacacttttagcaccctgtgtggatgtcatgtgatgagaggcaggaccgactgacttgttcactcacgggattattcaagctgccaggctctttgaagctatctcgtacacattctctgatagcccattggctgacacgatcatctccagctgagccttagcaagagcttgtctgctctcatcatatcgcctccaccgagagaaagctgacaccatgcgggaggccacctgaggatttatcttgtctagctgtaaaacaacttcacccaagaacttgtaaccagagccatcttttgcatggaaattcacaggggacccacaaaatcctccaattagcgaatacaccttgttcggattcctcatgtcaaaagcagggtgaccaagtaacttttgaacgttagcaacatttccagggatgtctgatgtagcttgaagagcaaaccacttgcttacaaccaaataatcatgctgccatttgttatagaagtccagaagggtgtcatcacgaacttggcctggattttgagacaatgctgctagtgcagcaaactgctccgtcatgttagtagcagacttgtattcaacaaatgcaagttcagtggtgtccggttcattcagagatgcaagataagcaaggcatgtgtttttcaatgcacggcgggccatgctatcatggtcaaatgtataagcttcagaacttctgttatttgtcactgttgaaagaaggtcatctttgagttgaagggcaagctccttcttaataaaggtacggacagcatgaactgcatcaggatctgcaactggcatcatatccataatctccccttgacccggcaaagttatcgctttcgcaatgaattctttatccaagcttgtgttccgcaggattgatctaagtccatcaacaaatttagggttcagggccagtgttttctgttgctggaagtcagctacaagactgagcatcagtttacgtgacagcacctgaccagcttcccacctgttaaattcatccgaatcattggcaagtaggaaaaacaagtcactctcagtcagatcagaatcaagacgaacaggagcactgtatcccctcaacaaggaaggcactggtttctcaggtatgttgttaaatatgaattcttcctccttcttattaaattgaagaacagtagtgaagactggctggccatcactagtgagtgattggagcatcccatcactgtaaatggaagttaggggcatatcctttccggtagaatcaacaagtccgacagcaataggaatgaacatcggctctttaactggttggccaggggtaggtggcacttcttgactaaatttcagagaaaatgtctgagaacttgcatcgtatgaagagctcactttaacagttggagtacctgcctgagagtaccattgtaaaaagtttggcagctgggtgttatttgcatcacacattgcagcataaaagtcttcacaagtcacagcttgcccgtcgtgcctttggaagtaaagatccatgccctttcgaaaccctgaagctccaaacatggtcttgtacattctaacaacttcagcacccttttcataaaccgttacggtataaaaattgtccatcttgatatacgaatgcggacgaataggatgcgccatagggccagcatcctgtggaaattgataggtcctgagtttagaaacatcggctatacgttttactgtgcgacaaccaagatctgatgagaattcctgatcccggaatacagtcaatccttctttcagagtgagctggaaccaatcacgacaagtcactctattaccagtccagttgtggaaatactcatgtccaacgacacctaaaattgcagcataatccccatcagtagctgtctctggtgatgccagcacaagtctagattgaaatatgtttaagctcttgttctccattgctcccatattgaaatccggaacaacaacaatattgaacaaatcaagatcatattcaaggccaaaaacctcctcatcccacttcatagctgctttaagagaatacatagcatgcgctgtctttgctaaatctgcccccggcccccaaattctaagtgttacttttcggccagaacatgtagtaaatgagtcctccctgcaatccaactgaccagcaactaaagcaaataagtagcttggtctcttgaaggggtcttccccctcgtgcacatagggacagggtacagcatctacctccaccaccatccggtccacctcccgcttcaccgccgggtcgccgtagtcaccgtcgatgtagggcagcgcgtccacggcctccgcgtccgacggcgcgcgccacggcgccccggagggcgccggcggggcctccagcatgagcacctccctcgtccccgacgacgacgccatcccggtggccgcctgccgctgccgcgcgccgctggtcgcaggggaggtggtggaggagagagagaagag

SEQ ID NO: 26427 - DNA, 627 bp, Oryza sativa
  Clone ID: PAT_MRT4530_31218C.1
atgaccgtccaacaaggcttcatgatcattgttatgtgcagatctaaaggtgttctaagattgcatatcaggtgtacaattggaagagcactgccgagaagcggcggctcggtggcacgatgcggaagagcggcggcagctcggcgacgaggcggccctccgccggcggcggcggcggctgcggaggagcagcggctcggcgacgcggaggggcggcgggaggagcggctgctcggcggcgcgacgcggaggactgctgctggtagcggatgcggagggctgcggacgagcggcggcggctcgacgacgaggcggccctccgctagtggcggaggagcggcgaatgcagaggagcggcagcttagtgatgaggaggggcggtgggaggagcggcggctcgatggcgcgatgcaaagggccgccgctggcggcggatgcggagggctgcggagaagcggtggcggctcggcgacgaggtggccctccgctggcggtggctgcgatggagcggcagctcggcgacgaggagcgccgctagcggctcgacgacgtggaagacgaccgacgacggcggtgccggctcggatccccccactctcgccgtccgtgcttcctgcctcccagacg

SEQ ID NO: 26428 - DNA, 345 bp, Oryza sativa
  Clone ID: PAT_MRT4530_31219C.1
atggagcaggcctcctgtgactatcccacgagcgctggagcaaggggccacgtgagaattgtggcgatcggcagaatgcagcgagtccaaatcgcgaacgggacgtgtgagaaccatccagatcgtcagagcttcatcgtacggcaggggactcgcgagcatgtatatctaggggctacacgcgtcgccctgccattggctgccgccgacgcgttcggcgcaaccgcgacgccctcgctgggtccatcgccggcgctcggttcagcctcaggtagccataggtgccgcgattcctccggctgccgctggggcccactccgatcccgagtatcccattggaactga

SEQ ID NO: 26429 - DNA, 1210 bp, Oryza sativa
  Clone ID: PAT_MRT4530_3121C.1
gcacgagacacaatccgagaacagctttgcctgcgaggtttcagcatcgaagaagtgtagagaacccacatgtttctggtagaatcttctccctgctgaaccttccccttccatggcctcgctgctgccgcctactcatctcctcactcctcccccgctctgctgctgctcgtacgctctacttctcccgagagccaggagggcgcctccaagattctcgaatggggccttctccgcggcggaatcgctggtccggggtgagttcttggggaaagtcgggaccttggctcggagaatggagggaaggcggcgccttgccgtggctagtgccgggagaggcccactttttggcggcggcggcggcggtggcgggcagcggggctccggccgggtggtggggaaccttgccttcgccgccctcttgacgttcctcgccaccaccggccagctccggtgggttctggacgccatcgtctccctctggcttctcacaatactgctgcctattttgggtctcgctgcatttttcttctttgcaggccaagacatacttcagagcaattgccccaactgcggaaaaagcttccagatactgaagtcatctttgaaggatggtccacaactgtgtccatattgtactcaacctttctcggtgcagggaaacaaatttgttagagaatctgctagattttcatctggaaggaccaccacaggtgctcaagccttcagtgagtccttcaaacgtggttcggaggaaccaccaatcatggcatttaatcagcaatcgcactatgtgttgcttcatgcggggaagaagacaccttctggaactgttgtagacatcgaagctgaagtgaaggatgccgagtgattcttctgcaggaatgtgctaagaatctctgcctcgttgacatcagttttgcagctcttcatggccaatttttcagagggctattaaatctggtagcagtgtcatggttgtaccaaccgttcgctagatttgttgatatgctaggtccaggatatcaagacgaactgacacttgattccataagtgacgacatgtagcgccttcttctcgttgcaacttgtaaattgcaattacctctgcttgtgtaaaagtaacaacagaaaaggtagatgtgaatatttacttcttttttttttttttgcttttgtatgtggatgagcaatcaaagatcagttgaag

SEQ ID NO: 26430 - DNA, 217 bp, Oryza sativa
  unsure (1)..(217): unsure at all n locations
  Clone ID: PAT_MRT4530_31220C.1
cgcacgcagggctaacatggcgggggagacggattccacgccgatggccgcggggcgcgccgtgccgacgncgccggagncgccgncccgcgctnnctcctcctcggcggcggcganagctctggcggcccgtcgnccgcgaggcgngtagggccaccgccgnggngntcctcctgntcctcgactcccacctctccgtcctnctcctacgtcgact

SEQ ID NO: 26431 - DNA, 536 bp, Oryza sativa
  Clone ID: PAT_MRT4530_31221C.1
gcacgaggcgctttctgaaacaaacaagagtgtaggtgtatcagttgtgtgccattctcgtctcttctccgcgacgcgttcgctttatctcccacccaaaacccccagagagggaagagaaacgcctccctcccctctcctcccccgacccaccctgcacctccttcctcgtcgacgccatggcagcaccggagtgaagcagccagccagccgcccggatttcaccatttggtcccgggtttcgcccggatctgggtctctcttcaaccgtcttctccaatctggcggtgctatagctcgccgcgcccggttggggacaaggcccagtaggcgctagccaaacagtgttgagcgcctcctcccctcctcgcgcctcggcgcacggccggcgagaaggttttgaggggcggcgagcttcttcaatctgcctccatctcggtttgaatcgagtggtgtagcaaataacatcattttcggaggcaatggcggcatataagttgggtgtggaggttgcaagtgctcatgacctgatgccc

SEQ ID NO: 26432 - DNA, 223 bp, Oryza sativa
  unsure (1)..(223): unsure at all n locations
  Clone ID: PAT_MRT4530_31222C.1
gtatttagtctttgnacccgaggtttttngnntncaagcaagctnannnntctcnagtttttgctagtnncgnntcgccgtantancctgttgtccntgnacgaaanttcgngggnattgctgcatagcctgctaannnctcttcacaanacncgtcntatttgantgggatctatgacgaacatgcaattcgctaccaaagatnncaccntatgatatgtaa

SEQ ID NO: 26433 - DNA, 2334 bp, Oryza sativa
  Clone ID: PAT_MRT4530_31223C.1
atgctgatgctttcatcaaaacgtggtgatgattctttctcggtgcctttacctgtagtcattgtcgcgatagtgatgctggtattcactttcagtgacgagctaccactttcaatcgtatacgacgtttctgttttactgttgctgtcatttggcaacttccagattccagcagcaactgtgcgtgtcgtcctcgcattggcaggtattctacatcaaaaggacgaaccaaaaaaggaagtcaagccggattgcgagaaaaaagatgataatgacagcaaaaacctcaaggcatctctaatcatattctatgggatggtgctggggcaagggatactttacattgtggcctgcttgctggaggtattttcattcatccctcggaaatacctcatccgccatggcggattgggaggccagatgggagtggaaaatgtcaatttgtactatgcatatgcctttgagaaatgcatggaaggggctgtgcttgctccaaagaagatcagccttatcacatttgccatggattccctcaactcagactcatccaggaagaagctctatggggttcagatgctgcataaattactcaaaatggagcagttaaggaccaaaacaattacaaaactcaccaatgacaccaagacagtagcctcattgttcgatatgctggactggacaagcgatagggattcagaaatcagattattcgctgcaaaggtcactgccgagcttgctggtagcctccgagttgttcaaatccctgggacaacgcagcttgtagcctcacttctggacactgatcaccaacagacaacaagggatcattttctgttcattgatagccaagtgggaagagaagactcaccaattcagcaagatggcatgggccaacagaactccccagtacttaagtacttgaaacagatggtaatatattgtttgataccggtggacgagccatctaacgtggatgaacaaaactcttgtatggtcagatgctggaagcagatcacaaaatgctggtcagttccagaggaggagccatccacggaccaagatttcctcccagtacaaggactgattattcttgagaggcttgctaactttgatcttggaaactgcatggaaatcagcagaacaggcctcatctcaaagatgatagattttacaagctacagaaatcatatgataagtactaatgaagcccaccaaataatgctcgcaagtttgtcacttagggtcctgagaagacttgcaagtactgaagggaagttaggtgtaactctgcgacaacagattttggaacataccttcatattgagcaaccttgcagagatcatggatgacaatgggaacagccatgaactgaagcagctggcagcagaaatcctgaaaaaccttgccatggatagaaacactagtgcagacattgggcacatccgagtgatcatcagcagtttgatgcgtgcatttctcagccaagatccatcctcaagtacaaattctaatcacttgctatggaaaaatgccggtcaagcactggcaatgctggcaatggaaagtagagataactgtttggtaatgttaatggaacaagggtatgtgttcattagacaacttacaactatgatgcaggatgacaggttcaaatgtatagcagcaagcctgttgtggaatatgtgcgagcatgctcaatctgagctcagcaactcagaccttaaggaattgtcttacatcttacgagagactagagatagaaaaactgctaatttaagtgtcaattgcaatactggactactggagggagaaccgacctgcagtttccacattgtttttcaaatattgacaagcatacacatctgtgctcttaatattgatagcattgtgctggaaggaataatggatgcagaaggggcagaactagaggtccttattggccttagttcacaaatatgtcaagtcattcctgaagactttgcccgagaagtagagcatggtcaaattaaggaaaaattcataaagaggcttgtcgaagtgcttaatgcacatatgaaacccagtgttcattgtcccagaatcaggagggtgattgttcagcatgccatatacttgatggaattcaattctcgctatgcaaatgatttccacaagtgctggatggtggaagcactatcaatggtggaacgtacaccctcgagggctgaaaactacaggttgctttcaggcgacacaggactcatggagcacaacacaccacttactgctcttgtggccagagcaaaagagctgatgggtcgtgaatgggtacggggcatcagcagtgtcacctaa

SEQ ID NO: 26434 - DNA, 2935 bp, Oryza sativa
  Clone ID: PAT_MRT4530_31224C.1
atggcccctcgcaagccaaaccctgtttcggtgaaagggccagaccccggccgaatcgacgacgacaccaccgccttcttggggctctctctcatggacgatgccgagctggcgaagttggtcagctctggagcattggtggaggggcaggcttttgccctggggaaggccgtggtaccgaagcccgtcgacaatcggacagtgttgttcgccgtcttctttgaggcggggcttcggtttccgtgcaacgtgttgttgccggagatccttcgccttttcgaacccagcgccgagctcttggagccatatttttcgccaccgtgaattcgaagacggtgattaccctggccggaacgaagaagacggtgtttggtagcgtgaactttaatgtttgccccgagcgctccgatctttggccggtgaatgccgccatgtcgaagtgggatcgccatcggatggtgaggtggttctatcacaccatccccttcgaggctggatctgagtcggtgaaatccctccggtgtcggcgcaaggcgattgcgccgaaccggaaacccaagatcaccgtggacggtgctatggaagcacggttcgtcttgctgcgcaaagtttactcccgccttagctgtcgcgacttggtagaggagttctgcatgcttcgcatttttcccctctcccagtcgtggtaggtcgcggttgaccaaagcgaagaggtcgatggcttgccgaagctggttcttcctgaggggacgaacgatatggctaccgatcaggccgacgccgaagcccagaggatgatcggcgacgtgtcggttgtcgagtacagccagttgcttacacgacaggcggccggccgggcaaatcgggtttacgacagcgcgggcaagtgaagctggcccctaggaagcgaagggccccttcctcctctcattctgacgccgacgacgaggacgacgtcgaagatcgtgacgacgaggaggaaggcgaggaggaagaggaggcggaggccatggtcggaagggctgcggacgacgcggtcgaaaaccgcgttgaaacccctggctacactcccactccaagtccggggcacaatgagaccggggtagagtcgaatagctccccccttcatcgaagggattcggaggtggcgagagcgctaatcgcgttttcagctggcaaggtggagaaggggagtccagttaaaaaggccgccaagaagagaggactcgtcaacgttggtcgtgtttttagcgacgacgagtcttctgacgaaaccccgacttcgcccgccggtcattgcttagatctttcgaccgcccccgttctttcgatcgacgttagcagagcgggtggcagtggcgctgccgtggcctcagcctccgctgatcgcgtcgtgcaagctgcggctagggttttcggaagccccttgtgtcagccggtcgtttcgccgctggtctagccgaaggggaagggggcggccgtcgaaacatctgcctcggattattctctcgtggcgccccactttgcccctggcgattttgagacccgggcggagctcattccctttgtcgagtgggtaagcaaccttgtctcgcctgccagcaccccgagtctattcaccgaactgaatgagttcgacgaggggtgttccgctatcaaaagcttggcgctttggattcttgcggctcactgttcgactaagcgaaccgtgtgggcccgtcttgatggattcaggaaccgacttcgggccaaggatgacgtgttaggccgcaagggtttgcagatagaggccctcgctaacaccttcaaggaggcgaaagccgaaaacaagcgactccaggcagaactggagaagggaagagaggccagagctgaggtcgaccgcctcagagtcgaacttgaaaaggaaagagcccattccgtggcgctgactgactattacaatctcaccgagctgaagatggaggctcttcgcctggaggtcagtaaagctgaggcgagagctgcggaggagtcgcagcggttttcgcgggagatggcgaaagccaccgcttctgcgaagacggcgcgccaaacacttcgccttgccctctccgacatgggggcgtgggttcgaggagttcctggcgaggacgcctccgtcttcgacttctcggagtggacccaacaagccggtggtgcgatctcggattgtgccaccgcgtacggcgattgctgtgcgcgagtgtcagtggccttcaccatgggccttctgcagtagtgcggctgcgagcacgtcaccgagttccccaactatgtgaaaggggactgggagatcagtgcagaggacgtttcgctcgcgcttcgcgcgtggcggagatagttctggcagaaggacggccaatttgccgccaaggcgcaccttctggagaaactagcgaaggcggaggcggaggaccagggcgaaggggaggacgcggcggccggagtgggtcgaggcgatgcccaagatcacccagagggtgttcaccgaaaattgtgtgttcggccccctcttggtgattggcgaagcaggaacaagaagttcgtggctgttaagggtttgccaaaggcgcgatgtgcgttttggcctgtttatcgcgatatgatgataaacggcaacatctatacggttgtgaaggttgccggctggatgcgggcgcaccctgggcagaccctggaggactacgatcatgttcatacaaagcgtttggaggacatggttcgcttttggcggaaccatcagaagaccgatcggcaggaggcgatctcccagcgtcgatacagtctagcctgtgttttgcccccctcccctctcagggtcatgtacgatattagtagtgatgacgaacccagctcacccaaccattccttagggggcgaaggtggctgtgggggcgaaggtgtaatttacttg

SEQ ID NO: 26435 - DNA, 2112 bp, Oryza sativa
  Clone ID: PAT_MRT4530_31225C.1
atgccgccggcgaaactcgatcccgatccgccgcccatccaccgcctcctggagctgatcaagtccgagccagacgccaccgccgcgctcgcccaccttgagctcctcgtctccacccgcccggccttcccaccgccccagccgctcctcttccacctcctccgccgcctcgccacctcttccccgtcccacctccctcgcctcctcaacctcctcccgcggctgcgccaccgcccgcgcttctccgagtccgcggcgctcgtcgtcctatccgccttctcccgcgccatcatgcccgacgccgcgctcgacgccttccgcgccctcccttccatcctcggctgcaaccccggcatccgctcccacaacgccctcctcgacgcgttcgtccgcgcccgtcgtttctccgacgcggacgcgttctttgcctccctctcccatggcgccttcggccgccgcatcgcccccaaccttcagacctacaacatcgtcctccgctctctctgcgcccgtggcgacctcgatcgagcggtcactctgttcgactccctgcgacgccgccaagttgctcccgaccgcatcacctattcgaccctcatgtgcgggctcgcgaaacaggaccgcttggatcacgccctcgacctgctcgacgaaatgccgaggagtagagttcagcctgatgtcgtttgttacaatgcactcctcggtgggtgttttaaggccggtgagttcgagaaagtcatgagggtgtgggacaaactggttaaggacccaggtgcaaggcccaacctcgctacttacaatgtgatgcttgatggattgtgtaagtttgggagattcaaggaggtgggtgaggtctgggaaaggatggtggcaaataatctccaaccagatgtaattacctatgggatcttgatccatggtttgtgccgatctggagatgtggatggtgcagcacgagtatactctgagattatcaagactgggcttgttattgatgctgccatgtataattcactcgtcaaggggttctgtcaagcagggagggtacaggaagcttggaagttctgggatagtgctgggtttgcagggcttcgtaatttaagaacttacaatataatgataaaggggctctttgacagtggtatggttgatgaggctatagagttatgggacctattggagaaagatgtggcttgcattcctgacacagtgacttttggcactctgatccatggattatgccagaatggctttgctaataaggcatttacaatatttgaggaagctcgagtcagtggcaaacaattagatgtgttctcatattcatccatgatcaatggattatgcaatgttgggaggttagttgatgcggttaaagtatatgagaagatggataaggatgggtgcaaaccgaattctcatatttacaatgcactaataagtgggttctgccaagtatacaggactagtgatgctgttagaatttacagcaagatggcagacaatggttgttctcctacagtcatcacatacaacactttaatagatggtctgtgtaaggctgaaaagtatcaagaagcttcaagtgttgcaagggaaatggtagagaatggctttacaccagatatcactacttatggatcgttgatccgtggcctttttagtgacaagaagattgatgatgctctttctatttggaaacaaattctttataagggtctcaaggttgatgtgatgatgcataacatcctaatccatggcctttgttctgctggcaaagttgatgaagctctccatgttttctcagatatgaaagagaagaagaattgtcccccaaatctagtgacttataacaccctgatggatggactttatgaaactggctatattgacaaagcagcaactctctggacctccataacagaagatgggttggaaccagacataatttcatacaatacaagaatcaagggcctatgctcttgtgacagaatacatgaggggatccagttattggatgaggttctctcacgaggcattataccgactgtaattacatggaatatacttgtcagggctgtaatcaagtatggacctatccaagtataa

SEQ ID NO: 26436 - DNA, 1335 bp, Oryza sativa
  Clone ID: PAT_MRT4530_31226C.1
atggattcccccgtgagcccggctcggtgggtggtgggcaaggccctcggccccgtctcggacggcttggtggaggcgtgggcggccagccgggagctcggacccaacgtggacgccctcaaggcgcagggcaaagacatacgcagccctgcgctcaaggagctcctccagaagctgcgagacctggcgttcgacgctgacgacgtgctggacgagctcgactacttccgcatccaggacgagctcgacggcacctaccacgccgccgatgagcacgccggcggttgcgcccgcaacctcttcctcaatgtcacccacactgccaaagctgccagcaaacggctgggattctctaaatgctcctgtgctgctgctgctgataatggtagtcacacctatccaagatcagaactgtctataagaatgaaggatgttgtcgaccaactgcagctcgtgtgtgcaaaggtcaccactattcttaatctagagatacaccattctatccgtagcactgattccagtactgcgagcaatcgtcccatcaccacacctacaagtatagagcctaaactgtatgggagggatgatacagcgaagagcataatagattatataacccaaggtacagactgcggcaaggacttgactgtcttgccgattgttggcccaggaggcatagggaagacaactctcatacaatacatatataaaagccttgaagtgcaaaaccatttccaggtcaaggtctggatatgtgtttctcaaaatttcagtgttgataagctcatagaagagatcaaacaatatgtccctaaagtggatggtgaaaaagatggtagaccagaagagctaattgaacaaagattgaagtctaaaagatttttattgatattggatgatatttgcaagtgtcaaagtgatgattggaaaaagcttttacttccactaacaaaaggacagtcaaagggtaacataattctagtcacaactcggtttccggttgtagcagaaatggttaaaacaatggataactcagtagatttggaaggtttggaccctggagcgtttagggatttattcctagcatatgtatttggtgataagctaccaagagacgtccataaagacttacttgtgatcggagataagattgcaggaaaactaaaaggttcccctcttgcagcaaaaacagtaggtcgactattgaggaaccactttgatcaatatcattggaacagagtcctagaaagtagagaatgggaaatggaaaccagcaatcatgacattatgcctgcattgcagcttagttatgattatctaccttttcatctgcaa

SEQ ID NO: 26437 - DNA, 5782 bp, Oryza sativa
  Clone ID: PAT_MRT4530_31227C.1
atggattccgccgtgagcgcggcgcggtgggtggtgggcaaggccctcggccccgtctcggacggcttggtggaggcgtgggcggccagccgggagctcggacccaacgtggacgccctcaagatggagctgctctacgcgcagggggtgctcgacaacgcgcagggcaaagacatacgcagccctgcgctcaaggagctcctccagaagctgcgagacctggcgttcgacgctgacgacgtgctggacgagctcgactacttccgcatccaggacgagctcgacggcacctaccacgccgccgatgagcacgccggcggttgcgcccgcaacctcttcctcaatgtcacccacactgccaaagctgccagcaaacggctgggattctctaaatgctcctgtgctgctgctgctgataatggtagtcacacctatccaagatcagaacaaggtgcgcaaggacgtggcctctgctgtggttggtcatacaacgaccatgacagtgaggaggaggaggaggccaccggcggcggcatccgcaagcttgcttccggtgctcgcaacaccatccatgctgtcggtaaacgcctccattgctcatcttttccagctgttgttgatgatgattctagcgtttcaatctgttgtggtgcttgcatgcacaagccaccacaacagagaaaggatgtgatcaaagaaacgccaaagttgaagattgacagagtgggtctgtctataagaatgaaggatgttgtcgaccaactgcagctcgtgtgtgcaaaggtcaccactattcttaatctagagatacaccattctatccgtagcactgattccagtactgcgagcaatcgtcccatcaccacacctacaagtatagagcctaaactgtatgggagggatgatacagcgaagagcataatagattatataacccaaggtacagactgcggcaaggacttgactgtcttgccgattgttggcccaggaggcatagggaagacaactctcatacaatacatatataaaagccttgaagtgcaaaaccatttccaggtcaaggtctggatatgtgtttctcaaaatttcagtgttgataagctcatagaagagatcaaacaatatgtccctaaagtggatggtgaaaaagatggtagaccagaagagctaattgaacaaagattgaagtctaaaagatttttattgatattggatgatatttggaagtgtcaaagtgatgattggaaaaagcttttacttccactaacaaaaggacagacaaagggtaacataattctagtcacaactcggtttccggttgtagcagaaatggttaaaacaatggataactcagtagatttggaaggtttggaccctggagcgtttagggatttattcctagcatatgtatttggtgataagctaccaagagacgtccataaagacttacttgtgatcggagataagattgcaggaaaactaaaaggttcccctcttgcagcaaaaacagtaggtcgactattgaggaaccactttgatcaatatcattggaacagagtcctagaaagtagagaatgggaaatggaaaccagcaatcatgacattatgcctgcattgcagcttagttatgattatctaccttttcatctgcaacaatgttttttctattgtgctttgtttcctgaagattacaagtttgacacaaaagaacttacttgcttttggataggactagatattttacattctgaatatcagaataaaacaaatgatgatatagctttgaacaatttaaatgatttggtcagccatggatttttcaaaaaagatgaaaccgatgggcatccatgctatattattcatgacctgctacataatttagcagcgaaggttgcatctcgtgagtgtgttagtttacattattctaatgtgagatcagtggaaatttggccttccattcgtcacttgtctatcaatacagatggtgtggatgatagtgatggaatgaacaatgaaagctttaggaacatattacaaaaactaaagacaagagtaaaggttgaaaacttgcaaactgtgatgatatttggggaactagatgaaagttttgctgaaagttttcatgatttgttcaaggaagcaagtgctctccgtgttctacatttgcccaaaatgtcatttcctgtggggttcatttttaataaattctcgacactagtccatctacgctacataaggctaggggcaccacgtcgaagtaaaactcatttaacaagtgccctttctagattttatcatttgaggattctagatctagaagcatgggatggttgtctcgatttgcctagagactttagcaatctttcaaagttatgccattttcttacgaaacatgataagcttcactttgctatttgcgatgtgggaaaactacagtttttacaagagttagaaagatttgaagtcaataaagaggaaaaaagttttgaactaaagcaactaggtcatttgatggagctaagaagacttggtatttataaccttgagagaatagacacaaaagaagcagcggcagaagcaaaactttttgataagaaccacttactgaagttggcattaagttgggacaaatgccaagcaagtaggtatcctgacaaagaagatcaagtacttgagaaccttcgaccatgtaacaacctcaaagagctattcatcattgaacatggaggatctacttgcccatcatggctaggtgcagagctctctgtgaaatccttggagactcttcatctttccaatgtaacatggaaaaacttaccgccgataggggaggtgtgtttggtaaacggacttggtgaagatcaatttgttagctgcaacacaggacaaagctttcagaacttgaaaaggctagaacttgtcgggttgcctaatttgagaaagtggacggcaaaagaagtcccgatgttctcacttatagaagtgctcatcgtaaagaattgcaatgaggtaatagaattaccattttcatattgtacttattgcccatcagaaggatatgagaatttgtttcctaggctaagagaggttgaaattgagaattgtccacaactaagaatgcctcctatgccttacacgcaaaccttgtgctttgtatacataaaggatgtagggacaaggttgaaaaaattacactacatgagcacatacagcttgaggattgtaggaaagacagatctaaatggcttagatgacaagattctggctttctataatttaacccaactacaagagttgatgatcaataattgcccacctttggcggggtgttaccttcaaatgttgacttcactgaagatactcagacttgatagttcaagtgtcgtgttccatctgtcagaaagtttgagtgactataagtggcaagttccagttgagtacctatctatttctagctaccatggaagtgggaaagcattgtcacagcttctctctcatctcccaaagctctcagagttgtatcttatgaactgcaacaagattacacggatgtgtatagctgtagaacagcagcaaacaactgctgttgagctggaggatacacaagcagtcgaatctattcagcagcagcaagtagcagaggatctggtggaggaagagggagtggtaccccagctagccatggatcaagaagatgacgatgggatgctgatcttcccagcacacctctccaactctctacaacaactaattctctacagatgcccggagcttatcttagatgttgctcgtcctgctcttcccaccagccacgaggatgagacaggaggatgggggctccaatccctgcgctccctccagagactacgggcttgtttgctccaggccaggcaaatactcgccagggcagcaaccaaacacgccctacaaatcacaaaatgccccaagtttctctccgcctacgaggccccaggctgccctttcccgtcctccctgcaatgcctcaagattgctggctgtaaggagggcgtgcagaccctggatttcatctcaaacctcaacttcctcacagaactacacatcgatgattgtggggaggatttgagatgcgagggtctgtggcctctcctcacccagggtcagctcagcgaattagatgtctttggaacacccagattctttgctggtttggatcccatactcggggggctgcaggacggacaagagcagcagcttcctcctcctcttcagtgttcctccaagctgcaggagctcaggacggatgacttcgcaggtgtcctcgtgaagcccatctgcttgctcctctcttcctccctcaccgaactacgccttggatggaacgacgaggtggagcgcttcatgaaggagcaagaggaggcccttcagctcctcacctctctccgggacctccaatttttgagatgcagtaagttgcagtgcctccctgcggggctacatagacttaccagcctcaagagattaaagatcatcggctgtccatccatccggtcgctgcccaagggtggcctccccagttcactgcaagaactagatgtcggatactgcaacaacgagaagctcaaacagcgaacttcacaatctatccatgcactgttccccaacatgtggatctcatgtgatatcctctacctgtacatagatcttttaatgccatttcagagttatgtggcaatcagattactcaccggtgttttggggtttgttgcgcaggtgttcttatatttagatctgattattggattgcaagacagatgtggcagaaacacatctttggaaaccaacaatgtggcagttacatgcttgaagtacgctagcacagctttgaaagtgaatagcgtggcaataaacaggcctgatagctgccatagactcaatcgttgtacaggagtctttggaacacccagattctttgctggtttggatcccatactcggggggctgcaggacggacaagagcagcagctttctcctcttcagtgttcctccaagctgcaggagcttcatacggatgacttcgcaggtgtccacgtgaagcccatctgcagactcctctcttcctccctcaccaagctagtccttggatggaacgacgaggtggagcgtttcacgaaggagcaagaggaggcacttcagcttctcatctccctccaggacctccatttttggggatgcactaatctgcagtgcctccctgcggggctacatagacttaccagcctcaagagattagagatcatcggctgtccatccatccggtcgctgcccaagggtggcctccccagttcactgcaagaactagatgtcagagctagctggaacgagaagttcaaacagcggtgcaggaagctaaagggaaccatcccagaaatcatactagactaacaaagggcactgccttcaagttgtacattcctgtagccttgtagaacttcacaatctatccatgcactgttccccaacatgtggatctcatgtgatatcctctacctgtacatagatcttgtgttcttatgtgagttccagtagacttcttaatactttgggtgcatatttctggtcgtcactcctgaagactaagtggtgtttagctagttgaattggcatactttatggatcaaaataccatcatggcttattggcttaataactgtggaaaatgataagtttgcagtgttctgcaactgatattaagatttagatctgattattggattgcaagacagatgtggcagaaacacat

SEQ ID NO: 26438 - DNA, 1140 bp, Oryza sativa
  unsure (1)..(1140): unsure at all n locations
  Clone ID: PAT_MRT4530_31228C.1
gggacatcgtcctggaccagataacatcattgacttcgaacttcttgcacactatgagatgttgtcattagatgagcagcttgatgttgcacagcagattggaactacccgctcgcagatactgtccaacttcagtgatatttcactgggcactagtttcttgtagattacattggaaataatagcgtcaatcagatttagaagctggcagttagccaactctgaagccacatgaagtttcttcctaatttctgtgatctcatggcaattggcaccagctttggtgtaaccttgctagtcctcaagggttaatagttgatgtatgccattaagggaattatctcagcaaactgtgacaaccatgctagtctacgatttttatttaaaaccacatgatgctggagaagctggatattcttccaaaattccagtgacctgaccatttgacaccttgtgaagatagcagccacaatgtaaaagagatcattgacacttgacagttggaagtgatcaagattaattagaaaggcactgtgtttgccatagtggtttataaggacgagactaatctactgctaattaggtctgcgccctcttttcagcagaagtctagttgagcttactggatttccttttttttatagtagtgcgacatggttgaagctgtaagttcgttttcaagatcattgaacttctatactatacgggccatgttttatgcacattttagcagaactctgtaagtgcggttactgcatttgctctgaacttctttccgatcgtcacaaaaaatttggaagaatatataaatcgagagcccgatttatcccaaaaaaaaaaaaaaaaaaaaaaaaaaaaaaaaaaaaaaaaaaaaaaaaaaaaaaaaaaaaaaaaaaaaaaaaaaaaaaaaaaaaaaaaaaaaaaaaaaaaaaaaaaaaaaaaaaaaaaaaaaaaaaaaaaaaaaaaaaaaaaaaaaaaaaaaaaaaaaaaaaaaaaaaaaaaaaaaaaaaaaaggggggnnntttttagggaaaataaatatttaaacccctgggtaaaaccaattatattcttaaagtggcccccaaaatataaaaacgcgggtgtttttaaaaactgaccttcaagaaaaacccttct

SEQ ID NO: 26439 - DNA, 345 bp, Oryza sativa
  Clone ID: PAT_MRT4530_31229C.1
atggagctgagcaggccgacgacggtggccgccgcggtgggcgcccggtggtggtggtggtgggaggcgccgtcgacgcgccagacggccacggcggcctcggacgacgccgggatggccgcggccgccgcggagagcggcgcggacgccgggacgcccgccagcggcggcttgccggcggtgagaatgcttcagatccttgcactaaagactgatcagacactggaaaaaggaaaagagattcagaatgtgactagattcaatgagagcaaatacattcataagggagctccacaaaatggaattcagacattcggtgcgtataatcacgtcgtcattgagtag

SEQ ID NO: 26440 - DNA, 222 bp, Oryza sativa
  Clone ID: PAT_MRT4530_3122C.1
atggcatctaccggcggagcccatgcattggtgctgctcctgttcatgttcgccgccgttctctcgccggcggcacgcagggaggcggcggaggcgatgcacgcggcggccaacacacgccgccatcggagctccggccggctggacggcaagacgatcgaccaggggattggatacatgctgatggctctagcatttgttcttacatatgttcttcactga

SEQ ID NO: 26441 - DNA, 1260 bp, Oryza sativa
  unsure (1)..(1260): unsure at all n locations
  Clone ID: PAT_MRT4530_31230C.1
ccagttcgcgtcgcttggcggactcgtgggcggccgccattcctcaggtttcccctcgccgacgcctccatcgccctccgggctccgcctccgccgccgccgccatggggagaaggcctgctaggtgctaccgccagatcaagaacaagccgtaccccaagtcaaggtactgccgtggtgtccctgaccccaagatcaggatctatgatgttggcatgaagaagaagggcgtggatgagttcccctactgtgtgcacttggtgagttgggagaaggagaatgtctccagtgaagctcttgaggctgcccgcattgcttgcaacaagtacatgaccaagaatgcaggaaaggatgccttccacctaagggtcagggtccacccgttccatgtccttcgtatcaacaagatgctctcgtgtgctggggctgataggctccaaactggaatgaggggtgcttttgggaagcctcagggtacctgtgctcgcgtggacattggtcaggttcttctttctgttcgttgcaaggagagcaatgctaaacatgctgaagaggcactccgccgtgccaagttcaagttccctggccggcaaaagatcatccacagcaggaagtggggcttcaccaagttcacccgtgaggagtacgtcaagttgaaggctgagggcagaattatgtctgatggtgtcaatgctcagctgcttggttctcatggtcgtcttgcgaagcgtgcccctgggaaggcgtttctggctgagaccattcaagcttccgcctagatgcctcttgctgaatggaacttgagagattttgctttagctagtctaattttgcatgctagaactcatgttttaagaattggttgtcttcaggatgatctatttttctgtaatagttccttctgtaggccagcttgatatggaggttttgcatatcatcagtaccttgtttgaatttttgctacatatcgttatcccaaagctatatctcagttggattgtgaagctttattaattcataaaaaaaaaagcgtctttacatctcataatgtagtgatatgcccattttggttnaaaaacctgggggggggccggcccccaatcccctttaggggctttttcccgccacttgcggtgttataacagggattggaaacctggggtcccaataaagccttgaaaaaacccttttccagtgggtttaaaaagggccccccaccccttcaaaattccacctaaggaaatgaccccttacgcctta

SEQ ID NO: 26442 - DNA, 339 bp, Oryza sativa
  Clone ID: PAT_MRT4530_31231C.1
aaaacgcaaaaaaaaaaacctttttttttttttttaaaaataggaggttcacaataaaatttgggtcctttaatttttgggggggccattaccccttttagcggggcgctttcctttttttacataaaacttttcccccaattttttttatggcggcttcttgctctttgtttttcccccgggaagtgaaaagaattaccttttccttttcccccaaaaccttataaattccttgttagttgggattaattcctaaccccgggggggttttaccctttaaaaagggttttgggcttttttttccccttttaagtttttttttttggggtccccaagttt

SEQ ID NO: 26443 - DNA, 631 bp, Oryza sativa
  unsure (1)..(631): unsure at all n locations
  Clone ID: PAT_MRT4530_31232C.1
attcggctcgagtaacttcctcatatatacacttactctccttttataggccttctttngaatcnggagccccccccaatctttttgtgtctctattttgttttggagtttggaacatatataggatcgaagcctaaaagattttgaagaaaaaagcgatgagaaactctgaagcaccaacacatggtggcatggagatagaagcaacaaggccttcagctgggaatggttcaacaataaccctaccagggttgagtcctctgagtgagaccctttggagggaaaaggccaacactgcagagatcattggtgatgtctcagcaaggctcacatggaaggatctgactgtgatggtcactctcagcaacggtgagacacagaatgttttggagggtctaactggttatgctgaaccaggaaccttcactgctctcatgggaccctctggctcaagaaaatctactctcctcgatgcactttctagtcgtttagctgcaaatgccttcctctcaagcaccattctcctcaatggtcggaaagcaaaactctcttttggcactgctgcctatgtgacacaagatgacaacttgattgggaccctaacggtgagagaaacgatatcatattcagc

SEQ ID NO: 26444 - DNA, 381 bp, Oryza sativa
  Clone ID: PAT_MRT4530_31233C.1
agctggtagcctcctgtgcagccgccctcctttttttttttttttgttcagactcacatgcacaagttgggtgccattattgtacaaggggcctgtcacacctgactagtttctacacaaaacgggggatccgcggaggaccacaggttgcatcataattacgatgcaactatttggacccagaacaaggcaactcgccatctagataccaggaataaactagcgaacatgatgacctacaccgaagaggatgacccacataagatgcagctgaaaacacagactagcttactgggcagctacggctgcatgaccagaaaaatcgatgttagacataggaacatcaatgccgctctgacgaggctaatgtggggtatgtgc

SEQ ID NO: 26445 - DNA, 1947 bp, Oryza sativa
  Clone ID: PAT_MRT4530_31234C.1
cccgccgccccaacagcaagagtcgcaagcgtgatcgcatttgaacttcatacatattacataccctacttgatgtctggtttgctgcctccgtatatcctcgagctcgccttccaggaaagcgctccaggtcgtgaattccacccaaattcgttgcctcccccactacccaacccaaatccgtagaggaacatagcagaagtgaagccaagaaaccagtaaaaaagcaaagcttccttgcttcgatcgatttatgatcaatttttgaagatacttccggccaccgctggtcgattccggcgaccccgtttccaggagatggggaacatgggcagcagcggcggccaccgtcgccggaacaacggccacggccggcatcaccaccatggtcagcccaccgcgccgccgccgccgccgcagcagcagcaacaggaggtggcgccgaaccgctacgtgttcgcggcggcgagcccttacccgccgcagtacccgaatcccaacctgccgcagtactacccgcagtacgggaacttctacccgccgccgccgccatcgatgccagggccgctcccggcgccgtacgaccaccaccaccgtgggggtgggccagcacagccgccgccaccaccgccgccaccccagccgatccatgccgcaggggagttcccgcctgctatgctgcaacagcatccccactaccatggctggggtggaaacttctcgtatggtccacctacccagccgccggcgccggcgccgccgtatgttgagcaccagaaggctgtcaccatccgtaacgatgtgaatctcaagaaggagactctccgggttgagcctgatgacgagtgccctggacgattcctcatcaccttcacctttgatgccaccgtcgctggaagcatgactgtttacttctttgcaaaggaggagctgaactgtaatcttacagcaacgaaagaagatttactcaagccagtcactgtaacatttaaagagggtcttggtcaaaaatttaggcaaccttcagggacaggaattgacttttcgttgtttgaagatgctgaattatttaaggagggagagatggatgtatatccacttgcagtgaaggctgaaacaacattctcaattggtcaattctcagaaggggaagaacaaaagtcacaaactccaaattcacagatcacccaggctgtatttgagaggaaggagaatggggattaccatgttcgtgttgttaagcagatcctttgggtcaatggcacgagatatgagttgcaggagatttatggaattggaaactctgttgaaggtgacaccgaagggaatgatcctggcaaagagtgtgttatctgcctatcggagccaagggatacaactgtcctcccatgtagacatatgtgtatgtgcagcgagtgcgcaaaggttctgaggtaccagaccaaccgatgtcccatctgcaggcaacctgtggagcgtttgctcgagatcaaagtcaacaacaaaggtgaagagcaacagcagcagcagataccacaaccaccaccacctccttcaaccgcgcctccgcaccaacagcaagagtcgcaagcgtgatcgcatttgaacttcatacatataacatacactacttgatgtctggtttgctgcctccatatatacaggagctccccttgaataagtggaaaacagggagaagacatgtgcgtgtttttagtatatgtgagcaccaaagcttgctgcgcgcggtggcttgcaaacttgcacttcagtgctgggtgtgctgtactacaatcatgtaagggaggatgggttagttaataccctgcatccatgaaaacaaggtttgtacataagttctctctacttgtactactgcgacagaaattctcacgatttgtattactgcggctgatggaagtggagtgcgtgtgcggtattggctat

SEQ ID NO: 26446 - DNA, 598 bp, Oryza sativa
  Clone ID: PAT_MRT4530_31235C.1
atgtcgggcgtgtgggtgttccggaacggggtggtgaagctggtggagaacccgccggcgtcggcgaacagcggcggcggcggcggcggcggcggcggcggtggcggcggcggcatccggcgcaaggcgctgctgcacatgccgacgggtgaggtggtcacctcctacgcctccctggagcgcaagctcgccgcgctcggctgggagcgctactactccggcggcggcggcgccgccgccgccgccgccatgatgctccagttccacaagcgctcgtcggtggacctgatctcgctgcccaaggacttctcccagttcggctccgtccacatgtacgacatcgtcgtcaagaaccgcgacgccttccgagtcatcgacgtctaaacctctcgtctaattactgccttcgtctctgcatgggtttgtatcattagtttaggaattactgttgattgttgttgtacgtacacttaattagcgttgttaattaagttatcttttgctggtgtttgtttatgctatgtactagggttgtgcgtgtgtggcagtgtgagtgtggactggacaacagtagtaaaaagtttgttcgctcgtcgtc

SEQ ID NO: 26447 - DNA, 2094 bp, Oryza sativa
  Clone ID: PAT_MRT4530_31236C.1
gtttttttttttttttttttttttttttttttttttttttttttttggtttgttttttatggaagttgcaatagttattgaaaataatcgagttacatatcattctcccttaaagagcatcggcaacagataagaattctactacaatctgaattgctcactatggcagacgcagcaaaccatctagagcacttatttgggcagacagatataaaagaacaatgaacaagtaacatatgctttgccggtagcccagccagctgcttaaccgaaactgcaagagcagaaccaaataaggcgtctcagaaacttcagatgaatcaaacttgcaacttgaggttgaagaactgccgatttctcaggcatctgcatctttcttcttcgccgccttctctccttcccagcagacactcatctctttgctcttcgcaaccatctctgctccatcgctgttccagccatccaaggtcgacctcggtgacacagcaccaggagtaacagcagtaaaactctgatacatcagcacaccgccaccaggaagctcttgctcaacaagatcatcgcacatgtaggaatcaacctctgcaccttttgcccatgatttggcaaaaccatgcccaccgaagatggtaacagcgaccgaaaagtctgaagggcagaaacaagccaggaccttcttgatcaaatcatcgtagaccaaggagctaggattgaagttcattgcttcatagcttgcatagctgaaaccttcctcaggagtgacatggatcgtggagacggcgggaccataaatgccattcattgagtacccacacgggtcaaactcaaagtcacaaatctccatctcagggatgatttcagaaatcccagagaacatagtcatctccttagctgatgagcaggagccatcagtggaatccttgaagaacacctcagctttcttagcatccagcccagtcatgcacatctcgagtgtaaccatgggctgctcaggctcttctgtggcatagtagacatgccacttcttcttgggcttgaatgcatcaccaatgacataagcattgccacctgacttgaggccaccaaagaagctgttgagcacagaaacctcctccaagaagctgcgatgcggtgatggctgcgctccagggaagatgaacatcccacgagagtacttcactgatagaacaggcagtgacaactctgcagcaagctcaaggatgcgaggaatggagagcagaagctttgttgtaccacaggtcttcagaacaaccttgtggggataaacaaaaaggctcgactctgaaagcacatatgagtcgaagtgcttgttcgaaagatgggatacaatggtacactttgcaagatccaagaacgagtcgatctgctcacgtgagagggcacgaaggccgcgaccacaggggtccacaaagacgggcgcatcagacaatgttatctcaaggcgcttctcatagccttcaaacccaatgggcgaggcaggggcagagccccaagaatcagccaaggacatcgacatttgatcaagtgttgcaaggagcagtggacaagacaggaaagaagagatcggagaagacaagggaagagattgagaaagcagccagccaagggagatttattgcaacaaaacaaaggaaaaattgcaggaaatttctactctacggggaaaggcatgtgaaggaatatcaggatggcttgcgagcgcagttggagtaagcagcagactggaacttcttgattcctccggctgggcgaacgtcctcaatcttgtagcctaggggagcttcgtacatggaactactactgctagacttctttttgccaccttttgactccattagaacatcaacaaaatgttcctttatgccaacaattcttgtccaagaatgcggccgcgccgcggttcctccttccctggaaagatggcaagaaaccaggaggaaggcgaaggaggaggaggaggagggcgctggctgttcttcgcgtgggggaatttggaatagaaaatcgaggcaatggatgctctgcgaggacgaggagggctttgcccctcgtgccgaattcctgcagcccggg

SEQ ID NO: 26448 - DNA, 1758 bp, Oryza sativa
  Clone ID: PAT_MRT4530_31237C.1
atggttcttcagttgcgcgaagaagtggaaccaatgccctactatggaactgattcagatacatttactcttgaggtgcatcatggtggtttttttctcgggcatggccagaatcggtcttacgtagatgagaaggtgacctggtttgatcactgtgaggcccaaagttggaatatgctttcgataggtgaattcattgcaatgcttggctatgaagatagcgtgaagacttattggttgctacgaggaaagagacttgcagatagactgaggttgattacacgagagatagatactgctgcaatgaagtcatttgtgaatactgtgaagaattttgttgtgtactttgatcatggggagacatatgggaacaataactgggatgacactttggagattttgcctaaggtacttagcccaagaaaggtaacagatgttgagaacaaagagggtgaaaggcttcctgagttttattcaaacaaagccaattccatagaattggttgagggggacagagatagtgaaagtgatagtgatgatagtgactttatggatagtgactatgaaatagatgatggggatgatgacttatttgaggataatgtagatgatgatgtatcacctaatggtatagtgaaaaagaagagttttgatgaggaacaactacaacttccagactatgatggcgatgaagatggtctaggccttatactagcagtccaacaggttttccctgattctgaacatagattttgtgttaggcatctttattctaactttcaagtccatttcaaagatgagtggaatgtcaacatggaagaaatgaggaatttaaaccaggaggcatatgattggttgagtaacatgtcgcctaatacatggattagagctttctttagtgacttccccaagtgtgacatcctgttgaacaacaactgtgaagtatttaacaagtacattttagaagctagagagttacctgtgttaagtatgttggagaggatcaaggggcggctaatgactaggtactacaataagcagaaggagatggaggagaagtggcaaggaccaatatgtcccaagattaggaaaaaagtttcaaagaatgcagatatggccaacaattgtttcatactcccagctgtggaagtagatggacttgaagtaaaacctccagtttatgataagaaagttggcaggccaaagaaatgtaggagaaagcagccacaagaagttcagggcaaaaatggaccaaaaatgtctaagcatggagttgagatgcattgctccgattgtcaacaacttggccataacaagaaggggcgtcaattgagaaagacaggattaaggcctaaacaacaaccaaagagaaagatcacgccactggttgatgatgaagcagaagctgatctagagcctgttgttactcaggatgtgatgcagccatgtccaagtattcagccttatccaaccaatacaatgctatcacaaatggctgtagaatcatcacaacctagtaaaagagctttgcaggcagaacctttacctgatagtgcatatatcttgtccaaccaaccttcagctagactagccccactaaccacagcaaccaaggaaggaagagctacagctgctagtggtggtactgggaagaaaggtggctttggtgcaaagaaggctgctggctcatctcttggtgcaaagaagcctgatggaaataagtcttctagaaagaaggctgcagcaaagaaaaactag

SEQ ID NO: 26449 - DNA, 3132 bp, Oryza sativa
  Clone ID: PAT_MRT4530_31238C.1
atggaggtcgaagcccagacctcggccgccgcggcggcggccggcgacgagctccggtcgctcctctccgccaccctgagccccgacaaggcggcggtggacgccgccacggaagggctctccaggatcgccgcctcctccgacccccgcttccccatctccctcctcgccgtcgccgcagctgatggggaccaaggaacaaaagttgctgcagcaacatacttgaagaattacacacgccgaaatattgactgggggttgtcatcacctgagctttataaagagttccgtgatcggctcgcccaggcgttgcttcaagtggaacctttccttcttcgagtattgattgaagttttccgccaagtcatagaaaaagattttgtcaaggaaaatttgtggcctgaacttgtcccccagttgaagcaagtgatccagagcagcaatataataagtccaggccagcatcctgaatggaatactatcaacgcactcacagtacttcaatctgttgttaggcccttccagtacttcttgaaccccaaagtagcaaaagagcctgttccaccacaattggagcaaatcgcatctgagattcttgtaccactacaagtgacattccatcacattgctgacaaggttctgttgtcacatgatgagactaatctggaatacgagcaactcctactcatcacgagcaagtgcatgtatttcactgttaggtcatacatgccatctagggtaaagcagattttgccttccttttgcaaagacatgttccgcatactagaatcactggatttcaacagtcaatatgaagatagagccacaacaaggctcaagactgcaaagagatgcctcatcatactttgcacacttgttactcgtcaccggaaacatgctgacgaaatactaaccctccagttttctcagccagatggcacatatagtcaacagcgcaaccagaatatcaagtcaaagcattcatttacatgccctggatggcgacttgtttcaccacatttttcttcacttctggattcagcaatttttccagctttagcattaaatgaaaaggatataacagagtgggaagacgatactgatgagtacatgcggaaaaatctaccttgtgaacttgacgacatttcaggatgggctgaggatttattcacagcaagaaaaagtggtatcaatttacttggtgttatagccctatcgaagggcccaccagttgtatctgcagcttctaagcgtaagaaaggtgataaaagtaaaggaaaaggagaaaggagctccattggggagttattggttataccattcctgtcaaaatttcctatacctccccagggggaagatgtgtcatcaaaggcagtgcagaattatttcggtgttctaatggcatttgggggcctccaagatgccatgagcacaaatatttatcattcattaatgaaggcattgacgatggaggattttgatgagttgagctgttatcctgttcgtgcttctgcttctggtgccattgcagaactcattgagaatggttatgctcctcctgattggcttgtccttttacaagtggtgatgaaaaggataagcgttgaagatgaaaatgagtctactcttttgtttcagcttctgggcacaataatcgagtctggccaagaaaaagttttgcctcacattcctgaaattgtatctaacatagccaataccataatgaagctattgccccctgtgccagatccctggcctcaggctgttgaacggggttttgctgcactggtatcgatggctcaagcttgggaaagctctgcaccagatgaaaacaaggacattgaaatgagggtctggcagtcaggccagtttgctatcgcccaaacattttcgcatgtgttacaaaaggcttggttgcttccagttgagcaaatggggttatctgtttgctcttcattgccacctctgtcatgtgtaaatgatgcttctattttacttgagttcattatgaggtctatcacctctatggaagaaactgcaagtatgaaggtgtttgagctagtagctatatgggctgacataattgcttgttgggattcttgggaggaaatggaggatcagggaattttcaatacaatcaaagaagctgttaacttccatcaaaactttgattctactggtttcttcctgaaaatactcccttcccgatctgaaaatagttcacaaagttcagtcattagttgggtttctagttttataaccagggccattgaagcttacccatctgcaacatggagggcatgttcatgcatgcatacactgctgcacactcctaatttctctcttggagcagaagatactagaatgactcttgctgtatcctttgcgcaagcagcattctcccgtttcaagtctgtatctgacagcccttctgggatatggaaaccactaatactagtcatttcgtcatgctacatatgctaccctgatgctattgagcaactcttacgcaaatatgacagtaacggttatgcgatatgggcatctgcattagcacaaatctcaagtagctctttcaatcctggcttgtcatctgaatccgagatcaaactagctgtgttaacgttagcaactgtaattgagcgtcttttggccctttctacgggtggcaccaaactgttgcatgattgctgtgtatcattgatggagtcttgcatccatctgaaggaagttcaagaggatggggatgatggtgatggtgcagaagatcttgatgatgatgatgaagaggaggaagacaccgatgaagatgatgaggattcggatgatgatgatgatgtacgcgaagagacagaagaggaatttcttcaaagatatgcagcggctgccgctggtgaatcaattgaaattgttgaggacggtgacattgatgatgaaacccaagacattgaattgggttccctggatgaaatggacgtacaacaagtggttctttcgatgatgaagattcgtcctgatctcattcgcgctcaaacatttccggatggcctaatggagagaatggcagaaacgtttcctgaatatgaacagttggtccatgttcatcggcaagccttggcgatactacaatag

SEQ ID NO: 26450 - DNA, 336 bp, Oryza sativa
  Clone ID: PAT_MRT4530_31239C.1
atggcacccgcgagcgcgacgacggcggcttcacgacgcggcagcggctctagcggctgcggcgcgcgaccggaggtggcggcaagcggcggcgctagtggcgagcggcgcgcgaccgtgacgatgggccaacggcacgggagcgatctctccggcctcgggccggcgaagaggaaggagagggcgcggcaggcgctgacggcggcggcgactggccggtcggccaccacggcgcactcgcgcgcgggcggcgcggcgatttgggtgacatcggcgggaaaggcagcgagagcgggagggagggctcgacgcggctcacggcagggcggggagtga

SEQ ID NO: 26451 - DNA, 972 bp, Oryza sativa
  Clone ID: PAT_MRT4530_3123C.1
atggggaagtacggcgtggagctggacgccgtcgccctcaactcccttctctctgtcatgtgccgcggggacgaccgcgcgcaggcggcacaggacctgttcgagcacacctgccgctcctaccacccgtgggcctcctcctctgccgtctcgcttcgccgacctcctccccaccagccggcctgccacgcccagcccctcccctgccaaccgtcggccgcggcccgtcgcaccagcctgccgagcccgctgcgccggcctgccgcgcccagcctgccgattgccgcctgtggagagggaaggagagagagaggaagagagatggaggctagcccccagatccgctcctggctcctgcaaggctgcaacctgcaaccccaacaccccttcgagaatcgtcgtgcgcgcagttcctcacaccatgtagcagaaggaagatggatgctaacagacgccaaggtggaattcagcaattattggctgcagagcaagaagctcaacagattgttaatgctgctaggagcggcaaaagaggaggctgagagagaaatagctgagtaccgtgctcagatggaagctgagttccagaggaaggttgcggagagtagcggtgattctggtgcaaacgtaaaacggcttgagcaagaaactgacacgaaaattgcgcaactgaaggagcaggctgcaaatgtctcccctgaagtgatccagatgcttcttaggcatgtaaccaccgtgaagaactgataaaagttggacgtcctgccgacaaattaagcagagattgggctcaaattgtgtgctacctttttgttaattccaagatggattacaaatttacggatgtcagctatagccacgaaccctgttcttagtcatacaataccaataagccgcagcagatttattggtgaacacgagggatgattatacaataagcattcttgttgatgtgaaaaaaaaaaaaaaaaa

SEQ ID NO: 26452 - DNA, 3465 bp, Oryza sativa
  unsure (1)..(3465): unsure at all n locations
  Clone ID: PAT_MRT4530_31240C.1
atggaggtcgaagcccagacctcggccgccgcggcggcggccggcgacgagctccggtcgctcctctccgccaccctgagccccgacaaggcggcggtggacgccgccacggaagggctctccaggatcgccgccgcctccgacccccgcttccccatctccctcctcgccgtcgccgcagctgatggggaccaaggaacaaaagttgctgcagcaacatacttgaagaattacacacgccgaaatattgactgggggttgtcatcacctgagctttataaagagttccgtgatcggctcgcccaggcgttgcttcaagtggaacctttccttcttcgagtattgattgaagttttccgccaagtcatagaaaaagattttgtcaaggaaaatttgtggcctgaacttgtcccccagttgaagcaagtgatccacagcagcaatataataagtccaggccagcatcctgaatggaatactatcaacgcactcagagtacttcaatctgttgttaggcccttccagtacttcttgaaccccaaagtagcaaaagagcctgttccaccacaattggagcaaatcgcatctgagattcttgtaccactacaagtgacattccatcacattgctgacaaggttctgttgtcacgagatgagactaatctggaatacgagcaactcctactcatcacgagcaagtgcatgtatttcactgttaggtcatacatgccatctagggtaaagcagattttgccttccttttgcaaagacatgttccgcatactagaatcactggatttcaacagtcaatatgaagatggagctacaacaaggctcaagactgcaaagagatgcctcatcatactttgcacacttgttactcgtcaccggaaacatgctgacgaaatactaaccctccagttttctcagccagatggcacatattgtcaacagcgcaaccagaatatcaagtcaaagcattcatttacatgccctggatggcgacttgtttcaccacatttttcttcacttctggattcagcaatttttccagctttagcattaaacggaaaggatataacagagtgggaagacgatactgatgagtacatgcggaaaaatctaccttgtgaacttgacgacatttcaggatgggctgaggatttattcacagcaagaaaaagtgctatcaatttacttggtgttatagccctatcgaagggcccaccagttgtatctgcagcttctaagcgtaagaaaggtgataaaagtaaaggaaaaggagaaaggagctccattggggagttattggttataccattcctgtcaaaatttcctatacctccccaaggggaagatgtgtcatcaaaggcagtgcagaattatttcggtgttctaatggcatttgggggcctccaagattttctgactgagaagaaagatctgacaaatacaatcattaggaatcgtattcttccactgtattccctggatccatgcagtccatatttgatttctgcagcaaactggattattggacagcttgcgttgtgcctaccagaggccatgagcacaaatatttatcattcattaatgaaggcattgacgatggaggattttgatgagttgagctgttatcctgtccgtgcttctgcttctggtgccattacagaactcattgagaatggttatgctcctcctgattggcttgtccttttacaagtggtgatgaaaaggataagcgttgaagatgaaaatgagtctactcttttgtttcagcttctgggcacaataatcgagtctggccaagaaaaagttatgcctcacattcctgaaattgtatctaacatagccaataccataatgaagctattgccccctgtgccagatccctggcctcaggctgttgaacggggttttgctgcactggtatcgatggctcaagcttgggaaagctctgcaccagatgaaaacaaggacattgaaatgagggtctggcagtcaggccagtttgctatggcccaaacattttcgcatgtgttacaaaaggcttggttgctaccagttgagcaaatggggttatctgtttgctcttcattgccacctctgtcgtgtgtaaatgatgcttctattttacttgagttcattatgaggtctatcacctctatggaagaaactgcaagtatgaaggtgtttgagctagtagctatatgggctgacataattgcttgttgggattcttgggaggaaatggaggatcagggaattttcaatacaatcaaagaagctgttaacttccatcaaaactttgattctaatggtttcttcctgaaaatactcccttcccgatctgaaaatagttcacaaagttcagtcataagttgggtttctagttttataaccagggccattgaagcttacccatctgcaacatggagggcatgttcatgcatgcatacactgctgcacactcctaatttctctcatggagcagaagatactagaatgactcttgctgtatcctttgcgcaagcagcattctcccgtttcaagtctgtatctgacagcccttctgggatatggaaaccactaatactagtcatttcgtcatgctacatatgctaccctgatgctattgagcaagtcttacgcaaatatgacagtaacggttatgcgatatgggcatctgcattagcacaaatctcaagtagctctttcaatcctggcttgtcatctgaatccgagatcaaactagctgtgttaacgttagcaactgtgattgagcatcttttggccctttctatgggtggcaccaaactattgcatgattgctgtgtatcattgatggagtcttgcatccatctgaaggaagttcaagaggatggggatgatggtgatggtgcagaagatcttgatgatgatgatgatgatgaagaggaggaagacaccgatgaagatgatgaggattataatcaggattcggatgatgatgatgtacgagaagagacagaagaggaatttcttcaaagatatgcagcggctgccggtggtgaatcaattgaaattgttgaggacggtgacattgatgatgaaacccaagacattgaattgggttccctggatgaaatggatgtacagcaggtggttctttcgatgatgaagattcgtcctgatctcattcgcgctcaaacatttccggatggcctaatggagagaatggcagaaacgtttcctgaatatgaacagctgttccatgttcatcggcaagcctaggcgataccacaatagactagtgtgcagccttgttatttattgtttctagtttcttttttttttaaacttgtccgtgtgtttatatatttgtatggaatggtgggccgattattgttgatggttgtggcgattattttgtnnttaaaaaaaaaaaaaaaaaaaaaaaaaaaaaaaaaaaaaaaaaaaaaaaaa

SEQ ID NO: 26453 - DNA, 356 bp, Oryza sativa
  Clone ID: PAT_MRT4530_31241C.1
gggggggaaaaaaaatgggttaaaggactgacccgaaacttgtttttccaggtggccacaactttaaataaaaaccctttagggggggtaacattgtgaaaaaaatttggccccccgaaaaaaagagttatttccccacaagggattgttgcatagggcctttttgataccaagggggggccccaaaaaggggcccaatttgcctttgccccctcggaaaaaaaactttgacgaaaggggccccctgggcccctttgggtgtaccttggccaaaaaaatcaaacccaccccgtcaggcaaaaaaagcccctgcccccgggcgggagaaagaatccccccggggggggggccatttt

SEQ ID NO: 26454 - DNA, 438 bp, Oryza sativa
  unsure (1)..(438): unsure at all n locations
  Clone ID: PAT_MRT4530_31242C.1
gtgagaatggcaggggtagggccttggaacccgtctgatcatctcagttcaggtttactgagttgaattttgccagctagctgtgatcttaaaatatacataaatacgttgagatgataattcaggggatggatctcatcattcaaccaaacatcttagtaataaactgcattttggtggaataactattactaagttctattacattattattatttatttatttggacaaaggaagtataacttccgggatctgcaccaactaaggatacacacaatcatatttgtggatggagtcatgtgttccaccaccacacaaatggtgcttcccataacatgatgttgatcattggtattgttcacgtaagaaatgtgtgggtntgtaaggaatgtagagcatgagtccctactgattgtcgaattttcgtacatcatgta

SEQ ID NO: 26455 - DNA, 1099 bp, Oryza sativa
  Clone ID: PAT_MRT4530_31243C.1
aaagggggaaggacggattaattaatcgctgcttatctagtcgataataacacggagaagagagagaggaaaaaaaaacagagaggatgacttgttttatcactgttacagctgtcttttttgacatttggaaagaccgccacttgtggcgtcctcctcccccgtctccaccgccctcctcccgacgctgcccttcccttgttcttatccaaaaccgcatcgaaaaatctcgccacgaagccgccgccgccgccgccgaggtggagatgaggggtggacgaataggtggtaggtggatggatgcagcgagcgtacgtggtggaggtgatcatacgctggctgcatgttgacgaagccgttgatcgatcttggccggcggaggcggttttgttggcttctactcggcgtcggagttctccgggcttggcgcctggttgagatccgggttcttggcgcggccgctccacgccgtccgctggtgcttctgctcgtggtggtggtgttgctcctcgccgtgcggctgcaggtgcgggtggtggtggtggtggtggtggtggtgcttctgccgctcgcggtggtgggtcgtcggcgcgaccatcatgccggtctggagcgcgtcgacgcgggagccgacctcgatggccttcttccggatcgaggccgcggacagcgtgccgccgtcgggctcgcggggctcgctcgcgccgccgccctcggacagcgacgccagcgaggagatctcctcggggaagttgagccgcgccgaccgcccgcggaggtagaacaccgccgtgtcgtaggcgcgcgccgccgccacgggcgtcgcgtacgaccccagccagatgcgcgtccgcttgtgcggctcccggatctccgccacccacttgccccacttccgcatccgcacgccacggtactgccgcctcggctgctgctgctgcagcggcagcaccgccgccgccgccgcctgctcctccttggcagcaaccgccgccgcagccgcggcgagaggagccatagccgcagccgccgccgccgcagcagcagcagcagaagcagccgagtcctcgctggaggagcggtggtactcgccctgcat

SEQ ID NO: 26456 - DNA, 407 bp, Oryza sativa
  Clone ID: PAT_MRT4530_31244C.1
acgcttacgctatgctgctatatcgcgagcagggctcttgtggcataaataaacgactgatgctacgtgcctacttaaatagtattagaaaactatactttgttaaaagggaatcccacggcttcttgacgcacttgatctgaaatcatacaaacatatcgccgaccagctgactacttgcatatttctttaggacggaccacggagatattacgcccagctatcctgtccaacttactcttgcaacgaaatctgatggctaggctaacacatgccatctgacagatcacttgtgtgtaaccagccatttgaactcatggaagattgacccatacaggctcaatgggcagaataattctgagcgaccgtacatacagacggctgagagtaccaggaaaacagtctga

SEQ ID NO: 26457 - DNA, 738 bp, Oryza sativa
  Clone ID: PAT_MRT4530_31245C.1
atgtggtgttgcagcggcgccgaggaggagctccacggcgcgccggccgccaacccggcggcgccgccaccgcgagcaccagggccgccgagagggccgaacgcgccgagagccggcggcgcgccggcgaaggtgctgccgatcgacgtcccggccgtggcgctggcggagctcaaccgtctcaccggcaacttcggcgacaggtcgctggtcggggagggatcctatggccgcgtgtaccgcgccacgctgagcaccggcgaggccgccgccgtcaagatgttcgacaacaacggcggctccggccagtcagaagccgacttctgcgcgcagctgtccgtggtgtccaggctcaagtgcgaccacttcacccagctgctgggctactgcctggagctcaacaaccgcatcgtgctctacgagttcgccaccaaaggctccctctacgacatcctccacgggaagaagggggtgaagggggcggagcccgggccggtgttgacgtggagccagcgagcacggatcgcgtacggcgcggcgaggggactggagtacctgcacgagcgcgcgcagccaccgatcgtccaccgcgacatccgctccagcaacgcgctcgtcttcgacggccacgacgccaagatcggcgacttcaacctcaccaaccagtcgccggactccgccgcccgcctccactccaccaaggtgctcggcaccttcggctaccacgcgccagagtaa

SEQ ID NO: 26458 - DNA, 190 bp, Oryza sativa
  Clone ID: PAT_MRT4530_31246C.1
acgctctttctgatctactcttacaccgcggtatacaccacgggttttgttagctttccccccaggtgaatttcacgtatccccactctgaactggtttgaatgtagattgtgagctaaaccttggcttagttctttcacagagccaccagaacgtttgaatgccgttttaaaaaaaaaaaaaaaaaaaa

SEQ ID NO: 26459 - DNA, 324 bp, Oryza sativa
  Clone ID: PAT_MRT4530_31247C.1
ttgttccaaaccagtggaaagctagggtttcgccgactcgcgagtggagggcgctgctcgtcgcgccgtcctcgccggcgggagggccggtcgtccgtcagcatcctctcttccgttgatcatcctccctctctttcgctagccgccatcgctctcttccactggttcgctctctccgtcaagccgtttggtttcgccggctctctgctacgcccctctctttcgtcgactctctccgttgagctctctggaaaatgtgataatggaaaaacttgtgagatcaagtgtagatatactaaggttgatgagtttgaagcaatctgt

SEQ ID NO: 26460 - DNA, 2129 bp, Oryza sativa
  Clone ID: PAT_MRT4530_31248C.1
gtgcttatttgtgatgcataagaacagatatgcccgcacttgaccttattcgataaggtcaggccaccaaacatgccctttctaagtttctgcctttctgtgatctttctcagtattttatacttcagatgatcttagcagaactgaggccacctctacacttgaactgagcagaatttataagagtacatgaacagatttttctacacttgttcttttttcttgctgttaggctgggaaagatggccaatgatgatatatgctgctgtttgtgattcatgtgaatagatttttgctctacacttgttctcattttcttgcggtttcttttttcctacacttggtcttattttccttttccttataccttttcttttgctacatttgatagatactactggtaagaacagataccaatgatagtagctaattcacattcttcatatatctgaggccattgttctgcatttatttacctgttggaaatgaggctcaatgatgtcaaatttctgcacatatttgctacattttcgagttattgatgtcaggcaaatactatcaagttccttgttcatcttttgatatcaacagatgtactcactttttttaggtaaccacacttgattttgacatgatcaagtttttatatgaaaccgatacactctgcacttgctcttttggtaaagatcatactactattaagtgttgatgctcttgcaacctgatctctgcaactcagatcctgtactatttcaaaggtacatgttatcctgtttacttttactatgtttcaggaaaatgtgataatggaaaaacttgtgagatcaagtgtagatatactaaggttgatgagtttgaagaacatagctgaaacagatggtttagttttgtatgcggttactaatttgtttatcaaattggttactgtaggaaacttgccatgagcacgtatatttgtatgtttgttttgaattgtcaaatgtaccagtgtcgtcaataaaattatgtacatgatttttgctagaataatcactcttgcgtgttcatccaggccatttcgttacatttgataaaaaaaatgatcatcagtgctgctcattggttttaaaaaatgacaacatcagtaaagcatacataacccagtacattgattctctaagagaaaaatgagcttaggaatattagtaggtgggcacagacccagagtaacataatttaatctatatatctacaatggattaaacttatcacacataaatagattagggactaggaaaaaatctcgtttcacaaactttatggggtaacctaaccacccacaagaataggtatttacacataagatgtatccatccaaccaaacaacatctcctgcatgctaccattccatccgccccttgctgcaaccaaccaaacagcatctcatcatatccaggttcatctcatccaagcaaccaaacacctacatgtgtatcctctaaaccaggctaaacttagcctggatgagggagatgggccaggctagagggatacgagcaaccaaacagacccttactgcataatcttcaccttctgtaaaccctctcactgagcaattggatatagggagtaagtggaaatggatgcagatggtagctccaagaaaggccctccaggtcgtcgcactagaaagaagctgaagttcaagccaaaagtgccaccacaaaagccaagaaaatcagttccagaaaagccaaacctggaacagtcaaagccaattgatgaagaattgatgaagagactgaagactggccaaggagctacaaaaacattgtcaagtataaaaggttgatctgtatccattgacctccacatatgaacactcaacacagaacccaccctcaactgtttcttctgcagctagtgttagcttaacactgccacagtcaggagggcacaaccaaggccaactgaagaagccattccacatcacaagagcggttcctcttgatgctattccaggatttttatacgacgatgaggatgatgatgacgacgacgacgatgagggcgataacaatgttgaattagaggagattcgaccaagttcaactgaatgtgaatcttccatccatccagcagaagagctg

SEQ ID NO: 26461 - DNA, 796 bp, Oryza sativa
  unsure (1)..(796): unsure at all n locations
  Clone ID: PAT_MRT4530_31249C.1
cccacgcgtccgcacttacatggtaggagatggagcaggcagacgagtcgtcggtgaacaaagagagctcagagcagcagcagcttaccagcgagcaagatgatgacggcgcgacatggctgagcctcactcttgccacacagggatcaccagaagaagcaacagccgaagcagaagaaacagaagcagcaaactgctcggagtctgaggctcccaagccttcttctgcaccacacaaggtgttctcatgtaacttctgcatgaggaagttcttcagctcgcaggctctgggcggccatcagaacgctcacaagcgagagcggagcgccgcaaaacgctcctaccatgcgcagaggatgatgatggggctgcctcttgaggcacatgctgcctttgtgcactccctgagagtaaaccagagctcagtgattcagaaggcaagccagcaagcacagatcaggacagcaccaaggtttcatgaaggcagcatcagctggccaccgattgcttatgaggaggtgccgaattcgacatggccagggagcttcagattgagatcacagccttcagaccaaccatcagaacagagtaagatagacttaaatctcaggctttgataggttgatgtacaactctgaccagtacataagtccctcctcaagcttgtccttctgaataaatgagtttgaagtaatcaataggttcagctcaccatcagatcaaaatcatatggtggtactgaacttcgaaggtattgttgttcatttggaattcttggcagaattattgaatatnc

SEQ ID NO: 26462 - DNA, 106 bp, Oryza sativa
  unsure (1)..(106): unsure at all n locations
  Clone ID: PAT_MRT4530_3124C.1
aaaccgctcgcagcagcagacttacgaggtcatggattcagtgaccgagcaatcgnaagagcgcccaatgcgcgaatctgcttctcacgacgcgttggcggaatga

SEQ ID NO: 26463 - DNA, 499 bp, Oryza sativa
  Clone ID: PAT_MRT4530_31250C.1
tctccgtctctctgctatgcccctctcttgcgtcgactctttccgttgagctctctggtaagggctaggttgtcttctcctcccttcctttgattttagccgatttgtttggattagaccgaccgtgtccccttcataaatatgctagatctactaaaagctgacatctttcttggtggatttcgatggaatgaaatgtctagtggcttgcttttcatttttcctacacttattcctatttttcctgttgatttgtgttatgccattgtatctttggctacaaatacaagttactgataaggccagatacaatagtgccttcttttaaattgatactgacagatacacacttgattaatagtgcttatttgtgatgcataagaacagatatgcccgcacttgaccttattcgataaggtcaggcaaccaaacatgccctttctaagtttctgtctttctgtgatctttctcagtattttatagttcaaatgatcttagc

SEQ ID NO: 26464 - DNA, 894 bp, Oryza sativa
  Clone ID: PAT_MRT4530_31251C.1
atggcgcctcaccacattaatggccttgctgacgttcgtgcagttgcggaaatgtcacctacacttcctaccatgattattagagtaccttgtgagcagtcagccaatattcacaggctactggaatttgttgaggatcgtctggatcacggtgctcacgacttgattaaggcagaggacattccccgacttcgagctatcgcccagggaaaccttacaagtgctgatgctccccagttttgtttgtcattgctcaacgagtcccagatctacctgcgggatggggtgctgccttttgatctcaactcaacgacagtggccccagatggtccaggtgcaggtcgtattcatgctgaacttctgatgccaccaggcagcttgcctttaccgcctcctgttgttgtcacagtgtcagggtgtgaaccactgaatgatgcgcgggaactttatcagtacctggaggagtacgtgaatcaagagggctggatagttgatgacacacagcttgcggggcttgcagagctggctgaagctagggacgagttggtaggagctcgcgataagctcactacacttgcatcagatattggagatgatcttttattgggaggagcggtcactgatgatgtaccgttgttatctggggacttcaaagcagctttggccagggtattgaagcttcctgaaggtatggagcttcccaaggactttgaatcacctcttcttgtccctgccattgctgggagggagagaattcatggtgaactcatcaatctccgagctgacctggctgctttgaagcagcatgttgaggagcagtggctcccatgggctaatgatcgtctatcatccgctggagtcatcggagaccagattctactagacatggagtga

SEQ ID NO: 26465 - DNA, 1077 bp, Oryza sativa
  Clone ID: PAT_MRT4530_31252C.1
ggccggccgggaagatgtcaaatagtaaaaaaaaaaaaaatccccaatccccctgcctatcgcgtttccccacccccgatccgccgctcccctcgccctcctccgcgccgcgaccgatctccacctcgacggccgcctgcgcgccgccaccgagtcctccgcggctgccaccacctcctgaatccggcctcccaccaccccatcgcacggtggcctccgtcgtcgacagtttgtctcctttctccccttcatcaccgagggacatctccatctaggaaaaaaagacactgcactatggcgtctagacgcaatgttcgggggtatgctccccttcctacagaggacagggatgacagcaatcttactgatgatgttgaccttcggttcacttacaccccaaaatccctcaggaaaatcccgtggaagtcaattgccctggcactattcctcctcctcctaggatgttcgcttctcttcctgtcatattttatattcacaggtcacatggagggggataactctcaggcatatggtctcttgttcctgggcatccttgccttccttcctggtttttatgagactcgagttgcttactattcctcgagaggagcaccagggtatacctttgcatctattccagattattaaccttccattgttttcatttgtctcaccaagggacagtggcgatagaacatgggcaaaaacttcaggatgcaggaatcaaaatgagctctttattttattaccactaaaatgttaacatctaaatgaagtcagctgctgacttctgtgttcacccgatggcattgctcaccaggtgtcacttatctgtgctgtacagacaaagtaaactcgtgatcatactcgtctcttgctacatactccagatgtagatggctgtttgtcaccaggagtagatggctgttttaaagttgccgcatatttttattccacaattccattgtattttgtgttggtatcattaaggtttttattttggctgcagaaatagtataaccatactttcatctatatattcaagctcttatagcaaaaaaaaaaaaaaaaaaaaaa

SEQ ID NO: 26466 - DNA, 990 bp, Oryza sativa
  Clone ID: PAT_MRT4530_31253C.1
atggcgcctcaccacattaatggccttgctgacgttcgtgcagttgcggaaatgtcacctacacttcctaccatgattattagagtaccttgtgagcagtcagccaatattcacaggctactggaatttgttgaggatcgtctggatcacggtgctcacgacttgattaaggcagaggacattccccgacttcgagctatcgcccagggaaaccttacaagtgctgatgctccccagttttgtttgtcattgctcaacgagtcccagatctacctgcgggttcaactgttctcgtcgaagtcggatgattgggtgcggccacccatcgactcacgggtagtatcggcagtggctagtgcgtttcatcttccccaggatggggtgctgccttttgatctcaactcaacgacagtggccccagatggtccaggtgcaggtcgtattcatgctgaacttctgatgccaccaggcagcttgcctttaccgcctcctgttgttgtcacagtgtcagggtgtgaaccactgaatgatgcgcgggaactttatcagtacctggaggagtacgtgaatcaagagggctggatagttgatgacacacagcttgcggggcttgcagagctggctgaagctagggacgagttggtaggagctcgcgataagctcactacacttgcatcagatattggagatgatcttttattgggaggagcggtcactgatgatgtaccgttgttatctggggacttcaaagcagctttggccagggtattgaagcttcctgaaggtatggagcttcccaaggactttgaatcacctcttcttgtccctgccattgctgggagggagagaattcatggtgaactcatcaatctccgagctgacctggctgctttgaagcagcatgttgaggagcagtggctcccatgggctaatgatcgtctatcatccgctggagtcatcggagaccagattctactagacatggagtga

SEQ ID NO: 26467 - DNA, 1111 bp, Oryza sativa
  Clone ID: PAT_MRT4530_31254C.1
agggtttcgccgactcgcgagtgggagggcgctgctcgtcgcgccgtcctcgccggcgggagggccggtcgtccgtcagcatcctctcttccgttgatcatcctccctctctttcgctagccgccatcgctctcttccactggttcgctctctccgtcaagccgtttggtttcgccggctctctgctacgcccctctctttcgtcgactctctccgttgagctctctggcactgcactatggcgtctagacgcaatgttggggggtatgctcctcttcctacagaggacagggatgacagcaaccttactgatgatgtagaccttcggttcacttacaccccaaaatccctcagaaaaatcccgtggaaatcaattgccctggcactattcctcctcctcctaggatgttctcttctcttcctgtcatattttatattcacaggtcacatggagggggataactctcaggcatatggtctcttgttcctgggcatccttgccttccttcctggtttttatgagactcgagttgcttactattcctcgagaggggcaccaggatacacctttgcatctattccagattattaaccttccattgtctcaccaagggacagtgacgatagaacatggacaaaaacttgaatcttcaatcaggatgcaggaatcaaatgagctcttattttattaccactaaactgttaacatctaaatgaagtcagctgctgactgctgtgttcacctgatggcattgctcaccaggtgtcacttatctgtgctttgcagacaaagtaaactcgtggtcatactcgtctgttgctacatactccagatgtagatggctgtttgtcaccaggagtagatggctgttttaaagttaccgcatatttttgttccacaattccattgtattttgtgttgatgtcattaaggttttattttggctgcagaaatagtataaccatactttcatctatatattcaagttcttatagcagctgatggcaatgtgttttttgtactgcttttctccatcatgatatttgtacggataaattccttctgtgctactgaaagtaaatctattccgacagctcggctcctcggtgg

SEQ ID NO: 26468 - DNA, 516 bp, Oryza sativa
  Clone ID: PAT_MRT4530_31255C.1
atgatgacatcatcaatggccggctcgggttggcgacctcgccggagctagagcggccggctgtggattcggagggcatgtacacgtagaggacgacgagacgaacccaacggtactcaccctcgagccaaacgacgaacgacgacggccgacgacgagaggagatggtggcggcggctcggacctcgccggcggcgagctacggcggtcggatgcggaaaggagagggtggccgagcttctccaccccttggcgaagcccacgacggcgacggcgaccgacggcgacggcggacgcggctgtgcggctttgccggagttggccggcggcagcgacttgctaagcggcggcggcgacggctctaggagtcacgagagaggaagggagagggggcaaacgaaagaggagaactagggggttctatttatagccttggattgaagagatcggactcctccggccagaaatcgctccgggaaatcaaaaactcggttttggagataaactcgaaaacga

SEQ ID NO: 26469 - DNA, 168 bp, Oryza sativa
  Clone ID: PAT_MRT4530_31256C.1
tgcacgccagcgcttcagtcatggctagccatccttttttgccgccctccttttttttttttaaagctttacaatctcacatccacggtttgctatctgaatggctagttgcccatttttttgtacttatgaatatattggaggtgctcataaacaagccaaccctag

SEQ ID NO: 26470 - DNA, 402 bp, Oryza sativa
  Clone ID: PAT_MRT4530_31257C.1
aacccaccaccaacaaaagtgaaacccccaaccggagtaaaaccccgcgacgaatcggacacacatcccgcgagtgggcgccagcagcggaaagcgaacgggtatcacgaggcgaacgcggacacgtgtaagcacacgagggagggcatgggaggcgtaaaggagcaccggacgaaaaagaccaaggagagcaatggaaatcggagagatgaagacgcagcaagggagataagccggctctcacccaggaaatacggcggcaccgcaggaggctcagccgccagcgagctctacgagctcgagacgacggcgagatacggcggcgtcggcgccgggatttgccctaggcagtggcggcgaaggagagaggccgatacagatcgatcggccgaaaacgtttaa

SEQ ID NO: 26471 - DNA, 493 bp, Oryza sativa
  Clone ID: PAT_MRT4530_31258C.1
ggggcctaaaaatgggccaaacattactaagcgaaacctggaaaggtttcagggggctaacccaaggccaactgttaaaagcccattgccgaactgacatatgggcaactggaagggactttgaccccggggggggcctatagctaagggaaccaaaaaaagcttacaaacattggtaaagagggtcccaaaagagaggggaacaatattttcgaaaggcactaaaaaggaatagcgggaaaccaacagtttatagcaaaaggttcaaacatatggaaaaaacagaatttttccatgcccttgggttcaggcaaacaaaaatgctacaactggggggccaaaatgcttgagggggcatgcatgtatacgggatcaagcgtaagttgacaggctaacaggggtttttttctcaacggtggcaccttccttgaatagtttctaaaccgcgggggggccttgaaaaggaggaccttttttcctaaacttgcttttt

SEQ ID NO: 26472 - DNA, 1302 bp, Oryza sativa
  Clone ID: PAT_MRT4530_31259C.1
atgcagcgcctcccgctccggcgcgccctgtccgccgccgcgtccgcgcccgtacgccgcgccctctccacggcgtcgcggcgccctccgtgggcgatggtggagaagtacgtggcggtcggatctcccgagcggcgcgtatccctccggctcgcggagcccccgtgcggctccaggctcatcgcccccgcccacctcgtcggctacgcgccgcgcgtgcccgaccccgacacggacgagctgaacgccttcttcgccggcttcgtcaaggccgcgagcggcgacggcctcctcctcctcaccttcatggaagtcaccggcacggcccccctcgtccccggcggcggtgggtggcgcgcgctgactggcatcagcatcgaccccgacatgacgcggttcgtgtgcaaccccatctccggcgagctgttcggcctcccggacatcgacggcaccaagaagaccgcgtggttctccgacatcggcatcctcacccaatccgaacgcccgcacgggccgccggacaggtatgccgtcgctttgttcagggaggactcggtgggctaccgcggcggggacgaacggttcgccatgcgccggtttctctcacaaacgggcaagtgggacaagctggtgggcttgccgtcctcgctcccgctccaccggcgtcgcatgaacacatccacgcaggaggtggtggccttccccggccggctgtggtgggtcgacctgagctggggcgccctctccgccgaccctttcagcgatcgcccggagctccgcttcgtcgagctgccgagaggcagcgtgacacagcccatggagaaggagcgccgggagctgcgcaggttccgccgcgtcggcgtcagcgaggggaggctgcgctacgccgaggtgtcccaggaggagccatacgtgctcagttcgttcgccctcgacgacgacggcggcgggtggacgctggagcaccgcgtggctcttagccggctctggccgcatgaccaaaacctctgcaagaacacgccgcagatcgcagccattgacccactgaacgctggctgcatgcacctcgtagttggcaggcaggttgtctccatagacatggacaatggggatttgcttgggtgcacgctgggaggtggaagtgatccatccgtggatacacttacaccatgtttgctccctccgtggcttgcatcgtgccggatcccccgtgcagaaactctttcaaggaacaaggcggatgcgaaaagcaagagtttatcagacatgttggttcgtgtagataggaagaagatgacttga

SEQ ID NO: 26473 - DNA, 651 bp, Oryza sativa
  Clone ID: PAT_MRT4530_3125C.1
atggatgctaacagacgccaaggtggaattcagcaattattggctgcagagcaagaagctcaacagattgttaatgctgctaggagcgttcctcgaaaattgagtgaaaaacatgctttcttgttactattcttctgtaccttaactaaggcaaaagaggaggctgagagagaaatagctgagtaccgtgctcagatggaagctgagttccagaggaaggttgcggagagtagcggtgattctggtgcaaacgtaaaacggcttgagcaagaaactgacacgaaaattgcgcaactgaaggagcaggctgcaaatgtctcccctgaagtgatccagatgcttcttaggcatatggagccgttcttttgcttggctatttttgtgaattatggagcgggcaagtgggtcatcctgaaggacgacgagagtgagacggcaacatcgatggacgccgattgccgacgtctccgtgaccggagcaccacgcggcgcgcggcagaccgtcggttgcccgactgtgctggtgcctgcccgtgccgtgccagctttggttcaccgtgcggcgcgggtggcgtggtgagcgcgccgcgccatcggagaaggatggcggttcggcgtcgagctgacatagtgacgctgctgcactgctag

SEQ ID NO: 26474 - DNA, 446 bp, Oryza sativa
  Clone ID: PAT_MRT4530_31260C.1
aggagagcatgccagatgcacactggagcatagtgctggtcgtcagtcgtctagtcggactaggtgacagacaggcgaggggtctgtctgtcggagcaggcgttattacggcgagggttcgtcggaggaggccgtattacaggcgagcaagcatacaagcatcgcggggatgacccgccgtgagtctgtaccagggcgtagcaatgtacacggcgcaggtgcacaatcagatgtcccgggtttgagccccagcagtgcagcatcttcgccgcacaggccaagatacataggacatagctggcttgccctcattagcttagtaggatcaacaccgttcatgtgttgcatgcaacgagatagtgatcaaaaacaaataatgaataatgaaatgttttgaaaacaaaatagctggtgataaagtactataaaaaaaaaaaaaaaaaaaa

SEQ ID NO: 26475 - DNA, 213 bp, Oryza sativa
  unsure (1)..(213): unsure at all n locations
  Clone ID: PAT_MRT4530_31261C.1
cgataaganaaccaaaganacaatccgtacgcacgcacacatcatgcnaatggagaagaagcacaggcacgcgangtccaggagcttcagcgtcggcgccatcgtntccttcctcaagagcacggcggcatccttnacggcgaccaccaccacggcctccgcgcngctgncgccgcacgcaggtngttgttcaaccaccgcaacgtcttctcg

SEQ ID NO: 26476 - DNA, 107 bp, Oryza sativa
  Clone ID: PAT_MRT4530_31262C.1
atggacggtgcaccgtacacgtccactccgccgctcgacgtgtcgatcgatcgccactactacggttatctcggattcgatctccggcggtacgagcgccgatgcag

SEQ ID NO: 26477 - DNA, 845 bp, Oryza sativa
  unsure (1)..(845): unsure at all n locations
  Clone ID: PAT_MRT4530_31263C.1
ccacgcgtccgccctgctgcagctgctgtgctgcgcgggttaaaaagagagagatctattaactggccctcctctcccacagcaaacacactcgtgtcgtactgagcatctgagctcggtggttgccgaggaggattcgccggcggcggcggcgggggggagatgtcgcagcatgcggtgtgctgcggggcgatgttctgggtgtacctgatgtcgtgcgtggggctggtgatgttcgccgggctcatgtcggggctcaccctcggcctcatgtcgctcagcctcgtcgacctcgaggtcctcgccaaggccggcaccccgacggacaaggacaacgccgccaggatcctgccggtcgtcaagaaccagcacttgctcctctgcaccctcctcatcggcaactccctcgccatggaggcgctgccgatatttctggactcgctcgtcccgtccttcggcgccatcctcatctccgtcacgctcatcctcgccttcggtgagatcatgccgcaggccatctgcacgcgctacgggctcagcgtcggggccaaggcggcgcccgttgtccgggtactcctcatcgtcttcttcccggtcgcctacccaatcagcaagttgttggattgggtactcggaaagggccatgttgcacttatgaggagagctgagctaaagactttagtcgatatgcatggtaatgaggctggncaaggtggagagctgactcatgatgaaaccactatcattacaggagctttggagatgactcanaagactgcannnagatgccatgactccatatctgaaaccttctcacttgnatataacgcttagctggacctgta

SEQ ID NO: 26478 - DNA, 112 bp, Oryza sativa
  Clone ID: PAT_MRT4530_31264C.1
catagatatacccctaacatattaaattaactgggaaatgagtccatataggcgtggaaactaaaatctatgtttcttaccaacatgtaaacactactaaccgttgacacat

SEQ ID NO: 26479 - DNA, 2070 bp, Oryza sativa
  Clone ID: PAT_MRT4530_31265C.1
atgtcgcagcatgcggtgtgctgcggggcgatgttctgggtgtacctgatgtcgtgcgtggggctggtgatgttcgccgggctcatgtcggggctcaccctcggcctcatgtcgctcagcctcgtcgacctcgaggtcctcgccaaggccggcaccccgacggacaaggacaacgccgccaggatcctgccggtcgtcaagaaccagcacttgctcctctgcaccctcctcatcggcaactccctcgccatggagattggagctgatggctttgtggcggcggcgtgtgcgcaggcgctgccgatatttctggactcgctcgtcccgtccttcggcgccatcctcatctccgtcacgctcatcctcgccttcggtgagatcatgccgcaggccatctgcacgcgctacgggctcagcgtcggggccaaggcggcgcccgttgtccgggtactcctcatcgtcttcttcccggtcgcctacccaatcagcaagttgttggattgggtactcggaaagggccatgttgcacttatgaggagagctgagctaaagactttagtcgatatgcatggtaatgaggctggcaaaggtggagagctgactcatgatgaaaccactatcattacaggagctttggagatgactcaaaagactgcaaaagatgccatgactcccatatctgaaaccttctcacttgatataaacgctaagctggacctgcacacaatgggtatgataatgaccaaagggcatagtcgtgttccaatatactctgggactccaaacaatattattggccttatattggttaaaaacttaattacttgccaacctgaggatgaagtgcccattcgaaatgttactatcagaaaaatcccaagggtgtctgatgatcttcctctctacgacattctaaacgagtttcagaaaggtcacagtcacatggctgtggtggtcagacgcataaaagaaccaggagcatccattgaaaagacttatagtgacagatcagattacaaaactaacagcgacagatcagattacaaaattaaccacagagatgcccatgctgatggtttgtcaccctctcgtgtcagcattgctggaagtcgtcgaagtaacattgaaaagaatggagaggtgcgcttatataagaaatcagaaaaaaagcgggacaatattcttgattttaatagcggtccacttccaagctattcattggatcaagaagcagtggggataatcacaatggaagatgttatggaacaattgctacaggaagatatcttggatgaaacagatgaatatgttgatgtacataacaagattaaaataaacatgctacctctgggcaaatcattatcaccaactatatctccaagtaatgggccccattcccaaggactcaggaggacccctatgacttctccattgtcatcataccatcatggtggctccatcttacgttcccctgcttcaaacaatcctcagtctcctgggactttgccgacaataatttctcctgaaagatcgcctgcttctcaagcaccttcgcgtagttcacctaattcaactcaggtctcaaggaattcgtaaaacggcgttgagagctaaagagctttaaggacaacgtttcctgagaaatggtaaaatgtcaacataaacagattaagacattttgagcttaggactgaattatacagatcagcatatctcttgtactgttgatgcttatttgttgattacatgcttgtatatacgtatggcttagcatctggacatcgctatagatggaagtctcactacctactgtagatgtatttttgtcagcttgcaattaccattgcagaggaaagcttgaagataaaaatgtaaaaggaatgcactagtatgcatttgtgctgttcttgtatgcatgcccccatcattttaatgatcagcaagcagatgttggtgcattcactgatggctatccacaccatttaagcactgtacaagtcctctcatattgtatcagaaattcagattagtgataaggcgccagcttatgtttgtgatgctagtttggtg

SEQ ID NO: 26480 - DNA, 285 bp, Oryza sativa
  Clone ID: PAT_MRT4530_31266C.1
aaattcaggccaccaaagaaggccaaccgaaatttaaagggggggcacaattttgtacatggggccactaaacaaactttaccacttggtaaagggaggggacaaagaacagccttataaccctataaaccccaccctagaggcagggagacggctacaaaaaatttggtgcaacaaaaaacggtaaatactttaaaccaccgggagaggacaaaacactccgtggccaggaacttgggggaagaggccccaaacaaatttcctgaaaaaccaggggggattaaa

SEQ ID NO: 26481 - DNA, 963 bp, Oryza sativa
  unsure (1)..(963): unsure at all n locations
  Clone ID: PAT_MRT4530_31267C.1
ataaactgaaccgccgcagccgcactcctctcccgcgctcatccgttcgtctgtcgtctgttccggttgctttggcgggcagctagggtttaggcgcggggccctcccgaatccccgatgtacggcgtcggcgtcggcggcggcggcggcgggaactacgatggcgggggagggaacgccagctccctcttcggcggcggcggattcatgccctcgcaggcgaccaacgccgcggaggggaccagcggcggcggcggcggcttccccaagagtcggaacgcccaggcgctgctcccgctcaccgtgaagcagatcatggacgcgtcccagaccaacgacgacaagtcgaattttgctgtcaatggcatggaggtgtccacggttaggcttgtaggacgcatgttaaataagcttgatcgggttacggatgtatcattcactcttgatgatggtacaggcagggtacctgtgaatcgctgggaaaacgatagcactgatactaaggagatggctgacattcagaatggtgactatgttattgtcaatggtggtctaaaaggttttcaagggaagcgtcaggtggttgcttactctgtgaggcgtataaccaacttcaatgatgtaacacatcactttcttcactgcgttcatgtgcacttggagcttaccaggccgaagcacagccagtctccacgcctaatactatagaatgatgaccatggagtaggcgtagattatgtgagccgtcgtcttaatctaccagaggaaacagtcgggaaaatcattatagaccaagttgatctgggacatttgtatgccactatcgatgaccaccattacaagtccacaangaatggttgatcgtattcaatattatacgtatgcttcacagcttcaagggcgcatggagccaaaaaagtgtgcactccgcgagagtagttactgcagagtgcctctcgtgat

SEQ ID NO: 26482 - DNA, 240 bp, Oryza sativa
  Clone ID: PAT_MRT4530_31268C.1
gaaacaaaaacaaaagcggagcacgggcggtggggtcaaatgacgacgaacaaactgggaacacactaaacacggtgggagacatcatcgaatcagagatgaacaattaaacaaggctatatatgacgatgaccgcttagatgccaccagactcctcagcagcccggaggctagtaggcgatgaagctgatgagctgcacctgcctgacgttgacgaagccgatgatacggacgaatgca

SEQ ID NO: 26483 - DNA, 583 bp, Oryza sativa
  Clone ID: PAT_MRT4530_31269C.1
ggggtgtggggtttttttttttaaaaaaataagatgcttcaattgcaaacacgttcatagttgtttgaaacacaaaagaagctcctaaagatctaacatgctatcaagctactcgcctgactgccaagggagtagttatttagataaacaactgggtggagcagttaagctgattgcctggtgatctcctgtagaaaaatcacgcgaggcactctgcagtaactactctcgcggagtgcacacatttcttggctccatgcgaccttgaagctgtgaagcatacgtataatattgaatacgatcaaccattcattgtggacttgtaatggtggtcatcgatagtggcatacaaatgtcccagatcaacttggtctataatgattttcccgactgtttcctctggtagattaagacgacggctcacataatctacgcctactccatggtcatcattccttcggcctggtaagctccaagtgcacatgaacgcagtgaagaaagtgatgtgttacatcattgaagttggttatacgcctcacagggtaagcaaccacctgacgcttcccttgaaaaccttttagac

SEQ ID NO: 26484 - DNA, 368 bp, Oryza sativa
  Clone ID: PAT_MRT4530_3126C.1
ttagtgtttggacaataactgtggctgctggcaagatagggacagtaatgttactgtatgcacggataccttgcgcgtgcttgtttgcagagtgcgccggtgggagaggatgaacggtgctggtgttgggtactctacttgtgcagctactggcattgtgaggtgcgacactaaaatcggaggacgcttgcttgagcctatgcacgtgaggacactatcttgctgctcgcatgaagactactacggctgggaatgcacaccatgtttgaagggtgacggactaaataggcgagacgatattgattaatgctgggagaaactttactgttagtgcatgggctgcaactgtgacaatacatggggttact

SEQ ID NO: 26485 - DNA, 1291 bp, Oryza sativa
  Clone ID: PAT_MRT4530_31270C.1
atgtacggcgtcggcgtcggcggcggcggcggcgggaactacgatggcgggggagggaacgccagctccctcttcggcggcggcggattcatgccctcgcaggcgaccaacgccgcggaggggaccagcggcggcggcggcggcttccccaaggtccttcccctcctaatcctacccaaatttctcgtttgtttgttttttttggatatctcttgcgctcccctcggactgacgccttgtggggctcgcgggtgtggtcagagtcggaacgcccaggcgctgctcccgctcaccgtgaagcagatcatggacgcgtcccagaccaacgacgacaagtcgaattttgctgtcaatggcatggaggtgtccacggttaggcttgtaggacgcatgttaaataagcttgatcgggttacggatgtatcattcactcttgatgatggtacaggcagggtttgctttgttctatttgcaaggaatggtgactatgttattgtcaatggtggtctaaaaggttttcaagggaagcgtcaggtggttgcttactctgtgaggcgtataaccaacttcaatgatgtaacacatcactttcttcactgcgttcatgtgcacttggagcttaccaggccgaagtcccaagtaaatgctaatacagcaacaggaactcctaaccaaactatgcctagggatagcatggcgtataaccaaagtccacttactaatcaggcctcaacattttctgcaccacaaaatactggtactggaacaaatatgatcgacttggtcttgaatgtttttcatgacccagcagttatgaatgatgaccatggagtaggcgtagattatgtgagccgtcgtcttaatctaccagaggaaacagtcgggaaaatcattatagaccaagttgatctgggacatttgtatgccactatcgatgaccaccattacaagtccacaatgaatggttgatcgtattcaatattatacgtatgcttcacagcttcaaggtcgcatggagccaagaaatgtgtgcactccgcgagagtagttactgcagagtgcctcgcgtgatttttctacaggagatcaccaggcaatcagcttaactgttcaattaagttgtttatctaaataactactcccttggcagtcaggcgagtagcttgatagcatgttagatctttaggagcttcttttgtgtttcaaacaactatgaacgtgtttgcaattgaagcatcttattttcttatgaccagtacaggccaagttactcaaaaaaaaaaaaaaaaaa

SEQ ID NO: 26486 - DNA, 1092 bp, Oryza sativa
  Clone ID: PAT_MRT4530_31271C.1
tatatagctaatagctccctgtttgttgtagcagaacgagaagggctgcttcaacccctagggatccctcaccgcctcttcgaccactccatggtgaactcctcgtgaccatgcaaatcctagccaactttggaggggttttttaacttgacgactgctcctatagtaagcggagaaaatggtgccaatcggtatcatgaaggtgaagggagtcctaagctcaatttcaatctatttattggtttcaagtggatgcaccaaaatggttccttaaaggaattggcaaaatctaccatggattcctctaggctggatgggcaaatgcacagggtgggcattgccatgttgccaggtcaaaagtttgtgccatagtcaactatggcagccttggtatcctaaatcttgggctcatgggtgaagcccttcattcatgatagatttggctataacgcacatcaccgttgaagctttggtagggactagtgatcccaagcttgcagaaaaagcgcgactttgcaacaacgttggtgaatagagagtctgcctcttctgtgagaacaattggtacatgcatgagggactcgttccttggcgccgactatccacgaccgcttccccacacgcatctgtcaccgtagaacggttgcacaagcactgcaagctagcacatggataagatatatccaaggtgctctagggatccataccatcttggaatatttgcggctatggtctttggtcagttcagttcaacccatcaatgactagtcggatcaattcatctagaaatgggagaactcaggggtggtactcttcctattctacttatcaagccatgttcataggtcgaattactttccaatcttcaatttggaaatctctggctcctcacgttgcaaacactttctttggcttgtggcacttcggtgttgttggactgcggataggcttgcaaagagaggactcccgcatccaagccactgcattctctgtgatcaagatgaagaaagcattgatcacatactaggtgcatgcttgtccggaatcaagatagctacggtggcttgtattcaatacaatagggtgcacatg

SEQ ID NO: 26487 - DNA, 671 bp, Oryza sativa
  Clone ID: PAT_MRT4530_31272C.1
tcaggcagccgggatgtggcgacgagtgtactcttcaccttgaaaccccagaacacctttagcgatctgggaagcaagatgaagaaccacaaagaggagcgtttgggggagacgaggcttgccatcgacgagtcttggtggaaccacgcgacgaggtgaagtcaggcaccaccagcatgcacatcgccatggagcctgaacccccaccggcaccaagcgcacggtgaggagagcttggcgcacgatgtccacctccgtactcgaccctgagcacgacgtgcccgtcgccccgttcctgatgccgccaccgacaaagtcttccagaagctcagcgcgtgtcggcagccatggatagacggaaacctcggcagcaggtggtgttggcttcccatgatgcggagtcttccccaggcagtggtgccccatccttgccgccacaaggagcgcccctccgatcagtttgtggcccctgtgtacgtccacctccatcgataccgccatggatgtgcctcctagtggagtggctggcgcaggggagaagagatgacaacgacctcaccatcctcctcacccatctgttgatgcgaaaaacacacactggcctgggagatctacttaactctagtatagatcctaaatcttgctcttgggttcaaaggcgtgccaattga

SEQ ID NO: 26488 - DNA, 190 bp, Oryza sativa
  unsure (1)..(190): unsure at all n locations
  Clone ID: PAT_MRT4530_31273C.1
cagtaacccaaccagaacttgcggaagcgcgggttggtgcctnctattcctcttcgggcggggcctcntccttctgctgttgntttactgctgntngngcgcttgntctccgnggctgcccngcnngcccttttgcggttcctccccctgngtttgtggctgttagcccctctcatgctgggggggggat

SEQ ID NO: 26489 - DNA, 813 bp, Oryza sativa
  Clone ID: PAT_MRT4530_31274C.1
aacttgtactgtaattctattctcgcttttgcttgtgtctttcgtttttcttttgcttgatcggatttctcgagttgccaggcgcagatccgaaaccagcaagggaatctatacaaatgctgtctctcatttctcacagttgataattacctatctgtatatccccttctcgcgaccataacctctcctttttgattggtgccgcgactacacactctctcaactcaacaaacacaacaatcgcctcggcttttgctgtcgcagatagatcgccatgcctccgaaatcaagatttacaaggcttgacgcctttaccaagactgtcgatgaagcgcgaattcgaacgaccagcggtggtgtcgtcaccatcgtgtcgctgctggtggtcctgttcctgtcttggggcgaatgggcagactaccgtcgcatcgatatacatcctgagttgattgtggacaagggaagaggcgagcgcatggagattcacctcaacatcacctttcccaagatgccctgcgagctcttgtcgcttgatgtcatggatgtctctggcgagcagcagcacggtgttatgcatggtgtcaacaaagtccgtctccagcccgagagccagggaggcgccgttatcgataccaagtccctatcgctccacgatgatgccgcccatcacctcgatccctcatactgtggtggctgctacggtgctacacctcccgccaacgctcaaaaggcaggctgttgtcagacttgtgacgaagtccgtgaagcctatgcccaggcctcgtgggcctttgggccgcggcgagggtgttg

SEQ ID NO: 26490 - DNA, 201 bp, Oryza sativa
  Clone ID: PAT_MRT4530_31275C.1
atgcgggagagccggtcccgcgcatccggcgtgcgggagcgcgccagctccaggtgccgcctccccggcctgcggcactggctcggtcccgcatcctggttccgcgggaccggcttgggtttcgctcccccacctctattctacggaaatgccattgacaagcgcccaagtcctagaaatgccatcgagtgtgagttctaa

SEQ ID NO: 26491 - DNA, 217 bp, Oryza sativa
  Clone ID: PAT_MRT4530_31276C.1
atgataaatatatgctttttttgttttagacgagatactggacagttcatagaaagaaaacaattgcttgcaatttatttaaatagctagtctttatccgaaagccgaactaataagaaccctccccaccttaaacgacttggacgctctagaacaggataggagagaatggacctaacttaaattcaatgttatgcttaaacctccgagcctatgc

SEQ ID NO: 26492 - DNA, 412 bp, Oryza sativa
  Clone ID: PAT_MRT4530_31277C.1
tcattatcaggaaccaattcgcaccgatcgatcgagggatcgatccagcaactagatcagcagtactagctaggaagcatggcccgagcacaggtggtgttggtcgccctggtggcagttctgttgctcgccagcccgacgccggcgaggccatcacctgcggacaggtcaactacgacgacgggccctgcctgacctacgcccgctgaggagccggaccgacgggggtctgcgtgcagcggggcgaggagcctcatggcggatgcacgcacgaccgcagaccggggcaccgcctgcaactgtctgaagaacgaggcccgcggcatcaaggggctcatggccggcgacgccgacagcatcccctccaagagcggggtcagcgaaccctacaccatgagcgcttccatcgact

SEQ ID NO: 26493 - DNA, 1247 bp, Oryza sativa
  Clone ID: PAT_MRT4530_31278C.1
cggacgcgctgcttcacacccccaactgtactgcgcacttggtgatcgagacgaggctagctaggataaggcgcggcttcggcggcggcggcggtgggcggaccggacggcggcgagagttggtgagtagtgagagtgagtgatcggtgtggagatgagcacggcggcggcgaggccagggcggcggttcacggtggggcggagcgaggacgcgacgcacccggacaccatccgcgccgccatctccgagttcctcgccaccgccatcttcgtcttcgccgccgagggctccatcctctccctcgggaagctgtaccaggacatgagcacgccgggagggctggtggcggtgtcgctggcgcacgcgctggcgctggcggtggcggtggcggtggccgtcaacatctccggcggccacgtcaacccggccatcaccttcggcgcgctcctcggcggccgcctctccctcatccgcgccctcttctactggctcgcccagctcctcggcgccgtcgtcgccaccctcctcctccgcctcaccaccggcggcatgcggccgccggggttcgcactggcgtcgggggtgggggactggcacgcggtgctgctggaggcgacgatgacgttcgggctcatgtacgcgtactacgcgacggtgatcgacccgaagcgcgggcacgtcgggaccatcgcgccgctcgccgtcggcttcctcctcggcgccaacatgctcgccgggggcccgttcgacggcgccgggatgaacccggcgagggtgttcggcccggcgctcgtcggctggcgctggaggcaccactgggtgtactggctcggccccttcgtcggcgccggcctcgccgggcttctctacgagtacctcgtcatcccgtcagccgacgccgccccgcacggcggcgcgcaccagccgctggcgccggaggactactagacccgccgccggcgacctccagctacaatatctattagctatgtgtgtgtggttgtttgtgagtgtgattaagtggttaataaggggtggtgtgtttgcttgccccagtgctgggatggacggtccagatcagctcatgtacatttgttggttggttactcggatgatgatccgtatgaacagtgagctaccagtgtgtaatgataaataattaagtttccattataaagtgaaataaagccaaataaaaagggacaaggtacccaattcgccctatagtgagtcgtattacaatttc

SEQ ID NO: 26494 - DNA, 1074 bp, Oryza sativa
  Clone ID: PAT_MRT4530_31279C.1
atgggaagagagtcggcggcggcgtgctcgccgaagccgaagctgaggagggggctgtggtcgccggaggaggacgagaagctgttcaaccacatcagccgctatggcgtcggctgctggagctccgtcccaaagctcgccggattggagaggtgtggcaagagttgcaggctgagatggatcaactacctgaggcctgatctcaagagaggcagcttctcccagcaggaggaggagctcatcatcagcctccataaaatccttggcaacaggtggtcccagattgcggcgcagctgcccggccggacggacaacgagatcaagaacttctggaactcgtgcctcaagaagaagctccggcagcgcggcatcgatccggccacccacaagccgctcaacgacggcggcgccggcgccggagaagagcaccacgacgacggcgacaagcagcagctaatggacgacgtcgacgactgcttcgccatcggcggcggcgggagcagcgactccctggcgccgccgcactcgccggccgtcagcttcgacccgctgtccgtgaccaacgtgccgacgacgatgatgcagtcgtcgtcgtctccctacggcgccgccggcggcgagcactcgtcgttccggtcggacaccctctgcgactacggcgggagcggcggcggcgtcgacgtcgtgtccgacgccggcacgtacagcgcctacaccggcgacagctccagcaacagcaacagcacggcgtggacatgcggcagcgtcgtcgtcggcggcgcgggcgagctgccgccgccgccgctgctgccgcacatggacatgttcggccgggtcgacgccgagccgccgccgtacccgccgttcgacgtccaggccaggttcagcccctggcaccaccaccaccaccaccaccacgagccgacgctgccgacgccgccgcaaaggctggacggcggcggcggcgccgcggcgagcttcccgatccggtcgctgtcgcgggacatgccggagtcctgcttcgacctcggccgcggcgcgctcgacgacgagttcggcgtcgacttcctctga

SEQ ID NO: 26495 - DNA, 503 bp, Oryza sativa
  Clone ID: PAT_MRT4530_3127C.1
aaaaaaaaaaaaaccctggatagggggggggggggaaacccgggggaaattttggccccaaggggggttaagggattctcccttttaataaagattttgccccccaaaattaccttaatccgggggcattttacacttttttttgggtggagggggttaatcccggggttaaaaacctttggccatacctaagcccggaggaaaaaggggaaaaattttttattggttttggacaaaaattgcttagggggggggaggaggggtttttgccggaaggaagcaaaggtttgcctttggggcccactgaaaagggggctggaaagggaaacttttatcccacgggtggggggtccaaattttggaaaaataggtgttttggggggggcccccagctgggggttccaacggggggcgccctattggggggggaaaaccttggaattggggggggtacaaccaaaaaacggggacaaaccccggaattttttgattttctttggggg

SEQ ID NO: 26496 - DNA, 452 bp, Oryza sativa
  Clone ID: PAT_MRT4530_31280C.1
gacttgttaaaattgaatgattttaaagggggggaggacaaacgcatttattaaatactcattgcggttcacagaattaatgaaaatgaacaccaattaaaagccatgatatttgacaacgaacaacaagatgcacattaagcaatatacaaaatgcatacatataattatggggagaaagttattaaagatataaacctttcgttctaggcttcattagagcgaaaacgatttagtattggtaggtataacgattctaggggtaataattcttgtggtgctagaggaaggggaactctgtgtgaaacaactgagtcacacgatttcatcaacaaatttattttgtgcctttgcgcataacacgagtctttttattcttgaaggtttttgtaaacagtttaagctccttcggaaaatgatctcttgacgaccatactgatcaggagattgtt

SEQ ID NO: 26497 - DNA, 1888 bp, Oryza sativa
  Clone ID: PAT_MRT4530_31281C.1
gaagaaggtggtgaggaggctggggaaggaggaggtggagccaagcgccggtgtaccgccctggccgcggccgtccctgcgctcgtcgtctgctccatcctcctgcccctcgtcttcctcctgggtctccaccgccccgtctgttctgtaccttacctacatgctgctcacctcacctcctgcttgtcttttttttcttaactgtcagcagggcatggatcggaggagcgcgccgcggttgtcatcagcactgtacgatttcatcaacacattttttccccctccttctgaatttaaatctggtagtagatcaaagtccaagaatgtttctaccaaatcaaaagaaaagctcaagggtgttttctctttagttcagctaaaaaatgagaccagaaaaaacaaaggtaagaaagatactactattgataagaaagagaaccaagaagtcgagcatgaggagaaccccaaatcctgtgaacttgaatatggtatctactgtctctggtctgttgaatataaggaagtgatgaaagattttattgtgaagaggcttaaggatcaactttttatggcaagagctcactatcctagtattgcaaagctgaagaaccaggaaacattcacacgtgaactgaaacaaaacatccaagagcatgaacgcatgctcagtgacaccattgcagatgctgatcttccaccattttttgcaaagaagctagagaaaatggagcacacaattgaaagagccaagtcttgtgaagtcggctgcacaagtgttgaacggaaacttaggcagctacttgatataactgaagatgaagcttatttccatacaaggcagagtgcatttctctatcatcttggggtacaaactatgccaaaaactcaccattgcttgaacatgagattgactgtagaatatttcaaatcaacgtctattcatacggtccagtcaaacaagcagaaacttgaagaccccaccttccatcactatgtgatattctccaagaatgtgcttgcagtttcgactacaattaattcaacagttatgaactccaaggattcgggtagcattgttttccatttgttcaccgattcacaaaatttttatgcgatgaagcattggtttgacagaaatatgtatttggaagcaactgtacatgtaactgacattgaggatcaccagaagctctctaaggatgttgattttcatgatatgaaactgttacgacctgctgaggaattccgtgtcacgtttcgtaatcattctcaatctttccagaagcaaatgaaaactgagtacatttctacttttggccattcacatttcctcctgcctgaccttcttcctagcttgaatagagttgtagttctagatgatgatttgattgtccagaaagacttgtcatctctgtggaacctcaatatgggtggtaaagtggtgggagctattcagttctgtgaagttaaattaggacaattgaaggcttacaccgaggaacgtaattttgacaacaattcatgtgtgtggttatctggtctgaatgttgttgaactgaaaaaatggagggatctccacattaccagtcggtatgaacaattgcttcaaaaggttagtgacagtgtgacatcatttccacttaaagtacttcccataagcttacttgtctttcaagatttgatatatcctttggaagattcatgggtccaatcaggtcttggacatgattatggagttagtcaaaccgatataaaaaggtctgttactctacactacaatggtgtcatgaaaccttggcttgatttgggcatacatgattataagggctactggaggaagtatatgaccaacggggaaaggtttatgacagaatgcaatatacattaa

SEQ ID NO: 26498 - DNA, 1339 bp, Oryza sativa
  Clone ID: PAT_MRT4530_31282C.1
cgccgccgctctacgtcctctcctccggctaccaatatcccagaaacctacccaaatgctcgcctccacctttgccacgcaccctgctgccgctgcagccgccaggcgacgaggtccgatccgctggcgcctgccgttctgttcccaaatcgtcacggtgacgctgaggcggcggtttccaatggcgaggctttcgatcacgaacgccctcgctagccagagcctcgagagtgcccctgcggcgcctcccaagcactcgttcccgatactggtgaatagttgtactgggaaaatggggaaggctgttgctgaagcagctgtatctgctggtcttcagttagttcctgtatcattcagtgctattgaggttcctgatggaaaggttgaaatttgtgatagggaaatttatattcgtgacccatctgaaggagaaagtattctcccttcgattgctaaggattacccagatatgatagttgttgactacactgttcctgatgctgttaatgctaatgctgagctttactgtaaacttggattgccatttgttatgggcacaacaggtggaaataggcaactgttgcacaaaacagttgaggacgcaaacgtgtatgctgtgatatccccacagatggggaagcaggttgtcgcgtttcttgctgccatggaaatcatggcagagcaattccccggtgcattttcaggttacaaactagaggtcatggagtctcatcaagctacaaaattggacatttctggcacggccaaagctgttatctcttgctttcagaagttgggtgtgtcatttaacttgaacgaggttaagcaggtccgggatcctcaggaacagcttacattggttggtgtcccagaagaacatctttctggtcacgcatttcacatgtaccatctcacttcaccggatgagacagtttcatttgagtttcaacacaatgtatgtggccgttcaatttacgcagagggaactgtggatgctgccctgtttctccataaaaagatacaatctggtgccaacaagaaattatatgatatgattgatgtcctaagagagggcaacatgagatgatcctctgttggtgttatacgtggttatgtaacaccgatctgtaaactcagatgcgcaccaaaattaggcgactactaagatttaccaattttctattgtaacaaattgtagtaccgtcggatagtagtttcctcaggagaaaaaaaaagtttatctcgaatgaataatgaagatgacttcgttttaaaaaaataaaacaacgcccaaaaaaacaaaaaaaaaaaaaaaaaactcgagactagttctctctcc

SEQ ID NO: 26499 - DNA, 680 bp, Oryza sativa
  Clone ID: PAT_MRT4530_31283C.1
cactcccctagctccccgaggatgcctgcccctgcctagcttaatgtggaactaactaggagtattaattaattccttccactaatcacccatcagcgccaaccggcggccacggccaccgtccgctccgacgacgacgacaagttgccactgctcactgctcactgctctggaaggtggtgaagcaggtgtcgctcggcttcactatgaagggccaccaccaccaccattccttgccgccgtcgccgccgcccaagcgccggtgtaccgccctggccgcggccgtccctgcgctcgtcgtctgctccatcctcctgcccctcgtcttcctcctgggtctccaccgccccgcagggcatggatcggaggagcgcgccgcggttgtcatcagcactgaaatggggtttagcaagcacaagcatctggatgggaggatgaagcacaagctactcaaggatgtttctagaaagaaaattcctggatctgatgggattttgggtgagaaatctggtagtagatcaaagtccaagaatgtttctaccaaatcaaaagaaaagctcaagggtgttttctctttagttcagctaaaaaatgagaccagaaaaaacaaagaacttcatacacaaagaagataccagttaaaggacttatcctggagatcaaaggatactactattgat

SEQ ID NO: 26500 - DNA, 2043 bp, Oryza sativa
  Clone ID: PAT_MRT4530_31284C.1
atgaagggccaccattccttgccgccgtcgacgccgcccaagcgccgctgcactgccctggccgccgccgtcccggcgctcgtcgtctgctccatcctcctgcccctcgtcttcctcctcggtctccaccgccccgggcatggatcggaggagcgcgccgcggttgtcatcagcactgaattagggtttagcaagcacaagcatctggatgggagaatgaagcacaagctactcaagggaaggctcgcgcccagctttactgaagaatttttccaatttgacattctgtcctgccaattggaagatttgtgtgactctggagggtactcactctacactgatgtttctagaaagaaaattcctggatctgatgggattttggatgagaaatctggtagtagatcaaagtccaagagtgtttctaccaaatcaaaagaaaagctcaagggtgttttctctttagttcagctaaaaaatgagaccagaaaaaacaaaagatgaagcttacaaagaagataccagttaaaggacttatcctggagatcaaaggatactactattgataagaaagagaaccaagaccaagaagtcgagcatgagaaccccagatcctgtgaacttgaatatggtagctactgcctctggtctgttgagtataaggaagtgatgaaagattttattgtgaagaggcttaaggatcaacttttcatggcaagagctcactatcctagtattgcaaagctgaagaaccaggaaacatttacacgtgaactgaaacaaaacatccaagagcatgaacgcatgctcagtgacaccattgcagatgctgatcttccaccattttttgcaaagaagctagagaaaatggagcgcacaattgaaagagccaagtcttgtgaagtcggctgcacaagtgttgaacggaaacttaggcagctacttgatataactgaagatgaagcttatttccatacaaggcagagtgcatttctctatcatcttggggtacaaactatgccaaaaactcaccattgcttgaacatgagattgacagtagaatatttcaaatcaacgtctattcatacggtccagtcaaacaagcagaaacttgaagaccccaccttccatcactatgtgatattctccaagaatgtgcttgcagtttcgactacaattaattcaacggttatgaactccaaggattctggtagcattgttttccatttgttcaccgattcacaaaatttttatgcgatgaagcattggtttgacagaaatatgtatttggaagcaactgtacatgtaactgacattgaggatcaccagaagctctctaaggatgttgattttcatgatatgaaactgttacgacctgctgaggaattccgtgtcacgttccgtaatcattatcaatctttccagaagcaaatgaaaactgagtacatttctacttttggccattcacatttcctcctgcctgaccttcttcctagcttgaatagagttgtagttctagatgatgatttgattgtccagaaagacttgtcatctctgtggaacctcaatatgggaggtaaagtggtgggagctattcagttctgtgaagttaaattaggacaattgaaggcttacaccgaggaacgtaattttggcaccaattcatgtgtgtggttatctggtctgaatgttgttgaactgaaaaaatggagggatctccacattaccagtcggtatgatcaattgcttcaaaagttgcaaaaggacagtgtgacatcatttccacttaaagtacttcccataagcttacttgtctttcaagatttgatatatcctttggaagattcatgggtccaatcaggtcttggacatgattatggagttagtcaaaccgatataaaaaggtctgttactctacactacaatggtgtcatgaaaccttggcttgatttgggcatacatgattacaagggctactggaggaaatatatgaccaacggggaaaggtttatgacagaatgcaatatacattaataacagactaac

SEQ ID NO: 26501 - DNA, 3994 bp, Oryza sativa
  Clone ID: PAT_MRT4530_31285C.1
tgtgttttcctttttttttgttcttctttttgttccatcgggctagaaaaactcgtttcaagccacagctcatgctaaaaaagggcacgaactgacaaaatcttgcagtctctacaaatagtttcgcccgcaatatgaatacatctggaactgcacacattccgtgctgcaaagaaaagaaaattgactctgatttcagatttggaggtcccaacctgcaggtctttctccctgacagaatgtgacagtatcaagagtccatgtcaacaggttcagctgtggaaacagtataaggtagctccttgcccattatcaccgcggtcatcatcaatttacccgcatcagggaaatccttgtgctgcatcagcacttcctccactgagagacatctgccctccaagcctctcagatgcacgtcttctttcttcacaggcagcacgtcctcaaacgaaccgtcatacaccacggcgtctgggctataacacagcctggaggcattgaacaggacagtgccctgaagagattcttggatgacttcatcgctccaacctcctgaagattcctcttgaaggctaacccagtcgtcctggtcggctgcattcatccagcaagcctctagaaggcctttgttggagctccggaacgaggccctcgtccaagcaaatacttcaaaagctttaagagagagctctcgatctcccttcaggcacatctcgatcagttccaatggacgaaatggcttggtagtatatttatctggtgcatactctgggtcatgctgaacaatctcttcctgcagatttagaattcggatatctgcatctatatgggcaaccttcacttcataatcaacatccttacctgctgctgctgcaattttggagagatagagaaagcgtcttctttcaacaaaggacagtgatttcctgttgcttgtaaggttagcatcttcctcaggactcacgagagtatgaagagtcttcgaagcagaagagaaccgatttaagcatatctcatgaagccacagaagatcatcccgctctttcagaaaattggctagctcttccgggaattcttcacctaatcttaatagcttagcatgttgacgcctgttgactagttgtttgaaaacaaagaaactgaatcccccgtgaggtcctacactatcatgcataagactgcgaagaaggcctgtatcactgagatcatagcaaatctgccacaatgtttggtacccttcatgccgtttagctgttgccaaaattggagaagtgacttctctgaatatagattctttcagttccagattgtcagtgacttctgtcgtctcctgatattttgcatctacaatttgttttgcgaggtcatagagggacccaagaagttcatctcttctgtcacagtattcttggattagcacaccatgctcatccccacgctcgaatttagcagttaacaacccaatatatgcatccagtaggatatctgtgagtcgttccaactgagaccataggtttgacttcattgacatgtccgcagcccctggttctctcaaaagctccatggcaaaggatgctactcgccagattccagatcgtacaacaggctggctgttccatgttatcagtccttcaggagaaggataccagtccttgtgctcctctctgtagcgcaatgctgcctgaactagggtcatgcaagcatttgataactcaagtgcacgttgcatctgaacagaagggttttcttctccggttataatgtattgaagctgatgagatatgcaattaaatagatcttctatatctgaaactctgctgtagaacacttcagcattatcacggtccattaagagaacagtgtttcttcgagattgctcaccaaccaattgaataaggttccacaatgcaccagttgtttggttttttgactgaggtgataaatgtatgcttgagcgttgatggctaagagcattttgtaattctctgagctggatcattccagagagcttttctccatgctccatgacagttagcatcgcagttccatcaaaattgtcatcagcattcattatgctattttgaataacaaagaaccaatgtgttcgattaatatcatagctaggatgatatatgctttgctttgaagagagttcctcatggcacttagacaagacaagaaactgaaggaatttcttgtgtttttgctgcttctcagttagggatgaaacaattgttgaagcaagaaattcagcttctctagttgttgtccaatgcttagatagagtgtttacgatggatttgcttattcgaacaaatatgttcatctcaccctctttgtcaaatgcgcctgctgctctaagcttttgaagtgcttcatgaactgtaccggacaaaacaaaatcatgaaataaccggtttaataacatttcagactcctcatcaaccacagcctgctgagctataccagttaatgctggtctttgcctctctccagcactccaagcctcagaactagctcttctgggtacaacactagcattgaatgcctgatttcttcttttctcttcagcaactgcttcattgcaacttccttttcttgacaagctccgctctggtggctcaaccccaccaactaacacagctttctcaggaattgcccacactcctgccttttctgtaagaacaacccaagctccttcatctctgtcctcggaagatgggataactgaagcatcgagaacctttccagcatcccaaggcagatcaaattgatagagacgggttgaacctctccagtatatggctattgttgctgttccatcacctgacagtatgattacagaaccagaaggcttaccaccagtttttagcctcatagaaaacaagaactcttcatcctctactctagccttagggattatcacctgagaaggagcttttttctccaaaaacctttcagttttaatcacattatcttcagatgaaaacttttggttaggtctgtacagcatcgtcagaagagaatactgagtgtagttcgacccactcacccgatctttgcagaaggtagcaacaagaatgataatttctttcccatgatcatctatctgcatgtccaaaagccatatgtttttctgtccagctatgtctttctttattcccatatcaccatcactaccaacaatttcctgagaccctatttttttgcagttgatatcatgcccgaatgagatgctccagcattgcagctcatgactagtcaataaaaagaacgtccgttcagcagccttagatgatgctttacttggtagccaagccaaggaccttccaccactatttttctgagaatgatcagcattataaactcctaatgtacccttatgaatttctcttcgacgaactgcagctggtgaacaccagaacatccataatgtgcctgttggctgagaagcaatcacaatgcattcattaatacctcctggaactgccactgcaataagagaattaatcctgcagtttccagatgtgccatcactgctttcagcatagatatcagaccaataagctatagcttgtgttcttttgttgcacaggataaaaccagtcgaacttcttcgatgcaatatatctccactgctccgtgttgatgcaccactactaccccatctcactatgcaaactgcccactgattaccacatagagatttttcttctttgttccccataagagaagaagggacctcaagtacaagacagtcttttgcaacagaagccaggtaactccagataaaaagctcatttccacataacatccatgcaagggatgtttctttatcaatgccaccagcaagcatgttcttgccggaaaaactcttttgcagaaggttggcttgagcatttcgaactatttggggaaattcggatacatgcaccggttggatctggccagaatcccctgtcctgtctgttcgtgttgatgttgaaatcttcat

SEQ ID NO: 26502 - DNA, 274 bp, Oryza sativa
  Clone ID: PAT_MRT4530_31286C.1
atccattatttctgggggttgcattccgcaagaagaccgctagttagggcgaaatgatttaaatttgactttgaaagatcacaacaggcctcatactccaactcttaagaaaaacctccactagacccattttttttttagatgagggggacctccccatctatgtgggagtactccaaaactagggctaaaaccctttggcatgaaagaaaaaaaatggggaattctttgatttcgcgggaaaccctccccgcggggggggggtttttttttt

SEQ ID NO: 26503 - DNA, 2478 bp, Oryza sativa
  Clone ID: PAT_MRT4530_31287C.1
atggatgcacttgctcatgcctccgcccgccgcatcgcatgccacgccgacctcccgctgccgtcggcgccacctgtgccgcgccagcctccctccgtcacccctcatcgtccagcctccccctacacctcaagcaccgccgctggactccccatgcctgatgccgtcaccgagggccacatctgccgcctgccccttcaccacgtgccaccgcgccctcaaccccgccgccactgcctcctctgctgtacctgtctcgtcgtcgggagctggccttcctcgccggagaggccagatctagtgggagggagggaggggggcgccggatccggcgagaaaggagccagatccggcggcccgtgtgcaggcgagccccgcctcgccgtcgggatctctacggctcgccgccgcctcctacgccccgccgcctgccgcgtagactgtggcctcccggggaagacgagctacgtggacgacaagaccaagatttcctacgcggcggacgacggcttcaccgacggcggctcgttccacaacatctcggcggagtacttcgcaccggcgctctcggcgcgctactacaacgtgcgcagcttccccgacggcgcgcgcaactgctacacgctccggtcgctcgtggccgggcacaagtacctcatccgcgccaccttcatgtacggcaactacgacggcctcagcaagctgccaatcttcgacgtctacatcggcgtcaacttctggatgatggtcaacatcacggaccccgccggctcgacgctcctggaggccatcgtcgtcgtgccggacgacttcgtgcaggtttgcctcgtgaacaccggcaccgggacaccgttcatctccgggttggacctcaggcctctcaagaagaagctctacccgcaggcaaccgagacgcaaggcctgtccttgttcggtagatggaaattcgggccgaccagtaataccgaaatcatcaggtaccccgacgatccacgcgacagagtatggacaccttgggactcgccatcaaattggaccgagatatcaacgacgaggccggtgcagcagacatacgacgacctgttcgaggtgccaacggcggtgatgcagacggctattgtcccaatgtttgccacagacaacatcgagctcgcatgggtagcctacacacagcccaaggacccgtcgccggggtacatcgccatcatgcacttctccgagctggagctcagcccccccagccgtgatgtgcgagaattctacatcaacctcaacggcaacatgatgtacagcaagggctacaagccagtgtatctctacgcccacgccatctacaacaccaaccccttcctacgatacccgcagtacaatatctccatcaacgccacctataactcgacgatgcgaccgttcatcaacgccatggaggtgtactccgttttctccaccaccaccattggcacatatggtcaggacgcttctgccatgatggtgatcaaggaaaagtatcaggtgaagaagaattggatgggtgatccgtgcattccgacagaatttacatgggaaagtttgacatgcagctatgaaaactccaaacacgtaataaaaataaacctgtcctccagtggtttgagtggtgagatatcatcttcttttggggatctcaaggctcttcaatacttcgatgggcatggttcatcaatgcagcttgagaaccgacgatttacatataaagatctggaaaagataacgaacaactttcaacgagtgctcggccgaggagggtttgggaaggtctacgatggcttcttggaagaaggtaaaagaaacaacgggagacatttaacctggagggagaggcttcgaatagcgttagaatccgctcaagggctagagtacctacacaagtggtgcaatccgcctcttattcatagagatgtgaaggctaccaacattctattgaatgcgaggctagaggctaagattgctgattttggcttgtccaagtcattcaatcttgagaatggcacccatgtatctacgaacacgcttgttggtactcccggatacgtggatccagagtaccaagcaacaatgcaaccatcgaccaagagtgatgtctatagctttggtgtcgtcctgctagaactggtaacaggaaagtcggctgtcctacgtgatccagagcccataagcattatccattgggcgcaacaacgcctagcacagggtaatatcgaagaagtggtggatgcatgtatgtgtggcgaccatgatgtaattggtgtatggaaggttgcggacatcgcattcaagtgtaccgcgcaggggtacccagttcagagaacaagtcaagcgcctatgggccgtggccagtggccaccgatctcgggcctcgagtcgtgccccagccaagcagttgaccagctgccatccaaggtcattgacatgccggtcctacaaagaggtggccagtaa

SEQ ID NO: 26504 - DNA, 1822 bp, Oryza sativa
  Clone ID: PAT_MRT4530_31288C.1
ccccgtcccccacccgccccccctccccgccggccgccccctctacgcctcacctcgccgcctcctccccttctccccgccgccgacgaggtccagaccgtggagccggccgcggcggcggcggcggcggcggcggcggtcgccatggatgcgccgcggagggagcggaggcaccaacaccaccaccggaaggcggcggctcaggttcaggctgcacctgctattgccgctgtgggggtgggagcgggagggaatggggcggcggcgcgggcggcgtacggggacgtgttcgggggcccgccgaggttcgccgcgccgttcgggggcgcgccggcggactacgccgaggtgttcgggggcgtggcggccacctgctccatcccgttcctcgacctgccccccgtgcccgccgtgggcgccgactacggcttcttcggccgcgccggggccggggactatggatagtggtatagaagctaatggagaaaaaaggaagaagtccaccacaacctctgcaagtgtcagtctaaggagctctgagagtgatttcacagttgatcagaagcagcacattccagcatatccacctatttctgaaaaagtttctgcaaatgagaatcacaagaactccaatagtatttcaacatccagtaatggaacaccttctcctgattatgcctttctaagggtttctgatgtcaacgtgcaaacacaaacagtaaaaccaccacctcctctgaagcagacatctaaattgcttaagaggagagagattttagcaaaaggagatgtccatcttgaaaatcacagctgccctccagcctcttctgctcatgccccttcaaacaccagcacatctcaggctgaaagaagagacgatactgctttgtttaataatgaggccaatcccagttctgctgcagctgctatgaaggaagcaatggaatatgcagaagctaggttaagagctgcgaaagaactgatggagagaaaaggggacagttttaaacttcgtaagaaaccaagccatcatagaagcacaagatctacagaaataaaggttcctacagagtcagacacattcgatgagaacctctccgtgaagaagtcaacaaaggaggaaatgaactctgaggattcgttgctggacaagcaccagaaggctagtgcagttagaacagatcattgtgatgacagtggaaaaagggcattgtcgctggagaaacctcagcatatgcaaagctgcactgcacccaatcaaacttccagtaaactaggtaagttaggcaactggacatcaggtgatgaattttatgagctgactggagaagatcagaaacagaaaacagatgcagctgtaggggaggaagataagtgtgaggtaacaaatcctgtcaccaagctcagcaaggaacaaaaatgcgaagttactgcagcggactctgatttggaaaggtatgaaaagctgtgggaggttaatgatggcagggatgcaggagtgaaacatgtcaatccgagagaagataatacatctccaatggggaaagatagggtgtctatgattctggaagcttctacagaaaatatagaccatgaaaaaatttataactctcattttgagggtcctaaagttgtggaaacttctaatgaaagccatgatggtgaggatggggctgttgagattccttgtaagagtggaatcactatttcagaaccaaacttgatgaaggacatgcacggttcattcatggaggcttcttcacctggagagtatgtggccgattttggtaaaggcactacagaagaaagtccagtagcatga

SEQ ID NO: 26505 - DNA, 1878 bp, Oryza sativa
  Clone ID: PAT_MRT4530_31289C.1
atgagtcctggtgaatttattgcaaattttctcatcaaatggaatcaggagaactacatcttgcttcgaatccgagtcatagtcgcattcctcatatcgctctacgcattgatgatgctcttctcgggcattttcctcttcgctatgaaaagatccatgttgagcttcctagatgctgtgactgacgccatcctggtgtatgttatgggggtcatgcaagccgcacctttcaagaaccagctgttcccagtctgggcccttatgctggtcagcttccgctctagcatcaattgcctctctagttatggaacgttttttgagctgagaaattcgttgaagcttttagctgtggcataccttaatataacacatgggtccaagttgtggcatgtcccattctggttattttggagtcttctggcactaaattgttgttacaggattctggcacgtcatgtagcatccaaatccttgtggaatggccggagttcagaacttcttcaggagtacatgggtgccaatggtaatgagagcaactttaaccctgaaagatgcaacccggagaccatggaaggatacaagtactttgtctatggagagtcacagaagagcagaatgaatggacacagcctaagtgttaaagacttgaggacaccaattaccttggacaagatttggcaatgtgaatgtgatgatgacatgctgctaagctccatcaaaaggcaggggaaggacctgagcctgtcctttgcattgtctcggttgctccggtgtaggctggaaggagcaaaactgcatgcagacactgtttccatgacccgaaagctgatcagcaagaggatcctcgcagaagatcctgaaaatgaacagctcggtatccgtatcttggagctggatgttgagtttctccgggactccctccacactagttaccctatggtcttctgcagcgggtttctctcactctccttcactatcctggcatgtttggttaagtttctcgtggttctatggctttacaaggacatcagtaagtgtcccaccatgttcatgcgatcatttggattctgctcaaccatgtttaagtgggaaatgactccttttattaaaggaaggaatccaaatgaaagtgtaaaggcaagagtcattcaagcactccgctccatggacctcgagggccatcctctgtcaaaagacctcccctcgccgcgtctcagtgtgagagctgagcgttattggttggcatccgttgcagatgtaccaagatgctcccgtgttattctggtctggcacattgcaacatgcctatgcgagatcaagtttgccaatgacagttttactggttgctgcttaaaatggatgtcgatgttaccatcaactgaggtggatgagaccgatgatgagctcgacaagtcatacgcggtgacatattacttgtcacgttactgtatgcacctgctggtctcaaagcgcaaactgctacccgaagacattttggtgtccaagaagaccctccaagacactgttcagtgtgctcgtgagatgctgaaaggctgcaactcgtttcagagcgtgtacgacaagcttatggaagaaccgcagaaagctcttgttccagacgctcatgacatgaatctgagtggaaacatattgcaacaaggtgctataatggccaatgcactcatcgtcaacgaggaggatgaggcatgtcgctgggagatcctagctgaggtgtgggctcacttgattgtgcacattgctcccagttccagaatagaagctcatgccgagaacctcaagtctggtagcgagttcataaccgtcatctgggctttgttttcccactgtggcatcgagaagagcgaattatggcagtag

SEQ ID NO: 26506 - DNA, 1404 bp, Oryza sativa
  Clone ID: PAT_MRT4530_3128C.1
atggagctcacgcctttgctcgccgtcgtgctcctcctcccgccgccgctcgcggtggcgcacatggcatggacggccgcctcccgccgccgccgcacgcggtgctacctcctggactacgtctgctacaagccggcggatgaccgcacgctgacggcggagctcgccggcgcgattgtccagcgcaacgagcggctcgggatgccggagttccgcttcctcctccgcctcatctcccgcgcgggactcggcgaccggacctacgcgccgcggaacctcctcgacggccgcgaggagctcgccgccgggcagcggcacgcggtcgacgagatggacgcctgcttcgacggcgccgtcccggagctcctcgccaggacggggctccgcgcccgcgacgtcgacgtgctcgtcgtcaacgtcagcggcttcttcccggagccctgcctcgcgtccagggtggtgcgccggtacggcatgcgcgaggacgtcgcggcgtacaacctctccgggatggggtgcagcgccacgctggtcgcggtggacgtcgcccggaacgccatgcgcgcgcggtcgccgcggcccgtggtggcgctggtggtctcgacggagtcgctggcgccgcactggtacgccgggaaggacaggaccatgatgctggcgcagtgcctcttccggtgcggcggggcggccgtgctgctcagcagcgacccggcccaccgcggccgcgccaagatggagctccgccgccttgtgcgctccaccaccgcggccagcgacgacgcctactcctgcatcatgcagcgcgaggacgacgatggcctccgcggggtcagcatcagcaaggccctccccaaggccgcgctccgcgcgttcgccgccaacctgcagcgcctcctgccgcgcgtcctcccggccatggagatcgcccggctcgccgccgacctggcatggcagaatctgttgcagcgccgccgccaccgagggcagaccaagctgaagatcaacctcaaggcaggggtggaccacatctgcctccacgccggcggggtggcggtgatcgacgcggtgaagaagagtttcgggctggaggagcgagacgtcgagccgtcgaggatgacgttgcacaggtgggggaacacgtcggcgagcagcgtgtggtacgtgctgtcgtacatggaggcgaaggggaggttgaggcgaggcgacaaggtgctgatggtgacgttcgggtcggggttcaagtgcaacagctgcgtgtgggaggtggccggcgacatggccgacaagggcgcgtgggccgactgcatcgacgcgtacccaccggagagcaagcccagcccgttcttggagaagttcgcttgggtcaacgacgaagccgccgatgaatcctcctcgccgttctag

SEQ ID NO: 26507 - DNA, 594 bp, Oryza sativa
  Clone ID: PAT_MRT4530_31290C.1
atgacgcgccgggccaaccacaccgcctcgccctccgtgaacgccacgacggcggcggcggcggcggccatgatcaccgccaccccgtccccgccgccgaggctgccgcttcccaaccccggcaatgccgacgccggcgccggggcgtggggcccctacgccagctcgcgcgcgttcttctccaacgtggccaccatcctcatcatcctcgcctgcgtctccctcctcgccttctgcctccacgccgccgcgcggtgcctcatccgctgcctcgcccgccgccgcgactccggggcgccggcgctggcgccggcgctggcgcaggcgcagccgcccaagccgtcttccgacgacggcgccaacacgggtagctcgggggcggccagcgcggcgtcgggggtcgcgatggtcggcgggtgggccgaggcggagtgcgccatctgcctgtcggagctggcggacggcggcggcgagcgcgtccgcgtgctcccggcgtgcgggcacggcttccacggcgcctgcgtggacgggtggctcgcggcgcgcgcttcctgccccacctgccgcgcgccgtcgcgcgccggcgagccctag

SEQ ID NO: 26508 - DNA, 153 bp, Oryza sativa
  Clone ID: PAT_MRT4530_31291C.1
atggcggcggctgagctcgaggacaacgcgagcggcgactggcgaccgagcttggggactgcacgagcggcgacagcgacgaccgttctaggaggctgcgacggcaatggctgtgcttggggaaggaacgtcttcatatgggtggggttataa

SEQ ID NO: 26509 - DNA, 447 bp, Oryza sativa
  Clone ID: PAT_MRT4530_31292C.1
gtgtggtagtgggtatactcgtcctcctcttcgtgctcgtcctcgtcgtcaccatcgagggcgtctgcaagcgccgctcctcctcctgattccgccgcggtcgctagccctaatgcgcgggggcctcctcgtcctgctcctcctcaccgcggccgtcgccggcggcggcggccacgagggctcctcctcctgccccttccacgcccacgacaagccccacgatgatcaccaccacggccacggccacggccacggccacagctgcggcggcggcggggacgactcccaccacgtgcaccatcatcaccatgggcatgggcatggccatgacggcgggatccagcggcggcttctccccgaggagctcgcggaggaggcggatctcgagctcgactccttcggcgatcaccaccaccaccaccaccatcaccatgaacaccaccacca

SEQ ID NO: 26510 - DNA, 1566 bp, Oryza sativa
  Clone ID: PAT_MRT4530_31293C.1
atgagccgcttcgacggccgcgccgcggaccccggctcgtaccgcgaccgccgcagcgaaggggcgttcgggggcgggacgagggcgttcgccccgacgagcaaggcggactccgcggccgcggccgctgacctggatgggctgccgcggttcgagaagaacttctacgtggagtccccctccgtggccggcatgacggaggaggaggtggaggcttaccggcatctccgggagtttgccttggagggctgcgaggaggataatcttgttcgcaagggtcgaactggcggatctggagcataaggaacagctgacacgttttacgctgcttctattgcacgatttgccatggatcctatagattggctaaaagcacctggacaaaatgatcgtcttgaatttgctgatataggtccaggtacaacactcgcttcctctttacccgccgttattcatgttaatgctcagccgattctagcacctggcgatggtccaattgttctggtgttagcccctacacgtgaacttgctgtgcagatacagcaagaggcaactaagtttggcgttgaaattgttatagccacgccaggaagactgattgatatgatagaatcacatcatacaaatttgcggagggtcacttaccttgttttagatgaggcagaccggatgctggatatgggctttgaacctcagattaagaaaattgtttctcagattcgtccagatcgccaaacattatattggagtgctacttggccaaaggaagttgaacagctagcaaggaactttcttttcgacccatacaaggtcataattggttctgaggagttgaaagctaatcatgccatttctcaacatgtggagatattatccgagagtcagaagtacaataagttggttaatctactggaggatataatggatggcagccggatattaatatttatggacacgaagaagggatgtgatcaaatcactagacagcttcggatggatggttggcctgctctgtctatccatggtgacaaaagccaagctgagagggattgggttctttctgaatttaaatcagggaaaagccctatcatgacagcgactgatgtggctgctcgaggcttagatgttaaggatgttaaatatgtcattaactatgactttccgggatcattggaggattatgttcatcgcattggtcgaactggcagagctggagcaaaaggaacagcttacacgtttttcactgctgctaatgccagatttgccaaggatctgatcaacatactagaagaagctggacaaaaggccaccgtgatagatatagagggtatggaggtggccggtcatggagctgattttcatatgttgttattgcagagagcaatgtttggcctttctttgtggatggctatgtgtatttctggctcactgaatcttttaactaatgatcggaccgtcttgaagcagagctacaataaatctggggatgcatttggttcgctaggagggcttctctggtggtccaagagctgtagctgcaaaccgtacagcttggcaatatggtaa

SEQ ID NO: 26511 - DNA, 1221 bp, Oryza sativa
  Clone ID: PAT_MRT4530_31294C.1
atggagttgcaaccaatccttgataagcttgcaaaaaaggtagctggttggaagccaaggatgctatcacacgatggcagattatgcttgatcaaatcaacaatgatggccctccctgtacacacaatgtcagtgattcagctgcctaaatgggcgataaaagaaattgaacgcaaatgcaggggattcctttggaaagggcaagaggaagtgagcggtggacactgcttggtcgcgtggaaaaacgtctgtatgccagtggaaaatggggggctggggatcaagaatttggaatactttggtcatgcattgcggctaaaatggcaggtcaccaagctacagcacaagaacagaccatggtctatggtggactttcaacttggaggggaagtggagaaaattttccaatcaatggctgagttcatcgtcgggaatggacaaaacacaaaattttggacttcaaattggcttgggggaggcagcattgcctggaggtggcccattctatcgacttatgtgggcagatcaaatctgtccgtggcacaagctctaacaggcaacagatgggtgagagatcttcgtggctccctctcaaacgaagccctagcccaatacttcgagctatggagtgagctacagacgatacacctaagtcaagaagaagacagcattagatggaaactaacgccagatggccaattctcaagcacatcagcttatgatctgttcttcaaatcaatggagctgtgcccggtgggagaactaatatggcatgcgaaggcaccatctaaaattcgattcttcatgtggttggccacaaaggggcgctgtctaactgctgataatcttcagaagaggggttggccacactctgactgctgcactctgtgcacacgagaatctgaagattgcgcacatctgttcagtaaatgcgtttatacagtgagagtttggagtttgttgcgcaattggatcaacgttcccttccccattcctgggagaagcgaacttgggctcactgagtggtggatgcaggccaggctgcgttttcggcactgctacagggacaacttcgacagtgtgtgcatgctagtttgctggacagtttggaaagagaggaatgcccgtgtgtttgatcagcggtcgaggatccctgaacagttggccgaagcaatcaaagaagaggttcttctgtggaaggaagcagcttactggggctga

SEQ ID NO: 26512 - DNA, 335 bp, Oryza sativa
  Clone ID: PAT_MRT4530_31295C.1
atggaagcagaactcacaatattagacaccgccacgattgaggccgagtggctttcttgagctcctgatggatttgccggtggttgaaaaaccagtaccagctatcctgataaactgtgataatcaaacattgattattaaggtgaacagttcgaaggacaatatgaagtcatttaggcatttaaaaagaagactgaaatctgtcagcaagcagaaaaactcaggagtgatagcgttagactatgtccagatagctaaaaattggcagaccagtttagggactatcacgtaatgtgatagataatacatcgagggagatggacttaagacccact

SEQ ID NO: 26513 - DNA, 565 bp, Oryza sativa
  Clone ID: PAT_MRT4530_31296C.1
gcgcggggccattccggccgacctccttcctcctatatattctagggttttctgtcccggcgatccgactgttctctcgcccatcgccgccgcctccgccgcctctgccccagctctgaaagaggggggcatatggcttccttatttcgacgatcttcgatcacccaccacgccacctcagctgtggcatctgcagcaggtgctcaccgtgccttctctccagcaatgggaggtggcattcgacctgatcttacaaacactgagattgacaagcttctgctccagaaatctgcattcaacaaggcaggcatattttcagcgagaggtaagatcacgcatgccaatgttgagaaagggctcgtgctgtctgaatgcctaaagattctgcgccgggagggtgaacagcagagttgggctaagctgtggtgcaagcagattgcagccgtggtgatttttggggtgctgtttaggtcgggagaaccggagaagcatgaaccaaatgctagtagttaataattaattctaagaggcttataactaagttacaaacatgtgactgtggact

SEQ ID NO: 26514 - DNA, 589 bp, Oryza sativa
  Clone ID: PAT_MRT4530_31297C.1
cccgggctgcaggaattcggcaccacggggagttagagcagctaaaggccatctgactcccaaagaatagaactgcaacgtaccatgaactacccctgattaccagaaacagagggctgataaaacatcaccaggcggttcctcacaggggggttgtgcagtctacaagcaaattgtacataagaggaattgaaagagatgtatcatcatcaacaacagctccaaagccacaaccaactcttgccatctaggcagagtttcccttcagaacggcacttgcttatgcaaggaggaagtgtttcaggggaatcagggcttgttctctcaactgatgcaaagcctaggttaaaatggacccctgagctacatgagcgatttgtggaggcagtaaatcaacttggtggtccagaaaaagctaccccaaaaacaatcatgaggctcatgggcgtccctggattaacactgtatcatctcaagagtcatcttcagaaatacagactaagcaaaaatctccacgctcaagccaatgcgggaaatgtgaaaaatgcgctagtctgcaccacagcaacagagaaaccatctgaagcaa

SEQ ID NO: 26515 - DNA, 1737 bp, Oryza sativa
  Clone ID: PAT_MRT4530_31298C.1
atggagatacagtcatcagggaggccaatcgatgtgctcatggagaaggttttgtcagtgaacatcctcccctcctcgtcgccctaatccccattccaaaacgaatccccaatctcgtccgcgccgccgatcgccgtggcctcccccgtgcgccgcccgccgcttcgcatcccggtgagaagaaaagagaggaggggaaatggagatacagtcatcagggaggccaatcgatgtgctcatggagaaggttttgtcagtgaacatcctctcctcggactacttcaaggagctctacaggctgaagacttaccacgaggtcattgatgagatctacaatcaggttgaccacgtagagccatggatgaccggcaactgccgtgggccctgcagcgccttctgacacctttacaagttcttcacaatgaagctcacgggttggcagatgcacggcctcttgaagcaccctgactcgccctacatcagagctgttggatttctttacctgcgatatgttgcggaaccaaagacgttgtggagttggtatgaaccctacattaccgatgatgactcttccgatcttgagacaggtcactggccatcttgagaagatgaagctcccaacaaagcagtcaggaataacaggggactctagtcgccttggttcagatgatactgcccgacggcctccttcagtaaaggcttctctgtcggtctcctttggtcagcgtgctccacaccgtgcatccacaagggactcatcccctgtccggaagacattgccttcagcaagggatagagaaaggagttctgatggtgagtgtgcaagatcttcacccaggaggcgacgaagtcggagccatgaacgtgatcatgattctgagcgtgatcgttcggatcgtgaccgtggtaggcacaaggatagggagcatgatcgccatgcccgtgaggacagagaccgtgattaccgtcgttcaagctattcaagtaggaatgttgacagacaaggccgtgaaaggagggacagggattctgatcgacatggacgttcgagtgcccgcaggagcaggagcaggagtccaaaccgtggcagaaccgaaggtgaaaatcaccgctctagcccatttggtagaccaccagagccatccaacttggcaaaattgaaggatttatatggtgacgcgacaaacacaaaggatgatacaggtgatgataaagctcgcagggattctggaactgaagaggtaatcagattgggacgtgcaaggtggaggtgaatgccaaagggcacatgaaagacatccccccctatttgttcttgttaacagcaatataacagccagagatatttgctatccccagtgctgcattcccagggacactcagaaaaaggaatgagctttcatttgttaaaattcgattgggccattgtatcttaggtagcatgtgcgcaacagaatgcatttgttgaaactcaattgggccaatgtatcttaggtagcatgtgcgcaacccaatacaatttgttaagcaggcaaacagctatgcaaattgctagtactaggataaagagattaatttggatagccaagttctgtacctggtatgctgttcgcgttatatgatacttttcccgtgttctgcccaaaaaaaaaaaaaaaaaaaaaacaaaaaagaaaggggggccgcataacaaaggagcatcctatgcgtacgtgctgcgtgcatctcgtcatagct

SEQ ID NO: 26516 - DNA, 1170 bp, Oryza sativa
  Clone ID: PAT_MRT4530_31299C.1
atggaggccgcggcggcggctgcggcggaggaggaggcggggaatcccgacggcgtggagggcgcggccgtcgccgccgttgcgcccgaagccgccgccgaaggtccgagtgagccgaacgcaggtgaagcttcgagggagccggacgcgggtcaagcttcgagggagccgggcgccgctggaccttcgagggagccggacgttgctggaccatcgagggagccggacgccgctggaccttcaagggagccgggcgccgctggaggttcgagggagccgggtgcggccggaggttcgaggcagccggtccccgacgcggcgcagttggcggtggtgccgtacgttgaggacatcgaccggtacctccggtctctcgaggctgagcaaacaaggaggccgatgattaactatgttcaggagatacaaggaggcatcatcaatatggatgtgagggggatcctagtggactggatggcagatgtggcttatgtgttcaatcttcaggaagagacacttcaccatgcggtttcatatgttgaccgcttcctttcaaaaattgcctttcctggggacaagctgaaactgcttggtaccactgcactgtttgttgcttcgaagtatgaagaaattcaccctcctcatgtaaggaacttcagtgccgttactgttaacacttacaccacgcagcaggtgtctaagatggagttggacatactgagatttctgaactttgatgtggggagtcccactgtaataacttttctacggaaattcttaacttcttgttgtggaggtaataattcaagtaacagaaaactggagctgatgtgtaactatcttgcggaattgagcttgttagacgattactacataaggtttcttccatcgattgttgctgctgcctgcctgtttgttggcaagttcacactcaacccgaacactcgtccttggtttgggtccgtgtcgacaattactccaccagaaaacatcaagggcggtgtggaaaaatacatggttagtagaatatacatgtgcgtctttgatcttccgatgctctttttgatggagacatggagttcctctggggtgagcaatcacaccaaacttcaactcaagcagaatatgatggaactacctatagaaaacccaacttttatatctgcaagctga

SEQ ID NO: 26517 - DNA, 501 bp, Oryza sativa
  Clone ID: PAT_MRT4530_3129C.1
tggccaaaccatgtgaaatgcctgttgagactctgtcgtccctgtggacagagtgatcactgtatgactgattctctagtctgactggtctctgggctctcttcccctaagcaactgcttcaagcgatagtctgtgctgagtgaccaccactaactgcatgagaatatagataatacacctagtgatatgagagtaatatagatcacaaggtctgggggttgaatgtgagctgcccttgtgatgattgcttttggtgttgacgctcgattcgcatcaagccacacccttggactcctgctgattatctgaccatctcactacacgaaaatttttagaagtgagcatgaccattatatgtggacagtcaatttcactagcccacatacactgttgagatctgcccattggtactagaggtacaattgtccagtcctggcaacagtataatggtaaagaacagatgcatggaggcccattatgggttaaaaaaaaaaaaaaaa

SEQ ID NO: 26518 - DNA, 456 bp, Oryza sativa
  Clone ID: PAT_MRT4530_312C.1
gcggcgtcgaggacttcgactggagggaggcggagaggatggcgagtgacgacgacgacgacgtgctcgtcgcgcactcggcgccgctcgtgctcggcggcggcctggtggcgtcggagccgaggaaggaggtgaacctctggagccggcgacccatggctcctcccactccgcttcgacttccatagatgacgtcagcgtgcatgagcttttgcatgcgtgttcatcgatctgttcgtccatttctaggcccaaatgcgagcgtattcccattccaatgtaattttttgatttttttttgttcttggagtaatttgtacagtcatatacttcacacgaaactgatcaaaagtacatcgatagttgttttttcttctccttaaattttagatgtgatgcttttgtttagaaaagaagatacaacgaaagagaacaaaataattaaaaaaaggttgt

SEQ ID NO: 26519 - DNA, 450 bp, Oryza sativa
  Clone ID: PAT_MRT4530_31300C.1
gggaaacgaaaggggcccttgttttttttcataattaaactttttggggggggggggtccccttttaacacgtccaatttttttccccctaaaacttatagtggcgaaggggacttttcatgaacgggggaacagcttcttgtagatcataaattggcacattggtttgggaaatgggatccctgggtctgggccccggggcccggggccttcgaaaaaatttttcccacctgcgggttgggggggggctttggcctccccgggccggggggcgtccccaccgggcggtttttggggaccccgtcctgggaagggccctcccctggggtgggccccacccgggtcccccccggggggcccccttggaagggggggaccccccgggcccccccggggggccctctttggggggttggttggggggcatggggggctggttttccccctggg

SEQ ID NO: 26520 - DNA, 885 bp, Oryza sativa
  Clone ID: PAT_MRT4530_31301C.1
atatgtggaagaatattgatattcagattgaagttgactaaaaggaatttagaagagtgtaaggaagactacaaagtgaactacacttttacacctaatgaaaagcttgagatgaattatgtaaatgacaaggcagaagagtttgggcagcacaattttcaggtaaaagaagagccaaaaaatgaaagtagtgatgattatgaaatgaacaatcatcgcaaaacaaagaaagagagatcaaacatgagatctacaaaaagatcaaacaaggaaccatacattaccgattctgatgggaaaacaaatgaaaaggcaatcacaatcgatgatgattccgaagaatcacttgatgattattttgatgaagaatacaatgaaaaggttacacaggagagtacaaagacgaatccttctaaaagaagagttacaagacgttttaaaacatctaacaaggaaccatatattactgattgtgagaagatagcaaatgacaaaccaatttcgcttgatgatgattttgatgaagaatataataaaaatatggtaaggggaaaaggttgtggaaagaagagtacaaatatgggaacttgcacaaaaagtgcaattgaaaatacaattcaagatgatgaagtgcatgacggaaaaattgcttcaggaactgctaaaagaccatcaaggaaatttataatttcagatagtgaggatgagcacagcagtaatacaaaggtgactggggacagcaccagctgtaatagtagtaaggaagatataaacaaaggtcgatgcaattataatattgagaacattaaagttcacatgaatgagcagtccagtcgatgcagatcaacaaggattagaagaccacccacccgatactcatattag

SEQ ID NO: 26521 - DNA, 1160 bp, Oryza sativa
  Clone ID: PAT_MRT4530_31302C.1
ttagggtgaagacctcttcttgcggaggatgacctcggtgtcgaggccgaaggcgtcgaccttggagatcctgaccacgtcggaccggcggaagaggccgacgaggccgtggacgtcgagcagatcgttggccgagtacttgtcgccgcggcggtgcaccgcgacgtgcaggacggcgacgccgccggggcggagcgtgcgctcgatctcggcgacgaagcggcccgggtagagcgcgtggtcgaacacgttggagaactcgaagtcgaaggtgtcgttggcgaacggctgcgcgtggaagtcgcccctgacgacgagcggcggggccggggcgaggtcgatgccgacggcgtcgcggacgccgacgaggcggagcgccgcgacctcctggccgaggcgcgcgccgacgcagagcgcgcgggaggcgttggagaggagcttccccccgccgtcgtcgcggaggagcgcggcgaaggcccgggcgaaggcgtccaccttgcggtgccagtcgcgggtggcccagacgcggcggaggcgcgggtcgagcgtcttgttgagctggtggcggaggtagtcctcgtaggagcggaaccccgcgcggcgcatgcggatgtgcggcgagggcggggtcggggagagcgggacggcgaacgcgacgggaggaggaggaggggaggaggagtaggattttcgccttcgaatctgcgcatgttttacttcctgtctcaaccatcttgaatcgttcttggagcctgatgctgctctgcctcacctttgtagtagtacgcagtcttgcgatgcagtcggcgacggagaaggtgaggaggacgccctcctcctgcctgctgctgtgcatctccgacatctgcaaggatgcggctgggcatgggggcggcggcgccggatgcggccgcggcagcggcgggggcggcggtggccggctggatggaaggggagggggcatggggcccaccgtttggccagcgagggaggaggctgccccccaatgccacgtggccctctcccaagggaagtcaggcccgaggtggggtggcggccactccttcccaaagactagtcggaggaggctgcctcccaatgccacgtggccctccctaaggggagtcgtgcccgaggtgctcacctacccgcatttatag

SEQ ID NO: 26522 - DNA, 1095 bp, Oryza sativa
  Clone ID: PAT_MRT4530_31303C.1
gacaggcacgtagtcgcgctcagtgtgagcagtgggtctctctggccaggtcgtgcgagcttgagcttggacctttccattaacgtgcttgctcctgcgcgttcgcatgttgatgtcctttattttcctgtttcgaaacaccattaagatttcatctgtcatgcgcagcctgcaagtgcaagccacctgcctttgacatggcaagcaggccactacaagatcatcacgattagaatagagtttaattagtcgtgcataaactataacgaatcgcgtaatcgtaaactctaatctctcgcccccgcgcgggcgtggcgacgatggcggcgggacagcaaggtcgtggcgacggggacggcgcggcggtggggcgctcggtgtcggctctccacggctccagcgacgggcgacggcgtcgccagatctggtctcctcgcttggccggggtgaccggcgatgggctcggtcgacaccgccgccgctccgtggacctggcaggggggtggctagcggcggcgatggtggcggatgtagcggcgacgaagttggcgacgacggcggcggactgcggcgcgtgccgcgacgccggccctcgtcaagaacctcgccgccacgagggaggcgcggcgccctcgtcaatgctccggctgtgaacgccgtgcccgtgacgccttcctccatgatgccggcgacccgtgcttcgcgctgcacctccgatccgtgccaccccggttggatctggacggctggcgtctgccggcgctggctagcgacagtggcggctgacaatggcggctggacggtggtggctggatgggggtgtccgtggcggtggcggtggcggtggcgatggtggctgacggtggtggctggcgacggtggtggctgtggtagtggcggtggcggctgtcgacgatggtacggtgcgtcatcgtcggcggcggtatgtggaggcggggaaggggttggattttcagttgatggcttgtcatcagataagcgcgagagatgcagatatatcctcactggtcggtcttgcgtattctggaaggacagcgacattggctcgcgtttgactgctccatcgacaaccat

SEQ ID NO: 26523 - DNA, 866 bp, Oryza sativa
  Clone ID: PAT_MRT4530_31304C.1
tggtatataaacagtacattggaaaaggcaaatctcagtggctcgctctggcgcgggcgtggcgacgatggcggcgggacggcgagatcgtggcgacggggacggcgcggcgatggcgcggagttgggcacggcggtggggcgctacggtgtcggttctccgcggctccagcgacgggcgacggcgtcaccagatctggtctccccgcttggccggggtgatcggcgatgggctcggtcgtcgccggcgctgctccgcggacctggcagggaggtggctagcagcggcgatggtggcggatgtggcggcgacgaagttggcgacgacgacggcggactgcggtgcgtgccgcgacgccggccctcgtcaagaacctcgccaccacgagggaggcgcggcgccctcgtcaatgttcctgctgtgaacgccgtgcccgtgacgccttcctccatgatgccggcgacccgtgcttcgcgctacacctctaatccgtgccaccccggccggatctggacagctggcgtctggcggcgctggctagcgacggtggtagctgacggtggcggctggacggtggtggctggacggggatgtccgtggcggtggcggtggcggtggcgatggtggctgacggtggtggctggcgacggtggtggctgtggcagtggcggtggtggctgtcgacaatggtacggtgcgtcgtcggcggcggcggtatgtgaaggcgggaaaggggtctggcagcggggaaggaggagttcgggtgcgggcgcgccgtggacggcgggaacaactgtgggcggtggccttggccgaatcgctgaaaggacaatgttgttgaccgaagatgatccttcttgtgcgga

SEQ ID NO: 26524 - DNA, 951 bp, Oryza sativa
  Clone ID: PAT_MRT4530_31305C.1
tcaggccgcccctagggggcggaaccctagcctccgccgccgcccctcctcctccctcctccatgcttcaaagccaccggagctcgtcgccggcaaagccgggcgacgcgttgggatggcggcagcggggccatcctcctcggctccacctcgccccggcgcgggcgtggcgacgatggcggcaggacggcgaggtcgtggcgacggggacagcgtggcgacggcgcggcggtggggcgctcggtgtcggctctccgcggctccagcgacgggcaacggcgtcgccagatctggactccccacttggccggggtgaccggcgatgggctcggtcaacgccagcgccgctccgcggacctggcaggggggtggctagcggcggcgatggtggcggatatggaggcgacgaagttggcgacgacggcagcgcactgcggcacgtgccgtgacgccggccctcgtcaagaacctcgccaccacgagggaggcgcgacaccctcgtcaatgctccggctgtgaacgccgtgcccttgacgccttcctccatgatgccaacgacccgcgcttcgcactgcacctccgatccgcgccaccccggtcagatatggacggctggcgtctggcggcgctggctagcgacggtgcggctggacggtggtggctggactgggggtgtccgtggcagtggcgatggcggtggtgatggtggctgacggtggcggctggcgacggtggtggctgtggcagtggcggtggcggctgtcgacgatggtacggtgcgtcgtcgtcgacggcggtatgtggaggcggagaaggggtctagttttctcagtttgggtcctctcttctcttgtttggtgtgttcaacttgtcttgaactacactctcttcttgagtggatctttgtaataattggctgtagttctttttgagcaaagaccggaatattat

SEQ ID NO: 26525 - DNA, 2253 bp, Oryza sativa
  Clone ID: PAT_MRT4530_31306C.1
atggagcctagcttgttgaaggcaaacatcgatctgactcagggaaaagaggacgaacgtacagaatatcggaacatatatgggccaaacatatacggacaaaccaattccctcgtgctgaatgatgatcatctacgtacattgaggaaatttggcacaaagctaaggtgttacggacactactacaaaaactctcatagagatcggctcataggtgccggttcatttaaaaccggcacctatagagcttttctcacctctctacagtggaaaaaatatagaaccggcacttttaaggatactagaaccggcacttttaaggatgctagaaccggcacttatactatagacaatcagcaagatgcaaatacaaaggaaaattcttcatcaatcgatgatttcaagacacttaaggatgacagccagcatgttataaataaaatggaacaatcttcgtcgactgatgaacctgggactgttgttacaccagaagagaaagtatctcctaatgtgcctgtgggacatagtgagattgaaattgctgaagataataaaattgctccacatgttgagaatggctatattgacaagaatgaaagatctcccaatgaagatggcaatagaaatcaaactgctaagcatctgaagaagtgccgcacatatctactcctccttgcgattcttgcagtatctctgacataccaatcaggtctgaatccaccaggcggcttctggacaagacacgaggattatcattcatctggtgatcacatccttgaggacactcaccaccctcgctatattgcattcttctatctaaatgcaattgcctttgttgcatccgttgtcatgatcattatgctcctgaacagaagaatggccaacaaggttataaaacggcgtgcactgcagatagcaatgatagtgatcctcctgtccttaacaggggcttatgttatgggaagctgtaggaagacaaagaattcagtttatatctcagtgatggtactcctcgtgcttgcttatgttggtattcatgttttgatagcaattcatgtaatcccagaaggttggaaaaggcaggtggcagaaaagctaaaccgcctctcgtgcagacatttgtggtcgcctctccatggcagcaaccagacagggcatggcaatgagaaggattgggagcgaaggcgcaatctactattgattctttctattctcgctgcgactgtcacataccaagctggcatgaaccctccaggaagtgtatggtctgatgacaaggatatcaaccgcacccttacaggcaacccagtccttcaggagaacaatttaagacgctataatgtgttctactactcaaattcagtctcattcgtgtcatctgttgtcatcacaatactactcgtgaacaagggatcctgtgagcatggtatgaagttctatgcattgcgagtgtgtttggcagcaggattggttggcctcttgattgcttatgctgcaggaagctgcaggaaagcaaaacaatctatttatctcatcatcgttgctgttgcagttctgatctcccttatgattcaagtcttcattatgtcttcaacatatgataaactaggaaagccattgtgcaagtgtatggaaagtttgcttgagtggatttttcagactaaggaggttaggcaagatattggttctgagatccaaggaagtccagatcctggtgacaaaagtgaaagaaaaagacacaagtatctgatgttgctttcaattttggcggcctccatcacataccaagctggtctgaacccacctggtggcttctggtcggatgacagttcagatcccccaaaacacaaggctggcgacccagtccttcataatattcatccccatcgctacaaagcattcttctgcttcaatgcattctccttcatgtcatccattgttgtgatcatgcttctgctgagcaaatctgtcagggagaagaatgtaccacttggggtattgcacttgatcatgatactagatttgctggctctcatgacggctttcgctgcgggaagctgcaggaaattcaggacctcagtttatgtctatggtctagtaatcggtgtcacaatataccttctgttggtgaccattttagcaagtagcatcgcgaaatgtctgagatcaaggaagataagtaagaattcctatgagaagcatcatgaacatccttcaagagtaaacacactgccacttaaacaacaagtttga

SEQ ID NO: 26526 - DNA, 897 bp, Oryza sativa
  Clone ID: PAT_MRT4530_31307C.1
atggctctgcaaggctttcgcccacgattcccagtccaaacccacaccaccaattcgcacaagaaggatcgtcgtcgatcaacaacattgtcccttcagcgatttggccaaggccaccacccacaatacccctttcccgcctccacataccgccgccgatgacgacgcaccgtaccatcgtcgacagccgccaccgccactgtcacagccaccaccatcgccagccgccacctttagccaccatcgccaccggcaccgccaccggcacagacacccccgtccagccaccaccgtccagccgccaccgtcagccgccaccgtcgctagccagcgccgccatacgccagccgtccagatccggccggattggcgtggatcggaggtgcagcgcgaagcgtgggtcgccggcatcatggaggaaggcgacacgggcacggcgttcacagccggagcattgacgagggcgccgcgcctccctcgcggcggcgaggttcttgacgagggccggcgtcgcggcacgcgccgcagtccgccgccgtcgtcgccaacttcgtcgccgccacatctgccaccatcatcgccgctagccaccccccttgccaggtccgcggagcggcgccggcgtcgaccgagcccgtcgccgatcaccccggccaagcggggagaccagatctggcagcgccgtcgcccgtcgctggagccgcggagagccgacaccgtggagcgccccaccgccgcgcccaacgccacgccgtcgccgtgccgtccccgtcgccacgacctcgccgtcccgccgccctcgtcgctaggcccgcgccggggcgagcggaccatcttcttcaccgctgctgttgtccagactttcccgcgcctcgttcaagcttcggtgagcatcgt

SEQ ID NO: 26527 - DNA, 186 bp, Oryza sativa
  Clone ID: PAT_MRT4530_31308C.1
gcggagtgggcggcggcgaagaaggggcccacagccaccagcgcttgggacggcggtgagggcgaagtgggaggcggcgaaagggctcccgcagccacggcgctcaggacggtggtgagggcggagtgggcggcggcgaatagggcgctcacagccaccggcgctcaggacggcaatgagggcgga

SEQ ID NO: 26528 - DNA, 788 bp, Oryza sativa
  Clone ID: PAT_MRT4530_31309C.1
ctcgccccggcgcgggcgtggcgacgatggcggcgggacggcgaggtcatggcgacggggacggtgcggcgttgggcgcggcggtggggcgctcggtgtcggctctctgcggctccagcgacgggcgacggcgtcgccagatctggtctccccgcttggccggggtgaacggcgatgggctcggtcgacgccggcgccgctccgcagacctggcaggggggtggctagcggcggcgatggtggcggatgtggcggcgacgaagttggcgacgacggcggcggactgcggcgcgtgccgcgacgccagccctcgtcaagaacctcgccgccacgagggaggcgcggcgccctcgtcaatgctccggctgtgaacaccgtgcccgtgatgccttcctccatgatgccggcgacccgcgcttcgcgctgcacctccgatccgcaccaccccggtcggatctggacggctggcgtctggcggcgctggctagcgacggtggcggctgacggtggcggctggacaggggtgtccgtggcggtggcgatggtggctgacggtggcggctggcgacggtggtggctgtggcagtggcggtggcggctgtcgacgatggtacggtgcatcgtcgtcggcggcggtatgtggaggcggggaaggggtctggcggcggggaaggaggagtccgggtgcgggcgcgccatcgatggtgggaacaattgtgggctgtggcctttgccgaatcgaagcccaaactgaaaggattactaaccctcccaccacccaccatttc

SEQ ID NO: 26529 - DNA, 275 bp, Oryza sativa
  Clone ID: PAT_MRT4530_3130C.1
gggccgggaataccccgtcgacccacgcgtccgaagtttttctatcacccgcttctaccggctgacgtcgtggagcctctcgccttcctcttgttcttgttggggagcgaggagcgagttacaggcgcttggtcgggcgagtagcgagctgggcacgatggctgtggcttcttctgccttttcacttctacaccttccttaggactggctcttctgctgccgcttctgggccgatgccgtcgcgatagatggtagaggtgttctcctctctgatt

SEQ ID NO: 26530 - DNA, 3010 bp, Oryza sativa
  Clone ID: PAT_MRT4530_31310C.1
cgcccatgcgaaggtggtggggtaaaggtccgcggctccggcgacgggcaggcgccagatccggtcgccccgcttggccgaggcgaccggcgacgggctcggtcgatgccggcgccgctccacggacctggcaggggggtggctggcggcggcgatggtggcggatgtagcggcgacgaagttggcgacgaaggcggcggactacggcgcgtgccgcgacgccggccctcgtcaagaaccttgccgccatgagggaggcgcggcgcccgtcaattgtacgccgtgcccgtgacgccttcctccatggcgccggcgacccgcactgtgcgctgcaccttcaggtccgcgccacccaggccggtctggacggttggcggctggcgatggtggaggctgacggtggcgactggacggtggtggctgatggtggcggctggacgggggcggcggtggcggtggcggtggtggtggcggtggcgatggcgatggtggctggcggtggcggctggcgacggtggtggctgtggcgctggcggtggcggctgtcgacggtggtgcaaggccatcatccggggctgacgcatgcgacattagtcgattccggaagaagtcgattccgacgacggagcagaagaagtcgattccggcggacggagcagaagaagtctgcggcaccttgcgaatcatctttggcataagaagtaactatatgcagtactactcatttgcagataacatggcacctagcaatttgattactgcattaacaccaaagaacgataggtggagaatcaaagtaaaagttattaggctatgggatgcggttaatcctacaatggttgatgagttctatggtatacagatgattgtactagatgcagagggcaactcaatacatgtctctatctcaaagcaattggcgaaccacttcaggccaaaaattaagattaactcaatatatacttttaaaaatttcaaagttatggaacatgataaataccgtgtcctaaaaaacaatctgaaaatccttttttatcatgataccatagtaaaagagacctgtttgtatttagatgtgattggcttacttagcgggatgaagccgatcgagcaaagaatgctaggaaaaaacacaagcagggagagggtttgcaacatgcgtgaaattgaactccttttattagagggagaaaaagttaaaattactctatggggagatattttagcaaatatggttgacgacgatttgcttgggaagcaaactgtgttcatcgccactggacttctggttaaagaatatgaaaaattattatcatttggagtaacaagttcaacagaagtttttttggatatggaaattcctgcaagcatggaaatattgagcaggcataatgctgaaaaggttttgcccacaatgattgaagtggacgcaagcactcaaggaaccattgaagagcaaatgttctacaatagaaagacattgaaagaaataacagaattgcgatatagtaaaaccacggtattttacccattaacggcacattgtaccaggtatgtaataaaccttgagataagtgaccacactactaggacgacatgtacaatatttaatgaggaagcagaaagaatatttggtcataagtctgtgtccaccatgctggaggaacagaatggacaaattgatatgattcctgatacaatacgtcagatatgtggaagaatattgatattcagattgaagttgactaaaaggaatttagaagagtgtaaggaagactacaaagtgaactacacttttacacctaatgaaaagcttgagatgaattatgtaaatgacaaggcagaagagtttgggcagcacaattttcaggtaaaagaagagccaaaaaatgaaagtagtgatgattatgaaatgaacaatcatcgcaaaacaaagaaagagagatcaaacatgagatctacaaaaagatcaaacaaggaaccatacattaccgattctgatgggaaaacaaatgaaaaggcaatcacaatcgatgatgattccgaagaatcacttgatgattattttgatgaagaatacaataaaaaggttacccaggagagtacaaagacaaatccttctaaaagaagagttacaagacgctttaaaatagctaacaagtcaatgttgaagtgcaatgatgattatggcttcactgatttgcaaaaatcagaagatgagtttgggcagcacaattttcagataaaagaagagccaaaaaatgaaagtagtgatgattatgaaatgaacaatcatcgcaaaacaaagaaagagagatcaaacatgagatgtacaaaaagatcaaacaaggaaccatacattaccgattttgatgggaaaacaaatgaaaaggcaattacaatcgatgatgattgtgaagaatcacttgatgattattttgatgaagaatacaatgaaaaggttacacaggagagtacaaagacgaatccttctaaaagaagagttacaagatgttttaaaacatctaacaaggctaagaaaggaaaatgttctgaaatgaaaactcagagaaataaggaaccatatactactgattgtgagaagatagcaaatgacaaaccaatttcgcttgatgatgattttgatgaagaatataataaaaatatggtaaggggaaaaggttgtggaaagaagagtacaaatatgggaacttgcacaaaaagtgcaattgaaaatacaattcaagatgatgaagtgcatgacggaaaaattgcttcaggaactgctaaaagaccatcaaggaaatttataatttcagatagtgaggatgagcacagcagtaatacaaaggtgactggggacagcaccagctgtaatagtagtaaggaagatataaacaaaggtcgatgcaattataatattgagaacattaaagttcacatgaatgagcagtccagtcgatgcagatcaacaaggattagaagaccacccacccgatactcatattag

SEQ ID NO: 26531 - DNA, 311 bp, Oryza sativa
  Clone ID: PAT_MRT4530_31311C.1
atgcagctcaacccgaaagcaagaactcgtcgaaataaaactaaagcaaaaagggtggcgatgcaccgaaattgtattgaacgtgactctatccatgcgtggcaatcatcttgaagcatatcaactcaacccgatgatgtacactgagtcgtattcttggaatcggctgtccgactcgaactctgccgatcttgaccgtagccgattcggattgcagccgattcttgctctgtttccacaaggatcttcgtcttcgattccgcttcgatctaatcttcttttccgatgctgatattaccaaatttggttgt

SEQ ID NO: 26532 - DNA, 366 bp, Oryza sativa
  Clone ID: PAT_MRT4530_31312C.1
caaggcaaacgatatccaaattgctacataactacaagcgctttttgcttggccagaccaatgctgaccttgtcgcatataatgggggcagataaactggacttgttcataacagttgtctacaagctaatgcacgatctctgatgaaagattgacccacacaggattctttatcagcggacgagtgggctcagccctggacacaaaggctgtgggggcgatctgccaaatgatctacttcaccatacctggaaagctttactaagattcggccactctgtgcgattggatgcgaaacatgggaaccgtacttcaaataggctctgatgctgctggagtggaagagtgaagaccgcttgcccggga

SEQ ID NO: 26533 - DNA, 426 bp, Oryza sativa
  Clone ID: PAT_MRT4530_31313C.1
ggggccaaaaaaatccccaaaacccaaaaagccccaactttagaaaccaaacaaaaatggaaaaacaaaatgcctgcgcccccttcccggtcaaaaaacaaacccgggggggacaaaaaatgccccggaactgcaaaccggcgaaacgcaaggtacccaagttcccccatcaaggcccgaccccaaaagagccctcccccccccaagggaataggggcccaccgggcatttaaagaaccacaacccaacccccattataacccggcgcgagggactggaaaaccctttcccagggcctcttggttttcaaggggcccctgggggccttaccaaggaccctattattgggcccaggaatctgggggttaaactcaacccccccctttttaccaaatgagggaaaccgattctcaaactctaaaaaca

SEQ ID NO: 26534 - DNA, 326 bp, Oryza sativa
  Clone ID: PAT_MRT4530_31314C.1
atgcagctcaacccgaaagcaagaactcgtcgaaataaaactaaagcaaaaagggtagcgatgcgccgaaattgtattgaatgtgactctatccatgcgtggcaatcatcttgaagcatatcaactcaacccgatgatgtacaccgagtcgtattcttggaatcggctgtatcggctagccctgtctgattcgaactctgccgatcttgaccatagccgattcagattgcagccgactcttgctctgtttccgcaacgatcttcgtcttcgattccgcttcgatctaatcttcttttccgatgctaatattactaaatttggtcgt

SEQ ID NO: 26535 - DNA, 573 bp, Oryza sativa
  Clone ID: PAT_MRT4530_31315C.1
atggtgaccacccacagcatcctcctttggttagctctcttcattctcctcccagctgctcactcatccctcgcggctagtgagcttcgggctggtccgacgcgagcttctccggtggaaatcgagcgatgcgacagcgggtcgaagcggcaacaaactcagcaccgtgtgcgcgtggatggccatgagctcggggcggatctggcgacatcagcacctcctcctcgccagcatgggaaaggagctcaatgcaaagctggcggcgtcgacagcgatggtgcaggcgacgagctcagggcagatctagcagctcagcatcgatggtgcctcctcctcgccggcgggggagactggagacgggttctgcacctgccgctaccaacgtcgcttcctcgccagtgctggcgttgccctgtcgtcctcatcgatgccggcaagcccctcccctctccggcagtgtcttcctctctctccccccactcttcgagttccactctctgcgcgcttttttctgacaaaactgatgagactctttgtacctggagaggacgcgactatgtgagaaccccatga

SEQ ID NO: 26536 - DNA, 2930 bp, Oryza sativa
  unsure (1)..(2930): unsure at all n locations
  Clone ID: PAT_MRT4530_31316C.1
atnagngcgaacagcagaactgttcttcattacatcgagcaaaatgtgagttcagtcactgaacactagacaaccccatataaaaattaaaaataaaagtagtaccatctttctataaaaagaagggtactaataacaaaattactaggtgtaacagtagtacaatctttctataaaaataagggggaaaggctggtatgatttacaatattctaatggcaacaaaaaaaaattctttagatccaatgatatgcacaaatttcaggtagcgtttgcaactcaatgaatgtaatatcccttgtcatcatcatctcttctggaagttgaacttcatgatagcgaagccaaacaaggaagcgaagaggaaagcgaaggcagcgaccacggtggccacccagcccaaccagctgtgcttgaagccgaagtagttctccacaaacaccttcacaggggtgccgtcttccatcggcgtctcgatgtcaccgaactgggagacgacgaggccgtacagcgtccacgcgacggggcacgcccagcaataccatctccaccagattgggactctaggtcgggggatgacgaagccggagaagagattccagatggcgtagaacgccgatgagacgatcgaggcaatgtggtagttcggtgtcaggccgaccgccatcatgccgtagaatgtgaagtagaggagcgtgaagaccatgaagaagaggtaccagaagaacttggcagccgtccactcgaacccaatcatcgcatacactatgatcccgtatacagtagcctgaaccagtgtgtatgggatctcaatgacaacctggccaaatgcatatggaaacgccgagtacatgccggcagccctttcacggtaaaagactgtccgctccacggccaccactggctgaacagatgtacagttcatgacaccgatgaacagcactgctgcatacattgaccccatggcattgaacaagtcttgtgacttcgtcactttgccgccaaggtcccagaagatggtaccaaagagaagagcaatgacagtagtgaaaaagaacctaacggcattgtaaggagggttcctccagtatgacaggttttgcttccacaggcaagccatgcattgtgttaaagaagactgagaatattgggtagggaaatacaggtcacttgaatcgggggctggttggctcaggtcctttatcaaggccttgttcctctggtaaagttcagacttcttgtatatatcactaaaatcaacaccaagtgcctgctcttgaccaattgttgtcacctccaacatccatgttgctgggttatagccatctttgattttgctgacccctgggatactctcaaaatacttgatcagctccgaagaatgatggcctagtggaccagcatagatctcttcaccacctcgcttcatcaggaaaagctcatcaaatgcttcaaatatgtcaatgctaggctgatgaattgtgcacaccacagttctgccagtattaacagtgttcctcacattcactccaggaagcccaaccaaagcatctctcagtgacttgagctccacaagctccatcacctcctcaatgaacatctttctagtgttggaatctacatcctcaggaagacggagccatgctgagaaaagtagcgactcatagactgtgacctgcggtgagtggatatcgttctgctcacagtatccagacacacgtgcaaaagtctcttgtttctttggatatcctgaaatgttgatgcttccttcaatgtacccacctgtctttctcccagccaatacatccatcagtgttgtcttgccagcaccactgacacccattagtgcagtcaacacccctggcctgaatgaaccactaacacctttgaggagctccaaccggtcatcagctacaccttgtgctttcatttcctgtggcatgtcaacagaatatctgacattgtcaaagctgagtgaaagcggagtaaatgggagaaccatccccctttgagtaacctcagtatcatcatcaacaattgttgaatcattttcagtgccgtttcccattggcctacgcgtacttccagatgacaagtgaacgtcacccacaatctcaccattcagattggcacgcttctctttcagttcctcttctgatactgactgacgggaatttccatatggcctgaggtatgtaagggcaagggtgaagagagcattgaaaaggatggtgaagccgatcattgcaccaaacccaatccaataccacctggcttcagggaatactccacgggacttgaggacttgcacaccaagggtctcattggaggcagagctattcacaattttgttccagctgtgccccatgagttcattaactgagatggcattctgggcgtacatcatcggggatatccagtagccccaaatccaccatttcttcacttgctctcttgctagaatgaatccacccaataccataaaaattagcagcatgaatgatgcaaagacatttgcaacaatcatgttcctcgctgccccaccaatgaatcggaaaagtgatcccgccatctgattgattgctaacatgagcaaatactgcttgaagaagctgcccacgtttgagtcaaacccaatgacgtagtatgttaagaacacatacccaccaacctcaataaacgtgattgggatcttgagaatccatgagggtatagtgtacgaccatgcaggataaaaaaggagatccctctgcttgaagaaaacaggcaacttaaagacagtgagcgcaagctctgagaaaccattgaacatgatcataagcacaccaaagaagagtgcgcccatgtagatgcccccgctggtcacagaatcacgtttcattttcgtacggaagaagagtgtcattgcaatgagtgacaccaccatcaac

SEQ ID NO: 26537 - DNA, 4981 bp, Oryza sativa
  Clone ID: PAT_MRT4530_31317C.1
agggacgaacagcagagctgttcttcatttacatcgagcaaaatgtgagttcagtcaactgaacactagacaaccccatataaaaattaaaaataaaagtagtaccatctttctataaaaagaagggtactaataacaaaattactaggtgtaacagtagtacaatctttctataaaaataagggggaaaggctggtatgatttacaatattctaatggcaacaaaaaaaaattctttagatccaatgatatgcacaaatttcaggtagcgtttgcaactcaatgaatgtaatatcccttgttttttttttttttttttttttgaatcaacaaattttctgctttcattaattcgacaaaaatgaaaacattgaaggccatactttacattcatctgcatccgacatttatcagctagagctggtcaagaggcaggaagctcaacaagggttctttttcctagagaatcctactagatgtccgaatttttacatgcttgaaataatgaaatactagaagatgatctctataccatttacaggatagctaatagctattcagtagtacaatagaacgaatgcaaaaaagaatgatcactttctcatctcctctggaagttgaacttcatgatcgcaaaactgaagaggaaggcgaaggtcacggcgaagacgacgtgcaccacggccaccacccacaggaagttatgatggaagccaaagtaatcagtgacaaactgtgcaacagttctggtgtcgccgtcgagcacatgtcggatatcaccaaactgggaaacaactaatccatacaaagtccatgcaacggggcaaatccaacagtaccatctccaccaaacagggactctaggtcgggggatgacgaagccggagaagagattccagatggcgtagaacgccgatgagacgatcgaggcaatgtggtagttcggtgtcaggccgaccgccatcatgccgtagaatgtgaagtagaggagcgtgaagaccatgaagaagaggtaccagaagaacttggcagccgtccactcaaacccaatcatcgcatacactaggaccccatatacaggagcctgaaccatggtgtatgggatctcaatgacaacctggccaaatgcatatggaaacgccgagtacatgccagcagccctttcacggtaaaagactgtccgctccacgaccaccactggctgaacagatgcacagttcatgacaccgatgaacagaactgctgcatacattgaccccatggcattgaacaagtcttgtggtttcttaactctgccgccaaggttccagaagatggtaccaaagagaagagcaatgacagtagtgaaaaagaacctaacggcattgtaaggaggattcctccagtatgacaaattttgcttccacaagcaagccatgcattgtgttaaagaagactgagaatattgggtagggaaatacaggtcacttgaatcgggggctggttggctcaggtcctttatcaaggccttgttcctctggtaaagttcagacttcttgtatatatcactaaaatcaacaccaagtgcctgctcttgaccaattgttgtcacctccaacatccatgttgctgggttatagccatctttgattttgctgacccctgggatactctcaaaatacttgatcagctccgaagaatgatggcctagtggaccagcatagatctcttcaccacctcgcttcatcaggaaaagctcatcaaatgcttcaaatatgtcaatgctaggctgatgaattgtgcacaccacagttctgccagtattaacagtgttcctcactgtcctcatcacaattgcagctgctcgtgcatcaagccctgaggttggctcgtccatgaatataatcgaagggtttgcaacaagctccactgcgattgttagcctctttctttgttcagtggacagaccattcactccaggaagcccaaccaaagcatctctcagtgacttgagctccacaagctccatcacctcctcaatgaacatctttctagtgttggaatctacatcctcaggaagacggagccatgctgagaaaagtagcgactcatagactgtgacctgcggtgagtggatatcgttctgctcacagtatccagacacacgtgcaaaagtctcttgtttctttggatatcctgaaatgttgatgcttccttcaatgtacccacctgtctttctcccagccaatacatccatcagtgttgtcttgccagcaccactgacacccattagtgcagtcaacacccctggcctgaatgaaccactaacacctttgaggagctccaaccggtcatcagctacaccttgtgctttcatttcctgtggcatgtcaacagaatatctgacattgtcaaagctgagtgaaagcggagtaaatgggagaaccatccccctttgagtaacctcagtatcatcatcaacaattgttgaatcattttcagtgccgtttcccattggcctacgcgtacttccagatgacaagtgaacgtcacccacaatctcaccattcagattggcacgcttctctttcagttcctcttctgatactgactgacgggaatttccatatggcctgaggtatgtaagggcaagggtgaagagagcattgaaaaggatggtgaagccgatcattgcaccaaacccaatccaataccacctggcttcagggaatactccacgggacttgaggacttgcacaccaagggtctcattggaggcagagctattcacaattttgttccagctgtgccccatgagttcattaactgagatggcattctgggcgtacatcatcggggatatccagtagccccaaatccaccatttcttcacttgctctcttgctagaatgaatccacccaataccataaaaattagcagcatgaatgatgcaaagacatttgcaacaatcatgttcctcgctgccccaccaatgaatcggaaaagtgatcccgccatctgattgattgctaacatgagcaaatactgcttgaagaagctgcccacgtttgagtcaaacccaatgacgtagtatgttaagaacacatacccaccaacctcaataaacgtgattgggatcttgagaatccatgagggtatagtgtacgaccatgcaggataaaaaaggagatccctctgcttgaagaaaacaggcaacttaaagacagtgagcgcaagctctgagaaaccattgaacatgatcataagcacaccaaagaagagtgcgcccatgtagatgcccccgctggtcacagaatcacgtttcattttcgtacggaagaagagtgtcattgcaatgagtgacaccaccatcaactggaaggttctgaacatgtagacgaaagagttcctcttcatgaggagaatctccctgtcaatatttgccttcagcagctccttgccaggagcaccgtaccttgtggtagccagtgcggcaggatggctcttactcttatcaaacggaacagcaagttcgtttgctatagctctccctgtgtggaacgactggaatgcactcacaaattccttaaccgtcacaaacctgtagggcttgtcatgcctcgcccagtactgcctttgatctttcttagaagtcacttcttgcaagaagtcggcaacacccttcctgtcaggacacttaaaccccatggactcgaagaattcaagcacatcctctcgggggccctggtacacaatctgaccgtctgagaggaggatgatatcatcaaacaagttgtaagtctcaggcgccggctgcagcagggagataacagctgtgccaccgaggatgtggacagtttgcctaagcgaattcactatctggaatgtagtggagctgtcaagcccagttgagatctcgtccatgaagagcgccctggctggcccaaccagcatctcaccagtcgtaacacgctttctttgcccacctgagatgcccctcagcatctcgtccccaaccatcgtgtcagcgcatatctctagtcctaatatcttcagtatatagtcagtgttcacgtttgcctcctgtcctcccattgcagccgccttcatgaatgcatcgatatcggcgtcaggcttaatgttcgctgccttctctcgccttgacagctcagtcaacatatcaaagcgactgccaacaccctggcatcgtgccgagaaggcaagtgtctccctgacggtcatctctccgatgtggaggtcgtgctggctgatgtaagccgccgtcctctccggcacgaattcctccatgccgtgcccgttgtaggtcacttttcctgaagccttgagatctttgccgagccttccggccaacgcgagcagcaaggtggtcttgcctgaccccggtgggcctaacagcagagtcatcctgcggggcttgatgatgccgctgacgtcgtggaggacgggcatggtctgcttccggttgggcagaatgccgagcgcgttgccggcttcctcgagggtgttggtgatggagttgaggacggtggggaggccgctgttgccgacgcggacctccgcctccgcctccaggtgctcgaaccgcacctcgatcgtcggcatgtcgatccccacccggtcgacgcggtccttgagcttgaggaggaacttctcgttgtcctcgtcggcgacgcgcacgaggcgctcgaggagcgcgcggcgctcgcgcgggccgagcccgtgcacgtccacgacgcccttccctcctccgtccccggcgccgtcgtcgccaccgagcggcagggatggggcgcggcgcacgcggtcgtaggtgggcagcttctcgagcgccgcccaccgcagcgcctcctcgtcgtcctcctccctcgacgacctcgagaacacgtcgtcccctctcctccacatcgacccgctgtcccccctcatgctcccccctagccgcatgctcgccaccttctggatctcccccgccgcgtccat

SEQ ID NO: 26538 - DNA, 112 bp, Oryza sativa
  Clone ID: PAT_MRT4530_31318C.1
gtttcatttgaaacggatcatccaaaacatcagcagcaaatctgtggatatgaggcatcgagctaagtacaggaatgagagacgggaacgaattcaggtaggcaccaagtgt

SEQ ID NO: 26539 - DNA, 174 bp, Oryza sativa
  Clone ID: PAT_MRT4530_31319C.1
atggaaactgaccgccgctctgcttgctgccgcgtagggatacttaaaattaggatcaggttgctctaccatcgaaccgtcgccactgtcatcgtggccgtcgccactgtcatcgtcgccacgctgctgccgtcgcccgtcgtcgagatgccaactcggctttctggtggctag

SEQ ID NO: 26540 - DNA, 1812 bp, Oryza sativa
  Clone ID: PAT_MRT4530_3131C.1
atggcttatacaaatgccactgcaagagaaattcccagctctattcaccccttccaggcaacaacaagcaacagtggcagtacatgcaaagaatattgttccgtctccaatttgcgcaaaatatgcagcttagcagatgaaacaacaagctacctctttcttcactgtccttttgcctctggtctatgggcttcactccacatcgatccaggaagttcttcctctagaatcctcctaaatggatgccccggtaacccaattttacataagagaggtctaagacaaggagacccactttctcctatgctatttattctagctatggaaccactgcatctgatcttcaaagcagccgaggaagccttaattctcaagaaaatagatccgagacgacaaagatttcgttgttccttctacgcggacgacgtggctctcttcatccctccagaggcacaggaactaacaactgtaaagaacattctccacacttttgcaaggatcagcggcctccacacaaatccttccaaaacagaggttttcccgatagcttgtgataatctgaatgttgaaagccttctaaattcattcatggggaatttaaaaaccttcccatgcaattatctcggcataccccttcatacgagaaaactgaggaaaatagatctacagcctctagtagataaggtgggtgcaagaataccaggttggaagggaagattctttacttcagcaggaagggaagtgttagtgaaaacaacacttacggcaacaccaatttaccacctcacggtactgccacaaatgaaatgggttttcaagaaaattgatcgtttcagacgtgcctttctttggaagggagaggaccctgaaaatgtgaatgccggtagcagtttaattaattggcaagaggtatgtaaaccaaagaatttgggaggacttggtattttaaacttagaaaaatttgcaagagcattgcgcctccgttggctttggtataattggaaagatgatacaaaaccgagggtgaatatgtcagttccatgtgatgaaactgatagatgcctattcagagctgggacaaaaattgagatcggggatggaagaaaaacctctttctggttagacaattggttggatggccaaacacccaaggatctagctccgacaatttttaggcttgcaaagagaaaaagtaatagtctacatgctgatctgaacaacaatcattggctatctctgttaaatccaatcacttccttggaggaggtaaacgaccttgtccagctggggggaagacttcagaacatatccctacaagatggactggcggatgaaataatttggagatggactgaaaatggggtttactcagaaaagagtgcctatcttgcccagttccagggatcacacacaaacgttttttacgagcctctttggaccacatctgcagaaccaaagcatcgattttttggctgtctatgtaggggggccttcgaggatgccacacatctagcaaaagagtgcccctttacgaacttggtttggaaccatgtcagtagttggcttgacattcaagcaccacaacaacatacagcaccttccattgaagactggtggagcaccctctgcaggatcaagcctaaatcaagaaggaagcacattctgagtgtccttttaacaacatggtggaatatttggctagaacgtaataggaggattttccaaaattcttcaaaaagcgagctgcaggtggccttcctagttaaagagaatatagacctcatcaaccaatccaggctctattgctgctga

SEQ ID NO: 26541 - DNA, 548 bp, Oryza sativa
  Clone ID: PAT_MRT4530_31320C.1
aagtacataaacaagcaatcttcgatgcaattcttgctgaaaacctatcacaaattcaagggactcactcaacccttaaaaaaggtgaagtgagcggtggtggtaagaaaccttaccaacaaaaacacacaggtcgtgcaagacaaggttcgattcgtaaccctcattacgtaggtggtggtatcgcttttggtcctaaaccaaatcgtaattacaaaattaaggtaaataaaaaagtaagttcattagctttcaaatcagcaattacttctaaagttaataacaacgaattcttaggattagttgattcgattaaacaagataaaccaagtacaaaagcaattgctaaattactaaaagaacttaaggttaataaaaaagtattaatcgtagcttttgaaaaaaacgaaaacctagaaaaatctagtgctaacttacctaacgtttcatacaaactatgaaaccaagtatcagtaaaagacttaattgatgctaactgtgtcttagcgcaaaaaagtgcaattaataactgagttgaaaggttgaac

SEQ ID NO: 26542 - DNA, 6921 bp, Oryza sativa
  unsure (1)..(6921): unsure at all n locations
  Clone ID: PAT_MRT4530_31321C.1
ccctcgcctcctttcgctgcgccgcccagctcgccgactcaggcggcggcgcaccgacggcgagctaccgctgaactccctcaatcccacctccgtcgccggcgaagagtctcgagaagggaggaagaagtctggcagaccaagctgttgcctgttgttgttcagagaaaagttttctggtggaggtctgggtgagcttattattctggagatcgcttgtgattgaggtggagaagctaatattggtggaacaatgtcggcgaagtggcgctcgttgcagcatcggcaccggtacacgtacacctcacttgtgttccccaagcagtaccttgaagaactagctcgtgtgccgactgaggtgtcctcgtccagtttcttctcccaattgaacaatttgatctctctcacctccacatatgcgcaagtcattgcagtcaaggaccttgcctcagcatttgtgcagtttctttcaagtccagccatccctgatgatgctgttcttgttgcaacaaaactttatttggagattctcttccttgagaactccctaccactccatcggacaatcatatctgtgcttgccaagtgcaagaaacactgttcattgatcagtggatgctttgctacgctctgtgaggagtatggtggctctggtatcaaggcgaagaaaagatttttggtatctcgagcagcattatcgctgattgggtacccaaagttaggttttttggatgaatcagtcaagaagtgtgcagaggtcatggcactagatgtggttgctgggcttgatggggtgattagtgacatagttgatgggtcccgaccatcgccagttgtgatggagcagtgccaagaggctatgtcttgcatgtactacttgctgcagcgctacccttctaagtttactgaacttgacaaagcatctactgtcttcaagcatgttgttaggacgatactgactgttctcaagtcatcagccttttctagggattgcctggtggcctctggagttagcttttgtgctgcaattcaagttttcatgagtgcccgggatatttgctggttcctttctgaaggtctcttttctatttgcgctgaacaaaaagacatcaaagagtcagctggacatgaggtgctttctgacttcaatttgtgtgaagaaatcagagatatctcaattttgagtagactttgtttgctgagagggattttgactgctattccaaggacagtactcaacatgcgtcagcttcattccaatggatccttatggactatgttgtacaatgggattttacctgagctttgcaagcactgtgagaacccaattgatagccatttcaatttccatgctcttacagtgactcaaatatgtttgcagcagataaaaacttcagttttagctgatttcactgacttctctggagactatgaacctttctcaagagatgtgatcaaccgtatattgagaatcatatggagtaacctagaagatcctttgagccagacagtaaaacaggtgcatctcatatttgatctactattagatattgaatcatgtattccatcaggagatcctgaggaaaacagcaaactgtttctctttaatattgcaagtgatttacttcgcctaggtccgcgatgtaaagggagatatatccctttagcttctttgacaaagcggctgggtgccaaatctcttctaaagttgaaatcaaatctccttttggaaacagcttatgcttacatggatgatgatgtctgttgcgctgcaacatcatttttaaaatgcttcctcgagacattaagagatgaatgctggaaagatgatggtattgagcaagggtatgatgccttcagatttttgtgcttgcctcctttgttgcggggactagtatctggaaattcaaaactacgttctaatctaaatacttatgctctgcctgctgctatcgaagttgatgcagatagcatatttgctatgcttggattcatcaatgttggcccaagcgcaaaggcaatcgaactagatgttgctttgaaaaatgaccagtgtatagctgcattggtttcactgcttaaggtctctcggaaccttgcacttgtggaaggggacattgatttagatcctgatgttttgtctcagcaggtagctaacaagtgtgatgcggttatatctatcagaggaattaatgttacagtgcctgttaaatggtttgttttagcactgacacacaatgaagaaagcctccgaatagatgctgctgaatcactttttctaaatcccaagacatcaagtcttccatccgccttggaactgagcttgcttaaacaagcagtcccattgaatatgcgttgtagctcgacagcatttcaaatgaaatggacaagtttatttagaaagttttttgccagggtgcgaacagcactggacagacaggtaaagcagggtttatggcttccatcttcattgtctggcgacaaagattctaattctgttgatactgtcaaggccaccactatcaagagagctgaagatctcttccaattcatgaagtggcttagctcctttctgtttaattcttgttacccctctggcccttacgaaaggagaacaattgcaatggagcttattcttaccttgctagatgtatggcctatttgtcgctctgaagggaagaatgatctttatccttatagtgacagcataacactgccagattcaacaatttcatttgtagggtctataattgatagctgggacaggctaagggaaaactcttttcgcattctactgcaattcccaacaccactccctggaatttcctcgagtacatccatagacagtgttatcagatgggcaaaaaaacttgtacttagcccacgagtccgggaaagtgatgctgaaaatgattgccttcaatgttacacaaaatccacaaatgatgacacagaactgactagtcaaaacccagttgcacaatatatttcatcacttattcagtggctgtgtgctgttgttgaagagggtgagaaggatctttctgaagcatgcaagaaaagctttgtgcatggagttcttcttaccctgcgctacacatttgatgaattggattggaacactgaggtagtacagtcatgtattgctgaaatgagatgtcttgtagaaaagcttcttcaacttataatgcgtgtgacttcattggccctgtgggtggtttcttctgatgcgtggtacatgccatatgatgtggatgacatgattgatgatgattccttcctctcagatataatagatgaggatcaacctggtaccgcttcagaaatagcagagaccaatgtaaaatcagggcataatggcaaaccagctgagcatgttgttatggttggttgctggcttgctatgaaggaggttagtcttctctttggaactatcatcaggaaaattccattgcctggttgctctcattcaaattcatctcatggtgatttggctgagaatacagaggagacaggcatgactggggacattcttgatgttgaacagttagagaagatgggtaaccattttctgcaggttcttcttaaaatgaagcataatggtgcaattgataagacaagggctggacttactgcactttgcaatcgccttctttgctcaaatgattcaaggctatgtaaaatgacagaatcatggatggagcttctgatggataggacggttgctaaagggcaaactgtggatgatttgctacgaaggagtgcaggaattcctgctgcttttattgccttgttcttggcagagccagaaggaacaccaaagaagctacttccacgagcattagaatggctcatagaatttgccaaaacatctttagctaattttcagaatgattccaaccagaagcttgacacagagaaggattttcttggagaaccatgtgaatcacaatcagaaactactgcaggtgtacattctaatgggaacttatctaaaagccgaaatgagggtgttgttccgactgtgcatgtgtttaatgtgcttagagctgccttcaatgatgcaaatttagcgactgacacttctggtttctgtgctgaggcaacaattgttgctatacatgcattttcatctccttactgggaagtgcgcaacgcagcttgtcttgcgtatactgcattggtgtgccttgttttcttatgtaggtacccagcacttcatcctttccttcttagtgaactgaatgttgcaactggactgctagctgatggaatttcgagcaatttggggtcacagattgcaaaagccatacacccaagcctgtgcccaattcttattctattgtcaaggctcaaaccttcacctataagccgtggcactgatgattccttagatccttttttgcttttgcctttcatccaaagatgcgccacacaaagtaactatcgggttcgtgtccttgcatcaagagccttaattggtttggtgtctaatgagagactgcagcatgttgtcggtgatatactgcataatttaccttgtgcaagccatgaagtgactgctcaccgtgctctgtgtttatcagctgatatgggaaatggaaatttaactctgcccgctaagtctttctcattcaattcaattcatggccttttgctgcagctgtcttctcttctagataacaactttagagctttgacagacagtaccaagaaggatcagattcttagccaactgattgaggctctctcaaaatgctcctggcttggcagtgtcaagttatgtgcatgccccgttgtaagtacatcttacttgcgggtgcttgatctgatgcttgatgttgcaagaacagggaaaagtgggcatactgatgccatccagatcctcctttgggagttgagttatcagtgtttgaacaatgggacttcaactcattatgcattccatgaccctacgcagattgaacttcgccagcaagcagctgcatcatatttcagctgtgttggccttccaaagagacatgatgaaactaacgatgaaaatgttcagttgcaaatacttgatatgacttcaagcataccagagatgcctcgggaggtctccctctatgaactacataaggagattgcatcttgccttgttgatcctgcatatgatgttagaattacagcactgaagaggattcttcagcttgccaaatcagccagatctggtgatagcaaaaagtttttgcaccagtgggcaaagtccaacctgcagcatgttatattaaaacgaatatttgaggaagaacaccccaaatgtctttactataatctaaagatcatcttttcatggaacatggaatgccagttcaacagtgaagaagattccagcacatttttatccttctgggacagattagttcatttaaacagcacagtgtcgcatgcaaaaaccagagaaacaattctatgttgcatgggtatgtgcatgagacagtttgctaaaatgctaaggggattactggattctaaaacacatgagcactctacttcttttgtcagaattgatgaagggaaaaacttgtcaactgccattcttagtgcaagctcttttgtcaatcttgttaagaacctgagtgcaccgtctgaaactgtaaatgctcgaagggctgctgctgaagcaattattgcgtctggtcttctggaagaagccaatttatttgccccatccctgtccaatgcataccttccttcggaacatgatgagaaccatatcgaggaaaaatgctcaaatgctactgtgagtgaacttatcaatctttattcatgcaagatacttgacttatggttcatatgcatccagttgctggaggatgaagatacataccttagacaaaaacttgccaacaatgttcagaaaataattgcaaagggttcagctaataacttgtgtgatgattccacaccacttcaagtggatagagtgattgagttgagcttcgaatacctaacttctttgcttggtcactggctgaaatacactgaatacttgttaaggctagttctggataccgctaacactttgaactcccgtggagatttaatccgtcagatctttgataaagagattgataaccaccatgaggagaagctgttgatatgtcagatctgctgctctagtattcagaagcttttgcagtccaaatatctggtggaaacaggagcagaagttgaactgttcttgcagaactggagggagagctttctgcaccagctcatatcactgaccagcagctttctcgagaaagaagggaaaactgattggattggtggtataggaaaccataaggatgtgttcatatcagtttatgcaaatctgcttggcctatatgcacttgctcagtcacaatctttggaacagctgaaggacagacacacagaatatttgaagaacttttcagaccttgatggggttatcacaccattcctaaaaaatcctttgatctctaacctttattcgttggtaaaagaatcacacgagacgttcaattccccaaagaagcaatgggatcaagtagggagttcagcaactgaaagttttgatccttattttcttatcagatgatattttgtcgtgcccaagtaatttgttgccattgtaattctattatagacgaaatacatttttttcctgatacaaatgtaccagacaggttccttatttgatgcccacaggttccttatttgatggcctggggcctagattttagctagtaaatttttgcagccaccgttgtaaagtttccctcaaatatgaacttcagtttagaatcaaaaaaaaaaaaaaaaaaaaaatattcactggagtcaaacaacaaccaacattatttttttaacacccttattttggtcattaagcaaccaatccccccanaa

SEQ ID NO: 26543 - DNA, 1761 bp, Oryza sativa
  Clone ID: PAT_MRT4530_31322C.1
cacgcgtccgccttagcttattagcttccttccttcactagtgacagttttcctcctacctaatctaagctagcccggtcgtcatcttcttccttcagctcacgctgaccaaacaccatctgttattctgtttgtttgtttttttaaaaaaaagaaaaaaaatctagctaggcgagccgattgaaggagctgagcatgccgagcagcggcggcgccatgcctgcccttccaccaggcttccgcttccaccccaccgacgaggagctcatcgttcactacctcatgaaccaggccgcctccgtcaagtgccccgtgccaatcatcgccgaggtcaacatctacaagtgcaacccatgggaccttcctggtaaggctttgttcggcgagaacgaatggtacttcttcagcccgagggaccgcaagtaccccaacggcgctcgccccaaccgcgccgccggctcggggtactggaaggccaccggcaccgacaagtccatcctctccactccgaccagcgacaacatcggcgtcaagaaggccctcgtcttctacaagggcaagcctcccaagggcgtcaagaccgactggatcatgcacgagtaccgtctcaccggcacatcagctaacagcaccaccaccacaaagcagcgtagagcgtcatccatgaccatgaggctggacgactgggtgctgtgcagaatccacaagaagagcaacgacttcaattcctctgaccaacacgaccaagaacccgaggaatcaaccgtcgaacagcttgaagacatccatgacaacaactcctctgaacaacctccagctccagctgacatgaacaaccaacagtcagatttccagcccatgacggcgatgagcatgagcaagtcatgctccctcaccgatctcctcaacaccatcgactgcgccgcgctctcgcagtttctcctcgacggctcatccgacgccatcgctgagcctcctgctcctcccagccccctaatatacacaacacctcatccaaattaccaaacactaaactataacattaacagcaacagcagcatgccacacgccttcgagtcacgcctagatcatcacgatggttacgttaacaattataatgttaatggcctgaggaggaagagaatgatggcgtgtagtgcaacttcctttgatgatggcagcagcagcaatgactttgtgcatgccgttgtcaagaaaccgcagctgctgccaagtgattcgaggggtagtggttttggaggaggttactgcaaccagcagctttcagagactgcgactggctttcagtttcagaacggcaatctgctgagccatccatttcctctgaacaatcatctgcagatgcagtagtaggcgtctagatcccgtttaccgatcgatctgaagagaggtgaattaatttcaacgaatgaaactccagattcagagaggaagatactgattgttccatttgtgatttattttgaggagttgcatgggcagatagacaaacagacggaattcttgatgtaaccgatgcaaggaaagattcagatttcttcctatggcattaatttgtgagtttttttttgttttcattttcatggccaagaatgtaaattataaatggtaatatcgtgcaagctagtactcaagccaatttatatgataatctttaggcatgttttttaataaaaaaaaaaaaaaaaaacaaaaaaaaaaaaaaaaatttgaaattgattccggggcccttcccatttt

SEQ ID NO: 26544 - DNA, 373 bp, Oryza sativa
  Clone ID: PAT_MRT4530_31323C.1
tttttgttttttttttttttttttttttttttttcttttttttttttttttttactgaatgcgcaaaaatataaatatatatcctaattataaaaaaaaaaagaacaaccttttatgcatggagaaagggttccatttaacgcaaaaaaaaagaaagaaataaaaatggccaggcataaataaaatgcccaataatcgggtgcatgtacaactagagggcgcatggttataaaaaaggcgaaaacaccacatgaaaataacaaaggtttccgtttataaatatgctagggcgctgttgaattaaatgttgggggacggcccaggtggccggcccataaaaagcagaagcatggttgggggcgggggcggatta

SEQ ID NO: 26545 - DNA, 539 bp, Oryza sativa
  unsure (1)..(539): unsure at all n locations
  Clone ID: PAT_MRT4530_31324C.1
atggcggctcggggaagaggcagtgcatgcaacggggcagccgttcttggcgcggcggcggcggtggtgatcgtcgggttcctcgtgatgagcgccgcgccgctcgccgaggcggccaggtacaccgttggcgacagcagcgggtggaggttctacgccgagggctgggccaagggcaagaccttccgcgccggtgacgtgctcggtaatatgcccgcggccgcgcgctctgcatctgttctaatctgcgtgctggtctggtctatcagtattgatcaatttatgtatgcatgtatgtggcattgtgggtggcctgcagagttcaagtacaacgcggtggtgcacgacgtggcggccgtggacctggcggcgtaccggagctgcacggtgccgaagggcgtcaggaagatgcggagcgggcgcgacaaggtgacgctccgcaagggcacgcactacttcatctgcaccgagccggggcactgcaaggccggcatgaagctcgccgtcagggccatctagggcaagctgagctagtccgn

SEQ ID NO: 26546 - DNA, 455 bp, Oryza sativa
  Clone ID: PAT_MRT4530_31325C.1
catcttgttctgggatacctttggaatgggtctattggaagccaaacacatccagaattatgtgctcactctttagacagaagcatctctgtaaccaagttatgccataagcctgtagaggattgcttcaggctacctcttaatgagaaaacatatgtccagtttcaggctcttcagatagaggttaatgatttacaattactggatgtaaacgaggataaatggagctatatttggaactctccgaattatacttcacagaaattttacaaaatgaactttctaggaactacccctcccaggctatacatttggttgtggaaaacaaatgtcatgaaaaccaaaagtttttatacggcttatgtttactgataggtaaacaccaaagacatgtttgatagacgatattgtgcagtggggattgtctgcagtactgcagctgcagtagcagtggc

SEQ ID NO: 26547 - DNA, 297 bp, Oryza sativa
  Clone ID: PAT_MRT4530_31326C.1
acaccaaacagttcatccatccaccattaatttatgaccaagtagtaggcagtattacatggcaccaaaaccgcccaatttttaaaaaaacaaaataaacaaaaaagaaatttaaaaatctaatcgatttacttatgccaattacaccaacaacaaatggaatgcacgttagctctcttctctctctcagccacccaactgatcaggaagtccatacgccatatccttcttcatctctggtgatccaaaaattgaaaaaaaaacatggaggtcatcatcacctgtaatctaatagac

SEQ ID NO: 26548 - DNA, 427 bp, Oryza sativa
  Clone ID: PAT_MRT4530_31327C.1
aagggccctgaaacatttttatttccccatcctttttattcattccccccaaagagacggacccctggaagttttcttgccctcatcaggcaagcagagcccccccccccgggggcaggggaattgttatgaacaagacccttatcaacatccagggctaaaacaaacaaggggatcaaagcaaatcccgaaaaaaaaaacccaggggaaaggccacattttttttttgtccccaacccctccgggtcacccccccgttttggggatttttttttaccctgttctattcgctcagggggccacgatctcgccgtcgtcctttgaccccaggatcaactccgggggcgccgcccccggcggcgtttttttgaacgcgcccccaatggggtttggccggcccagcgcctttagggccaggggccccccc

SEQ ID NO: 26549 - DNA, 291 bp, Oryza sativa
  Clone ID: PAT_MRT4530_31328C.1
atggtctttgctgaggcgccccctgcgcttgttgcggcacaggctcgaattgattgtattgaggagcaaattggggctgagccgatcctccttgctgatactgaacctgtggcgatggaggctgatattggtaattcaaattgcccccttgataattctgaaagtttggctccgatgcatttagcaaaccttgctgctgaatcggctgagcaacctgctgcctcggtggcatctgctgaatcggctgctgctggactgggtgcaggagctgatactggtgctgtcggctga

SEQ ID NO: 26550 - DNA, 3089 bp, Oryza sativa
  Clone ID: PAT_MRT4530_31329C.1
gccaaaattcacaagtctacgaagtgaagcaacagaggaggccgctagccgaaattgggctggattgggccagccccaggttcggccgaacctccctcgcctccgttggatccaggttttggatggacggtggagatgaagccgcaatgacggttggaggtattaccgactattccaaccgtcatagaagcgccgaccaccacgccgccagtctcctccaacaagacgcccgctgcagtgccgaccacccccgccacctcggcccccaccacggcgcccaccgcctcagctccggccactgcggcgcctcctctccgccggtcgaggctcctgtcgctggtgccattgtccaccatcttggggatccctgttgcggcgcacggcgagcagccgccgccactggagctcggacagccctcctcgctcgcctgctccgccgtccacccgcctggtggttcggccgaaccaatcctggcgtcgttggatccaggttttggcgtggacgtccaggattgcatcccaatgacggttggaggacacttcggacaattccccataatataccagaagtatttctgcgccattgctgggaattgtatttctactaatgtcgtgaagaaataccaacagtagccgatgttcaacaaccgatcgctatgtcctggcatttcataatactcccaagcaaagcaatctctgaattcctttaaaagctctatcaactttgttctaaattctgaagacaaattcttaataataaatgtcggcctcggtcgatcacctggacctatgtcaatttcttccaaattatcggccgacatgaaaccccggccttgcttgtcatcgagatcatctactgtgtccttggtgtagacgtttgaaccctgcacgacgccctcaaaataatagcttgggctctctatttttagaaaatctccattccaaacttttccagataagcaatcgatatcatccatctcccaaagagctaaatcggcattgacaacattgactgacctgtcggctggcacaatttcaattttgttgccttcccattgaatcaggcattgatgcatggttgagggaatacaacaattagcatgaatccaatcccttccaagcaacaagctatagcaacccttcccatcgatgacaaaaaatgttgtagggatggttttactgccgactgtcaactccacatttaaaacccctttagtttctgatggattgccaccgaaatctttgagaaccatatttgtcttgctaaggtcttcagcatttctgcccagcttcctgaatgtagcatatggcatcaaattcacagtagccccaccatcaaccatcatgttggacatcggcttcccattgacaaagccgtttatatacaatggtttaagatgtcgattctctgtccccctatggtttctcaaaaaccgcctgctcttcattccagcagaatctgaaaaactcacagctccaatgaggatcaaaaccaccatcgtcttcttcataatacttttcctgctgctgcttgtcatacttccatcggccttcatcggcttcttggagtcatcaaactttatttttcctccctcaatagccgcatggatctgttgtctgaagactttgcaatcattggtagaatgcgacccagagttgtgccacttacaatgcctcctcttgcccaattccttagccgatgggattgtatgactctcctcttttccagaactttttacccatgggcatggtataactttcttgcttctgacccactcggctcttgctacttcagaatcatcatcatcatcgtcggatccatacatgtaaagacaaacgtgattgatctttttgaagctcttcttggcttttgcaaacctttgttcatgtaaggttactttatgttcgtaggttgaaacactgtcctgccctgagaattttgaaaaatctggaactttgaatcggttaggcaatggaaccctctcaaaccactcagggtatggatgccgatataagtttcccgtatcctttggcttgagcccaaactgctctctcatcacatctgcaatcatatcggcccatggtctttgctgaggcgccccctgcgcttgttgcggcacaggctcgaattgattgtattgaggagcaaattggggctgagccgatcctccttgctgatactgaacctgtggcgatggaggctgatattggtaattcaaattgcccccttgataattctgaaagtttggctgtatgttgcgcaccaaatgttcggaaataacttgaggtatcaccaattgatctggttgcacattatgaaccaaattctctgggacaacttgatttgcaacgtgctgcctcggctgattatcggacgtcctcaacccagccgatgcatttagcaaaccttgctgctgaatcggctgagcaacctgctgcctcggtggcatctgctgaatcggctgctgctggactgggtcaacattaggcaacaaccgaggattgattagttgtccttttgtcgatgatggtgcattaggtgcaggagctgatactggtgctgtcggctgagctggtggcgcattgggagcaattggctgaacagtcggctgattattagtgatcaagggccgatagtttgggaaaacaccccctggtaaacaaactggtcctttagcctgatattcagctatcgaaccatcaaccattgacttaaccatatttgacaaggtaataacatctaggctgagatcctcaccttgcaccccctgagaaccatcacctttatctcctgagccatctgcagcacctttaccacctgattcagctgtactagttgggatttgttgtacttctccatccttggaagaacttgtcccaggaacatcagcaactaatttcatcttataccattgagcaattgttcctttacaggtttccatgaatgaattcaagaattggtgttgtgtttgctgcatcatcagatcgagctccttcttctgctcaggtgttagcttgtcagactttcgattcttgggagggagctctttgccagccaaatatggcgatgctggtagtttctcagccat

SEQ ID NO: 26551 - DNA, 265 bp, Oryza sativa
  Clone ID: PAT_MRT4530_3132C.1
atgtcaaagcccaaaacttctaccccgaatctttcagaaccggcccagcccacgagcttaacccaaaaagcccacaacagcaggaaccttctagtattctcccgtccagcgcatctggaccgtccatacgacaaccgacggctggatttccctggaaggcctttatatgcgcttccagacgctactcgaagcaggaaacccaccaccgaattcgtccgtactcctcctcctgcttcccctccggcgacggcggcgcagatctccg

SEQ ID NO: 26552 - DNA, 342 bp, Oryza sativa
  unsure (1)..(342): unsure at all n locations
  Clone ID: PAT_MRT4530_31330C.1
gagcaccganagnggagagagacncgcgagatgtccggcgaggaggaggagacgcggcgactcaagtcgnggagattcttaaggcaagtgctgatgactcgagtngcgataatctggacacaagtacgacagatccagcacatntcgacgngacccgtcgtcgaggtgtcgaggtgttcggaagtcgcaagtnctaacgcctctccttataagagtcgagtanaggctgtanttatagtttctggtgactntctataatatctgtgtattcttagaaagnnatatattaggctattnnttgatctcgtgaggttgtcntanaatcgtcaagtctntgttana

SEQ ID NO: 26553 - DNA, 419 bp, Oryza sativa
  Clone ID: PAT_MRT4530_31331C.1
attcagaagaacatggggggtcatcatttatcccccctagggttataggcccccgggcaaagggaagccccggggggggggcccccccccaggggcatcccccccggtgggtttaggggcccaggggccaggtccggggggcccggggtaacccagccgggggcagacccccccgggcccatgggggggggccccggggcaaaacgccgggggggtcgccgccgcgcgccccaaggcccctttccggggggcggggaacaccccggccagggggggcccggccccgggggggcccagccccctggagatgcccgacagcatgggaacgagcgccccgcacctgcaccagccgttgttgacgggggggagctgccgggagaagttttgccagacttgttcggccggggggctgggcgggc

SEQ ID NO: 26554 - DNA, 639 bp, Oryza sativa
  Clone ID: PAT_MRT4530_31332C.1
aattggaatatgaagcagagagttgcagcagtgttagttggtggtttgaaacttgctagcgttgggtttatttctagtgtgggggctggagcttcctcggatctcctgtatgctgctcgaggtgtgctgaaatcttcagtgaatgcagaagcaggacggaagagatctcctatttggaagtcagcagctgtttatagttgctttcttggaacgtcagcaaacttgcggtatcagatcattgctggtttagtggagcatcggctaggagagagtctagctactagctacaatcagccacttcttgctagtttgttgtcctttgtggcaaggacagtgaactcatactggggaacacagcaatgggttgatcttgcgagatatactggactacaaaaaaccaaggaagttcctcctgttgaggccacagcaccacctgctgaaacgtcacagttagccacaccgcccgctgaaacatcacagttagccacaccacccgctgaaacatcacagttagaggatggtagaacagaagtacaaaatttggatgacaacagcaaccaatcaagtggttgaacctagtgattttgttacttcacaatgccttcaaagtacataacgatatagctaggtttgtatcac

SEQ ID NO: 26555 - DNA, 436 bp, Oryza sativa
  Clone ID: PAT_MRT4530_31333C.1
agctggctcaaactggtcatcgtcagaaatggctctcaagaattttcttgtccttggtgtcttcctggctgccctgctcatgttctccctggatgatgtagctcatgcaagagagctcactgaagccaatgaatctgagggaaagaacgtaaaacctacgggagggccaggggttgaggatcaaaagtggggaggtggatactaccccggtggaggatatggatatggtggtgggtacggtggaggatatggtcgtcctgggtacggtggaggatatggtcatcctgggtatggtggtggctacggcggtggatatggacgtgggtatggtggcgggtatgggggttcgggtggaggatatggcggtggatacggaggtggatacggtggtggtgggggttacggtggaggatatggtggtggtggttggcactaa

SEQ ID NO: 26556 - DNA, 826 bp, Oryza sativa
  Clone ID: PAT_MRT4530_31334C.1
cttactgagatttactgctcactttctgattgctgaaaattcgaagaagtggtaaatttctgttttgctcacagtgaaagcttgggccttccacttcatttcaagatggatttctatggaaatactacagtgaaagattgaacagaagccgattgttgctttctcattttgttctcatgcaaaaccaggtaaaattttgactgctttaccttttccaaataatagtatctcgataatggtatattcataaatatagattttctgtgcatactttatgctataagagacagcatgactagcggtatcttctgaattattcacacacagtggttacttttttttttttttgcttaaatgaatagcatctcaatcgcctagatttgtgcataaaatgctgtttaggaccaactgattgatcaggcaatgctcaattatgtggtttctaagcagtttgatgccatgataaaaaatgtaccataggtttgttacaaatacatgtcgaaacatctaagtaatttctcaactattaaattttgcagatgctaaaccttctcgattgtgtaaaattcgttctatacggagtataacccaccagggttatggaaatcgcggcctgacctagtgaaggaccgtgatgatctctttcaatgattcctccagcactatcagcttttaaagataaaatcagtagtgcctttttagtttcagtagtctctgttttagtaactttttatttcatttataggtttacaacatttcgatctgttttgttggggatatatgtggatgtgtacttttttttctttaaaaaaaaagaattttaggc

SEQ ID NO: 26557 - DNA, 819 bp, Oryza sativa
  unsure (1)..(819): unsure at all n locations
  Clone ID: PAT_MRT4530_31335C.1
gtcgcgcgctcctgctgcgcggacgagggaggagaggctacgcctgncccctggctgcatgcgccgccgttgtgactgaccatggacgagtacaggccgcgacggtcgccggcgagcgagcggttcatcgggatgttcgcgtcgccgtcgtcgtccccgacggagccgtcgttcgtggcaggggatgagctccatgaggacgacttcctgttctcgtcctcccccgccgcgccgccctcgagcgcgcggccgggggaggggcccgggagcccgagccgggtgccgcaggggcaggtcgggctcctcgccgcgttgcacgagggggacaagaggctcctgctccgccgtggcggtgggggaggagggggcgcggccgctgccgccgcggcttccgcggggacgctgctccgtcgcaaggcgaccatcgcggccgccgccgcctcggcgtccggcggcggcggctcgttgtcgccaacccagtccccgacctctgccgcccgggccatcccgatgaccccgaggccgaagagcgccgggccagcggcgccgtaccaccagtcggctccggtgaaggtgcccgtccgcccgccccggaggcaggagatgttcaagtgggacgagctcgacgacgacgacttcctccggaacggcgacgccgccatgctgcccccgcacgagatggtcgcgcgcgcgtccgccggcggggccggcccggccgccccgttctccatgctcgagggcgccggtcgcacgctcaaaggccgtgacctgcggcgggtgcgcgacgccgtgctccggcaaaccggtttcctcgactga

SEQ ID NO: 26558 - DNA, 554 bp, Oryza sativa
  Clone ID: PAT_MRT4530_31336C.1
ccaccgaaaaactgaacaacacatcattttcttatcttattcctatctttggttcccattttgacgccgtctcattttttgatctctaccgcgtactgtaaatcgtgtgtgtgtgtgtgtgtgtgtaatagtgcgtaatacgatgatttggacaggagaagtaaaagtatttgctagtacctgtacttcaaatttcagttttgtttcgtcagggggttggggttgggcttctctttttcatattatgtttttgcagacgtggagtaattcaaacaatggtacgctcgtcaacgctgaaacctgactgcaaaatagtttgattgtcttctgtactgaacttgttccaaatggcaaggagacaacatagttcatcagcagggggaaatcgttttcctttgagtaatgcaggcacatggatttgattatctttttctttaagaaaacattttctagcaggggtcctactatgagagtaatagaagatcctaataaggaaattcaaataatccaccccgccaacacttattttaggccaataatcagacttatgtttt

SEQ ID NO: 26559 - DNA, 440 bp, Oryza sativa
  Clone ID: PAT_MRT4530_31337C.1
atggtggaggcggccaccgtaggcggcggagatctggccggagggagggagggccgcggccccagcggcggcggcgtcggccccagcgatggcggcgtgtcttctccactctccgactcgccactcccagggcagcggtggctccctccgccatctctcttctccctccggcggcggtggtggcgtcggcggtggcggcggcggtggcgttggcggcggccgcggatggatggtgtcggcggcggccacagatggatgacgtggtggcgaccgcggatggatggcgtggcgacgaccgagggcggcggtggcaacggccgagggccgcggtggcgatggccaatggcggatccggcggaaggcgagaaaagttttgtgatgtaggtttgttgttttttgatgattactttgtgattttgtgatgattgtggttgatgttt

SEQ ID NO: 26560 - DNA, 503 bp, Oryza sativa
  Clone ID: PAT_MRT4530_31338C.1
gttctgtgtataatctatgttatatgttgcatctccttgttgtagttgatcatgtctgcaagtgctttaattatttgacctcatggttgttaaggcgttgctttggcgctagggcgtgccgaggggtcaaggcatccctgagccttaacggcttagcgccataacccagataaagagaaagagaggggtgaaggtggcagcaactacacccttttccctgttctctgatccatgtcattgccatcttactcctcagctctggtttccactctcttcttctctcccctgtgccagattcattttgactctagggagcagcgccagatctacccaagaggagtacatacagatagatgcactgctggattcattctgaatctggggagaaaggagcacagatagaggagcagagctagcatgggaagaagagttggcgcgaggaagaagcgatgtgcaggcttgaggaagaagcgacatcggaggtggcgctgtgacaggagaga

SEQ ID NO: 26561 - DNA, 406 bp, Oryza sativa
  unsure (1)..(406): unsure at all n locations
  Clone ID: PAT_MRT4530_31339C.1
tttttggttttttgatttttggtggtttttaatttttttttttttttttttttttttttttttttttttttttcggggaaacaacccgggaaaaaacaagccccattggggaatgcaacgcaaatgcaacggaaggcaaggtgttcttgggggctggggcttttaatcctagggggggctagtttttaaatgcgccccaaaagggggggggaaaaaagaaagggaagcaaaaaaactgtccatgttaatggggggggggncacttccactcttgggtgtcaaacgggtgggaccctttttgggcaacgtaggggattttcccgcctgggaattacacccggcctgccagtccccaagttaaagggccctccctgggggcccaaacccatttcccgggggacccccc

SEQ ID NO: 26562 - DNA, 485 bp, Oryza sativa
  Clone ID: PAT_MRT4530_3133C.1
ttgagagtgtcacaggatgtgaagatcagcaccttaggttgcatgaacttgaagaaaatggaaatctacagatcttctgccaacttgctttggctgatctgaatgaaagatcagaagattatgcggaactccaatcaatcggcgctaagattgtaaagaaacttggagggactcccgcggcaataaaaagtgctgcttatctgttacgagtaagatcattagagtcctggcgaaggtttcttcacggtattaacaatttcactgttgttgatgtgaaggaattgctccgtttgacgaagctgcgcacagtcatcattgaagattgtggcaatgtcgaggaggacgtggtatacgcaatggcagaggtcgtgaagaactcaaaatccttgcgtctgttagaatgttctctgttcaagatgtgccatttacctgacagactttctagtctgatgcaccttcgtcacgtcaagatctcaatgctttaa

SEQ ID NO: 26563 - DNA, 429 bp, Oryza sativa
  Clone ID: PAT_MRT4530_31340C.1
atggagcgccgggtgcggggcaccgagcggcggcaggagcagtgcacggagttcctcgcgcgggcgctcaggagccccgacgtcctcgacaacatcgcgcgccgccacgccgcggcggtcgaacgaaagaagcggcggatgctcgccgccgccgcggacgacgacggcctcaccttcgaggcgctggcgctggccgcggcggccgacaccagccatagcacgggcggcgcggtgaccacggacatgatatggtacgagctgctcggcgaggagcaggcggagatcgacatcgaggtggaccagcttgtcgcctccgcctccgccgccgccgacacggcatcggaggcggagccatgggaggagatgggagaggaggaggtgcaggagctggtgcagcagatcgattgcttggcctcgccgagttcttga

SEQ ID NO: 26564 - DNA, 741 bp, Oryza sativa
  Clone ID: PAT_MRT4530_31341C.1
atggcgatgcaggagaaccgcgagcagatgagtagcgcggttcacatcacctgcactgtagttcacagaataaggttgatctgcaccggcaagatcaacaacccacggagaggtggcctcggcgcggaggcggcgggggcggcggctgagggcggcggaggcgccgtcggcagtggtgctgccgccgcgtcgccgctcggcctagatggtcactggcgacgcatgcacggcggtgctatgcggtggcggaagaaggcggcgacacgaaaggggagaggaggcgcgagcggcaagggcagcgactcgggatggttgctcgggacacgggaagggcgacagcgacgagaatcgagggggagaagggccgacggcggagcgagggtggtggcgcgaggaatcgacgaggaagaccacggcggtgcacaatcgagcgcggcggcggtgaaacagagcaaaaggggaaacgacggcgcacaatcgagcgcggcgacgtcggacagtgacgcggaggcagcggctgagggcggcgggggtggtggcgaagggtggcggagtgacgcggaggcggcggctgagggcggcgggggcggctacctcgacgtcgtccatccttcctgcaccaccaccggcggcgcctccgcctccctcagctgccgcccctgccaccgccaccgccaccaccaccttcgcactgaggccgccgccctcagccgctgccccagcctgccgctgaccgagtag

SEQ ID NO: 26565 - DNA, 438 bp, Oryza sativa
  Clone ID: PAT_MRT4530_31342C.1
atggcgtcgctcctatcacccctccctccgccccaagacgctattgccaacctcgtcacggcgcttgctactgcccatgccgcaacagccactggcaagaccgatgatcttcccgccaccctcactcaagcacaggcggcccaagacgccatcacgctgtcagacaacacaatcaccacgacaccttctccttctaccgtggttgtccagccgggcgtgcgcgatgtggtgcttgccaccacggcaccaacgcctcgtgcccaagacgcagtgccaaccaacgtgacaccagcactacctccgcctcagcgttccaagcgtcaagacgcatgtgtctgttgtcctcgacatgaaaagctcttataccatgcaagcgtattgagagagaaaaggaatggctcaacttatgcacaattggtgcgggctaatttcaattaa

SEQ ID NO: 26566 - DNA, 1900 bp, Oryza sativa
  Clone ID: PAT_MRT4530_31343C.1
gcacgacccgccgctgaggcccccctccaccgctgcggtcgacgccgaccgccccgccggcaccttcgccggtccctgcctgccgctccctagggcctcacagcccaagcgctccgcccgccgctctatacgtggcacccccccgcccctccgcttggccccgcccgccgggcgctcgcttctctccttggctcagcttgacatcgtcggagcagcagaaaagtttgctcgatcgagctagctaactaggtcgtcggatcagtgataaatcgttcgccgatggatccgtggattagcacccagccttcgctgagcctggacctccgcgtcgggctgccggcgacggcggccgtcgccatggttaagcccaaggtgctcgtcgaggaggacttctttcaccagcagcctctcaagaaagacccagaggttgcggcgctggaggcggagctgaagcggatgggcgcggagaaccggcagctgagcgagatgctggcggcggtggcggccaagtacgaggcgctgcagagccagttcagcgacatggtcaccgccagcgccaacaacggcggcggcggcggcaacaacccgtcgtccacctccgagggcggctccgtctcgccgtcgaggaagcgcaagagcgagagcctcgacgactccccgccgccgccgccgccgccgcacccacacgcggcgccgcaccacatgcacgtcatgcccggcgccgccgccgccggctacgccgaccagaccgagtgcacctccggcgagccctgcaagcgcatccgcgaggagtgcaagcccaagatctccaagctctacgtccacgccgacccatccgacctcagcctggtggtgaaagatgggtaccaatggaggaagtatggtcagaaggtcaccaaggacaacccctgcccaagagcctacttcagatgctcatttgctcccgcctgccctgtcaagaagaaggttcagagaagcgcggaggacaacacgatcctcgtggcgacgtacgagggggagcacaaccacggccagccgccgccgccgctgcagtcggcggcgcagaacagcgacggctccggcaagagcgccgggaagccaccccatgcgccggcggcggcgccgccggcgccggtggtgccgcaccgtcagcacgaaccggtcgtcgtcaacggcgagcagcaggccgcggcggcgtcggagatgatcaggcggaacctggccgagcagatggcgatgacgctgacgcgtgacccaagcttcaaggcggcgctcgtcaccgccctctccggccgcatcctcgagctctcgccgaccaaggattgacgattgctactgatcgacgcggcggattcgatcgcttcttcttgcaactgcgggcatggccattgccatcctctcctgtctctgcctctctgttcttggtggcgccagcaagaacacgatcgacgcggtgtccatccatggcggagttcgatcgatcgattgatcggctagggaggaattgatgattcgctgtatataacctagaatttttacacgattactcgagggatagatcgacgagcaacattttcggccggcgcccatggctgatcaaccaacgatcatcggcggcggccggacgtgagcaagacgattcagaaaaaaattcagatatttgcgtcggcaaaagacgcttgtaacatgtagagtagggaggaaaattatttgaagtgtacgtagtgcagtccttttgagcaaaattaatcccaaatttgcttcggtcccgaacaattcaacgaaaaaaaaaaaaaaaaaaaaacagactgtacatctcactctctcacttggggtgaagccccaagagtgaactgaaattcaacgaggagagacgctgacataaaaaaaaaaaaaaaaa

SEQ ID NO: 26567 - DNA, 432 bp, Oryza sativa
  Clone ID: PAT_MRT4530_31344C.1
atggaccgcttccagcccgaaggtcgtttccgctccccgcggccgctcggccttccctccttcccctccctctcgggccggcccctaggctcctctccgtaccggccgctcgaccgcgaggccggggacgagctgcccccgctgctcgggatccacacggggcaggggaagaacaggtactcctacaaggggctcgccaccgtgttcgagtcgcatctcaaggagctcgacgcgccgttccacgaggcgcccgacaaggccggctggttcttgacgacgagcgtcgcggccaggcactggctggagacaaagaaatcggcagagttagtagcggtgttctcagagatgcaagcagttctcttgctggatgagatctgctatgttccagctcgtcagtattcaccagctatcagggcagacatcacatcatga

SEQ ID NO: 26568 - DNA, 1320 bp, Oryza sativa
  Clone ID: PAT_MRT4530_31345C.1
atggctgccgccgcggactccggctccccccccttccctccctcccctctcgctctcttctctggtggcggagtccccggtcgggggcggaggaggggtggggggactttttggggggttggagattgtggaatgtattaccgcaggcaaaggaaggcttcttctgaggccaacgccaatgtgtttatgcctgggggtccaaatgaatggatgcaaaaacagaaggacagctcagcaataatagttcttgattccgatgatgaggacgaatacacggaaggatgtgaacagctcacatctgagaacaataaagaacaggcaccatctggacccactagtccttacacgacatggattgtatccagcacgaaagaccaagtaaatggaaccttgcatgttgatggagtccaaagcactcaaattgttccatatggtcaaaatgcaccgttaataaatcagttccctttgcaaaccagctggcaaccatctatccaatatgaaagggttatattgcagaaaagacctgaggagcaacgcgttcaagatctggtggcagcaagccatgcagagaagatagcagaaacacaagttctccttactcttcctactcttcctactgagagaaaacgaaggaaaacagaacccaccaccctggtagatgttgatggtggaactaacctaggaaaaagaaaaaggaaaaatcatcaaaatcaagcagcagttgattcaaacttggatttgcaacaaaatgatgttccttcacaaagctacaggactatgatagaagaggagaaacctgtaaaagaaagtgaaggtctcgaggatctttggaaagatttttcattggctgctgaatgtacaaagattgaataccactgtgcacaaactcacgtaatattctttgtccagcttgatacaaatgaagacatgtccaatgaaaaagatgtggatgatgaaaatgagatggatgatgactgcaatcatgacattcggattcatgaagatctaggccacgtatgccgtatttgtggcatgattgttagaaaggctgaaacaataattgattatcagtggaaaaagcgtcaacttttaaagccccaagcgttagatctggttatacttgacactacacaccaagagggtctagtatatgaatgttcgctattggacagtcacgcgaacggttccgacaaccttcgtcttactcgtacgtctaaccacgcctgcatgcaaatatctgttactaatacgtgttcacatgagagttgctctaagcctgccttttcaaagaccaagtccacctatgcttatgttatttga

SEQ ID NO: 26569 - DNA, 326 bp, Oryza sativa
  Clone ID: PAT_MRT4530_31346C.1
tctaaacttatgttaccacactacccccactaaaaaagggaaattttttttacctaacttggctaattattaacctttctatcgttatttgaagcagaaaacactgaccggaactcacctttgaagactctagggccttttgcttttctgactaattaaacccgcctctaaaggctttttgcatgccccggggaaataaaggaacaaaatcattcatctcctgcgataaggcattaaaaagcgccgacctcaaatgggaaaatgtcaccctgtcctacgactctggtgcgcctctggggatacccctcgagtgaacccttgatcca

SEQ ID NO: 26570 - DNA, 2877 bp, Oryza sativa
  Clone ID: PAT_MRT4530_31347C.1
atgtattaccgcaggcaaaggaaggcttcttctgaggccaatgccaatgtgtttatgcctgggggtccaaatgatatctcatttcctgcatcaaatagggatcatgattggggatatggcggtgttggcaaagaatgggaagctagttatgctcgcaaactccagttgatgaattttctttcttcactgcatcaacgcactgcaaatcctttggtaaccactagaatggatgctaacatggacactcctttggagcaaaaacagaaggacagctcagcaataatagttcttgattccgatgatgaggacggatatacggaaggatgtgaacagctcacatctgagaacaataaacaacaggcaccatctggactcactagtccttacacgacatggattgtatccagtgcgaaagaccaagtaaatggaaccttgcatgttgatggagtccaaagcactcaaattgttccatattatggtcaaaatgcaccgttaataaatcagttccctttgcaaaccagctggcaaccatctatccaatatgaaagggttatattgcagaaaagacctgaggagcaacgcgttcaagatctggtggcagcaagccatgcagagaagatagcagaaacacaagttctccttactcttcctactcttcctaatgagagaaaacgaaggaaaacagaacccaccaccctggtagatgttgatggtggaactaacctaggaaaaagaaaaaggaaaaatcatcaaaatcaagcagcagttgattcaaacttggatttgcaacaaaatgatgttccttcacaaagctacaggactatgatagaagaggagaaacctgtaaaagaaagtgatggtctcgaggatctttggaaagatttttcattggctgctgaatgtacaaagcttgatacaaatgaagacatgtccaatgaaaaagatgtggatgatgaaaatgagatggatgacgactgcaatcatgacattcgaattcatgaagatctaggccacgtatgccgtatttgtggcatgattgttagaaaggctgaaacaataattgattatcagtggaaaaaggcttcaaggacaagaacaaattactatgaatcacgttcaaaggatgctgatgagattgatactggtgctgttaaagtttccgaagatttcattgtctctgatattgccattcatccaagacatgcgaagcaaatgagaccacatcagttggaaggattcagcttcctggtcaagaatctagtgggagacaaacctggaggttgcattctagctcatgctcctggttcagggaagacatttatgctcataagtttcattcaaagcttcttagcaaagtatccttctgcaaggccccttgtagtgcttccgaaagggattttaggtacttggaagagggagtttcagcggtggcaagtggaggacataccactatatgatttctattctgttaaggctgacaaaagagtagagcaactggaagtcctcaaatcttgggaagcccagatgagcatactatttcttggatacaagcagttctcacgaatcatctgtggtgatggagatggaaacattgcagctgcgtgtcgggacaggctgcttatggtacccaacctacttatactagacgagggtcatacaccaagaaatcgggagacagatgtactggcatcactaaaaagagtccaaacaccacgcaaagtggtcctgtctggtacacttttccagaaccacgtttcggaagtgtttaacatcttggaccttgtgcgccctaagtttctcaagatggaatcatcccgtcctattgctagacgtataatgagtcaggtagcaatatcaggtatcaggagtttaaaaggggttcatgacagtgcattcactgagtcagtggaagacaccctgctgaacgatgacaacttcactagaaaagcccatgttattagaagtcttagagaattaacaaaagatgtgcttcactattacaagggtgatatcttagatgaactacctggcctagtagattttagtgtgtttttgaaactcagtaccaagcagaaagaaattgttcacaagatagaagcctatgagaagttcaaaagaagtgcagtggggactgcattgtacattcatccctgcctgtcagaaatttcagagggtgatgctgcagatagggcgagcaacttgacagatgccactgttgacagcttgattgagtctatcatcattaaagatggggtgaaagccaagtttttctttaacattctgtctcttgctaactctgcaggagagaagttgcttgccttcagtcaatatatacttcccatgaaatttttggaaaggttgttggttaagaggctgggctggcatgtagggaaggagattttcatgatatctggtgatactagtgcagacgacagagaagtggcgatggatcagtttaacaactctgccgatgcaaaagttttgtttggttccatcaaggcctgtggagagggaatctcccttgttggtgcatctcgagtcatcattctagatgttcatttgaacccatctgtcacccgtcaagcaattggacgtgcattcaggcccggacagcagaagaaagtgtttgtgtacaggcttgttgctgctgattctccagaggtgaagttccatgaaactgcattcaagaaagaagttatcccaaagctatggtttgaatggagtgagctctgcactactgaagacttcaaactgaatcaagttgatattgatgactctgaagatgaacttttggaggctaatgctatccgccaggatatcaaggctttgtatagaaggtcagctatctctttctcccggtgcgcatgtgcaagttaa

SEQ ID NO: 26571 - DNA, 1011 bp, Oryza sativa
  Clone ID: PAT_MRT4530_31348C.1
atggctgatatttgcttagacaaagcttcaaggacaagaacaaattactatgaatcacgttcaaaggatgctgatgagattgatactggtgctgttaaagtttccgaagatttcattgtctctgatattgccattcatccaagacatgcgaagcaaatgagaccacatcagttggaaggattcagcttcctggtcaagaatctagtcggagacaaacctggaggttgcattctagctcatgctcctggttcagggaagacatttatgctcataagtttcattcaaagcttcttagcaaatgttttcaatgcactctacagcgaaccggtgatacaaggtagagttctcaataggaagggctggatctatgttggcgagcagggtgatgtcagaaaaaattacatatggtgtaaattaggtacttggaagagggagtttcagtggtggcaagtggaggacataccactatatgatttctattctgttaaggctgacaaaagagtagagcaactggaagtcctcaaatattgggaagcccagatgagcatactatttcttggatacaagcagttctcacgaatcatctgtggtgatggagatggaaacattgcagctgcgtgctgggacaggctgcttatggtacccaacctacttatactagacgagggtcatacaccaagaaatcgggagacagatgtactggcatcactaaaaagacaccacgcaaagtggtcctgtctgacgtataatgagtcaggtagcaatatcaggtatcagagtttaaaaggggttcatgacagtgcattcactgagtcagtggaagacaccctgctgaatgatgacaacttcactagaaaagcccatgttattagaagtcttagagaattaacaaaagatgtgcttcactattacaagggcgatatcttagatgaactatctggcctagtggattttagtgtgttcttgaaactcagtaacaagctgaaagaaattgttcactgttggaattaa

SEQ ID NO: 26572 - DNA, 3385 bp, Oryza sativa
  Clone ID: PAT_MRT4530_31349C.1
atggccgctgccggcagggacccgccggcgacgccatcctccagaatgtattactgcaggcaaaggaaggcttcttctgaggtcaatgccaatgtgtttgtgcctgggggtcagaatggtatttcatttcctgcatcaaatagggctcatgattggggatatggcggtgttcgcgaagaatgggaagctagttatgctcgcaaactccagttgatcaattttctttcttcactgcatcaacgcactgcaaattctttgataaccactagaatggatgctaacatggacactcctttggagcaaaaacaaaaggacagctcagcaataatagttcttgattccgatgatgaggacgaagcagaaagatgtgaacagctcgcatctgagaacaataaacaacaggcaccatctggacccactagtccttgcacaacatggattgtatccagtgcgaaagaccaagtaaatggaaccttgcatgttgatggagtccaaagcactcaaattgttccatatggtcaaaatgcacctttaataaatcagtcccctttgcaaaccagctggcaaccatctatccaatatgaaagggttatattgcagagaagacctgaggagcaacgcgttcaagatcttgtggcagcaagccatgcagagaagatagcagaaacacaagttttccttactctgcctactcttcctaatgagagaaaacgaaggaaatcagaaccgaccaccctggtagatggagatggtggaactaacctagggaaaggaaaaaggaaaaatcatcaaaatcaagcagcagttgattcaatcttggatttgcaacaaactgttgttcctttgcaacaaaatgatgttccttcacaaagctacaggactatgatagaagaggagaaacctgtaaaagaaagtgatggtctcgaggatctttggaaagatttttcattggctgctgaatgtacaaagcttgatacaaatgaagacatgtccaatgaaaaagatgtggatgatgaaaacgagatggatgacgattgcaatcatgacattcggattcatgaagatctaggccatgtatgccgtatttgtggcatgattgttagaaaggctgaaacaataattgattatcagtggaaaaagaaaaacctgctatgggggatcttctctttactgaaatacttcctaaaatgggagagtgttttcattaccaactatattgatattgataccgctttggagtatatagcttcaaggacaagaacaaattactatgaatcacgttcaaaggatgctgatgatattgatactggtgctgttaaagtttctgaagatttcattgtctctgatattgccattcatccaagacatgcgaagcaaatgagaccacatcagttggaaggattcagcttcctggtcaagaatctagttggagacaaacctggaggttgtattctagctcatgctcctggttcagggaagacatttatgctcataagtttcattcaaagcttcttagcaaagtatccttctgcaaggcccctcgtagtgcttccgaaagggattttaggtacttggaagagggagtttcagcggtggcaagtggaggacataccactatatgatttctattctgttaaggctgataaaagaacagagcaactggaagtcctcaaatcttgggaagcccggatgagcatactatttcttggatacaagcagttctcacgaatcatctgtggtgatggagatggaaacattgcagctgcgtgccgggacaggctgcttatggtccccaacctacttatactagacgagggtcatacaccaagaaatcgggaaacagatgtactggcatcactaaaaagagtccaaacaccacgcaaagtggtcctgtctggtacacttttccagaatcatgtttcggaagtgtttaacatcttggacctcgtgcgccctaagtttctcaagatggaatcatcccgtcctatcgctagacgtataatgagtcaggtagcaatatcaggtatcaggagtttaaaaggggttcatgacagtgcattcactgagtcagtagaagacaccctgctgaatgatgacaacttcactagaaagtctcatgttattagaagtcttagagaattaacaaaagatgtgcttcactattacaagggtgatatcttagatgaactacctggcctagtggattttagtgtgttcttgaaactcagtaccaagcagaaagaaattgttcacaagatagaagcctatgaaaagttcaaaagaagtgcggtggggactgcattgtacattcatccctgcctgtcagaaatttcagagggtgatgctgcagatagggcgaccaacttgacagatgccactgttgacagcttgattgagtctatcatcattaaagatggggtgaaagccaagtttttctttaacattctgtctcttgctaactctgcaggagagaagttgcttgccttcagtcaatatatacttcccatgaaatttttggaaaggttgttggttaagaggctgggctggcatgtagggaaggagattttcatgatatctggtgatactagtgcagacgacagagaagtggcgatggatcagtttaacaactctgccgatgcaaaagttttgtttggttccatcaaggcctgtggagagggaatctcccttgttggtgcatcgagagtcatcattctagatgttcatttgaacccatctgtcacccgtcaagcaattggacgtgcattcaggcccggacagcagaagaaagtgtttgtgtacaggcttgttgctgctgattctccagaggtgaagttccatgaaactgcgttcaagaaagaagttataccaaagctatggtttgaatggagtgagctctgcactactgaagacttcaaactgaatcaagttgatattgatgactctgaagatgaactattggaggctaatgctattcgccaggatatcaaggctttgtatagaaggtaacaagctgtatgtggctgctgtataccatgtacataatgcaatgctgatctttctggatgatcattgctgtgaaggtgtggcagtagccccttctagtgccggcgttcccttcatgctaggatttttcgttaacctccgtcatttccctacctgttttgaaccactgtccgctttgttaacatgtgccagcttggcgcagcggttcgccagctgatcctagtcttatttttcttactgaagatctccaggactaataactatggtttctgccgttcccgcttgcggcaacaactgaaataatgccactgtttcctgaaaaaaaaaaaaaaaaaaaaaaactcgagactagttcttccctgcagcccggggatccactagt

SEQ ID NO: 26573 - DNA, 2175 bp, Oryza sativa
  Clone ID: PAT_MRT4530_3134C.1
atggggcaccctgtggtacccgataacaacatgctaccaaacccgaaaaccgtgcaccaccatgatttggttgaggtttcgaacgtgaaagtaccgcccacacccccttgcgtggcccccacacccggccacaccccctgcaaggctgcaactgcaaagctccccacgccacggttccaccacctccacctccaccactccatccatcaccacgtctcgcccctcgtccattcctttttccctccctccctcgcctgcctccacctccacctccacgggcgtcgcatcacaacgcaggcgcacccccagcaacctcctcctccaccaccgcagatcgcgctgcgaatccgcccgcgggcggcggcggcggcgaggacgcgagccccagaggagtacggaggagccttcgatctaataggtgcgcgccgcgggcacgcggaaaaaaaaataatgtggaggttcaatcccttcggggggaaagtacaaaatggattggaaggtcgcaccattgatgttggcaacattaagattacagtacgcaatgctattgcacaaggaggtttctcttgtgtatatctggcatccgacgcaatgcatccatcaaagcagtacgcaatgaagcacatcatctgcaacgactcagaattgcttgatcttgtaatggaggagatccaggtgatgaacctcctcaaagggcatcctaatgtggttacactagttgcccatgatgtttttgatatgggccgcacaaaggaggcactacttgttatggagttctgtgagaagtccttggttagcgcaatggagagcagaggtactggttattatgaggagaagaaggcacttttgattctcagagatgtatgcaatgcagtttttgctatgcatggtcagtcaccaccaattgcacatagggatctgaaagctgaaaatgttcttcttggattagacggtgcatggaaattgtgcgattttggaagcacatcaacaaaccataaatgctttgataggccagaagagatggggattgaggaagatatcatccggaagcatacaaccccagcatatagggcccctgagatgtgggatctttacagaagagaagttattagtgagaaagtcgatatctgggccttggggtgccttctatatagaatatgctacttcaagtctgcatttgatggagagtccaagttgcagatacttcatggcaattatcgtattccagagcaacccaagtatagtgccgctgtcacaaagttgatcaaagatatgctggaagcctctccaaatgacagacctgatgtcacgcaggcaagagctttgattgattggccattcatctccatgatactagaatcacaaccaaaatcagagaaggatcccttcaacagctttgtcgctgattttgaagcaaacaatctccattctgggaccaatgttgctagtaaggaatctgagcttgaagcagaagtgtccaatctgaaggagcagttgaagaaaacatcatcagagaaggccgagatgacagccaagtttgaaaagttgtctgcaatatgccgctcccagcgccaggagattcaagagctcaagcgcactcttgccgagactacacctccatcaagcaaagtcagctcaagattaccagactccgggccacagcgtaaggagaagattgaaggaacggtgtgggagcttgagcaaggaatgctcgcaaactcattacctagctctgaagccaaaacatggcaggcattccctgaccccaaatctcaacctgctcaggacatcaccagggagtactgccgctcagatcaacaggcccactgctcaggggagttcctcccagagattcagctcaggagcagcgaagaaagtggagcaaccatcaggcggattcgtggacacccagaggcgggctccgtgccggcctgcccagctgcagatctcggatgtttccctgagacaaaaacagagaaggaagaggcccatctttggatttccacggagccggggttcccccccgggactcatggcaaaggacagagtctctgtccgatgcacgagatgagcctacgcttcgccaccctgctgcaaagccttcttcgtggcaagctgctgattatcatcgatccgcccaccgtcatctcggagtgcgccactgccagagtttag

SEQ ID NO: 26574 - DNA, 381 bp, Oryza sativa
  unsure (1)..(381): unsure at all n locations
  Clone ID: PAT_MRT4530_31350C.1
ggaattcgggacgagctcgtgccgaattcggcacgancctccatcgatccatggccgccaccgcgaccgccgttgcggcgtctctgtccgtggccggggggctcgggaagccgctggctcccgtctcgtctccggcggcgccgattaaaagccgcctccccggcggcggcacggcgggccgtcntcntccgggcgtcgtcctcggggganccggtgangaagganaaagcctcacctgctgccgcggcggcggggataaccccggtggcggccgtggcngcngcnctggcngtgcccnaagtggcggaagcggggcctgnctttnnccntcnctcaanaaattccngnncncntcnnntccnggggnntcntnntcntccc

SEQ ID NO: 26575 - DNA, 657 bp, Oryza sativa
  Clone ID: PAT_MRT4530_31351C.1
atatcctaccatgaatagggaaaaatgatgacttgaagagtatataagctgttaatgtacttaaactaacatatgaagttcatggagaggtcagtgagcaaatccaaaaaaacccatctctggacaaatccaatgcagatgctgagaccggagataactagaagtagccaaatcggtgaacggttcatttgacataccttccagcctctctccggtctcagtatctgcattggatgacatgccgtggaaaccttcaaagcccccaggtaccaccatgctccaagcactaaaacaagagcaagtctgacagttgtgccagcagaggagggagataccatggatgccggttagaaaaagaacatggccagagtttgtctctcctcccggatctcccccttgtcatatccatcaccttccttgtaccgacaaaaccgcctcctgcctgctcttcacagccattgttccacctgcggtgaaatatgacatgaattccatcctcgtgtcgatagttacaaggtgttcagatttatactcacagcaggagaaaaataaaggtccagtagcacagatttactgtctgcagtgaagtgttttctttgagatccccaaatggtcatcatatcgacctgtcgctcatagcgcacactaaatgaaact

SEQ ID NO: 26576 - DNA, 494 bp, Oryza sativa
  Clone ID: PAT_MRT4530_31352C.1
gaataaatttagatttcttatagctgccatctactaattattaaatcaaacggttaagaactttgttggtaagattttcataaaaaaaattaaagcatgtgtagcagtgcttattcctaaatttccaggatttggcttaatttcatctcaaacccaaaacaaaaaggcaaagagcaaatagggcctaacttaaaccggtagagttaaaattagcaactcgacgtaatttggttgggatcaattaatgtggcccgtttcacctcaaatcaggcagcaattccattccacccgctcctcgcttatcccctccccttccttgtgtgttgctataagtcaacttagctctcctcgcctccaagcaaaatccccatttcgcaaagccaccgcgccgcctcctctccgctccaaaccctagatcgcgtctctcttcgtcgccatggaggacgagggcgccgggggcggaggcattggcggcgacgcatccccggtgcacg

SEQ ID NO: 26577 - DNA, 356 bp, Oryza sativa
  Clone ID: PAT_MRT4530_31353C.1
ttttgctgcttccctcgctgtcgactcggctcgggccggtgcttttttaagtgacgtgagaagaaagcgaggcatcgaatccaatccaatccaatccagagtgggggtaaaaccagcgatttttgagggggcattttctttcatttttttactttttggttggcttgggattcgccgccggtgtccgatggagcggttcgtgcagttcttgaggcggggcaatggtttgatggccggcgtctctggcggtggggagctgcgcggaggaggtggcgaaggcggagggggccgggtgcagggacgacgcggcggcgctgaggctcaagggggtggccatggcaacgatactggtggcc

SEQ ID NO: 26578 - DNA, 2883 bp, Oryza sativa
  Clone ID: PAT_MRT4530_31354C.1
atggcgaggatccagcgcacgcttgctaccaccgatgagcacagcatcagagatgcatctgagaggcttcacctgagggagcttcagcagtttgcctacgatgcccaagatgcaatcgatctgtacaagtttgagcttctgcggcgaaggatggatgatccaaacagtcatggagatggcggcagtagccgtaaacgcaagcacaagggggacaagaaggaacctgaaactgaaccggaggaagtttcaattcctgatgaattggctgttcgggtaagaaaaatcctagaaagatttaaggagatcacaaaggcatgggatgatctccgtctagatgatacagatacaacaatgcaagatgaggaacatagcatgctcccactgcctactaccccatatgttgacgagcccactatctttggtagagatgaagataaggaaaagataatcaaaatgctgctctctgtgggtggtgccaatgaaggagatgtgtcagttcttcccattattggaatgggtggagtaggaaagacagcacttgttcaactagtgtacaatgatcgaaggattctgaacagatttgacttgatgggctgggttcatgtctcagagaattttgatctcaaaagcataatgcgtaaaattatcatgtccttcacgaaaaaaccatgtcagatgacacaaatggatcagctccagtatatgctaatagaacaagttgttggcagaaagttcttgctggttcttgatgatgtgtggaatgagaggaaggatatttgggatgcattattatcagccatgtcacctgcacaatcaagcataatattggtaactacccgcaatacaagtgtgtcaacaatagtccagacaatgcacccctacaatgtgagttgcctaccttttgaggaatcctggcaactattcaagcagatggcctttttgcaccaagatgagagtatgaaaacagattttgaggttattggcagaaaaattgttcagaaatgtgctggcttgcctttagcagtgaaggcaattgccagtgcacttcgctttgaggaaaatgaggagaaatggaatgacatattggagagtgaacaatgggagttaccaacaacagaggatactgtgttaccggcgttaaaattaagctatgatcaaatgccaatccacttaaagcggtgctttgttttcttcgcattattccctaagaggcatgttttcttgaaggaaaatgtggtatatctgtggatatctttgggcttccttaaacggaccagccagacaaaccttgagactattgcaaggtgccttaatgacttgatgcagaggactatggttcagaaaatactatttgatggaggacatgattgcttcaccatgcatgaccttgtacatgatcttgccgcgtccatctcatatgaagatattttgagaatagacactcaacacatgaagtctatgaatgaagcatcaggaagccttagaagatgcttctccaagttgttctcacatcacattaaccttacaattgataatgagctatggagcagttttcggcatttgagaactttagacttaagccgcagctcaatgacagcattgcctgattcaattagaggactgaagttgctcaggtatctaagtattttccaaacaagaatctccaagctcccagaatcaatttgtgacctccttaatttgaagatcttagatgcaagaacaaactttcttgaagagctaccacaaggcattcagaagctggtcaagctccagcatctcaatttagtcctttggtctcccctgtgcatgccaaaaggaattggaaatctgaccaaactacaaaccttgacaaggtatagtgttggaagtggcaattggcactgcaatattgctgaactacattacttagtgaatatccatggtgaattgaccattacaggattaggtagagtgaccaaagttgatgatgctcaaacagccaacctgattaataaagagcatgtgcaaactctaagattagattggtctgatggattctactctagtgaatgtgatcataattctagtcatatagatgtaaaagcaacaccagaattagcagaggaggtatttgagagcttaaagccaactagcaacttggaggagttagaggtagctgactattttgggtacaaatacccaagttggtttggaggttctgcctattcacaattggccaagataactttatggaagcaaggctgcaagttccttccaacacttggccagttacctcagttgcgtaaacttgtagttatacgcatggaggaagtagagagaatcgggcaggagtttcatggcgagaattccacaaatcgattcccagtattggaggaattggagtttgagaacatgccgaaatgggtggagtggactggagtttttgatggtgacttcccttcacttcgtgagctgaaaatcaaggacagcggtgaattgagaacccttccacatcaattatcatcctctttgaaaaaattggtcatcaagaaatgtgaaaagctgacaagactgccaactattcccaacctaacaatcttacttttgatgggcaatcttagcgaagaaatacacaatagtctggattttccaatgctccaaatattaaaagaatggattgagtggcaacagtctctaatagacaaggaagataagcagcaaccagaatttgataatgcaagttatgatcaagaggctcttggtgcactgagcgacaatagtgaggatgatgttgaagttttcaatgaagatgaagatgacgatttctatgatgaaatgctagaagttgggcagtcaagcgggacagcaattaatgacgatgatggaagtaacgatgctgtttga

SEQ ID NO: 26579 - DNA, 551 bp, Oryza sativa
  Clone ID: PAT_MRT4530_31355C.1
cgcagccgcagccgcagtcgcctcgctagctagcggaggagggagtgcgagtaaggaggaggaaaggggaaccacacccacgcccgacactcggtgcatgcctactcgcgctccttatcactatgcggtcggctaccggtgctgatgggccagccccccatctgcatctcatactgagccgacggtaccaataacgacccctgggcctctgatggggtggatctgcatgagaggactatcagagagcgttactcgaaacagacacgccatacgcgaccgcatgcccgacagtgcgcgaggctatggaccggtatcggacgacccgccgatgaaaggacggatgagatccacgaacccagggctcatcaatgactgccagggctgcggcgcctgcaacagggcgaagtgcctccaccacaactgtctgctgccgccgagccgtcgctgccatccacaccgaaaactgccccgctggactgtgctcctgctggcgcacgcactcagacgctcagcggcgcacggtacagcaggacggagatatacggcgccga

SEQ ID NO: 26580 - DNA, 182 bp, Oryza sativa
  Clone ID: PAT_MRT4530_31356C.1
cttcttgcagtggagacattgatctttctcaacagcgaactgttgttgctgaggcagatgctgagactgtttaccttttgaggtactctgagacagcgtcacactctgggatcgacccaatatggttctataggacatggggtagtcaatacccagtccacctctcccaagataaaagcaag

SEQ ID NO: 26581 - DNA, 2985 bp, Oryza sativa
  Clone ID: PAT_MRT4530_31357C.1
atggcgaggatccagcgcacgcttgctaccaccgatgagcacagcatcagagatgcatctgagaggcttcacctgagggagcttcagcagtttgcctacgatgcccaagatgcaatcgatctgtacaagtttgagcttctgcggcgaaggatggatgatccaaacagtcatggagatggcggcagtagccgtaaacgcaagcacaagggggacaagaaggaacctgaaactgaaccggaggaagtttcaattcctgatgaattggctgttcgggtaagaaaaatcctagaaagatttaaggagatcacaaaggcatgggatgatctccgtctagatgatacagatacaacaatgcaagatgaggaacatagcatgctcccactgcctactaccccatatgttgacgagcccactatctttggtagagatgaagataaggaaaagataatcaaaatgctgctctctgtgggtggtgccaatgaaggagatgtgtcagttcttcccattattggaatgggtggagtaggaaagacagcacttgttcaactagtgtacaatgatcgaaggattctgaacagatttgacttgatgggctgggttcatgtctcagagaattttgatctcaaaagcataatgcgtaaaattatcatgtccttcacgaaaaaaccatgtcagatgacacaaatggatcagctccagtatatgctaatagaacaagttgttggcagaaagttcttgctggttcttgatgatgtgtggaatgagaggaaggatatttgggatgcattattatcagccatgtcacctgcacaatcaagcataatattggtaactacccgcaatacaagtgtgtcaacaatagtccagacaatgcacccctacaatatggcctttttgcaccaagatgagagtatgaaaacagattttgaggttattggcagaaaaattgttcagaaatgtgctggcttgcctttagcagtgaaggcaattgccagtgcacttcgctttgaggaaaatgaggagaaatggaatgacatattggagagtgaacaatgggagttaccaacaacagaggatactgtgttaccggcgttaaaattaagctatgatcaaatgccaatccacttaaagcggtgctttgttttcttcgcattattccctaagaggcatgttttcttgaaggaaaatgtggtatatctgtggatatctttgggcttccttaaacggaccagccagacaaaccttgagactattgcaaggtgccttaatgacttgatgcagaggactatggttcagaaaatactatttgatggaggacatgattgcttcaccatgcatgaccttgtacatgatcttgccgcgtccatctcatatgaagatattttgagaatagacactcaacacatgaagtctatgaatgaagcatcaggaagccttaggtatttatctctggttgtgagttcttcagaccatgcgaatttggatttgcgtacattaccagtgtcaggaggtatcaggatatttcaagttgtaaattctatggatgacaatagaagatatttttcatccttcttcaaaaataacagaagatgcttctccaagttgttctcacatcacattaaccttacaattgataatgagctatggagcagttttcggcatttgagaactttagacttaagccgcagctcaatgacagcattgcctgattcaattagaggactgaagttgctcaggtatctaagtattttccaaacaagaatctccaagctcccagaatcaatttgtgacctccttaatttgaagatcttagatgcaagaacaaactttcttgaagagctaccacaaggcattcagaagctggtcaagctccagcatctcaatttagtcctttggtctcccctgtgcatgccaaaaggaattggaaatctgaccaaactacaaaccttgacaaggtatagtgttggaagtggcaattggcactgcaatattgctgaactacattacttagtgaatatccatggtgaattgaccattacaggattaggtagagtgaccaaagttgatgatgctcaaacagccaacctgattaataaagagcatgtgcaaactctaagattagattggtctgatggattctactctagtgaatgtgatcataattctagtcatatagatgtaaaagcaacaccagaattagcagaggaggtatttgagagcttaaagccaactagcaacttggaggagttagaggtagctgactattttgggtacaaatacccaagttggtttggaggttctgcctattcacaattggccaagataactttatggaagcaaggctgcaagttccttccaacacttggccagttacctcagttgcgtaaacttgtagttatacgcatggaggaagtagagagaatcgggcaggagtttcatggcgagaattccacaaatcgattcccagtattggaggaattggagtttgagaacatgccgaaatgggtggagtggactggagtttttgatggtgacttcccttcacttcgtgagctgaaaatcaaggacagcggtgaattgagaacccttccacatcaattatcatcctctttgaaaaaattggtcatcaagaaatgtgaaaagctgacaagactgccaactattcccaacctaacaatcttacttttgatgggcaatcttagcgaagaaatacacaatagtctggattttccaatgctccaaatattaaaagaatggattgagtggcaacagtctctaatagacaaggaagataagcagcaaccagaatttgataatgcaagttatgatcaagaggctcttggtgcactgagcgacaatagtgaggatgatgttgaagttttcaatgaagatgaagatgacgatttctatgatgaaatgctagaagttgggcagtcaagcgggacagcaattaatgacgatgatggaagtaacgatgctgtttga

SEQ ID NO: 26582 - DNA, 935 bp, Oryza sativa
  Clone ID: PAT_MRT4530_31358C.1
ttacaaatggaggtccaagctgacaccctccttctgccccaattcacacctacctagcatctccggcgacgtcgacgagcacgacgacaacgaaggcgacgaggacagcaagctcatcggcaccatctcgtccttgcatgccacctcccccgccgccggcgtgcccgccaccgtagtagccagcttgtcagcgccctgcctgccggccgtgctgccgaaattctccgtcggcggcggcacgctccacagcccggcctgcacggggctaccgttgatgggctgcgccatggaacctggcccggcgaaggcgcccggggcggcgctcgtccacatcgggtagtgcgccggcggtggcggcggcggcggcggcggcgggtggtggtcgaagcggccgccgatgtggtggtggtagttgaagaggccgtacatgtgccccggcatgtagcggtgcatggcgagggaggcctggaggtgagctcgcttggcgtgctgccgctccctcttgtgcgcgttctggtggccgcccagcgcctgcgacgtcgggaagttgcggcagcagtagtggcactcgaacttgcgctccgccgccgccgtcgcggcgccgccgttcttggtgccgccgtcgccgccgttgctgccctctgacgtgaccgtgctgccgttggccgcgtcgggggagcctgcaccggcctccgtgggccgcagctgcaggtcgttggagaattcgcagccgaacagccggattgtgtcccgcgcctgctgctgcggcggcggcgccggccggatgaacggcagctgcgagaacgagtcgacgctgcgcatgtcctgcggcttcgccatccccgtccaaccaaccaaccaagctatctgcttctacgtgaaccaaaaccaagaattccaccacccaactcggggcattcttgctagctgctgcc

SEQ ID NO: 26583 - DNA, 413 bp, Oryza sativa
  Clone ID: PAT_MRT4530_31359C.1
acaggtgttgttgccgccagccagtgtgcttacgcccagccccagtgaagcgggctacgccagtgtgccagttggctacaggtgcagcccagtggtgccagccagctacggtggtggctacagcagccagcggcagccagcaaactccgacgggaactgggaggaactggaccgttgggcccctcatgcccaagttatctatctatctaatcgagctacacatgcatgcatgcatgccgatcgttatcatcgttatttttgtgtgggaactatctagtttggtggttaactggtgtgtttgccccatctgtgtttttgatcccaagaagaaagctcgtctcgtttggctttgatcaaaaggaaggaatgaatgaatcttagtgtgctccgctctcgtcaaaaaaaaaaaaaaa

SEQ ID NO: 26584 - DNA, 2711 bp, Oryza sativa
  Clone ID: PAT_MRT4530_3135C.1
atggcgcccgcggtgctcgtccccatcgacgacagcagcgacggggaggccggtagcgccacggtcgtcgacgtcccctcccccgcccccgcccccgccatggacatcgacggcgacgacgacgggcgcgaccgcggaggagaaggcgatggcgctgcggcgagcggaggcggcgtggaccacctcagcgacctctccaacgacatcctcgccaaaattctgggccatctcagggacatccgcaacgtcgccaccaccgccgtcctctccaggcgctggctcgacctctggacccatgtcgacatcatcgtcttgcagtatgacgagccccccgactccagaatcgtgcaggaagttctcgccgcccacgcgaggaagggttccacggacacgcacatccgcctgctcgaggtcacctccctcaacagcgccacggcggacgccacggcctcctggctccgcgtcgccgagccccgcctctccggcgagctcttcttccgcaacaggtcctcggttccgctcgaaattctcaacgaggagatggtcgtcgtggagcagctggtcgacgagtttggggacttggtggtggacgaatcgggcgccttcgagctgccctgcttcatgagggtcaccaagataacgctgcacctggggtttctcggcctatcgctgccaccatcgggtgtcttcgccgagctcagggagctgcacctggtgcacgtccagttcaatggcgaactcaccatggatgatgtcatgctcccctccttggaacggctagatattcgccattccagtggcttggcctccctgacgctcaggctgccgcctctgacccagatgactctgtacaatgtgcggtggttgcgtcggctcaacgccgagcttccggggctcgaggtgttgtctgtgatccgatgcttccgcgtgcatctggagggtgtgagaattttggcagaggagctggagcagctgcggtggctagatttgtactggcctggattggtctacttcaaccggatgccgcgcctgcggacgttggtgccccccgctgtttatccttatggattgcagagggttttgttcaatcggagctgtcagatgcttctcaatctctgtccgagcatttaccgtgtcgtgctgatggttgacattgaaccagagcaaggtggccatcatggcgttaggcctttaatggaaggcattacccaactccctcacattaagatcttgtccttgaatttacaaacacaagggcatgcttatggagctagtgtgttgcatattctgacaatgtgcactggtatagcaaagctgtccctgagaaaccaagaagatttccaggttgaaaatgcttgtccaccgaactgcctctgtgaccggccacgaaactggagagataaggacatttcaatgatgtctctaagagaagtagagatcctcaacttcagagggaggcaacatgagcttgaccttgtgagggtcttagtccgggtagcaccagcccttgaccttgtaagaataatctgtcacccttcgtccactgcttttggggtagagtcgctacgtgcctatgtacgaagttttgcaagctttaggacttctgtggaaccatattgcccaacaaatggcagaagctccaacaagtatcagtttactcattttcttatcaacttccaaaaaccacccatcaaaaatatgagatacgctaactggaagattaaatccaaaagaaaactgaactgctctccacaaaaacttcgcaacatgacaatcgaaaaagagatgttgaatagacttattcttcaaacaaaacgaacacctcaagctgctattccaattacgtcttgccaagttatccttagttagcacaacccctttaagtaagtaccacataaaaattttaatcttaagtggcatcttaagcttccaaatgcacttattcctgtctatataaccattattaattaaagctaggtacatagacctcaccgagaacaacccattctgatgaaaattccatctaaaagtatcaaacgaatcattcaattgaatatgtactatagaggaacataattcatgccaacaatcaagattctgaccaactaaaactcttctaaaaaaacattaagcgaaacagaacccattacagtagcaatagaagatgttttcctacgagcaattgcgtacaaagatggatacttgtccttaaaagcccagttacgtagccacttatcctcccaaaatctaatttgtttcctattattgacaatccaagaacccatatttaagaaagtacttttaacattcataagaccagaccaaaaataggaatcatcttgtttcttgtcaacttgggttatagacttattataaagatatttcctcttcaataagtcatgccaaaccccttcctcattaattaacttaaacaaccatttacttaaaagacatttattttgtaccttcagattatgaatcccaagacccccctggtccttgggttgacaaacaacatcccacctagtgagcctgtatttttattatgatcatctccttgccaaaagaatcgcgatctataaaaatcaattttatgaagaacccttttcggcacctcaaaaaaagatatcataaacatggctaaacttgaaagaactgaattaatcaacaccaatctacccccaaccgataaatgcttgcctttccaacta

SEQ ID NO: 26585 - DNA, 251 bp, Oryza sativa
  Clone ID: PAT_MRT4530_31360C.1
gccggtgacttagtacattgaccggatcagcatccggtccgcgctggtcaaccgcgcgttcggcgagtccctcaagaggatgtcgtctacgacgccgtcgtcagaggcagtggtagaggtgggatgctaagtttgtcaattttaggctttttctgaacattacatatcaagttatctaatgtgtgtaggaatgggctgctgctgacactgatagactgcatcacttagatgatttcatttttacccttctt

SEQ ID NO: 26586 - DNA, 737 bp, Oryza sativa
  unsure (1)..(737): unsure at all n locations
  Clone ID: PAT_MRT4530_31361C.1
ccacgcgtccgaccttgcaaaccattcaacccgctgctaggagagacttatgaagccgatttccctgaaagaggggtccgtttctttgcagaaaaggcaagggctggaaattctggggcgacagcaatctcaaatccaagttttgggggcagtcaattcaagtcgatccgattggtgttctgacagtggaattcgatgacggtgaaatcttccaatggagtaaggtgacaacaactattcataatctcatccttgggaagctgtactgcagccatcatggaaccatgcacataaaagggaatcgccagtattcatgtaaactcaagttcaaagagccatcgcttcttgatcgcaatcctcacctggtacaaggctttgtagaggatgatgatgggaacaaaccttcgtttttgataggaaaatgggatgaaaatatgtattatagtaatttagatacttccaaggtcaagaagcgttgatcaattgaaaggtgccgtacttctgtgggaaaagaacaaaccttctcctaatccaacgcgatacaatctattcgtcgttcgctatcacattgaacgaactgtctcctgatcttcaggacaaactccctcctactgattcacggctaaggccagaccagcggcatctagagaaacggtgaatatgagaaggcaaacgcggagaagctgagggtggaacgacgacanagatggtcgagtaagcttcaagacatggctgga

SEQ ID NO: 26587 - DNA, 2640 bp, Oryza sativa
  Clone ID: PAT_MRT4530_31362C.1
atgacgcagagcggcggcggaggcggaggcgtccaccaccacctgaaccaccacggcctctgctgcctctccgcggcggcgctgccggcgccggacgcgccgccgacgccggagcccgaggcgggcggcgcggcggtggcggtggccggggtgctccacaagtggaccaactacggccgcgggtggcgggagcggtggttctcgctccacgacggggtgctctcctactccaagattcgtagggacgcctccgctgccgccgacgaggatggcggcggcggcggcggcggcgaggtcaggctgatcggcggcgcctccgccaggatcggcggcgcgcgccgtccggacaagcccgtcggcgtcgtctgcctcaagttgtcagcatttcgggagagcaagtcggatgataggagattctacatattttcccccacaaagacacttcatttgaagacagattcaaaagaagaccgtgttgcctggatcgaggccttgatcttggcgaggagtttttattcgctaagatcactcagcggaaggataacttttgtgcaaagcgatgtttcggtctcgactgccaggcttcggaatcggatgcagcaagagggactgaatgaaagtcttatacaagagtgtgagcagattgtgcttacggagttctccagctttcgcaaacaactgaagctgtgctacgaggaccagctaagcttgtttggatcctgtaggcaccattttgaggaaggcaaagatgcaagtataatacagggggcgttgacaagaaatgacttttccagttctcgacatggaaattttagcgaatacagcactacagaatctgatgaatttgagaagcaagatggtggtgacttgacttgtgaagatgagtctactttctttgatgctgcagactacttcattgaaccaaacgacagatcttcagcaatgttaagctcaaccagttgtggtgagggacttttggatatccaaatggaagattctagtcacttattaccacaaatcaaacggcggagtaaactaccagagcctacagagaaagagagaggcatcagcctttggtcaattattaaagatagtgtcggcaaggatttgacacgagtatgccttccagtttactttaatgaaccactctcatccctccaaaagggctttgaagatttagaatattcacaccttttggatcaagcttatcaatacggaaagatgggaaacagtctcatgagaattctcaaagtagctgcatttgcagtctctggctatgcttcatctgtcgcaagaccttgcaaaccattcaacccgctgctaggagagacttatgaagccgatttccctgaaagaggggtccgtttctttgcagaaaaggttagtcatcaccccatgctgattgcctgccactgtgaaggcaagggctggaaattctggggcgacagcaatctcaaatccaagttttgggggcagtcaattcaagtcgatccgattggtgttctgacagtggaattcgatgacggtgaaatcttccaatggagtaaggtgacaacaactattcataatctcatccttgggaagctgtactgcagccatcatggaaccatgcacataaaagggaatcgccagtattcatgtaaactcaagttcaaagagccatcgcttcttgatcgcaatcctcacctggtacaaggctttgtagaggatgatgatgggaacaaaccttcgtttttgataggaaaatgggatgaaaatatgtattatagtaatttagatacttccaaggtcaagagcgttgatcaattgaaaggtgccgtacttctgtgggaaaagaacaaaccttctcctaatccaacgcgatacaatctatcgtcgttcgctatcacattgaacgaactgtctcctgatcttcaggacaaactccctcctactgattcacggctaaggccagaccagcggcatctagagaacggtgaatatgagaaggcaaacgcggagaagctgaggttggaacgacgacaaagaatgtcgagtaagcttcaagacaatggctggaagccgagatggttccagaaggatggcgaagacgggacatatcgcttcaaaggcggttactgggaagcaagggagcatggacaatgggatgactgccttgacatatttggggagttttcagagacatgatgaatgctcaggttcagttgcttttagtagcattagaccaactccaagttcagttggaactctgaagcatttgcaggtttttctgcatagaaacaaggacagcaatgcaaatgcaatgcaatgcaatatgaggaaggaatagacaatagagagcattgccatcttcagtggtagatatgcatggatggcgttggttaccgggctgttattagctcatttcctgaacaattattcgtaataatgttgctcttcttttgttcgttgccttggatccatgttgggattgtgaggccagcacatgtcgattgcacagatcgagcatcatttgtagaaaaggaaaaaggggtaaatttagatgaaaaaagatccccatggaatgtgacgctgcattattagaaaaccatattcagatcttttggactgaaaatgtgatcgttcttgcatttccagttt

SEQ ID NO: 26588 - DNA, 1339 bp, Oryza sativa
  Clone ID: PAT_MRT4530_31363C.1
tgcccgcactccctgtcgcctccttccatttcgcctcgcttcgccctcgccatcccctctccgcaccgcgcacgcgcctctccttccacctccccgcgcccaaacacacgcgtgggccgctcgccgtgtcttcgcactgaaaccctagtcgccgatggatcttctctccgcggcctacggtgccacctccgacgacgacgacgacggcgccgaggccacccctactccaggctgggccgcgacgggctacgcctccgccgctggacctccaccgaagcggccgcggtgggagcctccaccatacctcccaccacctcctccataccccatccctcaaccggccaggccacgcgccgcgccgccgcctgctagcaccgctagcggcaggtacgtctccaaaagggagcgggccctaatggccgcgtcgagctctcccgtggattcctcgtcaccgcttcctccatcggcggcagctcagtttggttctcctgttgatgttgatgaagcgaaagaaattaaggtgttcaaggaggatcatgctgtggaggtcatcaagttcaatcgaactaactccaacctgttcctgtctggttggtccaagggtactcttagactatgggatgttcggagtggtttggtgactaaagaatatcaaagaaatcttggcaccatccttgacattgaattcagttctgatgggaaacagtttatctgttcaacagacacatccagaagtaatgttagtgagaattctataattatatgggataccctgcgacaagttcctttatctaaccagcaaattatcttcttttcactgaggatcttttcccattcttattcatatgtatgcatacttcagcagtttgaaaaacagaagagatatttatccttaatttattatgataatcatgctaatatgctatttgctctgcatactaataatttattacttgaaatcaagaaggtttatacagaagcatatacctgtccttgtgtaagatatcacccatttgaagcttcttttgttgctcaatccaacggtaactacattgcaatcttttcagcaaagtcaccattcaagctaaacaagtatatgcggtatgaaggacatggagtgtggggtttcccgataaagtgcaatttttcatttagcgggaaggaacttacatctggttcatccgatggttgtatctatttttacgattataaatcgtcgagacttttgagtaaaatacaggcatttaaagaaccatgtactgacgttgcataccacccagtaattcccaatgtgattgcttcatgtagctgggctggtgaaatagctgtttttgaatga

SEQ ID NO: 26589 - DNA, 612 bp, Oryza sativa
  Clone ID: PAT_MRT4530_31364C.1
tggcctcccaagtgctgagattacaggtgtgagccaccgcaccacgtagtaatttcttagataacacattcatttattaaatttattttactttattttgaaacatcacagatatgcctggttctgagtgattttaaagtaacttcatatttttacttgtctctaagagcttgatttccatccacagttttttattattccaagatacagtcctacttatagcataacttccaaacataattttaatttaaaggaacatgtcatagaattaggattggaaaatcttgaaatagaaatctcacatacagttctttgacatttagaaattgcctctgctttcctatttccagtgatgagacccctggttctggacccacactgcctgtttttcaattctagctctgcctcttaggtgtgtacagactgactcatcctccctgatccctcagttttttttatctggaatgtgtggtcaatactggtacctgtctcaaggtttgttatgaagactggatgttctaaattatattaaatatttagcagaatgcttggcacatgagaagtgcccatttaatgtaagttgttgttaaggagaggtgagtatgttattta

SEQ ID NO: 26590 - DNA, 1260 bp, Oryza sativa
  Clone ID: PAT_MRT4530_31365C.1
ccaagctcgccacgccgtcggcgagctcgttcgcaccgtcgtggggggaggaggacggcggcgtcaaggaaccacagtcgcgttgtggccgccaccgccagatccggcgagcccgccgccaccactgcctcctgccgccgccagatccgccgccgccgccaccgatgctccccacccgcaccacccgttctactactccggtccggctgccgccgccgcggcggcggcggcggcgcagcagcagcagcagacgttcatgggcgcgctggcgataacgccggtggtcgctgagcagccgcaggggtcgtctggtggtggggagaagaaggtggtggcgccgacgaccccggcggcggcgggggcggcggcgacgacgacgctggcgaagcggccgtcgaaggaccggcacacgaaggtggatgggagggggaggaggatacggatgccggcgctgtgcgcggcgcgggtgttccagctgacgcgggagctggggcacaagtccgacggcgagaccatcgagtggctgctgcagcaggcggagccggccatcatcgcggcgaccggcacgggcaccatcccggccaacttctcctctctcaacatctccatccgctccggcgccgcctccgcctcctccgcctccaaccccaaccgcgcctcccccttcccggcgctggctcttcacccgcaccaccagcagcacgacgtgtccgccatgctcggctaccaccaccacctcctcccgccgccgcagcagcagcaggagtcgccccaggatcccggcggcgcgggcgcgttcatgaggaagcgatacagggaggacctcttcaaggagacgacgaccgccaagatcccagcgcgcccaaggcgcgcgagcagcagccgacgacgccgcaggcggcggcggccgccgccgcggcggcggcaatgtgggccgtcgcgccgaacaccgcggcgcccggcggcgcgttctggatgcagcccatgtggtccttcgccggcggcggcggcggcgccgccacggtgcaggcgccgctccagttcatgtcgacgcgtgtcaactaccccggcagcgccggcgccggcatgtcggacaccaacctcggcatgctcgccgcgctcaatgcgtacaaccgcggcggcgccggagaccagcagccgcagcagcaaccggagatggaccagcagggccgcaacgacgacgacgacgatgacggcgacgacagcggcgacgaagacaacggcggcgcaaacaacaac

SEQ ID NO: 26591 - DNA, 489 bp, Oryza sativa
  Clone ID: PAT_MRT4530_31366C.1
atgaaaatcgccgtggtggcaaggcaacggcgtggctcgcgcgcgcggctttgcgtccgcgcgcgtgcgtggcgttgagttcgcggagatgtgtcgcgtgattttgcacgggaattgccggtgtttgggcgtggaattcgtgcggacgttgttggtggaggatgccgcgcgcacgaggcaaaggaatcggcagcaatgccggacaatgggacaaactgccttgcggcgcccatacatccatccatcgatcaaagtatggtcgtcactcgtcagtctttcatgagcagtgagctagtgagacgcgcgacacgaaaaccctgtgctaaccgtgcagataaaaacaatttcggcaccgacattcgctgctccgttcttcatttctggtcggctttcccctgtccttttggccgtcgattaatacttgtcatccttccaagaatttccattttccaaacaccttattctctgccaattctgtcttgcatttgc

SEQ ID NO: 26592 - DNA, 2814 bp, Oryza sativa
  Clone ID: PAT_MRT4530_31367C.1
atggcctcgccgctgtgcccgcccaccccctgcccctctcatccagctcgcgcccggagactcggagagtggacggctgcttcgtcggaggggattgggcgtcccttgtctatgcacagggcagtgccagggttcctgcgtcgagccctcataaccagaaaccacccacaggcgtcgcgatttacttcactggcttgttgcttgaacaacctggatcatcaagagcccactcagagtaccatttctggtgattatagacgtcagtgccttcttcccttgatcacactagcagtgcggacttcaaactgggacggcgcaagaaagataagcttcagggagtgtgagaggttatatggcctttcccagtcaattgggttgtttgcattgcttatacagtcattcttgcctcggagagtcatagaggtccggtgcttgattcagagcattgtcaattactgtggaaatgctggtccggagttgtttgagttggcacttatgctggtgaacaatttgggtggatcgataacattgcttcaagtttatgctgcgctcatacgggtttttatagagttgtcaatgtttgaggatgctcttgtcacctacatcgaggccaagaagattggagttgagcttcagctttgcaacttcttgctgaagtccttagtcaagaggaatcagttcatgtatgcgaggagtttgtttgatgatatgaagagcactggtccctcaccaaatgtctactcttattcagttttgatgagtatgtatacacatggtgataaaccatgtttggaggaagcttttgatcttctttgtgaaatgaaaatcagaggcgtgaagccgactgcggcaacctacggaacctacctttatggactttgccgtgccaaacaagtcgaatctgcatgggactttcttcaagtgcttcggcagagaggctacccttgcaacagctattgttttaatgcagtgattcatggtttctgtaacgataatcaggttcacaaagccatggaggtatttgatgagatgaagaaaggtggggttgtcccagatgtccatagctacagcatattagttgatgcgctttgcaaacaaggtgctctatcattaggctctaatttgcttgatgaaatggaaagaaacagagtcagtcctactcttgtcatttacagttcacttctgcatggtctttgcaaagctggaaaagttgaggaggcccttgaacttttcgaacgtctcaaatatcaaggtttcaagcatgaccaaattacttacagcattgttcttcatggttgttgccgacatatggatatagaggttgcctatggtctttggattgacatggttaaccataattttgttccagatgtttacaattacactagtcttatatatgcattttgtagacatagataccttaaagaagcattggggttatttgaactaatgcttgacaacaagataaaccccaatatcattacatgcactattctagttgacggcttcatgaaagaagggctgattagtgaagcctttcttttcttggatgaagtacgccaatttgacattgtccccaacctttacacatacaaagttatcatcaatggcctcttcaagggtaacgaatctgatgatttgtggggattctttggggacatgataaaaaggggatatattcccgatgttgtcctatacagtattattattgatggctttgtgaaagctttggatttgcaggaggctttcaggttgtatcataaaatgttggatgaggggacgatgccaaatatctttacatatactagcctcataaatgggttgtgccatgatgatagactccctgaaatgacgccactgttaaagaatatgattttggaggggctgacacccgacagaattatgtacacttctctcattgcatgctattgtaagcgttcaaacatgaaaaaagctatggaaattttcagagagatgaaaaatgggggtatatcgccagatacttttgtttatacatgtttaattggtggctacaccaaagttcgtgctatggattttgcggagttgttgatggaagaaatggaaactaaagggcttacacctaccgtagtaacttatacagatctaataattggatacttaaaaacaggagatgagaaaagtgcctataggacatatcataatatgattcagagagtttcatgtgtctatggctgctgctgggtgaccaaggtgggtggttctacgagtaaatttctttggatgcctaaagatgtaaaatcccaaaacatgtggaatggtggtgccttttggcttcttcaggagtcaagattgcagggttcagatccaattgtgattaggcttgatgcttctactgttaacgctgttcttgctgatcttttctcctctgttgacacattaactaaaagtccaccattgacccatgaagaggaagatgatttggttttatccttgcatgacattgcaatactgattcttgtgcagtgttctttcattggcgatgatttcctgatcaacaccattggaccagctggtaaagagaaggtactgggcaatctctatgacggcacaccagtgatgatctcgactagtctattgctattcttctacctgatcatccaactgagatgtatgtttcttgtgttttgtgataatctgctttgtgaggcacatgaagctggagatatctgtcaaaaatgggttatgatcgacaggctgatgaagagaggcggcggcgctccggcaagcctcccaagattgtcaagcaccggcatcctcgacttatcgacgtga

SEQ ID NO: 26593 - DNA, 390 bp, Oryza sativa
  Clone ID: PAT_MRT4530_31368C.1
gcctgcaggaccggccgactggcggtcacccagccgttgtttacagcggccacagctaagcgggaccgctagggagtctacacgtcgccgaccgcgaccaaggaggtggtcccccgaggactctacgagttcgagggagcctataaggaggataagcgctacacgctcatacggccaaccggaaaggccggctgaagaagcctcacaggattctgcctgtctgacagggtcgcggcgaagaaagaccctgagaacgcgcacaggcacaagatcacggaggagatcgcggtctctgcggtagctggcgccggtggttgacagttgcaggagccatgcgcaacgagcatggagctccagaccgccgcaggagcaagagcgtataggacgctt

SEQ ID NO: 26594 - DNA, 105 bp, Oryza sativa
  Clone ID: PAT_MRT4530_31369C.1
atggttattggtgaaggtgtaggcaggcttggaactcaagcacatctaagttttacatggaccatgttgaaagttcttgtaattgcaaatcctgaagcagcgtag

SEQ ID NO: 26595 - DNA, 2468 bp, Oryza sativa
  unsure (1)..(2468): unsure at all n locations
  Clone ID: PAT_MRT4530_3136C.1
ccggccggggcccctcgtccattcctttttccctccctccctcgcctgcctccacctccacctccacgggncgtcgcatcacaacgcaggcgcacccccagcaacctcctcctccaccaccgcagatcgcgctgcgaatccgcccgcgggcggcggcggcggcgaggacgcgagccccagaggagtacggaggagccttcgatctaatagtggattttcatttatattcgtaggggcacgcggaaaaaaaaataatgtggaggttcaatcccttcggggggaaagtacaaaatggattggaaggtcgcaccattgatgttggcaacattaagattacagtacgcaatgctattgcacaaggaggtttctcttgtgtatatctggcatccgacgcaatgcatccatcaaagcagtacgcaatgaagcacatcatctgcaacgactcagaattgcttgatcttgtaatggaggagatccaggtgatgaacctcctcaaagggcatcctaatgtggttacactagttgcccatgatgtttttgatatgggccgcacaaaggaggcactacttgttatggagttctgtgagaagtccttggttagcgcaatggagagcagaggtactggttattatgaggagaagaaggcacttttgattctcagagatgtatgcaatgcagtttttgctatgcatggtcagtcaccaccaattgcacatagggatctgaaagctgaaaatgttcttcttggattagacggtgcatggaaattgtgcgattttggaagcacatcaacaaaccataaatgctttgataggccagaagagatggggattgaggaagatatcatccggaagcatacaaccccagcatatagggcccctgagatgtgggatctttacagaagagaagttattagtgagaaagtcgatatctgggccttggggtgccttctatatagaatatgctacttcaagtctgcatttgatggagagtccaagttgcagatacttaatggcaattatcgtattccagagcaacccaagtatagtgccgctgtcacaaagttgatcaaagatatgctggaagcctctccaaatgacagacctgatgtcacgcaggcaagagctttgattgattggccattcatctccatgatactaggtgcttataaaagaacacatgtgatgcctagaaggaacccgcctcctcctccaatagaacaatccaatagttcgttatctcatggaagctcaaaggcaggagatgcacctctaggtgcattttgggcaacacagcatgcacagggttctcaagttgcagataataggaactctttgtttgatgaggaaccaataaaaccatcaccttcatcaaagcataaccaaagcagaggggatatcagcatcagtgcccctggagatagacatggtcgttctggccaggctgtccggggtacaccaagtaactctgtatcaaacaatgggcttgcaagtggtgctaacacaaatctgttcatggagtcacaaagttctttgaaaactaaagaatcacaaccaaaatcagagaaggatcccttcaacagctttgtcgctgattttgaagcaaacaatctccattctgggaccaatgttgctagtaaggaatctgagcttgaagcagaagtgtccaatctgaaggagcagttgaagaaaacatcatcagagaaggccgagatgacagccaagtttgaaaagttgtctgcaatatgccgctcccagcgccaggagattcaagagctcaagcgcactcttgccgagactacacctccatcaagcaaagtcagctcaagattaccagactccgggccacagcgtaaggagaagattgaaggaacggtgtgggagcttgagcaaggaatgctcgcaaactcattacctagctctgaagccaaaacatggcaggcattccctgaccccaaatctcaacctgctcaggtcagaccaaaggttgatcattctaccaatggagcgcaaaacctggcaaggaacgcaaactcaagacaatcaccagatggttggggtttcgggccagatagtttcaggacatcaccagggagtactgccgctcagatcaacaggcccactgctcaggggagttcctcccagagattcagctcaggagcagcgaagaaagtggagcaaccatcagggtgggccggattctaacttctcgtggccattcggcaattgtccattctcattccgaactactagctgccctatgctgcaattgcgagttgaagattgatgagtgtggctatggttcttgccctggcgtagggtgccatgattggttattttcaacattgttcatagttggtcgagccgacctagacattggtgttctgcggccgttttgccaataccttgtcaataaacacatcttcaaatctaattacaacgtctgtatgtactttacgtgtgaagcat

SEQ ID NO: 26596 - DNA, 294 bp, Oryza sativa
  Clone ID: PAT_MRT4530_31370C.1
atgaaggaggcgggtaggacggtgctaacaagggaggcggctaggggtattcctaaagtgtgccggttcatctcccgcctcgacaccaccgattgcaccgccatcatcaacctatcgactgccgaccaaacgtgctacccaaatcgcatctccgtccaccacagagtgcccatgatcgctgacatcgcccttggagtcatcacaatagtgccgagcggagggggagggggagtgggagctattgctatggatagaggaaatattttgagaagtgggtcaactgggtgtggatga

SEQ ID NO: 26597 - DNA, 2253 bp, Oryza sativa
  Clone ID: PAT_MRT4530_31371C.1
atggcgaccgccgggggcgccgccgccgccgccgcgccgcaggcaatggacgagaaggcccggcgcacgcgcgacctcctcgcgagcttctacaacaccgacccgtccgccgctgcggccgcggccgcggcgtcctccgcggcgcggccatcccctaccgcggcctccgcgtcgccgctcgacaccatcaactcggcctccttcgatcccgacgtctacatgaacgtcctggtgcaacaatcaaatctggaagctcttttacagaggcatgtgaagatggccgctgagatcaagaatctggatacagacttacaaatgctagtatatgagaattataacaagtttatcagcgcaactgacactataaaaaggatgaagactaacattgttggcatggaagcaaacatggagcagctcctttcaaagataacatcagtgcaatcaagaagtgacacagtgaatacatctctttttgacaagagggaaaacatagagaaactacatcgtacacgcaatctcctccgaaaagttcaattcatatatgacctgccgactcggcttaacaaatgcatcaagacagaagcatatgcggatgctgtcagattttttactggagcaaaacctattttcgaggcttatggcgacacttcctttcatgactgtaaaaaagcatctgaggaggcaatcgatttagttacacagcacttgaagacaaaattatattcagattctgaacctattgaatcaagagcagaagctgtggtgcttcttaaacagctcaactttccggtggacagcctgaaatcaaacctacttgagaagttagaagattgcctcttaaatttccagaaggagcccacacaggcttcaattggtgatatttcaaagacattccgtgcttatctcataatatttcctgattcagaaaagcgcctcattgaacttgcacaggctttgttctcaaaaagggaaaacaatcttaaagttagtagatccttatgggaggacgccactgccattgatgaagttatacctgaggctgcattaccagctttttctctggagctgctaacacttaaccacaaagatgtactcgccagaacaccctcgacatcaaatgggaagttagaagagtcacagctgcaaactgccatggaaacaagcaaggttaaagtattgcaaggatgtatagatctcctgcaggaatttcatcatcttatagatggcaatacagagttacttgtaaaactgagagatttggttattgattgggtacaagaaggttttcaagatttctttcagaaacttgatgggcattttcatatgctttctgggagaagcaagagtccatctcaagagatggaatcggtgcaaattgataaggttccaacggctttggtgcttatgcttgcacaactttgtgttttcatagaacaaacagcaattcccaaagtcacagaggagttggcttcttctttttctggaggtggtgcacgtagctatgaatatgggccaccttttgtgcctggagagatatgccggctttatcgttcatctggggagaagttcttacatcatcacaaggagccgcgggaagtgaatatgtttgttgatctacttctcctagagttcaatggagtagtgtctgaagtcaaacaggtattacctggtttgattcggcgacatcgacattctgatagcactggcagcacaacttcctcaagaagtaatccaatgcgagaggacatgttgaaccgatcaaacacacaccgtgccagaagtcaatttttagaaaatcatctagcaaaattattcgagcagaaaatggaaatattcaccaaagttgaatacacacagggcacggaaaataaaaatgccaagaattttctcaatatgggtgagactacatttaaaccactgcggcaacctttcttcttgttagatactgcatcttctgaatctgtaatttctgctgtcctcaagctctgcctgaaaagcttgcaagaatttgttcggcttcagacattcaacagaagtggatttcagcaaattcagctggatatggaatttctcaagacatcccttaaggagtttgttgatgatgaagcagctattagctttttacttaaagaggtgaacaatgctgctcacgagagatgtcttgacccaatccctctcgagccgcccatattggataagctcatcagtgcaaaactagcaaagattaaagagcaaagtccaaatatgcagtag

SEQ ID NO: 26598 - DNA, 1112 bp, Oryza sativa
  Clone ID: PAT_MRT4530_31372C.1
gttgcttcctcacaaaattgaattaatgtggacggtggactcacgtttgattaaattcaagtccttgatcatcaatatttcccctgaactttcgagacaatgcacacaagactaacagagcatttctcgatgctgagagctcaacatagtattacattttcggggtgagttggttcagtttgagtgtttgacagatttacatatgcacatagctgtgaacggtgtatgaccagatgaaactgattgctaggggaaggaataaccaattgggcgtagctactgcatatttggactttgctctttaatctttgctagttttgcactgatgagcttatccaatatgggcggctcgagagggattgggtcaagacatctctcgtgagcagcattgttcacctctttaagtaaaaagctaatagctgcttcatcatcaacaaactccttaagggatgtcttgagaaattccatatccagctgaatttgctgaaatccacttctgttgaatgtctgaagccgaacaaattcttgcaagcttttcaggcagagcttgaggacagcagaaattacagattcctgtgtgtattcaactttggtgaatatttccattttctgctcgaataattttgctagatgattttctaaaaattgacttctggcacggtgtgtgtttgatcggttcaacatgtcctctcgcattggattacttcttgaggaagttgtgctgccagtgctatcagaatgtcgatgtcgccgaatcaaaccaggtaatacctgtttgacttcagacactactccattgaactctaggagaagtagatcaacaaacatattcacttcccgcggctccttgtgctttatccagactggagttgtaaatcgtttattaagaagtttggagatcttctgtgtcttcatatttatgtaatgatgtaagaacttctccccagatgaacgataaagccggcatatctctccaggcacaaaaggtggcccatattcatagctacgtgcaccacctccagaaaaagaagaagccaactcctctgtgactttgggaattgctgtttgttctatgaaaacacaaagttgtgcaagcataagcaccaaagccg

SEQ ID NO: 26599 - DNA, 594 bp, Oryza sativa
  Clone ID: PAT_MRT4530_31373C.1
agcacggaatgtctttgaaatatcaccaattgaagcctgtgtgggctccttctggaaatttaagaggcaatcttctaacttctcaagtaggtttgatttcaggctgtccaccggaaagttgagctgtttaagaagcaccacagcttctgctcttgattcaataggttcagaatctgaatataattttgtcttcaggtgctgtgtaactaaatcgattgcctcctcagatgcttttttacagtcatgaaaggaagtgtcgccataagcctcgaaaataggttttgctccagtaaaaaatctgacagcatccgcatatgcttctgtcttgatgcatttgttaagccgagtcggcaggtcatatatgaattgaacttttcggaggagattgcgtgtacgatgtagtttctctatgttttccctcttgtcaaaaagagatgtattcactgtgtcacttcttgattgcactgatgttatctttgaaaggagctgctccatgtttgcttccatgccaacaatgttagtcttcatcctttttatagtgtcagttgcgctgataaacttgttataattctcatatactagcatttgtaagtc

SEQ ID NO: 26600 - DNA, 1919 bp, Oryza sativa
  Clone ID: PAT_MRT4530_31374C.1
tcacttgccacctgctttatgagtctggctcccagtaccaatcttcttcgatttgcttccaacttcaccaatccaattgtcttcccaaaagcatgtattttccccatcaccaactttcttcgaacagaacttgtagaagatgtttttaacttccatgagcccttgccagaagtgtgaatcaccagctttgacagagataccagcaagatttttgtttttgagatacttatctcttagtatatcttgccaccaaccttcaatcaacttattatcttcagctctttgtatcaaaacagtcaaagcttctgctcccatatctaattttatgttgttcagttttgaatgaccaaaaagatccttgtagaaagcagtgatgtatctcaacagctcagcttgaccttcaaaggccttcatcctcttatcttccttgtctttcagtctcttgcttctcctcatctcttcatcttgacttccaagagcttcttcagttagattaatccccaacctcttagcaaaacttcccttagactcctgagaatccatgtaatcttcactgtcccccggatctactttgtccttgtcttcttgattcaaacccatatcaaaactgactctattctccttatcccagtctcctttctgcagttgcattgccaactccatgtctctcaagatctgtgcacatttgatcttatgttctcccagcatcaattctggcaccaggacttgcttcctctctctgaccagctccatcattccaacttttgccctgatcacattgctagctctgaaagtagccatatcaacctccaagacaggccctagatttgacccaatttcatacaaagcttggtaacccttcatttcctcaggaattccagtgattttgacccagacaatatgcaacttcccaactgcttcagatttctgggtccattctttcacattaacttgcacatcagtgcccttgacattgaaataatcaaagtttgcaagctcatcaaactttatcttgttacgaaatctcatctgaaagcttccattaggcattgctttagctttccaaacccaattccacttaaattgttgcgtgaaaccttgctcaagttgagcttctgtcaattctccaccaaagacagtagagatcatagccagaggattattatgctccttaggtgggtcaggcttagtgttttgaattaagatgcaacctaaacctggagcaccataccctactagctttgccataggcctcggctgcttgtcatagatgcaatcctctgtcctatgtgtgggtttggcacaatttatacagaagacaacattgctacaatccctagccatgtggccaaaacctttgcatctgtggcagaaaattctctgtgggttagtttgcataccagtgcgagaattgggtggtggagttggttgctgggttgcagtctgaggagtcactgcagatgtcgcaatcttctcttcagtttgattcttctccttctgaactggacgatattgctgcagcttcccccctttgttcatctggcccctcatctctccacctccagccttggtggattgctcactcccagcttgcgaggagcccccctggtgcgccactgcgggagggcgaccttcctcaccacggctggacgccgacgccaccctccgccccgggcagcaatgcccttgatgcgccattcgcccacgaaccacccttgcaaatcgacgcttatcgccttggattgtgcctctccaccgagattcaccacctccgatccccaatcgaggccactccttcgcctccacaccctctcaaccctaaatttctcgggctctctccccacagatgatggagatggggaaccaactgttggaggtgagtggatttggggggatccattactgtcaaaacggggcat

SEQ ID NO: 26601 - DNA, 566 bp, Oryza sativa
  Clone ID: PAT_MRT4530_31375C.1
tccatgatgcactggttacaaagagaagatcgagtttgcgacatacttctcagaagagatatctggaggattgctctttgacatggcagatcagataccgttcacttgccgagctcgtaaaagttggcagcttactggacttccaggatgctgctgttgatttcctgctcaagtcaaagaatttgcagctgttccctgaagatgaggctttcctgaaggctgctctgcaagatggtggtgaggactgttagcggtattcagatcatgcttcttcgcttgttgctgtggttgctaaaccggttgaagatggcatgtaagatgatggtgctttgcatctggaggaccctcctggatgggacttttggtctctgctgataagatatgctgctactagtattaagctgttatatattgcttgcctgtaatgtgaggcttcgtccttctggacctgaacatgtgtgtggtttaagtgtggatgtttaattaagtgcgcttattaacgtctctatgtaccgcttggactggctcgtgctgtcttccctattcaaaaaaaaaaaaaaaaaaaa

SEQ ID NO: 26602 - DNA, 758 bp, Oryza sativa
  Clone ID: PAT_MRT4530_31376C.1
atttcctttggaaataggcggattcgagattgcttcggattcgttttcccccgatctttccttctcgtcgccggcagccgtgggccttcgccgccgcctccttgcccctttaaaaggatccccgagctctcctctacccgccgccaccctcgccttcgtctctagtcgtctgtagcgccctagcgccgtgccgcctcgcgccgccgtcgtcgccaccgctccagccgtgcgccgccgtcgctccagtcgtcgccgtcgttcgggaagaccgccgtcgtggtcgccaagtcgccgccgtcctcgtccgccccttcgccgccgccgaagaccgccggagctccgtcgccgccgccaacccgatctccgccgccgcttctttctcgccgccggcgccgtccgttgcccttccgccgttgttttggtcaccggtgagttcgctgcgtcgccctctacccgttggtgccctccgtttgcgcgcccgagccgccgagtcgccgccggtgctgacgtcatcgctgacgtcatcgggatcgtccgccgtgagccggtcgtggaccgtttgatctcggccgtccgttttggatagggttgatctcggccgttcgtttccgtgaaccgctgccgtgcacccggtccaccgcaaaccctagccgctgacgcaataatccttcttttccttttgtatagcatgattcattgcggagcactagactgagaagtggcggagataagcccacgggggtcgctggggagtccat

SEQ ID NO: 26603 - DNA, 189 bp, Oryza sativa
  Clone ID: PAT_MRT4530_31377C.1
gttttaggtcaaagttataggcaatatcagctgcagtcgcctgtcctgctacgcaacaggtgcttagcccataagagttcgaaaggcagcgttggctagcgcaaccttttgcaacacgctttcaacggaacacatgcaccgccggcaatccaagaactcgcagcaccctgttgacaagtcacgccgaga

SEQ ID NO: 26604 - DNA, 1563 bp, Oryza sativa
  Clone ID: PAT_MRT4530_31378C.1
atggcggtcggcgtcgtcgccggcgtcgagagccaggagcgccgcggcggcggcgccggaaccggaagggtcaccgcgttcgtcgtgctgtcgtgcgtcaccgccggcatgggcggcgtcatcttcggctacgacatcgggatcgcaggtggcgtgtcgtcgatggagccgttcttgaggaagttcttcccggaggtgcaccggcggatggagggcgacgtgcgggtcagcaactactgcaagttcgacagccagctgctcacggcgttcacctcctcgctctacgtcgccgggctcctcaccacgttcgccgcgtcgcgggtcacggcggggagggggcgccgcccgtccatgctcctcggcggcgccgccttcctcgccggcgcggccgtcggcggcgcgtcggtggacatctacatggtcatcctcggccgcgtcctcctcggcgtcggcctcggcttcgccaaccaggccgtgccgctctacctgtcggagatggcgccgtcgcggtggcgcggcgcgttcagcaacggcttccagctcagcgtcggcgtcggcgcgctcgccgccaacgtgatcaactacggcacggagaagatcaggggcgggtggggatggcgcgtctcgctggcgctcgccgccgtccccgccgggctcctcaccctcggcgcgctcttcctcccggagacgcccaacagcctcatccagcagggcaaggtcgaacgctgcgacgtcgagcagctgctcaagaagatccgcggcgccgacgacgtcgccgacgagctcgacaccatcgtcgcggcgaacagcgccacggccggagtcggcggcggcggcctgctgatgcttctcacccagcgacggtacaggccgcagctcgccatggccgtgatgatacccttcttccagcaggtgaccgggatcaacgcgatcgcgttctacgcgccggtgctcctccgcaccatcggcatgggcgagagcgcgtcgctgctgtctgcggtggtgacgggggtcgtcggcgtgggcgcgacgctcctctccatgttcgccgtcgaccgcttcggccgccgcacgctgttcctcgccggcggcgcccagatgctcgcatcgcaggtgctgatcggcggcatcatggcggcgaagctgggcgacgacggcggcgtgagcagggcgtgggcggcggcgctgatcctcctgatcgcggcgtacgtcgccggattcgggtggtcgtgggggccgctgggctggctcgtccccagcgaggtgttcccgctggaggtgaggtcggcggggcagagcgtgacggtggcgacgagcttcgtgttcaccgtgttcgtggcgcaggcgttcctcgccatgctctgccgcatgagggccgggatcttcttcttcttcgccgcgtggctcgccgccatgaccgcgttcgtgtacctcctcctgccggagaccaagggggtgcccatcgaggaggtcgccggcgtgtggcggggccactggttctggtccagggtcgtcggcggcgacggcgaggaggaggagcgcaataatggcgggaagctttga

SEQ ID NO: 26605 - DNA, 350 bp, Oryza sativa
  Clone ID: PAT_MRT4530_31379C.1
ttttcctgcttgtagattcctggcaggttcctcttgtccagcgaggaggcgttcgtaggcatgtagactgcgagatagtgccgtggttggtacgccggccgccggcgaagagcaccggattcgcgagaggggtttcgccgcggggcagtttggtcgagcttaggttgctccctgcgtcggcgcgggagggacgagggctgagccgctgacggttttgtactagttcgcttccatgtgttggctggctttttcatgcatggttgctgcgcaacaagcagcgatggctagcaagggagtccagggggtccttgctttctctgcctctttaaccgccaagccgatgtgaaagt

SEQ ID NO: 26606 - DNA, 2877 bp, Oryza sativa
  Clone ID: PAT_MRT4530_3137C.1
gcctattggtttgtggcacacacgcgcactccgtcgaccatctgcacgtgatggcctatacggttggttggtcacaccaccgttgatgggcgaccacgtcttcaccgaccggctggccttcgtcaccgccgactggtgtttccgtctgcacggctggcctattaagccgccgctgttgggcgtctacgacttcaccaccggcctgcctccgtcgccgccgactggtgtccccgcctatacggtcggttggtcacaccaccattgatgggcatcgtcatctacactgccggcctgcctccgtcgctgccgactggtgtcctcgcctatacggttggttggtcacaccaccgttcatgggcgtccatgtcttcaccgaccggctggccttcgccgccgccgactggtgtttccgcctgcacggctggcctattatgccgccgctgttgggcgtcaacgacttcaccaccggcctgcctccgtcgccgccgactggtgtcctcgcctatacggtcggttggtcacaccaccgttgatgggcatcgtcatctacaccgccggcctgcctccgtcgccgccgactggtgtccccgcctatacggtcggttggtcacaccaccgttcataggcgtccacgtcttcaccgaccggctggccttcgccgactggtgtttccgcctgcacggctggcctattatgccgccgctgttgggcgtctacgacttcaccaccggcctgcctccgtcgccgccgactggtgtcctcgcctatacggttggttggtcacaccaccgttgatgggcatcgtcatctacaccgccggcctgcctccgtcgccgccgactggtgtccccgcctatacggtcggttggtcacaccaccgttcatgggcgtccacgtcttcaccgaccggctggccttcgccgactggtgtttccgcctgcacggctggcctattatgccgccgttgttggatgtctacatcttcaccgttggctcaccttcgttgccgtcgactggtgtttccgcttacacggctggcctattatgccgccattagtgggcatcttcgctttcaccgtccggcttgccgtcatcgccgccgactggtgtcttcgcctatacggttgattggtcacaccaccgttgttgggcgtctacgtcttcaccgaccggccgcctcgtccgccgccgactggtgttttcgcctatacgtttgtttggtcacaccaccgttgttgggcgtctacgtcttcaccaaccggccgcctcgtccgccgccgactggtgtttccgcctgcacggttggcctattatgccgccgttgttgggcgtctacatcttcaccgaccggccgcctcgtccgccgtcgactggtgtttccgcctgcacggctggcctattatgaccgccgttgttgggcgtctacgtcttcaccgaccggccgcctcgtccgccgccgactggtgtttccgcctgcactgttggcctattattccgccgttgttgggcgtctacgtcttcaccgaccggccgcctcgtccgccgccgactggtgtttccgcctgcacggctggcctattatgaccgccgttgttgggcgtctacgtcttcaccgaccggccgcctcgtccgccggcgactggtgtttccgcctgtacggctggcctattatgaccgctgttattgggcgtctacgtcttcaccgaccggccgcctcgtccgccggcgactggtgtttccgcctgtacggctggcctattatgaccgctgttgttgggcgtctacgtcttcaccgaccggccgcctcgtccgccgccgactggtgtttccgcctgcacggctggcctattatgaccgccgttgttgggcgtctacgtcttcaccgaccggccgcctcgtccgccgccgactggtgtttcagcctgcacgggtggcctattatgccgccgttgttgggcgtctacgtcttcaccgaccggccgcctcgtccgccgccgactggtgtttccgcctgcacggctggcctattatgaccgccgttgttgggcgtctacgtcttcaccgaccggccgcctcgtccgccgccgactggtgtttccgcctgcacggctggcctattatgactgccgctgttgggcgtctacgtcttcaccgaccggccgccgcctcgtccgccgccgactggtgtttccgcctgcacggctggcctattatgccgccgttgttgggcgtctacgtcttcaccgaccggccgcctcgtccgccgccgactggtgtttccgcctgcacggctggcctattatgaccgccgttgttgggcgtctatgtcttcaccgaccggccgcctcgtccgccgccgactggtgtttccgcctgcacggctggcttattatgccgccgttgttgggcgtctacgtcttcaccgaccggccgccgcatccgccgccgactgctaccactactgatggaaatcatcgtcttccgtcgccgactggttatgccgccgccgactggtgcttttatcttcacaactgcgcgtcttcactaccggtttgcttctgttgccgccgactcgtgttcacttcatcacggcaacgcaactttgtcatcatggtggagcgacttcatctttattatcttcggtaccagcaaactctattgctgctacttcacaagttttgctacttcaccaaccataacgtctttgtgaatctcgacatctcggcatgcgatgccgtgttattttactacaacaagtggctctccaacattcatgatttctacttggacatcttcaacacatatcttcaatcaagcaataactattcgacgacaagaagctacagttctcgactctatgttcagttgtttcccaac

SEQ ID NO: 26607 - DNA, 489 bp, Oryza sativa
  Clone ID: PAT_MRT4530_31380C.1
ggtctagggactgagcgtcgctctgactgtatggaatttgtttgtctttgtcccggtggtcacagatacggcacccagggacatcagcttctcccgttttatcttgttcgcctatcgattattcttcccgtgaaacatatacacagttagagtcttgccctgtgttcccgacgggaagtcttctctctcgccctgcctgcggggttgtcttgtcacgggagcacgtttcagcttcttgtaatctctctattccttttgctttgtgtacttcaagctttctcattgtttcctttggcttttttcattttcttgatcttatttgcagtttagtctatcggcacatctccttacctccgactgtatccctacctaccctggagggcacagggggaagaactaaaaaggagaggaaagaagagattacagaacataccaagcatcccaatatcagagtccacgctttcctgataaaaaaaaaaaaaaaaaaaa

SEQ ID NO: 26608 - DNA, 375 bp, Oryza sativa
  Clone ID: PAT_MRT4530_31381C.1
atgccacgtcatctctcccttcccctctctctctccctcactttgctcctcgtctggtggccgatgatgggtgatgcggcggcgacttgccttgctcttgttagattggctgataccccaggcatcaaaagaggactagaatctccttcagcatggaagtccccttggttcgtagatatgcaatttcagggttcatacttcgtcagcccagctgatagaacctacgatgcgctaagattggtgaagcagatagtaataatgcgcagactgctgctgctttggcagaagcccggctgggcctgggcatatgacatatcagcatatggcattcccacttcagctctcaaggtttgttccgcctcttttcagtgttga

SEQ ID NO: 26609 - DNA, 159 bp, Oryza sativa
  Clone ID: PAT_MRT4530_31382C.1
gagacggtcagctcgatcttaatctgtagcagctcttgttggttcacgacgaatgactcgctaagatcgactagatgttcactaacacaaaacctgtacactcattacctgatggacaactataagacaacgatttgcatactgaacgaagctggcact

SEQ ID NO: 26610 - DNA, 2604 bp, Oryza sativa
  Clone ID: PAT_MRT4530_31383C.1
atggcaaacatgaacataaccaccatcttggagaagcgattgaacaaagagggcttcaaagctgaccaagacattgagccaaagttgactactaccgttcttcaacaactggaagatacttcaggagaagtctctggtttagctgttaaatgcttggctccacttgtcaagaaggttggtgaggatagtgtggtggagatgaccaacattctttgtgataagttactcaatggaaaggaccaacatcgagacactgctagtattgctctgaagacaatcattgcggaagttacgacaacaacacttgctgaaaagattttggtgtctcttgccccacagctaatcaagggcgccactgctggaaaaagtgcggaagtgaaatgcgagtgccttgatatattgggggatgtacttcatagatttggcaacttgatcacaaaagatcatgattgcatgctgactgccttgttatcccagttgagctctaaccaagcaagtgttaggaaaaagtctatttcttgcattgcatcacttgctgcatgtctgtctgatgatttattagccaaggcaacttttgaggttgtccagttgcttaaaaatagaagtgcaaaatctgaaattgcccgaacaaatatccagatgattggtgctctaagtgagagcgcaaatgaatacacagatgatgaggatgcaagctggaaagtccggagggcttcagcaaagtgcttatatgcaattatagtatctcgtcctgaaatgttgtctaagatgtatctggaggcttgtccaaagttaattgaatggtttagggaaagagaggaaaatgtaaagagcactgagcctatgttggcaatccttttgcttttcagccctagatggttgctgaaacaagaagtacctaaggttgtcaaatccatcaataggcagttgcgtgaaaaatcaatcaagacaaaggataagtcatctacctccaacctgaagattgaagcccttgtatttacaagacttgttatggcttcacattccccagctgtgtttcatccatacatacaggctctttctggcccaatattgtctgctattggagacagatatgacaaggtcaccgctgaggctttaagagtctgcgaagagctagttcgtgtacttcgtccaaattctgagccacactctccagattacaggccatatattggtccaatctataaggctatcttggcccgcttggcaaatcaggatcaggatcaggatcaggaagttaaagagtgtgccatatcttgcatgagccttgcgctatccacgtttggtgatggtctccaaagggaactgccggcatgccttcccgttcttgttgatagaatgggtaatgaaataactagacttacagcagttaagatattagaaagtattgatgatttgacactaataagatatctaattaagtggattcctgcccaaccttgggccgatggggagatttatctgtattctccagatacacatagttggtcttctcaaggcatgaagatgaaattctttatcatggatgaaaagtataatatggaagccaaagggatttataagaagattgatgagttgtgtttgctttgcatgataagaagatcggtcgtattattctgtgttatccaaaatttgatcaactgcttaaagattggctgcctgctcaagccttttaaaggccggtttataccacccatatggatgcatcttataaaagatgtcatatcttacatgagcaacattgataacttggctgcaagcttaggaagtattgactcatatgtgttggagacaaagcccgagagaataaaggtcatcctttttccttttgagtcaagagaagtaaattggcgaaaagattttgctacatttctgatagaacatcttcggaacaaatggaaatccaccatgttggatcacttcatcaacatcttacaaaaagatttcaaaattgggtacattcaacatcatccgttgttgcaagatttcaatcagctttctaacatgataaggatgacatggaaagaatctaagtatttaactgttgagaggagagtattgctatcttcaacattaaatgctattaggaacaacattccatggacatcagtgacaactatggatgctgttgtgaatgaatacatttctaaagcaacaaatgactccttgggcctctttatggaaattaagaagatagcagcacattacattgaaaaccgccgaaaactgaacaaagaaaaagggatatgcaataggaaacaggtacatccaattgagataatcgaagaaatctggccaggaactttcaacatagtacctacagatcttgatggcctaattacaactatgtgttttgtcccacctagcatcttgctatacccaatagcagttttcattgcaatgctgaaggatctggagtactctgaaaatcatgaatgggttagtgttgaaggcgattatgcaacaattgggatttcagatcatgcccagatactgggaggggcagttccaacacttactactagaagggtagagggtatccatgactgcaagtgggaccctttacatacagatataatataa

SEQ ID NO: 26611 - DNA, 1002 bp, Oryza sativa
  Clone ID: PAT_MRT4530_31384C.1
cggagtgaaggagcaactgcgcctactttgcaaggtgtacgcgctgcatcttcgctatcacaagcatctgagagactggctgccgacagggcagcatcacagcaaggcaagggagcagctgggcagaacgagcacctaggaaaagctgtatgcccacgtgcggtcgaacgcggtggctctgggggacacgttcaactacaccggccactacctggggtatgagctggggcgctacgacggcaatgcttacccggctctgtacgaggaggcgtccaaagaccccctcaactgacatctgtagtgccggacggctaccagaagcacctccgccctctggtcaagcagcagctcaagctctgcaggctatgatcatccatacatcatcctccctttgttgctctatcaatcatatgatactgcatacgattcgagtagcagtgaaataacaccagcatatgccaggggctgggctgctgctagtattatctctttctagaactatcattaattcgaggggagctgcaatacgcttatttatttgggaaaacctgggattctatcgcatggcgacttgatttacttgtaaatttcaaccttccacttcccccctagttcagggcttgttcattcgactccttcgcgctacaatacgtactttccactcatgatggtttggggcggaagtggatgtggggagctaagctttagcagcaataaccgtcgacttacgttacagtaatgtttacttcgtcgtccttccgccgaccactatcacttcccctcacaacccacatagaattcatagtcttcttgtctccaacatctatacctcttttgtatgtgaataatatgtagttctattcctctttatagtatcttgcaccgttatgatctcccgtacctccactagttactcctcgatacacaccagactaccatcgtctcgccagttcatcttccgctttatttgataaaagtgtgtgcttatgtgttttggattgt

SEQ ID NO: 26612 - DNA, 620 bp, Oryza sativa
  Clone ID: PAT_MRT4530_31385C.1
tggatcccccgggctgcagggtttcatccatacatacaggctctttctggcccaatattgtctgctattggagacagatatgacaaggtcaccgctgaggctttaagagtctgcgaagagctagttcgtgtacttcgtccaaattctgagccacactctccagattacaggccatatattggtccaatctataaggctatcttggcccgcttggcaaatcaggatcaggatcaggatcaggaagttaaagagtgtgccatatcttgcatgagccttgcgctatccacgtttggtgatggtctccaaagggaactgccggcatgccttcccgttcttgttgatagaatgggtaatgaaataactagacttacagcagttaaggagatagaacacaatggacaacctttaggattagtgaaatcgccatcatcagtagtagaacagaatgagcagagcccgagggagttgcggatccaagcgaaggccaagacccgcaagactttgagcaaggcaagtcatcactattccttgaacatgttgatcccaattgcgaaattattttgtttacaaataaaattgcatgcaatgatgaacatcccacttgtgattatgccatgcct

SEQ ID NO: 26613 - DNA, 4013 bp, Oryza sativa
  Clone ID: PAT_MRT4530_31386C.1
atggcaaacatgaacataaccaccatcttggagaagatgacagggaaagataaggactacagatatatggcaacttcagatttgcttagcgaattgaacaaagagggcttcaaagctgaccaagacatcgagccaaagttgactactaccgttcttcaacaactggaagatgcttcaggagatgtctctggtttagctgttaaatgcttggctccacttgtcaagaaggttggtgaggatagggtggtggagatgaccaacattctttgtgataagttactcaatggaaaggaccaacatcgagacactgctagtattgctctgaagacaatcattgtggaagttacgacaacatcacttgctgaaaagattttggtgtctcttgccccacagctaatcaagggcgccactgcttcgggcgacttgataacagtgattacaattgaaagtttcagcctgctaattaagtttacagcgtttctgatggtgcattatacttttgagggaaaaagtgcggaagtgaaatgcgagtgccttgatatattgggggatgtacttcatagatttggcaacttgatcacaaaagatcatgatagtatgctcactgccttgttatcccagttgagctctaaccaagcaagtgttaggaaaaagtctatttcttgcattgcatcacttgctgcatgtctgtctgatgatttattagccaaggcaacttttgaggttgtccagttgcttaaaaatagaagtgcaaaatctgaaattgcccgaacaaatatccagatgattggtgctctaagtcgctcggttggataccgttttgggccacaccttgctgaagttgttcctttgctcataaactattgtacaagtgcatcggaaaatgatgaagagctccgtgaatacagcttgcaggccctcgagagttttatgctgaggtgtccaagagatatatctccatattgtgagggtattttaaatcttgcattggaatatataagctatgatccaaatttcactgatagcatggaggaggacactgatgatgaggctcaggatgaggaagatgatgatgagagcgcaaatgaatacacagatgatgaggatgcaagctggaaagtccggagggcttcagcaaagtgcttatctgcaattatagtatctcgtcctgaaatgttgtctaagatgtatctggaggcttgtccaaagttaatcgaacggtttagggaaagagaggaaaatgtaaagagcactgagcccatgttggcaatccttttgcttttcagccctagatggttgctgaaacaagaagtacctaaggttgtcaaatccatcaataggcagttgcgtgaaaaatcaatcaagacaaaggataagtcatctacctccaacctgaagattgaagcccttgtatttacaagacttgttatggcttcacattccccagctgtgtttcatccatacatacaggccctttctggcccaatattgtctgctattggagacagatattacaaagtcaccgctgaggctttaagagtctgcggagagctagttcgtgtacttcgtccaaattttgaggcacgcactctagattacaggccatatattggtccaatctataaggctatcttggcccgcttggcaaatcaggatcaggatcaggaagttaaagagtgtgccatatcttgcatgagccttgtggtattcacgtttggtgatggtctccaaagggaactgccggcatgccttcccattcttgttgatagaatgggtaatgaaataactagacttacagcagttaaggcgtttgcagtgattgctaaatcacctcttcgcattgatctttcgtgtgtcctagaccatgtcatttctgagctcacggctttccttcgaaaggcaaacagagctctaaggcaggctacattgggaacactaaattctcttgttgttgcgtatggtggtcaaattggatcctcttatgaaactattattgctgaactttctacgctcattagtgacatggatttgcacatgactgctcttgcgctggaactttgttgcacgatcatggtcgatagaaaatccatccaaaatgttggtcttgcagtgaggtacaaggttttgccccaggcccttattttgatcaggagtgctctcttgcaagggcaggcactacaggcactgcagagattttttgcttcactggtccagtctgcaaatacaagctttgacactttgttggattctcttatttctactgctaaaccatcgcagtcaggtggacttgccaaacaagcattgtcttccattgcacagtgtgttgctgtgttgtgcttagcagctggggatcagaagtgtgcctcaactattgaaatgcttaaaggcattttaaaagatgacagcactactaattctgctaaacagcacatggccttgttatgtttgggagaaattggaagaaggaaggacctcagcaatcatgctcaaattgagaatattgtcattgagtcatttcagtcaccttttgaggagatcaaatctgcagcgtcatatgctctcggaaacattgctgttggaaatttatcgaagtatttgccttttatcttgaatcagattgacaaccaacagaagaaacagtatctattgcttcattcactgaaagaggtaattgcacggcagtctgttgaccatactggccagagtgagctccaggattcaaacattgagaagattttggcattgctctttaatcactgtgaaagtgaggaggaaggagttcggaatgtagttgcagaatgcttaggcaaaattgctctgattgaacctaggaaattaatccctgctctaaaggaacgcacatctagtcctgctgcaaacacaagagctacagttgccattgctataaaatattcaattgttgaacggcctggaaaaatagatgaaattatgtactccgagatttctaccttcctgatgttgattaaagacagtgacaggcacgtgaggcgtgcagctgtgctggccttgagtacagctgcccacaacaagccaaatttgattaagggtcttcttcctgaattattgcctcttttgtatgaccaaactgttgttaagcaagaattgatcagaacagttgaccttgggcctttcaagcatgttgtggacgatggtcttgaactcaggaaagctgcctttgaatgtgtggatacattgctggatagctgtcttgatcaagtgaacccatcatcatttatcgttcctttcctcttatctggtttaggtgatcattatgatgtaaaaatgccttgccatctgattctctcaaagctagcagacaagtgcccttctgctgttctggcagttttggactcattagttgaccccattgagaaaactataaatcacaaacccaagggcgatgcagtgaagcaagaggttgatcgcaatgaagacatgattcgaagtgctcttcgagcaatcgctgctctaagccgcataagtggtaatgattacagcatgaggttcaagaatctgatgaacaagataatggcctcacctccgcttgctgacaagtacaactcggtgcgcagcgagtaagagctgatctttttgtatatggtagaaaatagttggagccgacttggtatatgtgccactgcctattctgaggtgaagattcaacccagcattgccctatatttttctggtggagctagtccgaaacactgaacgatacagctgagactaagaggtggtttgaaaatttgcgaacacaaatggctggttggaagctagactttttttttttgtcttgtacaaagtatggcggcaattcactagattcagtaaagttggattatattttagccgtcttgtgcgtattttttcattgcgtggtactagtaattcttccaatctctagacgccgtccttttccaagtttggttcaagcgtgatattgaaaattaaaaacttgaaaatcgaattaaaaacgatcaatttttaacttg

SEQ ID NO: 26614 - DNA, 492 bp, Oryza sativa
  Clone ID: PAT_MRT4530_31387C.1
gaaactcgaccctcactctactctcctgcccaccacggctggtggcggtatggcggattacactgctaggacggtgaaggacgtgaaccctcatgagttcggcaaggcctacttcgcccacctcaagcgctcaggcaagatggagctccctgagtgggttgacactcagtgaagactgcgaggctcatggagctacctccttatgatccggactggcactacactaggtctatctcgattgaaaggaagatctacctgacgcagggtctagctgtacgttgttttcagacgatctatggaggaacctcagaggaacatggtcacgcccctcgtacttgtgcatgagcagggggactctgtcacgcagacatgactatcacacctgcagaccatgggtattattgatgtcgaccctaacggtggaagactcatcaccttacaaggaaggcgtgatctggaccaagtgtccacaagagttgctgctaccatctg

SEQ ID NO: 26615 - DNA, 2142 bp, Oryza sativa
  Clone ID: PAT_MRT4530_31388C.1
ctgcaggaattcggacgaggcttatctttgcagctaatagtagccatctcgcactaaaatggcgatcccgacctcgtgctgctgccaacctggggcaccggccacctcatgtccctgctcgacgccggcaagcggctgctcggctgccgcggcggcggaggcctctcgctcacggtgctcgtcatgcagccgccgaggaaggagtatgcgtccgccgtcgccgccaccgtgcgccgggaggaggcatcgggcctcgacatccgcttccgccacctccccgccgtcgagcccccgaccggctgcgcgggcgtcgaggagttcgtctcccgcttcgtgcagctccacgcggaccacgtgagggcggccgtctccggcctggactgcccggtggccggcctcgtcatcgacttcttttgcacgacgctgctcgacgtggcccgggagctcgccgtcccggcctacgtgtacttcacctccaatgccgcgtgcctcgctctcttgttgcgcctgccggcgctggagggggaggtcaccgtggagttcgaggagatggacggcgaggtggacatccctgggttgccgccggtgccgccgtcgtcgctgccgatgccggtgatggacaagaagaacccgaactacacgtggttcgtgtaccacggcaggcgtttcatggaagccaacggcattatcgtcaacacggtgcgcgagatcgagcggagcgtccttgccgccatcgccgacggccgcgtcacgccgggagtccgtgccccggtgatccatccggtaggcccggtgatctcgttcaccccgccctccgatgacccgccgcacgagtgcgtgcggtggctcgacgcgcagcctccggcctccgtcgtgttcctctgcttcgggagcatgggcagcctcgcgccgccgcaggtgctcgaggtggcgcacggcctggaacgcagcgggcaccggttcctgtgggtgctgcgcggcgctccggccgccggcggcagcatgaatcccaccgacgccgatctcgacgagcttctcccggagggtttcctggagaggacgacggggagagctctcgtgtggccgacgtgggcgccgcagaaggagatcctcgcgcacgccgccgtgggcgggttcgtgacgcacggcgggtggaactcgacgctggagagcctgtggttcggcgtgccgatggtgccgtggccgctctacgcggagcagcacttgaacgcgttcacgctggtggccgccatgggcgtggccgtggccatgaaggtggacaggaaacggaacaacttcgtcgaggcgtccgaggtggagcgcgcggtgaggtcgctgatgggtgggtcggaggaagggaggaaggcaagggagaaggcggcggagatgaaggccgtgtgccggaaggctgtggaggagggtgggtcgtcggacatggcggtgcacaagctctacgaggagctctccacgcagacggcttaaaatactactctctctgttccgtttcaggttataaaatattttgacttcacttaaagttaaattatttaaaatttgattaagataatagctgctgcatgaaccgggagatgaagtcctcgccgccgcggaagtccgggagctcctcggcggggaggcagtggaaccggacgtcgaagccggagtgctccgacgcgccggccgcttcacggcggatgatctcgtcgatctcgggcgcgcggtgggactccggcagctgcgcgaggagcacggtgggcgacatggcgccgcggccgtcgtcggcgttgccgcagaagccaacgcggagcatccgcttgccgacttccagcatgggcgtgaggtggccggggacgcagaacgggatcagcaccaccgtcgctgggctcgccgtggctggagccatagctcacagattacgcgcgggaagcaggccggaaacgagattgtgttgcgtgctttcgtgaggcttacagcgtttcttctttcttcttttcgcgtgcacatggggtgcctcaaatggggatgtctaacatgaatgaacagacactgattcggccaccggccgcgtcactaatgcactgtttggttggttggttgtctaaaaaaaaaaaaaaaaaaaaaaaaaaaaaaaaaaaaaaaaaa

SEQ ID NO: 26616 - DNA, 1050 bp, Oryza sativa
  Clone ID: PAT_MRT4530_31389C.1
atgtcgagcaactacggcactgcacggtggtgcgacgccatggccaggtcatcgccaaagttgaggctttcaaataacatgtttgaaggggtgttccctcccatcatcttccagcatgagaaacttacaactattaacctcaccaaaaatctaggaatctccggaaatttgcctactagtttctcaggtgacagtagcttacagagtttatctgtcagcaacaccaacttctcagggacaattccaggttctatcagcaaccttagatctctcaaggagttggctcttggagctagtggtttctctggagtgctgccctcctccattggtcagctgaaatccttgtctttattagagtggtcactgatgacaaaatcatctgtgacggatgaaacacccgtcacagataacccatctctgaccgatgcactgcaggtgctaagtctaaaggataatcatcttaccggcgagttacctgataatatcaaggaaggttgtgcattaagcgcattagatttcagcggcaattcgattcaaggacaactaccaagatctttggtcgcttgcaggaatctggagatccttgacattggaaacaataaaattagtgactctttcccatgttggatgagtaaacttcctcaacttcaagtcctggtcctcaagtctaacaagttcattgggcagatattggatccttcttatactggaggtggaaacaactgtcaatttacgaaactgcagtttgctgatatgtcatcgaacaacctcagtggcacattgccagaagagtggttcaagatgctcaaatcaatgataatggacacgtgtgataatgatatgttaatgagagaacaacatctgtattaccgtggcaagatgcagtcataccagttcactgctggaatctcatacaaaggacgccgggttgtagcatccgcctacccaattttgacaagccttaccgtgcaggcaccctgttcgacgttttgcccaggagagccttcagagtttggtcaagttactgtttacgtcggtgccatgctgtga

SEQ ID NO: 26617 - DNA, 350 bp, Oryza sativa
  Clone ID: PAT_MRT4530_3138C.1
gcacgaggtgcgcccattagcattttcggactctctttccccctcaatcgatccccctcccctcccctcccctccccctaggcgagtggcgaggagccacaaaacctccggtcgccatggattctaccggaggaaactcaggcaagctgttcgacggaatgcatctttgcttgtcggaacaaggatccccgcggacccagtcgccggcggcggtggatcccagcttggacagatccggtgtgttgcttaagtcctatgtgttattgcatacgttcttggttgtgggtgatgtttgctatggagcgtgacacacccggccggtggctcgtgcaggtgtggtgctcggcgga

SEQ ID NO: 26618 - DNA, 769 bp, Oryza sativa
  Clone ID: PAT_MRT4530_31390C.1
atgctcaccggactcacccatcttgacctctccaacacaaacttcgctggtctggtacctgccggcatcggccgcctcaccagcctgaactatcttgacctgtcgacgacattttttgtagaggagttggacgacgagtacagcatcacgtactactactcggacacaatggcacagctctcggagccgagcttggagaccttgctcgcaaacctcaccaacctggaggagcttcgcctgggcatggtgatggtgaacatgtcgagcaactacggcactgcacggtggtgcgacgccatggccaggtcatcgccaaagttgagggtcattagcatgccgtactgctcactctccggtcccatttgccactcgctctcggccttgcgatcactttcagtgatagagctgcactacaatcatttgtctggtccagttcctgagttcttggctgcactccccagccttagtgttcttcagctttcaaataacatgtttgaaggggtgttccctcccatcatcttccagcatgagaaacttacaactattaacctcaccaaacatctaggaatctccggaaatttgcctagtagtttctcaggtgacagtagctcacagagtttatctgtcagcaacaccaacttttcagggacaattccaggttctatcagcaacattagatctctcaaggagttggctcttggagctagtggtttctctggagtgctgccctcctccattggtcagctgaaatccttgtctttatatagag

SEQ ID NO: 26619 - DNA, 401 bp, Oryza sativa
  unsure (1)..(401): unsure at all n locations
  Clone ID: PAT_MRT4530_31391C.1
ggctgctgatccggttcgagctcgtgccgnagaggcncccacnnaatcatcccggtttcgaangacgacggtnanatcanggacgcaggagccactngaatcgggtgaggnncagnncncancnaacttcccctgtgaggaagaggncatgggggancaaaaataccatntananggtcgccantntgangcgttgnggnatataccaagatctccacgttccgtctgtgntctggatgtcngagatagantcttgatacccttcntttcttctagctcnggatgtgnattgcccgtctgtcctcaacanggccacnncccccngngantgngctctctttttgatgaaggccacagacncgaaagatccntctccccgggnagaatgnttnttggggang

SEQ ID NO: 26620 - DNA, 508 bp, Oryza sativa
  Clone ID: PAT_MRT4530_31392C.1
atggaggatgcagatgcactgcaggtgctaagtctaaaggataatcatcttaccggcgagttacctgataatatcaaggaaggttgtgcattaagcgcattagatttcagcggcaattcgattcaaggacaactaccaagatctttggtcgcttgcaggaatctggagatccttgacattggaaacaataaaattagtgactctttcccatgttggatgagtaaacttcctcaacttcaagtcctggtcctcaagtctaacaagttcattgggcagatattggatccttcttatactggaggtggaaacaactgtcaatttacgaaactgcagtttgctgatatgtcatcgaacaacctcagtggcacattgccagaagagtggttcaagatgctcaaatcaatgataatggacacgtgtgataatgatatgttaatgagagaccaacatctgtattaccgtggcaagatgcagtcataccagttcactgctggaatctcatacaaag

SEQ ID NO: 26621 - DNA, 729 bp, Oryza sativa
  unsure (1)..(729): unsure at all n locations
  Clone ID: PAT_MRT4530_31393C.1
cagtttgttctagaagatnaaccatatggacgagattccattggnaaattcgcgtccgaagaccagcacctttcgaccggggtcccgccccgaaccgccttctcctgctgccggctccgacccccgacccaggttctacgtggccgagaccacccaccggtctgaatcgttcacttccaggtccttctacggcttcaattgagatatccagcgtggcttgacgggaacggcgtgatgcctgctctgcaactgcaaggacgatggtcggatagattaattcgaagcgtaattataaaggtaatcactactatatcagtacaaatcatgatcttcaccaacacaagatactaccaccgaagcttcaaggatcatgggtgtacagcggagcgctgctacgtactacgacgatctgaagacgagcgagtccgccttttaccgtgttgtctgtcttgtgcactgccttcaaaataagtcctgcagcccaacacgtgctatagactgagttaaatttctcttcgtgtcatcatcttccgtcaaagttgtttcagattgctttttgccctgtacgtataagagaaaagttgtgtgttcacatttttctcgtaccgcgttctgctatacgttggtgaactagttacgataatctatgatactgcttggactaaaaaaaaaaaaaaaaaaaagagatataaactactcaccctgtgtgntcataaaaaaaaaaaaaaa

SEQ ID NO: 26622 - DNA, 369 bp, Oryza sativa
  Clone ID: PAT_MRT4530_31394C.1
atggaccaagatctgctttcattatatgggcaataccaatctactaaagtagatcatatggatgtagaaaaagctttagattttgtgatgaattggaaacatctcttttccatttctatttacctagttcatatttttgtttcgtgtgttctcgggaggaattctatctctaaagaaaaagttttggaagatttttttaacctcagcctagcggattctccccgttacctggacctgcctcccccgcggtcaaaactctcctctccagcccctctggctgggccagaagcctcgtctcctttaactgattcaagtgattcagtcaaaatgaaagtaatctcacagaaaattggattatctaaaacctcg

SEQ ID NO: 26623 - DNA, 426 bp, Oryza sativa
  Clone ID: PAT_MRT4530_31395C.1
atggaggccgccaccgctgctcctccatatccatcaaagtccgagctcgccgctgcggaggtcgcgtcgtgcgcatgggggcggagtggcggccggatccgccaccgccttgcctcctgcccgcagttgcccatcacggccgcgcccgccgtcacccgtgcaagatccacgccagattcgtgcgcgtggggcgcggagcggcggccgcatgcgccacctcctcgcctcccacccgtagtcgcccgtcgccgcagcgctcgcagtcgtgccgcgccagatccgccgacgtcgtgcccaccgtcacgccagatcagcgatagaggtcgagccgctgcgtctccagcccgcagtcgtccgtcgtcgcctcggccgcaaccgtgctgtgccgaatccgccaacgttgcgcccgccgccgctcggctgtag

SEQ ID NO: 26624 - DNA, 418 bp, Oryza sativa
  unsure (1)..(418): unsure at all n locations
  Clone ID: PAT_MRT4530_31396C.1
aagagacagcaagtagccttcagtgatcattccatttttctctctagtttttatgctgattgcggcgacgatgctccgttctcttggtggttgccggcggcgatggtggcggcggcggcggcggtggcggcggtggctgttccgttgatgttgaagtcggtggcgtgtggaggaggaggaggaggaggaggaggcgacttgccgccactttggccgcgtgggacggcccgggatgcccgagctgtcgcaggcggtcgtgcgggccctccataaggggggccgggccatcgtcgacgagtggtgccgcgacatcggcgtcggcaagggcgtcttcnaggtctggatgcacancaccaagcacaactacctcggcggccacagcgcccgccgcngcgcctcctcctcctccgccgccgcc

SEQ ID NO: 26625 - DNA, 603 bp, Oryza sativa
  Clone ID: PAT_MRT4530_31397C.1
atgggcagcgacggcccagcacactcaaagacaacggagaacagcggaagactagggcgacgaccacaggcacttgacggcaggcacgagctagacaccaaagacttgaacgatttattgcgtcagccgaggggagagggcgcgcggaccgggtccacgggagtggggcccacgcggcagcctcacggtccacggtggaccgggcgcacgcggatcacgccgaccggcgccgtgggccccaggcgtcagctgcacccgagggcgtgggcggctgacggccgggccatacgtggcagccgctcggtgcgcccgggggaggggcggccattgcggctcgaccggcgggaggcggcgccctcgccccgatggtcgccgccggcgaccaccggcacggcggagcagtggccgagggaggggagggaaaggggaaaacgaacggcgctcttcttcacgctcccaagtagcttcttcctcggcatggttgctccattggaccttgcaaaaacggattacccgattcctggtcctgcgctccatggtgtccaggattttcactggtctctccacgtaggtcaagtcttcgcgaacttcaatctgctctga

SEQ ID NO: 26626 - DNA, 487 bp, Oryza sativa
  Clone ID: PAT_MRT4530_31398C.1
ggccgaagcccccccccccccccccccacacacacacacacatccggcgccgccgcccctactccgatggctactccggccagcgagcccgccggcgcagggacgccggagccagcagcgccgttctccgccgactggaaggagcggatcttgctgcccgccgcggtcgccggtgtggtcggagctggattcgggctgctgtcgcggcaccgggctcgccttggcgccgcccgcgccaccgtcacctacgccgtcaacctcgccatcgtcgccgggtgctacggtggagcacgtgaacttgcaagagatgctcgggcttcaacacctgatgatcccatgaactccgttgttggtgggctagcaagcggagctgttcttggtcgattacaaggcggacactttggggcagttaagtatgcagttacctttgcagctggtggtaccgcattggactatgctgcactgaagctgagtcctcaaataatgg

SEQ ID NO: 26627 - DNA, 624 bp, Oryza sativa
  Clone ID: PAT_MRT4530_31399C.1
atggcgcgcggaccgggtccatgggagtggggcccacgcggcagcctcacggtccacggtggaccggacacacccgggctcacaccgaccggcgccgtgggccccacgcgtcagctgcacccgagggcacgggcggctgacggccgggccccacccggcggccacacggcgcgcccggaggcggccacgtcagcgtggccggcgggaggtgtcacgaccggaaataacccaacgggcgttccttacgtgcgtgcattaatccttgtcccaggaggcaagccgcgggacgcgcccgaaggcggccacgccggcacagccgacgggaggcggcgcacccgcaccccgatggtcgccgccgacggggacggcagtgttccggcgatcggcgaccgaaacggagaggtggacgaggtcggcgaggtcgcggcgaacccgaagaaggcgacgccgaaacgggagaagctcgtcttcacgctcccaagtagcttcttcctcggcgtggttgctccactggaccttgcaaaaatggattacccggttcctggtcctgcgttccattgtgtccaggattttcactggcctctccacgtaggtcaagtcttcgcgaacttcaatttgctctga

SEQ ID NO: 26628 - DNA, 182 bp, Oryza sativa
  Clone ID: PAT_MRT4530_3139C.1
cgcacgtaattttagagccagagggagttgcggatccgagcgaggatcaagacccacagaactacgagcaaggcaagtcatcactattctttaaacatgttgatcccaattgcgaaactattttgtttacaaataaaattgcatgcaatgatgaacatcccacttgtgattatgccatgcct

SEQ ID NO: 26629 - DNA, 321 bp, Oryza sativa
  Clone ID: PAT_MRT4530_313C.1
atgatggtagcggcggggccacctaacaatgagagcagcggtggcgatggcaataatgaggttatagcgacgtggcaagcccatccatggcagtggcagctgcgaggtgtttgcaacgatggtggcttgtccacggtggtggaagcaacgagtagtggtgatggcaagctcatcagcagtggtgcattcatgtctacaaccaactgcaatgggacgacatatttcggctcctcatggctagatccgcccttccttcgacctaatctagtgacggcgttgacaagagtgccatggatggcgatagtaggcttgggaacatga

SEQ ID NO: 26630 - DNA, 388 bp, Oryza sativa
  Clone ID: PAT_MRT4530_31400C.1
aaaaaaaaaaaaaaacccggtggggggggttttttttttttccccaaataatgtttggattagggaagcgtttttttgtaacttgtttacccttacggggggcctttttggaaaagctttaagtccataagccctgactttaagcaagaaaaccctttttaaaactgccctttagagagaggggaaaagagttcccccaggtttcccccgcaatccaacagttttttgaaggaaaaagaacccctggaatagccggtttaaaaactaaagttcatccttggggggtgggaagccgcccttttcccaaaagggggggaacttcttttttgctggtggttgaggccccctccaatcgccatatgtaaattttttgacgggggggcccaaa

SEQ ID NO: 26631 - DNA, 341 bp, Oryza sativa
  Clone ID: PAT_MRT4530_31401C.1
ggtgttgggttttttttttattttttttttttttttttttttttacgggatccaacaattttttaaccacctcaaaccatgacaaattttttattttacaagatgaaaccgggaaccaaacaatctttaacaggcagcccacatagttccacacattgcttttaattagaacattgcactaaattgttcctgcggagaaagaaaaaaagagcttaaattttggcgatgtcctccccctcaaactggatgtaatcctcgggggcgcccccatccttgggcccgttaactttaaccccctttttgagccttagggtgttggggagctccccttaagcctttag

SEQ ID NO: 26632 - DNA, 126 bp, Oryza sativa
  Clone ID: PAT_MRT4530_31402C.1
atggcgaggtggaacacggccaacaacaataacaacgacgcagaggaagcctgcagcaagccccgggttggcgcgagggcgaaggcgtgcggcctccagatcccatcatcatccaccacaggatag

SEQ ID NO: 26633 - DNA, 847 bp, Oryza sativa
  Clone ID: PAT_MRT4530_31403C.1
cgggctgaggcgcgcaactccccttcaaaaaaaaaaaaaaaaaacggaaaatctcaatgaatctttcgccgtctccgaggtggggaactcttcttcctcatcttccgcggccgcggcggcggcgcccccgccggccatggcggcggtggcggcggcggagcagagcgcggagcagttcaggggccaggcgaagctcctgttcctccccgtcgccgacgctgtcccccgcctttcctccttccgtccacctgccaccgacgccgccacccctggcagtgactcctcctacccgacgccgacgtcgattcccccgccgccaacgtcactgccatcgacacctactcctgtggcagtgtggaggactgttgcttccgttgataatgcatccccgccatcgcgcctcagatcggggacaccgacggccctcatgccgaccgcgccgctgcgcctccagatcgacgctgccgacgcccatcacacgcaccaccagggctatgtgttcatcaaagagaacaaagggaagttagaaattagaaatagtacagttcctatatctagcaggctttactttgaatgccaacaaacctacagctgtatcatggctgatatcaccaacaaattactgctgccaaactacaggagaacaatagatgataagctgttccaaagaaaggttcctggaggtattatgagaggtttcttcctaatggtgttgtcttcgagaagacatttttcctatgctggatttgagcaacaaccaaagaagttcgtaagtccaaagattcgtttgctaaacattgaacaagaactgaaatatgaaaaagaaaatgcagaaatcaggttatag

SEQ ID NO: 26634 - DNA, 510 bp, Oryza sativa
  Clone ID: PAT_MRT4530_31404C.1
gaaaagggcaccccggggcgcaccacttttttcataattaaagggaacagccagggattcacttggttttttaaaacaaaaaattgcagaacaaaatgtgctggagctgaagcccgctaaccggatatagcgacaaaaaccgcaagaatgtctgttgaatccacagagtttctactttgaactacaaaggacaagctactttttgtggatcccttcaaatgcaacaatcttgcttgggcacccaaactgcaaggattagctaaaggctaacaattcttcttaaataccaacctagagttataaagggtctagccgtaggacccaagcttaatgatcttccgggccatgatctggaattggaaatcttgttgctcaccacgagacaaacctatgagatcaggctgcaaaaggatccaggcggcccggggtaagaagttgttttcctcccaagggtgactcaactacctttcaacatgattcctgcacaaaaaaggaatgggcctcgtgccc

SEQ ID NO: 26635 - DNA, 495 bp, Oryza sativa
  Clone ID: PAT_MRT4530_31405C.1
atggcccaagtttgcagagagctccgagtacctcgcggggatcccgaggagtcagcagccggatatatcccgtggttgaatggggcttgtactcagcttgagggcgttggcaagcggattgacgaggctctgaaacaggaatgccgccgatcgagccgatatgcaggagggcatgtattggcttgtgtacgagatcatcgtccgcaactgcacctcgagtttctccatgaaggattcactcattctcagaggactcctgcggagatagaccacctggcgaagtcgatggcaccgttagcggagaaggttttccatcgtttgagtcgtacactctccctagcccccagccttgtcgtcggaggatacttctcgggggacaaggctcttagacctttgacctgccttggatccgacaagaccttatcggctctgggcgtccccagccgaggatcccttaggttcctcggaggccttgtcaggacggtgtatggatga

SEQ ID NO: 26636 - DNA, 2305 bp, Oryza sativa
  Clone ID: PAT_MRT4530_31406C.1
ctacttgcactgcagctgcttctgcaatggctttgagctccatgtcagctcctggatatgagtagggaagatcactgtaggcttcctcttgctctcctccaggtaagggaagtcttcggtgaagtgcaagcctcggctctcgtgccttgcaagagcacttttcacaaccagctttgcgcagcagaagaggttcctcatttcacaggtctcaacccccaccattgtaggcttccaccccctcctgaacaagaactcctcccattctgactccagatcactgatcttccattccgcgtgcttcaggcggttcgtcgaccgcactatcccgacatactcccacattattgactgaagctccatcctggcctgctttgtcttctcaatgatatcagatagtatactgtccctaagggagacagacagcacaggacgagcccatttcttcgcgaaagaaggatcgacatctgcatcgaccatatgatctattgaaggctgcactgctctccgagcaaacaccagtgcttcaagcagtgagttgcttgcaagccgattagcaccgtgcaatccagtgcatgcaacctcaccagcaacatacaggcctttcacatttgtctccccctgcaacccagcccggacacccccacacatgtaatgagctgcaggaacaacaggtatcggctgttgtgtgatgtcgagaccgtggcgcaggcattcagctgcaatgtttggaaaatgggcaagaaccttttcccttggcttgtgactgatatccaggaggacatacttttctcccctcttcttcagttggtcatctatgcttcttgcgaccacatctctcggtgctaactctgcacggtcatcatacgaagtcataaacctctccatggactgattataaagaattcctccatctcctctgactgcttctgttatgaggaatgcattctctcttcttgtagctggttttattgggagaccctcatctgatagtgcagttgggtggaactgcacaaactccatattagatattacagcctgcgcacgatgagacattgcaattccatccccagtagctaccggtggattggtcgttgaggggtatatatgaccaactcctccagatgcaagcaatgttactttcgagatgaaacgaattgccttctgagtttcagcgtccaatgaatccacaccatagcaatatatttcaccattactctgacaggtgagtaaatcaatggcaaagtggtggccaaacaaagatatgttatcatcattatcaactgcttgaagcagtgctctctcgatctctcttccagtcatatcagcagaatgaactattctgttgtgagaatgtccaccttcccttgcaaggtgcagccttccgtcctcgccatggtcaaatgaagctcccatggcaatgagctccttcacacgctccggtccttctgtgcatactaccctgacagtctcttcatcacacagataagcccccgcgacaatggtgtcttgcatgtggctctctacagaatctgaggggcatagaaccgcgctgacaccgccttgtgcgtagttcgtgttgctctcatgaggctctgctttggtaatgatggcgacagagccgtacttagacacttccagagcataccttaggccagcaacaccgctgccaatgaccacaaaatcgaaatattttgttgtttcatcttgcaagcacgaggctgcagaggctctgatggacccgaccttgtgcctcattcgaagttgggaagcactaacagacttcgcgccgatgaaatgaggaatactggagatatgaacctgggcgcatctgttgacgggagagaagaaggccatccccgatgcttgcatgtgccctttctcgacatgcaccgtcgccttgcattggaggctcccaaagccgttcatcagagccgccatccccggctctaaagatttcgctgaatcgcaggaggaagaagagggagatcttggtgcctcacctgcaccaagaaccgctctctggctcaacgggaagaagaagcaggcgcgcgcgcagcaggaggaggaagacaggtggcgggcggagatcaaacacagcctttgggtgtccgagacaacgtcagggctgggcttgcggaggaggagaatccgagaaggcgattggttgggcgagagaagagaagaagaggaagggtgggtaaaaaaaagaagccaaaaagtgctcttcgccttggaaagaaaaggaaaggcgaggaaaattcctcgcaccccgaggcgccacatcgccgccgccggtagactatag

SEQ ID NO: 26637 - DNA, 121 bp, Oryza sativa
  Clone ID: PAT_MRT4530_31407C.1
tgcacagctcgaaaggctttgcacccgggtaatgaaaggatgatagaatagtgcggaaagaaagcaatcgaggattcagtacgagcggtctagtcgtgtagcggataatcttggtgtgaca

SEQ ID NO: 26638 - DNA, 534 bp, Oryza sativa
  unsure (1)..(534): unsure at all n locations
  Clone ID: PAT_MRT4530_31408C.1
ccggtcgaccccgcgtccgcccaaacgtncgtgaacgcctagcccaacccttgctccccctcatcttcccatccatatgtccaatcggtggggtctactacaacaatgcggggagcattcccaccattcgctctgcctgctactgaatatgcaacccataatgactcaaatgttactaataaacaaatgcataaacaatctctactacaatcacatctcctgctacaaatacaagtgctcatccctttctttgagctcttaaggcaacaacataacatactgataacccccttttgtcaaccagctacgtttcaattgataaacaaccaactcattcagcaacagtgttgccaacagctcaaacttgtaacgcaacaatctcactaccaagccattaatagcgttcacgccattgtgcaccaactacatctgcatcatgacgatgttttctactttatcagacttaagctcaaactcaagctatgctggacttaaactttccatacatatatggtatctatcctaactactaca

SEQ ID NO: 26639 - DNA, 2222 bp, Oryza sativa
  Clone ID: PAT_MRT4530_31409C.1
gcacgcgcgccggccactcgtctcctcctcctcccacctcccgtttcctccgcgccatccgtcctccgcctcggcgccatggccgcgaccccgccgtcgtcgcagcaccggcggccgctgtcctcctccgcctccgccgcctccctcgctggcaagccgcgggggggcgggctcctgctcgggcggtacgagctcggccgcctcctcggccacggcaccttcgccaaggtgtaccaggcgcggagcgcggattccggggagccggtcgcgatcaaggtgctcgacaaggagaaggcgatgcggcacggcctcgtcccgcacatcaagcgggagatcgccatcctccgccgcgtccgccaccccaacatcgtgaggctgttcgaggtgatggccaccaagtccaagatctacttcgtgatggagctcgtccgcggcggggagctgttcggccgcgtcgccaaggggcggctcaaggaggacaccgcgcggcgctacttccagcagctcgtctccgccgtcgggttctgccacgcgcgcggcgtgttccaccgcgacctcaagcccgagaacctcctcgtcgacgagcacggcgacctcaaggtctccgacttcggcctctccgccgtcgccgaccagttccaccccgacggcctcctccacaccttctgcggcacgccctcctacgtcgcgcccgaggtgctcgcgcgccgcggctacgacggcgccaaggcggacatatggtcctgcggcatcatcctcttcgtgctcatggctggctaccttccgttccatgaccagaatctcatggccatgtaccgaaagatttacaggggggaattccggtgcccgagatggttctccaaggatctttccagtctactgaatcgcatccttgacacgaacccagagacaaggatcactgtcaaagaggtcatggagagcaggtggttccagaagggattccggccggtcagattctatgttgaggatgatcaggttcacagcttggcagatggtgataatgatatgccggagttggaacctagtgagcctcctcctcctcctccgtttccgccgccgccgccgcagcaagatgatgacggtgaggagtcgggatgggagtcggactcatccgtggcatcatgtcctgccacattgtcatctgaggagcgtcggcaaagacctctcgggtctctcacacggccagcaagtcttaatgcgttcgatatcatatcgttctcaaagggatttgatttgtcggggttgtttgaggagcgagggagtgaagtgaggttcatatcggcagagcctatgcaaacaatcatcacaaaattggaggagatcgcaaaggtgaagagcttcttcgttcggcgaaaagactggcgagtgagcatagaaggcacgagggaaggtttgaagggtccattgacaatcggcgctgagatatttgagctcacaccaagcctggtggtagtggaggtgaagaagaaggcaggggataaggaagaatatgatgacttctgtaacagggagttgaaacctgggatgcagcatctcgtacaccatatgggatcagttccaaatataccttctgatacggagtagctggagcttccatgcggtggtctcggtcttcgcggggtccgggccaattccggaccggtcgtggttcccgttgctggcctcgtcgcctgggtggctagctggtgccctcttcctctggaccgccgtccatcgtttggtgctgttcgtttcttcaatcgaaatgatgtatgctagtgtttgcatgctaatatcagctatcaaatgtctgtttttagctgttacagtttaaagagagtcacgtggccgtgtatagggcatcggtctcccctgttgtcgcccggccttgcggctgtgcccctccgcggctgcctttcgttggccgatgctgccagttagttctctgaattcatatgacatcaacactgaagaaattagctaaaagtgctctaaagaagttctgttttgggattaacaattgtaaatatagggtgaatgaataaattagccaaagcgttagcattctaagtatctagttgtttattacttctgtgcatcaatttgaatgcacacttctgtataccattgttgtgctaccttttgtttaagtaactcaaatactgtatactggtgttgtggaaacaaaaaaaaaaaaacaaaccccaacatcaaaaaaccaa

SEQ ID NO: 26640 - DNA, 1839 bp, Oryza sativa
  Clone ID: PAT_MRT4530_3140C.1
tagcatgtgtagcccccccgtagctagacagcgccgccccgactgctgccgtcgctcgccgtgtgctcgccgccgttgccgcccgagctcggaagcgcctctcatcgccggcctccctcgatgcgattcctcctaatccggcgcaaggggtggattcccgtagccgcgtagatgctctcaccgccgggaatcggcccctcgtgaccttgtcgctgtttcccccttttctctccgccggttgccgccgccgtaatccgccgccgtcgaacatcccggtgtgctcgccttcgcgccgactggtgtttccgtctgcatggctggcctattatgccgccgctgttgggcgtctacgacttcaccgccggcctgcctccgtcgccgccgagtggtgcctccgcctacacggctggcctattatgccgccgctgttgggcgtctacgacttcaccgccggcctgcctccgtcgccgccgattggtgcctccgcctacacggctggcctattatgccgccgctgttgggcgtctacgacttcaccaccggcctgcctccatcgccgccgactggtgcctccgcctacacggtcggttggtcacaccaccgttgatgggcatcgtcatcttcaccgccggcctgcctccgtcgccgccgattggtgcctccacctacacggctggcctattatgccgccgctgttgggcgtctacgacttcaccgccggcctgcctccgttgccgccgagtggtgcctccgtctgcatggctggcctattaagccgccgctgttgggcgtctacgacttcaccaccggcctgcctccgtcgccgccgactggtgtccccgcctatacggtcggttggtcacaccaccgttgatgggcatcgtcatcttcaccgccggcctgccttcgtcgccgccgactggtgtcttcattgttattgatggacgactttgttcccacattggccacttctgccatcaccaaggggaatattacaaagctaagatccagatccagatatgcataaaagggattcatggctttaagcttatctcttacgctccaggaatggatcagtcagaacaccaccaccggctcgcctcgaccgccgccgactggtgtttccgcctgcacggctggcctattatgccgccgttgttgggcgtctacgtcttcaccgaccggcttgccttcgccgccgccaactggtgtttccgcctgcacggctggcctattatgccgccgttgttgggcgtctacgtcttcaccgaccggcttgccttcgccgccgccgactggtgtttccgcctgcacggctgacttattatgccgccgttgttgggcgtctacgtcttcaccgaccggctgcctcgaccgccgccgactggtgtttccgcctgcacggctggcctattatgctgccgttgttgggcgtctacgtcttcaccgaccggccgcctcgtccgccgccgactggtgcttccgcctgcacggctgacttattatgctgccgttgttgggcgtctacgtcttcaccgaccggccgccgcatccgccgctgactggtgtcaccgcctgcacggctggcctgttataacgccaactgatgctatcttcttcacggctggctacatcaccgtcactactaataggcatcggtatcttcaacacaagctgcctacgtttgccatggctgccgactggtttcttcacttccatggctgcatgattctgccagtgttgattggccttaccatcttcatcgccggtcgtctcgtctactgctgactagtgccctcgcctctacatctggtttatacagctaccacggggtgcagg

SEQ ID NO: 26641 - DNA, 383 bp, Oryza sativa
  unsure (1)..(383): unsure at all n locations
  Clone ID: PAT_MRT4530_31410C.1
gtgttggtgacaaagtcaaacggtttcnaccgatcactagaggatatcctggtcgcgcggacccccacaaataacgtagggacatcacctaatgcttctttcccccacccgtttttncttccccctctcctcacctctcctctcgatcgcntccgctgccaccctccaccattctaattcccccacccctcccccctcgcaagcnatggctgccgccgccgctgtaaggtccgtggcgatctcgctcttcgtcgtcgccctcgccgtggcagcgttcgcctggtccccgtcgtcgctggcgggcggcgcanaacccacctgcgggctggaggaggtggcagcgccgccgggcngtgcgcggcgggggcatggnagaatttggg

SEQ ID NO: 26642 - DNA, 266 bp, Oryza sativa
  unsure (1)..(266): unsure at all n locations
  Clone ID: PAT_MRT4530_31411C.1
tgctctctctctctctctatccctcttcccccgcaacccccacctactcgtcgcgggggggcccgtctcggctgcggcggcggcggcggagtaggccacggcggtggtggtggtggtgagtggacgnacaaaanacaccttacgtccgagcaatacaagcgactgtccgacaacactgaaccacccaatggtcaaagggagcacgagccatctcgatcaagaagaggcaacgactagatcaccgcggcctgctaccgacaaagaat

SEQ ID NO: 26643 - DNA, 2394 bp, Oryza sativa
  Clone ID: PAT_MRT4530_31412C.1
tttagcgattatagatgtctcatttgggacttagcttcacctcgtgacatactcattgttcacagatggatctcacagatcaggcaatgcttggcgcttgtactgaaggctagccaacgcaggatcagaaccctttactcttcctagcgtctcaaccggcacagaagaatgaattctgtgatcagctgtgaagacaactctgcggattggaaagcttagtagaatggtcctaagtacgggatcaggcttcattttctcatgagccaacgttccatgaacatggctgtggaagtcgtcataatcaaactggtacccaacagccctcaaaccggccatggtagttccatactgcttgtagacggaggacgcatagctccaaactgatgctctcttccacaccaagcttttcgatcatataagcttggatgttccttacgacgtcggctccaatgccggtggtcaccggatacagcgtgtcatcaaggtcgaagacgaggctgtcgccgttgagcctctgctccttgctgtagttgctctcgcactccatctcgatctgcttgatgaattggttgtgtgaaggcagaagattggttcgcgcggtgagccggagtgaagaaacaaaagggatgagaaaagcaggaaaggaaatcgtgggaagaatcgctgggcaggcaggagattgcagttggaagcggccgtatatgtagatgtagatggagatggagatggagatgggagtgaactagtcgatgagccgtcgacgccgcctgtcatcaaggtcaaagacgaggctgtcgccgttgagcctctgctccttgctgtagttgctctcgcactccatctcgatctggttgcacttgaactggatgctggattgaattgcttcttgcatttgcatcggcagctcggcaccaatctgtgtcttcattgaaggaaaaatattccaaaatctgagggtttcatccccggctcctgttactattgtctgtccatcaggtgacattgcaaggtaaagcactcgcagcgtgtgtccagttagagtagcaacctttgacatagatgggtacttccacaccatgatttggttttgggaatacccatgagtgctcacaagctcatttacatttttacaccaggcaagattacaaaccgtgttccagaacctgatacacctatcagcggttccaccacctgatgccaggaggccttgctgatgtggtgaccatgctattgctttaactgcagctgtgtgttctgtcagcctcaatatcggctgctgcgaacgttggttccatactagcagctgattatcatttccaccggatgcaagctcacggtcgtcgtgcgaccatttcagtccacagacctctgatctgtgccctgagaacttgctgatatagtcacttgggacacggatgtcatgctgcaatatgttcttgtccctgctaccggaggacaagattcgggagctccatgctaatacaccagtccgtgtttggtgtcctcccatgttcctaatccgtttacagcgagagctatcccaaatctggacatcgccaaggctggtgccgatggcaagataggagccttctcgggtccagtgcacagcgcagacgctgtccctgggccccaaatcgcagagcttggtgaccttgcaattggaagccgaccagaggtagacgcaattcccgaggccgacggcgagcgtgttctgcgacgaccagtcgacaagattgaggtagaagtcgtcctgcagcgacggcgcgtccaggaccttgtgcggggtcttggggaccttcctgggcggcttgcgcggcgtggaggattcagcggagccggcggtgcagtcgtagtggccggcggtggcggcggcggaggcggcgaagggcgatttgggcgaggggtggtcggtcttgaagcggaagaggttggtgttgggggaggagggagccggggagggggagtccgggccgaagatctcggcgcggaggaggcgggagtagggggcgtcgtcggtggtggaggagggggaggcgcggtcgcggtcgaggagggcgaagttgtggaggcgggaggaggagcggcaggggatgaagcggtcgctgtacgtggtcttggaaggggatggcgtcttggggacgtcgaggaggaggcgggccggggaggcgacggcgggatcgaggcggagcccccccgccatcgccggcggcacgttgaggcgcggcggcgccggcttgggggacgcgtccgtcgccatcgagagagactagggatctctttcttgctcgtctgctgccccgccacccaccgccgccggcacgtcgaggctggatgcgccgccgacgacgacaacgacgacgaaaggaggaaggaaagaggaagcggagaatgaag

SEQ ID NO: 26644 - DNA, 370 bp, Oryza sativa
  unsure (1)..(370): unsure at all n locations
  Clone ID: PAT_MRT4530_31413C.1
ggangggggggtggagggggctaaatcagcttaaatttccccttttctgaacccatcctttacaaaacacaagctgccttccccaaatccaggccacgggggttacatttttccttttggtacaccagccggtttacaaactgaagaagatcgtcatccctctggaatcctattaatcagcctcttcatggggattccccaagtactggaatatccacctttaatgcagctgcacctccttttcaccattcagaggactcaaaatcggttcttgcagatactcgacgatattcttggccacctctttggccttctctagattgactgcatgcccagcttttttgataaccaccaatcgggatttctcccc

SEQ ID NO: 26645 - DNA, 551 bp, Oryza sativa
  unsure (1)..(551): unsure at all n locations
  Clone ID: PAT_MRT4530_31414C.1
agcnctttggaaagangtcacgtacttgcngcgggtgaccgaggtcgtctgcgccggcgcgcgcgtggcgcggcgcgggtactgcgaggtcggggccggctccgcgcccgtctccgggcaggcgctgctgctcgtccacattgtctggctcttcgtgctcggcgccgccgtcctccttggtttcctctgatgtnngcgcgncacccgctacacctccncccttccccctctgtngttgatttctccacatctatccgtttcgcgattatttntctaggttggtattagtgctttttttttttatctgagggatgtcgttgtnacaatttgtcgtaaacttgtaantttggaggatttcgtcgagagatgtcacacgatntcntcnanagatgtcncacaattctntcananatctgtttgattggtctnggctccatctcatanctgaattgtgcanatnggtcctgatctgttanctaganatcatgttttgacantctgtnaatgtttnctnacaattgcntcnatcnctntncatngttttnggtacc

SEQ ID NO: 26646 - DNA, 1023 bp, Oryza sativa
  Clone ID: PAT_MRT4530_31415C.1
atggccaagcctagggcctccgccgccgcggcgaaggcgccagcctccacgccgcccaagacggtgcactcggcgctcgtcacctacgcctccatgctctccctcctctccctctgcccgcccttcgtcatcctcctgtggtacacgatggtgcacgcggacggatccgtggtgcgggcgtacgagcacctccgcgagcacggggtgctggaggggctcaaggccatctggcccatgccaaccatggccgcctggaagatcatcttcggcttcggcctcttcgaggccgcgctgcagcttctcctccccgggaagcgcttcgagggccccgtctccccctcgggcaacgtgcccgtctacaagggtcatcttgctccatcttcatctgattctggatcctcagggaatgtgataattgatttctactggggaatggaactatatcctcgcattggtaagcactttgatatcaaagtgttcacaaactgccgttttgggatgatgtcctgggctgttcttgctgtaacctactgcataaagcagtatgaaatgaatggccgagttgcagattcaatgcttgtgaatactgcattgatgttgatctatgtcaccaagttcttctggtgggaatctggatactggtggggcttgtctcgtcattttcactatgttccagagattctatctgcttttttctggacagttccagctctttttgatcatttcctgccgtacttctatgtgatctttctgaccatattgctgttcgaccgagctaaaagggatgatgaccgatgctcatcaaaaaaaatttccccttctcgtgagaaccctagcacaggcgatctcgtctgcgactcttgcacggcggcgagagtggtgtggtcagaggcgacggggccggagatctccaccacggacgcggcggcgacggtcgtgaaccaggaaggatgcagccgccagtaccatatagggaggggcctctcgattacgagctgccagtgttttgtgactgcaaagtga

SEQ ID NO: 26647 - DNA, 171 bp, Oryza sativa
  Clone ID: PAT_MRT4530_31416C.1
tttcaaagaattctgggagtgctttcttttttttttctttttttttcagtccacacctgcatttgctttcaatcattcttggcggcaggcagcctccaatcacctgcacctcatcaggtcacctatcctcaccttgcagtcactcacctccgcatttgcaaagtcctttca

SEQ ID NO: 26648 - DNA, 674 bp, Oryza sativa
  Clone ID: PAT_MRT4530_31417C.1
ctcgatctccttcctccactgtcgctcagatcgacgcgggccatggccaagcctagggcctccgccgccgcggcgaaggcgccagcctccacgccgcccaagacggtgcactcggcgctcgtcacctacgcctccatgctctccctcctctccctctgcccgcccttcgtcatcctcctgtggtacacgatggtgcacgcggacggatccgtggtgcgggcgtacgagcacctccgcgagcacggggtgctggaggggctcaaggccatctggcccatgccaaccatggccgcctggaagatcatcttcggcttcggcctcttcgaggccgcgctgcagcttctcctccccgggaagcgcttcgagggccccgtctccccctcgggcaacgtgcccgtctacaaggcaaatggcttacaagcatatgcagtgaccttgataacatacctgagcctgtggtggtttggaatttttaaccctgcaatagtatacgatcacttgggggaaatatactctgctcttgtatttggaagctctgagttctgtatttttctgtacataaagggtcatcttgctccatcttcatctgattctggatcctcagggaatgtgataattgatttctactggggaatggaactatatcctcgcattggtaagcactgtgatatcaa

SEQ ID NO: 26649 - DNA, 467 bp, Oryza sativa
  Clone ID: PAT_MRT4530_31418C.1
agcatataggccccctcgcggtattgctcaagatcaagagaagtcagatgccttaaaaattcaaatggaggaactgagaacaaacgttcaaggtgttgaagacaaaattcgtcgtactgaaaaaagtttagctgacttgaggaggcttcaacaggaaattaactccagtacatctgctagaactacatattttacacttcagcagcaacagtatgccgctctttctgaggaaaacgaagataccgatgatgaactaaaggagtggcaaacgaaatttgaaggaatgaatggcattgctgcaaaataaggtcagtaaactagaaagagatgtggatgatgaaaatacaacaagctccttcctttccaaggccataaatgatttgatgcgagaaacaggaaggctccaggcagaagccgacgctcacatgtcagtgaaacacgaacgggattcagcaatcagaaagatc

SEQ ID NO: 26650 - DNA, 356 bp, Oryza sativa
  Clone ID: PAT_MRT4530_31419C.1
gttcatcacaagaacaagggggggggggcccccacctgcgcggcccaaacgggaggatcccccagggggccccccgaagaacggggggggcgaaaccaaaaagacgaaggcccctcggggggggggccctcaccaatggagagggattacaaaaaaccctctccggggacaaagaaggcccacggcgggggggaaaatgtaggtggacttgaagccggtgtatccggcggcgcgggcaaactaaaggggcccccccccaaaacaaacccttgccggcggctttgggggggggggggagcaagcccccccaaaacaccccctggttaagggccgacccgggggaccttttcgggggg

SEQ ID NO: 26651 - DNA, 2072 bp, Oryza sativa
  Clone ID: PAT_MRT4530_3141C.1
agcccgtgaattttgagttacttcgtcgacaccgagtggatcgccttcgtcgccgccgactggtgcctccgcctacatagctggcctgttatgccgccgttgttgggcgtctacgacttcaccgtcggcctgcctccgtcgccgccgactggtgcctctgcctacacggctggcctcttatgccgccgttgttgggcatctacgacttcaccgccaaccgcctagcgccgccgccgactggtgtctccgcctacacggctggcctattatgccgccgttgttgggcgtctatgtcttcaccgaccggccgcctcgtctgccgccgactggtgtctccgcctgcacggctggcctattatgccgccgtctgttgggcgtccacgtcttcaccgaccggcttgccttcgccgccgccgactggtgtctccgcctacacggctggcctattatgccgccgttgttgggcgtctacgtcttcaccgaccggcttgccttcgccgccgccgactggtgtctccgcctacacggctggcctattttgccgccgtttgttgggcgtctacgtcttcaccgaccggtcgtctcgtctgccgccgactggtgtctccgcctgcacgactggcctattatgcctccgtctgttgggcgtctacgtcttcaccgaccggcttgccttcaccgccgccgactggtgtctccgcctacacggctggcctattatgccgccgttgttggacgtctacgtcttcaccgaccggcttgccttcaccgccgctgactggtgtctccgcctacacggctggcctattatgccgccgttgttgggcgtctacgtcttcactgaccggcttgcctttgccgccgccgactggtgtctccgcctacacggctggcctattatgccaccgtctgttgggcgtctacgtcttcaccgaccggcttgccttcgccgccgccgactagtgtctccgcctacacggctggcctattatgccgccgttgttgggcgtctacgtcttcaccgaccggcttgccttcgccgccgccgactggtgtctccgcttacacggctggcctattatgccactgtctgttgggcgtctacgtcttcaccgaccggcttgccttcgccgccgccgactggtgtctccgcctacatggccgcctattatgccgccgttgttgggcgtctacgtcttcactgaccggccgcctcgtccaccgccgactggtgtcaccgtctgcacggctggcctattatgccgctgttgttgggcgtctccgtcttcaccgaccggccacctcgtatgacgccaactactaccactactgatggacatcatcgttttcattgctggccgctttgtctgacgccgactggcttgttcacctccatggccgcacgctttcgtcatcattctacttcttccgtcgccgactgctttgtcaccatggtggagcgacttcatctttattatcttcggcaccggcaaactctattgcctctacttcgcaagctttgctacttcaccaaccatgacgactacaagagtttcaacaccttggcatacgtcaacaagtataatgccatgttattttactacaacaagtggtgttccaatattcaagatttctactcggacatcttctatgcgtatattcactcaagcaatgactaatcgacgacaagaagctacagttctcgactctatgttcagttgtttctcaactaaccaaagagtcgggggctacacaaatacaagactcttcagttttgatgagttggacaacagcatctactttcctccaattatttcgccttcacggttgacctactatgcaaacgctaatgagcgtcttcgtcattatcattggttgctacactgctattgactggatcatcgacatcgtcatcttcatcaatatccctcttcaacatagcctcttcaacatagcctattctattgctgtttgatgggcaacttcgtcatcatagtcgatcatctctgttgctgcttatcatcattactgtcggttgcgtttgtcgtcgccgactattttcttcatcttca

SEQ ID NO: 26652 - DNA, 171 bp, Oryza sativa
  Clone ID: PAT_MRT4530_31420C.1
atggcgtggtcactggcactggggaagatgatgttgaggtggcgccatgcaatgatttgtcttgaggtcccaaatttaggcggcagcggctcttcttctattctcacgttcgagaaggctggcgtgctcgaggatgacgttgtcgcttcactggaaggagcgacaagggag

SEQ ID NO: 26653 - DNA, 495 bp, Oryza sativa
  Clone ID: PAT_MRT4530_31421C.1
gcaagtgaatcgccatgctccacctgctcaagaagacggccgcggccgccaagccgcgtgcccagaacctgcagacccgcctcatgagcggcggccacggccacggcggtccgccgccgaccggtttcgaggccaaggtccgcgccgttctccccaaggactaccagattgtgttggcgacgctcggtttctactcgacggtcgtccttctcttcaagctcaagccgtcgaagaaggccgtggaggcgccggttgtcgccgcgcctgccgcttcgggttccagcgccgtgccttcgctcctcgacgatgagtgggcggagtggtccaagctccctggcaactacgagcgatgggagaagagccttgagacgctcggcaactaagttgttggccgtctcttgtcgctctccttctcgcccgacgtggatttggagcgatgcttgtgccccaccgtaccctgtgtgatgcgatcggcacagtccggtggatcagcgc

SEQ ID NO: 26654 - DNA, 1609 bp, Oryza sativa
  Clone ID: PAT_MRT4530_31422C.1
ctcactttcaataacttgcaaggataactcaaactacttgaatcagatcagacaaaaacatcataagaatatcacgatgtgtggaggagcactgatcccgaacgactatggcgacaagccgccgccgccgccgtcggagtcgtcggagtgggacgcctcagcgaagacggacaatgaagaataagtgacagtggtaaccggcgacgttttttttttttttttttttacagttaatgattatgctcatttggatacattgcaaaatcactatagttaatgattccgctcattttggatacacaacttctcgaatatgctatattctcacgacattacatccgagttggctttcttacagttacagtttccaagcaaattgttgataggttacaacttacaagcaaaagacagctggggaaacagacaacatgtccactctctaccagcagagtgtgcagagtttctaatctggcaaggcagtccccctttcaagattgttcttgatctcaagagtatacttgccaaatgccctctcaaccttcttgttgaagtgttcgttccggtcattgatcgagtcaatgtccttgtcttcatggaacttgcgcctcctgctgaatgctttccgtttctcatcccgttccttaagctcattaaccatcctgtctatgttttcttccgggaccttagacaccttcccatattggagacttgaagcgtcccgataaaattcaggatcggcttcctttgctttgttgtatgcctccatgtcaacctcaatgttcttggtcctctttttgtatgcatcatataaggtcttctggttgaaaacatcccaaccatatggtgcaggttccttttcccacttcttgtattttgcttcggccgactcctgtgtatcgagcatgtaagactttgtcatgtccaggccatttgagtcaagaagctttccgatcttcttttttctgtcttccagccacttttgtttagaaacacctctactctcagcgcgaggctccatcctcttcttctctgccaccatcgcttgctgatttgccttcctagcttcattctgcagcaccagaaacagaaatgccttcatagcttcattcatcttcagccgcaactcaaatagcttcttctgcttctctgtcatctgcgggtaaccgtcgtctgagccggcgtcctcctgctccgcatcatcatcaccaccaccaccctcagcttgggcagcatcggatttgccagcgtctgcagaaggcggttcttgctccgcacgctccaaccctgatttggcgtcggcgatcctcttgaagcagtactcggagcagacgtggtaggggttggaggcgttgatgcagtcggggtggacggtgcggtccaccggcggccgctgctcgtcctcgatgcgctccttggcctcggcgatcttgcggaggcagtagtcggagcactcgtggaacgggttcgacgagttgatgcactccggccgcgacttccccgacgccgccgacgacgacgacgccatcggcctccgagctcgggattcgtcggaaccctagttccggctgagctccgccctcgtgccgaattcctcagcccggggatccac

SEQ ID NO: 26655 - DNA, 612 bp, Oryza sativa
  Clone ID: PAT_MRT4530_31423C.1
aattcaggatcggcttcctttgctttgttgtatgcctccatgtcaacctcaatgttcttggtcctctttttgtatgcatcatataaggtcttctggttgaaaacatcccaaccatatggtgcaggttccttttcccacttcttgtattttgcttcggccgactcctgtgtatcgagcatgtaagactttgtcatgtccaggccatttgagtcaagaagctttccgatcttcttttttctgtcttccagccacttttgtttagaaacacctctactctcagcgcgaggctccatcctcttcttctctgccaccatcgcttgctgatttgccttcctagcttcattcatcttcagccgcaactcaaatagcttcttctgcttctctgtcatctgcgggtaaccgtcgtctgagccggcgtcctcctgctccgcatcatcatcaccaccaccaccctcacccacatcggatttgccagcgtctgcagaaggcggttcttgctccgcacgctccaaccctgatttggcgtcggcgatcctcttgaagcagtactcggagcagacgtggtaggggttggaggcgttgatgcagtcggggtggacggtgcggtccacc

SEQ ID NO: 26656 - DNA, 123 bp, Oryza sativa
  Clone ID: PAT_MRT4530_31424C.1
tttggttagcacaacaatttcattattatctttctccagccatcacaaagcaaattaatatctgaaccaaacattctaaggagcgttatgggatacacaggaatccgcgaggtttttttttaa

SEQ ID NO: 26657 - DNA, 159 bp, Oryza sativa
  Clone ID: PAT_MRT4530_31425C.1
atggctagggatggagccgccctcaatccgcggtggctggggagggagccgcctcaatccgcggcggcggcggcggcggcggactgggatgcagagaagaggaggcaacgcgaaaaaggagatggtgggaggttaacaatggatccatatgtagattag

SEQ ID NO: 26658 - DNA, 1245 bp, Oryza sativa
  Clone ID: PAT_MRT4530_31426C.1
atggctaaactcggcgacccatccactcggcctgaggaggagtacttcatccccactccacacgccacggaggttgagctcaaggactgggagtccacggcgatcatcccctgggcggcaaaagcgcctgcgtccatcactccaagggacgtcgaggccatcttcaaggaggaattccatcttcgtgaggccgacgtcttcgtctcacgacaccaccccgaggccttcctgatcaagttcgagcaccagcgccattgtgtggaagcgctgcggaagggcttcgtcaagcgccacggcgttgagctccactacgtcaaatggcgtagcctcaagagtgccctcggtgtcgccttgatgttccgggtccgtctctacctcgacggcataccgcggcacgcttgggaggccgatattgttgagcgtactgtggcgaagacgtgcgcattggagagcatcgagaccagcctcatccacccgccggacacgcgttggatcagcgtgtgggcgtggacgggcaacccaagctccatacccaagcgcatctggctgatcttcaccaacagcactcgtggcaaaaagcccggcttggtgtcgttctctgacaagccgctggagcggtggcaacacggtgtcaagtactgtgtatatgtccacctcaaagaaatccacgactacacttcggccacggtgactcttgatgagaacgcggctgtcaccccggcgaagcgtcgtcttccaccgtggcaccttggggtggccgatggtgaaccggcgccggagcgtgtgttcccgcagttccctcaccacccgccgccgccgcaaggcctcttccaccccggagctggtcgcgatgagggcggcaagatggagaaggaccgtggcagccgcaacaggggagaccggcgtaacgtcgaccggcgcgacgtcaaccgtcgtggtcgtgatgacgacacacgcgacaggttcggccgcgagagggacggccgcgacaaggatagtcggcgtcattacaatgacgaccaccccgacttcgatcggggactcggctggcgtcgccgagatgacgatgaagcccggcgagagaacgtgatcgacgtgatccgcattgcccgccacacgacccagtgcgtcgtgcgccatcgcacacgatcggatcgtgcagtgggcgactcgctacattactgccacgccgtgaacatacgcacggggcttatggacgcgctcgttctaataaccgagccctga

SEQ ID NO: 26659 - DNA, 918 bp, Oryza sativa
  Clone ID: PAT_MRT4530_31427C.1
atgggttgctcgagctcgagggacgtgcgcggcggcgcggcgaagccaccggcggtggcggctccggcggcggagagccggcggcatagcctgcggccgtcgcgcaccgccttggttctcacctccctcgccttctgccgcggccgccgcgacgacgccgtgcacgcgtactccagcctgccgctggaagagccgccggcgaagggcgcccatgtctccgtcgacttcgacttccgcgcgctccccggagaagaggatgctaagcgtgggctcaaggctgccctcgaggacgccgcgccggcgcgacggtgcgcgtctttcaacgcgtcctcgccgccggcggcggcgaaggaggcagaggtgcgggctttacctggttttgaccagggaatcatgtccggcctccggggcatcgtggcggcggagccctcgcggtcgccggagcgggagaatccgacgacgccgaaggcgagcgaggaggaggcggcggcggcggcggcggcgttcgacgacatgggcacaccggcggctcgcgacatcccggagttccgggagaagatagagaagaagaggaaggcggtcaaggcggccgataaaaaagccctcgacgtagcgccgccgcccccgcggcggccggagcgcgtgacgaaggcatccgccgtggtggtggtgtacttcaccagcctccgcggcgtccgccggacgttcgaggacggccgcgccgtgcgcgccatcctgcgcggccaccgcgtgcgcgtcgacgagcgcgacgtgtccatgcacgccgccttccgggcggagctccgcggcctcctcggcgacggcttcgccgggccaccaccgctcccgcgcgtgttcgtcggcaacggccgccacgacctcggcgtggattcaaaaatctggtcctttcactcttga

SEQ ID NO: 26660 - DNA, 1139 bp, Oryza sativa
  Clone ID: PAT_MRT4530_31428C.1
atggcgcagcggcacgagcggtggatggccaagcacggccgcgcctacgccgacgacgccgagaaggcgcggcggctggaggtgttcagggacaacgtggcgttcatcgagtcggtgaacgccgccgcgagccagcacaagttctggctggaggagaaccagttcgccgacctcaccaacgccgagttcagggccacgcggacggggctcaggccgtcgtcgtcgcgcggcaaccgcgccccgacgtcgttccggtacgccaacgtcagcaccggcgatctcccggcgagcgtcgactggcgcggcaagggcgccgtcaaccccgtcaaggaccaaggcgattgcgggtgttgctgggcgttctcggcggtggcggccatggagggagccgtgaagctggccacggggaagctggtgtcgctgtcggagcagcagctggtgtcgtgcgacgtcaagggcgaggaccagggctgcgagggcgggctcatggacgacgcgttcgacttcatcatcaagaacggcggcctcgccgcggagtccgactacccgtacacggcgagcgacgacaagtgcgccaccgccggcgccggcgccgccgccgcgaccatcaaggggtacgaggacgtgccggcgaacgacgaggcggcgctgctcaaggccgtggcgaaccagccggtgtcggtggccatcgacggcggcgaccggcacttccagttctacaagggcggcgtcctctccggcgccgccggctgcgccaccgagctggaccacgcgatcacggcggtcgggtacggcgtggcgagcgacgggaccaagtactggctgatgaagaactcgtggggcacgtcgtggggggaggacggctacgtcaggatggagaggggcgtcgccgacaaggagggcgtctgtggcctcgccatgatggcctcctacccgacggcgtgacaaccatcactctgaaatctgaacgagtgaatggcatgcagctagcaggttttaaataagcagtatggtattatggatggtgctctgtttctgaattcggatagtacaaaacagaactggaatgtaatgacaacttgggcaagatcaaattttcttgtcttcacaactggaatctatctattatctatctatct

SEQ ID NO: 26661 - DNA, 660 bp, Oryza sativa
  unsure (1)..(660): unsure at all n locations
  Clone ID: PAT_MRT4530_31429C.1
ccggaattcccgggtcgaccacgcgtccgttataattcatttttttttaattttgtccaaaacttcgaagatagttgctctgaacaaaatttaatgtctcgttagttaaactctggcggcttataagctgagtgaagtaaactagcattgtcataggattagacttttatagttatacccttgcaatctaaaatttaaggagggaaagcaacgagaaaacctctaaattaattccaaaattcaaatttagctatggcttagaagctgaaggcctgccaatggaatagtctttagcacctagcactctaccagagcaaatagtgtgatctataaacaggtgttatggactttcttagccgctattctggactaagccttaggatgagagaaatccgaatcatttagaaatcttgtttacttttgaaagttacgtctgcaaccgaaattatttatattttcatgcattggttatctctgcactaatgatgtcccattgcagttcacctacattgcaacaggaaaatattttcattatgtcagagcaaaatagtgtacttttttttgaccaccaagaaattagntttttgatatatacatggtggcantagagaaaacgatgttgaactgaccaaagtctncatcaactaatagctgagatgc

SEQ ID NO: 26662 - DNA, 119 bp, Oryza sativa
  Clone ID: PAT_MRT4530_3142C.1
tttttgtggggtcttttaagctacaaggaaactccgcatccctaatccctaccattaccatactctccagattgacagctcaatacaagtacagtaatctcctggaaagtcacttatta

SEQ ID NO: 26663 - DNA, 147 bp, Oryza sativa
  Clone ID: PAT_MRT4530_31430C.1
ttgttgtgtttttaaagggaggggactaaataacacctactactaataaaccataacgaaaagaggggaacatacaggctatacatgaaatagcgaacaaaaagacacggaacttgcgatcccataaacaccacgcaactatgtcga

SEQ ID NO: 26664 - DNA, 1131 bp, Oryza sativa
  unsure (1)..(1131): unsure at all n locations
  Clone ID: PAT_MRT4530_31431C.1
cctcgctcctcgtcctgtctggctgtctctcctcctccccgcgtggcgncgtcggtagataccgcgtgattcatccggcggcggcgagctccgccgatggagaaggtgaagggtctgctgaagccgcggccgacgccgcagcagcagctgcgggagtggcagcgcaagctccgcaacgagtgccgcgtcctcgaccgccagatccgagatgtgcagagggaggagaagaacgtggagaagtctatcagggaggctgcaaagcgcaatgacattggatccgcaaaggctcttgctaaggaactagtgaggtcaagacgtgctgttaatcgtctctatgaaaacaaggctcaactaaattcagtatcaatgcatcttggagaaattgttgcaacggcaagaactgtcggtcatctgtcaaaaagtgctgaagttatgaaaatcgttaacaatctaatgaaagctccagaattggctgccaccatgcaagaatttagtaaagaaatgacaaaggctggtgtgatggaagagatggtcaacgatgcagttgattcagctttggactctgaggacatggaggaggaaattgaagaggaggttgacaaggttcttgcttcagtagctggggagactgcctcacagctacccgatgctgtgaggaaacagaggataaaccaagcttcaacaagcagggtcccagaagagcgacaagctgttgctgagggcgctgatgatgatgaggaagatctggaagagatcagagcacggcttgctaaagtgaggtcataacattctaactttgggagttccctagataacatccagaccaatctatgatagattggcctcggttgaccaagtttgaactagcaatgtactgttgtatacttgtatagtaaacatcctgtatcttgatctgtctagagacaaaaaaaaatgaataatgtaatctcctggtggctctatcgagtaggcactcctttggttttcgatttgaagaacgtaacaaagttagtggcaaatcgtacacctgtgacaaagtcagtggcatataatggattctctccagatagatatcaagcgatagactcaaaaattcgaaatgatagcttttcgcatggtttaggagggtga

SEQ ID NO: 26665 - DNA, 642 bp, Oryza sativa
  Clone ID: PAT_MRT4530_31432C.1
gaacacaatggcgatgagaatgtggttgctgcttctggtggtggcgaggaggaacaggaaaaggaagagagatggcaatggcggcggcggcatcttcagcaagctcatgtccggctcgccggactccctcccggcctcggtggaggcagaggaaaatgaaagagaaggaggcgaccagggaggcgagaaggctgggattctgagcaccgtcgcttccaagattggcatcgccatgtccggtgctgatggccgcgagaaccacggcaacgaggacgatgctaagatcagaaatggcaacgctgctgaccatggcaaggctgaagagaaaagggatgagccgaatggcggtggaatagtgaagcagatcatgtcaaacctccctgcaggtacagttcatcattgtcaatctcttgctgcaatttgtacatgttctgatcataaaaccgatctacagcaagttctctgcttccgtcaaattttgtttctttgattgattgaattaacgagaccgctattttctgtttctccctgtgctgcagatgatcaggcgccggatgctgaagaggcgtccctgctcatcgctattatcgacgactagccagctcgtcgaccagaaagctgatgtagttctagattctggcg

SEQ ID NO: 26666 - DNA, 307 bp, Oryza sativa
  Clone ID: PAT_MRT4530_31433C.1
cttgcctcgccgccgccgctgctacctccgcctaaactaatcccgaaaatgatcctttctagggcgtcagagtcgatggcgccatcgttcaacaggagggcgccagcctctctggcgccgtcctcctgccaccgtggcgggtcgacgctgagaagcacacaagaatcaaccatagaaaagttaaactcaaatggatgaaatatgtgacttgtaaaattttccaaagctctactgaaaagcttctcgccttgaaaacacaatcttgcaagcggaatttggaggttttaatttcgccgaacccggagaa

SEQ ID NO: 26667 - DNA, 763 bp, Oryza sativa
  Clone ID: PAT_MRT4530_31434C.1
cctggtaacagggaaaccaccaagttttggttggatcggtgtctgcatggcaaaacgatatttgaattagctccaaacttgtgctagctgatctctaagtgcacctttaaacaatgcactgtggctcaagcgctgaataacagaagatggttggctgccacatggtgcttttattgttcaagtgcttatttcacttgagaaggcatctacatcaggaagttggcctataatgcttatttcatgtggtctatcaagtttgctccttggaagtgaatttggaaaagttgggctagcttcgctgcaagttattcacttggttagctgtttaacaactggtgttggatggttgacaggcttgctaagcgaggtttatcgcacccgaatgcttgtcccttctgcgaccaggatgatgaatctattcggcactttctcatctcatgtgtatttccccgccatgtctggacatgtattctacagaagctgaatatgttggcctccgtgcctcggtctaccgcgtgtctctctagttggtggtaagttaacagaggtgttcctaaagaccaaagaaaggggctcaactccttgatcattctagtaagctaggaaatatagaagcaccggaatgcatgtgtgtttgagggaacaaagccccaatgttcaggtggttctgcattctattgcggaagagagcagcctgtggtgctgggctggcacctccgcacttcgtgagctacttgtttggtcgctcacaatagtcacctag

SEQ ID NO: 26668 - DNA, 309 bp, Oryza sativa
  Clone ID: PAT_MRT4530_31435C.1
atgaaaacaatttccccatctctccccctttccggcggctccatcgactacccaagagggacggggaggctacccgtacgtatcgatctggcagggcaccgctgctacccctcgtccccgcggtgtggcctcaccctccgcatctatggccagtgcggtggtgctcggggtgacaccaacgacatgtacaagctgtgcgcggacatggcgatgcagcgtggggatgaggaagagtgggccgccggtgaggatattggccatgatgctgccgagcaaccacctatcaacgaggaagtcatactcccgtga

SEQ ID NO: 26669 - DNA, 2496 bp, Oryza sativa
  Clone ID: PAT_MRT4530_31436C.1
atggtgattgaaagaatggaagccaggtggaaagagagagcaaagttttggttcacattgaatccaactgtgagatcatccagcgtgccaggaaatcaaggtatcaacagcaccattcttccttctgcggccactctggaaggctgcccacggagctgcggcaacctgagcttcgactacccattcggcattggttctggctgcttcaggaacccagacttcaatctcacctgtgacaacaccgcacaaccacctaggctcttcctgcagggtgggacagaggttatcgaagatattgatgctattgtatacggtagcacctcaaactacctatttatgtatgtcaccgttgatttttcccatgcaatcccagtaagtccaggtaccaaagattataacatgtcctggaaagccccagggagatcttttactcttgataatgccttgctaaacattactggctgtgactttgatatatacctgcttgatcaagacagaaatagcgctgtgaggctctgtacagttacttgccccaacgaagaaatcacggaaaaggtggccaggcagaactgcaatggtacagggtgctgtaccatcgagttatttgaggctactctcagtgcattccagttcaaatttgtccaacacagcaaaggtgggctcgaggcacaaacaaacagaagctctttatgggacagaatcaacataacaactatctatgctagcctgtcgtggagtatcgtcgatcaaccaacatgcgccagcacaagggataataggaccaactatgcctgcgccagcagcaaaagcaagtgctgtgagagctatggattacctgatcttggttacctctgtggatgtgatagtggatattggggaaacccatacatacccaatggttgccagcgtgataacggatatattccagctcagcagaaggcaaactgctcccgatcgtgtgggaacatcagtgttccatttccttttgggttagaagaaggatgctttgcaaggaagctatttcagcttaactgcacaagtgcaacatcctctagcctccaatttgatgatgagcatcaggtgacatacataaatatcagtgagggtcttgtgggcattagatatacatctaattatgagcaggaggaatttaaagtctatgtacctaagcaaccagatctctatattggatctggcgaatcatcgtctgtgcgatgggctgttgccaatctaacgtgccaagaagcaaagcagaactactccggatatgcatgtgttagcatcaatagcacatgcttgggggtaaactctacagatggttacattggttatagatgcaaatgtttgcctggctttcaaggaaatccatatgtgcaaaatggctgtcaaggtatcattattgggcttagtgttggttttggcattctacttgtcagcttaagtgcaacatttatctgccgtagatggaaaagggacatccaaaagcaactacgtcggaagcatttccaaaagaaccaaggtcttctcctagaacaactaatattgtcggatcaaaatgcaactgacaagacaaagattttctctttagaggagctagagaaagcaacaaacaactttgattctacacgtatccttggtcgtggagggcatggtatggtgtacaaagaaaccgaggtcccgctgttggtatatgactttattcccaatgggtcattatttggtgttctgcattctggctcaagcagtgatttctctttgtcatgggatgactgtctaagaattgcagtggaagctgcaggagccctctgttatctccattcggcagcttcagtatcagtcttccatcgtgatgtcaagtcctctaatatactcctagatgtgaactacacagctaaagtatcagactttggtgcttcaagattggttccaattgaccagactcacgtagttacaaatgtacagggtacatttggctacttagatccagagtattaccatactgggcagctgaatgagaagagtgatgtatatagttttggtgtggtacttgtggaactactaatcagaagagaacctatttttacaacagtatcaggatcaaagcagaacttgtccaattacttcctttgggagctgaaggtaaagccaatcaaagagatagttgcagcctacgttcatgaggaagctactgaggatgagataaacagtgtcgcttctcttgcagagaagtgcttgatgctccgaagtgaagataggcctacaatgaagcaagttgaaatgactttacagttcttgcgaacaaaaaagttgaactcatgccatgctactccagaaaacgatgaagagctgcaacagttgctaccgagaaggtctgaagctagttgcgagcaagtggctgttaacttgggtaacagtgctaattctgagtctcgaaatagcctcaaatgctatagcttggagcaagagttcatttcatctgttgggctgccatgctaa

SEQ ID NO: 26670 - DNA, 1512 bp, Oryza sativa
  Clone ID: PAT_MRT4530_31437C.1
atggcggcggcgcccgcgggacgacggtgcagaaggcgcttcggtggcttctgtcgatggcgaggggcagccgagaatgacggccgacagtggcgacatggggtagagctcaccttgacatggaggagagggttgcggcaacgattgggtccgacggagcggtggccgaggtgcgtcggggcgcggtggagttggtggtggaggccgcatggggtggcggtggctagggtggcggcagtgaccggccggaggcggatgaagtgggcagtgtttcggttgtggagggggaaaacggagctgcggacgggctgtggcaaggctcggcggtggtggcggcacagctcggcggtggctagggcggcgggaagcggcgaccggagttcgacagcaagtagcggtgcacaggctcggcgttgcgagcatgatttctggcgcggggaagctcgggagttgggggaaacgagagagaggaggtgtagggagcattttataggcctcgagggctcggcacgaggccggaagaggcagaaggtgccgacgaagtggggtggcgacgtgggtgatgtggggctccaccggcgccattttttgggggtggtggaggatgtggatggggtcgtgcccacgcggttggacgcgagcacggacagcactgaatttcgttttcttttcttttctcctcttctcgatctctcctcctctcgatccccttctctccttctcgcgtgcacgctcgagcggagggaggaccgggcatggcaagacggcagtcgacgcggcgacggcaacgacggccggcacgacgactggggaaggcggcggggcagtggagaggggaccggcagtcggtgcctgagagacggcgcgcgaggaggcggtcgcgccttctgtgctcagccccggcggtgcggcggcccggtcgaggcaaggcggagacgacggcggctgtcgcagtggtcgaggagggcgtggggcagaggaaggcgggggcggccatggcgcgacgacgacggccggggcggcgcgacgccagcctgggggaggatgaagacggcggctacggcggcttctgtggcggaggcagaggtggtagtgggtcgcggaggcggcgcccgtgcgcggggcggtgctctggccgatggcggggaggcaatggtggcggcggggaatgggaggcgaaaggtggagggtgatgggtcaggtggcgtttatggcggattcgattgcagtggcttcgaggggaaggaagagagcttggtggcttcggggagaaggacaaaaggaggcggcactgtggcgacgcggtgggcgtgggcgcagcgcaggcgttcggtgtggacggcttcaaggagaaggaagcggggcacagtggcggcacggcggcgtgaacgcggctcacacgggcggcgtggacgcacggctgagggagcaggagtagtggcgttggcttggcatgcgaaggacaacatggctaggccgggctgggccgccaaggtggagagggagaaataa

SEQ ID NO: 26671 - DNA, 558 bp, Oryza sativa
  Clone ID: PAT_MRT4530_31438C.1
cacgcgcacaaaagcgggtaccctagagttttcgccccctttttttttttttataacttaaactatcttatcatatgcttccatgtatgcacatttacattctgaaattttaacttagctatatacatattctgtaatatataccatatgctgaatctgaaataacaacatatgttttatgcaagtattcattaaaaaaaattatgcacaatattgtacaacataccagactacccaagcaaaattaaatgattttccttgtcaatttgactatatcacaaatatacttcatacattaatttcacaggatagataaacactgtacagagccgaaagtacaaatttattccattagtgcttagtgcttaaaaaatccaacttgaaatctcattaaattagtgcagttatgaacagcgaaagcttgattaaaataaacagaaaagcagtggtcagtcgaccttatttcttccccaaaatccatatactgctaaaaaaattcagtagacgattggcaccaaatgaattagctctaatcaattggcaaacttataaacaaag

SEQ ID NO: 26672 - DNA, 487 bp, Oryza sativa
  Clone ID: PAT_MRT4530_31439C.1
atagtattatgctcctgtggatcttaacgcagaacaccatgtatgcaagttcgttcgcttagcgacgatctatctcctcgcagaggaagagtatgggtgggtggactggcaataccagatcacggaggggacgtcagtgcgcatccgcggtgcgggctatctgtgttgtggcctgctgtgccggcctttgccaccaccaaaaccttcttactcgctgctacatccagcacggcgagctctggagcaatggcgcagtaggatgtgagcggtgacaacgggatatcgaagctgctgcacctgaaagtgtgtgaccaactatagctgttgctcctgctgctactgaaagtgagagtatgccctgccgtggcccagctgcatgtcgacacatctgtacgacagctgctactgccgataataggtttgcactgggcctgaagttgctggcattagaacccaacgtatatgtaggcaccgcctaggcttttgc

SEQ ID NO: 26673 - DNA, 1950 bp, Oryza sativa
  Clone ID: PAT_MRT4530_3143C.1
atgggcgtccatgtcttcaccgaccggctggccatcgccgccgattggtgcctccgcctacacggctggcctattatgccgccgctgttgggcgtctacgacttcaccgccggcctgcctccgttgccgccgactggtgtcctcgcctacacggctggcctattatgccgccgctgttgggcgtctaccacttcaccgccggcctgcctccgtcgccgccgattggtgcctccgcctacacggctggcctattatgccgccgctgttgggcctccgtcgccgccgactggtgtcctcgcctacacggctggcctattatgccgccgctgttgggcgtctacgacttcaccgccggcctgcctccgtcgccgccgactggtgtcctcgcctacacggctggcctattatgccgccgctgttgggcgtctacgacttcaccgccggcctgcctccgtcgccgccgattggtgcctccgcctacacggctggcctattatgccgccgctgttgggcgtctacgacttcaccgccggcctgcctccgtcgccgccgagtggtgcctccgcctacacggctggcctattatgccgccgctgttgggcgtctacgacttcaccgccggcccgcctccgttgccgccgagtggtgccaccgcctacacggctggcctattatgccgccgctgttgggcgtccacgacttcaccgccggcctgcctccgttgccgccgagtggtgcctccgcctacacggctggtctattatgccgccgctgttgggcgtccacgacttcaccgccggcctgcctccgttgccgccgagtggtgcctccgcctacacggctggcctattatgccgccgctgttgggcgtccacgacttcaccgccggcctgcctccgttgccgccgagtggaatggatcagtcagaacatcacccccggctcgcctcgaccgccgccgactggtgtttccgcctgcacggctggcctttatgccgccgttgttgggcgtctacgtcttcaccgaccggcttgccttcgccgctgccgactggtgtttccgcctgcacggctggccttcatgccgctgttgttgggcgtctacgtcttcaccgaccggccgcctcgtctgccgccgactggtgcttccgcctgcacggctggcctttatgctgccgttgttgggcgtctacgtcttcaccgaccggcttgccttcgccgctgccgactggtgtttccgcctgcacggctggcctttatgccgccgttgttgggcgtctacgtcttcaccgactggcttgccttcgccgctgccgactggtgtttccgcctgcacggctggcctttatgccgccgttgttgggcgtctacatcttcaccgaccggccgcctcgtctgccgccgactggtgcttccgcctgcacggctggcctttatgccgccgttgttgggcgtctacgtcttcaccgaccggcttgccttcgccgccgccgactggtgtttccgcctgcacggctggcctattatgccgccgttgttgggcgtctacgtcttcaccgaccggccgcctcgaccgccgccgactggtgtttccgcctgcacggctggcctattatgccgccgttgttgggcgtctacgtcttcaccgaccggcttgccttcgccgccgccgactggtgtttccgcctgcacggctgacctttatgccgccgttgttgggcgtctacgtcttcaccgaccggcttgccttcgccgccgccgactcgtgtttccgcctgcacggctggcctttatgccgccgttgttgggcgtctacgtcttcaccgaccggcttgccttcgccgctgccgactgcgttgattggccttatcttcttcaccgccggtcgtctcgtctgctgctgactagtgccctcacctctacgtctggtttatacagctaccactactga

SEQ ID NO: 26674 - DNA, 349 bp, Oryza sativa
  Clone ID: PAT_MRT4530_31440C.1
cttatcttcatttttgggaaaccacaaggcttacacaggggttctgccaattgggagaaacatttgcccctaaaaaggggggggttcacgaattgggggggccccaataaacatggttgggtttcaactaaaaaaagggggtacgaccactttttcatgaaccaagagaggttaagaaaagcttggccctgggggccattttttttgggcctcccccctttgggggggttaaaaatgggacctgcttctctttgggtgccccacgttaaaaaggggggcacccttttgtcttttttttgggggggggccccccctaaagattggagtgcccccggggggggtgggaaaa

SEQ ID NO: 26675 - DNA, 873 bp, Oryza sativa
  Clone ID: PAT_MRT4530_31441C.1
atgtgccgaacgaccgggttcgctcctatagtggagctcttcgccctcctcttcaccgccagtgcatcgacgaaagatgtgcacacacccgctgggccgaagaagtctgtcttcggcagtaaatggctctacatcgacaatccttgcgccgccaactccgacaacgcgggtaggctccggtttcgccacctccacatctccatcaactccaagccgaatgtggatgattgggggatcgaagtgaaggaggacaaaaaaaagctcggccttcccagtctcgtttttcccgaatggaccaatcaagctgacaccaacaagatcatcggcggtctaacaaccgcggagtatggctggctgctgcagtgccagcttgacggccgggcaaaccaggtgcatgatggtgaactgcctgcctgggtgaaccccgccaaagtagacgagggggccagcgcgtcgaagaagtgcaagcgtgcggtgccgaaggctgtccctggggcgaagaagcttcccatggcaacaccattgctggctccagcgcatctccgcttcgccaaacggacctcgaggggcgaaaactctagcggagatcgccaaggctacgccgaagaaaggtggtccaagtggcgtgaagaggcaggcgaaggtcgtgatgaagggaggggtgttgattccctccgctttcacggacagcgagtcctcttcgccaagcacgcccacttcgccagcgccccgagctcccgtgacaaagaatgtggagtggcggttgcgaaggacggatgcgaggtgtggaggaaggatgggccatgggcagccatggcgtcggcggagagcaagtggaacaatatgattttgaaactacaagatccaaattag

SEQ ID NO: 26676 - DNA, 1080 bp, Oryza sativa
  Clone ID: PAT_MRT4530_31442C.1
atgggaagcttcttcgcccctgctcccgtcggcagcttcgtcctcctcgtcgtcctcatcatccgcctccgactcgacgacaggcactttggaaaccttgcgggatcagatccaggcaccagggacagccttcggcaccgcacgcttgcacttcttcgacgcgctggccccctcgtctactttggcggggttcacccaggcaggcagttcaccatcatgcacctgaccgccgatgatcttgttggtgtcagcttctgcgtctccaagcaaaagtcgtacaaagtgaaaaagacaattaggctggtagtcagaaagaataagagatcagaaagagacgcgatcggtggcaaaaggcttacgattggtccattcgggaaaaacgagactgggaaggccgagcttttttttgtcctccttcacttcgatcccccaatcctgagcaaggggagcgatccggagcatgcaatgctttttgcaaaggtcgcgggtgctgaggcgacgtgcgaccttgcgaagaaggatgagtctttactccagcgttccaataacatccacattcggcttggagttgatggagatgtggaggtggcgaaaccggagcctacccgcgttgtcggagttggcggcgcaaggattgtcgatgtagagccatttcggccatgagtccgaccgctctggtcggaggttgaagttcacactgccgaagacagacttcttcggcccagcgggtgtgtgcacatctttcgtcgatgcactggcggtgaagaggagggcgaagagctccactataggagcgaacccggtcgttcggcacatggagggcaagaaattgtcgcacggcagccagaagtccacgtcgaagaaggaggcaaagaccacggttcgcccgtcgcctggcgctaggacgatgtcattgctaggttgagaggcatggccttcggcagttaccccaacaagaaccattgcggctacatcggagtcgttaacctttgacttgcccaggtagcaagtccagttgttgccaaggctcccggggccatcgtcaatcgcaccatcttgggtaggtttgcgtggggccat

SEQ ID NO: 26677 - DNA, 741 bp, Oryza sativa
  Clone ID: PAT_MRT4530_31443C.1
atggggaggcgaccggcggcggaaaggatggcggcggccgacacgggaggcgacgggaacggcggtccgacgacgcccgaccatggcggagccgcggccgagggccggcaagacctagggaaattattggagcggttagggagggaaataggcgaccggagcggcgagaataccacgccagagaggagaggaatggtggggctcaccggcgaccgagagataccacgttccggtgggtttccggcgatgaacaacggtgaccgaggtgctgcacggcgctgcgaggcgagaggtgaagacggagcgacgcggcggcggctaaggcgacggtggaggtggctcgggatgcacggtggaagcagtacttcgggggtggaagagggagatggagtggatgccgcgctgcgcacgatggctgcggtgctagggaaggcgacggcgcagcgcgaggtggaccagagaggcgatgcggcgcggctggaggcggcaatggtggtggagagagatggtgaacgtggcggcggcgtttcgaatgtggggaggggaaatggagcggtggacggggtgcgcacggcggctgcggtgccggggagggcgacgccgcagtgcggggtgaacgggagcggtggcgcggcgcggctggagttcgccggggagcgcgtggggaaagcgggggaaggtgcgacgggctcggggaggagggggaaacggaggaggggagcacgaggatcccttttatag

SEQ ID NO: 26678 - DNA, 2057 bp, Oryza sativa
  unsure (1)..(2057): unsure at all n locations
  Clone ID: PAT_MRT4530_31444C.1
cggccctgcaccgagtgtcccgcgcggtggcggcggggattggccacgcgtcggtccaccgcgcgccgaggtggggcgcggcggcggcggcggcgaggtggctgagcgggggcagggaggcgatgagctacgacgtggtggtcgtgggggctgggcccgcggggctcgccgcggccatccggctgaagcagctctgccgcgacgccgacaccgacctctccgtctgcgtcctcgagaagggctccgaagtcggtgcgcatgtattgtcggggaacgtgttcgagccacgagcgttggatgaactcatcccgaagtggaggcaagaggataccccaataagagtccccgtctcatctgacaagttctggctgttgacaaagaataaggcatggacacttccatctcctttcgataacaagggaaactatgtgataagcttgagccaaatggtgcgatggatggcctccaaagctgaagaattgggtgttgaagtatatccaggttttgctgcgagtgagatcctttatgatgaaaatcaaatagttacaggcgttgcaaccaatgatgttggtattgctaaagatggttccaaaagggaaacttttcaacctggtgttgaactaagaggcgactacttagaaaatgcagggcgaatgacactgttggccgagggttgccgaggttcattatcagagaaaataataaggaaccacaagctcagagagagtgggcaaggccagcatcagacatatgctcttggaattaaggaggtttgggagatcgaggaaggaaagcacaagccaggttctgtgattcatactgtagggtggcctttggactcgaaaacatatggaggatcatttatgtatcaccttgatgatagacagttagcgataggtctggttgttgccttgaactatcaaaatcctttcatgagcccatacgatgaattccagaaattcaagcaacaccctgctgtcaggacaattttggatggtggaacagttcttcagtatggtgctcgtacgttgaatgaaggtggttttcaatcaataccaaatccagttttccctggaggtgcaattattggatgctctgcagggttccttaatgttcccaaaataaaaggaactcatacagccatgaagtcaggtatgctggctgcagaagcaactttcaaaactcttgttgaaggatcttcgatggaactctattgggagaatctcaagaagtcatggatatgggaagagctttatagagctcggaattacagaccagcatttgaatatggatttattccaggcattgccttgtctgcactggaacgatacgtattcaaaggaaagtccccctttaccttaaagcacgggatacctgaccatgaagcaacagatatggccagtttgcactcgcctattcaatatccgaaaccagatggtcaaatatcctttgacgtaccaacttctttatacaggagcagcacaaaccatgagcatgatcaacctcctcatctccgtttgagggatcctacagtaccggagagagtaaatcttcctctgtatgctggaccagagtcacattattgtccagctcgagtttacgagtatgtcaccgacgagaaaggtgaccagaagcttcacataaatgctcaaaattgtcttcattgcaaggcttgtgacatcaaagatccaaagcaaaacatcgaatggaccgttccagaaggtggaggcggtccagggtacacagtaatgtagacgatagcaaaatactgcctgataccatgaaaacattaaccgaaaggcaataaattatcatcatgtatagaggacatcatgaaataatgtatggtatatttcttctggtcaatgtgaattcaacctatacttgtcaattggtcgttccaaagtataccaaaggaaaaaaggaaatacatgacaaaatcacagacagactacatcaggactagataatttcacagtgacttttgttcagtgtagtttcaaaatattcttgttttgaagaaatttaaatgccgtcaaagttgcaccntannataa

SEQ ID NO: 26679 - DNA, 177 bp, Oryza sativa
  Clone ID: PAT_MRT4530_31445C.1
ctaggcttgatgggccggaaaggcttcctcggccctcgcgggggcgaacttgtcaagacgaagtcgtcctccttcgacagatagtcttcgccttgcacccttcacctgagacgtctctggcctggcgcttgtacgactcttcgtcttgcgccgttcttgctccatagccttcgccat

SEQ ID NO: 26680 - DNA, 669 bp, Oryza sativa
  Clone ID: PAT_MRT4530_31446C.1
tccggaattcccggctcgacccacgcgtccgggttttgatttgatctgtgtgatttgagtgacctgagtgagattctttggacgagggattctggcttgatttgttttgtgggttagcgcggtatattgtgtggaggagattcaaggcgaccgacgagaaggtaccaagggaaagccacatcttcatgagaggccgcaaacccactggtgatggaggagggggctgcgtagacggcacctgccctgggggtgcacgtcaagatgctgtttaccttgctgtgtatcacgatgtctacttgatggacggcggagcacattactcggtaaaggctgggatcatatgctcatgacactgtgaagctttgttattgaccgcagcctaggtgcaacgaccctacgccacaggctgagcgttgataactgtatggctcagcaactggatggaaccaacaatgagtgagggtggtgcaagcacaagcttgatgctaatgcaatcatgactgagtcactggccattagcaagctgagctatatcagaacatcctctgtaccagcacattgcctaccttgctggatacaagcatctgggtgtgcactgtacctgcattcaacgtcattaacggatggatcacatgctggatacaagcttgccatgcaggagttcatgat

SEQ ID NO: 26681 - DNA, 1496 bp, Oryza sativa
  Clone ID: PAT_MRT4530_31447C.1
atgcctgagctcgttctccagcttgctggcgtggtcctaggaaatctatgtgtgcacggaatcgacttggggctcaccggtgaaggaggaatcaaagatggagctcggcggccggagttggagaagaatagctcgatctctctcctcggtgctcggatcttggggattcctgagggcatttggagaggacctcgaggggaagatgttggcgcgacggctcggccggattcgctccacagcagccgggacagcgacgaggtcgtggcggcggcgctccgggcgcgctctgcagctcccgtgggcacgatggcgttcccgtcgctgcagtggatgaaatgatccgctgcacgcgagacggccacgtcgacaggaagcctgacgatcatgaactggaagggaagactgccgatcaaaccgctgatgaacaagacgatggcacggcggaaggaatccaggaggagggacaaggcgctggagaagcaaaacaagatgctggaggcaaggaggggatcatgccgaacaaagctataggagacggcgccaagcatcggcccaagacgtcggaggcccaacccacgctacttcagcaatcagtgggccaggaaatcatccagagttataacaaggatgctcatgccatccagctactcattgagcttgctatctgccctacagctcgacctcactttactctccaacaaggagtcattaaatataagggacgtatttgggtgggggatctaacagaattgcaggataagttgattgatgctcttcatgactcaccaatgggaggccattcaggatttccagcaacttaccagcgggttaagagtttatttgcttggacaggaatgaaaaagaagtggttccaacagaggaagcttatgcagcaactcttgcagcatcatttgaaccgagctcaacagcaaatgaaacacatggctgacaaaaagagaagcttcagggaattccaagttggagactgggtttatcttaaactacaaccatatgttcagtcttcagtggctgtcagggctaatcacaagttggcgtttcgctactatggcccttaccagatactgcaccgggttggcgctgttgcttacaagttgcttctgccagcagctactactgacgccacatgggaggatatgcaagatcttcactcaaggttccctcatgcaccggcttgggggcaagccgatttccaagcatgggggcttgtcaggcctcctctgaagactcaagactgccacaaccacaggaagcctgacgatcatgaactggacgggaagactgccgatcaaaccgctgatgaacaagacgatggcacggtggaaggaatccaggaggagggacaaggcgctggagaagcagaacaagatgctggaggcgaggaggggatcgtgccgatacaggaaacggcgccaagcatcggcccaagacgtcggaggcccaacccacgctacttcggcaatcagtgggccaagtag

SEQ ID NO: 26682 - DNA, 1587 bp, Oryza sativa
  unsure (1)..(1587): unsure at all n locations
  Clone ID: PAT_MRT4530_31448C.1
atgaggaagagctgggggctcgggcggccgtcgggtgaccggcggtggctgctccccttcgccgcgagcctcctcgtctcggcgaccctcttcctcgccgcggcatgcggcctcttctccccgccctctctcgccgacggcgacgacgactccatcctcatcgacgtcgccacctgggacaccgcctccgccgcagaatccgagatcaagaaccgcctcctcgactccaactccgactccgacgacggcgacaacccggacgacgcggcggtgaactcggacgcctcctccgcggatcccccgcggatcgcctacctcctggagggaaccaagggggacggggcgcggatgaggcgggcgctgcaggcgatctaccacccgcggaaccagtacatcctccacctcgatctggaggcgccgccgcgggagcggatcgacctggccatgtacgtcaagggggacgccatgttcagcgaggtcgggaacgtgagggtcatcgccaagggcaacctggtcacctacaaggggccaaccatggtggcctgcacgctgcacgccgtctccatcctcctcaaggagggtctggagtgggactggttcatcaacctcagcgcctccgattaccccctcgtcacgcaggatgatatacttcatgtgttctcttccttgccgagaaatcttaattttatagaacacatgcaactatctggttggaaagtgatttcaagagcaaaacctattgttgtggacccagggctctatctatcaaaaaagttcgatcttaccatgactactgagcggcgagaattgccaacatctttcaagttatatactggttctgcttggataatgctcacaaaaaccttcctcgagtactgcatatggggatgggacaatctcccacggacactccttatgtactatgttaacttcatctcctctccagaaggttatttccacaccgtcatctgcaactcggacgagtttcggggcactgcggttggccatgacctgcactacattgcttgggactaccctccaaagcaacatccaaatatgctctccatgaaggacttcaacaagatggtcaagagcggcgcgccgtttgcacggaagtttcccaaggatgacaaggtcctggacaaaatcgaccgtgagctgctgcaccgctccgaaggccagttcacccccggagcatggtgcgacgggagctctgaaggaggagctgatccatgttcctcaaggggtgaagattcggtattcgagcctagtcccggtgccgagaggttgcgaggcctcatgaagaaggtgctttcatgggattaccgcaatggcagctgctcgtcgctcggttacgatcagacaaaacgagattggtatgttccaaaaggtagaggataattcatgttgtcctggtaccttttcttgtaaattcagatagctgaacttgnccccttcctttgaaatgaacaaagctgatgaatccaacattctgaccaagaaaaaagatgttgaaattgcaatgtccgtaaaaaaaaaaaaaaaaaaaaaaaaaaaaaaaaaaaaaaaaaaaaaaaaaaaaaaaaa

SEQ ID NO: 26683 - DNA, 359 bp, Oryza sativa
  unsure (1)..(359): unsure at all n locations
  Clone ID: PAT_MRT4530_31449C.1
ccggccgggataaatatcaagccaatcggcaatcgctgagatttactagtacgtactgtacctgcataaatacataaacacataacatattatggcctcgagtgatactcctacccatgaggagacactcagttttgagccctcggtatggggcgacttctttatcaactatgaaccacaaccattgcagagatcagaggggtggatgcaggagagggctgagaagctgagagggcaaatccggacactgtttgggacctgccacgacatgtcggcgaggatgaacttagtggattccgtccaacatctcggaatcaatcacctcttncccagagagatagaagatgctctaacgagca

SEQ ID NO: 26684 - DNA, 3026 bp, Oryza sativa
  Clone ID: PAT_MRT4530_3144C.1
atggagagcgcaccggccaccaccacctcctcctccacccaacacggcggcggcggcggccatatcttcctcctcgctttccccgaggcgcatggccacgtcaacccgatcctgcagctcggccgccacctcgcggcgcaccacggcctcctccccacgctcgtcaccacccgccacgtcctcttcacccttccaccccctcccgccccctttcgcgtcgccggcatctccgacggcttcgacttcggcggcatggcggcctgcggggacgccagggagtacacccggcggctggcggaggtgggctccgagacgctgcgcgcccttctccgctctgaggccgacgcggggaggcccccccgcgtgctggtgtacgacccgcacctcccgtgggcggggcgcgtggcgcgcggcgcctgtgtgcctgccgtcgcattcttctcgcagccgtgcgccgtggacgtcatctacggggaggtctgggcggcgattgatgctggtcatggactcgaggcgtctcagctttccggtcgatcggccgcgagtccactccgccggcttgtcctcgccaccgccattgctgataacaacaacgacttcaccgccggcctgcctccgtcgccgccgattggtgcctccgcctacacggctggcctattatgccgccgctgttgggcgtctacgacttcaccgccggcctgcctccgtcgccgccgattggtgcctccgcctacacggctagcctattatgctgctgctgttgggcgtctacgctttcaccgccggcctgcctccgtcgccgccgactggtgtcctcgcctatacggttggttggtcacaccaccgttcatgggcgtccatgcctccgcctacacggctggcctattatgccgccgctgttgggcgtctacgacttcaccgccggcttgcctccgtcgccgccgagtggtgcctccgcctacacggctggcctattatgccgccgctgttgggcgtctacgacttcaccgccggcctgcctccgtcgccgccgagtggtgcctccgcctacacggctggcctattatgccgccgctgttgggcgtctacgacttcaccgccggcctgcctccgtcgccgccgattggtgcctccgcctacacggctggcctattatgccgccgctgttgggcgtctacgacttcaccgccggcctgcctccgtcgccgccgattggtgcctccgcctacacggctagcctattatgctgctgctgttgggcgtctacgctttcaccgccggcctgcctccgtcgccgccgactggtgtcctcgcctatacggttggttggtcacaccaccgttcatgggcgtccatgcctccgcctacacggctggcctattatgccgccgctgttgggcgtctacgacttcaccgccggcttgcctccgtcgccgccgattggtgcctccgcctacacggctggcctattatgccgccgctgttgggcgtctacgacttcaccgccggcctgcctccgtcgccgccgattggtgcctccgcctacacggctggcctattatgccgccgctgttgggcgtctacgacttcaccgccggcttgcctccgtcgccgccgattggtgcctccgcctacacggctggcctattatgccgccgctgttgggcgtctacgacttcaccgccggcctgcctccgtcgccgccgactggtgcctccgcctacacggctggcctattatgccgccgctgttgggcgtctacgacttcaccaccggcctgcctccgtcgccgccgactggtgtccccgcctatacggtcggttggtcacaccaccgttgatgggcatcgtcatcttcaccgccggcctgcctccatcgccgccgactggtgcctccgcctacacggctggcctattatgccgccgctgttgggcgtcttcgctttcaccgtcgaccgccttcgtcgccgccgactggtgtcttcattgttattgatggacgactttgttcccacgaatggatcagtcagaacatcaccaccggccgcctcgtccgccgccgactggtgttttcgcctgcacggttggcctattatgccgccgttgttgggcgtctacgtcttcaccgaccggcttgccttcgccgccgccgactggtgtttccgcctgcacggctggcctattatgccgccgttgttgggcgtctacatcttcaccgaccggccgcctcgtccgccgccgactggtgtttccgcctgcacggctggcctattatgccaccgttgatgggcgtctacgtcttcaccgaccggcctgcctccatcgccgccgactggtgtttccgtctgcacggctggcctattatgccgtcgttgttgggcgtctacgactccaccaccggcctgcctccatcgccgccgactggtgtttccgtctgcacggctggcctattatgccgtcgttgttgggcgtctacgactccaccaccggcctgcctccatcgccgccgactggtgtttccgtctgcacggctggcctattatgccgtcgttgttgggcgtctacgactccaccaccggcctgcctccatcgccgccgactgctaccactactgatggacatcatcatcttccgtcgccgactgattatgccgccgccgacttgtgcttttatcttcacaactgcgcgtcttcactaccggtttgcttctgttgccgccgacttgtgttcacttcattacggcaatacaactttgtcatcatggtggagcgacttcatctttattatcttcggcaccggcaaactctattgttgctacttcgcaagttttactacttcaccaaccacgacgtctttgtgaacctcgacatctcggcatgcaatgccatgttattttactacaacaagtggctctccaatattcaggatttctacttggacatcttcaacacatatcttcaatcaagcaatgactattcgacgacaagaagctacagttctcgactctatgttcagttgtttcccaac

SEQ ID NO: 26685 - DNA, 182 bp, Oryza sativa
  Clone ID: PAT_MRT4530_31450C.1
catgaggaaaactattggtggccattggggcatggttaagactggggatagtgcatgatgtttcgcatacgctataccagacggatctcagctagattgacaccaccaacaccaatgacagacagtcacagactccagataactatttggaatccgcaattcgacagagccacctggatacc

SEQ ID NO: 26686 - DNA, 3351 bp, Oryza sativa
  Clone ID: PAT_MRT4530_31451C.1
atggagtcgggggtcccgccctgcgccgcgtgcggggacgacgcgcacgccgcctgccgcgcctgcagctacgcgctctgcaaggcctgcctcgacgaggacgccgccgagggacgcaccacctgcgcgcgctgcggcggggagtacggcgcgcccgacccagcgcatggccagggggcggtcgtggaggaggaagtggaagagagccacgagccggcggccggcggtgttcgcgagagggtcaccatggccagccaactcagcgatcaccaggatgaaggagttcatgccaggactatgagcacccatgccaggacaattagcagtgtctctggagttgggagtgaattgaatgatgaatctgggaagcccatctggaagaacagggtggagagctggaaggagaaaaagaaagagaagaaagcctcagcaaagaaagctgcagcaaaagctcaagctccacctgttgaagaacagattatggatgaaaaagacttgacagatgcatatgagccactttctcggatcattcctatatcgaagaacaagctcacaccttacagggcagtaatcattatgcgtctggtagttctggggctcttctttcactaccgtatcaccaaccctgtttacagcgcctttggtctctggatgacatcagtcatatgtgagatctggtttggattctcctggatcctggatcagttccccaagtggtgtcctatcaatcgcgaaacttatgttgataggctgattgcacgatatggagatggagaagattctgggttggcacctgtagatttctttgtcagtacagtggatccattgaaagagcctcctctaatcactgcgaatactgttctgtccattcttgccgtggactatccagttgagaagatttcgtgttacgtgtcagacgatggttcggctatgctcacatttgaatcacttgcggaaacagcagaatttgctaggagatgggttccattttgcaagaagtactccattgagccacgtgcccctgagttctacttctcacagaagattgactacttgaaggacaagatacacccatctttcgtcaaggagcgtcgggctatgaagagggattacgaagaatacaaggtgaggataaatgctttggttgctaaggctcagaagacacctgaggaaggctggattatgcaagatgggacaccatggcctgggaacaaccctcgtgaccaccctggaatgatccaggttttccttggtgagaccggtgctcgggactttgacggaaatgagcttcctcggctagtctatgtttcgagagagaaaagaccagggtaccaacaccacaagaaagcaggggccatgaacgctttggttcgagtatccgcagttctgacaaatgccccttacattcttaatcttgactgtgatcactatgttaacaatagcaaagctgttcgtgaagcgatgtgtttcatgatggacccttctgttggtagagatgtctgctatgtccaattcccacaaaggttcgatggcattgatcgcagcgatcgttatgccaataggaatgttgtgttctttgacgttaacatgaaagggcttgatggcctccaaggtccggtttatgtgggaactggttgttgtttctataggcaagcgctctatggttatggaccaccatcactgcctgcgcttccaaagtcttctgtctgttcatggtgctgctgctgctgtcctaagaaaaaagctgaaaaaagtgagaaagaaatgcatagagactctcgacgtgaagaccttgagtccgccattttcaatcttcgggaaattgacaactatgatgagtatgaacgctcgatgcttatctcccagatgagctttgagaagtcgtttggactgtcatcagtgttcatagaatcaactcttatggagaatggaggcgttcctgagtccgcaaacccatctacactgatcaaagaggccattcatgtcattagctgtggatatgaagagaaaactgaatggggaaaagagattggctggatctacggttcagtcacagaggatatcctgactgggtttaagatgcactgccgtggctggcgatccatctactgcatgccgataagacccgcgttcaagggatcagcgccaatcaacctttctgatcgtctccaccaggttctccggtgggctctcggttccgttgagatcttcctcagccggcactgcccactctggtacggctacggtggtggtcgtctgaaatggctccagagattgtcctacatcaacaccatcgtctacccgttcacctctcttcctcttattgcatactgttgcctgcccgccatttgcctgctcacaggcaaattcatcattcccacgctctccaacgctgcaaccatatggtttcttggcctcttcatctccatcatcgtgacgagcgtcctggagctgcggtggagtggcatcggcatcgaggactggtggcgcaacgagcagttctgggtcatcggtggcgtctccgcccacctcttcgccgtgttccagggtatcctcaagatgattgctgggctggacaccaacttcaccgttacggccaaggcgacggacgacaccgagttcggcgagctgtacgtgttcaagtggacgacggtgctgatcccgccgacctccatcctggtgctcaacctcgtcggcgtggtggccgggttctccgacgcgctcaacagcggctacgagtcctggggcccgctcttcggcaaggtgttcttcgccatgtgggtgatcatgcacttgtaccccttcctcaagggtctcatgggtcgccagaaccggacgcccaccatcgtcgtgctctggtctgtcctgctcgcctccgtcttctccctcctctgggtcaagatcgacccgttcatcggcagctccgagaccaccaccaccaacagctgcgccaacttcgactgctgagcgacatttgtgctccaggagcatcccgtttggcggtgttttgccggtattgcaaatgtgtgtatctaatgcgacgaagacgatgggtggtttcctctctctgggctttgtcctcgatctgagaggtgttgtaggttagtactccgcatgaaaatgttcattgtattgttattgtctgtgatataagaagttttgatgttgaagccgctgaaactatgagagggcaccgttaaatccgtttaatcatacttgtagaaaaaagagggggaaagaaaaggttttcttcggtgaacttgaaattggactactgatcagtttgtaatgttatatgactagaagctattgaaaaggatcttaaaaaaaaaaaaaaaaaaaaaaaaaaaa

SEQ ID NO: 26687 - DNA, 499 bp, Oryza sativa
  Clone ID: PAT_MRT4530_31452C.1
tttttttttttttttttttttttttttttttttttttttttttttttttttattttttttttttttataaccaaccatggatttgattgaaaaagagcttgttttaaaaaaaaaaaaattttaataaaaaaaaaacaaatctggttaacttcgagtgcgaaaaagaaaaaaagatattgaaataaaaaaaaagaattgtgactgaaaaaaaaagacaagacaggaacaaggacgggcaaatgttaataagcttaatgtatcatccctgcagagggaagaaagcacaaacggggaaggggggagggacgaacggggaggaagggggaaaagaaaaaggaggaagggttaaaaagagggccgttttggctttaaagaaagaaaagggggggcccaggaaaaggcgaggccccgaaccgaaaggaaagagaaaggtcgggaactgggttgggtggaggattgcattgaccaaccttgatggaattaaacagaacgtgttctt

SEQ ID NO: 26688 - DNA, 442 bp, Oryza sativa
  unsure (1)..(442): unsure at all n locations
  Clone ID: PAT_MRT4530_31453C.1
ccacgcgtccgctacaaacgagaacattgcagcaggacatacatatgtatattactcggcaatttgcaggccactcagaaattcagaaactaaactgttttcaactataaaactctctgtatggcgagaatattggtggcttggtgcttggcatgttactagagccctactttgtggaaattagtggtggttataattttatgaaaggttattatctttgaacaatgaacgcacaaactttcatgtcttttctccgcactctatttataagcacagttactatatgcaggatgaagaacttgcacagcaccaagtatctatgnntgctgnttgntgctcttacttgnggnttaagaatgntttttgntcaccaagcttntttgggactcaagtgttaactgggtagntgaaactaaactgtgctaataagatgaaactgact

SEQ ID NO: 26689 - DNA, 185 bp, Oryza sativa
  unsure (1)..(185): unsure at all n locations
  Clone ID: PAT_MRT4530_31454C.1
ttttgcaacgtcttaagtctcgttctctgaagtctattccaaacgacgttttaagtcanggtaaaacttttaccacctgacgtaagacgccacaccaaaagcttggacgaatatctgtaagaaccggaagactctcctactagcctagtacggtaaaagtaagcacttatgacttattagaagag

SEQ ID NO: 26690 - DNA, 123 bp, Oryza sativa
  Clone ID: PAT_MRT4530_31455C.1
atggagatgatgaagatgcaatcggttggtcaacatgtggaggttgacaactggatcattgggactaataattttattgagttgaatgagagaaataggtcccaaggattgcaaaggtgttga

SEQ ID NO: 26691 - DNA, 305 bp, Oryza sativa
  Clone ID: PAT_MRT4530_31456C.1
gcacgagcgccacatttgtcattcagacattcagtttgtgctggctgggcacttactgcatcgatcgatctcctcttcagaacaagaagagatcagctttggagctagctagcttagctagccggctgagctaatttcgccttgctttggtttttgtttttagtttatctgaaggagagggatttgtaagtgcaaggaactaaagcggcatctataacagaatggaggatttggcgaagttcttgtttggagtttctgggcaatgtcatcgcgctcttcctcttcttatccccagtgcctacttt

SEQ ID NO: 26692 - DNA, 2651 bp, Oryza sativa
  Clone ID: PAT_MRT4530_31457C.1
gttagttgatgttgatgtcgcccctcgtgtctctgttccagtgctggtagcgcgtcccgttaatctctcatgctcatgctcatggcagccgacgtctccattcccacgccgcctctctgctctctgctctccctccacacctactgattcttcttccccttcccttctccgctttccctgccttgcaaatccgccaaagggctcatcttagtgttcctcttgcgtgattccgagctaaaggtgccgtctttccccccaaaccaccaccattcatttagtgttctggtggggatccagtgcaacaaactgggtagtaattttgtcgcttttcggagtctgctcatttttggggttcaatctgataagaggatggctttctcttcctccgaactccgtcaggggacttttagctgatcgatgaattgctgttcaagtgaagcggttttaagttccaaagtggcgcttctgaattcactcttctcgtactatagtattgccaaaggagaattgctctaataagatgaactgtacaaaaggagggggatttccccttttgttttgcgcagtcatttgtctcatggcccaacagggggcttgcaatgtggtgctaatagcgaataacactaccttgtcatttgatgatgtcgaggcaacttttactccagaagtgaaagattcaggtgtaaatggtgcaatttacgctgtggaacctctggatgcatgtagtccattgagaaagaaagcagccaatggtcctgtttcaccatttgcactggtcatacgaggtggttgccaatttgacgataaagttagaaatgcacagaatgccggatttaaggctgtgatagtatatgatgatgaagacagtggtgtcctggtttcaagtaattttacagtggctgggagctcgtccgggatctacatatatgcggtattcctctctaaggcttcaggagaggttttgaagaaatattcaggtcaaagtgatgtagaggtgtggatactaccagtatatgaaaactcagcttggtctatcatggcaatttctttcacatcactgcttgctatggctgctgttctagctacttgtttctttgtgaggagacaccagataaggcgggacaggggaaggattcctgtaacccgggaatttcatggaatgagcagtcaattggttaaagcaatgccaagtcttatttttacaaaagtgcaagaagacaatagtacatcatcatcttgtgccatttgcttggaagactacagttttggagaaaagctaagagtgttgccttgtcgtcacaagttccatgcgacttgtgtggacatgtggttgacctcgtggaagacattctgccctgtgtgcaagcgagatgcaagtgctggaacctcaaaaccccctgcatcggagtccacccctttgctttcttctgttattcatctgtctgctgaatcaacagctttgtcttcttttcggtcaacggtggcagtatctccccctaggccaataagacgtcatccttcatcacagtccacatcccgcgcttactccatttccagtgccccccgcaattataaccttcaaagatattacactaactcaccttatattagtacgagtagaagcaatgtagatcttgcaaatatgtcatcacaatggtctcacactccgcaccaagcatccatgcattctctaagaagtggccatttgtctctaccgatcaacatcaggtatacaataccacatgtttctcgttctgactatggatctgccagcctgggtttatcccatgattcctgttctcaccatggatctccgagttattatcatagctctttgggccagcaacgttcttacctgatgcaccgcaccgagtcagggccaagcctgtctactatggtgctccagtcgccacaatagagtcagtagcagtacaatggcgaatcaggagaagtctatcagctgcggtttaactcgatcattacgtcaggcctatgtacagcattgtcttgattctgatggaagcttgtctgctgtgacatcggatcagtcgctaccaagatgctgattgatcttacgaagttcactgtttcatgagcatttgtgcaagcccctgctagatttgttcctgggagatgcaaataaaacagaaaaatcctatgcgacacaaaactggcaggttcatgcaaagttcattcatggaactatttcgtgccagccaccattgtgattcaacaaggttacttacattgtctgtacggaggggaaattggtgatcttaaatcgaagaaagacttgctgagttttgctgaagaagcaaatatccatgagtctacaaggaatagtttgactttgcgtattgtttgaggcttgtattataggtgatgactttagagttggtgtaatggtgtgtttcttttacattagttattttgtcatgcgtataaatgttacagcttagcaataatctgttagtcggtgaatgttttgtagctctctaatatttattcttttttgcgaaactttctaatacttattctgatcttggatatttgtgcaagtgtgtggggggggccccgttcttcctttcaagatcaactgtacctgaaaattctagagcatgtttacgctatgttaaaaaaaaaaaaaaaaa

SEQ ID NO: 26693 - DNA, 679 bp, Oryza sativa
  unsure (1)..(679): unsure at all n locations
  Clone ID: PAT_MRT4530_31458C.1
agtgcaggtgaagaggaggagaccgaaggaggggaagagggggaggaggatgggatctgggattggagccgtgctggtgcttgttgcagcatggctaacatttgcgccgcctggtgctctggcttcttcgcgcaggtttgatctgagtattgcacaagaaaagttagtgaactccacaggtggttcaactgcttcaagctcacaccttgtttttgatccttcaaaatcaaagagactctcatggcatccaagatatgtcttgttttattcttctttacgtggtgggcaaatcccatttcttaccttaatataggatcttcttgtatgaaggttttctttctgacatggagtgtgaccatttagtatctatgggacgtggtaatatggagtcatctttagcatttactgatggtgatagaaatagttcgtataacaacattgaggatatagttgtttccaagattgaggacaggatatcgctatggagctttcttccaaaagaaaatggagagagcattcaggtcttgaagtatggagtgaacagaagtggcagtatcaaggaggaacctanatcaagcagtggtgcccataggcttgcgaccattntgatgtatctttctgatgtcagcaagtggtgaaaactgtttcccagatctgagatgaggatgctccagctaag

SEQ ID NO: 26694 - DNA, 2073 bp, Oryza sativa
  Clone ID: PAT_MRT4530_31459C.1
atggcgagaatcaaagagctttgcaactccttttcctcagctgcattattgtatattggtagttctatctcgatctccatgcgcatgcatgattcgctgcacgcatatggcggggaggggtgggatggtggagtgggaggtggggcggcggcgggattcggaggacgtgatcgtgctgcgccggggccgccggcgaggaggcggccaccgccggtgaaggcggtggagccggagtccggcgggttcgcgtacgagccgccggagaagctgttctacaagacgagggtgtgcgagacgttcgtgaccagcggccggtgcatgttcgaggacggctgcacgttcgcccacggcgacgaggagctccgcccctcgctcaccgcgtgcgccggcggctggaggaagccttcgccgtcgttgtcggcggcggcgcctcccgtggcggtggcgccgacgcctccgccggcgcaggtcgtgcacgagctcctcgccaggggatccggctccggcggcggcggccaccgcgccatcaccaaggtgtgcttcgagttcagggacaagggcatctgctatttcggggagacctgcgccttcccccacgtctccgctgcagagatccgccagggctcaaggctgtcgtcgatgtcgtcgtcgtcgtgggagatgccggcacggaggagcgtggcggtgaccgtgcccaggacgttcgtctccgtgccgccggtggcgccgccgccgccgccgccccactaccgtgtcaacaacagcagcagctacaacgcggcatccatggccgccgcggcgcccgccgccagcgacgccaaccttgtcgcccagcagccgccgccggagcagggaggccggaagatgacccgcctggagatgctcagcctcaagaagatgaccggcatctacggcgactggctcgagggggcgagagagatgcggatctggtgttctttagtgcaggtgaagaggaggagaccggaggaggggaagagggggaggaggatgggatctgggattggagccgtgctggtgcttgttgcagcatggctaacatttgcgccgcctggtgctctggcttcttcgcgcagtataaaactttggatgaatcgcttcgattatcgtgggttgatgcaaccatttggtggcatatgtgagattcctattataaaactgagtccataccaattaaatgattacaatcaagaggcagtggagaaggggcaacatagatgggggaaatggtttgatctgagtattgcacaagaaaagttagtgaactccacaggtggttcaactgcttcaagctcacaccttgtttttgatccttcaaaatcaaagagactctcatggcatccaaggatcttcttgtatgaaggttttctttctgacatggagtgtgaccatttagtatctatgggacgtggtaatatggagtcatctttagcatttactgatggtgatagaaatagttcgtataacaacattgaggatatagttgtttccaagattgaggacaggatatcgctatggagctttcttccaaaagaaaatggagagagcattcaggtcttgaagtatggagtgaacagaagtggcagtatcaaggaggaacctaaatcaagcagtggtgcccataggcttgcgaccattttgatgtatctttctgatgtcaagcaaggtggtgaaactgttttccccagatctgagatgaaggatgctcaagctaaggagggggcaccatctcaatgttctggttatgcagtgcgaccagccaagggcaatgcaatactgctgttcaatttaaggcctgatggagaaacagataaggatagccaatatgaagaatgtcctgtcctcgaaggagagaaatggctagccataaaacatataaatttgagaaaatttgattatccaaaatcatcacttgcatccgaggatgagtgcacagatgaagatgataggtgtgtgagttgggctgctagtggtgagtgtgacaggaatccggtgtttatgataggaagctcagactactatggctcttgccgaaagagctgtcgagtgtgctga

SEQ ID NO: 26695 - DNA, 2682 bp, Oryza sativa
  Clone ID: PAT_MRT4530_3145C.1
atgaggggaggggcggggatgtgtttcgcgagcatggaggcggcggggagcagggggatggggaagggggcgagtaggaggaggacggcgaggtcgacggcgccggtgggcgcgctggtggagcgggtggtggtggcgccggcgccggtggagcagcagcgcggggcggggcggccggaggcgcacccgcagagcgtggcggccagggccgtggtgaccgtgcggcggaggcgcaaggaggacgccaaggaccgcttcgccgagcagctcgacgccctcgccgacagggtcggccgcagcgtcctcctcgagctcgtcagcacggagaccgacccaaggaaggggacgccgaagaagagcaagccgtcggcgctggtggggtggttcgacaagaaggacgtcaaggcggagcgcgtggtgtacacggcggagttcgccgtcgacgccgggttcggcgagccgggcgcggtgaccgtgctcaaccgccaccagcgggagttctacatcgagagcatcgtcgtcgaggggttcccgaccggcccggcgcacttcacctgcaactcgtgggtgcagcccacgcgcgtgagccgcgaccggcgcgtgttcttcagcaaccggccgtacctgccgtcggagacgccgccggggctgagggagctccggctccgggagctcgccgacctccgcggcgacggcaccggcgagcggaggatcaccgaccgggtgtacgactacgacgtgtacaacgacctgggcaacccggacaagggcgtcgcctccgcccgccccgtcctcggcggcgagcagatgccgtacccgcggcggatgcgcaccggccacgcgagcgcggacagtggtggccgcgcctctcgacgcccggcgacctggcctccctgctcaccacccgtggtgtggctctgctcggcgcaggacgcggcgctcaacttcgggcagtacccgctcggtggctacatcccgaaccgcgtctcgccggacatccgcgacttcgccggcttccacgacgtcgacaacctcttcaaggagggcctccgcctcaagcaggcgctccacgaccagctcttccagaagatccccttcgtccgcaagatccaggagaacagcgagggcctcctccgctacgacacccccgacatcatcaagaaggacaagttcgcgtggctgcgtgacgacgagttcgcgaggcaggcgcttgccggcatcaaccccgtcaacatcgagcgtctccaggcgttcccgccggtgagcaagctcgacccggccgtgtacggcccgccggagtcggcgatcacggaggagcacatcatcgggcacctcgacggcatgtcggtgcaggaggcggtggaggggagcaggctgtacatgctggattaccacgacatcttcctcccgttcctggacaggatcaacgcccaggacggccggaaggcgtacggcacgcgcgcggtcttcttcctgacggccgccggcacgctgaagccgatcgccatcgagctgtgcctgccgccgatgacagacggctgcaagcgcgccaagcgggtgttcacgccgccggccgacgccaccagcaactggctgtggcagctcgccaaggcacacgtctgctccaacgacgccggtgttcaccagctcatcaaccactggttgaggacgcacgcgtgcatggagccgttcatcatcgcggcgcaccggcagatgagcgcgatgcaccccatcttcaagctgctcaagccgcacatgcggtacacgctcaagatcaacgcgctggcgcggcagatcctcatcaatggcgacggcgtcatcgagtcgggcttcacacccggcaacgtctgcatggagatgagcgccttcgcctaccgggaactatggcggctggaccaggagggcctccccgccgacctcatccgaagaggcatggccgtggaggacccgagccagccgcacgggctacggctgctcatcgaggactacccgtacgccgccgacgggctgctcctctggtcggcgatctcgcggtggtgcgaggcgtacgtggcggcctactacccgagcgacgaggccgtgcaggcggactacgagctgcagtcgtggtacgccgaggccgtgcagagcgggcacgcggacaagcgcggcgcgccgtggtggccgcgcctctcgacgcccggcgacctggcctccctgctcaccaccctggtgtggctctgctcggcgcagcacgcggcgctcaacttcgggcagtacccgctcggtggctacatcccgaaccgcccgccgctgatgcgccgcctggtgcccgccgagggcgacccagagtacgcgcacctcgtcgccgacccgcaccgcttcttcctctcggcgctgcccagcctgacgcagaccacgacgttcatgaccgtcatcgacacgctgtccacgcactccgccgacgaggagtacctcggggagcgccccgacgaggcgtggacggccgacccggcggcgctggcggccgcgcgggagttcgcggccgacgtgcgccgcgccgaggaggagatcgagcggcgcaatgccgacccctcccggcgcaaccgttgcggcgccggcgtgctgccgtacgagctgatggcgccgtcgtccggaccgggcatcacctgccggggcgtgccaaacagcgtaactatatag

SEQ ID NO: 26696 - DNA, 237 bp, Oryza sativa
  unsure (1)..(237): unsure at all n locations
  Clone ID: PAT_MRT4530_31460C.1
ccgtccgnanntcccgtcgaccccccgtccgcccacgcgtccgcccacgcgtccgcccactcgtncgcagacacttaggctgactctttatctacggcttgatctgtctcaattttgggcatctatacatactaactttacattcttgaatttcaatttttcataatggctaattgataatttgtggtcgttggcaatctaactatactcaaaaaaaaaaaaaccatttttcttttc

SEQ ID NO: 26697 - DNA, 371 bp, Oryza sativa
  Clone ID: PAT_MRT4530_31461C.1
gcagaacaacatgccaaagatgaaactcagaactcttttgtccattgcagagtcagctaaaatgtttgcagttcagtctgctgaaaactaaccactcttttacatgtaaagtagcactcactatatctgcagctatgcacaggaaacaaacattcagaacatcttctaagattctacctgaacacaaattccacgagcaagattagcggcaaccgacaaacgaaagaattttcagaacgagacatcagacatgaacgccattctttccccgcaaaaattttaagaaaaatgccattcttgatgcagctagtgattagctctcggaggacatgatctccagctcagcccaccacagcggcgacaccttcgga

SEQ ID NO: 26698 - DNA, 600 bp, Oryza sativa
  Clone ID: PAT_MRT4530_31462C.1
gacgagggccactcaactaccccttcacccttctttcctcccgttctctctcctcccccaatgttcctcccaatcccgagctagtgcggcggcgtcggcgggctgcggcggcagcaacagcgtcaacggcgacgggcaacggcagtggcgggcggcggcggctgcgggacgacgacggacgaggacgggcggcgcggccgggacgacgacgggcggtgcgtgcggccggaggctggcggcggtgggctgcggcagcggcggagagcggctgttgcgggacgaggacgggcggcgcggcggcggggtcagcaggtggcggcaccccatcttcttccccatcctccgacgacggccacaaccggttgtggcagcgtctgcgtcggcagcatacggggacagcgagcgtgggccgcgacgcgtcggcggtggcaggcagtggcggcggttgcgggcggtgttgcggtggccgcgactggcggcacgtggtggcgtcggcatcggctcgcgagcggcggcgtcgacaggcgactcgcgtgcgggggcgtcggcagaaggcagcctgggcgacggcgcttgcgcggcggcttgggaggcggcgga

SEQ ID NO: 26699 - DNA, 176 bp, Oryza sativa
  Clone ID: PAT_MRT4530_31463C.1
gccacagatggagtggcacgacgcatgggccagacacacacgtgtgatgtgtggtggctggggagactaccggggcaccccacgccacgatggatggagatgggccgattgcagatggccacttaccattggggggccaaacactggggcccccctcgtgcaaacactgtgcgcaa

SEQ ID NO: 26700 - DNA, 741 bp, Oryza sativa
  Clone ID: PAT_MRT4530_31464C.1
ggcgctagttctctctctcttcctctcgtcgccggaggcgggaggccatcgacgctgaagtgaaggggatcgcgatctccggcgagcgtgcgggggaagatggctgacccagagttggaagctatcaggcagaggagaatgcaagagctaatggcacagcatggtgcggcaaatccgcaaaatgctgggcaacaaaaagctcaagaagatgcaaagcaggaagctgaggaacggcggcagatgatgcttgctcagattttatcttctgaagctagagaaaggctctcccgcatagctttggtcaaacctgataaagcaagaggggtggaggatgttcttctgagagctgctcagtccggtggaatatctgaaaaggtgtctgaagaaaggcttatctcacttctggagcaaatcaatacccacactagcaaacagacgaaagttacgattcagaggcgccggagcgtccttgacgatgatgactagctgcatgtgtgttgtgtgtacgatgagctggtggaggagtctgctgtagcgcaaaactacttagaaatgatgattatcaaacgctatatcaacaaccatcaaaacttgagcgactatttgatggatatttggccgtatatgaattaattcgagtttggtttggcttgttccattgatgacattcaaaaaaaaaaaaaaaatccatcatatcatgagtatcttagttgctcctgtcaaaaattcgagggggggccc

SEQ ID NO: 26701 - DNA, 300 bp, Oryza sativa
  Clone ID: PAT_MRT4530_31465C.1
atgaagcccggcaagaagtctgttttgcctccctatgctacagtgtcgcccctagcctccagcagccacgtcgcgccgcctcttcggtcgtccccgacctgcgccgtcgcttccctcggcttcgcaagggccgaaccatcgccatgttttgatctccggcgaagctttgcagtcgactccgtggtcgccgaatcccgccgtctcctccgttggcatcgcagcgataacagcaagcccggcagccacctccacgaagccgcaagtcatcggagcgtcgtcgtcaccgtgaagccgatctaa

SEQ ID NO: 26702 - DNA, 168 bp, Oryza sativa
  Clone ID: PAT_MRT4530_31466C.1
atgagggccgccaagatgcatgaggtgaggtccagaggccgaaggtgggaggatgcctcctacccatccgtcttctcgtgcttcaccgctgtcggcttccttgcctctctctccacgcactcgcttcctgccagcatcacctacatcctacggtggcacggaggctaa

SEQ ID NO: 26703 - DNA, 378 bp, Oryza sativa
  Clone ID: PAT_MRT4530_31467C.1
gatcaatttctccaacaactcgatccattcgcagtagctgcgagctctgagcggcggcgaggtgtccgacatggcgtcggggcagaaggtggtgaagccgatggaggtgtcggtggaggccgggaacgccggggaggcggcgtggctggacgacgacgggcgggcgcggcggacggtcacgttctggacggcgagcgctttttttatcaccgccgtcatcggctccggcgtgctgtcgctggcgtgggcgatcgcgcacctgcgctgggtggccggtcccgccgtgatgctcctcttcggcttcgtgttctactacacctccaccctcctcggcgagtgctgccgcaccggcggcccgtggcccggggggccgtactg

SEQ ID NO: 26704 - DNA, 359 bp, Oryza sativa
  unsure (1)..(359): unsure at all n locations
  Clone ID: PAT_MRT4530_31468C.1
gcggcggcgagctgcggcggcattgggcggcggagtgggggtgctcggcggcggggttggcggtgcccggcggcgaggttggtgctcacggtgacgagactggagggatcgatcgatctagagagaaatatctctctttggttctgacgggtgggcctaggggcaaaaacgtccacaaatcttgaaaaaatatgcaaatggaattaagaaatgagaaacacagtaaaaaacctgaaagtggtaccaaatagactaattagcagtcctaatgatatattataaaggggtatgcggattgggtggtaaaaaaagttaaggcncgcgaatttaatggttaaatagtctaaaaaaaaaaaaaa

SEQ ID NO: 26705 - DNA, 155 bp, Oryza sativa
  Clone ID: PAT_MRT4530_31469C.1
actagaaggtgtacacgaacgccgttaacgtcgtctccaacgctagctgcaacagcagctgcgtgattcctctggagatggacatgactcacatagtggatgtgttcgagggtgtgaccaccagtgaggatgccatgactgctacccatgagact

SEQ ID NO: 26706 - DNA, 813 bp, Oryza sativa
  Clone ID: PAT_MRT4530_3146C.1
atggcttcggatggcagcagcaagaagcttcgcgtcgtgctcatcccgttcttcgccaccagccacatcgggcccttcaccgacttcgccgtccgcctcgccgcggcatggccggacgccgtcgaggccaccctcgcggtcacgccggcgaacgtgcccgtcgttcgatcgctgctcgagcggcacggcccagccggcgcggggtcggtggcgatagccacctacccgttcccggcggtggacggcctcccggcgggggtcgagaacctctccaaggcggcgcccggggacgcctggcgcatcaacgcggtggccgacgacgaggcgctgatgcggccggcgcaggagtccctcgtcagggagctccgccctgacgtcatcgtcaccgacgcgcacttcttctggaacgccggcctcgccgacgagctcggcgtgccgtgcgttcagttctacgccatcggcgccttctccaccatcgccatggcccacctcgtcggcgccgtcaaggaaggcgccaaggaggctgccgggaagccattcctgtgggtggtgaggactgacatgtgggccccacccgatggctggaaggagagggtcggggacagggggatggtcatcagaggttgggccccacaaaaggcgatactggcccacccgtcagtgggtgccttcgtgacgcaatgcgggtggaactcggtgctagaggcggtcagcgccggtgtcccggtcttaacatggccaatggtgttcgagcagctggatttttcacattttggtccttttgaaaaacttatttcacaaatagacccctag

SEQ ID NO: 26707 - DNA, 390 bp, Oryza sativa
  Clone ID: PAT_MRT4530_31470C.1
tggtgtctgggaaaatcgcgattttcgcatacgggtgcttatatcacccgcacgtgaaaaacaaaaatccaagaggatggaatagaatttcacaaaaaatgaaaaccctagattggcgcggcgatgccgcggctcccggccgccgccacctcgtcgtcgacgcccgcctcccaccggcctccacgcccgcctcgtcgtcatcaccgcccgccggatcccgcgcctccaccgtcgcgctgtcgtcgctgtcgccgcgccgccgcggtatccgtgcggggacggccgccgcccgccagatcccgtgcctccaccgccgcaccgtcgttgctgtcgccacgccgccaccaccgcaccaccatcgccgtgggccgccgccgccgctgagaggca

SEQ ID NO: 26708 - DNA, 240 bp, Oryza sativa
  Clone ID: PAT_MRT4530_31471C.1
aagcacaaaaaatacatatatattggctgggaaactgatcacccggggtaacaaccaacacttacacatgttataatacatactgaccaatggtttttcaccagtaacataattaaactttgaaagcattaacacaaacaaaacatacagtttccaaagttcaaagagttcatactgtttcacagctaaccaaccaacaaaaacatgtagtacgacgtgctttacacttgcaatctctcg

SEQ ID NO: 26709 - DNA, 418 bp, Oryza sativa
  Clone ID: PAT_MRT4530_31472C.1
tttgtggggtttttttaatgtttgggtttttttatttttttttttttcggcaaatttttttcttgattcaggacagggtcgcaccaaaacacttgcccaaacactgaaacacaatctaaacctgaaatgaaatttaaacaaccgcaagaagaaaaaacttcttttccagaaacttttattttcgcgaaaagcagcagttagcaacaccgatcgatcacaaatttattggtgaaatttttgaagaacaccacatcagcttctaccttaattaggtggttgccacttgatccccataatccatgggggggaggtcaagcttagggtgggcgttccttttgttgacaaccctgcagttgagcctgacctcgccctgggtggtcccggttttaaccttgaggccgcccattttaaccatggc

SEQ ID NO: 26710 - DNA, 654 bp, Oryza sativa
  Clone ID: PAT_MRT4530_31473C.1
atggagatcaattgtaaagctataaaggacatgctgggttccactgatgttctggacttctggtgttatcaaaaagtgctccctgtgacctttgaagctgcattatttagtcaagtatttcttggatggtggaattttaattcattatgtaacttttttgataatggagacaatcctagtccctacattgagatgcatacggcttattgctttaccctaccaaatgagggtactagccctagaggaacagataatgctgaatgttctgagacatcttcagacaggtcgaattcggaaagcataaaacctgaagaatgtgcaatgccatcttcaatatttgataagaagatttccataaaaaagaagctcagattgttaagtcgaatggctatactgaaagatgatggaactgtagaagttgatatccccactaatgctgaggctgcatctcttgacctttcttcaaatgattactgtaatgaagcctttagtggggaaccattggcatcttcagatttccagcacagacctcctatgcaaattgttatgctcattgttggtactagaggagatgtgcagccttttatagctataggaaaacgattgcagtggtaccgtcaatacttggttttgattctagtccttacacagtag

SEQ ID NO: 26711 - DNA, 1215 bp, Oryza sativa
  Clone ID: PAT_MRT4530_31474C.1
ctagatagccgacacagcctgttctctaatttgatctacttcttcaatagcttggatgtcttgggcatcggttccaggaatgaccttgatggacttggtcatatcagccacattcttgatagccgatttcagtctggacttctgttcttcgacagcatttgggagattggctaatttttgtttttccaaatccagctcggcattgcactcttgaagttgtgctatgagatcaattttgcgggcctccagccgatctatgttagaagctggagagatggtgttcgccgaatcatccgagattagagcttggatctctgcaaatcttgcctggattgagccacagtcagccaccaagttatccaatgatgactctagccgatgagatatatcctcaagagttttcttgacatcttcattcagaggtgctagagttttgcttgttgtctcttcttctgcctcttcacacttctcaaagtatgtctttggaggagcgataacaccgccagcacccatcacaggttcagcaatgaaagcagcaatcatggagcatttcttgaggtcgctagacggctgggaggaggtgcggcgcggcgcgacttggccggcagtgacgccggtgcctcgacagctcgccgcttccgcgctcgatgggcgcgcgagaggaaggggtgggtgccgcttgcccgcgccctgcagcttggcggtcccccaccggatagcctccagctccaacgccgctgccatgctgccggccgccgtcgcgtggcaccacgccgccgacccggccctgccgccgccgccgacgcagcaccccagccacgctccagcggcggaggcggaggcgagcggcagccgcggcacacggtgatattttctctccgaaggggacggtggcggctggtttcgatggatttgggacttgggatcagccttgagaagtgagccggagcagcaggagttgaaggagtcccgccggaagtcgccgtcaccgtgaaggccgaaccgttgccatgttttgatctccggcgaagctttgccgtcgactccgtggtcgccggacctcgccgtgtccactgtcagcatcgcagcagtgaggagaagcccggcagccatctccccgaagccgaaatccaccagagctccatcgtcgccgtcaacccgaagctcgctgtcgcgttttgatctccggcgaagccctgctgctcctcccgtcat

SEQ ID NO: 26712 - DNA, 816 bp, Oryza sativa
  Clone ID: PAT_MRT4530_31475C.1
atggcgacgctcggggccgaggcgaagaaggtgctcgtgtcgaagggcggcggccaacgacgagcgcgcaggtcgagcgcgccggagcctccaagcacggctgcggcgcacaccatcgccatcgtcgtcgtcgtcaggggcggcgcccttggggacggtgacaatgagctcgccgtcggtgtagttggcggtggccatggcggggagcgtgcatggagggaggcggaatcgccaccggtcgagctcgaacgcgcggcggcgccatcgtcgccgttgaccccggcggagaggttccgcacgactggcgagggcgagcggcacggccgggacgtggccggcgagggcgagcggtcccgcgctgactcagctgtcatgtcggacaaaacggagacggcgacacgctggcgcacggggatggaggcgcggagcatgggtgtcctccttggccacgacggcgacgccgacgcggaggccgtctcggcggcaccttcctcgatagccacgaccgccgccgtggcggccgacacggcgaagctcccctccatcgtggcggccgactacatctgctataccttcagcattggcaacaatgtttcccaggtcacccgcatgacggacttcatcttctggtgcaccacggcgacgcgctggcgcacagggatggcggccgacacggcgaagctcccctacttcctcgctgccgcctcgcctcatcccctgccgccgccgccgctccgtgtcgccacctgcgccgcccttcctcgctgctgcctcgcctcctccgccgcctgccgctgtggcgccgtgcgcgtttag

SEQ ID NO: 26713 - DNA, 366 bp, Oryza sativa
  Clone ID: PAT_MRT4530_31476C.1
atggatgatgtggatgataaggatttttcaccacatcaagctacaactaaggagtcaatgatgcgaagggccggccgggaacgcacatgtgccggctcagggcggcgcccctgcgcgtgctgtcttttcatgcgccaccgccacgacgagtacagcgacgacgacgacgacgaccacggcgatggcgacgacggtgacgagcggtggtgcgcgggccgagcattggcggcatcagcaaggtggcgcgcgggggtgtcggcctcaacatctatagggcagtgcgtggcgacatcggttgggtggtgcggctggtcggcgcgcgagggcagcggtgcagcgggtggcgactcgcggcttgagtgttag

SEQ ID NO: 26714 - DNA, 174 bp, Oryza sativa
  Clone ID: PAT_MRT4530_31477C.1
atggcgttgttgttggccatggccgggaaatggatgcatggggaagaagctggacatgtcgttgcttccatttctgaattccttcagatggccacttgcgtctcaagcggtcacgcatttcgcatcggcatggaaggtagaagtaggagtatactagggtggttattcagctaa

SEQ ID NO: 26715 - DNA, 506 bp, Oryza sativa
  Clone ID: PAT_MRT4530_31478C.1
tacgactatctatgacggaagctggacacgtccgcaggtctggatccggaatagcgggcgcgctctacgtcgttcgtccacgcggccagctaggtctagatcgtgagcgggcgctgacgatctagactcgcaaccatccttattgatgacaagaaaatatacattggcgaaatcttgtcagaacaaagtggcactgaggaaccaacctgcataaaggttgctgataagctgaaatctgattatgactatgtcacaccttgtatgacatccaccttacacgcggggaggctgtagtagagagaccatcggttaggctatgcaagctctatgatgagctcgcaggtgacagtacggattttgtacgttactgcttagaggaaattcattgatagcttcagcagccgtaaagttggtatttttgacaagatccctgacagccatcctgaccttctgaaagaattccaaagctcaggtgccatggctatgctatttatgaactacccact

SEQ ID NO: 26716 - DNA, 370 bp, Oryza sativa
  unsure (1)..(370): unsure at all n locations
  Clone ID: PAT_MRT4530_31479C.1
cctattgngctgaaaatgaatggcnatggacttcttaaaacactgtgcaataccctnnngncacgancctnttgntnttgcncatgtnatagncattaggtcatctngnagatcanaatctagnacccacggggtnctnnttnangnnaagttagtcagcgnangcancnnttcctatngntacagtngctacgnntantggcannantaacnncagtancagnttgaacctcagtagggannnctntngaanagtgnngannaggatccgacctntcatcgctgtggctnctncatgcagcgttctccantgactggtattgcttgctttgncatcgttgtgncnntcctccnttgcgnncncnngnnc

SEQ ID NO: 26717 - DNA, 2084 bp, Oryza sativa
  Clone ID: PAT_MRT4530_3147C.1
atcccgccgcatgctcggggggtctcaccaaccggccgcctcgctgccgccgactggtgtctccacctgcacggctggcctattatgctgccgttgttgggcgtctacgccttcaccgaccggccgcctcgtccgccgccgactggtgttctcgcctacacggtttgatggtcacaccactgttgttgggcatctacatcttcaccgctggcctgtctccgtcgctgccgactggtgtcctcgcctatatggttggttggacacaccaccattcatgggcgttcacgtcttcaccaaccggcttgccttcaccgccgccgactggtgtctccgcctgcacggttggtcggtcacaccatcgaagttgggcatctacactttcaccgccggggctatagtcatcgctgccgactggtgttttcgtcaccattgatggacgattttgtttccacatcggtcacctttatcgtcaccgaccggctcaccgtcgtcgccgccgactggtgtcttcgcctatacggttggatggtcacatcaccgttgttgggcgtctatgtcttcacagccgacttgccttcgccgccgccaactggtgctctcgcctatacggatggatggtcacaccaccgttgttgggcgtctacgctttcaccgccggcttgccttcaccgccaccgactggtgtctccgcctgcacggttggcctattatgccgccgttgttgggcctctacgtcttcaccgccggctgccttcgccgttgccgactggtatctccgcctgcatggctggcctattatgccgccgttggtgggtgtctacgtcttgacagccggctaccttcgccaccgccgactggtatctccgcctgcatggctggcctattatgctgctgttgatgggcgtctacgacttcaccaccggcctgcctccgtcgccgccgactggtgtcctcgcctatacggttggttggtcacaccactgttcatgggcattcacgtcttcaccgaccggcttgccttcaccgccgccgactggtgtctccgcctacacggctggcctattatgccgccgtttttgggcatccacgtcttcaccgatcggccgccacgtctgtcgccgactggtgtctccgcctgcacggctggcctattataccgctgttgttgggcgtctacgtcttcaccgaccggccacctcgtatgacgccaattgatgatatagtcttcatggctggccacgtcgccgtcaccgctaataggcgtcatcatcttcaactcaagctatctacgtttgttgccgactgcaaccactactgatggatgtcatcatcttcattgctggccgccttgtttgacaccaactggttttttctggagctgaccggagtatctatcttcacaactacatgtctttgccaccggttcgtttctgtcgccgccgactcgtgttcacttcatcacggctatgcaactttgtcaccatggtggagctacttcatcttcattgtcttcggcaccgacaaactttattgctgctacttcgcaagttttgctactttaccagccatgacgtctacaggagcttcgacatctcagaatatgatgccgtaatattttactacaacaagtggtgttccaatattcaagatttatacctggacatcctcaatacatatattcactcaagtgatggctactcgacgatgagaagctacagttctcgactctatgatcaattgctttccaattaaccaaagagtcgggggctacacaaatacaagactcatcagattcaatgagttgaacaacagcatatactttcctctaattatttcgtcttcacgattggcctactacgcaactgccaatagaggatctcatcgttatcatcggctgctacaccgctattgactggatcaccaacatcatcatcttcatcaacatcctgtcaaacctcttcaacatagcccactctactgctattgatgggcaacttcgtcaacatatttgatcatatctattgctgccaatcgtcattaccatcggttgcatttgtcgtcgtcgactatttcatgcattttca

SEQ ID NO: 26718 - DNA, 328 bp, Oryza sativa
  Clone ID: PAT_MRT4530_31480C.1
ctgcctttataacaccctactgctatctctcacctgggcgagctagtttaataacacagtctggactcacacgcattgcagaggagaggcgacaatggaggggtaggaggcggacatgcggctgggggcgaacaggtactcggtgagggtgccgatagggacggcggctccaggattctgctgacggcaaggactacaatggaggctaaaggaactccgatgaccacgcactggggagtctccatgcttgccaagaagattgggagagcaaaccaagggctggcaaaacctcatagtttctggagccctccaaagaaagagggtgaca

SEQ ID NO: 26719 - DNA, 408 bp, Oryza sativa
  Clone ID: PAT_MRT4530_31481C.1
tttttttttttgttatagtgtatacgcaggactccagccgcatccccttgctcatctgaatccatgtgacatagtctagctagctaggctctactcaccacaagatgattacttgtattccttgcattatatttaacggataaatgcatgcttcctaaactaccaaatgatgcggcttttattaaaaagatttatatatatgaatctcttagaaaatcgtttcaactttataatagttaattcattcgggtgtatccttggataattgtcacgaaccaatcggtcactcagcatttagctcaaaagaatagacacttagattgtcaatatattactggcagaaacctgttaattctcaattcccttgttattaccctcatatctaactacgtaagagaaggttctttt

SEQ ID NO: 26720 - DNA, 738 bp, Oryza sativa
  unsure (1)..(738): unsure at all n locations
  Clone ID: PAT_MRT4530_31482C.1
ctcctctcctctcccccccccccaccccccccgccccaccgctcttcctcgtcttcatcatcatcatcatcttcttcttcttcttcttcttcttcctcgcctccttccgcgcgcccgttcgcgtcctcctgcgggtcgcgccgctcctcctcctcctcctcctcgccgccagcgccggcgcgtcgcgggccaggcgcccgtgcatggatgtttttccctcatggtacctcttccttgcggcgctgctgctgctgctgctgcaggcgtcgagctgcgaggcgacgcgaggcatgcagccgttcaaggggaggccgctggagagaggcgtctccaacaacttcttcgggttcttgccccgtggccccgcgccgccgtccggcccgtcccggcagcacaacgccattggagccgaggaccaaggcaacccatgaattcgatanatgtagagagagagagagagagagagagagagagagagagagagagagagagagagagagagagagagatcagagttgcatagatatcatcgaaattaatcttcttggttaattaattgtagctagcactagcagtagcacatgtagtagtagtagtagtacgtagcagtangcagtatatacacttcggcaaggagaagaagaagaagaagaagccgcaggtatagtacagtaggatcaaggatgatgtacatgaagaagcttttttttcttttacaaaaaaaaaaaaaaaaaaaaa

SEQ ID NO: 26721 - DNA, 463 bp, Oryza sativa
  Clone ID: PAT_MRT4530_31483C.1
atggcctctcgggcacgcgtgcgctcgtacctctactcccgtggcattgattatcccgtggacggtcagatagtgctcgacgtgcacgcgatcgatctcacatcgctcacgtacgcacgcgccgcgccgcgccgcgcagcgttcatcgtcgtcgtcgtcgtcaacgacgaccagaccgaccggcgccgtccggccatccgccgcagcgcgcgccgctcatcggcgccccttcccggccggcggccaaccatgcccgttctgatgctccccggcaatacgatgccgccgccgctcctcgacggacgacggtgacgatcgacgacagcgaggcggcgctgctcgagagactcctccgccggatggaagaagcgacgacgccgccgccgccggcggcgaccaaacgcgagccaacgaccggcgttgcttctcggtcaaggctggctgccgcttcgtccgggtaact

SEQ ID NO: 26722 - DNA, 1936 bp, Oryza sativa
  Clone ID: PAT_MRT4530_31484C.1
acgaaagcttttgccgcaatggcgtctaaaccaagcagccgagcggaaagcaaccaggcggcggcggcggtgccgtcgctgtacgggcgcgccctgccgtcgccgccggcggtggagttcgcgtcggcggaggggcggcggctgttcgcggaggcgctccaggggggcaccatgcaggggttcttcagcctcgtctccgtcttccagacgcagtcggagccggccttctgcggcctcgccacgctcgcagtcgtcctcaacgcgctccgcatcgacccggggcggcggtggaagggcccctgccggtggttcgacgagtccatgctcgactgctgcgagcacctcgacacggtcagggcggaggggatcaccttcggcaaggtcgcctgcctcgcccactgctccggcgcagacgtccgcaccttccgcgccgcccaggccacgctcgccgacctccgccgccacctcctgcgctgcgcctcctcccaggattgccatctcgtcgcctcctaccaccggaagcttctcggccagactggaacagggcatttctcgccgattggcggctaccatgctgggcaggacatggcgctgatcctggatgtcgctcgcttcaaataccctcctcattggattccgctgccgcttctttgggaagccatgaacacgattgatgaagcaactgggcttctcagggggttcatgcttatctcaaggaatactgaagctcctttattgatccgtgcagtgaattgcagggatgaaagctggcaaagcatggcaaagtattgcatagaagttgtcccaaatcttttgagggataacagcgtagacaatgtcctaacaattctttcccgtttagtgaatcatcttcctcccaatgctggaaattttatcaaatgggtcattgaagttaggagacaagaggaaggaggatccagcccaagtaaagaggctaacgaaatgcctttcctgaaggaaaaggtcctacagcaaatccgtgatactaagctttttcagctggtccacaaactgcaatgttctaagcagccctgttgtagttgctcgtctttaacggacgaagattccatttcccagattgcagccagtgtgtgctgtgaagcaaccgcattgctaagtgggaatctgtcatcaagagatggattatttttcagtgaaacttgttccggatgtacacaagtgaatgatgaggggcttaaaaatgtcattacaggcaaagtggtatctgaaggcaatggacatgttgataagctttcaccgatatcctcgactgaaacatgcttctgcaattcaactctgagcaatgaaactgtcaattatccatcaaacacagacattctaactgttctattactgtcgttacatcctagcacatggttgtgcattgaagatgagaagttgaaagctgaatttcagagccttgtttctacggacgatcttcctgatcctcttaaactggaggtgtgctgtctcactcctagaaccttgcattgaaaggcttgtagagaaaaggaggcatatgaagatacttggccacaaccttgggaacaatgctaacatggcaacccactcacttaataatgaatttcgctgttcactgggcctttggttgctggcttaaccttactggaaattgacgcgaaaagaaaaggttaggatgttaggagaggaggtgaaaatattacctccttttcaaataaggactatataaacaattttctgataataatgatgttttggcaattggcaagtactttgcaaccgtgaagtatctttccttgcttaatttctcttttgtttttcccttgtacttctgatagttccatgtactttattccctctaattaatggataagcacacttagctcgtcctaaaaagataagaaaaaaaaaaaaaaaaaaaaaaaaaaaaaaa

SEQ ID NO: 26723 - DNA, 219 bp, Oryza sativa
  Clone ID: PAT_MRT4530_31485C.1
gccaaaaacggtacggaaactttccggattccggacctatttttgaaaacggaatctgacggtcggaatttttcgaaaacggaaacgaggaaatattttctcgtaaacggaatcgaaaatgataagggaagtttccgtagcaactcggaatcggttggaaactttccaaaaattttctcggaatttttggaatttttttcggaatttccaaaaattttg

SEQ ID NO: 26724 - DNA, 636 bp, Oryza sativa
  unsure (1)..(636): unsure at all n locations
  Clone ID: PAT_MRT4530_31486C.1
aattgtatacgactcactatagggcgaattgggtaccgggccccccctcgagttttttttttttttttttgttntantttncattgtnncatncaaacanccnncnactntncctcnngnnttntcctgacacaccccacnaagtgttaanctntnattnncaaaatntntggatatnatngtncacactncccaaaancgatnggnanngtagananatgggatngantgctgcagtncctacggtacantcncctcnangngggtnactanagacccngtctggcacgtgcctnagatgngggctcaccccttcaccctgcatcaaactgcacttgctgtcatgatngactgcggacatgggtgctctaaccttcctatgatgttgttgcgccntccgccacatctgctgaccgcatngctgtntcctccctgtcagcngctcngttgtaacccncgtcactgcccctangtaggcttattgggctncctgtngctccncaaccnttgnacggtncgatanncgtgctgccngtgctnctccatgcnttngtncnnnctcaactttccaagncttccctgtatggccccaaaaaanaccttcntccggnaattttgctcttaaaccnattattt

SEQ ID NO: 26725 - DNA, 879 bp, Oryza sativa
  Clone ID: PAT_MRT4530_31487C.1
tttggccgcaaattttttttttttttttttgagcagttaataccaggacctcaggaattgacacatcatttcagcagttaataccaggacatgtcacaaaattgtctaacaaaatgcagttaagatttgattttataaagcgattccttgctagtcatatgcaaaaactaacagatgtagtaggtgaatggttggttgtttcatgacatattgatatcaataagtacaagctatcctttcatttgctcctgtggtcactgttgtagtcatcaatcagtttctcaacatccttccagaacaaaccttccacaagaaccccatccttggtgaaccattttgtgacactcttagtgaaatggactggttcactggaagatttagaatgtggatctgcacttgctattgtgagggtatacatgtctgacaatcttggtaactttgaagatataacaagcccagtcctattaaatgatcccgcgggagggtacgtgaagaggatggcgttcttctccttggtgtaggtaacgatctgcagcgccacgttgagcgccgcgtacagcgcgatgcaggcgaggaggacgtccctgttctcggggaacttgcgggggtagaactgcgcgaggagcgcgacggcgatcaccgccgcgccgaccgccagcctccggttgctcagccgcgcgtcctctgggtaccccttgctcttcgcgacctcggagacggtctcgtcgaggagatgcttgatggagtaggggtcgaggaggttggccttcttcgccgccggtgagggggtggcgccgccgccgtcggtcgccatccgcgtcgtcgccggcgaaacgccggccggtgcggtggggaacagaatatgatgcgcccggccgg

SEQ ID NO: 26726 - DNA, 617 bp, Oryza sativa
  Clone ID: PAT_MRT4530_31488C.1
gcacgagaattccctttgtcgatccccggcccgcccgccgccgccgacgacgaaaccctagccttgcggatcgatcggcggcggcggccatggagagctgggcaagctgggtgggcgccagcgtcacctccgccttcttcgcctccctcgagcgctgctcctgcatcaacctctccaccgacgacgacgacgacctcgccgacgcccacgaatccaaggaccgccccctcgtgctctccgacgccaacgcccacgcccacaccgacgcccatcccgatccccccgccgccgccgccgacgccgacaagcacaaggacgacaagctcccgcccgtatgactacgctactgttacttgagacgccgcctgctagtatgtgtcttggtcttctccatgtcttccaattccatctgctagtgaatgctatctttagccattgtgacaaaccaaacaataaaccatctgtctttcctatcgtgatttctgcctccggctgtgaatatccgtgtgccttttgtactggattgcgttatatctaatcaatcaaatcatcgtatctattattacttgctaaaaaaaaaaaaaaaaaaaaggacgggcgccccggggcccccggca

SEQ ID NO: 26727 - DNA, 851 bp, Oryza sativa
  Clone ID: PAT_MRT4530_31489C.1
cccggcccgttccacttccacagcagtggactcagtgagcaacggaggaagcaacgatgcgctcccgatctctcctcctcgtcgccctcgccacccttcttctccacgcctccgcctccgcctccgacgacgacctcgactacctcatcgacaacgccgacgacatccccgccaacgaccccgacggctggctccaggagggctcccccgacgacgacgacgacgacgacctcttccaccatggccaggcccaggaccatcccatagatgagacccacgtcttcctcctctccgccgccaacttctccgacttcctcgcctcccaccgccatgtcatggtcgagttctacgccccctggtgcgcccattgccaggcgctcgccccagactacgccgccgtcgccggcgacctctcccctcttgcccatcaagtcgccctcgccaaggtcgacgccaccgaggacactgatctcgcccagaagtacgacgcgaggacactgatctcgccccgctgctccaccgccggggcttccccacccatcctcttcttaatcgaccgggtgtcccaagggctacaacggcgcaagaaccaaggaagccatcggggcggcggcaccaccgtcctcgcggccggggggctactcaccaccacggtgaaaaggggggaaaaaaacttaccgggggggcaagggcatttttggccggcccgaatccctttgggggggccaaggggaggaaatggccgggctcccaggggggaaaaaggtaaaaatttcacaagattccaatccgggggggggaaggttttaaccttggacaagggggaaaggccccccctttaatctgtaaaa

SEQ ID NO: 26728 - DNA, 141 bp, Oryza sativa
  Clone ID: PAT_MRT4530_3148C.1
atggcagtgcggatggatgcggtgctccgcgtcgggctcggggcacctggtgccgatggatgcggcagtgttgatagtgcggacgaatgtggcgctctaggtcgggctcagggcacctgggtggcagcgcagatgaaagcg

SEQ ID NO: 26729 - DNA, 1713 bp, Oryza sativa
  Clone ID: PAT_MRT4530_31490C.1
ttacaacaaaattttcatctttgacttgataaagagtagctcctcttcgctcaccatcttccacaccccaccaactagcaacctacccttcagaggaaatgccagttctggcatatctgaaatctcacattcttcaggtgatggtcttgataattccggaattctttcagcatccaattgcttctctgggtcagaataatagccgatcctctcagtatgatcatcaggctcaacacttacatgttgctctaatatttcatctcttgattcatgatctacgacgtcaagggtcggaagaacagccactgaactaaatgaacaaggtatcattcctattggacagggggtccaagactttgctgtagaccatctgttacgtttctctggcatgattgtgttcaatgaagccccggtgtcattttctgccaaacgtaaatccttctgtttcaaccgcgacttgaacatttccagcttctctgttgcttcctcaactgattccgtttctttggtgggctctgggagggtagaatctctagccacctttcccagggataacataggaagcttcctcagtttctcctgcacattgttggtggccatctcaatcagcactagggctgcatctatgatacatctttcatctataatagacaaactcaacagcttccgcagaagttttgctagacagaaacgtgggactgcattcctgtctgaagagagcactcctatctcatggacaactccaatgcaacctgaatccttcaattcttttaactttgtcacaagccacagaacatgggaacttaaaagttccactttagctggcaggctagcattgtattcacctttgttttcaaggtcttccatggtctcaattgtttcaattactgacttcagtatgccaagcagcaaccttggttccttttctgataatttagttatgatagttctcatatcattatttgatatttcactgtgaatatcagatgactgatctacatccttatcagtttctaacacatcgctattttcagaggactctggggcaccacgttggaaaaagtccaatataacaaaggcaacctcagaaggacatgcgtagtaaagccggcgtacatattttatgtttctcgaaatcattttctcagaacgtttcctttttgaacccgactttgctttcattgaatcttttcccttcataaagttattgatctcatgcaattttgaccttacttcaacttgaacatcaggaatagcattagtctgggaatcccagtaaatacacttcaaccaatcaaatgccttaatggctgccaatcgtagcagccgaagagagggaagagtgcgatgtgaactctcatgacgaatgtcgacaagaactcgtggtattccaacagcctcagctaattcagatattgaatagccagttttcttatgtgggttctccacaaaaccatttacgagccggaagaagggatcccgcagccgtatctcgacgaaagccgcggtcacatcgacggggaccgggagggtgcctctgctcctccacgccgcgatcctacgaagagcggcggcgggggaggcggagaagaggccgtcgcgcacgtgccgccactccgcccagctcgaccacggcaccagcttccggccggtggagaggccgccgccgcctccgcagaagccacccgtcgcttccggcgccgccgcgtccat

SEQ ID NO: 26730 - DNA, 536 bp, Oryza sativa
  unsure (1)..(536): unsure at all n locations
  Clone ID: PAT_MRT4530_31491C.1
tgtggtgacgaggtgagcgcacgggcgcacagcggaggcgccgatctctctctccctcccagaacccgccatggggagcaggaagaaggcgaagccgagcaggagcaggaagaaggcgaagccgagccccgaccaggccgtggccctcgactacgtccgcgcctgggcgcatcccgctgcctccgcgccgccgccggagccctcggctgccgatgccgccggggacgacttcctgccgcaccaggccgcgcgcatggcctctggaggcggagggagcgtgctgttcgagctccactcccactccaaccacagcgacgggttcctctccccctccgagctcgtggagcgcgcccaccgcaacggagtgaaagtacttgccctgacagatcatgataccatggctggtatacctgaagctgtgtcagcggctcacagatttggcatgagaataatcccaggagtttgaatcagtgcactatattctncaaaggaaatcgctggtactggtgagcaatgtcatattctngcatactatg

SEQ ID NO: 26731 - DNA, 1495 bp, Oryza sativa
  Clone ID: PAT_MRT4530_31492C.1
atggggagcaggaagaaggcgaagccgagcaggagcaggaagaaggcgaagccgagccccgaccaggccgtggccctcgactacgtccgcgcctgggcgcatcccgctgcctccgcgccgccgccggagccctcggctgccgatgccgccggggacgacttcctgccgcaccaggccgcgcgcatggcctctggaggcggagggagcgtgctgttcgagctccactcccactccaaccacagcgacgggttcctctccccctccgagctcgtggagcgcgcccaccgcaacggagtaagtacacgatctggactctcctccgtttgcctggtagccgatgttaaatcttaccatgtgcatgccacaattttgaatggtagaaaaagaagaagagttagaatggctaaattgtatatgtcggtactacaggtgaaagtacttgccctgacagatcatgataccatggctggtatacctgaagctgtgtcagcggctcacagatttggcatgagaataatcccaggagttgaaatcagtgcactatattctccaaaggaaatcgctggtactggtgagcatgttcatattcttgcatactatggtatgtgtggaccttcaaggtttgatgatctggaaaggatgctatcaaacattagagatgggcggtacttgcgtgcaaggaatatgctggcaaagctagatagactaaaggtgccaataaagtgggaacatgtaactaaaattgctggtgagggagtagcacctggcagattgcatatagcaagggctatggttgaaatgggtcatatagagaacattaggcaagcattcaacaagtacattggtgatgatggccctgcatatgccacaggaagtgaaccattcgctgagactgtggtgcagttgattaatcgtacagggggtatatctgcattagctcatccatgggcattgaagaacccagatgcagtcatccgagcattgaaaggtgctggccttaatgctctggaagtctacagaagtgacggaaaagttgatggatttagtgaattagctgagaagtatgaccttttgaagatcggaggttcagatttccatggaagaggtggaaaggatgaatctgatattggaacagttaagcttgctattactactttgtgttccttcttgaagatggctcggcctatctggtgtagtgccatgaaagacattctactgaagtttgcagaggaaccatctacgactaatctgggaaagatggttttgtttggagaactcattaattttaatggtttttcatcaacgggttctggtatggatattgttaatctgtgcttatcttcttggttaagtaacaatggcatggaagaagtggaacttgaggagcttgtcaagagctgcacataatgcgtaggtaaaagataatctcaaatgcatgactaccttgaaccaaaaaaaaaaaaaaaaaaaaaaaaaaaaaaaaaaaaaaaggagg

SEQ ID NO: 26732 - DNA, 421 bp, Oryza sativa
  Clone ID: PAT_MRT4530_31493C.1
cggcatcagactatcggacagtgaagcagatgttgtggatcagggcagaactatcgctgttattatggcctttgaagagcatgcttgttgcgttgcatcagatcttccaactatgcattgcactgacctttaggtagcgactccgaaccatttagcttgcacaatgaagatgtgattgtgggtggctacaccggtgaaaatgtacatgttaaggccatatgagaccaatatctcatctctgtatacatcattacttacatgactgtggaagcctgctgtggacttgactcccatcctgagactacatagcttaccacagaaagctcatgcagttcaggtagtgtccactactatcgagtgaggcctccatgaactatcgcctttgtacctcccacagcacaactactagtggccccagcca

SEQ ID NO: 26733 - DNA, 246 bp, Oryza sativa
  Clone ID: PAT_MRT4530_31494C.1
aggagcgaagccagggacgacgcctccaccgatatcccccggcggcccagccatggccacattcctcttccattctcacagctcgacttcgctaggactgtcgccgacttgccgccgaccgcaaggcctacgcgctgcgagagcggggtggatctggctgccccaagcacagcagtcgccaaatctcatcgcgataatcccgttgatgtaggcggtggcccccgccacagctcaagcggcagatag

SEQ ID NO: 26734 - DNA, 293 bp, Oryza sativa
  Clone ID: PAT_MRT4530_31495C.1
aatacgttaaacatctaattagtattaagcatccgatcgatgtgacatgtactgaaaataccatccaaacagcctagacttttggacgagggagtactacgatgtacgctatgcagtcgctaacctgagtaaatgccttgatgctgttcccgactaaagtttgagcctcgaggcctagaaaatcattcggccgagtccgaaaggagccacgtcccacccatgttctccctgcccacaaaaccccgttttccccttcacgtttgcccttccgcctcaactgttgcttcgttcca

SEQ ID NO: 26735 - DNA, 903 bp, Oryza sativa
  Clone ID: PAT_MRT4530_31496C.1
atttttgaaaaggaaaaaagagatttattgcgtcagcggctagggtttgcggtggaccgggcgcacgacagcggttcacgggaacggacggccgagatcgatcctatccaaaacggacggccgagatcgatcggtccacgtccggctcacagcagacggccacgatgacgtcagtggtgacgtcatcgccggcggcggcagcggctcggcggcttggcggctcgggcgcgcaagcttgccggcgaacgacggtgcggcggcgcgaacggagagcacccacgggtagcggacggcgcggcgaactcaccggtgaccaaagaaacggcggaggagaccttcggcttgacgacggcgacggtgctccggcggtcttcagcgacggcgaaggggcggacgaggacggcgacgcgacggcgaccacgaaggcgacctccccgagcgacggcagcaactggagcgacggcggcgcacggctggagcggcggcaacgacggcggcgcgaggtcccacggcgctagggctcttccgacggcgagagacgaaggcgagggtggcgacgggggctaggaggcggtggcgaaggcccacggcgaccggcggcgggatggaaagctcgggctcggagaaagagagagaccgatccgaatcgacctcgaatcaaacactttccaagtgattttagccgatgattccataagagaaaaggtagagaagatcccgaagattgtttcccctcaatcgatttcaccggatcgggaaaggagcgatgggccccacctgtcagcgaccgagcacgcgcgcggctgcggactgggccgtcttgagccggggggagagagagagagggttttgggccgactttcggcccaaagccaaaagagacttttaaaaacctttttcaat

SEQ ID NO: 26736 - DNA, 447 bp, Oryza sativa
  Clone ID: PAT_MRT4530_31497C.1
aaccaaacgggggtttctcacaaaaaaaaaaaaaccgatagctccgggttgaaaaccaaaaaccgaaaaaaatgggttttttggggggggttaaaaacaaaaacaaaaaggccgggtgcaacttgcaaaactttacgggggaactaaaaggccatagggggtttgttgggcaccaaaaaaagggaactccggggaaaagggtaaactctttcattcaaaatcctcttcccgggcatcatcatcagcaccagcggaggggtggagagcattcattttttcgaaaaaacgggccttcctttggtcggagggtaactttttgggggggaatctttgggggggcgccggtccctttttggttgatttgcccagggaaggatcagcacggaggggaaattggccctttttggacaggggttttcatgccaaaaaaaaaaattccctttttgg

SEQ ID NO: 26737 - DNA, 159 bp, Oryza sativa
  Clone ID: PAT_MRT4530_31498C.1
gtcagccgggggaaacaaaaccaggtgttcccagccacaaaggaggtggtcgtcgccaccgcgtggcatggctcgtcacccgagcttttccgccagtgtacagacgacttcggaatgcggccgccacctctttcaaccaaagctcgacaagcgggagct

SEQ ID NO: 26738 - DNA, 861 bp, Oryza sativa
  Clone ID: PAT_MRT4530_31499C.1
gtgacgtcatcgccggcggcggcagcggctcggcggcttggcggctcgggcgcgcaagcttgccggcgaacgacggtgcggcggcgcgaacggagagcacccacgggtagcggacggcgcggcgaactcaccggtgaccaaagaaacggcggaggagcagcggacggtgacggcgacgaggttgaagcggcggagaccttcggcttgacgacggcgacggtgctccggcggtcttcagcgacggcgaaggggcggacgaggacggcgacgcgacggcgaccacgaaggcgacctccccgagcgacggcagcaactggagcgacggcggcgcacggctggagcggcggcaacgacggcggcgcgaggtcccacggcgctagggctcttccgacggcgagagacgaaggcgagggtggcgacgggtagaggagacaccggggatccttttaaaggggctaggaggcggtggcgaaggcccacggcgaccggcggcgggatggaaagctcgggctcggagaaagagagagaccgatccgaatcgacctcgaatcaaacactttccaagtgattttagccgatgattccataagagaaaaggtagagaagatcccgaagattgtttcccctcaatcgatttcaccggatcgggaaaggagcggccggatttggaaggaaacggcggcggcgcggcactagggtttcgggcggcagcgacgcgaggaagacgatcggtctgacagatgggccccacctgtcagcgaccgagcacgcgcgcggctgcggactgggccgtcttgagccggggggagagagagagagggttttgggccgactttcggcccaaagccaaaagagactttt

SEQ ID NO: 26739 - DNA, 3207 bp, Oryza sativa
  Clone ID: PAT_MRT4530_3149C.1
atggactcgaggcgtctcagctttccggtcgatcggccgcgagtccactccgccggcttgtcctcgccaccgccattgctgattgcaacaacgacttcaccaccggcctgcctccgtcgccgccgactggtgttcccgtctgcatggctggcctattatgccgccgctgttgggcgtctacgacttcaccgccggcttgcctccgtcgccgctgagtggtgcctccgcctacacggctggcctattaagccgccgctgttgggcgtccacgacttcaccaccggcttgcatccgtcgccgccgagtggtgcctccgcctacacggctggcctattatgccgccgctgttgggcgtctacgacttcaccgccggtctgcctccgtcgccgccgattggtgcctccgcctacacggctggcctattatgccgccgctgttgggcgtctacgacttcaccgccggcctgcctccgtcgccgccgactggtgcctccgcctacacggctggcctattatgccgccgctgttgggcgtctacgacttcaccgccggcctgcctccgtcgccgccgagtggtgcctccgcctacacggctggcctattatgccgccgctgttgggcgtctacgacttcaccgccggcctgcctccgtcgccgccgagtggtgcctccgcctacacggctggcctattatgccgccgctgttgggcgtctacgacttcaccgccggcctgcctccgtcgccgccgactggtgcctccgcctacacggctggcctattatgccgccgctgttgggcgtctacgacttcaccgccggcttgcctccgtcgccgccgagtggtgcctccgcctacacggctggcctattatgccgccgctgttgggcgtctacgacttcaccgccggcctgcctccgtcgccgccgagtggaatggatcagtcagaacatcaccgaccggcttgccttcgccgccgccgactggtgtttccgcctgcacggctggcctttatgccgccgttgttgggcgtctacgtcttcaccgaccggcttgccttcgccgctgccgactggtgtttccgcctgcacggctggcctttatgccgccattgttgggcgtctacgtcttcaccgaccggcttgccttcgccgccgccgactggtgtttccgcctgcacggctggcctttatgccgccgttgttgggcgactacgtcttcaccgaccggcttgccttcgccgccgccgactggtgtttccgcctgcacggctggcctttatgccgccgttgttgggcgtctacgtcttcaccgaccggccgcctcgtccgccgccgactggtgcttccgcctgcacggctggcctattatgccgccgttgttgggcgtctacgtcttcaccgaccggcttgccttcgccgccgccgactggtgtttccgcctgcacggctggcctttatgctgccgttgttgggcgtctacgtcttcaccgaccggcttgccttcgccgctgccgactggtgtttccgcctgcacggctggcctttatgccgcaattgttgggcgtctacgtcttcaccgaccggcttgccttcgccgccgccgactggtgtttccgcctgcacggctggcctttatgccgccgttgttgggcgtctacgtcttcaccgaccggccgcctcgtccgccgccgactggtgcttccgcctgcacgtctggcctattatgccgccgttgttgggcgtctacgtcgtcaccgaccggccacctcgaccgccgccgactggtgtttccgcctgcacggctggcctattatgctgccgttgttgggcgtctacgtcttcaccgaccggcttgccttcgccgccgccgactggtgtttccgcctgcacggctggcctttatgccgccgttgttgggcgtctacgtcttcaccgaccggcttgccttcgccgccgccgactggtgtttccgcctgcacggctggcctttatgccgccgttgttgggcgtctacgtcttcaccgaccggccgcctcgtccgccgctgactggtgcttccgcctgcacggctggcctattatgccgccgttgttgggcgtctacgtcttcaccgaccggcttgccttcgccgccgccgactggtgtttccgcctgcacggctggcctttatgccgccgttgttgggcgtctacgtcttcaccgaccggcttgccttcgccgctgccgactggtgtttccgcctgcacggctggcctttatgccgcaattgttgggcgtctacgtcttcaccgaccggcttgccttcgccgccgccgactggtgtttccgcctgcacggctggcctttatgccgccgttgttgggcgtctacgtcttcaccgaccggccgcctcgtccgccgccgactggtgcttccgcctgcacgtctggcctattatgccgccgttgttgggcgtctacgtcgtcaccgaccggccacctcgaccgccgccgactggtgtttccgcctgcacggctggcctattattctgccgttgttgggcgtctacgtcttcaccgaccggcttgccttcgccgccgccgactggtgtttccgcctgcacggctggcctttatgccgccgttgttgggcgtctacgtcttcaccgaccggcttgccttcgccgccgccgactggtgtttccgcctgcatggctggcctttatgccgccgttgttgggcgtctacgtcttcaccgaccggccgcctcgaccgccgctgactggtgtcaccgcctgcacggctggcctgttataacgccaactgatgctatcttcttcacggctggctacatcgctctgttgttgggcatctacatcttcatcgccggcgtggtgtctagattacgggatatcattatttggagttatatattgcggatgagaggtgggccgctgatggtgacagctcagtacgggccacgagtcgctgctccgcagaaaactctaccgacagagaaatcagccgtaccagcgccaccgaccttcaagactatggcaaacaagactctccgcgaattcactgctccctctgctgacaatgtggccattgggccgcagatcaacatgggagacgtggatttcgacttgaagtccagcctcatcatgatggcgcaggctagcccgttctgtggcaagcctaatgaggatgccaatgctcatctgcaatag

SEQ ID NO: 26740 - DNA, 423 bp, Oryza sativa
  Clone ID: PAT_MRT4530_314C.1
ccattcgccattcaggctgcgcaactgttgggaagggcgatcggtgcgggcctcttcgctattacgccagctggcgaaagggggatgtgctgcaaggcgattaagttgggtaacgccaggggcgaattcgagctcggtacccggggatcctctagagtcgacctgcaggcatgcaagcttcaaaatagtctgcaaggcgaggataacagtgtcatctttcctgtgacgcgtgcgaactgtgaaattgatggcaagcgcatgcgaagaaagaagcagaaggtcaacctgcctaacaatcttggcataggcatccatggccccagcatatcggcgcggggcgccgggcgccagcttgccctccgcctgaagcctaaccttgacaaggtcagtggggttggcgatactgatcgcaatggcacctga

SEQ ID NO: 26741 - DNA, 455 bp, Oryza sativa
  Clone ID: PAT_MRT4530_31500C.1
gtgaaaacatcacttgtaaatatgcagtgcgatatatgtacagcagcagaatttatacattgcagccaaattttagaacagattagtcacagaaagtagaaacattgatggtacatacaatggtcatgcagacaatgctgcacagtttcaacggtagtcaggagccaaagttatgtaagacccacatgactctaggaaaaacaataaacacataaaacttcagaaagagcaatactgattgcttgcaagttgcaacccatatattacgatggtttttgagcagatcttatccttgggcaaaaccgcaaaacatgacaattgccaagtagcataggccatagaatttcgaaagttagtagcaggattctgaataaacaacagatcaggcatacatgtacacagaaaatggatagcagcatatatcaggatatattataattaagaccagatttcag

SEQ ID NO: 26742 - DNA, 1540 bp, Oryza sativa
  Clone ID: PAT_MRT4530_31501C.1
ggcatcttaaccaattcagagtttcagatgaatatcaaattttgttttatcaatatgcatatctaaatcaatttcagagctccagataaaaagaaatcaattatttgtattgatgcatgcatctaaatcaattcattcagagtttcaaataaaaaaagaatcattagctgttgccaaattggtatatatgaagaagaaattagggaggtggaggcggaggagggggtcgtctcctcgtccaggtccaagcgggtccggccgaagcgacccaagaaggtgatgactccgatggaggcagtggagaggcggaagctgaagagggaggagcaggaggagaggaggaaggtgaagaaggagaagaggcggattaggaggttgatggagacggaggcggcgggcgaagtgggtgaggcggcggcggaggaggaggaggaggaacatgaggcggaaacggagggtgaggaagaggcggcggcggaggagcaaaaggtgtatgttgggggcatcccatactattcctccgaggatgacataagaagtttctttgaagcatgtggcagcatcacatcagtggattgcatgacatttcccgagagcgggaaattcaggggcattgccattctcacgtttaagactgatgctgccgcacaaagggcattggctcttgatggtgcagatatgggaggattttttttgaaaattcaaccatacaaatctgtccgtgaaaaggaagattttgcaccaaagatgatagagggatacaatagggtttatgttggaaacctggcatgggacataacagaggatgacttgaagaagttcttttctgattgcaaaatctcatccatccgattcggaacagacaaggagacaggtgatttcaaaggctatgtgcatgtggatttttctgagggtacatctgttgctgttgcaatgaagcttgatcagaaggtgattaaggggcggccagtcagaattagatgtgctgtccccaagaaggacaatcagaagctcaatggcaatgcaaatccagattcatcaaataataagatacggatttgttatgaatgtggcacgcctggtcatatctcttcttcttgccctaataagaaggcttctgaagccatttctgatgaaaagaaggctaatgttgactcagtcacagcatcgtcaaagaaaaggcggacatgctatgaatgtggcattcctggccatctctcatcggcttgcccaaacaagaaggccggcgatgctgtttctagtgacaaggggcctgatgatgagacaaagtctgcaccatctatcactcccgaggataataaaataggtgaagaatcaaattcagctccctccaagaagaggcggaaatgctatgaatccacttcagatggaaataaggctagtgatgacacaaaccctgtgcctgcgaagaaaaagaagaggcggacatgttatgaatgtggcatcgctggccatctcgcgtcggaatgcccaaacaaaactacctgatcgaatggttgtgttactgttttggattttt

SEQ ID NO: 26743 - DNA, 492 bp, Oryza sativa
  Clone ID: PAT_MRT4530_31502C.1
atcaataaatcccgtgtatacatttccccaagggcacaacaaatcaacaatcccggcacagcaattttgaataacaatctaaacacatgacactataaaagttcccgtgtatacacttccccaagggcacaacaaatcaacaatcccggcacagcagttttgaataacaatctcaaacacaacacgaaatcatttacgtcatttcagctcttcttttctagatgaatttacagtttcagtataaattttcctacaagtcatgtaccaacaatgcaatccaaatacacccgtgttgatcttgaacacatcatcaagctgttaccaggagccgagtgccattcaaaacatgcaaacaaagtgtaatgcatattgtggcgataaccatagacttatcagtcatgtattgcatcgcgcgcagtccgctatccatcactgtgttgccacccttcttcgccccagcgtgcattttccacagtgcgaactcaaggaacg

SEQ ID NO: 26744 - DNA, 457 bp, Oryza sativa
  Clone ID: PAT_MRT4530_31503C.1
atgaatcggcgcggatacggtaacgaaaatttatcggaataaaaaaaaaccctcaaactgagcttcaaactttgtcaagtctaattctcaagtctcaacaaaagttttcggaaaatttccaaccgattccgagttccgacggaaactgctattatcatattcgattccgtttccggcaaaatatttccgaattcgtttccgttttcgaaaaattccgaaaaaattccgaccgactgattccgttttcgaaaactggcccggaatccggaaaaattacgtactgttttcatccctaatctagatgccttaaccgtacggcggcggcgccaacgagctcgccgccggctactccaccggcaccggcctcgccgccgagatcatcggcaccttcgtgctcgtgtacaccgtcttctccgccaccgatcccaagcgcaacgcccgcgactcacatgttccc

SEQ ID NO: 26745 - DNA, 1995 bp, Oryza sativa
  Clone ID: PAT_MRT4530_31504C.1
tcaaggatcaaacgatgggatttcagagtcgtggccgcaaccaagctggtacagaatcctggggaggatgctcctgaacttgtcctcctccctcttctccagcaggtagtagatcatgggcacgacctccgacatgacgagcaagtagagctcgccgtcggcctgctagtacgtcatcacggcctgcatcaccttcgtcgggttcgccttcccgaacagctagtagaacctgcccggcatgaacagagacacccccgagatgaacacctcgtggtcgatgtcctgtttcttgagatggttgacctgtccttccatggtctccttgccgaagcgtgcgttcataatgtcctcgaacatgctgaacagtaccattaggtagtcccttccgatgactccgcagggcacaatggcgtcctttaattgtgcttccttctgcacaaattgtgactggtttgactttaacagtctcagtacttcacccttgcagtggagattcacgcattggcagccggggtagagcagtacgcactcgccagagacgagcggctggtagatgtacttgtaggtcatggggacgccgccccagaggttgaggaagtcgaagaagtcgtggccctcggaccacgtcttggtcttgttggggaacagcagcgggtgcgcgatcccccggagcaccctccccttccgccgcaggaactccgtcgccagcgagatgagctcgatccccagcagcatgtggttccccaccagcagcaccggcccttcctccggcacccccgccagcccccgcaccaccaccccgtcccccatcgtcgagaacatcgccgggcacgtcctcgccctcaggtcactgccagctttctcgacctccttgagctcagtggctgatggggggatgtagtcgaaaacccggtggtaccgcctcgagtggcggtaaaggctggtgcatttgatgatcgacgagacatgaacaccgtactccaacagtaagctgtgcccatggttctcgaagaagaacactttgcatttaggtagcattctctggagcctgtcagcttcagatttgcttggaagtaatctgtcagcacagctgactagcagtagcacttcagctgaaactgattctagacggcaattagcatatgaagcagcctgttggatcagcttcattttccatcctagagtgtcctccggtattttatttagtatgttcgaatgcttcaggaatgatgatatattacttgttaatctgtttagtgcttctaaaggatgtcttccacttttcatgctactcaatgccatgtcaacttcattgtcaatattgtagttcagaagagatgtaattgcaatccgtgcacgatccgacaacgggctggaaaccgacaggagctgttttatgtctgatttctcaaatgatgttgctggattaaccagtaccaacaccaaatcgatgcaaggattacgagcagctactgcaagtgctatgcatcctccaaaagaagtccccaaaaggtagatgggcttattaggtgaagtggcatgctctgctctcacaacatcctctaccatttcaacaagttcttcaaatggcgtgcggtcgtggaagggaatgtgcatacatcttagttcaaaaatccttccaagtgccttgtggtgcatgaagagccccatccccataccatctaccccgggtaaatacagcatgagtggagcatcctcaatgggtgagccggcatcaacgggacagaacaagcgtggcggtccactgtcatgttctaccagctctccaagtgatctgtagtaataatccagatccttagccttctggtacccatcgtcgtaaagcgtttcaagccccttgtagctcacttgcaatctccagcctgcatgcttgaactgatggcagctgctgatcctctcaaacaagtcgtgtcgtcgtcgtcgctgtcgccacagagctatctgggagtggagaggaagagaaagagtagccat

SEQ ID NO: 26746 - DNA, 216 bp, Oryza sativa
  Clone ID: PAT_MRT4530_31505C.1
atggagcggagcttgaacaataaaatgaaggggccaatatctttccatattttcttcgtattactcaaaatattgactagccacttcttggcaaaagaatcacagcatgatcaaatacatatttctcatggacagacggcagctggtgagtccactaagggtgagtttgaggaggaggagattgagaagattgggaagatacaaaaaacgaggtga

SEQ ID NO: 26747 - DNA, 156 bp, Oryza sativa
  Clone ID: PAT_MRT4530_31506C.1
atggcagatcaagcacccatatttactcgtgcttggcagatcaagcactcattccttgtgcgcggcgcgttccgggggtcgagcggccggcaccctctctgcctcccgctaatttcgccggaatgggacgcgcactcgagaatggatcgtgcgcag

SEQ ID NO: 26748 - DNA, 378 bp, Oryza sativa
  Clone ID: PAT_MRT4530_31507C.1
cagggggatgtggacatcatagggggatatgaagcacacattgagtccaacaatactgacacaaaaggtggtcatcaatcaaggagagaaccaggttaggaagggctgacagggccatatgcaccacccaggggacgatgaacagaaaggggtggctgtcgatacacagggaaagggcaagcttgggcaagaatagtagcgacttaggaacgaaggcttggtgagataatgcttgcttaacatgatgtacattatgaacatggggacgaagacctctagtacgaattaatggacggaatccatacttactgcaaaaaggggacaggcgaaaatttgagtgggatgagatttcggaatgctattaacaggtcaaggacc

SEQ ID NO: 26749 - DNA, 562 bp, Oryza sativa
  Clone ID: PAT_MRT4530_31508C.1
ggtgcattgccaacacatgtcgaatccactgggaaatggtgcaattgttcaaacatcggaggaaaagatcatcgtattgcaaagaagctacaatgttaggggagtttccaggttactttgtttttcctaggaggacattccgagagtaaaatctattttttccccgtagttagatctatatttggttcagcaaggtgatctaattcttaagggtgtattggataactgtatgatatttttctcccaaatgtaatgtaaaaacatctactgagacaaatggtggacctaagttattgaaagtctttggtattttgattctacatgacttacgggattattgattgagtagtcgctcagtaatatacatggttcttatgaaactgaagttcatctgtatatcagccacaagaaattggaatcttggcacatcaaactgatgaaaaggaccttgctgttctcaacgaaagagtttcccaagagatgtttgatggaatcatccgtgaggtagttgaggaaactggagtgccttctaattcactgagcctgtcttcattggaatttc

SEQ ID NO: 26750 - DNA, 357 bp, Oryza sativa
  Clone ID: PAT_MRT4530_31509C.1
atggcatacccacacgaggacggcgagacgccgcgttctccttcgagacgccccagcggcgacgcggcggatgagggcggcgtggcggggcggtggggctcccttgtcgggttcttccacaaccacaaccatggcgcctgggcgaacaaccgctccatccctgtcggcgtcgacagcaccagggactgccgtcggagccgccgccgtggtgccacggcgcgtaatcccggcggggtgtttgccttgggcgatgacgccgagtggcatgtcatcggctcacgtggcgggcgcgtcctcctccttagccccacccggctccgcctccttgtgctggagcccatgctcggtcgccgctag

SEQ ID NO: 26751 - DNA, 1386 bp, Oryza sativa
  Clone ID: PAT_MRT4530_3150C.1
cggacgcttgggctcactcttctcccccaaatcgtcggagccagcggccactgtcgtccccgtcgctgtcgccccaccgctcgtcggagccggtggccgccgtcgtccccgtcgccgtcgccccaccgctcgtcggagccggcggccaccgccgcgggggaggcggcgacgacgaggagcttggcgacaggtgaggtgaacaagagggagagcgggagcgggggcgcggaggccgctgccggcgccggggaagccgccgctggctcaggaccccggccgccgaggaggacgacgacggcgcggcctcggcaagggtcgccctcaagctcgcctcccttgccgcgccgctctggctccccgcccttgtcggtcttctcatcggctgccccgcctcgccgaccaccggattcgccactgcctcctccacgcttcgcctcgccgatcaccggattcgcgcaccgcctcgttctcctgctccaccacgcggctgcctcctcctctctctcctcctgctccaggctactggtaccaggtatcacgggtatcaggtaccatgtatcacgggtaccaggtaccaggatactaggtaccaggtattacgggtatcaaataccagatatcacgggtaccaggtaccaggcaccagggtaccaggtaccaaatgtatcagacggtaccagaggtaccaggtacctgatacccaaggtaccaagtatcaggatggagaggaggagaccaccggcttcctctgcttctgtggcggcggaggagttgccacctgcgctcactggcaaggaggcggcgggagcagcgggcaaggacgacggcgaccttggcgaggagcgcgagggaggaggggagaggccccggtgccggcagcaacgagagcgccagtggaagaagcagcgccacagcgcgtggaggcggcaccgcagcgggcggaggacgacgtcgtggaggatccagatccagatatgcacaaaagggattcatggctttaagcttatctcttacgctccaggaatggatcagtcagaacatcaccaccggcttgtcgtcatcgccgccgactggtgtcttcgcctatacggttgtttggtcacaccaccattgttgggcgtctacgtcttcaccgaccggcttgccttcgccgccgccgactggtgtctccgcctgcagggctggcctattatgccgccgttgttgggcgtctacgttttcaccgaccggcttgccttcgtcgccgccgactcgtgttttcgcctgcacggctggcctattatgccgccgttgttgggcgtctacgtcttcaccgaccggccacctcgtccgccgccgactggtgtttccgcctgcacggctggcctattatgccgccgatgttag

SEQ ID NO: 26752 - DNA, 751 bp, Oryza sativa
  Clone ID: PAT_MRT4530_31510C.1
aaggggagcttgaacgggacgaggcaggctccccgggctgctgcctgctgggctccgggagagtcttggcgcggcggcccccgctcgcgctcgcccctcgctgctcgcgaggatccccgggagaaaggcggcggcagcgacaaaggtgacacatcatccactgactgggacaaagcttggtctacatttaagaagaaagggaagaagaccctattttcggagttctcaccaaacaagtatgtgagctggaacccacgacgcagcgagtatccattatcagaagaggttgatccaatcagaagaactgagaggtctaacctaatgttgtggacaagtccgaaatttaccttggtaatggcgattgtcatcgtctcgacattgctaatctatacaatagttgttccacccaagtaactgaagaagtgacaggcatgagttgaactgtaagagaaacattctacttgcatgtttgtactgtacatttgtttgtactagtattagacagctctggcgggtctggtcgcctggtccgtgtggaattcaagtcaactgccacatctggacatctaaaatagctttcttgtagcatctcttgtccatgatctgctgtattttaattctctgattgtcattattgtacagtattgtcttcagattcttcttcttttatagtgctctttgtaattgtgtctgcgcaaatgcgatgcccgtgcggccgtgcctaacggagagcctctccagaaataatttg

SEQ ID NO: 26753 - DNA, 471 bp, Oryza sativa
  Clone ID: PAT_MRT4530_31511C.1
atgccactcggcgtcatcgcccaaggcaaacaccccgccgggattacgcgccgtggcaccacggcggcggctccgacggcagtccctggtgctgtcgacgccgacagggatggagcggttgttcgcccaggcgccatggttgtggttgtggaagaacccgacaagggagcccctggcgcgccgccgtggaggtcgttgaattggcagaggaagcggcggctagtgagcatgcggcggaaccgactactgacgagggagacgtggtggaggcaggtcaagtgcggcggtagcagtaacacggcgagtgtcactagccacccctccacgttctcgctcgactcggccacgcccaccaccgccccgccacgccgccctcatccgccgcgtcgccgctggggcgtctcgaaggagaacgcggcgtctcgccgtcctcgtgtggggatggcaatgggtcgggtcgggtacgggtag

SEQ ID NO: 26754 - DNA, 281 bp, Oryza sativa
  Clone ID: PAT_MRT4530_31512C.1
cccgcccgccgcccctcccgccccgccataggattccaattgccttccggaacctttccgccccgggcttaaccgggccgttcggtgcccttcacccgtgcttaagtgtttcttaaggcttccattccggaattcttggaaaccggttttttttggaacctttgggccaaaaattggattccaaaccttgggccgtttgccaattaaccggtaaccaaccggttaaggtaacttgccaagtgtccaacccaatgccaataagggatttaacccccaagttc

SEQ ID NO: 26755 - DNA, 1911 bp, Oryza sativa
  Clone ID: PAT_MRT4530_31513C.1
cctcctcctcctcctcctcctcctccgccgccgtctccgcgaagtcgttcccgccgccgccgccgcgggcaccgcccacgcgctccgttccggcaggcggcgcgcgctcgctcgctcgctcttggtgtctctggagaagaagcggagagagagagagagagagaggtggagaggagggagggggtttgctggggtagtctctagaggctccccctgctgccgccatcgccgtcgacggctcctcctcccctcccccggtggagatccggggtggtgttcctcgggttcacgcataggaggtggcggctgcgcgcgcagaggctcgggggcgagggcggcggcgcgggcgagatgaaggggtcggccatcccggcggtcgcgatcatgccctcgccgctcttcctctggcggttcaaggttgtattgtttctcctatggggtttatgctgttgcaagataggttgggactctgttatgagaatgagtgctgatctgcgagacttatttctttacgaagctttcttatactacaatccgcttcttcttgtggctctgatgatttggttatggggagtaaacctgtgggtctttgcacaatcatcagtgaattacgcaagggtgtttgatcttgcacaaacacatttatcgcatcgagaaatatggaggtgtgctacttggcttactttgattgttcccacgagtatgacagcttacctatatttgtactcacatggagaagtgtcccttgctgcatctcaaccagttcttttatatgctatccttcttatagtcctcttatctccttttgatatgttttacctgtcgtcacgcttttactttctgaggacagtgtggcgtataatgcttccattgcaagcaattacattccccgacttctttttggctgatatttttacatccatgtcaaaggtcttctcagacttggaacgttcagtttgtcgcatggtcaatcggcaggttgcaacgaccgcttggcttgaagcagattcaatttgtggcagccattctgtagctattcctctagttcttgtgttcccttatttgtgtcgactcttccaatgccttcgacaatacaaagatacaaaggagaagacttgtcttcttaatgcactcaagtactcgacagcggttccggtgattttcctttcagctctcaagtatcatgtattccctgacaagtgggttagcttttatcgacccctctggcttatgtccagtgttataaattcgctgtattccttttactgggatataaagcgagattgggatttgagcatcttaactaggattttcatgttcaaaaacccaagtacatggactaaccttctttatgggcagatctgggtatattactgggtgttagccagcaatcttgtgctccgctgtacatggacgtacaagctttcagcacatcttcggcacaactacctgacagtgtttacaatagcagcgctggaaatattgaggcggtttcagtgggtgttcttccgtgtcgagaacgagtggaacaagatgacagccaagcagagtctggaaatgtcatctgacatgccctctgaaggagacaggcttttggattcaaatagtcatacagtatgaactacgaaccgcaggtctcatattttgtgataccgattcatcattcttttagtgacccttatagcccgattcaagtcgaaaattctgttttgtttgtagaggccaaaaggtcagggttacatgataggtttctataaaaattgatattcttggcacactacatatgcaatccttttggctatatatatatatatatatatataccatttgtaatcccattgaatccaaagaggtgtttgttgacagttgacacatcaaagaggaatattaataccaaagattttacatgtt

SEQ ID NO: 26756 - DNA, 465 bp, Oryza sativa
  Clone ID: PAT_MRT4530_31514C.1
acacatggcaccaagcactccaaaagatcggttgcataaggtggccactcgagcatcgaggacaactacaccatacaccacaatcgcctactttgtggcctaaactaagtgatccacctcctcctagatctccaatgtctacaagcacaggaaaggtcagagtaacacaggcaacatcttcatcaagaaattccagtactcagaaaaggtggacgtaaaagctgtgcatccttgacgaacatcttgcaacattggtataacctttttgtacattacatctagaaaagcatttgttttgttatttaatagacactactcattgattctgcactctggttttctttcacaattgaagaactgcaaaaccagttggaatagattgttccctgtaaatgctcttgtacatatgctatgttcacaatacgataaacatttgatgtgtttattataaaaaaaaaaaaaaaa

SEQ ID NO: 26757 - DNA, 164 bp, Oryza sativa
  Clone ID: PAT_MRT4530_31515C.1
gcgttcgactgatttgatgcaactatacaacttcaagagtttactaagaaacccatacgatcaacatggcggacggtcttactactttctactacacaatttgacacaacgaaagcttcttgaacatcttccttctcgtgtttcatcacatacccatcgatttg

SEQ ID NO: 26758 - DNA, 500 bp, Oryza sativa
  Clone ID: PAT_MRT4530_31516C.1
agaaggtcggttcgtccgctctcgaggttcgtgttcgtcgcccaaaccctaggttccctcccctctgcgcgtttgtcgatctatgtatgttgttgcggtaggttttgatttttttttttcggggttcggtgtgaacgatctgtgcctggttgatttcggtatgagagatgcaaatagaccgtagctgatgaaaaccgtagcagatcgaggctggtttgctgctactgctgctgtaaatttcctgtagatttaggttcgggtgtaaatattgaacaaattgatgcgatttccattggaggaaattgaatctacggtgactgctgctcacggttgctgctgagtgctgcttcttgcagtggggagcccgccatggttggattagatgggcggagcttgtttagtgggttacatgggtggttccttcaaccggccaaatcattttttatcatcagtggatggaagagacccttaggctagatatgtagttatgtgattggtcg

SEQ ID NO: 26759 - DNA, 636 bp, Oryza sativa
  Clone ID: PAT_MRT4530_31517C.1
gcacgagggtcaaatagtcgtcttaagaataaaccatctggaggaaatcaaaacaggctggacaaggtgattattcaagattgttgcgcaaatgaagataattatgacaaaaataatcatgaaaacaatttattgcaaaatgccatgcaacaagacattggctctcctacgacattgtggaatgtgagtgttttatgtttctctttatcctggatgaacttggtgaagtgtcaaattagctacatttctttttgcactgtaaacttggaatatagagcattaatggaattggactgtattataacatattgttaatgtggctgattcatgaatgatctgaaccttcaactcttgtgacctactaaccagattgtctacttgactctaaatacttcagaggattgcatgatattggcatatctatatgttaggttggatttattttctgctactttgatgtaatggggatcggcatctatcttggcattgtccaattagtatgtagccactgagctatcttaactagaacaacaataggtctcgtcagtcttactgccacatagtactgtaggacttgctagccatactattatacgtccaacttgattccaataactcaaagtcatgcttaagtcg

SEQ ID NO: 26760 - DNA, 540 bp, Oryza sativa
  Clone ID: PAT_MRT4530_31518C.1
atgcgctggcgcgtcagcaagaaggttaagtgcaactccatttgtgacgcatttatcctcgaggttggtggaatggcgaccatcaccgtacctgtccctggagatgaagtactccgtacatcaaacgccagaagattcttctactccacggaagcttcaatcggcctcacacatttgttgcgcgttggcgacgaggcacttgaccagcagcaggccacagcccacaggggcaagtccatgtccatccttcgccgcaaagcagagcaaaaggggagcagcagcagcagccagacagccagccagccaacagacaccgggaccggagagatcgaccgatcgatcgaccaggtcaggcgtggtgtgccccggccgacaagaggctctggctcggttcaccgctcggcaaacgcaagcccgggggcacgggccgccaccggcgcagtcagccaaaacgcacgcagaaacgcgatccaaccaccgcccgatcgaggcgcgcagaaaaggcggagcggatggcgaaacgagagggttacgcactag

SEQ ID NO: 26761 - DNA, 1515 bp, Oryza sativa
  Clone ID: PAT_MRT4530_31519C.1
atgaccatgagctcgccaccgccccgcgccagcaagcacctcaagtcggcgtaccggcttgccgccatcgccgtgccggttgtggcagccgccgtcgtcgtcatcgtcgtcctcctcagagcggcgcagctcggccccggcgagctcctcgctggccggcttggcgccgcgcggcacgtccacctcttcctcgccgcgctcgttgtcgtcccgtccgccgtggccacccttcttcgcctcgtccgccgcccacacagcgtctacctcgtcgactacgcctgcttccggcctcagccgagcaaccgcctcccattcgccaccttcgccgagcacttccgcctcagcccgcacatcgacgacggcagcttccgcttcgtgacgcgcatgatggagcggtcgggcctcggcgaacggacgtacgtgccccgtggcaacctctaccttccgccgcgcacggggatggaagaagcccgcgacgaggcggagattgtggtcttcgcggcggtcggcgacctgctcgccaggacgcgcatccgccccgaggagatcgacgtcctcgtcaccaactgcagcgtcttcagcccgacgccgtcgttcgcggacatggtggtgaacaggttcaagctccgtggggacgtccgcgccgtgcacctctccgggatggggtgcagcgcggggctgatcgccgtggaggtcgcgcgcaacctcctgcaggcggcggcgccccgcggcgcgcacgcgctggtggtgtcgacggagaccacgtcgttctcccactacgccgggacgagccgatcgatgctgctgcccaccgcgctgttccgcatgggcggcgtcgccatgctactctccacgtcgaggtcgtcggccaccaccaccacctcccggttccggctggcgcacatcgtccggacgctcaacgcggcggaagacagggcgtaccggtgcgcgtaccacgaggaggacggcgacggcaacctgggggtgaacctgtccaaggacatcgtccccgtcgccggcgagatgctcaaggccaacatcgcgacggtaggctcccgcgtgctcccgttgtcggagaagctgctctacgcgctgtcactcctcgcgcgcaaagtggccggcagccgacgacggaaggcgatcaaactccacgtgcccgacttccgcacggcgttcgagcacttctgcatccacgccggcggccggtcggtgatcgacgccgtgcagagcggcctcggcctcgccgacgaggacgtggaggcgtcgcggatggcgctccaccggttcggcaacacgtcgagcagctcggtgtggtacgagctggcgtacgtcgaggccaagggacgcatgcgccgcggcgaccgcgtgtggatgatctgcttcgggtcggggttcaagtgcaacagcgcggcgtgggagtgcatctcgctgccggcgcgcgacgccgacgggccgtgggctgattccatccatcagtatcccgtggccatcaccaccaccaccaaaatgtgctga

SEQ ID NO: 26762 - DNA, 602 bp, Oryza sativa
  Clone ID: PAT_MRT4530_3151C.1
aactagtggatccccgggctgactgccgtctaattggatcatccgagcaaagctgcgcgccattgtaccacaccatggtcggcgtcggctaaaaggggggttggggcttgtgggataccaaaaccggtgtcaccgagcgatcctttacttttttccgtacgatccgattcggttcggttccaatccgattcccatccttttggtcgcgggacctgggatctcctccgcccgcgcggcgtgtgtcgtccgattttgcgacactgccacaacagtcccacaatatcggctcgaattcgagctgaagaagaactgatagtagcaagaggtgtcccccctcaattctagctctgaattgcaggaaaagctggtaaaatcttagggtaatgggagtcaagccttcacagtgaagatttaatagatgaaggcacaccaattgtggcagttacctatcgaggatatgaagtctggtcctctccctcgcggacgaacttctccgaaaaaacatttgtgcatacttgttgtagctttcgtctccattgtaacactgtgggcttatctctatccagcccaggattatacgtctcctatgagagattggttac

SEQ ID NO: 26763 - DNA, 707 bp, Oryza sativa
  Clone ID: PAT_MRT4530_31520C.1
gccaaggagaagcatgctagaattgaggagattcagagcggccgaggcaccagcaaactcctagacatgcaggtttgggctgagctgatcgtggcaaagctcaaaatgcttccaaccgccgggtgacaagaagaaaagaaaatggagcagacatcggcaaagtcagcagcgttgtcggtcgccactgagctgaccaattccggccatgctgccaaggggaaggtggatctgggcaccggcaacaggcgacgtcgcagcccaccgacgacattgcaggcagcaagccgtccccaccacacgaccttgccggaggcagggggacatggtaggaggcggaactgacggctgcccaccaccacggccggctgccgtcgccggaggctgcaggggcgtggtaggaggcagatctgatggccacccaccaccacggccggctgccgtcgccggaggctgctggggcgaggtaggaggcggatctgacggccacccaccaccacagccggctgccgtcgccggaggcaggaggaacagggcgggagacaagctagcatgaagagagttttggatctggaaaagaaaaggagaggaagttaatggtgtggggaggtcgtggtgctggggggggaggcgagcgccgccgccggcaatgccaccgggggcagcgtcgccggccgcggcgaggctgcgcgcgcgtggggggagcgggc

SEQ ID NO: 26764 - DNA, 463 bp, Oryza sativa
  Clone ID: PAT_MRT4530_31521C.1
tcggttcaagcattatacagcaaaaaagaaagatctagtggtctgcatcacagaagatcattttcgattttgctctccttgatattgctgcatgcagcgactctgcgcaccacgatgctgtaagacaaagttataggaaacatcagctgcaggcgactgtactgctacagcaacaggtgcttagcccatatcaagagttcgtaaggcagcagaatggcataacggctagcccttgatcgcaatcagctgcaatgcaactgagaaacaaccaatgctggcaacagctctcgctgatggcgcaacaatcttactatcacgacattaacattggtcaggccataacgcagaagttacaactccagtagttgggtgatctctactacgatcggaatctggctaaggctcaagctctgttgccttacaacgtgccatctagatataggatataccctaggaactatgg

SEQ ID NO: 26765 - DNA, 289 bp, Oryza sativa
  Clone ID: PAT_MRT4530_31522C.1
gtccttccgccgccgccgccgccgcctgggcggcttcacatccccggacccggaggaggacacggatggcgatccgtctccgccgcccaccgtcctcgacggcctcgtcacgaccctcctctctcagaacaccaccgacgccatctcgcgccgcgccttcgccgccctcaaggccgcgttccccacctgggaccaggtttggtggccgcatccaggaagcttctagaagctccctcgtgtcctctgatgcgcgattcgttttcgtttttggaggtggtggataggagga

SEQ ID NO: 26766 - DNA, 294 bp, Oryza sativa
  Clone ID: PAT_MRT4530_31523C.1
acgcgcaaggggaagggggggagctttagggaggcgctgccgttctttccgctcgtgggcctgaacctggtttcaactgtccacaccgcgcgttccgagaagcttgccgccgtcttctccccctccatcgcccccgacatttacaaggtcgttgatgccgacatcaactccgtcgacctcctggcagggattcaaaaaccgtcggtggcccgaataccagccatccgatgatacggcggttaccgtgcggtaactcgcccaaaaccgcgacataataacaaaatcgaaatttga

SEQ ID NO: 26767 - DNA, 552 bp, Oryza sativa
  Clone ID: PAT_MRT4530_31524C.1
atgcttctcgccaaaggttggcgcggccgcaaagatgacagtggcggggcttctcgccaaccggctcgagcagccaggggagtcaccctgggtggtggtggcagcaaccaccagatccataccgcctcggccggatctggcggggtggcggccggcagcgaggaaggcatcgtcaacagcggtggggatggcgacgacgacggcaatgtctcggcggcaagaggcggcggggatggcgacagcgatggggatggtggcagtggcggagaccgtagatccggcggcagggcgcttggatttggcacccccacgccggatccgaccggtggcggcacgagcgtgccggcgcaacctggcaagaggatggcgcagccgtgggtgacggtggcgacgggccggcgcgacgcggcaacgcggccagggagactcgtggcgatggccgcgacagtcggcagccgacgggaggagcggcgcggcccggctggccggccggcgccggcggaggcagtgcgcacacggaggcggcggcgcggcccgagagactcgcggtga

SEQ ID NO: 26768 - DNA, 152 bp, Oryza sativa
  Clone ID: PAT_MRT4530_31525C.1
gattgaagattcatttttctttgaattttaaccacttacaagaaaccaacccttttgattctatgcttacatttccttacccatttaatcctatagattatataatttcaagacaccacagatacaatatatacaatgagagaatatgatga

SEQ ID NO: 26769 - DNA, 1945 bp, Oryza sativa
  Clone ID: PAT_MRT4530_31526C.1
atgctttcagaccagctggacactatttcctggaaatggagcaactcaggagaatttacctccaaatcagcatatcaagccctcttcctgggaagaatccagttccagaacgcaccgttatggtggatggctcttggagctattgggctgcaggcctacttgccaatgaacgaatcctccttccttcattggctctgtgacactcgggagaggttggtcgaatcacaacgaagaggtttcgtcaccattgcaacgttggtggcttggacaatatggaaggagaagaacaatcgcatttttaaccatcaacacaaagcttggctagagattgccaggcgatatcagctgaagcggagctctggcgcctagccaactcggcgatgccggcgctgctcttgtaaaaccttcgttgctcatggtcgccatcttctttaacaagaataggcttaagtttccattggttgccctcatcaaccatggccacgtcctccacgcggatgagcgggcggcggcgctgcagctccagggcctggcgctgctcggactcctgccgctgcaggcgcagctgctcgtggtggcgccggatgaggctctcggcgcggcgcatcagctcgtcgttgggcatcgccgggagcacgtccctggtgcgccacggccgcctggccggcgccggcggcgcccgcacgtgcggcggcgacggcggcggggtcatgttggtcgccgtcgccgacttgcgtatctctcgccgcgccacggccgccgccgcggcgcgctcccggcgccgcggctgctgctcgtcggtggtggtggcccacgtctcgctcttcggcacggtcaccggccgcgcccggccgctctggaggatggtctgccacatcgagtccatggacacgtcgtcgtcgtcgtcgccggcgccggcgccggcgacgacgtcaggcttgggcgtggagaagtcggtggcgagcgtgattgcccacttgtcgccgtcggcgggggcttcgatggtccagctgctcggtggtggtcgccatggatcctcgacgacgacgggcttcttgacggccatcttgacgtccgtggcggcgatggtccagctgctcggccatggctcgtcggcgacgacgggcttcttctcgacgacggccggcttggcctcctccgtgcaagcgaggacccacgccgaccattcttcctccccaacgaggggattcttggcgtcgtcgtcgacgaagaaggcccagtccggccattcctcatcgacgacggacttcttgacgtccggcttcgccgtggcctccgccgccgtggcggcgaggtcccaggttagccattcctcctcgacgatgatcggcctcttgacgtcgacggtgtccatgagtgcagcgcccaccgccgcggcggcgcctctcggcgtctgcagtaccacgccggccaacgccttgctgacgtcgcgcgggctgcagtcgcccggtctggccggcgtcgtctccccgctggccgccgacgccgccgccttgcgggcacgcgggcggtcggtggtgctcctcttcgccgctctcgcctctcgcgacggcttcttcttcgccaccgtcgtcgtcaccaccggcgccgcagcgacgacgacgaggtcggccgcaaccgccgccacagcaaacatgtcgtcatggtcatggtcatgcccatgccccgacgacgacgtgtacaaccccacgtccacgccgccgccgccgctctctccaaccccatcgccgtcgccggcggccgtgtggccacggtaagacgagacgagccagacgacgataacgttcgccgcgatccacaagaaggaaggcgacgagaggacgccggcggggagagacgcgggcgagtcgtacgaggccgccgccgacgtgaccacgacgatggcggccgccgccgccgcggcggtgagcaagaagcacttcat

SEQ ID NO: 26770 - DNA, 491 bp, Oryza sativa
  unsure (1)..(491): unsure at all n locations
  Clone ID: PAT_MRT4530_31527C.1
gtaaagnttggtggnggaaatttggtgaacccggataaaccaatttttccccccaggnaaccagcttatgaccatgatttacgcccaagctcgnaaattaacccctcactaaagggaacaaaagctggagctccacccgcggtggcggccgctctagaactagtggatcccncgggctgcaggaattcggcnccagggaaggagaatcatggcgtacggatgaagggcaaggggcgcggggagggcatagaacccagtgcttcttttggggacccccttttgtcgggctccaagcacggcccaggattcaaaggaaaccggaaaaaaggctgttgttgttttttcctacacggccggcatgcncattggagttcgttggtcttgttttcnctcgcggaaatgggaatcggaaatttcattttaaccccttcaccgggccgaccaaaagtgaacttttgcccccgaaaaaaaaaaaaaaaaaaaaaaaaaaa

SEQ ID NO: 26771 - DNA, 700 bp, Oryza sativa
  Clone ID: PAT_MRT4530_31528C.1
cgcagaaggagattgcagcggaggcatagacttccaaaggaagaacagaagaagagaataataaaaaaagggctcgtgggagggagggaggaaggaagaggaggaggaggtcaattcaagcactagtcgtttaattgggagagaccgagagaaaaatggctctgggagatgactcccctgcctcttacatccacatggtgcagcacctgatagagaaatgcatgacgttcgggatgagcatggaggagtgcatggagacgctgtcgaagcgtgccgacgtgcagcccgtcgtcacctccacagtatggaaggagctggagaaggagaacaaggagttcttcgacaagtacaagcagttgagatcagaaaagggaggcgtgagcagctcctgattaattaaccaggagatcgattagatgcatgcagctagccagttaattgtgataattaagctagcatccatccctttattagtttctaattagattttattgtactacttagaaaataagagtgggaggttgatcgatcaggctagctagctgctggctatatatggtggtgcatgcgtgtacaggggttggcaaggaagcagccatctgatctgatcatcgctataatggcgctatatgtagctcccgaactgtatccatcgtcaatcttatctccgagatcacggttcagcctagctagcttctcg

SEQ ID NO: 26772 - DNA, 296 bp, Oryza sativa
  Clone ID: PAT_MRT4530_31529C.1
cgtgggaagtctttctaatttgtattgaaaataaattttgttcaaaggatccagcacagaggaagcccacactaaggaaaacaaaaacgtgcaccggacgacggcactaacataggccccaaagagcacattacagagaacagcagacacacaggggatccttaaaagagagcagatcagcttggaggaaccatattgcaccaaaggatgaaccattttttcagacaacctgcagctgtgcgcgccggtgcacagctcacaatggaagcaccacccgcattctaagcaccacccta

SEQ ID NO: 26773 - DNA, 2802 bp, Oryza sativa
  Clone ID: PAT_MRT4530_3152C.1
atgagcacatatgatcgtcagatctataatacacccggcagattcaaatccccaaacaggagtctcgtgcgttacccccttttattattgccgaattcatgtttcgacagttggcgcgccaggtaggggtcgcgtcgagttcctcatcaacgattgtgatggaaccaatctccgacgtcattggattctccaaactcgttcttcccttctcggattcaatccagtcgtgaagatcagacttcgaccaacccgatcaagcagcatatgcatgtcagagatactcatgttcgactcggatgtacaagctctggaatcaagatcacaagctgaccaggtcaatgcatgaaaagctgacaacacaactgaatcaagatcacaaccatcaccaagcaaccggagcatgcaaacatacgtgcatatatggactgaggtggcgatctactaacgaactcccgaccggctgtatttttcattcgagtttttcttagcctcgattgaattaagagcagcatgttatacctggagttacgtacgcatatactccctcggtttcaaaatgtttgacaccgttgactttttagcacatgtttgaccattcatcttattcaaaaaatttaatacatatttcacaaaagtttttgaataagacgatcggtcaaacatgtgctaaaaagtcaacggtgtcaaacatttcgaaacggatggagtatttatcaaggatcaacacttcacctgacagtatttaccattaccaggtttatcgttctaattttcttatataaattagattaatcttggtatttttctagtcttctaattgacagatcactaatgttgtttgatctgttatgcacgtacatctgttgcatccgccgttacggttggtgtactccaccgccattgttaatggtgtcattgacttcaccgccggttcgccttcatcgccgtcgagtgatgttttcgcctacacggatggttagtcacaccaccgttgttgggcatctacgtcttcactgccggcctgcctccgtcgccgccgactggtgttttcgcctgcacggctgacctattatgccgccgctgttgggcatctacaacttcactgactggctgcctcatcgccgccgaccggtgcttttgcctatacggtttgatggtcacatcaacgttgttgggcatctacgtcttcaccgaccagctacctcgtccgtcacgccgactggtgttttcgcctacacggctggcctattatgccgccgttgttaggcgtctatgacttcaccgccggcctgcctccctcgccgccgactggtgttttcgcctatacggttggttggtcacaccaccattcataggcgtccacattttcaccgccgaccgcctaggctgcctccacggctggtgttttcattgccattgatggatgactttgttcccgatgcttgggggctatgactagtcggacagagtgtttaaatgtacggagaggagaaatacatatttataaatttttaaaatacttgaatttttctcgagtattatattaacatcagatactactcatcctatatgtttgttctgcaggatccatatctaaatatgcataaaagggattcatggctttaagcttatctcttacgctccaggaatggatcagtcagaacatcaccgactggcttgcctccgccgccgccgactggtgtctccgcctgcacgactggcctattatgccgttgttgttgggcgtctacatcttcaccgaccggcttgcctccgctgccgccgactggtgtcttcgcctgcatgactggcctattataccgccgttgttgggcatctacgtcttcaccgaccgacttgcttccgctgccgctgactggtgtcttcgcctgcacggctagcctattatgccgccgttgttgggcgtctacgtcttcaccgccgtcttgccttcgtcgccgccgactggtgtttccgcctgcacggctggcctattatgccgccgttgttgggcgtctacatcttcaccgaccggcttgcctccgctgccgccgactggtgtctccgcctgcacggctggcctattatgccgccgttgttgggcgtctacgtcttcaccgctggcttgcctccgccgctgccgactggtgtctccgcctgcacggctggcctattatgccgccgtgtctccgcctgcacggctggcttattatgccgccgttgttggacatctacatcttcaccgatcggccgcctcgtatgacgccagctggtgctatcgtcttcacggctggccacgttgccgccactacaaataggcgtcatcaccttcaacgcaagctgtctacgtctgctgccgactggtttcttcacttcgatggctgcatgattctgccagtgttgattggacttatcgtcttcatcgccgctaccactactgatggacatcatcgtcttctatcgtcgactggttatgccgccgccgactggtgcttttatcttcacagctgcgcgtcttcgctaccggtttgcttttgttgccgccaactcgtgttcacttcatcacggcaatgcaactttgtcatcatggtggagcgacttcatctttattatcttcggcaccggcaaactctattgctgctacttcgcaagttttgctacttcaccaaccacgacgtctttgtgaacctcaacatctcggcatgcgatgccgtgttattttactagaacaagtggctctccaatattcaggatttctacttggtcatcttcaacacatatcttcaatcaagcaatgactac

SEQ ID NO: 26774 - DNA, 604 bp, Oryza sativa
  Clone ID: PAT_MRT4530_31530C.1
ccggccgggaattaatttttctcctaccctcacctcccgccgtgcccgacggcgcccctaatctctccccaccggcgacggccctcccccaccggcggcgccccttcccctccctctcccccactgtcggctccttcccacttcgtcagggtgccggcgtcgccccgctcctcgctagatctggcgagtcggcggctccccggcggcgcggtgactcgggattggctcctccccctccctcccggcatctccctagcgcaacggcggcgcggctacggaagaaactggaggaggtcaagatggatatgtaaaaagggatttgtcaattgctttaggctgcaatgctaattttgttggggtggattggagttcttccatggatccctttgtcgattttatttgggtgaatctttggttattgtgtttgccttatggtgttgtgcatccgatttggttgtgtcgaactataaaagtctggttttggaaagtgtttccatgagattagattattgttaggattattgctcggtgtagttctaatactaataatgatagttcgattggtttgttaatcggcaaaaaaaaaaaaaaaaaacccgcggcc

SEQ ID NO: 26775 - DNA, 705 bp, Oryza sativa
  Clone ID: PAT_MRT4530_31531C.1
atgggcagcgagctgccggccgcggcgccgccgcagccgaagcgatccaccgcggcggcggcggtcgcgcgcagacggatagggcgcgagctgtggcagttctggctcgatccgccgccgtactgccggcccgggccatcccccgtgaaggaccacttccactgggaggtggtcatcgatggccccgccgccaccccctacgccggcggcgtgttccccgtcgacgtctggttcccctacgattaccccttccgtccccccaagctcttcttcaagaccaaggtgtaccatccgaacattgacgggaaggggaggatggcgctggacatcttccaggacaactggtcaccggccttgacgatcaacaaactcctcttgtgcttcgtctccgtcctcttcgaccccctgctcgaccgcccgaccaaccgctgcatcgccaagcagtacaagcacgagtacgaggcgtacgaggagaaggccagggcttggacgcagaagcactcctcgacgccgatcgtctcgcactacccaccgtacgctgtcatcggcagcacgccgccggctgttcctcacttcccagcgactgcagccaggagaaaggctgctgcatcttcagcttcaggttcagtaagcagcagccgcattccgttgcttatgaaggatgagagtatctggagaaggacaatgaagttttttcagggttag

SEQ ID NO: 26776 - DNA, 1786 bp, Oryza sativa
  Clone ID: PAT_MRT4530_31532C.1
atggccatcgagtgcctcgtgctaggggcggggcaggaggtggggaagagctgcgtggtggtcaccttcggcggcgggaagcgcgtcatgttcgactgcggcatgcacatgggccaccgcgacagccgccgctacccggacttcgaccgcctcctcgccgacggcgccgccgactacaccgccgccatctcctgcgtcgtcatcacccacttccatttggatcatatcggagcactgccgtacttcaccgaggtctgcggttaccacggtccagtttacatgacgtacccgacaaaggctttagctccattgatgctggaagactatcggaaagtaatggtagatcatagaggagaggaagagcaatatagctatgaagacatcctacgctgtatgaggaaagttataccattggacctgaagcagaccattcaagtagataaggacctttcgatccgtgcctattatgctggacatgttctaggggctgcaatgatatatgcaaaagttggagatgctgctattgtgtacactggagattacaatatgacaccagataggcaccttggagcagcgcaaattgatcgtctgaagttagatctgttgataacagaatcaacatatgctaaaactgtgcgtgactcgaagcatgcccgagagagggagttcttaaaagcagtccataagtgtgtttctggaggtggtaaagttctaattccagcatttgctcttggaagagcacaggagctatgcatactactggatgactattgggaaaggatgaacctgaagattcctatttatttctcagctggtttaaccattcaagccaacatgtactacaaaatgcttattggatggactagccaaaagatcaagaacagctacacagttcataacccatttgacttcaagcatgtttgccactttgagcgttctttcattaacaatcctggtccatgtgtgctttttgcaacacctggtatgattagtggtggattttcccttgaagtgtttaagaaatgggctccatcagaaaaaaatctggttacacttcctggatattgtgttgctggaaccattggccataagttgatgtctggaaaacctaccaggattgacatagacaaggacacccatattgatgtcagatgtcagatccatcaactgtcattcagtcctcatacagactcaaaggggatcatggatcttactgaatttctttctcccagtcatgtaattctagttcatggcgaaaaacctcagatggctttcttgaaggagcggatcgaatccgagttggggatgcaatgctgttacccagctaacaacgagaccgtctctattccgacatcccagaacttgaaaataaacgccacggagaagttcattgtgagcttctcagaacctgaattttggtggcgacatgccacaaggctgcaggactgaaggagtagctgagggcgttcttctgatggagaagtccaagactccgaagattttgcgcgaggacgagctgcttcactcgctgggcatggaaacgcattttgtccattttgaaccactgcatccgtccagcattgaggtaaaacatactggtgagtccgcggaacgcgcaaaaggattgcacgtcaatatattagaatgaaagagtttttcttacacaatacaatcagccagatcggcttatgccaggggaagggagaaaaagcaaagcaaaatctgtctacggaggctaaactcaactccgatcagtaggaagggggcaaaacatgctaaactccca

SEQ ID NO: 26777 - DNA, 2441 bp, Oryza sativa
  Clone ID: PAT_MRT4530_31533C.1
cttctcgtgtttttttttttttttttttttgaagccaaagaacatccatatacccaaaatttgaagggaacaaataaaggtgatttgacatatctagaagtacaacccacacaggtttgcattgacagcacttcattaaggagcaatgcattattcatctctacgcagtaagcacaaattaagatgtacaaatcaaatatgcacaacaactccacagtcaagtatgtagtaatgctttacaacagtaacatcacaagaagaagcacaggtgtattgttgtatgcctgattatcggtgtcaaaccaaaattcacgccatgacagtaaggctgcaagctattacttatctggatctaagacaatagaggtgtagtgcgttcatctgaattcgaggagtgttggataggtttcatcgccgggtcacagtacgcatttacaagattgctgaagaattctgccatttctggtttgctctcttcttctctgtctttctttatcaatgactcagtagaatatgcttcgaagatcggtaaaaatctgttccggcagtattcattgaacagaagggtcagcactggaagaggtaccagcaaacttgatgcaaggggaagtttcttcaatccaaatactccaattgcaataacatgcatcagcaccagagaaaatattgttcccccgtgcacaatgggccagaatcttccaccagtgtcatacttgggtgaatatacattaaaaagctgattacgatatatgaagtagccaaggcagaagtaaaccagtacaaatgggaggataagtggggatacaatgaagtatgtgagcccaagaagtccaaacaggagaacccgaggaatttcactatggtaatgcattgatggaggtttggactcatccctcttgcagcattttgcacagctaccccacaaatggaataaaagggcagcagtttgagtaagttctgatgctatacttgtccaagatgtcacaacatatgtaataaagaaagaggcctgtgctggtacaacaactgcaagccttttagggatttccttcggatcaaggaatatctcgagttgaccaagtactgagccagtaagaacatttgcaaagaacacactccatattgtaaaccgaagcattttgttgcaagcacttctctcaatcccactaacagagatgaatccttgcattgttgaaaacagcttcattatagagggcacataagaggaaagaaagtgaagaatgacactgggaagatatcctgtaaccaactgactgacaacagacatttccagtatatttctcaggaaaggcaaccatgtctctagctgttccatataggtgagtccttgaacaaatgccgaaactaggagaaagacgagtatcaggagaatagaacgctacagagactacaaacttggatatccatctgtccatgaatgatgttgaaaagaaaggccaataaacgtcatggggatcaggagcatgctcagtctgccactcagtaggcttgtctgattgtcttatgtaaatagcatttgcagcaccatatcgagatctgaatgacacaaaagcagcgggaacttcctgtctgctcctagtagtgtctgattgttccattctaacattttcttctaggtcctccagccttttctgatatttcccaacaagatcatttctgccaaatattccaagaaattttcctggaggatctccagaagtacgccgtacagacttcaagttggcaagctttgtgcaaatattctcagcgtcattaagaaggcggcggagtttgccagtttgatgaacaacagtgtgtgacaagtaggtagatgaatggtactctttgaagaacttatcaacagcatcactcacagacacaccattggttacaggtatagctcgaactagaactgtgaaatgctgaggtagtggttttgatgtcataaaatattcgagcctcttgccagaaatatatttgtattcataataaaggaggtagcatgtaattccagttatgatgtacacagccgaaaagtggagccacaatttgttggagccatcctgcacgttggagacgctgaagagatcgacggacttgttgggcagatcggagaagtcaatctgccgcagctggtcccccatgaagttcaccggcatcagcactcccacccccaccaccgccgccgccgcgaacaccctaatgctgaagacgaagatgcggaggaagacgacgccgtcgagcccggcggcggcgtggacgtcggcctcggtgcggcgccacgccgcgggcagccacggctccggcggcgcgtacggccgccgcggcgagtacacggcgacgtacggcgggcgccgccggagcagcgtgtacgccgccgcgaggagcaccgtcagccccaggttgatccccaccgaagtcgcgagcgccgacagaatcat

SEQ ID NO: 26778 - DNA, 1719 bp, Oryza sativa
  Clone ID: PAT_MRT4530_31534C.1
atggccatcgagtgcctcgtgctaggggcggggcaggaggtggggaagagctgcgtggtggtcaccttcggcggcgggaagcgcgtcatgttcgactgcggcatgcacatgggccaccgcgacagccgccgctacccggacttcgaccgcctcctcgccgacggcgccgccgactacaccgccgccatctcctgcgtcgtcatcacccacttccatttggatcatatcggagcactgccgtacttcaccgaggtctgcggttaccacggtccagtttacatgacgtattatgattgcgcagctttggtgtatccgttccagcagtacccgacaaaggctttagctccattgatgctggaagactatcggaaagtaatggtagatcatagaggagaggaagagcaatatagctatgaagacatcctacgctgtatgaggaaagttataccattggacctgaagcagaccattcaagtagataaggacctttcgatccgtgcctattatgctggacatgttctaggggctgcaatgatatatgcaaaagttggagatgctgctattgtgtacactggagattacaatatgacaccagataggcaccttggagcagcgcaaattgatcgtctgaagttagatctgttgataacagaatcaacatatgctaaaactgtgcgtgactcgaagcatgcccgagagagggagttcttaaaagcagtccataagtgtgtttctggaggtggtaaagttctaattccagcatttgctcttggaagagcacaggagctatgcatactactggatgactattgggaaaggatgaacctgaagattcctatttatttctcagctggtttaaccattcaagccaacatgtactacaaaatgcttattggatggactagccaaaagatcaagaacagctacacagttcataacccatttgacttcaagcatgtttgccactttgagcgttctttcattaacaatcctggtccatgtgtgctttttgcaacacctggtatgattagtggtggattttcccttgaagtgtttaagaaatgggctccatcagaaaaaaatctggttacacttcctggatattgtgttgctggaaccattggccataagttgatgtctggaaaacctaccaggattgacatagacaaggacacccatattgatgtcagatgtcagatccatcaactgtcattcagtcctcatacagactcaaaggggatcatggatcttactgaatttctttctcccagtcatgtaattctagttcatggcgaaaaacctcagatggctttcttgaaggagcggatcgaatccgagttggggatgcaatgctgttacccagctaacaacgagaccgtctctattccgacatcccagaacttgaaaataaacgccacggagaagttcattgtgagcttctgcatggatgaaactgaaaatgatccgcagaagcagaacctgaattttggtggcgacatgccacaaggctgcaggactgaaggagtagctgagggcgttcttctgatggagaagtccaagactccgaagattttgcgcgaggacgagctgcttcactcgctgggcatggaaacgcattttgtccattttgaaccactgcatccgtccagcattgaggtaaaacatactggtgagtccgcggtgcagcagagcagtttagaacatttagactgcgagtga

SEQ ID NO: 26779 - DNA, 666 bp, Oryza sativa
  Clone ID: PAT_MRT4530_31535C.1
gcgcaacaaccacccgcctacgaaaatattcttcgcaaacaacaaaaaaaaaacaatccgcccaccacccccatctgccaccggcgtcgcttgctgtggccgacaccaccaccatcgcccctctgctggatctgggagggagggaggaggggagccgcaccgctgcctccggttagatctgggagggagggagggaggggggaagagagaggggaggggtcgtgccgcctcttccgctgccggcgccctcctcctccacctgctgaggccgccgccaccgtccttccccttcggccgaatctaggagggagggaggggaggggaggggaggggacgtgccacctctgccactgccagcaccctcctccctttgccggatctgggagggagggaggaaggggaggggtcgggccgtctgcgcctctgctggctcccaccccccctccgctggatctaggaggaggggaggggtcgcgccgcctcctccattgctgtctatggctgccacccgtggggggtctccgccactgcaagtgccctcgctcctccgtcaaatctaggagggagggagggagggaggggaggggccacgccgcctcctccgctactgtctgtggccgtcacccgggaggagccacgccggcacctgctgggaggaaggagtga

SEQ ID NO: 26780 - DNA, 111 bp, Oryza sativa
  Clone ID: PAT_MRT4530_31536C.1
accacgcgtccgattagttctaccaagttttctttgttaagttgagatccaatcttgatcttttttatgaatgccattatgagcccatgattagatctcagcgtaacaaag

SEQ ID NO: 26781 - DNA, 279 bp, Oryza sativa
  unsure (1)..(279): unsure at all n locations
  Clone ID: PAT_MRT4530_31537C.1
acggagatcgcgcatgatcgaacaggagatcgtgagtgttggtgccaggtacaagcagacgagtactcgtacgcggatgaaagagatgatgacgtcagggaacctaatcccttctantacctctcctcttctgcgactcctctcagggatctctcttgcggagtggggtccacatcgtcagaggggtttccttggcccacatggaaacatgttgactggtcaagagattacttgttataccctccaagcagctgtcacgcgtgagctgacgactgatga

SEQ ID NO: 26782 - DNA, 209 bp, Oryza sativa
  Clone ID: PAT_MRT4530_31538C.1
gagaaagttactctgaaggcagagaaagagagggttgaacaacaaggtaaaggattggggggtggttctaccagaattggttcttaatttccttaatccagttgatttcaatccgctgcattcccttcatttataccaccttatcaagctttgggcaacaaaaatgcttctacgcccgcagcatttcaagggatggcaatggggcaatg

SEQ ID NO: 26783 - DNA, 1290 bp, Oryza sativa
  Clone ID: PAT_MRT4530_31539C.1
atggctccctccttgctcgcctcggcggcgagccaaatcctcgccgctccccgccggggaggccgcggccggcggcgtctggtcatcgcctgctccgccggtgccggtgctcctcccaagctggtgactttcctcgggaagggcggctccgggaagaccaccgcggccgccgtcgccgctcagtattatgcaagtgaaggcttgaagacatgcttggtcatacagtcccaagatcccaccgcagagcaattgatgggttgtaagatcggtaactcgctgaccgagtgcgctgccaatctttccaccatgaagctggagactagtaaaatgctgcttgaaccccttgaccggctaaagaaagtggactcgcagatcaatcttactcaaggagtccttgaggcggttgtaggggaggagcttggagtcttacccggaatggactcggtctgttcagtgttagctcttcagaagctgcttaacttcttttcaactcaaaggaatagttcacaagaggaatttgatgtggtagtgtatgattgcaacaatacagaggaaattctacggctaattggtgctactgagagagcaaggtcttacttgaggtatgtgaaggatctagcagaaaagactgacataggaagactggcttctccttccgcgatgagactaatatacgattctgcaaggccaaatggtaaaactagtgaaggaagactgagttcagagttatggaatgatattgaacaacttattcagagaatatcggtttggtttgccgatccctcaaaatttgcatgcttcctcatcatggaccctagaagatcaatctctgtatcttctgcattgcgatactggggatgtacaactcaagctggtggaaatatatgtggagcatttggttataccgaacagcgtttcgaaattcaccaaggagttgcagagaagtttttgccgatgactttctcgtttctgccatttctgccaactgattcttcagcagattggagcagagtgctgaattctttgagccaaaatgcaaaagatttactgaggaatacaagcaacaaagtatacccttcagttagttttgattctgttcagaaatcggtgacccttttcatgccgggctttgataagtctgaaatcaaactatatcaatatagaggtggatcagaactactgatagaagccggcgaccagaggcgcgtcgtaaagctgccgccggcgatgcagggcaaagttggtggcgccaagttcgtcgacaggaacctcattgttaccatccggtag

SEQ ID NO: 26784 - DNA, 252 bp, Oryza sativa
  unsure (1)..(252): unsure at all n locations
  Clone ID: PAT_MRT4530_3153C.1
ggcctcncagctctccctcacccgccgccggctccacccgggccccgacctcctcaccctctcctccccgcgcctccgcgcctgcctccgcctctcccgcgccgccacccttgaggcgggggaggagactgtctaggcgcctaccacaatccttatccaaacaaacaacctgcacccaacggagcccgcgtcaaagcccaaaagccgccggctgcagcagctgcgcccccccttcccaaattcccggactct

SEQ ID NO: 26785 - DNA, 465 bp, Oryza sativa
  Clone ID: PAT_MRT4530_31540C.1
agcagcttctctagccttgctctcctagcgctcagttgttatactgaccctctaagggctactaggcctcaatcatctcttcctcttcgtgtatatctagccttctatgctacccggggatctctttcgttattgatgagtatactgcccgtggatgataccagaggtataattatctatgggcaaagatgatacatgccatatattgaaatgacacgactaggtcggggacgcaggaattttacaggaatatcacatgtaatagatcaactatagtaggaactagaaacatgaacacttgcggggtacaaacaaggatccatgtacatcatcttgcatgtatcgagccaaaggcaggatctacctatacccatgtctattattcagagcatcgaaggcaatgaatggagcaaactatggacgtacctagatcgctgagactactggcgccaaaagctcaacaac

SEQ ID NO: 26786 - DNA, 503 bp, Oryza sativa
  Clone ID: PAT_MRT4530_31541C.1
ttttgcccacgtggggcatacccagtggtattccccgttcgttagggccatgtatcatttgatgcactaacgtttggggcacatggggttaagccttccacaccatgttcatgatcaccagcccaatggcgctcctgcagcagccatgtgtcgcatagcaggctacataggcatgtatgcctcagtgcacaactgtggcaacccagttgcccagtatgtatgctagtacgctatgcacaacatagtttatttgtgctggactcgggcactgccagcagatgatgaagatggcgatgcagatgcacatacatgtgcaacatggcaccacatgtcaacttccaacatctcttccatgtggttgttgcttgatcaaacgttggttacatgtactctagtaataaggtgttgcaatactatccgtgtcgccaaacactagaatattagatacccattgtattaaatttccatccttttcagacttccaaaaaaaaaaaaaaaaaaaa

SEQ ID NO: 26787 - DNA, 221 bp, Oryza sativa
  unsure (1)..(221): unsure at all n locations
  Clone ID: PAT_MRT4530_31542C.1
ggttgataaccccgggggggtaagtgcccctgctccctggtaattgcccattttgtggtaatcgtccctgcncccataattggtgnctccttgggttgttgcaaacccccattggtgccagtaattgttccccangggaaaatggttgaacgcccccgggtagggttatattaggcgccccttgtgccnattccgtataggtaagcgccctaattatgtag

SEQ ID NO: 26788 - DNA, 1101 bp, Oryza sativa
  Clone ID: PAT_MRT4530_31543C.1
ctagccttctcgtattctcctttttctctttgcttcaactaccaacgctgcgccacttttctcaaataaagatgctattagatggcaggatgaggagctagatggagtaagagtcaggccgggcatggatgccaggggagtcgcgagagatggcgacgcatcgccgacggccacaccgcagcatcggcggccgggcaaggcggcgcggggtagggaggaggtgctggatcttggcggcggccacacggcagtggcagaggtggcatggcaggggcatagggtgatgtgggatagggtggaggtggtggacctcgccgctggcgccgccgccgccctcgccactggaccatgctccgggagaacgcccccacagcatccacccctcgccgccgcttccgcaacgtctgcactagcaaatccgtagaggtagacctccccgagctcgatggacactacgtcttcgtccccaaaggcgagggcctcctcctcctcgtcgacaagcgcacgtccgtcgtccgcctgctcaacccgctcacgcgcgcgccacctcgcggagctcccgccgctcatcccgttgatggatatattcatgggtttaagtgccggcctcgccgacgacgctacaatcgccttgcatgccttcaagcccaagatcatgctcggcgtcggccgttgccaagcggcgccgtggctggtggtggcagctcccggcgacctcctccccaccacctcaccggccttctccgcccgacgccgcctcaccggcttcgcgccgtgcacgccgccgcctcctcctccagcccccaccgcgccgccgccgccggctccaccctccaccgcgccgccgccgcctccaccctcccctgcgccgcggcccgcctccgccctccaccgcgcggtcgccgccgccgtcctccaccgcacgaccggcgccgccgtcctccaccgcgccgcggccgatgccgccgtcctcgactgtgcggcggcagccgccgtcctccaccgcgcggcggccgacaccgtcctccaccgcaccgcggccggcgccgtcctccaccgcgccgtggccgacgccgacgccgccgtcctccactgcgccat

SEQ ID NO: 26789 - DNA, 411 bp, Oryza sativa
  Clone ID: PAT_MRT4530_31544C.1
atggcagcagatgctcaagaggagacatgcctccaaatggccgaatcgtttgatacaacagtcatggaccatgaactgtgtactgcctaccgtgatccggctgaccggctccgaagaatcaaagtgctcaaccagtcagttctcagtcacctcccctgccaacctctttatccttcttgcttttgctcgaagcaagcagaacgcacacacggtttcctgctaatctgcattctgcaagcatcatgggtgtttgaaatgttcaaacttcaaacattacggcgtccattggatcatcaacactacaggatgcggaaagatatccgcagccacatctctggctttctcccaagtcccaaccaccgcctcctctccctcgaccgctgcctgaaccacgagaggatgactagatga

SEQ ID NO: 26790 - DNA, 1343 bp, Oryza sativa
  Clone ID: PAT_MRT4530_31545C.1
caaacccaatccagaggagggaggagcgccgccgccgccgccgccgctcaggcgagaggttgccggagccgccgccaccgatgctgcgcgtggtctccaccctccccgcgctccgcccgctcctcgccgggagcacgctcctcctgaacgctagacctctgctccgctcccgcctgactcggcggccgtttcgcgccgtctcgtcctccacggcgtccccgtcgagctccagctccggcgccagggacttcgggggtgtggatttcggcgatgagcgccttctgcggtgcgcggcggcggggagagcgccgctgcgggtggcggtgctggtgagcggcggggtggacagcagcgtcgcgctccgcctcctccacgccgccggccaccgctgcaccgctttctacctcaaaatctggttccaggaagatttcaggaacttttggtctgaatgcccgtgggacgacgatttgaagtacgcgcaagctgtgtgtgacaagattgatgtaccgttggaggtagtccatctatctgatgagtattggaaccatgtggtatctcacataattaacgagtatcgcagtggccgtactccgaaccctgatgttctttgcaacacaagaataaagtttggagctttcttagaagctattgaaaatttgggatttgattacatagcatctggacattatgcacatgtagttcatccatcacctgacgatgttgaagggccatcagtcctccaactttcaaaagacaaggtgaaggatcaaacttatttcctttcacatctatctcagacccagcttagaaggcttctttttccactgggatgtataacaaaggatgaagtgcgcaggctggctgctcagatggacttgcctaaccaagatagaaaggattcccaggggatatgttttcttggcaaggtcaaatttagtgagtttgttgaaagacagataggagagatggaaggagtactgttggaagctgaaactggagactacctagggacacaccgtggattttggttttatacaattggtcagcgacaaggattgcgccttcctggcggaccctggtatgtggttgagaaaggtgttcaaaacaatgtggtttttgtctcaaggaattactactcgctggataagagaaggcggacatttcgtgttggatcgctgaactggtttagcaattctggaccaacaaacaatgagcaacttaaatgcaagggtgatgctacgaagatagttgatctagatgatccaggggccttagatcttgattttagagttgatacatctgtcgttggattaacagacgcgctggcttatccagagaattaa

SEQ ID NO: 26791 - DNA, 226 bp, Oryza sativa
  Clone ID: PAT_MRT4530_31546C.1
aacggaacgagaagatattgcatattacctggtgcatattgacagagagaactttcttctccaaaataacaacctcaaaaataaccccatgcataataacaatccacatattaaaacttgaactttattcaaacacacggataccacatgtaactgtaattctgtcatattaccttacaaagcatatcacccaaatgctttaaaatcttcttcacagtaatatttt

SEQ ID NO: 26792 - DNA, 2286 bp, Oryza sativa
  Clone ID: PAT_MRT4530_31547C.1
atggcgtcgtcgtcgtcggggcgtcgggttggggggcctaggggcggcggggagagtagtcctagtccggcggcgggggcgggggcggcggcgtcggggggtcgacggatcctacggacgcagacggcggggaacctgggggagtcgatattcgacagcgaggtggtgccgtcgtcgctggtggagatagcgccgatcctgcgtgtggcgaacgaggtggaggggagcaacccgcgggtggcgtacctgtgcaggttctacgcgttcgagaaggcgcaccggctggacccgacgtccagcggccgtggcgtccggcagttcaagaccgcgctcctgcagaggctggagagggagaacgaccccacgctcaaggggagggtcaagcagagcgacgcccgcgagatgcagagcttctaccagcactactacaagaagtacatccaggctcttcagaacgctgccgacaaagccgaccgtgctcaactcactaaagcttaccaaactgctgccgtcctgtttgaggtcctcaaagccgtcaatgtctcccagaaaattgaagttgatcaagcgattttggagacacacaaccaagtcgaggaaaagaaaaaactttatctcccttacaacatcctcccgcttgaccctgacagcgctaatcaggctatcatgcgatatcctgagattcaagctgcttttcacgctcttcgtaatacaagaggactaccgtggcccaaggatcatgaaaaaaagcctgatgctgatcttcttggttggcttcaggcgatgtttggatttcagaaagataacgtgtccaaccaaagggaacacctcatactcttacttgccaacgtccatataaggcagattcccaagcccgaccaacaacccaaggtctcactcttactcaacgtccatatcggtgcttgtgtcattctggtgttggatgaccgagcactggacacagtcatgaagaagctatttaagaactacaagagatggtgcaagtaccttggccgcaaaagcagcttatggttgccaactattcaacaagaagtgcagcagcgtaagctcctctatatgggtctttatcttctcatctggggtgaggcggctaacctgagatttatgccggaatgtctatgctacatctatcatcacatggcttttgaactatacggtatgttggctggaaatgtgagtccaacgacaggtgaaaatgttaaaccggcttacggtggtgatgaagaagcctttttgaagaaagttgtgactccaatatacaaagtcatcgagaaggaagctgaaaggagtgaaagtagtgaaaggagcgaaaggagcaagacaacaaaatctaagcactcacattggagaaattatgatgatctaaatgagtacttttggtcaagagattgtttcagattaggatggcctatgagagctgatgcagatttttttaagaccccagattatgcttatcatgatgaagtgagcggagagaacagaagagttggtagtggccagtggatgggaaaagtaaattttgttgagataaggtcattttggcacatcttccgcagctttgacaggatgtggagcttcttaattttatctttacaggccatgattataattgcttggaatggtggtacaccaagtgatatctttgatgcaggagtatttaaacaggttttgagcatattcataactgctgcaatactgaaattgggtcaagcaattctggacatcatcctgagctggaaagcaagaagaagcatgtctcttgctggcaagctgcgctacatcttgaagttgatatcagctgctgcatgggttgtgattttaccagtaacttatgcatacacctgggagaatcctacaggtcttgcaagaacaattaaaagttggctcggtgatggtcagaatcaaccatcattatacatcttggctgttgtgatatatttagcaccaaacatgctgtcggctgtgttatttcttttcccagtccttagaagagctcttgagcgatcaaatcttaaagttgtaacattcatgatgtggtggtcgcagatcaagccacttgtgcgaccaacaaaagatataatgaaggagccaatacggacgtttcaatggcatgagtttttcccacacggaaataacaatattggtattgtaattgcactttgggctcctatcattcttgtatatttcatggatacccagatttggtatgcaattttctcaacattaattggtggtatatatggggcatgtcgccgtcttggtgag

SEQ ID NO: 26793 - DNA, 159 bp, Oryza sativa
  Clone ID: PAT_MRT4530_31548C.1
ggcacaagcaacgaattatgtatgtatatagacagcatctgatactccaaaacaacgaagatcatatgttattacaaaagagacgaaaaagaaagagccctgccgtgacaatgttctagtcgatggaacacgaagaaaagaatcactttctaggacagt

SEQ ID NO: 26794 - DNA, 1965 bp, Oryza sativa
  Clone ID: PAT_MRT4530_31549C.1
atggcgattcatgttcttgtcccagatgcaggtgggcggcatcatcggcatggctgccctccgttcacctgtggtaatcttagcagcgtgtcgtctcctttccgccggcgaggtgacccatctgagtgcggagttctgtcgtacgagctcaattgtgccgatgacaaggctacaattcagattgacaacggaacatactatgtgacgggcatcaactacactgattctaccttcttgatcgttgatgctgacatctcggattcacctagcagttgccctcttcctcgatggaattcccttcgagagcccaggttccagagccttgagccttcttgtgggtacctagccatgactcctttgggtggtcgggacagtgtagcaccagtaaatgaaagcttaagcttaagctatgcagacgtagtaaaatctatgaggaaaggattcagagtccaatttcctttcagatatcgtactggaagctttaagcaatgcccaatggattcgattcccatatgccttgcagatctggaagatgattgcaggtttctgttgacgcccttggctgtattggttttccttgcacacaagtactggaaaacaagggttacaattgatgcagttgagaagtttctccgaatgcaacaaatgctcggaccgacaaggtatgcctacactgatatcactgcaatcacaggccatttcagagagaagcttggccaaggaggttatggctctgtatacaagggtgtgctgctcccgggtgatctccatgtggctgtcaagatgctgaatggcaactccaactgtaatggagaagaattcatcagtgaagttgccaccataggcatgattcaccatgttaatgtcgtgcgtcttgtggggttttgctccgaggaaatgagaagggccctagtttatgaacacatgcctagaggatctctagacaagtatatttacttgtctgagagaagtttctcatgggacaagatcaatgagattgctctaggcattgctagggggatcaactacttgcaccaaggggctttacggggaacagtgggttatatggctcctgagatggtatcccggagttttggtgtcatatccagcaaatcagatgtttatagctttggaatgctactacttgagatggctggaggaagaagaaacgtggacccaaatgcagattcaagtaaaagtaaggcgtactacccatcatgggtttatgaccagctaatagcagatcaacaatttgatgagatatcaaatgttgctaacatgcatgagctggagaggaagctatgccttgttgggctgtggtgcattcagatgaaatcacacgatcgaccgacgatgagtgaggcaatagagatgctcgaagggggtgtggatgcgctgcaagtgcccccgagaccatttttctgcgatggggatggcattggcaatggcatgccacctccacaaatactgcactatgacatcaagccacataacatccttcttgatgacaactttgttccaaaggttgctgatttcggcctcgccaaactgtacccaagggacaatagttttgtgccgctcggcgccttaaggggaacaatagatactggaggaagaaggaacttagacatgcatgcagagaactcaagtcaggcctactacccgtcgtgggtgtatgaccggctaaccgagcaacaggtgagtgctggtgagatatctgatgctactgccgctgacatgcatgaattggagtggaagctgtacatcatagggctacattgcatccagatgaagtctcacgatcggccgacaatgagcgaggtcatagagatgcttgaaggtggcgttgttggcctgcagatgcctccaagaacattcttctgtgatgatgaatccatgtcacctatgatggattcttaccaattctcctctgggctaactgaaatcttagaggaggacgagtga

SEQ ID NO: 26795 - DNA, 412 bp, Oryza sativa
  Clone ID: PAT_MRT4530_3154C.1
gctagttgcgggttatatacaaatatacagtgttgcgactaattgttcaaaaccaaatatagaggcttgtgatattacactgcctagacaaacttgtaacctgaatcatggtcccttactaatgcatattaagcctggtccaaagggattggagggggtcgaggataaatgattccacacctcaatatgggacaatgaaacccctgcaaatctaacagaagatctatatcatcaccattgtcttcatcataaaatagagtcggcattgaaaaattttgatagatgcgcaaccctgccatgaacaaaagctttgaaatctgactgtaccaggccttaagatttatcttaactaagactgcacgaagcataacgaaacacatcaatagcagctttaacatcataaactttaatg

SEQ ID NO: 26796 - DNA, 224 bp, Oryza sativa
  unsure (1)..(224): unsure at all n locations
  Clone ID: PAT_MRT4530_31550C.1
caagcgcatcacacacacgctcgtcacatcacctccacgcaagctccccccatnnccttcaacctccatcccacacatcgcacgcgctcaccagcagcctcacacacccctcatcaccccaccaaactcgcctcatctccctccctccgcccccgctctccctngngcaannccgctccacactcgccctccactacctctccggctcctatacccacttcaca

SEQ ID NO: 26797 - DNA, 1608 bp, Oryza sativa
  unsure (1)..(1608): unsure at all n locations
  Clone ID: PAT_MRT4530_31551C.1
ctattgggcctaaattttccactcgcctccctctttcctctcaacctgtggtctaattgggccacatatcagcccatttgcaattttcccccaattccccacccgcctggcgccttggccacccaaaccgtgaccgacgggcgacggcgtgccgcgtgcggcagccggcgcggcagcctgcaggggcccaggaggcagccaggcaggaggctgctccaggccgtcagccgagcaggagcaggcgctgcacagctgcagcctgcaggtcggcgtccgccgttccgcgccgaggcccgaggcagccggcggctgcgcgctgccgctgcggccgtgcggcatcctgctcgccggcgactgcctgacctgtttcgctgtcctgtactgtactttcagcgacacctgaaatatgggagcatctgcatctttgttgacagccacgataaccttggaatctctcattcctgccaagtgttgtattgctccggatactccaaatgccatatagagctcaggcgcaactattttcccagtctgaccaacctgaagttcattgggaacaaatcctgcatctacggcagctctggtcgcacccactgctgctccaagtttctcagcaagctgctccaatactttgaaattctcagcactttttaaacctctgcctccagttactactacgggtgcatttgcaagatcgggccgttctgtatcttgggatttcagattcacccatgcagatttcccagagcttccttcactgaggaaagagagatcaacctgggtgataggtgcaacttttgcttctgacatagcctcagttggggaaaatgatgttgacctaatgctcatcatacatggatcctctccagtatatcgcacagtacaaagcgcatttccagcataaatgggcctcacaaagactcgtggctcagatattgaagtgacatccgtaacaggggacacatcaagaagggcagcagcacgtggaagcaaattcttcccgaacgaggttgatgacgctataacatgtgagtatccacctttgtgctgaacagaacgaagtagctcggcccaaggctcagccaatggatgcgcaaagacatctgaatcagcaacaagaacctcggataccaatggatggctggacgcagcatgctcggcagccttgtgaagccccggcccggatccgcccaacagaagagaaaccctattatcatccttgccgattgcttctgcggccgccaatgcgctcagagatgagggcttcacgaacccaccttcgtgctccgctacgaccagcgtgctcacaggtctagggagcgatcgggcgaaggaccgcgagctccccccggcggtggccgttcccctcctcaacgctcccaccaccatcgccgccatggcgcgcaacacaggtctcccgatctcctgctatgcttgctctctcagatcggagggaagccgagaagaagcgaagagcagcagccgcgcgggcgcggcggcgagaagagccgaggagaagagggcggtggcggggcgggcctcgcgccggtgatggatgccctcggcggtgaagagaaagtgcgctgtaatcgccgggcngngnccccg

SEQ ID NO: 26798 - DNA, 723 bp, Oryza sativa
  unsure (1)..(723): unsure at all n locations
  Clone ID: PAT_MRT4530_31552C.1
ccggccgggatacaattctcccacccaaattcgtctctacactcaacacgcctcaatacgtctttgtgactacatcaacaccacaaatccctttcttctaaattcatccctcagaacacaatcaaaatgcctaaggctgctgctcccgccaagcgtgcgaccagaactaagcgggccaagaaggaccccaacgctcccaagcgcggcctgtctgcctatatgttctttgccaacgaacagcgtgagaacgtccgtgaggagaaccctggtatctctttcggtcaagtcggcaagctcctcggtgagcgatggaaggccctcaacgagaagcaacgtgctccctacgaggctaaggctgccgctgataagaagcggtatgaggacgagaagcaggcctacaatgccgatcaggaagaagaggagtcttcttagaatggagcctccgatgtcaaacccaagcgtcgctccgcagaagaagtctgaatcggattagtcccagcaccangcgccgtggttgtagattctgggccaggaagtccttcctcttttgcattttgggtctgggggcggtggttgtatgatgngcacaggaaagaagtgccttgtttttttactaggaatttntctcgnggttaaggccccgtcccccgatgttattgatcctttgaggggcgaatcgattgagctactgccttttctattttcagtggtccttgggccatg

SEQ ID NO: 26799 - DNA, 410 bp, Oryza sativa
  unsure (1)..(410): unsure at all n locations
  Clone ID: PAT_MRT4530_31553C.1
gagagcagagcatatgcagagcaggggaaggggcgaaggtatctccttccctgcagctgcttccatcaatacaatacaactagtgatttcgttgcagtgatcctttctgtcgatggcgcacagcaggggcagggggcgggtactactacagtggcgatgatgagccggaacccgagctactactactccggcgagggtgagctgagcctggcggtgcagcggcaggactcgctgtacagggacgcgagccgcgccgggcagcatgagcaggcgcatggcgaggggtgggcgcgcacgctgcgtctggccttccagtgcttcggcgtcctctacggcgacatcggcaccttcccactctacgtctacttcaccaactttcgacggnggcaatccgcaacaaccgacgacct

SEQ ID NO: 26800 - DNA, 4263 bp, Oryza sativa
  Clone ID: PAT_MRT4530_31554C.1
atggagttctacgcctattccatgctcctcatcctgcctctgatactgtacatgtcctaccacctcacaagaaccctagccgagaagaagcccaccacccatggcctcaaggcacacccgctgctcggccacctaccggccttcgtcaagaacagccaccgcttccttgattggtcgacggagctcatcgccggcagcccggagatgaggattggattgtggatccccgggatgcggagcggcatcgtcaccggcaacccggccgacgtcgagcacatcctgcgcaccaacttcgcaaactatcccaagggccagcacgccattggcacgctcgaggatttcctcggccatggcctcttcaactccgacggcgagcagtggctctggcagcgcaagaacgccagctacgagttcagcaagcgctccctgcgcaagttcgtcgtcgacgtcgtgcaggccgaggtcgccaaccgcctgctcccgctgctccgccgcgctgccggtgatggtgtcggtggtgatgccgtcgtcctcgacttgcaggacgtgctccagcgattcgggttcgacaccatctgtatggtggcgttcgggcatgacccgcgctgcctcgccgacggcggggtcctggaggaggccaagtcggagttcatgcacaacttcggcgaggcactggacctcgtcatcggccgcttcatggaccccatcgaggtctcctggaagatcaagaaatggctcaacatcggcaccgagcgccgcctgaagaaagccatcgccgacgtccatgccttcgccatggacattgtccgcgcccggcgccagagcgcgtccgtgaaagacagagacgacgtcttgtcaaggttcgtggcgagcgacgagtacagcgacgaggtcctccgcgacatcgtcctcagcttcctcgtcgccggccgtgagacgacgtcgtcggggctgacgtggttcttctggctgttgtcatcccggcccgacgtcgtggcgcggatcgccgacgaggtccgcgctgtgaggaaggcgaccggcacgcgccccggcgagccattcgggttcgacgcgctccgggagatgcactacctccacgccgcgctcacggagtcgatgcggctgtacccgccggtgccgaccgacccgcagtcgtgcgcggcggacgacacactccccgacggcacgttcgtccgcgccggctggttcgtgaactacagcgcgtacgccatggggaggctcgccgccatatggggcgaggactgcatggagtacaggccggagcgatggctcggtgacgacggcgcgttccagccggcgagcccgttccggttcacggtgttccacgcggggccgaggatgtgcctcgggaaggagatggcgtacgtgcagatgaagtccatagttgctaacgtgatcgaggagttggtggtcgacgtcgtcaaggaggtcgccggcgggggcgttccggagcatgtgttctctatatcgctgaggatgaagggtggcttacctgtgaagataaggagaaagggacatatgcgaggcactgttcgtccaagcattcaggccgcagcacctggtccccggtggctgaggctagcagccaccctccgccccatctcgccggcgacggcggctgtcaggtatcctctgttccctctcgcctgcggccatcaggtgtcagctgtcaccatggcgaaggaggtcgatcggttcgtggagctggtggttgtccggcacggcgagacgtcgtggaactcctcccgcatcgttcaggggcaaatggatccagagctgaacgagattggaaaacagcaggctgttgtggatggtggagaaagtcttaatcagttaagtgagcagggcatctcctacctgaacaaagttgctcagaatcatatcggggagcgggtgattgttgtcggccatggtgctgccatactagaactctgccggcacactgatccacccaacagctcgattcgtaggaaaattcccaatacttcactgaacattttccgcatttccggcgtcaccggccggtggatccttgagaggtgtggagacgtcggccatctcagtgaaaatggctttctggagaacgcatttggcggccggcccatcggttgctgcttctcgcctccgcgtttcctcaccccgccgccgcagccgcagccgccgccgccgccgtcgccgtcgccgtcgccgtcgccgtcgccgtcgccgccgccgcagccgcagccgccgtcgccgtcgccgtcgccatcgccgccgccgcgtcgtctgcgtttcatgttcaggctcctgccccgcatcaccccgctcccgcgccgccgcctccgtcgcagccacaacccaaacccactaatctcccccgccgtcgctgcttccctcgccggcgtcctcgccacccgctccacgaaccccacctgggcacggtccctcgcggcgctgctcccctccccgctctccgacgcccacctcgccgccgccgtctcctccctgcccgaccccgacctcgccgtcgctctcctctcctggtcacagtcccccgaccaccatgtcgccctccaggaccctactcctctcgcccactccacgctgctccgcctcctcgcccgctcccgccgtttcgacgccgtggacgacacgctccagtctatgtctctcgcgggcgccgcgcccacgcgcgcctgcctcggcgcgctcgtcgccgcctacgccgacgctggcatgcttggaaaggccaccgagatgtgcgagcgcgtaagggagcagtacggctcgctcccggaggtgacccattgcaaccgcctgctcaagctcctagtggagcagcggcgctgggatgacgcccgtaagctgtatgatgaaatgcttggcaaggatagtggtgcggataactacagtacttgtgtgcttgtccggggactgtgcctggaaaggcgagtggaagaggggttgaaattgattgaagcaaggtggggagctgggtgcattccacatgtagtgttctataacgtcttgatcgatgggtattgccggcgtggagatatgggtagaggattgttgctgttgggggaaatggagacaaatggattcttgccaacccttgtgacatatggttctcttataaattggcttggaaagaagggtgatctagagaagattgggagtttatttttggagatgaggaaaaggggattttcccccaatgtccagatttataacagtgtcatagatgctttgtgcaattgccggtctgcaacacaggctatggtgatcttgaagcagatgtttgcaagtggatgtgacccagatatcatcacatttaatactttgataactgggctgtgccacgaagggcatgttcgaaaggctgagcattttttgagggaggccatcaggagggagttgaacccaaatcagcttagctacactccattgattcatgggttctgcatgagaggggagttgatggttgcatcagatttgcttgtggaaatgatgggcagagggcatactcctgatgttgtcacatttggagcactaattcatggtcttgtagttgctggcaaagtcagtgaggctttgattgttcgtgagaagatgacagaaagacaggtattcccggatgttaacatatacaatgtattgattagtggtttgtgcaagaaacgcatgcttcctgcagctaagaacattcttgaagagatgcttgagaaaaatgtccaacctgatgagtttgtttacgccacattaattgatggattcattaggagtgagaatcttggtgatgcaaggaaaatattcgaattcatggaacacaagggtgtctgccctgacattgttagctgcaatgccatgataaaaggttattgtcagtttggaatgatgagcgaggcaattctatgcatgagcaacatgagaaaggttgggtgcatcccggacgagtttacatatactacagttattagtggctatgctaaacaaggtgatacagactctgcagaaggcttgtttgcaaatatgcaggctgaagctctatctcctaatgtgcaactggaggttgaaagatcaggaacgttcatagtaccatctaactggaggagtggtattaatatgaccaaatctcccgcagagatctccacccaaagtgtctccaatggccactcaactacagttgatgctattgtgacactgcaagcaagattatttggcaggatgcgcaggtgtaaatcagactgcaatgtcgcttaa

SEQ ID NO: 26801 - DNA, 643 bp, Oryza sativa
  Clone ID: PAT_MRT4530_31555C.1
tttgttttgttgggtaggtgttaaagaatactttctccaagcacaaccctctttatattcctttacaaccccttctgttggtttgcttcgaaaactgtatgaaacgagcacttgatttgccccaagttgggcgccacaaaactcaaatatggcaaatgtacaaaatcaaatacaaacgcagtacacatcaaatcaatcgtacattggggatttagggttgttagtgcatcatctggccgtcgggcgtcggatcgataggaaggccatcggcacggtcactcgatttttccttggctttgactggattctttatgacgaaattgacgtattggtagcctccactggtagggccggccgccgctgcgtcggccttgtttgttggggattcctttgccgcggcggatgcctcggccttacctgccgcggatttctcagccatggcgggtgcatcgcctttgccggctgtagattccttgaccgcggccgtcgtgtcggtcttgccgggcgctgtaaattcttttgccgcggtttctgtgtcggtcttgccggataccggggattcctttgctgcggtctccgtgccggtcttgttagcagtggatttttttgttgcggcctccatgctggtcttgtgggatgcggg

SEQ ID NO: 26802 - DNA, 1431 bp, Oryza sativa
  Clone ID: PAT_MRT4530_31556C.1
atggactcttactactgttccatgctcttcttcctccctccgatactctacgtctcctaccacctcacaagaatcctcgccgacaagaagaagcccaccacccatggcctcaaggcgcacccgctgctcggccacctcccggcgttcgtcaacaacagccaccgcttcctcgactggacgacggagctcatcggggagcacgccattggcatgctcgaggacttcctcggacatggcctcttcaactccgacggcgagcagtggctctggcagcgcaagaacgccagctacgagttcagcaagcgctccctgcgcaggttcgtcgtcgacgtcgtgcaggccgaggtcgccgaccgcttcctcccgctgctccgccgcgccgccggtgatggtcgtggtggtgatatcgtcgtcctcgacttgcaggaagtgctccagcgattcgggtttgataccatctgtatggtggcgttcgggcacgacccgcgctgcctcgccgacggcagtgtcatggaggatgccaggtcggagtacatgcacaccttcggcgaggcgcaggacctcgtcgtcggccgcttctttgatcccatcgaggtctcctggaagatcaagaagtggctcaacgtcggcaccgagcaccgcctgaggaaggccatcgccgacgtccatgccttcgccatggacattgtccgcacacggcgccagagcgcgtccgtgcaagacagagacgacgtcttgtcgaggttcgtggcgagcgacgagcacagcgacgaggtcctccgcgacatcgtcctcagcttcctcatcgccggccgcgagacgacagcgtcggggctgagctggttcttctggttcttgtcgtcccggcccgacgtcgtggcgcgcatcgccgacgaggtccgtgcggtgagggaggcgaccggcacgcgccccggcgagccgttcgggttcgacgcgctccgggagatgcactaccttcacgccgcgctcaccgagtcaatgcggctgtacccgccggcgccgatcgactcgcagtcgtgcgcggcggacgacacgctccccgacggcacgctcctccgcgccggctggtcggtgacgtacagcgcgtacgccatggggcgtctcgccgccatctggggcgaggactgcttggagtacaggccggagcggtggctcggcgacgacggcgcgttccagccggcgagcccgttccggttcacggtgttccatgcggggccgaggatgtgcctcgggaaggagatggcgtacgtgcagatgaagtccatagttgcaaacgtgcttgaggagttcgaggtcgacgtcgtcaaggagatcgccggcggcggcgtgccggagcacgtgctctcggtgacgctgaggatgaagggtggactacctgtgaagattaggagaaagactgaagcttactag

SEQ ID NO: 26803 - DNA, 1949 bp, Oryza sativa
  Clone ID: PAT_MRT4530_31557C.1
acatggctgacttcaacttgttaaatttgtacaatacagtgatacgccatccttttattgattaactggcatcaattcaacccagggcaaatcatttttctgccgctgtagtctagtaggaaatggaaaatgggcaaaacaaccaaatcacaaacgttattcttaacccataagctcaaaacgaaaagagcaaaacttgaagcttaactaattataccattcagcggcaaagttcccttgtggccttctctagtaagcttcagtctttctcctaatcttcacaggtagtccacccttcatcctcagcgtcaccgagagcacgtgctccggcacgccgccgccggcgacgtccttgaccacgtcgacctcgaactcctcaagcacgtttgcaactatggacttcatctgcacgtacgccatctccttcccgaggcacatcctcggccccgcgtggaacaccgtgaaccggaacgggctcgccggctggaacgcgccgtcgtcgccgagccaccgctccggcctgtactccaagcagtcctcgccccagatggcggcgagacgccccatggcgtacgcgctgtacgtcacggaccagccggcgcggaggagcgtgccgtcggggagcgtgtcgtccgccgcgcacgactgcgagtcgatcggcgccggcgggtacagccgcatcgactcggtgagcgcggcgtggaggtagtgcatctcccggagcgcgtcgaaccggaacggctcgccggggcgcgtgccggtcgcctccctcaccgcgcggacctcgtcggcgatgcgcgccacgacgtcgggccgggacgacaagaaccagaagaaccagctcagccccgacgccgtcgtctcgcggccggcgatgaggaagctgaggacgatgtcgcggaggacctcgtcgctgtgctcgtcgctcgccacgaacctcgacaggacgtcgtctctgtcgttcacggacgcgctctggcgccgggcgcggacgatgtccatggcaaaggcgtggacgtcggcgatggccttcctgaggcggcgctcggtgtcgacgttgagccacttcttgatcttccaggagacctcgatgggatcgaagaagcggccgacgacgaggtcctgcgcctcgccgaaggtgtgcatgaactccgacctggcatcctccatgaccccgccgtcggcgaggcaccgcgggtcgtgcccgaacgccaccatacagatggtatcaaacccgaatcgctggagcacctcctgcaagtcgaggacgacgacatcgccatcgccaccaccatcaccggcggcgcggcggagcagcgggaggaagcggtcggcgatctcggcctgcacgacgtcgacgacgaacctgcgcagggagcggttgctgaactcgtagctggcgttcttgcgctgccagagccactgctcgccgtcggagttgaagaggccgtggccgaggaagtcctcgagcatgccaatggcgtgctcgcccttgggatagttggcgaagttggtgcgcaggatgtgctcgacgtcggccgggttgccggtgatgatgccggtgcgcatcccggggatccagaagcccatcctcatctccgggctgccgacgatgagctccgtcgtccagtcgaggaagcggtggctgttgttgacgaacgccgggaggtggccgagcagcgggtgcgccttgaggccatgggtggtgggcttcttcttgtcggcgaggattctggtgaggtggtaggacatgtagagtatcggagggaggacgaagagcatggaatagtagtaagtgtccattgccattgaaagacttggtagcaagctgggttgcctgcaggttgacctgtggatggaggcaagaggagtgttcatctggcattatatactgggacactggatctccaaagcaatttataattgcaatgtcaagtcgattgaacttc

SEQ ID NO: 26804 - DNA, 1548 bp, Oryza sativa
  Clone ID: PAT_MRT4530_31558C.1
atggagttctacgcctattccatgctcctcatcctgcctctgatactgtacatgtcctaccacctcacaagaaccctagccgagaagaagcccaccacccatggcctcaaggcacacccgctgctcggccacctcccggccttcgtcaggaacagccaccgcttccttgattggtcgacggagctcatcgccggcagcccggagatgaggattggattgtggatccccgggatgcggagcggcatcgtcaccggcaacccggccgacgtcgagcacatcctgcgcaccaacttcgcaaactatcccaagggccagcacgccattggcatgctcgaggatttcctcggccatggcctcttcaactccgacggcgagcagtggctctggcagcgcaagaacgccagctacgagttcagcaagcgctccctgcgcaagttcgtcgtcgacgtcgtgcaggccgaggtcgccaaccgcctgctcccgctgctccgccgcgctgccggtgatggtgtcggtggtgatgccgtcgtcctcgacttgcaggacgtgctccagcgattcgggttcgacaccatctgtatggtggcgttcgggcatgacccgcgctgcctcgccgacggcggggtcctggaggaggccaagtcggagttcatgcacaacttcggcgaggcgctggacctcgtcatcggccgcttcatggaccccatcgaggtctcctggaagatcaagaagtggctcaacatcggcaccgagcgccgcctgaagaaagccatcgccgacgtccatgccttcgccatggacattgtccgcgcccggcgccagagcgcgtccgtgaaagacagagacgacgtcttgtcaaggttcgtggcgagcgacgagtacagagacgaggtcctccgcgacatcgtcctcagcttcctcgtcgccggccgtgagacgacgtcgtcggggctgacgtggttcttctggctgttgtcatcccggcccgacgtcgtggcgcggatcgccgacgaggtccgcgcggtgaggaaggcgaccggcacgcgccccggcgaaccattcgggttcgacacgctccgggagatgcactacctccacgccgcgctcacggagtcgatgcggctgtacccgccggtgccgaccgacccgcagtcgtgcgcggcggacgacacactccccgacggcacgttcgtccgcgccggctggttcgtgaactacagcgcgtacgccatggggaggctcgccgccatatggggcgaggactgcatggagtacaggccggagcgatggctcggcgacgacggcgcgttccagccggcgagcccgttccggttcacggtgttccacgcggggccgaggatgtgcctcgggaaggagatggcgtacgtgcagatgaagtccatagttgctaacgtgcttgaggagttggtggtcgacgtcgtcaaggaggtcgccggcgggggcgcgccggagcatgtgttctctatatcgctgaggatgaagggtggcttacctgtgaagataaggagaaagggtgaatgtgtttag

SEQ ID NO: 26805 - DNA, 312 bp, Oryza sativa
  Clone ID: PAT_MRT4530_31559C.1
gtttaatataagttttaaaatatcaccactttggttattggtcaaggactaattttggttcctcctagttttcatatcactagaaaaaaattctggggataatatattttgaatgcttatcttgtttattgagctcatcaatattttaatttatgatttttgtttgggaaaaaaaaatgccttgcaggctgataacgctaaatcttcaagagctatttctatgtcttcagcagtttgcagcttggtggttctcttatcagatgagcactacttcttagggagctccatggatggatctgtaagtgcataact

SEQ ID NO: 26806 - DNA, 380 bp, Oryza sativa
  Clone ID: PAT_MRT4530_3155C.1
acaaagctggcacgcctgcatgtgccgggacgctatacagcggtcgacccactcgtgcgaggagatccgccggcggcgcttgcatgaattgcactcgacgggtaacaagctccaggaggaagatccccacggcgcacttcacggcgtcgaccttcgtcctgcggatgctcatgtcagcggtgatccagccagagctccgccacaagtacaaccttcggtccatcctatccggatggcgataacagcagacgtgagggcatctcaagggcacgaccgacggtgaatttgtgtacagattcgctgctgcgccgcctacatcagatctccacggacagagtaaaccgctgcaacgtgtaccttgggttactcccttcgaaagt

SEQ ID NO: 26807 - DNA, 684 bp, Oryza sativa
  unsure (1)..(684): unsure at all n locations
  Clone ID: PAT_MRT4530_31560C.1
gtagaggattgttgctgttgggggaaatggagacaaatggattcttgccaacccttgtgacatatggttctcttataaattggcttggaaagaagggtgatctagagaagattgggagtttatttttggagatgaggaaaaggggattttcccccaatgtccagatttataacagtgtcatagatgctttgtgcaattgccggtctgcaacacaggctatggtgatcttgaagcagatgtttgcaagtggatgtgacccagatatcatcacatttaatactttgataactgggctgtgccacgaagggcatgttcgaaaggctgagcattttttgagggaggccatcaggagggagttgaacccaaatcagcttagctacactccattgattcatgggttctgcatgagaggggagttgatggttgcatcagatttgcttgtggaaatgatgggcagagggcatactcctgatgttgtcacatttggagcactaattcatggtcttgtagttgctggcaaagtcagtgaggctttgattgttcgtgagaagatgacaganagacaggtattcccggatgttaacatataccatgtattgattagtggtttngtgcaagaaacgcatgcttnctgcagctaagaacattcttgaagagatgcttgagaanaatgtccaacctgat

SEQ ID NO: 26808 - DNA, 135 bp, Oryza sativa
  Clone ID: PAT_MRT4530_31561C.1
atgccgtcaccggtgaggcatctggccgcggcccgtcacaggtcatgccttcgtcattggtcattgtacttgaagattggagctagtgatccagtgtacaacctcatgttttgcaccgtggcagtgttgcattaa

SEQ ID NO: 26809 - DNA, 1001 bp, Oryza sativa
  Clone ID: PAT_MRT4530_31562C.1
ccggccgggacgtgtggtccggcaggacatatgcgaggcactgttcgtccaagcattcaggccgcagcacctggtccccggtggctgaggctagcagccaccctccgccccatctcgccggcgacggcggctgtcaggtatcctctgttccctctcgcctgcggccatcaggtgtcagctgtcaccatggcgaaggaggtcgatcggttcgtggagctggtggttgtccggcacggcgagacgtcgtggaactcctcccgcatcgttcaggggcaaatggatccagagctgaacgagattggaaaacagcaggctgttgtggtggctcgtcgtcttgcaagaaaagctaggccagctgctatatactcgtctgatttgaagcgtgctgctgagactgtaaaaatcatagcaaaagtctgtgatgtatcaaacttagtgttgattgaagcactaagagaaaggcacatgggatatctgcaaggtttgacgtgggatgatgctatgaataaaagcccaggcgttttcaaaggctttgctaattttgaagtcaaaaatggtttggactttgatggcagaaaccacgaatttccggatggtggagaaagtcttaatcagttaagtgagcagggcatctcctacctgaacaaagttgctcagaatcatatcggggagcgggtgattgttgtcggccatggtgctgccatactagaactctgccggcacactgatccacccaacagctcgattcgtaggaaaattcccaatacttcactgaacattttccgcatttccggcgtcaccggccggtggatccttgagaggtgtggagacgtcggccatctcagtgaaaatggctttctggagaacgcatttggcggtgatggagcctctgcctaacacattcagcggctcatctttgtcagtgtattcagtgattcaatcacccatgacttgaagtctgaaacatttttcgtttttctgattgctattttcttcggtgt

SEQ ID NO: 26810 - DNA, 327 bp, Oryza sativa
  Clone ID: PAT_MRT4530_31563C.1
acgcatccaggcaagggtgggcgtgatggagcgggatgggccctgcgacggcctttatcgctttcggattcacctaggcacgagaggggactgcccgctgccttgcgaggagtgggggtgaaacctgaggtgtggtgtgtttggttagagggggttatgcgaagggtcctgtcacggcctctttccgacgttgatctatatgtcaactttgtcgtttgtgtaccctggccggtcctggacaggggttttaatgcacattctgcttggaattctattcgggaatttctaggcgtgacacgggagctcgatctcgatgccaccgttatg

SEQ ID NO: 26811 - DNA, 811 bp, Oryza sativa
  Clone ID: PAT_MRT4530_31564C.1
ggaaaaaaatcggcctaccatcgcttctatccactcgttctctttcaactccaccaaccaccagccacatgttatccttatcccttcaacttcccaatttctctctctctctcccccaacttcctaccttctctctccgtacaacctcactattgacggagaagatacgacgacgacctcaccggcggcggctccccccacaacgagcttcgaggttacggaggaggtacgatgacctcggcggcggcggcgttcgtcgacctcgctagtggtgggcatccccgacgacaagcttcgaggatacagagaaggtaagatgacctcgccgcctccgacgtcccccacggcgagcgtcgagtctgtggaaggaggtacgacgacgacgaccttaccagcaacgacgtctccctgattagcgtggagactgtgggaggaggcgtcgtccccatccaccaaggagctcaccgagcttggccaccatgtcctcttgaaagcttcgccatcgtctcctcctaggcatgtgttgttgctccgtgctcagggctcaactctcggtttgttgcagtttggtgtgtatgtttgttgcactttgattatttgggtgtttcattatcttttggttagatgttgcataagatgtgcaatgttttttctttgatgttccacacaacaggctctcgatgttgcaattagttttttttccaatgtcgcatgtgtgtgaaacattttttactacacaatgaaacatttttcactgagtaatgaaatgtctgaaacaatttttattgaaaaaaaaaaaaaaaaaaaaaaa

SEQ ID NO: 26812 - DNA, 393 bp, Oryza sativa
  Clone ID: PAT_MRT4530_31565C.1
atggcggcggtgcgcggggttgggctagcgtcgtcgctcctcctcctcatcatcatcatcgtgtctgcaccgcacctcctcctcgcatcgctcccgccccgcgatgcgtccgccgccgcgtcggggtcgacgacgacggcagcggcggcggcgacgacgcccgtagcggcgtcaagctttccttcagaagaagctgatcatggcaagaagctcctgcacgaccacggcgaaagtgcaactagtaattcttacgatgtcgtcccatttcaaccgcactgctgcagcaaccacgacttaccaggtcaactgcgggcggtcaagtacagggttctgtgcggcaatcatcctgggccatgcccacacccaaaaacacacaaggacattcgcttttaa

SEQ ID NO: 26813 - DNA, 226 bp, Oryza sativa
  Clone ID: PAT_MRT4530_31566C.1
atcagaacgcaaaaataatcgtttcacgtgtgttatcaaacagaggagtgttcccattcaccaagtctaccttctggtgtaacgccaaatttgcatctcctctgtttgtgctatattctacttaagataaaattaaccattttgtctacatagatattgagacattctccccagtaacagaagaaaagcctagtttattctcccgtttagcttgttgatgtagtcc

SEQ ID NO: 26814 - DNA, 433 bp, Oryza sativa
  unsure (1)..(433): unsure at all n locations
  Clone ID: PAT_MRT4530_31567C.1
cggccgcccttttttnngggattttatatttacggggggtacacccattttttttttttttcattcatcctttattaacatctttttttttaatttttttttacatatagtttctcaacaacacaacggaagaacacaagcaagccttattttaccacaagaaatattaccacacattaaacaccccaaaacaaatgccggcttgctaacgcccaacccaaacgcttacaagacaaaataaaaaaaaagacacaatggtttcacaaaaaaaagggccccaaaaaccccttattttaaataaacccccccaccacacttgaactcaaaccccctcaaagagcaaaaaaaaaaaacgacttaaactacacggaaaacccccgttttcaaaagggatatgactccaaaaaaaccccctgaccaacggcttagtggg

SEQ ID NO: 26815 - DNA, 333 bp, Oryza sativa
  unsure (1)..(333): unsure at all n locations
  Clone ID: PAT_MRT4530_31568C.1
ccgccgcatcccgctcgccggtcaccggctagacgccgccgtcgcgcgggctcctgggttgccgtgtctccatcgcttccttgttggcctgttcctgcgagcttcgccctctggcttcctccctgttcgggatccgggatcgtgtgtntgcctctcggctcgctgcgccgccgccgccgccggctcgtcccgtctgtgtgtgtntatgtgcagttgaaattggagtnaatatacaatgaggctgttgaaagcggatcaagttgttcaggaaagtcattnacggcgggtggaaaaagcaatctcgactgctttgggctttaacgttggtaataa

SEQ ID NO: 26816 - DNA, 138 bp, Oryza sativa
  Clone ID: PAT_MRT4530_31569C.1
atggcggaggtcgaccgcgacgagttgcaatatggccggcgacggaagaagacatggcaggcaggacgcggcagctgctctggtggcgacttcggtggcggttctcgggcggcggcgagctcagggcgtgggcagtga

SEQ ID NO: 26817 - DNA, 246 bp, Oryza sativa
  Clone ID: PAT_MRT4530_3156C.1
caacaatattttgggtttcattttaaaaaacattccccgcccccatgaccaaggggcccgtttaaaaacggccctttttgggaacctcctgaatttcaaggggcccttttgcgcgggtggggttttccccaattcccccatttgtgccgcctttaaaactccccatttggcaccccaaaacccaagaatttccacacccaggtattgccatttttgggccccccctaattttggcatttctttttt

SEQ ID NO: 26818 - DNA, 2239 bp, Oryza sativa
  unsure (1)..(2239): unsure at all n locations
  Clone ID: PAT_MRT4530_31570C.1
atgccgatcattcctgagcaggcaatggagttcctctctcgaacatggagcccctcatcatcagatttcttccaagcattcgtgtcggtgtgcgaactgaggccggacaacctgaagtatgtcgaggctgctgacagcaagaagatgggcacagtgcttgcttccgctgctgcgctggtggccaccgtctgcgcagaggctgcagagctcgctgggaccaacaggtccggcgtgacttccgccgtgaaaactggagtcgagagctgctcctctgctgaactgctcaccctcacggccactgctgctacatgtctgagaggagctgcagcactgaaactgagggcagacgtcaggggaatcggtagcaacaacaactcagttggcaccagcactactagcatccacaaagacacaactctcagggttaggctgccttgtgggagcgtgcgactgaggaaggtggctgtctttccacagtgcgacagagtagtactgaggctggggaagaaacatctgcacggggcattctcaacctacaaaaattatgaggtgcttgacgtctccagcaacggcggcgatgtggtggtggacggcatggtgttgttcccgctggtgctcagaacggccgctggtgtggtacagctgctgttggacagtcagatgcactgcaaggtctggaagaatgccatcgagggcattctgtccgaccaaaacggttggcaacttggcccatcagaaggccaccggccgactccgactccaagtctccaactcccaccggcggcggcggcggcggcgagccgagttccccatcgccatcggtggcggcatctccgtgaccccctgctcaagtggcggcggcggagcgtgcggggaaggaggaggtggaggatggactggtcgaaccttggcggggaggggccggccggcctcatcgccgagcgcgtcctcgccaacgacgtcgccgactacatccgcttccgcgccgtgtgccggctgtggcggctgcgctcggtggatcccctctcccgcgccctggactgccgcttcctcccccggcggtggatcatgctcgacaaggcggcgcccccccgctgccgccgcttcctctacctctccaccggcgagtgcatccgtacggatctcccggagctcgagagccacaccctggtcgcgctcgccccggagggcctcctgctgctgctccaccagcgcaccctcctcctccgcctgctcaaccccctcacccgccacctcaccgacctcccgccggtcaccgcgctgctcacgccggagcaactgcgatcttggcattcggatggggggttagaagacgatccgctattggcgcgtggcgtcggtcttgcatccgcaaccacagtggctctcttcctctgccgccccaagttgatcgccgtcgctaaacccggcgatgagtgctgggccgtcgtcgtcgccgacaagaaccgcccctacattgactcggctttgcccttcgcagggcgcttctactgcgccatcggcggcagtgtcatggtgctggacagctctccttcttcagatcagatcatagagggcggccgcggctggtcaccaccgctcagccgagcaagcccttgcatttctcccggatgtcaggaactattcaccttgtggacaatggtggggagtttgatgctggtgtaccgtaagatccgccagagcaatgttgatgatgaatcgcggcaaggtgctgcgaaatacgagatgaagtatgatgtttacagggtggatttcgacgccggggacttgatcccgaggctcgcagctgacactctctacctgggattcgattgtcgtgaaaagactcagatgaacgaaatcgacggttacaatgttgcagatgggagtagcgagccatgccacctcgactccatcttccgtgagatgtcgcagcaggacggttacagtgttgcagatggaagcagcgagccatgccacctcgactgcatctttcttcagatgttgcagcagccatacagcttcgtcaactgcctctcccactgcatccagggaataggcgatcatcttgcctaagctcgcggatcatccggtggtcgttcggtggcaatctgaaccttgcatcctttgctttggcatcacttgtagcgttgttccttgcgatgaaacagcatctgtaccccccaagtaattaatttatgaagattgtnttacgcgcttatttttaaaaaaaaaaaaa

SEQ ID NO: 26819 - DNA, 180 bp, Oryza sativa
  Clone ID: PAT_MRT4530_31571C.1
atggtcaataacattcgtccgtttcattttggatgtggatttggatcctacgatttaaatgagactggcggagccgaggcctggctaggatgggcaggtgcccgagctcaagccatgcagcaaggcgtagcacctgctgctgattctattgcctattttatgcaccagaccaccagtaat

SEQ ID NO: 26820 - DNA, 1146 bp, Oryza sativa
  Clone ID: PAT_MRT4530_31572C.1
gcacgaggccgcacccgttgaaaccaaaccaaccaaccaccaccacccgccgccgcagccgccgccgccgaccgcctcgacccccatccccatggcgtcggcgtcgcggctgctgccgcccacgccacctccccactccgccgcatcccctcctgcccgccaccgccaccccgccctcgccgccccgcgctcccgccgcccgatcaacccgccgcgcctccggtgccgcgccgccgcgggggccgcagccaccaccaccaccaccaccggcggaggcgggggtggcggcgcgctggtgctggaggggagcggcgcgggcgcggtggctgtgcgggagttcgtgacgctcgacgagctccgcgctgccgtgcgactccgcatccgcactttctacgagtacgccaccgactcctacggggccgaggatctcagaaaatctctggcggaccgggagtatgacgcattacaggatcgaatttctgggaagatgatcaattttcaaagagtttcatgtataaatggaacagtcccactgttgccttctttggtgtcagcagaggagctttgttctacatgtaagtttgttgaagatggagaagagagagttgtagttggtagtttagaccttaatcagtgtctttggctaccagatgaactgaccggaaagaggcctggggtaaatgagtccagccatacaagggcttatctgagcaatgtttgtgttgctaaggagcttcaaagaaatggattgggttatgccctggttgacaagtctaagaaactggctcgtgaatggggtataactgatctgtatgtccatgttgccatcaacaatgaggcagcacagaagctgtacaacaaatgtggatttgtctatgagagtgaggagcctgcatggaaggctagatttcttggccggcctcgaaggctgcttctttggctcgatctgaagaaagacgctttgtgattatacgtgtaaatgcctttgtttatagttacgttcttcctataggatattaattaatgtatttctctcactgcctgatgccaaaagtttttaaatatagtgatctgtctcgctttcctccgtaaaaaaaaaaaaaaaaaaaaaaaaaaaaaaaaaaaaaaaaaaaaaaaaaaaaaaaa

SEQ ID NO: 26821 - DNA, 647 bp, Oryza sativa
  Clone ID: PAT_MRT4530_31573C.1
ttgcccggagatccagactgaggaggagtaagggctcatcggtatgagaatttcaagaagttgtcaaggactatctacaagtacaatcgccaagcgcggagcgcgaggctctttacttgcccctttagcccctaacgaactcgcggactacaacaacataagagttaggtggactgggtacactggctgatgaatcacactgggagggctatcttgatcacatccacactatgatggctaggggtaatgatattcgccctaatgagaatgccctgtgaggcagtgaagaagaggagaagggaactattctcaatgcgggacaaagcaatgcgtcaagccgagttgcagacaaacagcagctagtcagaaagaaagagctcatgtctgcaactttgatttccttgttgatctttgtcccctgggacagtgatacctgcttgtagcaatgtttcatggatggtactaaatctaagttatcatctgcgcacgaacatgtgctattttgttttatgttatgatcaagctgaattagatggactaagtcatgtgtaattctatttttcagttgcaacgtatgtctgttgtctatttgtgaaattatgtcgtcctagctgaacatttagttccaaaaaaaaaaaaaaaaaaaa

SEQ ID NO: 26822 - DNA, 424 bp, Oryza sativa
  Clone ID: PAT_MRT4530_31574C.1
gatcatgcagacttcattgatctgagcagcatcacagggccatgatccaaaacttgacgggttataaaatcctcccgacgcagcacaatccaaggatgactgccgcactcttaactattgtaaaacaaaaagcatgatacaagtcccagctagcacagactctctttactccgtcatcctaaacctctgacgcctcgacaggcgtcccattactaaaagccttagcccggttgccccctaggacggtgctctcctgtaatggagacttgacgaacttgctgactctcccaaagtgaccatgacggactccataagtcttgatcaggccgtcaccggtggccttgactaagctgacaatggtcttgacctattcacgggacaaggtgaagacatgctcaatgccgacgaactgcagctccttctt

SEQ ID NO: 26823 - DNA, 483 bp, Oryza sativa
  Clone ID: PAT_MRT4530_31575C.1
aggggggaggggagccgccgccgccgccccgcaccgtcgccgctgccgccggcctccccccccacggccgtgctgcccgtcgtcttcgtcgacggcgaccaaaccgtcgacctcggcaccgtcaccgtccagcccttcctcggcgtccgcaaactgcgggtcgtcgtcgccgaccgggtgggcctcgtgcggcagcagatcttggcctcgctcgcacgcccatgccgtgcgcgccgcgtccccttcaaggaggggaccgaactcaccgccgccgtccgcacgagggttccggcttctatgtcctcgccgtcctccaccgcaagcgccgcggcggccgctccggtcggcgacttcctcgccgagctgcggtcctacgtctggaaggacgacggcgaggtcatcctcaagctcccccggttgaccggcgtggaccgcctttattgtttcccccttaaaagaggatagggcgctttttataacttg

SEQ ID NO: 26824 - DNA, 123 bp, Oryza sativa
  Clone ID: PAT_MRT4530_31576C.1
atggcctcagtgattgctgcatcacttaatgagaagccaaatctagtctctgttgagtcaacttcaggggacctgctcgagaataaatcccagttcttgtaccatgagatctccatcttctaa

SEQ ID NO: 26825 - DNA, 803 bp, Oryza sativa
  unsure (1)..(803): unsure at all n locations
  Clone ID: PAT_MRT4530_31577C.1
agagatcccagttgatgctgtgttccagnaggacgagccggccggcatcattggtgtcaccaagggtaagggttatgaaggtgttgtcacgcgttggggtgtcactcgccttccccgcaagacccacaggggtctccgcaaggtcgcctgtatcggtgcctggcatcctgctagggtttcctatactgttgctcgcgctggtcagaatgggtaccaccaccgcactgagatgaataagaaggtttacaagatcggcaagtctggccaggaaagccatgctgcctgcactgaatttgacaggactgagaaggacatcactcccatgggtggcttccctcactacggtgttgtgaagggcgactacctcatgatcaagggttgctgtgttggccccaagaagagggtcgtcaccctccgccagtccctgctcaagcagacctctcgtttggcgctcgaggagatcaagctcaagttcatcgacacctcgtccaagttcgggcacggtcgcttccagaccaccgacgagaaacagaggttcttcggcaagctcaaggcttagtttgtgcggttcctcagcaaagtcagaatttgtcaaaacgatcatcactactctatacttggttctcttctcttgatattttctggggtattaagttttgtagcagatgtttcaggacctgttgatctatgaatttgtgctcccttctgctgtccctaccttaactctgttgaaccctatggattaaatctcgtaatgcggttttgctagtaaaaagttgtcaaaaaaaaaaaaaaaagcggcc

SEQ ID NO: 26826 - DNA, 106 bp, Oryza sativa
  Clone ID: PAT_MRT4530_31578C.1
ctggtggcaggtgatgacgcttaggggtgtcggcgtcagaggtggcatcgatggggtgacagatggcttgggcttggcggatcatctatgtaatgggtacgtatga

SEQ ID NO: 26827 - DNA, 310 bp, Oryza sativa
  unsure (1)..(310): unsure at all n locations
  Clone ID: PAT_MRT4530_31579C.1
ccttttttttttttttttttttttttttttttttttttttttttttttttttttttcctgacaaggncgacttgccattttattttattacacaatattattattggncanacacatacacaatatacttggaagntagcatccatatgntcttnttccccaaacacacactaattntanagtcacanaaggngngancgaagggccattttgtcagnagtaagaactactgnaaggccacccttattccaatattaagcacacatagtagtacaatcacanggcatgntttatcttcttgntgnagccg

SEQ ID NO: 26828 - DNA, 432 bp, Oryza sativa
  Clone ID: PAT_MRT4530_3157C.1
atggaggttatgggtaacttagcagggtggagatatgaggcgcggatgcacaaggagcgtgggattggtgttggagttattgtacaccgctccttggttgtcactttattccctgcaaaagggattagccttctcggcgaggtcaaccagggggatgcctatcaaggttttgtcataatcgctatgaggatcatccctgaatttaggagtgcaacctggagcttgatttctttggaatccggagatggctccaaggaggactctttagtcagactttatgatattgcgggcttagattcaggttcggcaaaagaaggttccttccttcctgacacaaatgcctctggacggggctcaacacactacccggcaaaggagaatttctacacgaagagtagtaatacgggttacagggaaaaatgggaggcataa

SEQ ID NO: 26829 - DNA, 162 bp, Oryza sativa
  Clone ID: PAT_MRT4530_31580C.1
atggccagaactgctgaagccagcggccggcaacaaggttggtgccggagaaagcggacgtcggctccggtgctggtgccatcaagatgcgacagcggtgcgaggagagttggagatagtggcctggtgacgatcaaggtgcagcgaatcaatgatacctga

SEQ ID NO: 26830 - DNA, 413 bp, Oryza sativa
  Clone ID: PAT_MRT4530_31581C.1
gtttcggcggtctaaccgacgactcatcggaccggcggcaaggcggcggtcagaccggcggaagcgaggcgaccggcgtgttccaggcgcttgggagaggcaagaaggaagatgatgggagagtcaaagatgatgatgtgaacaagaagaagaacatgaaggagaaggagaagaagaagcactgcatgcagtggttaattcaagaactcataaaagtttttgatggatctgaagatgaagatgagggcaaaggtgactcgatgcctcgggagagtatttgcggtgatggaccgggagtcggcttagtggcacggcaggcgatctcggcggttcgaccggagttcgatctcggtcagaccagcgtgttccaggcgttagaccggtgcaactacttcgaactgaaagaagaatag

SEQ ID NO: 26831 - DNA, 807 bp, Oryza sativa
  Clone ID: PAT_MRT4530_31582C.1
atgaaggatatcgtggcggggaacgaggcacagcgccaagggctggagaagcagatgctggatcagggagagcacctggagtcaatccgagatgctctccgcaagaactacaccagccttcaccagctcgtggaggagcttggcgctaaggtcacgatccctccgcatggcgatgagaccatgctggtgtcctccttgtgcgacctggtcaaggagatggagaagatccctggcaagcatgttgccaaggtcgccgagaacacctgcaccggcctgcgcacgggcgcatgtcacgttctcgcgtgtgtcaggctcgcgcaccccgagatcgacctcaatgaggtgttgaccaggggcggggctgtcgacacgcgcgaggacatgatgtcggaggtcgcagagctgggggaaacccaagggggacgtcctaatacttccaatgtcgtgcccaacaccgtgattgaggcgcccgttccagatgttgaggagaacctcttcaccaggttcgtccaaggatacgaagctaaggataggcaaatggtagacatgattcaccggtactggccagctcgctgctcccagatatcgctctactacgtacccggacagggaggacttaagtatgacggttgggagaaggcgaaatatccattctatcatccaaacgccatcagggaatcatctggactgtccctgccaaaccccaaatcagatggctgcgggagtggtattggcgacatagaattggcatttaatagccgccaacaaaacccccccacacttatctctttgctcgtccctgagtaa

SEQ ID NO: 26832 - DNA, 328 bp, Oryza sativa
  Clone ID: PAT_MRT4530_31583C.1
tcctgtatagcaggacagccgccgcccttttttttttttttttttttttttttaaagacaactttttttttgagaggccaattaataaattcctaatttaggttaaaggctaattaatagacatttgatcttcatctatctagagagtccttcttttttttgagtcaaaacagaatatcagcttctgggtgtgacacttgtttggctttccactctggaaagaaagattcattgctgcagtagcattcagcagctctgcagctgagaggggtgttaaccaactttttgtttgtacggttggttgggttctttccacgtccgcaaatca

SEQ ID NO: 26833 - DNA, 334 bp, Oryza sativa
  Clone ID: PAT_MRT4530_31584C.1
aataaatacatttcttaaacttgttcttataacattatttacaggatcaacagcctctgtggaatatctaaaaatcttccataggagcgtagggtcttacaacgggatagacataggtgaggcgctggaccaccttgatgtgggaaccctactccgacctagaaaagggcaacctcgagttaaaatatacctatgcccgaagcctgcatcaattttactgacagtaccaaactcaacacaacgtatattatccccccattcctattttttagtctgggaacaccagagaaccctggctgcgatgaatttattggcaaaccaaaaccaaaaggga

SEQ ID NO: 26834 - DNA, 227 bp, Oryza sativa
  Clone ID: PAT_MRT4530_31585C.1
aaacaagcgaacacacggtcccccccggttttccccctaattatcaatgatcatcaaactgcaccagctgccttccagggcgcccgattgagcaagcctaaattgagtattgaacttgtcaaaagaaagaacctcacagaaccgtcctgtgttgaactgcatccttagcccatctacactcaaccaaagcaaaccttggcggaccttgtggaggggcaaatagaccc

SEQ ID NO: 26835 - DNA, 231 bp, Oryza sativa
  Clone ID: PAT_MRT4530_31586C.1
aaaaaaggtttgataaaataaattaatatgtaatatacaattctacaaacatgcatgttcaaattcaacttctacaaatatataactaatataaatattcttattttttcgttcgtcacctcatatgtgcggtgatttttttgtccccctcgcctctcctaaatcttagtcggaattccatcaccccgacccaaaaaaacttcccaatcagaattcaatcaatcacacaaa

SEQ ID NO: 26836 - DNA, 192 bp, Oryza sativa
  Clone ID: PAT_MRT4530_31587C.1
aggagctgaggattctatttattgggcgctctttttttttttttttggaaaaatcattaattatttaaatataaagcaaacagttggttaaacagagtattcaagagtcgattgagctttgttcacggagacaaaatcaaagacctctcttatggactggtggttacttaatactagaaattacttagagac

SEQ ID NO: 26837 - DNA, 249 bp, Oryza sativa
  Clone ID: PAT_MRT4530_31588C.1
gataggatcaaagcatttatattaccacgactgtttaaggatggatttgaggagctctacttatacccgaaaatacagttgagggacactattttagaacagccgactgctttgccaacatggctggcaagctgagcctggcagtttacacaaagaacaggcgatcactattgaccaaacggtgacgaacgaagaaaataccgggtctttgttgtctgaagatacactaagggggtcggttggtcttat

SEQ ID NO: 26838 - DNA, 201 bp, Oryza sativa
  Clone ID: PAT_MRT4530_31589C.1
actggaaataatttgtttagctcctggtttagaatggtatattcctggtttggagatacaactgtgcagccgggatggttgttcagaatggttgggcctatgcaacagagtatgttgtatagcgttggattaatattgtttaattattacttaactgttttcttaaattcttaaatgtttgctaaatgctgcttttgcaaa

SEQ ID NO: 26839 - DNA, 180 bp, Oryza sativa
  Clone ID: PAT_MRT4530_3158C.1
ggatgccggctcaactacttcccggtctctctccccggtgctggtactgcggaggcggcaacctctcggatggcggcgagttcgggggaacctcctgaccaccctccccctggtccccctcccgacgacgctgccacttcctcccttctcctcagtccgctcccgactcatttggaatga

SEQ ID NO: 26840 - DNA, 381 bp, Oryza sativa
  Clone ID: PAT_MRT4530_31590C.1
acggggaagacgcaggaagttctgtgctccgggagaaggcccggccatggcagtctcagccaagtctgccaatataaacgtgtaatgatcagtttctgttgttggacacttggatgggatgcccgtagtatgcagagttcccaagattattaggctgattcgaggggttttgccgatttgttgtcattaccactcgaaaacctgtgaattttgaacaaatttacacgaacgtctgagtttaagtttggatttttttttaaaaaaatgattaatttatcgagtggtttttcaatttatactatgtcagctggcaggttgccacccatccctgtggcaaatttgatgttggcccaatgacttattttaaaaaaaaaaaaaaaa

SEQ ID NO: 26841 - DNA, 3390 bp, Oryza sativa
  Clone ID: PAT_MRT4530_31591C.1
atggcggcctcaagtggaatcggcgattcaggatttgcacgacgaggttggcaaacttcgtcaacagctggatctcctcggcaaaccgaagcaagcttcaccgacgacgctttcccctcgggttccgtcgacggacgaggaaaggaaggcgctgttgctgcctacgccgacgacctcttcacatcaagtcgcggcggaaggcggaagcaattgggcccatggccacggcgctcaacagaatttccggaggagggcatctggagtgaggttggggagtttggttttgaacaaggcggtagacagtataatcatagagttcctaaactagatttcccaaaattcgatggtacggaccctcaggattggaggatgagatgcgagcactattttgatgtgaacaatacttatccagggttgtgggttcgtgtagccaccatctatttctatggaagagcagcatcctggttacgttcgtctagggctcatgtgcggtttcctgtttgggatgatttttgcatagcagtttccactaagtttgatagggatcagcatgatgtgttgattaggcaaatggatacaattagacagtcgagaacagtttgggaatactatgagaaatttgatgagttgatgaaccaattgttgtcctatgatcctgtcattagcaaaaagtatctagtgcatcgctttactgaaggattgcgtcgagagattagaaatgcagtattgttacaacgtctccacgatttggagtctgctctggctattgtgtctttgcaggaggaagtgctggaagctccaccggagtctggtgtgaaggactctaaaggaggaatgcacattcgctctaattcagtattaaaaggggctttgccacttcctctaccaccaggcaaaggagttctatctgcagttggaaaggtcgatgacaaaaagggaattgatggtggtcggccagttgggggttctaacaagatgggtaaggaggtactaatactggtggattcaggcagcacaactagttttctcagttccaaggtggcagatcagttgtcaggggtacagttagttcttgctacaacacagtgcagtccaatgtcagtagattgggtacaaaagtccttggttatctgttggcagggaaaatctgtcactcttcaaggaattgtgccagaattgcaacagtgccaaatgatatccactcaacaactgaaagagttcgatgacaggagagcagttgctcattttgttcagctatgttctttggatgacaaagaatcttcagaacaaattcctgtcaagattcaacatgttcttcaagaatttgcttctgtctttgatgaaccaatgggtttacctccaactcaatcttttgatcatacaatccctcttatccctggtgcagtgcctgtcaatgtgcgcccctatcggtatacaccggctcaaaaagacgagattgaacagcaagttagggaaatgttggacaagggtataattcaacctagttccagcccattttcttctcctgtgctattggttaagaaaaaagatgggacatggcggttttgtgtggactaccgccatctaaatgctatcactgtgaagaataagtacccactgccaattatagatgagctgttggatgagttgtcgagggcacagtggttcaccaaactcgatcttagggcaggctatcatcaaattcgtatgaagatgtcagatgagcataaaactgcctttaaaacacatagtggccattatgagtttcgtgtgataccattcggcttgaccagtgcacctgccacctttcagggtggaatgaacagcatcttatctcctttacttcgcagatgtgtgctggtatttgtcgatgacatcctcatttacagtgcaactttggaagatcatgtgaaccacctgcgacaactgttccaaattctggtcaagcatcagctcaaggtgaaacagagtaagtgttcttttgctcaacaacgtctttcctatctggggcatatcatcactcctaatggtgtgtcgacggatgacgacaagattcgagtggtccagaattggccggtgcctggttcagtcaaagaattgcgtagctttttggggttaactgggtattatcgcaaatttgtttgtcactatggcatcttaagtaaaccacttactaatctgctgcgaaagggtcagttgtacatttggacatctgaaacggaggcagcctttcaagcattaaaacaagccttgattactgctcctgtcttggccatgccaaatttttctgaaccatttattgtcgagacggatgcttccgataaaggcattggtgctgttcttatgcaacatcagcatccaatcgcgtttctcagtaaggctcttggacctcgccatcagggcttgtcaacttatgaaaagaagagcttggccattatgctggctgttgaacattggcgcccttatctccaacacgctgaatttttcattcgaacggaccatcgcagtctctctttcctagatgatcagcgtctgaccactccctggcaacacaaggctctcactaaattactgggattgcggtacaaaatcatttataagaagggcactgataatggtgcagcagatgctctgtccaggtacccttcttctgccactttggaattgtctgccttgtctgttgctgtgcctgattggattcaggaagtggtgtctggttactcacttgatcctgacgcgtgtagcaaggttcagaccttatgcatcagtgctagtgctgtacccaatttttctctgagaaatggtgtgttatatttcaaggatcgtatatggattggtaccaatacagctgtgcaacagaaaattttagcaaaccttcatactactgcagtgggtgggcattcaggcattcatgttacttatcacagagttaaacaattgtttgcttggcctcgacttcgctccacggttttggagcgagtgggggaagtggcctatcgcttggtgttaccctcctccagccttattcatctagtggtgcacgtatcccaattgaagcaagctttggcaccaagtgaaacagcgtctcccaggcttcctgttcttcgtccgacaacagaggcgtctccggtaccacttcaagtcctggatcgtcgatttgttcacaaaggatccaagatggtggaacaagtgttgatcaagtggtctggcggtgaacctgccgccgtcacctgggagaatgagcaggagctacgtcgtcgctttccaactacaacaacttggggacaagttgccactcaaggaggaggggatgtcacggcggcatctgagcaaggcgttcaacctgagacggcaacagcggcccagcagcaagatcgatccaaaggatga

SEQ ID NO: 26842 - DNA, 369 bp, Oryza sativa
  Clone ID: PAT_MRT4530_31592C.1
cacttggactacaacactattaccagttgggattaaactgatgctattagcaagactacataggaaaacataaaagaagacgtggttacacgcactgttatacaagctgcctggtgcggaataaatcgataacgcaccctttgaatttagcgacagaaagcatacacgcggaccgcactcatatgggcgggggatcacgtggactaaaaaaggtaggtgacttgactgatgtcagcagcctagtgaaaaacgactttactggcgcccaatgacaatatgtgcaggagcagacatacccgtactgggggtcggctttctacacttcacaggtggccaacatgtatgggtacttctcgattgcaacgatga

SEQ ID NO: 26843 - DNA, 4152 bp, Oryza sativa
  Clone ID: PAT_MRT4530_31593C.1
atgtcgttgaacaacaagcaagcggagactcaggcagtcgtcgcgaagctggatgcaggagtcggtgggtggcagcctcaagtggagtcagcgattcaggatttgtgcgacgaggttggcgaacttcgtcagcaactggatttccttggcaaatcgatgcaagcttcgccgacgacgctttcccctcgggttccgttgacggatgaggaaaggaaggcgccgttgctgcctacgccgccgacatcttcgcatcaagtcgcggcggaaggcggaagcaattgggcccatggccacggcgctcaacagaatttccggaggagggcatctggagtggtgaccactctgatcccaactctagacaaggctacgtttgaatctcattcagttcctttgcactcgttggagaatttcaaatctgattcggaggttggggagtttggttttgaacaaggcggtagacagtataatcatagagttcctaaactagatttccctaaattctatggcacggacccccaggattggaggatgaggtgtgagcactattttgatgtgaacaatacttttccagggttgtgggttcatgtagccaccatctatttctatggtagagcagcatcctggttgcgttcgtctagggctcatgtgcggtttcctgtttgggatgatttttgcatagcagtttccactaagtttgatagggatcagcatgacatgttaattatacaaatggatacaattcgacagtcgggaacagtttgggaatactatgagaaatttgacgagttgatgaaccaattgctggcctatgatcctgtcattagcaaaaagtatctggtgcatcgctttactgaaggattgcgccgagagattagaaatgcagtattgttacaacatccccgcgatttggaatctactctggctattgcgtctttgcaagaggaagtgctggaagctccaccggagtctggagtgaaggactctaaaggaggaatgcacattcgctctaattcagcattaaaaggggctttgccactacctctaccaccaggcaaaggagttctatctgcagttggaaaggttgatgacaaaaaaagggaattgatggtgttacacgcagttcaggaattattctctgttttggatgcaattggagagagttctttttctgaatctgctgaattgattacgtctgaagaacaagtagtaatggttgtaccagttcacgcaatacaaggggcagaacatgtgggttcaatgaggattttgggttatatccaaggtaaggaggtgctgatactggtggatttaggcagcacagctagttttctcagttccaaggtagcagatcagctgtcaggagtgcagttaattcctactatagcacagtgcagcccaatgtcagtggattgggtacaaaagtccttggttatctgctggcagggaaaatctgtcactcttcaaggaattgtgccagaattgcaacagtgtcaaatgatatccactcaacaactaaaagagttcagtgacaagagagcagttgctcattttgttcagttatgttctttggaggacagaggatcttcagaacaaattcctgtcaagattcaacacgttcttcaagaatttgtttctgtctttgatgaaccaatgggtttacctccagctcgatcttttgatcatacaatccctcttgtccctggtgcagtgcctgttaatgtgcgcccttatcggtatacaccggctcaaaagaacgagattgaacagcaagttcaggaaatgttggacaagggtataattcaacctagttccagcccattttcttctcctgtgctattggttaagaaaaaatatgggacatggcggttttgtgtggactaccgccatctaaatgatatcactgcgaagaataagcacccattgccaattatagatgagctgttggatgagttgtcgggggcacagtggttcactaaacttgatctcagggcgggctaccatcagattcgtatgaagatgtcggatgagcataaaacagccttcaaaacacatagtagccactatgagtttcgtgtgatacctttcggcttgaccaatgcacctgccacctttcagggtgtgatgaacagcatcttatctcctttacttcgcagatgtgtgctggtacttgtcgatgacatactcatttacagtgcaactttggaagatcatgtgaaccacctgcgacaagtgctccaaattctggtcaagcatcagctcaaggtaaaacagaggtattattgcacatttgttcgtcactatggcatcttaagtaaaccacttactaatctgctgcaaaagggtcagttgtgcatttggacatctgaaacagaggcagcctttcaagcattaaaacaagctttgattactgctcccgtcttggccatgccaaatttttctgaaccatttattgtcgagacggatgcttccgataaaggcattggtgctgttcttatgcaacaaaagcatccagttgcttttctcagtaagtctcttgggcctcgccatcagggcttgtcaacatatgaaaaggagagcttggccattatgctggctgttgaacattggcgcccttatctccaacatgctgaatttttcattcggactaaccatcgaagtctatcttttctggatgatcagcgtctgaccactccctggcaacacaaggctctcactaaactactgggattgcagtacaaaatcatttataagaagggcactgataatggtgcagcagatgctctgtctaggtatccttcttctgccactttagaattgtctgccttgtctgttgctttgcctgattggattcaggaggtggtgtctggttactcgcttgatcctgatgcttgtagcaaggttcagaccctatgcatcagtgttggtgctgtacccaatttttctctgaaaaatggtgtgttatatttcaaggattgtatgtggattggtaccaatacagctgtgcaacagaaaattttagcaaaccttcatactgctgcagtgggtgggcattcaggcattcatgttacttatcaaagagttaaacaattgtttgcttggcctcgacttcgctccacagtaactcaatttgtcaactcgtgtgatatttgtcagcatgctaagtctgaacatgtcagatatcccggcatgttacagccacttccagttcccgaacatgcttggcaaatggtatctcttgacttcattgaagggttacctcgctcagattctttcaactgcatattagtggtggtggacaaattctccaaatatagtcattttgtaccgttggctcacccctttactgcccttgatgttgcagaggcttatatgcagtacattcataagttacatggtcttcctcagtctctcatttcagacagggatcggatttttactagcacattatggacttccctctttaaattggctggcacccaattaaggatgagttcctcttatcatccgcaaactgacgggcaaactgaacttactgcagcttgtcagtctactgagcttgctgattggcttcatgagcgggagaaaatgcaaactctgattcgggatcatctcctgcgtgcacagactcggatgaaatttcaggctgacaatcgtcgttccgaacgagtttttgttgtgggcgattgggtgtatatgaagctgcagcccttcgaacaacagtcagtggttttggagcgggtgggggaagtggcctatcgcttggcgttaccctcctccagccttattcatccagtggtgcacgtatcacaattgaagcaagctttggcaccaagtgaaacagcgtcgcccaggcttcctgttcttcgtccgaaaccagaggcatctccggtaccacttcaagttatggatcgtcgatttgtacgcaaaggatccaagatggtggaacaagtgttgatcaagtggtctggcggtgaacctgccaccgtcacctgggagaatgagcaggagctacgtcgtcgctttccaactacaacaacttggggacaagttgccactcaagggggaggggatgtcacggcggcatctgagcagggcattcaaactgagacgtcaacagcggcccaacagcaagatcgacccaaaaggatgtag

SEQ ID NO: 26844 - DNA, 183 bp, Oryza sativa
  unsure (1)..(183): unsure at all n locations
  Clone ID: PAT_MRT4530_31594C.1
gaggcaaccgaatataatgattctagaaatnttgcggccaagttgctcgcagcataacggaagctggctcgaatcactagtggtccctggaggaaaactagcaactgaacatgtgctaaacttatagggatgtgcaatacactctggtattcctcctctacgtggtggtaagcaaaggtgaat

SEQ ID NO: 26845 - DNA, 117 bp, Oryza sativa
  Clone ID: PAT_MRT4530_31595C.1
atgaatcgggccaaccccggggagaagccggttgcgggtaacccaggaaagacaagtgagcaaaaggccgccaaagcgccgaaccgtaaaaagccccgttgctggcgtttttcaaag

SEQ ID NO: 26846 - DNA, 5376 bp, Oryza sativa
  Clone ID: PAT_MRT4530_31596C.1
cctctggcaagctacaaatatttgattaatagtaaagtacttaaggttcaaaccgcattacatccattgacagcaccagatcataataaaagaattgcctcaagatttttcatgttaaaaatgagatacctaaagctgacaagagaagattgatgtaaatatcataacagccctaaaaaattacatgtgttttctcccatgggcaactactattgcactggttagcgcccactcttccagcttcataacaaaatgccggcggtgtgtgcgctactgcttaggacgttgatggccaaagcaatattgatctttgcagtctgatactaacttcagttccttctagacaggcacagttagactttcgccttcaaaaaaaagtccatacacatggctgttcgatggaatacccttttcctttctctccacgtcctgtttgtttcgccatgacaacgtagatgttttattaaaatgaaccttacatttgttttctcccactggctattactcttagcactagctagctccaactcgtacctggcctttttcaaaagatagccggtttcctgtgaggtcgtgaatatctgttcgttgtttctatcagtcctcatgggctaaggaatcaaatctataactgaactggcgatcatttatgccagcagccgatgttgcctttagagcaatcaaaagagatctgtgcatgacactaagatcttctccatggtaagagtctgcatcatgcaatatttgcataaggtaggacttaaatttatgagctttctcagcaatttcttctaataaatccaactcctcaatccctgaatagaaacccttggcaaaagagcggagcccgattaatgcaggaagtgctggacgattccctttagatatcttctcctgtagtctattctgtaatgggtccccactttctaaatgaaagcaaaaaggacaggtccattcacgagtcacttgtgtagaagcaggcagtggttcgacacaggagctatgatacctcgcttgacatatcatacatctaggggtaatatgatctcccacatcacaagagcagatggcacataatcctttctggttacagtcggaatataacatacaagcattgtccattgatcctctaatcttcagaagcgcggagagcaaagaatcactgttattgccatcaggaaacagagtacagtggcagtgagtaagccactcctcgatctttttaatctcagcaaccaccttatccatctcagtacaatcgaatgccacagactgaccactgtctctcaagcttaatagtccatcccaagattgatgatcaggaaacatgaagaaggcattgcattgttctgcccatgaattgtgcttgttgatagcatcctcaagtttggcaatcatcataggataaggaacagcaatttcctgatcaccaacaagtgcatggaaaatgagatatatcagtttgaactttgaaatacttgccttatactccgctaaaatattttcaacatttaacaatctggatgtttcagacatttctgaaccaggaagaaacataagtgcttttcttagccaagatgatcccctcaccaatagttcagctaaggaacaatccgacaatgaggcaggaaggttgacagcttgttgaattaatttttcagcatcctgcaacaaaggagtcacaccgcagaaagacaatgcattcaatatccatccaagtgtgaaaaaagaatccttcagctcatgaacaaccttaaattcaaaaccgagagatagtcctttttctatttctgcattaattttatcttgcagctcctctagttttcttttaagtggatcaatagtagagtcgattacatttgaatccagtaaggatcttgaactgtgtatcagacttagtgaattatgctcccattctatgacattgttgagaacagaattaattgcagaagtgtcaagaatgactttcatacttgcaggctggccgattaaatcctttaggtcatcaacattaagaaaacctccagatgcaggtttatcacttctaggcctcagataggcctgacatttgtccatccacaacttagcagtagcaacctctgctttcatatccagttcagatggaaggataacatgtatgttctctgagcacagaatatggttttcaaactcagggagagcagctgagtgctcaagaataaagctagccttctcttcccaagtgatggcagctttgaggttatgggacagatcaacaaatggttgctcctcttcaatggttaatatggaagcttctttcagcacttctttgaccacctccatagatgtttgtgttgcaagagcctcggatgcttgcttcctgcagaaggatttctttagctcttcctcaacaacggaaaattcctcaaacaacatgccttttactcctagtgattctccatccttcagaatgccagtcaactcctcaacaatgttgtcataatcattcctttcaagaagtttgccgactatgttattagcatgattgacccatgagcaagcacctgaataccgttgcatcagaatgttcagctctggaatactgaagttggcaccatccaccacaagaaggaagctctccaactcctcagatttcagttcatttaggaaatctatgtcgacgatgccccgtttattctgttcaaggcaatcacatgctttcttcaaccaggactttgcggaagaaatctcacaagacagtgctgatgtttctgttagttcaaccgggaactctaaagccctagagtacagtgtttccaagtaatcaacctttgagcgagatgataatgcattgtttatctcattaatcattatttctcctttgtccacatatacctgcaattgtgcaagacttggttcataacatggtttgcatcttacagcagctaattctttgatttccacataatttactttctcggaacaattctctttacaatgaagaaagccatcaatttgagagaggcattttctaacactggaagcccatttcctaccttctattaattttgctgacatattccgcacagaatccatattatgatcaccccaaagaaactgttcagcatcttctaaggcagtggcatatgcagtatctaaaaatggcatatggagaatatggtcagcttttgaaagccagtcttctgcaagttgtgtatatgacatatactgatctttgtcctttctcgttggcaaaaaaacatcactatgtaaaagggagttctgcttaacattctcccttggtagattagcctttgagacctcacaaactaaatcacccaactctgcaagggtatggcggtaaagtaagcgatgtttctctggactgcattcacaaaggtgcttccagtgctgggaaaaagagaaaatgctcttaataaacttggctaatatcaatgggatgagtgcactgtcaatgtcacatgacatgagatggcgatatactagtaggtctacctcttcacttccaatgaagtttggattattcttcggtggcatcagattggatttgacaatcccagtaatccatagctcctcacgacattttttctccttcacaaatagcctctctatttctccttgtaagtagggaagtgattcattgtccacgccgttctttgcaaccacatacaaaagctcctcatgtgacaaaacaggtgctttacggtacaggcgatatagttcagcaccaatgccaccatgaggtaaccaatcggcaggagcaaaatttacagcctcagcacaatttaaaccaggttcctgtatcacactataaacaggaacaccatttgcttgtaaaatcgatggactcagcatcgtgacaaggtgaaaaagcaggtcaggctgtgcatcaaatagatcaggcaaagcattgcgcataacctgcagatcacaaaaggttaagtattctaacataacaagtctcagtgttgccttctcaaaagcatttgcttctgctccaggtaccccataccaacatttcggctcacccacgtgcatggagtaactgtgtaggtgaaaaagactagcactcacagcggctctatgattagacatcagatgaccagcaatgttatcccggactgtctgaagaactgagcctggtaggtttgggaaattattcagattccatgggctcgagcaatacttgtgccacataactgggtccaccgacgatggcacgggatcacaaaggcgaggaaacccacttccataaattgaagtgtccaaatcactcccatacataacctcaagctctcctacctttccctctacaatctcccaaaattgcttctcaacctgaacacgactgggattcttgtgtccaaaccacctttttctcaccctctcctcaaatttccggaaagtttcaacttggcaagtcttcctcctgtggacaaatccaaaacaattcctatcagagttcatgcactctgagcaataccagtttcccggaggcacactctcgagtggtggagacaagcaatatagatgccatcccttatcacagcgatcacagagcagcatgacttccccatgcaagccactattacactgctcacagacctgatccattgcctcattgaccacagtagccgttgcatcaacctttctccttttctgcttgggagcagatgctgcagttttggcactagtgctgcctccacagtgtcccattgtgttgctggttttcctaagccttttcttctggcgcctaatactaatattagcagaggaagcagaaaccggcggttgatcatcatgtgattgtgatggcaatctgtttgtgaagtgctcatattgatagagatgctcataatagagctgcgcgatgacgtgctcggagacggagaaggcatgcctcggcgccttgtcatcaacgaggcggagcacgtcggcccagcgcttccccgcgcaggcgccgtcgtagccgccgaagcgcttgacagcgtggaaaaggcggcagaggtcgagcgggcgtccgtcggagagggcaggcaactttggctttggcttcttgcggcctcggtgtcggtggaggaaacggcggtaatcgaggaggaaggtgtcgggatcagcgggggcgaggcgggcgaggaggcggtggatgggctgcctctttgtggggaaagagagggtgcagacgtcgagtgccgggggaggagaccaggagggcggcgggacgatgcggcagatgccgtatggctcggcgaggggccggatacgggccacgtacgccagggggtcgccgaactcctcctccgtggggcggaacaccggagcctcagggacggaagatccaacgccgctgcctctggctgcggcggagatccccat

SEQ ID NO: 26847 - DNA, 208 bp, Oryza sativa
  Clone ID: PAT_MRT4530_31597C.1
tttttgtttacaagtcaaaaatagtagtagtagtatacataaggtccacaacatcagctaattaagttactccttttttggcttattatttcatatgcactggtgttaaaattcctgcggcggaacaagacttttgctttttcggctggaaagattgtgttgtgctgctgatgcttcatggaaagattgagctatccccacgcgtccg

SEQ ID NO: 26848 - DNA, 789 bp, Oryza sativa
  Clone ID: PAT_MRT4530_31598C.1
cggaattcccgggtcgacccgcgcgtccgaaattgagtgttatagtgagatggcatcggagatgagcaagaacgtgaaggtcaccgatgatcaagaggttacatcacaggagcgtgaccaaagtggtggtacaaaagtaggtggggaggaggaaattgctccactggcgcggcagtcgtcaatcctctccctcaccttggaagagctacaaaactccttgtgtgagccaggacgcaactttggttccatgaacatggacgagtttgtggctaacatatggaatgctgaagaattccaggctaccaccggaggttgcaagggtgccatggaggaagccaaggtggtagacagtggaagcggaagcggtgatgcaggaggaagcggtttatgtcggcagggatcattttccttgccgctaccgctgtgccagaagacggtggaggaggtgtggactgagatcaaccaagcccctgcacacacctccgctccggcctccgcgctccagccacatgccgggagcggtggtgttgcagctaacgaccgacaggtaacactaggtgagatgacacttgaggatttcttggtaaaggccgggggtggtcccgagggtcctttaccgggcaagcggccatgggatctggcatggtcaacgggccggtgaaccccatgcagcagggccaaggcggtcctatgatgttcccagtaggaccggtaaacgccatgtatccggtgatgggtgatggcatggggtaccccggtgggtacaacgggatggcgattgtgccaccg

SEQ ID NO: 26849 - DNA, 123 bp, Oryza sativa
  Clone ID: PAT_MRT4530_31599C.1
agaagcatcgggtttccaactcaactaaaaatggcaaaatatccatagtttgggggggttgtataagtaatgcatatgtaaaatggtatgatttgatcattcatggccaaataggggctaaca

SEQ ID NO: 26850 - DNA, 683 bp, Oryza sativa
  Clone ID: PAT_MRT4530_3159C.1
atggagccgcaatctattttccaattatctgctcctcagggcgaattttacgagccacctccttcatcggagcctattttaacacctggcaatgaaattcgtctcgaattcatccgtatggttagggagaaatctttctatggtttaggccaggaaaaccgctacatcatctgcaggaattcgaggcatgaagcaagagactgttcggtggaaattatttccattctcacttcatgggagagcgaaacaatggtacatatttaccgtcgggtgtgcaaacagtgactgggagaaattgcgagacaggttatgcctcccatttttccctgtaacccgtattactactcttcgtgtagaaattctgagttatagggagtctgcattctaccttgacataactgttggagggtcattcatgcacaaaactcccgcgaaggcaaggaaattctcgatcgcatatcggaaaatacctcctttgccgggtagtgtgttgagccccgtccagaggcatttgtgtcaggaaggaaggaaccttcttttgccgaacctgaatctaagcccgcaatatcataaagtctgactaaagagtcctccttggagccatctccggattccaaagaaatcaagctccaggttgcactcctaaattcagggatgatcctcatagcgattatgacaaaacc

SEQ ID NO: 26851 - DNA, 259 bp, Oryza sativa
  Clone ID: PAT_MRT4530_315C.1
cgcaaggctagggcggcggcggcggcgcacgacgacgcacagcggcagcggcggctcagaagaggcgacgcggcggctcggcaggagtgcggcagcggcggtagcggctcgacagcgcggcggcaaggcgcggcagcggcgacacggctcggctctagggcacgagggattcctcactagggagcgaaaaccggagagggacgacgacggcgtcggtggcggttccggcggcaacacccaggatcgacgacgacgctag

SEQ ID NO: 26852 - DNA, 750 bp, Oryza sativa
  Clone ID: PAT_MRT4530_31600C.1
ttattcttcaagttgagctataagatcaatcttgcgagcttcaagcagatctatgttcgactgaatcggcccaacagagagttgatcaagcttagctttctcctcatgcacgagttgccgattggcttggatagtggcttcaatgtctttccgttcctgccgatcggctatccgttgcttagccttttccagcttgaattggtattgctcaaggaatactgctggagtaatggtgtttaccagatcgtctggaattagggcttggatttctgcaaatcgtgcccgaattgaaccacagtcggtcaccagattatccaatgatgactgtagccgaagggatatgtcttcaagtgttttctcaactgtttcatccaaaggggctagagccttgcttgtggtttcttcttctgcttcttcatcaaagtaatctgggatggcaggagcggctgattgttcctcttcctcaatattatgacttcctatagccgatggagttcggtcacttgacatttgctgtataggaggtgaaggaggaggaggaggtggtggagctggcttggatggtgctgctgccgatttcttcttcacagcagtcttctttttccttgaaaagtgagcaggggcagcaagagttggaggagtttgcttgggtaaagccaatggtgttttttctccggcatcactcaattcggataccgcaagacacagccccacgacacgtttccgtgtgctgacatgccaccacgacat

SEQ ID NO: 26853 - DNA, 1167 bp, Oryza sativa
  unsure (1)..(1167): unsure at all n locations
  Clone ID: PAT_MRT4530_31601C.1
ggatcctttgtcagcagaaatttttttgggataaatcagaaacatatgaatttgatgaagtgcttacagagtttgcttcacagaagagagtgtacgagagtgttttttgtattttgcagagtgttttggagggatacaatggtaccgttatggcatatgggcagactggtactgggaaaacgtttacacttggaagacttggtgaagaagatactgctgcacggggaatcatggtccgtgcaatggaggatattttggcagattatagccattgtagaagatccgaggacaggggatgtttcgttacctggggctacagtagttgaggttcgagatcagaagagttttgtagatcttctaaggattggggaggctcatcgtgttgctgcaaacacgaagttgaatactgagtcttctcgtagtcatgcactcctcatggtaatcttggtgggttcactccgaccacctattgttaggaaaagcaagcttgtggttgtagacttggcgggatctgagcgaatagacaagtcaggaagtgagggtcatacattagaagaggcaaagtctatcaacttgtccctaagtgcacttggaaaatgcatcaacgcgctagctgaaaacagcccacatgtaccagttcgtgattcaaagcttacaagattgcttaaagattcatttggaggcactgcaaggacatcattggttgtgacaattggtccatctccaagacatcggggtgagactaccagtacaataatgtttgggcaaagagcaatgaaagttgaaaacatggtgaaactgaaggaagaatttgactacaaaagcttatgtagaagacttgatattgaattagataagttaattgcagaaaacgaaagacagaggaaatattttgatgatgaaattgaaagaataacagcagaagctcaattgcgtgttacggaggctgaaagagatacaaaatttctctagagaatgagaaagcgaagtaccatcaggaataccttgactctataaagatactggaggagaaatggaaaatacaccaancatcacctaagaaactgattaaagaaactgaacctacatncagtgaggtaggagaagtgcagaactttactgcagatgagaaagtgtgcgccatctgctgaagatgaggctatgacc

SEQ ID NO: 26854 - DNA, 863 bp, Oryza sativa
  Clone ID: PAT_MRT4530_31602C.1
atggatcgggcatggatgtatgacacaaaaagaactcatccggcgtgcttgaaggaaacatccaaatttgttgatcaggcaaagacacatgctttgagggagaacaggaggaccatttttgtccatgctttgattggaaaaacgaaaagatgctacaagacccgaaggatatttttggccacattgtagagcgtgaatttaaggatgactacaaggtatggacttgtcatggggaagtcgccgttcgtaatgaagaggttgatttttttttgctttgatcgggagaaaattttataatcgaagatatgtcccagggaacgatcctggaatttggttgttatggtatagatgatgcaaatattgattttgatatggaggatatgttgcggcacgttgaaccagaggtcctaactggtacaaaacgaggcttggacaattgagaagcgttagaaaaagcaatgaaggaccttctttacgacgaatcaaaaggatgtgacagtgactctacggtgttggcgtgttgcgctctgtgcttgaacttctcagattgaatgccatacatggatagtctgacattaattagcttcaacgatttgatggatttgttgagagatatgcttcttaagccaaacttgttgccgaccagcatatatcaagccaagaaactaatatgtctattagctctaggtgttcaaaagattcattcatgtgttaattactagacattatacagacacatataccccagtgtatgttgtgtgaaaactagtggctagcagagaactcccgccggcgaaggccaaggtagacggggccggtggaatacaatgctctatggagaggagtaagggcaaatatgacgg

SEQ ID NO: 26855 - DNA, 524 bp, Oryza sativa
  unsure (1)..(524): unsure at all n locations
  Clone ID: PAT_MRT4530_31603C.1
ccagcttttaatgaaggggattgcttgtgttatgaatgggctatcgaacttgttttgacatattatcatatcatatagaaatagagtttttagacagaatgaatcaactcacttatttttctttgctcgtcattttttgatatctatgttcggaaaagggaagatagccctgttgagaaatgcaaggctgacagatgtcctactgtgccatgacacaacggatagcggacggaagcgaggaagggggaagtagaccctaccgaccgcatgccgaaaatgcatttatcctttgaattactcattgaatggaatttcgcactggaaacttttttaggagaagttcgaatccgtttcgtttggatattgattggtcttggtttgacatggtttacgtgttactggttctcggaagagttaatttttttattagctaaaccctttcttaccctacctttggactcgtattttgtttgtcacaaattgatattattcaaggacatgatgtctttttaaaaaaaaaaaan

SEQ ID NO: 26856 - DNA, 484 bp, Oryza sativa
  Clone ID: PAT_MRT4530_31604C.1
cccacgcgtccgcccacgcgtccgcccacgcgtccgcccacgcgtccgctcagagagagagagagagagagagagatgcggcgtggcagcagcagcagcagcggtttcggtggccatctcctgtggctggtgcttgtattgtggtcatggcggatcgctgccgctcaagctcagcaagcaccaaaaactgatccaatcgaagtgtcagcactaaacacaataatggggagatggggcctgacggcaccatcggaatggaacatcagtggtgagccctgcagcggtgtagcctctgacaattccgactgggataactacccaaaagaccctgccatcaagtgtgactgctcttccaacgacaacaccatctgccatattatcaaactctgcacatacaaggtgttcgatgcaatatgcctgaaataggagctacagaatctcacctttctacaagacctgaacctgaatcagaattatttgactg

SEQ ID NO: 26857 - DNA, 3981 bp, Oryza sativa
  Clone ID: PAT_MRT4530_31605C.1
atggcgtcgataaagtatgatctaccgctgctagactacaagacgagattctcgctgtggcaagtcaagatgcgggctattctggcgcaaacttcggatcttgatgaggcgctggaaagcttcgggaagaagaaatcgactgaatggaccgctgaggagaagcggaaagatcgtaaggctctgttgctgatccaacttcatctatctaatgatattttacaagaagtgttgcaggaaaagactgctgcagaactttggctcaaactggaatcgatctgcatgtctaaagatctaaccagtaagatgcatatcaagatgaagttgttctcgcacaagttgcaggagagtggttctgtgttgaaccacatatcggtcttcaaggagatcgttgtagacctagtgtcgatagaggtacagtttgatgatgaagatttaggtcttttactgttatgctcactgcctagttcatatgcaaattttcgtgacaccatacttttaagccgtgatgaactaaccctagcggaagtttatgaggcgctccaaaacagggaaaagatgaaaggtatggttcagtctgatgcgtcgtcctctaagggcgaagcattgcaggtcagaggcagatctgagcagagaacctacaacgacagcagtgatcgtgacaagagccagagtagaggccgttccaagtccagaggtaaaaagttttgtaagtattgtaaaaagaaaaatcacttcattgaagaatgttggaagctgcagaataaggagaaaaggaaatctgatggtaaggcctctgttgttactagtgctgaaaactctgattcaggagattgtcttgtcgtttttgctggttgtgttgctagtcatgatgaatggattcttgatactgcatgttcgtttcatatctgcattaacagagattggtttagttcttacaagtctgtgcagaatggagatgttgtgcgcatgggagatgataacccacgtgagattgtgggcattggctccgtacagatcaagacacatgatggcatgacacgcacgctgaaagatgtgagacacataccagggatggcgagaaatctcatctctctcagcacacttgatgcagaaggatacaaatactccagttcaggtggagttgtaaaagtatcgaaaggttctctcgtttatatgattggtgatatgaattctgcaaacttatatgtccttagaggaagtacattacatggttctgttaccgctgctgctgtttctaaagatgaacctattaagactaacctgtggcatatgcgtcttggacatatgagtgaacttggtatggcagaattgatgaagaggaacctgctggatggctgcactcagggtaagatgaagttctgtgagcactgtgtttttggtaagcacaagagggtaaaattcaatacctcagttcatcgcaccaaaggtatacttgattatgtacatactgatttgtgggggccttctcgtaaggcctatcttggtggtgctcgttatatgcttaccattattgatgattactctagaaaagtgtggccttatttcctgaaacataaagatgatacatttgctgcttttaaagagtggaaagtcaggatagaaaggcaaactgaaaaggaggtaaaagtacttcgcactgacaatggtggtgaattctgttcggatgcttttgatgattattgcaggaaggaaggcatcgttaggcatcacaccatcccgtacactccacagcagaatggtgtggctgagcgcatgaacagaaccatcatctccaaggctcgttgtatgctatccaacgctcgcatgaacaagcgtttttgggcagaggctgctaacaccgcctgctacttgatcaacaggtcgccttctatcccacttaataagaaaactcccattgaggtatggtctggtatgcctgctgattattcacaattgagagtttttggatgcactgcttatgctcatgttgataatggaaaattagagcctagagctattaagtgtctgtttcttggttatggttcaggagtaaaaagatataagttatggaatcctgaaactaataagaccttcatgagaaggagtgttgttttcaataaatctgttatgtttaatgacagcttgcccacagatgtcataccaggtggttctgatgaggagcagcaatatccacaagatgaacctattgcacatcgcagaacaaagaggagttgtggagctccagtccgccttattgaggaatgtgatatggtttattatgcttttagttgtgctgaacaggtggagaatactcttgagccagccacatatactgaagctgttgtttctggagaccgtgagaagtggatctcagctatgcaggaggagatgcagtctcttgagaagaatggcacatgggagcttgtgcacttgccaaaacagaagaagcctgttcgttgtaaatggatcttcaagagaaaggagggcttatcttctagtgagcctccaaggtttaaggcaagtattgttgctatgcatgatcttgagcttgagcagttagatgtgaagacagcatttttatatggagagcttgaggaggagatatacatggaccagccagaagggttcatagtacctggtaaggaggattatgtttgcaagttgaaaagatctttgtatggtttgaaacagtctcctcgtcaatggtataaaagtggatcacctatatacttgctgttatatgttgatgatatgctgattgctgccaagagcaaggaacaaatcactacattgaagaaacagttgagtagtgagtttgatatgaaggatcttggtgctgctaagaaaattctaggtatgaaaatcactagagacagaaattctggtttgttatttcttagtcagcaaagctacattaagaaggttcttcagcgttttaacatgcatgatgcaaagcctgttagtactcctattgcacctcattttaaattatcagctttacaatgtgctagtactgatgaggatgtagaatacatgtctagagttccatattctagtgccgttggttctttgatgtattccatggtttgttcccgtccagatttatctcatgctatgagtttgattagtagatacatggcgaatcttgatttggataagagaaggtcactcacaggttatgtgtttaccattggtagttgtgctgtgagttggaaggcaacattgcagcctgttgttgtccagtctaccactgaagcagaatacatggctattgctgaagcatgtaaagaatcagtttggttgaaaggattgtttgctgagctttgtggagttgattcttgcattaacttgttctgtgacagtcaaagtgctatctgccttactaaagatcatatgtttcatgagaggtcaaagcacattgatatcaagtaccattatgttcacgatgtagtcgcgcaagggccagtcttcaatgaccatttgtacccaactgctagatgctacactgaggataggtttcaagggcatttgaagcacatatgggaggcaagaccttatgcaatggagtacctagagaagcaccacactaggatctggtacatatgtggcttctcaaagatgaagaccaagggcctgaaaggattgttggtacatgagatggttgatggaattagagagatgataatggagaaatttgcacttaggagagattgtggcaaaaagatggaagatggtatcctaccaaatatgatgaaggagttaaacaattcaactggtaatctgaaggttatcaagatgcctagaaatgatgatgtatttgctgaagttacactggttgagagtgataacagcactaagagacatattgtggacttggatagccagcactgctcttgtagagtatggcaggtcacaagaaagccatgcaagcatgccttggcttggatttgcaccaataggggcaagattcaggctatgtaa

SEQ ID NO: 26858 - DNA, 1808 bp, Oryza sativa
  unsure (1)..(1808): unsure at all n locations
  Clone ID: PAT_MRT4530_31606C.1
atggcgcctcctccgtctttgctcgccaccgcgcttctcctcctgctcctcgccatcgccggcgggccaaatgccgccgccgtcgccgaggccgtcaggtaccagaccctcgtcgccaccccgctctcgccgcacccgtacaccgccaccgccgtggaggatgacggtctgttccaggggagcctcgccgcggacgagggcggcgccgccgcgtcgacggtggggctacgcgtggtccaccgcgacgacttcgcggtgaacgccaccgcggccgagctgctcgcgcaccggttgcggcgggacaagaggagggcgtcgcggatctccgcggccgcggggggtgctgcggcggctaacgggacgcgtgtcggcggcggcggcggcgggagtgggttcgtggcgccggtggtgtccgggctggcgcaggggagcggggagtacttcaccaagatcggggtggggacgcccgtgacgccggcgctcatggtgctggacaccggcagcgacgtcgtgtggctccagtgcgcgccctgccgccggtgctacgaccagtccggccagatgttcgacccgcgcgcctcgcactcgtacggcgccgtcgactgcgccgcgccgctctgccgcaggctcgactccggcggctgcgacctgcgccgcaaggcctgcctctaccaggtcgcctacggcgacggctccgtcaccgccggggacttcgccacggagaccctcaccttcgccagcggggcccgcgtgccgcgcgtcgccctcggctgcggccacgacaacgagggtctcttcgtcgcggcggcggggctcctcgggctcggccgcggcagcctctccttcccctcccagatctcccgccgcttcgggcggagcttctcgtactgcctcgtggaccgcacctcctcgtcggccagcgccacctcccggtcctccaccgtcacgttcggctccggcgccgtggggccctcggccgccgcgtccttcaccccgatggtgaagaaccccaggatggagacgttctactacgtgcagctcatgggcatcagcgtcggcggcgcgcgcgtcccgggcgtggccgtgtccgacctccgcctggacccgtccacaggccgcggcggcgtcatcgtggactccggcacgtccgtcacccgcctggcccggccggcgtacgccgccctgcgcgacgcgttccgcgcggcggccgcgggcctccgcctctccccgggcgggttctccctgttcgacacgtgctacgacctgagcgggctcaaggtggtgaaggtgcccaccgtgtcgatgcacttcgccggcggcgccgaggccgcgctgccgccggagaactacctgatcccggtggactcgaggggcaccttctgcttcgcgttcgccggcaccgacggcggcgtctccatcatcgggaacatccagcagcagggcttccgcgtggtgttcgacggcgacggccagcgcctcggcttcgtgcccaagggatgctagctaattgcgccttaagcctgctgcttaatctaattaacgggggagtgagccttgtttagtcataattaagtacttaattaagggtttggtttgattaaggtggcgagtgagtgagggagggagagagctttggatgctgtaaagcgctgtgtgctttgaggataaggcggttgaaggctgtaaaacagttaaagtgatgggttataaaaatctccttgaccatgtcaaaaaaaaaaaaaaaaggggcctctcgggcgcgtccgcgctggttatnaaaaaaaaaaaaaaaaaaaaaaaaaaaaaaa

SEQ ID NO: 26859 - DNA, 3690 bp, Oryza sativa
  Clone ID: PAT_MRT4530_31607C.1
atgaagtatgatctaccgctgcaagactacaagacgagattctcgctgtggcaagtaaagatgcgggctgttctggcgcaaacttcggatcttgatgaggccctggaaagcttcgggaagaagaaaacgactgagtggactgctgaggagaagcggaaagatcgtaaggctctgtcgttgatccaacttcatctatctaatgatattttgcaaaaagtgttgcaggaaaagactgctgcagaactttggttcaaactggaatcgatctgcatgtctaaagatctaaccagtaagatgcatatcaagatgaagttgttctcgcacaagttgcaggagagtggttctgtgttgaaccacatatcggtctttaaggagatcattgccgacctagtgtcgatggaggtacagtttgatgatgaagatttaggtcttttactgttatgctcactgcctagtttatatgcaaattttcgtgacaccatacttttaagccgtgatgaactaaccctagcggaagtttatgaggcgctccaaaacagggagaagatgaaaggtatggttcagtctgatgcgtcttcctctaagggcaaagcattgcaggtcagaggcagatctgagcaaagaacctacaacgacagcaatgatcgtgacaagagccagagtagaggccgttctaagtccagaggtaaaaagttctgtaagtattgcaaaaagaaaaatcacttcattgaagaatgttggaagctgcaaaataaggagaaaaggaaatctgatggtaaggcctctgttgttaccagtgctgaaaactctgattcagcagattgtcttgtcttttttgctggttgtgttgctagtcatgatgaatggatacttgatactgcatgtttgtttcttatctgcattaatagagattggtttagttctcacaagtctgtgcagaatggagatgttgtgcgcatgggagataataacccacgtgagatcatgggcattggctccgttcagatcaagacacatgatggcatgacacgcacgctgaaagatgtgagacacataccagggatggcgagaaatctcatctctctcagcacacttgatgcagaaggatacaaatactccggttcaggtggagttgtaaaggtatcgaaaggttctcttgtttatatgattggtgatatgaattctgcaaacttatatgtccttagaggaagtacattacatggttctcttaccgctgctgctgtttctaaagatgaacctagtaagactaacctgtggcatatgcgtcttggacatatgagtgaacttggtatggcagaattgatgaagaggaacctgttggatggctgcactcaaggtaacatgaagttctgtgagcactgtgtttttggtaagcacaagagggtaaaattcaatacctcagttcatcgcaccaaaggtatacttgattatgtacatgctgatttgtgggggccttctcgtaagccctctcttggtggcgcttgttatatgcttaccattattgatgattactctagaaaagtgtggccttatttcttgaaacataaagatgatacatttgctgcttttaaagagtggaaagtcatgatagaaaggcaagctgaaaaggaggtaaaagtacttcgcactgacaatggtggtgaattctgttcggatgcttttgatgattactgcaggaaggaaggcatcggtaggcatcacaccatcccgtacactccacagcagaatagtgtggctgagcgcatgaatagaaccatcatctccaaggctcgttgtatgctgtccaacgctcgcatgaacaagcattattgggcagaggctgctaacaccacctgctacttgatcaacaggtcgccttctatcctacttaataaggaaactcccattgaggtatggtctggagtaaaaggatataagttatggaatcctgaaactaataagaccttcatgagaaggagtgttgttttcaataaatatgttatgtttaatgacagcttgcccatagatgtcataccaggtggttcagatgaggagcagcaatatgttagcgtgcaggtggagcacgtggatgatcaggaaactgaaattgttagtaatgatgttaatgatactgttcagcactcacctcctgttttgcagccacaagatgaacctattgcacatcgcagaacaaagaggagttgtggagctccagtccgccttattgaggaatgtgatatggtttattatgcttttagttgtgctgaacaggtggagaatactcttgagccagccacatacactgaagctgtgcaggaggagatgcagtctcttgagaagaatggcacatgggagcttgtgcacttgctaaaacagaagaagcctgttcattgtaaatggatcttcaagagaaaggagggtttatctcctagcgggcctccgaggtttaatgcaaggttagtagcaaaaggtttcagtcaaattgctggcgttgattataatgatgtgttctctccagttgtaaagcatagttcaattcgcacattcttctgtattgttgctatgcatgatcttgagcttgagcagttagatgtgaagacaatatttttacatggagagcttgaggaggagatatacatggaccagccagaagggtttatagtacctggtaaggaggatgatgtttgcaagttgaaaagatctttgtatggtttgaaacagtctcctcgacaatggtataaaaggtttgattcctttatgttgtcacatggctttaagaggtctgaatttgatagctgtgtgtatattaaatttgttaatggatcacatatatacttgctgttatatgttgatgatatgctgattgctgccaagagcaaggaacaaatcactacattgaagaaacaattgagtagtgagtttgatatgaaggatcttgttgcttctaagaaaattctaggtatggaaatcactagagacataaattctggtttgttatttcttagtcagcaaagctacattaagaaggttcttcagcgttttaacatacatgatgcaaagcctgttagcactcctattgcacctcattttaaattatcagctttacaatgtactagtactgatgaggatgtagaatacatgtctagagttccatattctagtgttgttggttctttgatgtatgccatggtttgctcccgtccagttttatctcatgctatgagtttggttagtagatacatggctaatcctggtaaagaacactggaaagctgttcagtggattttcaggtacctcagaggcacagctgatgcttgcttgaagtttggcaggactgataaggggcttgttggatatgtggattcagattttgctgcagatttggataagagaaggtcactcacaggttatgtgtttaccattggtagttgtgctgtgagttggaaggcaacattgcagcctgttgttgcccagtctaccgctgaagcagaatacatggctattgctgaagcatgtaaagaatcagtttggctgaaaggattgtttgctgagctttgtagagttgattcttacattaacttgttttgtgacagtcaaagtgttatatgcctcaccaaagatcaaatatttcatgagaggacaaagtacattgatatcaagtaccattatgtttgcgatgtagtcgcgtaa

SEQ ID NO: 26860 - DNA, 822 bp, Oryza sativa
  Clone ID: PAT_MRT4530_31608C.1
atgccgtcgccgcgccgggccgtgaatctccggtggtcttcgttggagacggaggtggaggcggcgatcgcggtggagggcgggtgcggggtggacctcgcgatggtcggccgggcgctggggctggacccggccaccgtccgcctcaacggctacttcgtcagccgcgggcgcggccacgtctcctccgccgtcacgtggcgcgcgctcctcgacttcttcgccgcgcgcgggctgcccacgggcgacgcccccgccgcgcccgtcgccgtccacggcaagcccgcgcctcctcctcctcctcccccggtgtcagattgtacaatcaatgtttgcccaaagcggaaatttgggttggtttcagattgtacaaccgagatctgtccaaagcgaaaatttgggttggtttcagattttacaaccgaggtctgcccaaagcgaaaattcgggttggcttcagattgtacaacagaggtctgcccaaagagaaaatttgggttggtttcagattgtacaaccgaggtctgcccaaagcgaaaatttgggttgtatgctggaaaaagtcttaagaagagcaagaattccgaagatggagttctgtctagaactggggctgatatacttagcgatgaaatcacccttggtttgaagagaagactaaaattggatgacgccaatccagctaagaagatgaagcaaatagaatgcaacacagaaacacagcagccggttaagttctcctgcagcttcatcaacgggcacggaaagcggtcacgggacgaggagatgattacctcattctcatgcaaaagagttagatga

SEQ ID NO: 26861 - DNA, 288 bp, Oryza sativa
  Clone ID: PAT_MRT4530_31609C.1
tcacacggcgttgcaggcctccccgtcgcctcctcttacttcactcttctcccctaaattagacggcactgcaaccctccctgtcgccgtcgcccactgctcaccagagccggcggccgccgccgcgagggaggccgcaacggcgaggagctcagcagcgagcgcggtgagcaagagggagagtgggagcggggtgcggtggagccggaacggggtgcggttgcggcggcatcctccatggccggcagcaagcggatctgctacatcgttggtgatgaagacctccat

SEQ ID NO: 26862 - DNA, 909 bp, Oryza sativa
  Clone ID: PAT_MRT4530_3160C.1
tgaacatgcaagattagggatggcggcgactgaaccccctgtcttgtaacgatttgccgaaggtacgcaacaccggagaggaagggaaaatgttgccgcagagagcttcaataagcaggagcctgagcaaccaaccaacaagcttgccaccaagagcttcaacaagcagaagcatgtggagattcaaccaactaacaagctggagcagctcattcagcccaccaacgagcatgagcagcagcagctcttgcagccaccaccatccgtccttgtcagggagcctgagacggccggcccagaaacaccacatccatctccatcactctgggcaagcaatgaacagaggccagctgcaccggatccaccaccgcaagcccttgtcgccatggaaaggacgccaaacgccccagatccatccatcttcagcgacgacactgggacagccacggccacaaacaccaccgccaccatcgtcttctccgatcgccatgaagcaacaccggcgaaactccaaaagggacaaacccgagctacaggaagacctgactacggaagaactccgacctaacctactttatactagtacgggaaggtggcctggcccctccttcggccctcaccggcggcgaaccaccggaatcggggggaagaggggtcggggagggggattttactatagaagcctattctcccacaagctctccagagacttctgtttaactctcagtttgttgtttggtgatagtgcggccatgagaagaccagttggacaaatcgaagcatccatttgtagaactttgcgagaccttagctccacaaatcaacaccgtggaatcgaaaaaattgttgtcgactatgtgcgtgcgtgacagtacagtgcacggttgaaaagcaggggagaggcatcag

SEQ ID NO: 26863 - DNA, 519 bp, Oryza sativa
  Clone ID: PAT_MRT4530_31610C.1
atggctaatcctgttaaagaacactggaaagctgttcagtggattttcaggtacctcagaggcacagctgatgcttgcttgaagtttggcaagactgataagggacttattggctatgtggattcagattttgctgctgatttggataagagaaggacactcacaggttatgtatttactattggtagttgtgcttctaccactgaagcagaatacatggctattgctgaaacatgtaaagaaccagtttggctaaaaggattgtttgctgagctttgtggagatgattcttgcattaacttgttttgtgacagtcaaagtgccatatacctcactaaagatcatgagaggacaaagcacattgatatcaagtaccattatgttcgcgatgtagtcgcgcaaggtaagctaaaggtatacaagataagcactcatgataatcctgctgatatgatgataaagcatgttcctgttgctaagtttgagttttgctcaagcttagttggtatagtggtttag

SEQ ID NO: 26864 - DNA, 884 bp, Oryza sativa
  Clone ID: PAT_MRT4530_31611C.1
tcacagattcctgaggatctggacgatctggtcgagcttgtccaggttcttcttccgctcccgctcgcgatcctcctcccggctcaccatctcggcgacctgcttctcccgctcctcgccgcgccgctccagctcgacgaggcgccgccgccgctgctgctcttcgtcgttcgcctggatcgatatgccgatgcacaagccggcgaagaagcagacgaaattcgccgccatggagaacgaacaagagagaaaaattacgaaaccgaaggtatatatgctgcttggccggtcggtgatcgccgccgccgccgataggattattatcgaacgggctgcttggatctccggcgaggttgtgagtacgtcgtggtcgtgatggaggcaggttcctgagcagagcagcagcggcgtagtgcgacggaccctagcgctcgcccaccgcgtcgcgatcgcgcgcaggtggcggtggggacagggcgctcggtcgcaggaggcggcgatggcgcgcaggtggtggtggggaccgcgctcatctcggtcgcagtaggaggtagtgatggggagctgtgtagcgatgcggcgatgggggagaagcgtctggactcggcaaccagcgatacggcgatggggagaagcgtctggactcggaaaccctagcgccatccatccgatgggaagaagcatctggaaccctggcaccatccatggtgaaatcaaccgccccctccccatcttcttggctagcagaaacgtgctaccagacgtctcctcaaacctgtgcctctccgtcagacatcatccatccatccgcaagcctcagatccatacctccctcgacatcatcgcttcatcctgcaagcatattctccaattcggacatgatt

SEQ ID NO: 26865 - DNA, 1070 bp, Oryza sativa
  Clone ID: PAT_MRT4530_31612C.1
tcaaattgctggtgttgattataatgatgtgttctctccagttgtaaagcatagttcaattcgcacattcttcagtattgttgctatgtatgatcttgagcttgagcagttagatgtgaagacaacatttttacatggagagcttgaggaggagatatacatggaccagccagaagggttcatagtacctggtaaggaggattatgtttgcaagttgaaaagatctttgtatggtttgaaacagtctcctcgtcaatggtataaaaggtttgattcatttatgttgtcacatggctttaagaggtctgaatttgacagctgtgtgtatattaaatttgttaatggatcacctatatacttgctgttatatattgatgatatgctgattgctgccaagagcaaggaacaaatcactacattgaagaaacagttgagtagtgagtttgatatgaaggatcttggtgctgctaagaaaattctaggtatggaaatcactagagacagaaattctggtttgttatttcttagtcagcaaagctacattaagaaggttcttcagcgttttaacatgcatgatgcaaagcctgttagcactcctattacacctcattttaaattatcagctttacaatgtgctagtactgatgaggatgtagaatacatgtctagagttccatattctagtgctgttggttctttgatgtatgccatggtttgctcccggccagatttatctcatgctatgagtttggttagtagatacatggctaatcctggtaaagaacactggaaagctgttcagtggattttcaggtacctcagaggcacagctgatgcttgcttgaagtttggcaggactgataaggggcttgttggatatgtggattctgattttgctgtagatttggataagagaagtcaaagtgctatatgcctcaccaaagatcagatgtttcatgagaggacaaagcacattgatatcaagtaccattatgttcgcgatgtagtcgtgcaaggtaagctaaagggtgaaggattgattcatgctacaagaaggaatttgtctcaag

SEQ ID NO: 26866 - DNA, 1611 bp, Oryza sativa
  Clone ID: PAT_MRT4530_31613C.1
atggcgtcgatgaagtatgatctatcgctgcttgactacaagacaagattctcgctgtggcaagtcaagatgcgggctgttctgatgcaacttaggatcttgatggggcgctggaaaccttcgggaagaagaaaacgactggctagaccgctgaggagaagcggaaagatcgaaaagactgctgcagaactttggctcaaactagaatcgatctgcatgtctaaagatctaaccagtaagatgcatatcaagatgaagttgttctcgcacaagtttcaggagagtggttctgtgttgaaccacatatcggtcttcaaggagatcgttgccgacctaatgtcgatggaggtacagtttgatgatgaagatttaggtcttttactgttatgctcattgcctagttcatatacaaatttttgtgacaccatacttttaagccgtgatgaagtaaccctagcggaagtttatgaggcgctccaaaacagggagaagatgaaaggtatggttcagtctgatgcatcgtcctctaagggcgaagcattgctggtcaaaggcagatctgagcagagaacctacaacgatagcaatgatcgtgacaagagtcagagtagaggccgttctaaatccagaggtaaaaagttttgtaagtattgcaaaaagaaaaatcacttcattgaagaatgttggaagctgcagaataaggacaataggaaatcagatggtaaggcctctgttgttaccagtgctgaaaactctaattcaggagattgtcttgttgtttttgctggttgtgttgctagtcatgatgaatggatacttgatactgcatgttcttttcatatctgcattaacagagattggtttagttcttacaagtctgtgcagaatggagatgttgtgtgcatgggagatgataacccacatgtgagacacataccagggatggcgagaaatctcatctccctcagcacacttgatgcagaaggatacaaatactccggttcaggtggagttgtaaaggtatcgaaaggttctcttgtttacatgattggtgatatgaattctgcaaacttatatgtccttagaggaagtacattacatggttctgttaccgctgctgctgtttctaaagatgaacctagtaagactaacctgtggcacatgcgtcttggacatatgagtgaacttggtatggcagaattgatgaagaggaacctgctagatggctgcactcagggtaacatgaagttctgtgagcactgtgtttttggtaagcacaagagggtaaaattcaatacctcagttcatcgcaccaaagagtggaaagtcatgatagaaaggcaaactgaaaaggaggtaaaagtacttcgcactgacaatggtggtaaattctgttcggatgcttttgatgattattgtaggaaggaaggcatcgttaggcatcacaccatcccgtacactccacagcagaatggtgtggctgagcgcatgaacagaaccatcatctccaaggctcgttgtatgctgtccaacacgcgcatgaacaagcgtttttgggcagaggctgctaacaccgcctactacttaatcaacaggtcgccttctatctaa

SEQ ID NO: 26867 - DNA, 180 bp, Oryza sativa
  Clone ID: PAT_MRT4530_31614C.1
atgattcccaatccacaacaacttttcacaaagcacaggcaatcaaaactacgcaataggactgctacgaaaaccatctttcgtggcggccattttgggtcttcgctggcagaatttagagccgccacaaagcaaaggccagtgaagatcaacatctttgctagcggttatcaactataa

SEQ ID NO: 26868 - DNA, 3294 bp, Oryza sativa
  Clone ID: PAT_MRT4530_31615C.1
atggcgtcgatgaagtatgatctaccgctgctagactacaagacgagattctcgctgtggcaagaaaagactgctgcagaattttggctcaaactggaatcgatctgcatgtctaaagatctaaccagtaagatgcatatcaagatgaagttgttctcgcacaagttgcaggagagtggttctgtgttgaaccacatatcggtcttcaaggagatcgttgccgacctagtgtcgatggacgtacagtttgatgatgaagatttaggtcttttactgttatgctcactgcctagttcatatgcaatttttcgtgacaccatatttttaagccgtgatgaactaaccctagcggaagtttatgaggcgctccaaaacagggagaagatgaaatgtatggttcagtctgatgcgtcgtcctctaagggcgaagcattgcaggttagaggtagatctgagcagagaacctacaacgacagtaatgatcgtgacaagagtcagagtagaggccgttctaaatctagaggtaaaaagttctgtaagtattgcaaaaagaaaaatcatttcattgaagaatgttggaagctgcagaacaaggagaaaaggaaatctgatggtaaggcctctgttgttactagtgctgataactctgattcaggagattgtcttgtcgtttttgctggttgtgttgctagtcatgatgaatggatacttgatactgcatgttcgtttcatatctgcattaacagatattggtttagttcttacaagtctgtgcagaatggagatgttgtgcgcatgggagatgataacccacgtgagatcgtgggcattggctccgttcagatcaagacacatgatggcatgacacgcacgctgaaagatgtgagacacataccagggatggcaagaaatctcatctctctcagcacacttgatgcagaaggatacaaatactccggttcaggtggggttgtaaaggtatcgaaaggttctctcgtttatatgattggtgatatgaattgtgcaaacttatatgtccttagaggaagtacattacatggttctgttaccgctgctgctgtttctaaagatgaacctagtaagactaacctatggcacatgcgtcttggacatatgagtgaacttggtatggcagaattgatgaagaggaacctactggatggttgcactcagggtaacatgaagttctgtgagcactgtgtttttggtaagcacaagagggtaaaattcaatacctcagttcatcacaccaaaggtatacttgattatgtacatgctgatttgtgggggccctctcgtaagccctctcttggtggtgctcgttatatgcttaccattattgatgattttgctagaaaagtgtggccttatttcctgaaacataaagatgatacatttgatgcttttaaagagtggaaagtcatgatagaaaggcaaactgaaaaggaggtaaaagtacttcgcactgacaatggtggtgaattttgttcggatgcttttgatgattactgcaggaaggaaggtatcgttaggcatcacaccatcccgtacactccacagcagaatggtgtggctgagcgcatgaacagaaccatcatctccaaggctcgttttatgctttccaacgctcgcatgaacaagcgtttttgggcagaggctgctaacaccacctgctacttgatcaataggtcgccttctatcccacttaataagaaaactcccattgaggtatggtctggtatgcttgctgattattcacagttgagagtttttggatgcactacttatgctcatgttgataacggaaaattagagcctagagctattaagtgtctgtttcttggttatggttcaggagtaaaaggatatagattatggaatcttgaaactaataagaccttcatgagcatgagtgttgttttcaatgaatctgttatgtttaatgacagcttgcccacagatgtcataccaggtggttcagatgagaagcaacaatatgttagcgtgcaggtggagcacgtggatgatcaggaaactgaaattgttagtaatgatgttaatgatactgttcagcactcacctcctgttttgcagccacaagatgaacctattgcacatcgcagaacaaagaggagttgtggagctctagtccgccttattgaggaatgtgatatggtttattatgcttttagttgtgctgaacaggtggagaatactcttgagccagccacatacactgaagctgttgtctctagagaccttataaagcatagttcaattcgcacattcttcagtattgttgctatgcatgatcttgagcttgagcagttagatgtgaagacagcatttttacatggagagcttgaggaggagatatacatggaccagccagaagggttcatagtgcctggtaaggaggattatgtttgcaagttgaaaagatctttgtatggtttgaaacagtctcctcgtcaatggtataaaaggtttgattcatttatgttgtcacatggctttaagaggtctgaatttgatagctgtgtgtatattaaatttgttaatggatcacctatatacttgttgttatatgttgatgatatgctgattgctgccaagagtaaggaacaaatcattacattgaagaaacagttgagtagtgagtttgatatgaaggatcttggtgctgctaagaaaattctaggtatggaaatcactagagatagaaattctggtttgttatttcttagtcagcaaagctacattaagaaggttcttcagcgtcttaacatgcatgatgcaaagcctgctagtactcctattgctcctcattttaaattatcagctttacaatgtgctagtactgatgaggatgtagaatacatgtctagagttctatattctagtgctgttggttctttgatgtatgccatggtttgctcccgtccaaatttatctcatgctatgagtttggttagtagatacatggctaatcctggtaaagaacactggaaagctgttcagtggattttcaggtacctcagaggcacagctgatgcttgcttgaagtttggcaggactgataaggggcttgttggatatgtggattctgattttgctgcagatttggataagagaaggtcactcacaggttatgtgtttaccattggcagttgtgctgtgagttggaaggcaacattgcagcctattgttgcccagtctaccactgaagcagaatacatggctattgctgaagcatgtaaagaatcagtttag

SEQ ID NO: 26869 - DNA, 250 bp, Oryza sativa
  unsure (1)..(250): unsure at all n locations
  Clone ID: PAT_MRT4530_31616C.1
caacacaagtgttctattcctatgagtanctttctcctaggatcaactctcccatgttgaatcccgccttttaatagagttcngacatgtagctacgtgttgacataaaacttttgctactggctatctcatatctgtaaatatacagtattgggatttttaatggtccaagattttgactatcatcctgttagttcacccgtgtgaaaagtgaattttggtgatctcttcttcggaaaaaaaaaaaaaa

SEQ ID NO: 26870 - DNA, 399 bp, Oryza sativa
  Clone ID: PAT_MRT4530_31617C.1
atgccgattgctgccaagagcaaggaacaaatcactacattgaagaaacagttgagtagtgagtttgatatgaaggatcttggtgctgctaagaaaattctaggtatggaaatcactagagacagaaattctgatttatctcatgctatgagtttggttagtagatacatggcgaatcctagtaaagaacactggaaagctgttcagtggattttcaggctcagaggtacagctgatgcttgcttgaagtttggcaggactgataaggggcttgttggatatgtggattctgattttgctgcagatttggataagagaaggtcactcacaggttatgtgtttaccattagtagttgtgctgtgagttggaaggcaacattgcagcctgttgttgcctag

SEQ ID NO: 26871 - DNA, 3672 bp, Oryza sativa
  Clone ID: PAT_MRT4530_31618C.1
atgaagttgttctcgcacaagttgcaggagagtggttctatattgaaccacatatcggtcttcaaggagatcgttgccgacctagtgtcgatggaggtacagtttgatgatgaagatttaggtcttttactgttatgctcactgcctagttcatatgcaaattttcgtgacaccatacttttaagccgtagtgaactaaccctagcggaagtctatgaggcgctccaaaacagggagaagatgaaaggtatggttcagtctgatgcatcgtcctctaagggcgaagcattgcaggtcagaggcagatctgagcagagaacctacaacgacagcaatgatcgtgacaagaaccagagtagaggccgttctaagtctagaggtaaaaagttctgtaagtattgcaaaaagaaaaatcacttcattgaagaatgttggaagctgcagaataaggagaaaaggaaatctgatggtaaggcctctgttgttaccagtgctgataactctgattcaggagattgtcttgtcgtttttgttgtttgtgtttctagtcatgatgaatggatacttgatactacatgttcgtttcatatctgcattaacagagattggtttagttcttacaagtctgtgcagaatggagatgttgtgcgcatgggagatgataacccacgtgagatcgtgggcattggctccgttcagatcaagacacacgatggcatgacacgcacgctgaaagatgtgagacacataccaaggatggcgagaaatctcatctctctcagcacacttgatgcagaaggatacaaatactccggttcaggtggagttgtaaaggtatcgaaaggttctctcgtttatatgattggtgatatgaattctgcaaacttatatgtccttagaggaagtacattacatggttatgttactgctgctgttgtttctaaagatgaacctagtaagactaacatgtggcatatgcgtcttggacatatgagtgaacttggtatggcagaattgatgaagaggaacctgctggatggctgcactcagggtaacatgaagttctgtgagcactgtgtttttggtaagcacaagagggtaaaattcaatacctcagttcatcgcaccaaaggtatacttgattatgtacatgctgatttgtgggggccttcccgtaagccatctcttggtggtgctcgttatatgcttaccattattgatgattactctagaaaagtgtggccttatttcctgaaacataaagatgatacatttgctgcttttaaagagtggaaagtcatgataaaaaggcaaactgaaaaggaggtaaaagtacttcgcactgacaatggtggtggattttgttcggatgcttttgatgattattgtaggaaggaaggcatcgttatgcatcacaccatcccgtacactccacagcagaatggtgtggctgagcgcatgaacagaaccatcatctccaaggctcgttgtatgctgtccaacgcccgcatgaacaaacgtttttgggcagaggctgctaaaaccgcctgctacttgatcaacaggtcgccttctatctcacttaataagaaaactcccattgaggtatggtctggtatgcctgctaattattcacagttgagagtttttggatgcactgcttatgctcatgttaataatggaaaattagagcctagagctattaagtgtctgtttcttggttatggttcaggagtaaaaggatataagttatggaatcctgaaactaataagacattcatgagcaggagtgttgttttcaatgaatctgttatgtttaatgacagcttgcccacagatgtcataccaggtggttttgatgaggagcagcaatatgttagcgtgcaggtggagcacgtggatgatcagaaaactgaaattgttggtaatgatgttaatgatactgttcagcactcacctcctgttttgcagccacaagatgaacctattgcacatcgcagaacaaagaggagttgtggagctccagtccgccttattgaggaatgtgatatggtttattatgcttttatttgtgctgaacaggtggagaatactcttgagctagccacatacactgaagttgttgtttctggagaccgtgagaagtggatctcagctatgcaggaggagatgcagtctcttgagaagaatgacacatgggagcttgtgcacttgccaaaacagaagaagcctgttcattttgtaaagcatagttcaattcgcacattcttcagtattgttgctatgcatgatcttgagcttgagcagttagatgtgaagacagcatttttacatggagagcttgaggaggagatatacatggaccagccagaagggttcatagtgcctggtaaggaggattatgtttgcaagttgaaaagatctttgtatggtttgaaacagtctcctcgtcaatggtataaaaggtttgattcatttatgttgtcacatggcttcaagagatctgaatttgatagctgtgtgtatattaaatttgttaatgtgtcacctatatacttgctgttatatgttgatgatatgctgattgctgccaagagcaaggaacaaatcactacattgaagaaacagttgagtagtgagtttgatatgaaggatcttgatgctgctaagaaaattctaggtatggaaatcactagagacagaaattccggttggttatttcttagtcagcaaagctacattaagaaggttcttcagcgttttaacatgcatgatacaaagcctgttagtactcatattgcacctcattttaaattatcagctttacaatgtgctagtactgatgaggatgtagaatacatgtctagagttccatattctagtgttgttggttctttgatgtatgccatggtttgctcccgtctagatttatctcatgctatgagtttggttagtagatacatggctaatcctggtaaagaacactggaaagctattcagtggattttcaggtacctcagagacacagctaatgcttgcttgaagtttggcaggactaataaggggcttattggatatgtggattctgattttgctgcagatttagataagagaaggtcactcacaggttatgtgtttaccattggtagttgtgctgtgagttggaaggcaacattgcggcatgttgttgcccagtctaccactgaagcagaatacatggctattgctgaagcatgtaaagaatcagtttggttgaaaggattgtttgctgagctttgtggagtttattcttgcattaacttgttttgtgacagtcaaagtgctatatgccttactaaagatcagatgtttcatgagaggacaaagcacattgatatcaagtaccattatgttcgcgatgtagtcgcgcaaggtaagctgaagggtaaaggatggatcgtgcacctggggacgcctggcggagtgcggcaacctttactttttgctccagttttgaaaatttttgccgatctgggaatttcgcttcatggtgcccgaattacaaccattggcgagcgagtagaagatttattcataattgccaccgctgaccggcgtgcgcttaataacgagttgcagcaggaagtgcatcagcggttgacagaggccctcaatccaaacgataaagggtga

SEQ ID NO: 26872 - DNA, 3453 bp, Oryza sativa
  Clone ID: PAT_MRT4530_31619C.1
atggcatcgatgaagtatgatctaccgctgctagactacaagacgagattctcgctgtggcaagtcaagatgcgggctgttctggcgcaaacttcggatcttgatgaggcgctggaaagtttcgggaagaagaaatcgactgaatggaccgctgaggagaagcggaaagatcgtaaggctctgtcgctgatccaacttcatctatctaatgatattttgcaagaagtgttgcaggaaaagactgctgcagaactttggctcaaactggaatcgatctgcatgtctaaagatctaaccagtaagatgcatatcaagatgaagttgttctcgcacaagttgcaggagagtggttctgtgttgaaccacatatcggtctttaaggagatcgttgccgacctaccgtcgatggaggtacagtttgatgatgaagatttaggtcttttactgttatgctcactgcctagttcatatgcaaattttcgtaacaccatacttttaagccgtaatgaactaaccctagcggaagttgatgaggcactccaaaacagggagaagatgaaaggtatggttcagtctgatgtgtcgtcctctaagggcgaagcattgcaggtcagaggcatatctgagcagagaacctacaacgatagcaataatcatgacaagagccagagtagaggccgttccaagtccagaggtaaaaagttctgtaagtattgcaaaaagaaaaatcatttcattgaagaatgttggaagctgcagaataaggagaaaaggaaatctgatggtaaggcttctgttgttaccagtgctgaaaactctgattcaggatattgtcttatcgtttttgctggttgtgttgctagtcatgatgaatggattcttgatactgcatgttcgtttcatatctgcattaacagagattggtttaattcttacaagtctgtgcagaatggagatgttgtgcgcatgggagatgataacccacgtgagattgtgggtattggctccgtacagatcaagacacatgatggcatgacacgcacgctgaaagatgtgagacacataccagggatggcgagaaatctcatctctctcagcacacttgatgctggaggatacaaatactccggttcaggtggagttgtaaaggtatctaaaggttctctcgtttatatgattggtgatataaattctgcaaacttatatgtccttagaggaagtacattacatagttctgttaccgctgctgttgtttctaaatatgaacctagtaagactaacctgtggcatatgcgtcttggacatatgagtgaacttggtatggcagaattgatgaagaggaacctgttggatggctgcactcagggtaacatgaagttttgtgagcactgtgtttttagtaagcacaagagggtaaagttcaatacctcagttcatcgcaccaaagagtggaaagtcatgatagaaaggcaaactgaaaaggaggtaaaagtacttcgcactgacaatggtggtgaattttgttcggatgcttttgatgattactgcaagaaggaaggcatcgttaggcatcacaccatcccgtacactccacagcagaatagtgtggctgagcgcatgaacagaaccatcatctccaaggctcgttgtatgctgtccaatgctcgcatgaacaagcgattttgggcagaggctgctaacaccgcctgctacttgattaacaggtcgccttctatcccacttaataagaaaactcccattgaggtatggtctggtatgcctgctgattattcacagttgagagtttttggatgcactgcttatgctcatgttgataatggaaaattagagcctagagctattaagtgtctgtttcttggttatggttcaggagtaaaaggttataagttatggaatcctgaaactaataagacattcatgagcaggagtgttgttttcaatgaatctgttatgtttaatgacagcttgcccacagatatcataccaggtggttctgataaggagcagcaatatgttagcgtgcagccacaagatgaacctattgcacatcgcagaacaaagaggagttgtggagctccagtccgccttattgaggaatgtgatatggtggagaatactcttgagccagccacatacactgaagctgttgtttctggagaccgtgagaagtggatctcagctatgcaggaggagatgcaatctcttgagaagaatggcacatgggagcttgtgcacttgccaaaacagaagaagcctgttcgttgtaaatggatcttcaagagaaaggagggtttatctcctagcgaacctccgaggtttaaggcaaggttagtagcaaaaggtttcagtcaaattgctggtgttgattataatgatgtgttctctctagttgtaaagcatagttcaattcgcacattcttcagtattgttgctatgcatgatcttgagcttgagcagttagatgtgaagacagcatttttacatgtagagcttgaggaggagatatacatggaccagccagaagggttcatagtacctggtaaggaggattatgtttgcaagttgaaaagatctttgtatgggttgaaacaatctcctcgtcaatggtataaaaggtttgattcatttatgttgtcacatggctttaagaggtctgaatttgatagttgtgtgtatattaaatttgttaatggatcacctatatacttgttgttatatgttgatgatatgctgattgctgccaagagcaaggaacaaatcgctacattgaagaaacagttgagtagtgagtttgatatgaaggatcttggtgctgctaagaaaattctaggtatggaaatcactagagacaaaaatactggtttgctatttcttagtcagcaaagctacattaagaaggttcttcagcgttttaacatgcatgatgcaaagcctgttagtactcctattgcacctcattttaaattatcagctttacaatatgctagtactgatgaggatgtagaatacatgtctagagttccatattctagtgctgttggttctttgatgtatgccatggtttgctcccgtccagatttatctcatgctatgagtttgtctaccactgaagcagaatacatggctattgctgaagcatgtaaagaatcagtttggttgaaaggattgttcgctgagctttgtggagttgattcttgcattaacttgttttgtgacagtcaaagtgctatatgtctcactaaagatcagatgtttcatgagaggacaaagcatattgatatcaagtaccattatattcgtgatgtagtcgcgcaaggtaagctaaaggtatgcaagataagtactcatgataatcctgctgatatgatgacaaagcctattcttgttgctaagtttgagctttgctcaagcttagttggtatagtggtttaa

SEQ ID NO: 26873 - DNA, 684 bp, Oryza sativa
  Clone ID: PAT_MRT4530_3161C.1
ttaggtcggagttcttccgtagtcaggtcttcctgtagctcgggtttgtcccttttggagtttcgccggtgttgcttcatggcgatcggagaagacgatggtggcggtggtgtttgtggccgtggctgtcccagtgtcgcttttaatctggaccgcagctggcttgctctccacatcaagggtctgcgcggtgtccgacgcaatcccggctgcgtcgctgaagatggacggatctggggcgtttggcgtcctttccatggcgacaagggcttgcggtggtggatctggtgcagctggcctcggttcattgcttggccagagcgatggaggtggatgtggtgtttctgggccggccgtctcaggctctctgacaaggacggatggtgttggctgcaagagctgctgctgctgctcctgctcgttggtgggctgaatgagctgctccagcttgttagttggttgaatctccacatgcttctgctcgaatagcgccgtttccgtggaggcagccgaaggggtcaccggtctatcaagcggtgtgcgcgtcttcagtagaggctcgtggacgtggtcgtcgcggcattgccgcagtccccagctcgggggcagcaggatcgtgcgctctcccctaacgcgcacgtgtctcctcctggccccaccacgtatcttcaccatatactccat

SEQ ID NO: 26874 - DNA, 1362 bp, Oryza sativa
  Clone ID: PAT_MRT4530_31620C.1
ggccatcgaaagtacgcaagtgtttttgacgcaaaatacagcatttagcgcctagttgtaagtatttgtcacgtatatcctgccatcctgatatccaccaaacaaagagcccaaaaacggcccttttcttctcaaacaaaactgaacttgttacacggcaaacaagcctgcggtgtacggataaaagtcgaaccaagcgtagcggaagaaccgaggttgtggcggcgcggcatcttcccagaccaccgaaatcgcctggtcctccatgccgtaagccatgatcttgcccggaattccgaagagcagcaagctaccgtgctcggcgacgtgcagcggccagagatccaggcagtcgactagcctagcgcggcgcggccagatcaggtggtgcttccgcgttttccgctgtatatccgggtacaactccttcatgcgcgtgaggtcgacgcggtacagcacgcgccactcgcggcagtctcccgccatccccaccacgtcgaagcgggcggcgagcttctcctcctccgtgtagccgatcatccggaggtggccccggccggcaccagctgactccccgaccccgaggtaaccgcagatccagcgattctccggctgcagatgcctcgccggcggcatcggcaggctgctcagctctccttccccgtcgtcgacggcgaagcggagcagggagcgcgagcgcgatgtcacccacaccagcgagccgttccagtgcacgccccgggagtggtggatccccgcgaacgggttgctgccgcgctcgtaacggagcgccgccctccatgaccgagcctgggaggagtacacgtggacgccggcgagccccagcgcgacgaccttgtacaccggcgacctggacgggtcgtaagccaggttcaggtggcgcccgcggccgtccggcggcgtgggtatctcgacgaacctcttggtggccgggttgcagacgtagtagcagcaccagcgcgccccggaggcgacgctgctatccatcggccggcggcagaggagcagcccgttgcacgagctggtgacgttgatcttgcgcgggacggtggagccgctctccgggacgaacgagaggtcgggagcagcgggatgcgtggcgctactgtcgcgtagaggattgtagctgaacttcttgtggagctcgttgctgaggaagaagccggcaacggagtggccgtctctgctcctcgagaagtttgtgtgcatgaaatggtgctccgatgtcacggcatgccattgcttgcagacgagccgcatacgagcggcattctttggaggaagccaggcgaggatgttggcgatgatatcgtcggagaataatatcgcctcccctgccat

SEQ ID NO: 26875 - DNA, 1215 bp, Oryza sativa
  Clone ID: PAT_MRT4530_31621C.1
acacgtgcatattttcataaattgatctgagtaggccaaccagtattgtgcattgtaattagttcccaaaaataacagcactaactattttcatcaaaaatagaaatttacagggatagttataaaccactgcaataccaaacaaagcattgcagattgccttaaaaaaatgaagcattacaaaagacagttctaccttgctaaaccatcatgagaaactgagaatatgtgtgttcatcttcatcacagtgcagaattcactgagtaatcagtgtcagcaagtgggattcgattgagtatgaactaactacaatgtacaacattttagacgccttgcctgatttgtggtaatgtaaaactgcacctgctgcccaaaaagtacagggcaaaccaaagtacaaaacagcctacacttcttcagcccatttctccttcggtatctcaccagagtcggtgattacaactttcttcctaggcttgccattgtaagttccagcacccccttcaatggcgtacacataatccattccctgaatcaccctgccaaacacaacatgctccccatccaaccagcttgtcttgattgtggtaatgtaaaactgcgatccattggaatcaggtccagaatttgccatggcaataacacctggatgtgtatgttttactatgaaattctcatctgggaaggtgcccccatatatagactcacttccttttccatcacctctaactatgtccccaccctgaatcatgaagcctgggataatacgatgaaatcttgatcctttatagtgaagagatttacccttgtgcccaatgccctcttctcctgtacaaagagccctaaaatttgcaactgtttttggcacaacatctccataaaggccaatgacaattctacctatatgttgcccatcaatttccacatccaagtataccctgttagtaactgcaggtaatcgaacctctccaaggctctcgcggcgggagtaggcggcgaaggcgaggtagagggcggcgcaagcgaggaaggcgacggccaccttccgcagcatcgcgaaccaggggcgagtagttggacacttctacctcatcaattcgccgcaacgacggcgcaaatctgcaggcgagagcagccgccctcccgatttgggggcgattcgctcgcggcggcggagaccctcgtgccgattcctgcagcccgggatccactag

SEQ ID NO: 26876 - DNA, 594 bp, Oryza sativa
  Clone ID: PAT_MRT4530_31622C.1
atgctgattgctgacaagagcaaggaacaaatcactacattgaaaaaacagttgagtagtgagtttgatatgaaggatcttggtgctgctaaggaaattctaggtatggaaatcactagagatagaaattctgttttgttatttcttagtcagcaaagttacattaagaaggttcttcagcattttaacatgcatgatgcaaagcctgttagtactcctattgcacctcattttaaattatcagctttacaatgtgctagtactgatgaggatgtagaatacatgtctagagttccatattctagtgatgttggttctttgatgtacctcaggggcatagctgatgctttcttgaagtttggcaggactgataaggagcttgttggatatgtggattcagattctgctgcagatttggataggagaagtcaaagtgctatatgcctcactaaagatcagatgtttcatgagaggacaaagcacattgacatcaagtaccattatgttcgcgatgtagtcgcgcaaggtaagctaaagggtgaaggattgttcaatgctacaagaaagaatttgtttcaaggtggagtttgttga

SEQ ID NO: 26877 - DNA, 270 bp, Oryza sativa
  Clone ID: PAT_MRT4530_31623C.1
cctaaagattcttgctgcttactaagcatggggaatcaccttcctgttgtcactctttctgaagactctatagttaagatatttaaccgaacaatgacgaacttgacactctccataacagtcattcagttggcttgcttctgaattgtgcttagatcaaaagattatgttgtattaatgccatgaagggcccttttcaaatgaatactacacgtggaacctaaagtatgctgaatttttatacaggagtatatgttgctgttacacttg

SEQ ID NO: 26878 - DNA, 903 bp, Oryza sativa
  Clone ID: PAT_MRT4530_31624C.1
tcgcgatctagcggacgcgtgggcgcgctccgcctctctctctctctccatcgatccaagcccccccccccccccccccagatccccctcgccgcctcgccaccgcgtcggccatggcggaccagctcaccgacgaccagatcgccgagttcaaggaggccttcagcctcttcgacaaggacggcgacggctgcatcaccaccaaggagcttggaactgtgatgcgctcattagggcagaaccccactgaggctgagcttcaggacatgatcaacgaggtggatgctgatggaaatggaacgattgactttcctgagtttctcaacctgatggcgcgcaagatgagcagcggcggcgagaagtccggctcgggcggcggcggcggcggggcggtgaagacaccgtccgacttccttaagtccatcagggggcgccccgtcgtcgtcaagctcaactccggcgtcgactaccgcggtattttggcttgtcttgatggttacatgaacattgcaatggagcaaacggaagaatatgtcaatggtcagctgaagaacaagtacggtgacgctttcatacgaggaaacaatgttttatacatcagcacatcaaagcgtaccctcactgatggcgcatgagagggtgagacagcatgcagttcaatgcctgccactatcgcaactttgatgtcctgtgcgatcaatctctaaagaaatactgtcttacaatctcgtagttgctacatggaaagagatgttttctggaatggaggattatcaccagatatttgtaccccaaaaaaaacttatgttcgattttagtagattctacagattgtggtctgctgcactcttgatgtatgtggtgattattggaccgtcagggatatggataagatttatatct

SEQ ID NO: 26879 - DNA, 1391 bp, Oryza sativa
  Clone ID: PAT_MRT4530_31625C.1
atgaaaaaccaaatctttgcagtcgagtttgacagcataaaaaatattgagttccaagatatcaacaacaaccacgttgggtttgacatcaatagtctcatctctgtggactcataccctgctggtttctatgatgataaagatggtatcttcagtaatttgaccataactagtagtgaagcaatgcaagtttgggtggattacaatggagatatcgcacaaattagtgtcaccatggctcccatgggtatggcgaaaccattaaagccattaggatcagccaatcgtaacctctcatctgtacttagtgagatggcatatgttggcttttcatctgctgcaggcagggacaacactcggcattacattctcgggtggagttttggtctaaatagtgctgctccaagtattgatatcaccagtctgccgaagatgcctcattttgaacccaaggctagatcaaagatcctagaaatcattttaccaatagcaacggcagtgtccatcctttccgttggcaccatcattcttttacttgtacgaaggcacctaagatattcagaggtacgggaagattgggaagttgagtttgggccacatagattctcttttagggatttgtttcatgccacggaaggattcaaggacaagaatcttttaggcattggaggattcggaagagtatatagaggagtgcttccagcgtcaaaactagatatagcagtgaaaagagtgtcacatgattcaaagcagggcatgaaggaattcgttgcagaagttgtcagcataggccgcctccaacaccgtaacattgtgcatttacttggttattgtcgacgaaaaggaattacatctggattggtctatcttcatgaggagtgggagaaagttgtcattcatcgagatatcaaggcaagcaatgtgctccttgacgccgagatgaatgggagacttggtgactttggccttgcaaggttgtacgatcgtggtgtcgatgcacaaacaacccgtgtggtaggcaccataggatacatggctcctgaattggcatcaagcagcaaggcaacccctctcaccgatgtattttccttcggtatatttgttcttgaagtcacatgtgggaaaaggcccatcaaggaagatgtcaacggtaaccaaatcatgctggtggattgggtgctagagcattggcagaagggatcacttactgatacagtagacacgaagctccaaggtaactatgatgttgacgaggcaagcatggcactaaagctgggattgctgtgctcccacccgtttgcagatgctagaccaaaaatgcagcaagtcatgcaataccttgaaggagaggttccaatacctgaggatatgccacctcatttgagctttga

SEQ ID NO: 26880 - DNA, 699 bp, Oryza sativa
  Clone ID: PAT_MRT4530_31626C.1
atgtctcttgaggtcaggcaccctgcccgcccggggtgcatgctgacgcttcacggcgacgccgacgcgatggccttccagtgcaccggctgcatggaaaccggcaaaggcccaaggtacacctccggcgaccacgtcctccacacgtactgcgccctcgcgacacccacgctgcagcacccgctggtggagggtatcatggagctccggctcgtcgcccccaccggcggcgacgccgtccgctgcgacgcctgctacgacgcggtgcgagggttccactaccacagctccacgagtggcgtggacctgcacccaggttgcgccaagatgccgaggtccatcacgctgcgggggggcaccatcttcgatctccggacggaggtgtctcaccggtgcaccagctgcaaggcgatggaggggttctaccgcccatggttctaccgctccgaaaacaaccctgaccaacgcatgtacctgcacgtcaagtgcatcaaggagatccaggacgccggcgacgacgacgaggtgaggatgatggtccgcctacaagagcgtgctggccggaacgttaggctagagaggcgcgtatgcaaaacgcttgtgatcatggtgcgcatcgtcttcaggctgctcatcggggacccgacaccgatactcacagaaggagtgaacgccatcgtctccatggcgatgcagtag

SEQ ID NO: 26881 - DNA, 353 bp, Oryza sativa
  Clone ID: PAT_MRT4530_31627C.1
aaagctgcttcacattttttttttttttgatcgaattggtctctcgcttgcatttcactccatggatagacgtgcatgaggtttagtgtggtgattagttcttggatcttgaatcggcagctgatcaaatccgcgccgaaaggcggtggtcggcagcaacgcctggcgaaggggatggagaaggtcgcggttggcttgttgcccccgctgcggttcatcgccgtcctcgcccgcgtgtcgtggacgtcgttcatctactgccatttctccttgctcagcggcggactgctgctgggccactgcggccgccacaactgatccgacccgtgccgggtgaggtacatctacgtgca

SEQ ID NO: 26882 - DNA, 623 bp, Oryza sativa
  unsure (1)..(623): unsure at all n locations
  Clone ID: PAT_MRT4530_31628C.1
ttttttttttttttttttttttttttttttttttttttagggcagagggagtatattacagtttgtttctaggtagactactggaacaaacatacaggtcggttttttcctgttcttgggacctttagaataaaaggntgtcctgaaccctttacaatccatacacgtttacacatattaacagctaaagttttctaaggttgacaacaggaactcaaacagccaacccccgcgtgggttatagagcaagtagctgtagttttatatttagatcgaaacccgctaaagcgcagcatgataataaaataattcgctgtattttatcacggcaagcttttgcttacccacgtaccaagataaaatagcgttacagagggcaagagacgcaatttttgcactagatggcacaaatagattgaatgcctgtaatactactacaagggagctcccaattctgcactagctgacgggagtgacggcgcaagatgtctgcaatggatcgtcaggtttaactataaaacattacttcttcaactttggactaccatgttcattacttctagtcttttcttgctcattcactggctgctccagttcaagcctgtgggctgacattcgagcta

SEQ ID NO: 26883 - DNA, 267 bp, Oryza sativa
  Clone ID: PAT_MRT4530_31629C.1
atgatcaagatcagcttcgacacgacgacctcaactaccataaagagcgaaggcaacgtgcagcccttcgggctacccgttaccaacaaagcctgcggcgctaccatcagtgcaacgtccgggcctggcgtggtatctagatttggggatatcattatttggggttatatgctgcagatgagaggtgggccgctgatggtgacagctcagtacgggaactcgacagttaggggtggcttctcaaagtaccaggagggcatcggatag

SEQ ID NO: 26884 - DNA, 174 bp, Oryza sativa
  Clone ID: PAT_MRT4530_3162C.1
cggctcgggggccgatctggtcctccagtcccgtggaccggtggtgaaccacccgcgtggtcccggtccatggtggaccggcccccttaacctgcttccgaattccggctcttccgacgctccggtgtacttcgaaatagtcgctgaggttccttcagcagcagagcaaggcaa

SEQ ID NO: 26885 - DNA, 174 bp, Oryza sativa
  Clone ID: PAT_MRT4530_31630C.1
atggagacctttgcctctgcagacctttacgtggaggtagcttccatgccgccgcagcagcagcaggtggtgccaacagcgctcgcacccacggtgacgttcaaccaggacatgctattacaactcctccaattcatcatcaaggacggctacacagctactgcgtttatctga

SEQ ID NO: 26886 - DNA, 225 bp, Oryza sativa
  Clone ID: PAT_MRT4530_31631C.1
atggcgtcggaagaggaggacgtcgacggcgacggcgacgatggaggcgaggcggccggcgccgaagaggggtccggccccttcttccccatcctgctcttccctcgtcgccatggaaagaaccgggaagccataaatcctattcagtaccctttttctaatccgaattcccaattgctaatcgagacaaacaagcagcgcagaacagacggctacagagattaa

SEQ ID NO: 26887 - DNA, 144 bp, Oryza sativa
  Clone ID: PAT_MRT4530_31632C.1
tctcccactggctggagggcccacgcgcatgcaggagaaaaggcggagccgtggcaatcgtctcacggcagcgactactcatacgtctactgtagacaatccgacaatagaggagaacctggtgaagcatcgagttcgacctaa

SEQ ID NO: 26888 - DNA, 648 bp, Oryza sativa
  Clone ID: PAT_MRT4530_31633C.1
attaacctaattttattacaaacaatggaatccaagtaaaaatcaagaaaatttggaaaggtacaaaatcgtatgcaaaacacaagggccttgagccctgtatagttcaacagacagctttaaaaaaactctaggtaataaattgccagatagagaaaggaaacttttgtccacaaacctagcattatgcagtgacagggccctctgcattgctacgtccattgagctgctctgggtggatcttcttccccaacatcttcctcatgactcgacttaattttcttgtagccttcagcggctttgacgttggttttgttggcttcttgtgatgcatcttctccatgcacgacgtaggctttgaagtggatgccccagcaacaatgacgattttcgggtaacacttatcctctgcatcacttgatgagaatgcttctgcagcaaatagatcggcaagtgtagttctcactttctccaccttctctaacatcagaagtggtcgttcctggatgttaggaacatcttccacttccatgccatgcattaggatttcctccttcacaaagcacatgaagttgtcttctttcatcgatgatgagtgcatcttggcaggctcaagagcagatgccggttcacttggtgctgtaactg

SEQ ID NO: 26889 - DNA, 910 bp, Oryza sativa
  Clone ID: PAT_MRT4530_31634C.1
ttatgcagtgacagggccctctgcattgctacgtccattgagctgctctgggtggatcttcttccccaacatcttcctcatgaccactaaagactggctagatgcataatgcttactccagttgtagctatatggtaaaacatatgtgtaagatgtggcgcatcgacttaattttcttgtagccttcagcggctttgacgttggttttgttggcttcttgtgatgcatcttctccatgcacgacgtaggctttgaagtggatgccccagcaacaatgacgattttcgggtaacacttatcctctgcatcacttgatgagaatgcttctgcagcaaatagatcggcaagtgtagttctcactttctccaccttctctaacatcagaagtggtcgttcctggatgttaggaacatcttccacttccatgccatgcattaggatttcctccttcacaaagcacatgaagttgtcttctttcatcgatgatgagtgcatcttggcaggctcaagagcagatgccggttcacttggtgctgtaactggtgtgtcctgtttagcctcagccttttcttcttcgcacttctcttgttccactttctcatcacacatgatgatgggctcatcttgttcaatacaggactcaggacagagtgagtttacattgtggcccagcgtgccaattgcaagtataccattaataagcacatcacggagcagcagggcctcagtgtcttgctcagtcacacttgcacgcagagagtcttccttctcttccatggctaccttgttctcattgatggtgcaatactcgacattagaatgcttcttccgattcagccaattgaacacctttagagccatctctctagaaccaatatgaaaccagcctgcagcccggggatccactagt

SEQ ID NO: 26890 - DNA, 366 bp, Oryza sativa
  Clone ID: PAT_MRT4530_31635C.1
atgcagctcaacccgaaagcaagaactcgtcgaaataaaactaaagcaaaaaggtggcgatgcgccgaaattgtattgaacgtgactttatccatgtgcggcaatcaccttgaagtacctcaatccaacccgacatcacacatcaagttgtattgctaggatcggctacatcagcttacctagtccgacccagactcagccgatctcatcgtagccgatctggactccagccgatccctgctctgttttcgaactcgatctctgcctccgacttcgcttcaatctaatcttccgctcaagcgaaactttatcctctctctctccggcgattcctccgacgcaaaagcgactcccgggcgacttcat

SEQ ID NO: 26891 - DNA, 408 bp, Oryza sativa
  unsure (1)..(408): unsure at all n locations
  Clone ID: PAT_MRT4530_31636C.1
cggacgcgtgggtctaagaagttgattgggaacaaaaaccaaaacatttctcaagtctactcatatatcactatgtcacttttggtccataaaaggcaagagaaaaaagttttgcacattttggattcggaattgagcgtcctgacagcatcaacttcaaatgaaggaaaagaagctcctggcgagtttgaagtttgatccaccactattggattgacacaaaattatcgttatagcaagtgaagatacgagatggcacatctactgaggaggagaaactaataatgtcatgcacccgataggcagaaaagaagcatcacattcaagtcgctgatatggagcattgttcctgtctagattacaaggtaatcaaattnttggtggattttgctagcatcaaacccagca

SEQ ID NO: 26892 - DNA, 1449 bp, Oryza sativa
  Clone ID: PAT_MRT4530_31637C.1
ccggccgggcactccttgtgtgttggtggccatcactgagcttatcattggagcggcctcagctgagcccccaaccagctgcagcagcagcagcagcaggggcagcctcagttcaccgcccggcgccgccgcatccatctgcattgctcgctcggaggcctcagttttggttacctgcagtaatcattgttggagaaaatggttgcagaggcctttacagtagatttgaatgaacctcttgtatttcaggttggacatttaggtgagcagtatcaggaatgggttcaccaaccaattgttagcaaggaggggccaagactttttgccaacgatgtcttagagttcttaacacgcacggaatggtgggcaattcctcttatctggttgcctgttgtatgttggtgcctgactaaatcagtcgaaatgggacacacactttcagaagtagctctgatggttgtgtttggaatatgcctatggacattgatcgagtatataatgcatcgattcctgttccacataaatactaaaagttactggacaaacacagcacattaccttcttcatggaaattatcacaagacacccgactgatggccttcgacttgtctttccaccagctgctgcagctatcttgtgctttccgttctggaatctaatcaggctgattactacaccaactacaactcacggcgtgtttggaggcggcctgttgggttatgtgatgtatgactgcacacactactatctgcatcatgggcagccgtcatctgatccaggaaaacacctcaagaaataccatctgaaccatcacttcagaatccaaaacaaggggttcggaataacatcgacgctgtgggatcatgtgtttggtacattgccctcgacgaaaaccattgacaagaagagctcttgacttgtgctgcattttgcaaaaaagccagaaatggaggcaaagatagcatgtattatgttctccatgtccacctcctcaagccaaatcctgttcaggtgttctagattgatttgctcctgcagaatccccatgattgcatgattgatgacaggcctgatggatgatgaatcactgatcgatttctagttcttattctctgaagatgaaccgaagatccaagattggtccatgaaattatcctttcttgatttggccctccgagaatagattcctgtgcaatctagtcagtagttgttcaggtcatgtaaacgtacggtaagaaatttatgtgcagagggttttccagtttatcctatgcatttgacctctggtcatgtattgattctgagacaaagtgtagtgatcgcttgatgatactagtacacattgctgccttcttttttgtcctgtaaaagatttattattggcagcaatggatggtagagagggcaatctgcttcttacccttgagtataaagttttaagttttgagc

SEQ ID NO: 26893 - DNA, 335 bp, Oryza sativa
  Clone ID: PAT_MRT4530_31638C.1
gcacgaggctcctctccaccctttcgcttcgccgcttcctgcactgctctgccgctcctccatggtggtggtcttggaggacacttaattgagatatgaagtccgtttgtggttcttgtgagcttaagatgcttggcacttgattttcttagttcagcaatatcatcatttgacatttggaaccagtaaacttaatgctcatggacagagctgatacatcaggttttgtcagtggaggcatattttacatgaacatccatgtgtatttccatttcgtttatactatatgcttcctttatgaagttataaaattgggattctgatggtttgacgaa

SEQ ID NO: 26894 - DNA, 307 bp, Oryza sativa
  Clone ID: PAT_MRT4530_31639C.1
gccttgccattcttgtatccatccaaggagtgtgggacgccaaacatattttttttgtatctatgctaatctgatcattaatgaaggagagttttagcagcacagatcggattaaattggagtagtttcatagatggagcatagtgaccttattgagttctgaatggcattcaccctcatggacatataccatttgacaatgacctctgggggaagtgcacctttagatcatactggcacatgttgattagatgattaccatggattgttatgtgctattgggtatttaactgctggttgcctaaaa

SEQ ID NO: 26895 - DNA, 405 bp, Oryza sativa
  Clone ID: PAT_MRT4530_3163C.1
atgaccatgaagcctaacgaggtgctcgtcctcgtactcgtactggccgtggtcacctctccaggcacggtgtgcggggcgtcccggacagcgccggcggccgcgacgaagtgcgacccgctggcgctgcgcccgtgcgcggcggcgatcctatggggagaggcgccgtccaccgcgtgctgcgcggggctccgggcgcagaagcgctgcctgtgcaggtacgcgaagaaccccgacctgaggaagtacatcaactcccagaacagcaggaaggtggcagccgcctgcagcgtgccggcacccaggtgccgcttgtatgcaccacagaccaactatgatgatcctccttacagactctcttgtctcatcactgatgtcagaaatactattgcagaactgatctaa

SEQ ID NO: 26896 - DNA, 3744 bp, Oryza sativa
  Clone ID: PAT_MRT4530_31640C.1
atggcgtcgatgaagtatgatctaccgctgctagactacaagacgagattctcgctgtggcaagtcaagatgcgggctgttctggcgcaaactttggatcttgatgaggcgctggaaagcttcgggaagaagaaaacgactgagtggaccgctgaggagaagcggaaagatcgtaaggctctgtcgctaatccaacttcatctatctaatgatattttgcaagaagtgttgcaggaaaagactgctgcagaactttggctcaaactggaatcgatctacatgtctaaagatctaaccagtaagatgcatatcaagatgaagttgttctcgcacaagttgcaggagagtggttctgtgttgaaccacatatcggtcttcaaggagatcgttgccgacctagtgtcgatagaggtcagaggcagatctgagcagagaacctacaacgacagcaatgatcgtgacaagagtcagagtagaggccgttctaaatccagaggtaaaaagttctgtaagtattgcaaaaagaaaaatcacttcattgaagattgttggaagctacagaataaggagaaaaggaaatctgatggtaaggcctctgttgttaccagtgctgaaaactctgattcaggggattgtcttgttgtttttgctggttgtgttgctagtcatgatgaatggatacttgatactgcatgttcgtttcatatctgcattaacagagattggtttagttctaacaagtatgtgcagaatggagatgttgtgcgcatgggagatgataacccacgtgagatcatgggcattggctccgttcagatcaagactcatgatggcatgacacgcacgctgaaagatgtgagacacataccagggatggcgagaaatctcatctctctcagcacacttgatgcagaaggatacaaatactccggttcaggtggagttgtaaaggtatcgaaaggttctcttgtttacatgattggtgatatgaattctgcaaacttatatgtccttagaggaagtacattacatggttctgttaccgctgctgctgttactaaagatgaacctagtaagactaacctgtggcacatgcgtcttggacatatgagtgaacttggtatggcagaattgatgaagaggaacctgctggatggctgcactcagggtaacatgaagttctgtgagcactgtgtttttggtaagcacaagtgggtaaaattcaatatctcagttcatcgcaccaaaggtatacttgattatgtacatgctgatttgtgggggccttctcgtaagccctctcttggtggtgctcgttatatgcttaccattattgatgattactctagaaaagtgtggccttatttcctgaaacataaagatgatacatttgctgcttttaaggagtggaaagttatgatagaaaggcaaactgaaaaggaggaaggcatcattaggcatcacaccatcccatacactccacagcagaatggtgtagctgagcgcatgaacagaaccatcatctccaaggctcgttgcatgctgtccaacgctcgcatgaataagcgtttttgggcagaggctgctaacaccgcctgctacttgatcaacaggtcgccttctatcccacttaataagaaaactcccattgaggtatggtctggtatgcctgctgattattcacagttgagagtttttggatgcactgcttatgctcatgttgataatggaaaattagagcctagagctattaagtgtctatttcttggttatggttcaggagtaaaaggatataagttatggaatcctgaaactaacaagaccttcatgagcaggagtgttgttttcaatgaatctgttatgtttaatgacagcttgcccacagatatcataccaagtggttcagatgaggagcagcaatatgttagcgtgcaggtggagcacgtggatgatcaggaaactgaaattgttggtaatgatgttaatgatactgttcagcactcacctcctgttttgcagccacaagatgaacctattgcccatcgcagaacaaagaggagttgtggagctccagtccgtcttattgaggaatgtgatatggtttattatgcttttagttgtgctgaacaggtggagaatactcttgagccagccacatacactgaagctgttgttgctatgcaggaggagatgcagtctcttgagaagaatggcacatgggagcttgtgcacttgccaaaacagaagaagcctgtccattcttcaagagaaaggagggtttatctcctagcgagcctccgaggtttaaggcaagttgtaaagcatagttcaattcgcacattcttcagtattgttgctatgcatgatcttgagcttgagcagttagatgtgaagacaacatttttacatggagagcttgaggaggagatatacatggaccaaccagaagggttcatagtacctggtaaggagggttacgtttgcaagttgaaaagatctttgtatggtttgaaacaatctcctcgtcaatggtataaaaggtttgatttatttatgttgtcacatggctttaagaggtctgaatttgatagctgtgtgtatattaaatttgttaatggatcacctatatacttgttatatgttgatgatatgctgattgctgccaagagcaaggaacaaatcactacattgaagaaacagttgagtagtgagtttgatatgaaggatcttggtgctgctaagaaaattctaggtatggaaatcactagagacagaaattctggtttgttatttcttagtcagcaaagctacattaagaaggttcttcagcgttttagcatgcatgatgcaaagcttgttagcactcctattgcacctcattttaaattatcagttttacaatgtgctagtactgatgaggatgtagaatacatgtctagagttccatattctagtgctgttggttctttgatgtatgccatggtttgctccctgccagatttatctcatgctatgagtttggttagtagatacatggctaatcctggtaaagaacattggaaagctattcagtggattttcagtcaaagtgctatatgcctcaccaaagatcagatgtttcatgagaggacaaagcacattgatatcaagtaccattatgttcgcgatgtagtcgcgcaagcttcacagtggaggtggtggtgcgagctgaataggcaaaaccagcccgtcgtccttgccggcgttgtccactggctaatggatgcctcccgcagtagccactacatcctgacgtacgacattgcgacggcggaggaggggaagatggatctccccaccgattattgtggttgcaaggaaatacggttgggatcgtcgccggaggggaggctgaggctgctcgtccttcatcagcacctctcgttgtccgtgtggctgttctccggctccggctccggctggacaaggcacatcatgatcgagacggagagtaggctacggtgtgtgtacccgtcgtggagcgtggacttggagttgccgtggtcgtgcacgtgggagaggagcgacacggtgttgctgcgtcccatggactactccgggtccgggtggacaagatgcccactagggttgctggtcttggacgtcaccatgggggaaatgcgtactgttaataatcggagcgaccaacttgttctctacgcagtcgatctcccctctcgcatctcagcaatgaaaacctactag

SEQ ID NO: 26897 - DNA, 1720 bp, Oryza sativa
  Clone ID: PAT_MRT4530_31641C.1
atggccaaaccattagatttgccgttgttgctgataccggtcatggttgttatcctcatcagcgtgtcatttgcccaaacaaatgtcacttcgggcgcctccgtgcaggccgtcgccggcgccggctggtcctcgccgtcgggccactttgtcttcggcttctacgccaccgacggcggcctcgccgtgggcgtctggctcgccaccgcgcccagcataacggtgacgtggacggcgagccgcaacgacacgccggccaccggcggcgcgctgcggctcacctacgacggccgcctgctctggaccggcgcgaacggccaggacaggaccgtcgccgcgccgccccagccggccgtcgcggcggccatgcgcgacgacggcaacttcgtgctgtacgccgcgaacgcgacggtggcgtggtcgacgttcgcggcgccgaccgacaccctgctcgccggccaggacctcgcccccggcgcacagctcttctcgagcgtctccgccacgagcagggccaccggcaagtaccggctgaccaaccagctcaacgacggcaacctcgtcatgtacccggcgggcaccatgaacgtcgccgccgccgcgtactgggacaccggcacgttccagataggcttccccctcaccttgcgcctcgatgccagcggcgtgctctacctcgtcggcaacaatggcagctacaccaagaacttgacgaaggccagtgcagctcaagccgtagagcaagctcactaccaccgcgtcacgcttgatcccgacggcgtcttgcgttcgtatcgccatggattgctgtcgagcggcgggtggaagaccgacgtcgagtggatcgggccgagcgatcggtgccatgtcaagggcgcctgcgggttcaacagctactgcgtgcttgatcgcgacgcgcagcccagctgcttgtgcccgccggggttcgatttgatcgacgccggcgacgccgcgggcgggtgcacggcgagctccggcgccggcgagtgcacggggggcagagagccgaccctggcggcgtgcatgtcagactgcttctgcgtcgccgcgctgctcgacaccaacgacggcacgtgcacgaagcaacagctcccacttcgatacggccgcgcgggcggcggctacacgatgttcgtcaagaccggtggagcggcgagcccggcgctcggcggcggcggcggcggcaaccaccaccaccaccgcttcaggcgagcgagcaccgtcgcgctggtttgcgtcgggctcttgacgttcgtcgcgctgtgcgccctcctcgcgtcggcgcggctgctctggctgaaccagaggatggtgcgacggcgcgtcgcgctcgccgacgccgaggccctggacgaggaggcgccgctccgctcgtacagctacgaggagctggagcacgcgacgtacagcttccgacaccccctcggccgcggcgcgttcggcacggtgttcaaggggacgctgcggcgcggcggagagaggaccgtcgccgtgaagcggctggagaagctggtggaggacggcgagcgtgagttccagagggaggagagtggttctgtgttgaaccatatatcggtcttcaaggagatcgttgccgacctagtgtcgatggaggtcagaggcagatctgagcagagaacctacaacgacaacaatgatcgtgacaagagccaaagtagaggccgttccaagtccagag

SEQ ID NO: 26898 - DNA, 169 bp, Oryza sativa
  Clone ID: PAT_MRT4530_31642C.1
gatccttagacgccgcctttttttttttttgttaaaatatatagccgagctccagtattgaggacattgccaacccaacaacatatatctagcagatacactcttactaagtagagagggtcggtgatcaaaacaaagcgagccggccgtaaataaaaacatgacaact

SEQ ID NO: 26899 - DNA, 303 bp, Oryza sativa
  unsure (1)..(303): unsure at all n locations
  Clone ID: PAT_MRT4530_31643C.1
ccccnnccggnccacccctcgaggtcgacccacgcgtccgagagacggacagaggccactacccgtgcaccacgccccctctcccacaatctcgcaaaaaagttgattttctttttcagcttcctcctcccctcctccgcttctcatcaatccactagcatatcagatcagattcctgtacacttccctttcctcgcatccaatcccgactatcaaatcatcaccatccttttgcaaaaccaaaaaaaaaaaagtagataaaagaagaaggttcttgcatccaagagaggaggacactgtcgt

SEQ ID NO: 26900 - DNA, 3375 bp, Oryza sativa
  Clone ID: PAT_MRT4530_31644C.1
atggcgtcgatgaagtatgatctaccgctgctagactacaagacgagattctcgctgtggcaagtcaagatgcgggctgttctggcacaaacttcggatcttgatgaggcgctagaaagctttgggaagaagaaatcgactgtatggaccgctgaggagaagcggaaagatcataaggctctgtcgctgatccaacttcatctatctaatgatattttgcaagaagtgttgcaggaaaagactgctgcagaactttggctcaaactggaatcgatctgcatgtctaaagatctaaccagtaagatgcatatcaagatgaagttgttctcacacaagttgcaggagagtggttctgtattgaaccacatatcggtcttcaaagagatcgttgccgacctagtgtcgatggaggtacagtttgatgatgaagatttaggtcttttactgttatgctcactgcctagttcatatgcaaattttcgtgacaccatacttttaagccgtgatgaactaaccctagcggaagtctatgaggcgctccaaaacagggagaagatgaaatgggcgaagcattgcaggtcagaggcagatttgagcagagaacctataacgacagcaatgatcgtgacaagagctagagtagaggccgttataagtctagagaataaggagaaaaggaaatctgatggtaaggcctctattgttaccagtgctgataactctgattcaggagattgtcttgtcgtttttgctggttgtgttgctagtcatgatgaatggattcttgatactgcatgttcgtttcatatctgcatgaacatagattggtttagttcttacaagtctgtgcagaatggagattttgtgcgcatgggagatgataacgcacgtgagatcgtgggcattggctccgttcagatcaagacacatgatggcatgacacgcacgctgaaagatgtgagacacataccagggatggcgagaatctcatctctctcagcacacttgatgcagaaggatacaaatactccggttcaggtggagttaggaagtacattacatggttctgttaccgctgctgctgtttctaaagatgaacctagtaagactaacctgtggcatatgcgtcttggacatatgagtgaatttggtatggcagaattgatgaagaggaacctgctggatggctacattcagggtaacatgaagttctgtgagcactgtgtttttggtaagctcaagagggtaaaattcaatacctcagttcatcgcaccaaaggtatacttgattatgtccatgctgatttgtgggggccttctcgtaagccctctcttggtggtgctcgttatatgcttaccattattgatgattactctagaaaagtgtggccttatttcctgaaacataaagatgatacatttgctgcttttaaagagtggaaagtcatgatagaaaggcaaactgaaaatgaggtaaaagtacttcgcactgacaatggtggtgaattttgttcggatgcttttgatgattactgcaggaaggaaggcatcgttaggcatcacaccatcccgtacactccacagcagaatggtgtggctgagcgcatgaacagaaccatcatctccaaggctcgttgtatgctgtccaacgctcgcatgaacaagcgtttttgggcagaggctgctaacaacgcctgctacttgatcaacaagtcaccttctatcccacttaataagaaaactcccattgaggtatggtctggtatgcctgctgattattcacagttgagagtttttggatgcactgcttatgctcatgttgataatggaaaattagagcctagagctattaagtgtatgtttcttggttatggttcaggagtaaaaggatataagttatggaatcctgaaactaataagacattcatgagcaggagtgttgttttcaatgaatctgttatgtttaatgatagcttgcccacaaatgtcataccaggtggttctgatgaggagcagcaatatgttagcgtgcaggtggagcacgtggatgatcagaaaactgaaattgttggtaatgatgttaatgatactgttcaacactcacctcctgttttgcagccacaagatgaacctattgcaaatcgcagaacaaagaggagttgtggagctccagtccgccttattgaggaatgtgatatggtttattatgcttttagttgtgctgaacaggtggagaatactcttgagccagccacatacactgaagctgttgtttctggagaccttgtaaagcatagttcaattcgcacattcttcagtattgttgctatgcatgatcttgagcttgagcagttagatgtgaagacaacatttttacatggagagcttgaggaggagatatacatggaccagccagaagggttcatagtacctggtaaggaggattatgtttgcgagttgaaaagatctttatatggtttgaaacagtctcctcgtcaatggtataaaaggtttgattcatttatgttgtcacatggctttaagaggtctgaatttgatagctgtgtgtatattaaatttgttaatggatcacctatatacttgctgttatatgttgatgatatgctgattgctgccaagagcaaggaacaaatcactacattgaagaaacagttgagtagtgagtttgatatgaaggatcttggtgctgctaagaaaattctaggtatggaaatcactagagacagaaattctggtttgttatttcttagtcagcaaagctacattaagaaggttcttcagcgttttaacatgcatgctgcaaagcctgttagtactcctattgcacctcattttaaattatcagctttacaatgtgctagtactgatgaggatgtagaatacatgtctagagttccatattctagtgctgttggttctttgatgtatgccatggtttgctcccatccagatttatctcatgctatgagtttggttagtagatacatggctaatcctggtaaagaacactggaaagctgttcagtggattttcaggtacctcagaggcacagctaatgcttgcttgaagtttggcaggactgataaggggcttgttagatatgtggattctgattttgctgcagatttggataagagaagtcaaagtgctatatgcctcactaaagatcagatgtttcatgagaggacaaagcacattgatatcaagtaccattatgttcgcgatgtagtcacgcaaggtaagctgaaggtatgcaagataagtactcatgataatcctgctgatatgatgacaaagcctgttcctattgctaagtttgagctttgctcaagcttagttggtatagtggtttag

SEQ ID NO: 26901 - DNA, 189 bp, Oryza sativa
  Clone ID: PAT_MRT4530_31645C.1
atgccggggagtggcggggacaccagatctggtggtggtgggatcataaccgccaggatgcccagattcgatgccagcgtggggggacggttcctggcggcggcgacctcgatatcggccaccgtccggatcaaccccatccaccgttcatctccggtcacagtcccacctgtcacttgtcctgcgtag

SEQ ID NO: 26902 - DNA, 3669 bp, Oryza sativa
  Clone ID: PAT_MRT4530_31646C.1
atggcgtcgatgaagtatgatctaccgctgctagactacaagacgagattctcgctgtggcaagtcaagatgcgggctgttctggcgcaaacttcggatcttgatgaggcgctggaaagcttcgggaagaagaaaacgactgagtggaccgctgaggagaagcagaaagatcgtaaggctctgtcgctgatccaacttcttctatctaatgatattttgcaagaagtgttgcaggaaaagactgctgaagaactttggctcaaactggaatcgatctgcatgtctaaagatctaaccagtaagatgcatatcaagatgaagttattctcacacaagttgcaggagagtggttctgtgttgaaccacatatcggtcttcaaggagatcgttgccgacctagtgtcgatggaggtacagtttgatgatgaagatttaggtcttttactgttatgctcactgcctagttcatatgcaaattttcgtgacaccatactgttaagccgtgatgaactaaccctagcggaagtttatgaggcgctccaaaatagggagaagatgaaaggtatggttcagtctgatccgtcgtcctctaagggcgaagcattgcagaataaggagaaaaggaaatctgatggtaaggcctctgttgttaccagtgctgaaaactctgattcaggagattgtcttgttgtttttgctggttgtgttgctagtcatgatgaatggatacttgatactgcatgttcgtttcatatctgcattaacagagattggtttagttcttacaagtctgtgcagaatggagatgttgtgcgcatgggagatgataacccacatgagatcgtgggcattggctccgttcagatcaagactcatgatggcatgacacgcacactgaaagatgtgagatacataccagggatggcgagaaatctcatctctctcagcacacttgatgcagaaggatacaaatactccggtttaggtggagttgtaaaggtatcgaaaggttctcttgtttacatgattagtgatatgaattctgcaaacttatatgtccttagaggaagtacattacatggttctgttaccgctgctgctgtttctaaagatgaacctagtaagactaacctgtggcacatgcgtcttggacatatgagtgaacttggtatggcagaattgatgaaaaggaacctgctggatggctacactcagggtaacatgaagttctgtgagcactgtgtttttggtaagcacaagagggtaaaattcaatacctcagttcatcgcaccaaaggtatacttgattatgtacatgctgatttgtgggggccttctcgtaagccctctcttggtggtgctcgttatatgcttaccattattgatgattactctacaaaagtgtggccttatttcctgaaacataaagatgatacatttgctacttttaaggagtggaaagttatgatagaaaggcaaactgaaaaggagaaggaaggcatcgttaggcatcacaccatcccgtacactccacagcagaatggtgtagctgagcgcatgaacagaaccatcatctccaaggctcgttgcatgctgtccaacgctcgcatgaacaagcgtttttgggcagaggctgctaacaccgcctgctacttgatcaacaagtcgccttctatcccacttaataagaaaactcccattgaggtatggtctggtatgcctgctgattattcacagttgagagtttttggatgcactgcttatgctcatgttgataatggaaaattagagcctagagctattaagtgtctatttcttggttatggttcaggagtaaaaggatataagttatggaatcctgaaaccaacaagaccttcatgagcaggagtgttgttttcaatgaatctgttatgtttaatgacagcttgcccacagatcactcacctcctgttttgcagccacaagatgaacctattgcccatcgcagaacaaagaggagttgtggagctctagtccgccttattgaggaatgtgatatagtttattatgcttttagttgtgctgaacaggtggagaatactcttgagctagccacatacactgaagctgttgtttctggagatcgtgagaagtggatctcagctatgcagggggagatgcagcctcttgagaagaatggcacatgggagcttgtgcacttgccaaaacagaagaagcctgttcgttgtaaatggatcttcaagagaaaggagggtttatctcctagcgagcctccgaggtttaaggcaacgttagtagcaaaaggtttcagtcaaattgctggtgttgattataatgatgtgttctctccagttgtaaagcatagttcaattcgcacattcttcagtattgttgctatgcatgatcttgagcttgagcagttagatgtgaagacaacatttttacatggagagcttgaggtggagatatacatggaccagccagaagggttcattgtacctggtaaggaggattatgtttgcaagttgaaaagatctttggatggtttgaaacagtctcctcgtcaatggtataaaaggtttgattcatttatgttgtcacatggctttaagaggtctgaatttgatagctgtgtgtatattaaatttattaatggatcacctatatacttgctgttacatgttgatgatatgctgattgctgccaagagcaaggaacaaatcactacattgaagaaacaattgagtagtgagtttgatatgaaggatcttggtgctactaagaaaattctagatttatctcatgctatgagtttggttagtagatacctggctaatcctggtaaagaacactggaaagctattcagtggattttcaggtacctcagaggcacagctgatgcttgcttgaagtttggcaggactgataaggggcttgttggatatgtggattctgattttgctgcagatttggataagagaaggtcactcataggttatgtgtttaccattgggagttgtgctgtgagttggaaggcaacattgcagtctgttgttgcccagtctaccactgaagcagaatacatggctattgctgaagcatgtaaagaatcagtttggttgaaaggattgtttgctgagctttgtggagttgattcttgcattaacttgttttgtgacagtcaaagtgctatatgcctcaccaaagataagatgtttcatgagaggacaaagcacattgatatcaagtaccattatgttcgcgatgtagtcgcgcaaggtaagctaaaggtcgagcggctgcaaaacggagcccagagccaggctgagggaaaaagctcgaatcgagcttcgcaacacagcctggcccgtcacatgcagcgcgcggcacccgcgagtgcaaggcgctgcacccgcacatgcaccggcctcgctggggtcaccgccccacccgagtatttgccctgctctcacccggctcctgatctcctcgtcctcctacaagccgcggtttccgtccccaccgaccgccggagacgagcaagcagggaagaacaaccggcgagaagacggcagagacgaggggcttggtggagctcggccggctacgttggagatgagggctggaggcggctgcagggtcacaactcacaacaactgaatttgtga

SEQ ID NO: 26903 - DNA, 2421 bp, Oryza sativa
  Clone ID: PAT_MRT4530_31647C.1
atggaatgcaacagagaggaggccttcagtgccagagaaattgctgtaaagaagctggaaaatagagactttgtcggtgcccgcaagatcgcgattaaagctcaaaggctttttcctgagcttgagaacatctcccagctgttaactgtctgtgaagttctttcttcagctgaggcaaagatatctggagagttggattggtatggtgttcttcaggtggataaaatggcagacgaaacagtaataagaaagcagtacaacatactttcgtatcggcttcatcctgataataatactctgtttggtgccgaagcagcattcagatttgtttcagaagctcatgcagtattgagtgatcatgcgaagaggtctctgtatgacaccgaaaggcagcgtgcttcaagagaagtggccaaggaggctacacaaccaccaaacaagactgaagcaaacataaacaatttggctggatccatgccaccatctgcttctacacgatctcgacgggacactcaaacccaacccactcaaatctctacttgaataaagaaaaaacaaagtcccaacgttcgcacctatgatgctgtaatcaatcaaaatatgcattgacattgaaaaagcttaagacgaaatttaaaggattagaaagtaaagcgcaaaggaaataagaacagaagctgagggtgagggtgtcactcagatatgtccgcattgtcagaagcaatctctgtactaccaacggaactttttggcccgctgcaatgattgtggtaagttctttgcaatcaaactgcgtgagcagtctgtgccctcaagaatcctatcaactgctgcaaaaagccccaatcagcatggtaatcagcatcaacaaggtaaatgcttggtgacaagaagcgaggccattcaattttcagcaatgaagcaaactaatactgaagaaactgatgaatccataaaacagtatggctgggctggtgacatggaaggtaaaggcctggtgacaagaagtgacagagttcaattttcagaaattagccaagctaaatctcatgtgcctcctgctgacaatgatatgcccggaactttggtaccaaggagtcctgatccaaactccatcgctgtgcagaatttgactggagaaagtgtatcagcagggacaaatgctccaggatcatccagtcttcagatattgggtcggagaaagctctgtgatagctctgacagcagccgtgctatgaactctaatattgagaggaaaaggaagtataattctccatctgatgctgattggagtaatgagcaaatatgtaatgatgatgttgctgttactgagaatcaatttgccaaacaacatgtccccatcgaagtggacagtgaagaggaaggaaatgaaaaacatggagacaatcaacaaagtcataggaaagatgatactgatacttcttctcagcgacctgattctgccaatcctgtgattgcctactcttctccagacttctttaattttgacaagtccagagatgtctcccaaattgcggttgatcagatctgggcagtctatgatggccatgattgcatgccaagagcttatgcccggataaatcatgtcgatccttccaacctcaaagtgcagttcacttggctggtgcacaacacagtaaatgaacaaaattccaaatcgaccaatgaaaaactgccatttgcttgtgggaacttctgcttaggagaaacagatgtattgcacaatccatcgaggtacttatcccacagtgtttcgtcgacaggcaaaaatggtaactcgtgtgatataaatcctaacaatggtgaggggtggccgtgtgggctctttataaaggatggagcatgcagtttgttgacgtagcggatagatatcaatcatatgggtatgatattgtgcaagtcctttccagtggctcaatggatgatggtgtcacggtttcaccgctggtcagaattgcaggggttgtcagtctatttgcgaaagcgaagaacgagtcatgtttttcgatatcatcatgtgaggtacttcgtttttctcacagtatccccttctataggacgaatggaaatgaaagggtaggtgttgcagaagggttcctggaactagacactgcagctcttccaagtgacttggattcggcatttacttccattactcttgaatcctacatggctcttgacaagaaaacaaatatcgaattaatctgttatgcatgccctgattcagaattctacaacatcgaacaagaccgctcgcatgataagtttgaagctggccagatttgggctctttacagtgatgctgataaattccccaacatctatggttgggtaagcaaagtgccatggcttcattggagagtgcaccttgcagatctctgacccatctgttgttggtta

SEQ ID NO: 26904 - DNA, 3539 bp, Oryza sativa
  Clone ID: PAT_MRT4530_31648C.1
atggcgtcgatgaagtatgatctaccgctgctagactacaagacgagattctcgctgtggcaagtcaagatgcaggctgttctggcgcaaacttcggatcttgatgaggcgctggaaagcttcgggaagaagaaatcgactgaatggaccgctgaggagaagcggaaagatctgttgcaggaaaagactgttgcagaactttggctcaaactggaatcgatctacatgtctaaagatctaaccagtaagatgcatatcaagatgaagttgttctcgcacaagttgcaggagagtggttctgtggtcttcaaggagatcgttgccgacctagtgtcgatggaggtcagaggcagatctgagcagaaaacctacaacgtcagcaatgatcgtgacaagagtcagagtagaggccgttctaaatccagaggtaaaaagttctgtaagtattgcaaaaagaaaaatcacttcattgaagaatgttggaagctgcagaataaggagaaaaggaaatctgatggtaaggcctctgttgttactagtgctgaaaactctgattcaggagattgtcttgttgtttttgctggttgtgttgctagtcatgatgaatggatacttgatactgcatgttcgtttcatatctgcattaacagagattggtttagttcttacaagtctgtgcagaatggagatgttgtgcgcatgggagatgataacccacgtgagatcgtgggcattggctccgttcagatcaagactcatgatggcatgacacgtacgctgaaagatgtgagacacataccagggatggcgagaaatctcatctctctcagcacacttgatgcagaaggatacaaatactccggttcaggtggagttgtaaaggtatcgaaaggttctcttgtttacatgattggtgatatgaattctgcaaacttatatgtccttagaggaagtacattacatggttctgttaccgctgctgttgtttctaaagatgaacctagtaagactaacctgtggcatatgcgtcttggacatatgagtgaacttggtatggcagaattgatgaagaggaacctgctggatggctgcactcagggtaagatgaagttctgtgagtactgtgtttttggtaagcacaagagggtaaaattcaatacctcagttcatcgcaccaaaggtatacttgattatgtacatactgatttgtgggggccttctcgtaaggcctatcttggtggtgctcgttatatgcttaccattattgatgattactctagaaaagtgtggccttatttcctgaaacataaagatgatacatttgctgcttttaaagagtggaaagtcaggatagaaaggcaaactgaaaaggaggtaaaagtacttcgcactgacaatggtggtgaattctgttcggatgcttttgatgattattgcaggaaggaaggcatcgttaggcatcacaccatcccgtacactccacagcagaatggtgtggctgagcgcatgaacagaaccatcatctccaaggctcgttgtatgctatccaacgctcgcatgaacaagcgtttttgggcagaggctgctaacaccgcctgctacttgatcaacaggtcgccttctatcccacttaataagaaaactcccattgaggtatggtctggtatgcctgctgattattcacaattgagagtttttggatgcactgcttatgctcatgttgataatggaaaattagagcctagagctattaagtgtctatttcttggttatggttcaggagtaaaaggatataagttatggaatcctgaaactaacaagaccttcatgagcaggagtgttattttcaatgaatctgttatgtttaatgacagcttgcccacagatccacaagatgaacctattgcccatcgcagaacaaagaggagttgtggagctccagtccgtcttattgaggaatgtgatatggtttattatgcttttagttgtgctgaacaggtgaagaatactcttgagccagccacatacactgaagctgttgttgctatgcaggaggagatgcagtctcttgagaagaatggcacatgggagcttgtgcacttgccaaaacagaagaagcctgttcgttgtaaatggatcttcaagagaaaggagggtttatctcctagcgagcctccgaggtttaaggcaaagttagtagcaaaaggtttcagtcaaattgctggtgttgattataatgatgtgttctctccagttgtaaagcatagttcaattcgcacattcttcagtattgttgctatgcatgatcttgagcttgagcagttagatgtgaagacagcatttttacatggagagcttgaggaggagatatacatggaccagccagaagggttcatagtacctggtaaggagggttatgtttgcaagttgaaaagatctttttatggtttgaaacagtctcctcgtcaatggtataaaaggtttgatttatttatgttgtcacatggctttaagaggtctgaatttgatagctgtgtgtatattaaatttgttaatggatcacctatatacttgttatatgttgatgatatgctgattgctgccaagagcaaggaacaaatcactacattgaagaaacagttgagtagtgagtttgatatgaaggatcttggtgctgctaagaaaattctaggtatggaaatcactagagacagaaattctggtttgttatttcttagtcagcaaagctacattaagaatgttcttcagcgttttaacatgcatgatgcaaagcttgttagcattcctattgcacctcattttaaattatcagttttacaatgtgctagtactgatgaggatgtagaatacatgtctagagttccatattctagtgctgttggttctttgatgtatgccatggtttgctcccggccagatttatctcatgctatgagtttggttagtagatacatggctaatcctggtaaagaacactggaaagctgttcagtggattttcaggtacctcagaggcacagctgatgcttgcttgaagtttggcaggactgataaggggcttgttggatatgtggattctgattttgctgcagatttagataagagaaggtcactcacaggttatgtgtttaccattggtagttgtgctgtgagttggaaggcaacattgcagcctgttgttgcccagtctaccactgaagcagaatacatggctattgctgaagcatgtaaagaatcagtttggctgaaaggattgtttgctgagctttgtggagttgattcttgcattaacttgttttgtgacagtcaaagtgctatatgcctcaccaaagatcagatgtttcatgagaggacaaagcacattgatatcaagtaccattatgttcgcgatgtagtccacaagggtgaaggattgattcatgctacaagaaggaatttgtctcgaggtggagtttgttgaattgtgatccaaattcatttgcacttaatatcttcactatatctgggctgtgcgcctag

SEQ ID NO: 26905 - DNA, 510 bp, Oryza sativa
  Clone ID: PAT_MRT4530_31649C.1
gtggggggtgtgtgttttattttttttttttttttttttttttttttttttttttttcttttttttttttttttttttttttttttttttttttttttttaaaatatgaaaaacaactttttttttttttatttcccccaaagtttcacatgtcacggggtggtgggggggaccttattttaaacttccaaaccactttcctgttaaaactcattacaagacccccccaaggggggaaatggtcctgggggccccatagtccctaggggggatcccatttttagatggcccgttaaaagccaacaaagcttgaccttggcccagtttccgatcaaaggggaaatccccaaactgctggagttgtacctgctgccctttggcctgaacaatgttaatgtcctgatagggaaattgttgcccccccagcccgagctgttgccaaacttggttgtttctcagttaaaacccctcttattgcaaaaaggggcttgcccttttccccggccccgg

SEQ ID NO: 26906 - DNA, 173 bp, Oryza sativa
  Clone ID: PAT_MRT4530_3164C.1
aataagaccggcggcgtgtcgacactgacacagtacgacgtccagtatctattgtagtacgtacaagactatctcttgggatagcctgatttgtatgccatacgcaaggaaggtattgtggattatttggtcctttcatcgcacaaacagtgtagtcccttctagtcataaat

SEQ ID NO: 26907 - DNA, 3483 bp, Oryza sativa
  Clone ID: PAT_MRT4530_31650C.1
atggcgtcgatgaagtatgatctaccgctgctagactacaagacgagattctcgctgtggcaagaaaagactgctgcagaattttggctcaaactggaatcgatctgcatgtctaaagatctaaccagtaagatgcatatcaagatgaagttattctcgcacaagttgcaggagagtggttctgtgttgaaccacatatcggtcttcaaggagatcgttgccgacctagtgtcgatggacgtacagtttgatgatgaagatttaggtcttttactgttatgctcactgcctagttcatatgcaatttttcgtgacaccatatttttaagccgtgatgaactaaccctagcggaagtctatgaggcgctccaaaacagggagaagatgaaatgtatggtcagaggcagatctgagcagagaacctacaacgacagcaatgatcgtgacaagagtcagagtagaggccgttctaaacctagaggtaaaaagttctgtaagtattgcaaaaagaaaaatcacttcattgaagaatgttggaagctacagaacaaggagaaaaggaaatatgatggtaaggcctctgttgttaccagtgctgataactctgattcaggagattgtcttgtcgtttttgctggttgtgttgctagtcatgatgaatggatacttgatactgcatgttcgtttcatatctgcattaacagagattggtttagttcttacaagtctgtgcagaatggagatgttgtgcgcatgggagatgataacccacgtgggatcatgggcattggctccgttcagatcaagacacatgatggcatgacacgcacgctgaaagatgcgagacacataccagggatggcgagaaatctcatctctctcagcacacttgattcagaaggatacaaatactctggttcaggtggagttgtaaaggtatcgaaaggttctctcgtttatatgattggtgatatgaattctgcaaacttatatgtccttagaggaagtacattacatggttctgttaccgctgctgctgtttctaaagatgaacctagtaagactaacctatggcacatgcgtcttggacatatgagtgaacttggtatggcagaattgataaagaggaacctactggatggctgcactcagggtaacatgaagttctgtgagcactgtgtttttggtaagcacaagagggtaaaattcaatacctcagttcatcgcaccaaagatatacttgattatgtacatgctgatttgtgggggccctctcgtaagccctctcttggtggtgcttgttatatgcttaccattattgatgatttcgctagaaaagtgtggccttatttcctgaaacataaagatgatacatttgatgcttttaaagagtggaaagtcatgatagaaaggcaaactgaaaaggaggtaaaagtacttcgcactgacaatggtggtgaattttgttcggatgcttttgatgattactgcaggaaggaaggcatcgttaggcatcacaccatcccgtacactccacagcagaatggtgtggctgagcacatgaacagaaccatcatctccaaggctcgttgtatgctgtccaacgctcgcatgaacaagcgtttttgggcagaggctgctaacaccgcctgctacttgatcaacaggtcgccttctatctcacttaataagaaaactcccattgaggtatggtctggtatgcttgctgattattcacagttgagagtttttgaatgcactgcttatgctcatgttgataacggaaaattagagcctagagctattaagtgtctgtttcttggttatggttcaggagtaaaaggatataaattatggaatcttgaaactaataagaccttcatgagcaggagtgttgttttcaatgaatctgttatgtttaatgacagcttgcccacagatgtcataccaggtggttcagatgagaagcaacaatatgttagcgtgcaggtggagcacgtggatgatcaggaaactgaaattgttagtaatgatgttaataatactgttcagcactcacctcctgttttgcagccacaagatgaacctattgcacatcacataacaaagaggagtcgtggagctcctgtccgtcttattgaggaatatgatatggtttattatgcttttagttgtgccgaacaagtggagaatactcttgagccggctacatacactgaagctggtgtttctggtgatcgtgagaagtggatctcagctatgcaggaggagatgcagtctcttgagaagaatggcacatgggagcttgtgcacttgccaaaacagaagaagcctgttcgtattaaatggatcttcaagagaaaggagggtttatctcctagcgagcctccgaggtttaatgcaaggttagtagcaaaaggtttcagtcaaattgctgatgttgattataatgatgtgttctctccagttgtaaagcatagttcaattcgcacattcttcagtattgttgctatgcatgatcttgagcttgagcagttagatgtgaagacagcatttttacatggagagcttgaggaggagatatacatggaccagccagaagggttcatagtgcctggtaaggaggattatgtttgcaagttgaaaagatctttgtatggtttgaaacagtctcctcgtcaatggtataaaagtaaggaacaaatcattacattgaagaaacagttgagtagtgagtttgatatgaaggatcttggtgctgctaagaaaattctagctttacaatgtgctagtactgatgaggatgtagaatacatgtctagagttctatattctagtgctattgattttttgatgtatgccatggtttgctcccgtccagatttatctcatgctatgagtttggttagtagatacatggctaatcctggtaaagaacactggaaagctgttcagtggattttcaggtatctcagaggcacagctgatgcttgcttgaagtttggcaggactgataaggggcttgttggatatgtggattctgattttgctgcagatttggataagagaaggtcactcacgggttatgtgtttaccattggcagttgtgctgtgagttggaaggcaacattgcagcctattgttgcccagtctaccactgaagcagaatacatggctattgctgaagcatgtaaagaatcagtttggttgaaaggattgtttgctaagctttgtggagttgattcttgcattaacttgttttgtgacagtcaaagtgctatatgcctcactaaagatcagatgtttcatgagaggacaaagtacattgatatcaagtaccattatgttcgcgatgtagtcgcgcaaggtaagctgaaggtatgcaagataagtactcatgataatcctgctgatatgatgacaaagcctgttcctgttgctaagtttgagctttgctcaagcttagttggtatagtggtttag

SEQ ID NO: 26908 - DNA, 579 bp, Oryza sativa
  Clone ID: PAT_MRT4530_31651C.1
atgcatgcatatacatttgcatggtccagagacaagaatattcgcgtacaagtgttgagtgtgtactttttggtggtgtttgctattcggatttctgaattttgcctcggttccatccatgacagtgctactgctacttgctgtttattccgcggtttttgcatgcatatgcttgggggggctaaggaggagaataatgcaatgtgggcagcgatgcagaaaaggaacggccattgctcattaggaatccaacgggatgctaattgtcaccggttaagctgcagatcagccttctcgagtataggctttacgaatcgattcttccgtaccacaaggagccatgaacaatccatccaatgtattgttcatcccggtgcaacacaagatatatcgggctatcggccaatggatcgccatggaagtatggaactgacgaggccacaatgcaaagttttggtaattgcgagcacatgggccgtgagagagagagagagagagaggggggaaattcggcgagtgggccatgcagcccacatagtcagctttggcctggcccggtatcggggctatgggccgctc

SEQ ID NO: 26909 - DNA, 795 bp, Oryza sativa
  Clone ID: PAT_MRT4530_31652C.1
ctagttgtgtggccttgccgctgtggatggctttatgccgacggtgacgttgaagtgccggaacacggcggcccaccggcggttgttcttgagcctgtgcacggcgatggtgttgggccggaactcgtccatgtcccagttgatgtcgtacatccgcggcttgaggttgtaccggttccgtcccgatgtcctcgttggcggacacccagcgcgcgacgtcccaggacacgacgtagcccatgccgtgcatgaacggcatcgggtcgtcgccgacggcgtagccccggccgaggtagacgtcctccgcggcttgccgcggagctcgtcggcgagcgccgccacgcggaggtacgtgtcgtcgtcggccttcatgacgtagtcgtaggggcacggcgcgaacaggcgcggcacggaggagaggtacgcgtgcgtcttgccgtcgttcatgttctcggtactgcagccgtcgagcaccaggatgtcgccgtgccgcgccgcctccgccgccaccagcaccgcgtccgcggcgtccgtcacgtcgcacagcacgaaccgcacgtccacctgcgcccccggcgcgggctgcagcgcgtacgccaggcgcaggatgccgcgccgctcgtaccggctcggcgtggtcagcacccccacgaggagtcggaactccggctccctcgcggccgtcgtctcagcacctagaccgccgtcgttgttagtgttgtcgacgacgggacgggagcgcggagcactgaggcagccggagacggagaggacaacaaggctcgacagcgccat

SEQ ID NO: 26910 - DNA, 4383 bp, Oryza sativa
  unsure (1)..(4383): unsure at all n locations
  Clone ID: PAT_MRT4530_31653C.1
atggtatcgatgaagtatgatctaccactactagactacaagacgagattctcgctgtggcaagtcaagatgcgggctgttctggcgcaaacttcggatcttgatgaggcgctggaaagtttcgggaagaagaaatcgactgaatggaccgctgaggagaagcggaaagatcgtaaggctctgtcgctgatccaacttcatctatctaatgatattttgcaagaagtgttgcaggaaaagactgctgcagaactttggctcaaactggaatcgatctgcatgtctaaagatctaactagtaagatgcatatcaagatgaagttgttctcgcacaagttgcaggagagtggttctgtgctgaaccacacatcggtctttaaagagatcgttgccgacctagcgtcgatggaggtacagtttgatgatgaagatttaggtcttttactgttatgctcactgcctagttcatatgcaaattttcgtgacaccatacttttaagccgtaatgaactaaccctagcggaagtttatgaggcgctccaaaacagggagaagatgaaaggtatggttcagtctgatgtgtcgtcctgtaagggcgaagcattgcaggtcagaggcagatctgagcagagaacctacaacgatagcaatgatcgtgacaagagccagagtagaggccgttccaagtccagaggtaaaaggttctgtaagtattgcaaaaagaaaaatcatttcattgaagaatgctggaagctgcagaataaggagaaaaggaaatttgatggtaaggcctctgttgttaccagtgctgaaaactctgattcaggagattgtcttgtcgtttttgctggttgtgttgctagtcatgatgaatggatccttgatactgcatgttcgtttcatatctgcattaacagagattggtttagttcttacaagtctgtgcagaatggagatgttgtgcgcatgggagatgataatccacgtgagattgtgggcattggctccgtacagatcaagacacatgatggcatgacacgcatgctgaaagatgtgagacacataccagggatggcgagaaatctcatctctctcagcacacttgatgcggaaggatacaaatactccggttcaggtggagttgtaaaggtatctaaaggttctctcgtttatgtgattgatgatatgaattctacaaacttatatgtccttagaggaagtacattacatggttctgttaccgctgctgctgtttctaaagatgaacctagtaagactaacctgtggcatatgcgtcttggacatatgagtgaacttggtatggcagaattgatgaagaggaacctgctggatggctgcactcagggtaacatgaagttttgtgagcactgtgtttttggtaagcacaagagggtgaagttcaatacctcagttcatcgcaccaaaggtatacttgattatgtacatgctgatttgtgggggccttctcgtaagccctctcttggtggtgctcgttatatgcttaccattattgatgattactctagaaaagtgtggccttatttcctgaaacataaagatgatacatttgctacttttaaagagtggaaagtcatgatagaaaggcaaactgaaaaggaggtaaaagtacttcgcactgacaatggtggtgaattttgttcggatgcttttgatgattactgcaggaaggaaggcatcgttaggcatcacaccatcccgtacactccacagcagaatggtgtggctgagcgcatgaacagaaccatcatctccaaggctcgttgtatgctgtccaacgctcgcatgaacaagcgtttttggatagaggctgctaacaccgcctgctacttgatcaacaggtcgccttctatcccacttaataagaaaactcccattgaggtatggtctggtatgtttactgattattcacagttgagagtttttggatgcactgcttatgctcatgttgataatggaaaattagagcctagatctattaaatgtctgtttcttggttatggttcaggagtaaaaggttataagttatggaatcctgaaactaataagacattcatgagcaggagtgttgtttttaataaatctgttatgtttaatgacagcttgcccacagatatcataccaggtggttctgataaggagcagcaatatgttagcgtgcaggtggagcatgtggatgatcaggaaactgaaattgttggtaatgatgttaatgatactgttcagcactcacctcctgttttgcagccacaagatgaacctattgcacatcgcagaaaaaagaggagttgtggagctccagtctgccttattgaggaatgtgatatgaatactcttgagccagccacatacactgaagctgctgtttctggagaccgtgagaagtggatctcagctatgcaggaggagatgcagtctcttaagaagaatggcacatgggagcttatgcacttgccaaaacagaagaagcctgtttgttgtaaatggatcttcaagagaaaggagggtttatctcctagcgagcctccgaggtttaaggcaaggttagtagcaaaaggtttcagtcaaattgctggtgttgattataatgatgtgttctctctagttgtaaagcatagttcaattcgcacattcttcagtattgttgctatgcatgatcttgagcttgagcaattagatgtgaagacaacatttttacatggagagcttgaggaggagatatacatggaccagccagaagggttcatagtacctggtaaggaggattatgtttgcaagtcgaaaagatctttgtatgggtttaaacagtctcctcgtcaatggtataaaaggtttgattcatttatgttgtcacatggctttaagaggtctgaatttgatagctgtgtgtatattaaatttgttaatggatcacctatatacttgctgttgtatgttgatgatatgctgattgctgccaagagcaaggaacaaatcactacattgaagaaacagttgagtagtgagtttgatatgaaggatcttggtgctgctaagaaaattctaggtatggaaatcactagagacagaaatgctggtttgctatttcttagtcagcaaagctacattaagaaggttcttcagcgttttaacatgcatgatgcaaagcctgttagtactcctattgcacctcattttaaattatcagctttacaatgtgctagtactgatgaggatgtagaatacatgtctagagttccatattctagtgctgttggttctttgatgtatgccatggtttgctcccgtccagatttatctcatgctatgagtttggttagtagatacatggctaatcctggtaaagaacactggaaagctgttcagtggattttcaagtacctcagaggcacagctgatgcttgcttgaagtttgggaggactgataaggggcttgttggatatgtggattcagattttgctgcagatttggataagagaaggtcactcacaggttatgtgtttactattggtagttgtgctgtgagttggaaggcaacattgcagtctgttgttgcccagtctaccactaaagcagaatacatggctattgttgaagcatgtaaagaatcagtttggctgaaaggattgtttgctgagctttgtggagttgattcttgcattaacttgttttgtgacagtcaaagtgctatatgcctcactaaagatcagatgtttcatgagaggacaaagcacattgatatcaagtaccattatgttcgcgatgtagtcgtgtcaagaaaggtgcgagcgccttcaaaaatgatcctcttaagcacattgaccttcaccaagcggtgttcagtgggcgcaccgttgtcggcaaccactcggccgtcacgggggctgccccagcgccgcaccgcaaggagcagtacagtgccgcttatagaccaccgatgccatctccatcagcaccaccgactgcagatagggaggcttgcagccctgcgagagcagtccatgcagagccgcacaagggaggcagatgccgctaaggctaaagggcttgaggcttgcttggagttggtggaaaatgttgggcaccgtactggagggctagtgtggtatgatacttgtcgtcttttcncgtgatgaattccactgccactgtttcgtttgcctccaggacgccgcaactcgcctagaatatatctctactcgtgccaacggagcagattcctcatctggtggcacgcattagtttgtaccttgtacttccaattcactgtcaattgtgcagtgtgttgttttaaaaataaacatgtcattatgtttatcaatttatgcgtgctaacatttgct

SEQ ID NO: 26911 - DNA, 380 bp, Oryza sativa
  Clone ID: PAT_MRT4530_31654C.1
gtgggtgagattcatgacgtgccctttactttcagtggggctgccattgcaagcggatagtccgcagtctatacgggcgtaccgacaacgagatcaggaacttctggagaacccacatgggcaagattcgcaccaccactccaagaagaagaccaattcaccatcgtcagggccgacagacctctgtcggttaacttgtactcctgtgatcaccgacggggacgatcaacgtatggatgacacgtctgcggctgctgcagagaaagcgagcaggctgagggcggtgacgatcgaggaccgtggaccagcatggtgagcagacggtcaccaccgccggaggagccatgatgttgactatgcgactacaccatggcaccagc

SEQ ID NO: 26912 - DNA, 864 bp, Oryza sativa
  Clone ID: PAT_MRT4530_31655C.1
atggcgctgtcgagccttgttgtcctctccgtctccggctgcctcagtgctccgcgctcccgtcccgtcgtcgacaacactaacaacgacggcggtctaggtgctgagacgacggccgcgagggagccggagttccgactcctcgtgggggtgctgaccacgccgagccggtacgagcggcgcggcatcctgcgcctggcgtacgcgctgcagcccgcgccgggggcgcaggtggacgtgcggttcgtgctgtgcgacgtgacggacgccgcggacgcggtgctggtggcggcggaggcgggcgcggcacggcgacatcctggtgctcgacggctgcagtaccgagaacatgaacgacggcaagacgcacgcgtacctctcctccgtgccgcgcctgttcgcgccgtgcccctacgactacgtcatgaaggccgacgacgacacgtacctccgcgtggcggcgctcgccgacgagctccgcggcaagccgcggaggacgtctacctcggccggggctacgccgtcggcgacgacccgatgccgttcatgcacggcatgggctacgtcgtgtcctgggacgtcgcgcgctgggtgtccgccaacgaggacatcgtgcgtcgcagcggcacgcgcgggcacgaggaccgcctcgtcggcaggtggctcaacgccggcggcaggggacggaaccggtacaacctcaagccgcggatgtacgacatcaactgggacatggacgagttccggcccaacaccatcgccgtgcacaggctcaagaacaaccgccggtgggccgccgtgttccggcacttcaacgtcaccgtcggcataaagccatccacagcggcaaggccacacaactag

SEQ ID NO: 26913 - DNA, 186 bp, Oryza sativa
  Clone ID: PAT_MRT4530_31656C.1
atgccggagctcgtcgccagtggccacatccttcgcattgagcaggtcctcctctgcctaggcaccacgccgaagctcgtcaccggtggccgcatcctccgcgagcgcgggacctctcctattggtttaacgacgatgaccaagccctgcgcggcgcgctggcgccactaccctcggccagcatag

SEQ ID NO: 26914 - DNA, 573 bp, Oryza sativa
  unsure (1)..(573): unsure at all n locations
  Clone ID: PAT_MRT4530_31657C.1
gagcctctcctctgatcctctcctcccccactccaccgccaccgccgccgtcgccgctgccgccgccgccgcgcgaggaggacgggcggatctcccaatnaggtgactcctctcccccgccgatctccccgaatccccccgttccccgtagccctctctttctcccccgccggcctcgtcgtcgccgtcgtcgtcgctgggaattctgttcgtggatggggcggccaccaccgcgtagcgtngggagagaggattcgtttcgtgtttgggttggggggtgcagcgggtgggatccgggagtttcggttcctggggcagcggcgtgatcgatgatgggatatgtggatttcggttcacgtcttcgtgaattccggcggggaattgccgaattgggggcgatggtggttgctgacttggtgtgggcggtggattcctacggtatattgggtgatctccttgttgttgttgttgttgggcgttgcaggtgtnaggcttnttgattngggagctnctggttgtagtttgcaatttcaaatggtggatccccggaaggctccnacggntcgccgcgtt

SEQ ID NO: 26915 - DNA, 348 bp, Oryza sativa
  Clone ID: PAT_MRT4530_31658C.1
atgaaggctccgccagccgctggctcagatctagccagagacaagctctacagccactcgctcagatctagagcgcgtgcaaatccgtctccacctcaccggcggagagcgagcccggtcaagcaaactcccggcggcgcttctgcaactacgacgctggcggtcgggcacggggctgccggaaaggcacgactcgccgctgccgccaccccctcatcccatcaaggagcggtggctgggagtgagccacgtctgtctgaggtcaaccactgcctctcctcatcgccgtcagggaagaggtagggaaagagtccgcgtgatggagaagctataatttcttacccataa

SEQ ID NO: 26916 - DNA, 666 bp, Oryza sativa
  Clone ID: PAT_MRT4530_31659C.1
atggaggcggaggccgaccaggcgacggtggttgcctcctggggaccagaccacgggggccgcgtcggcgccgtagcgcacgtggagagggagcgggcaaggccgcccgagatggcgccggtgttcagcgcgcacggcgagcggtgggcggcgccccgggacatagaggcggtggtggcggcgcgagacgacgaggcggtaacggcgaactccgggaggatttggtcaccaggaacggaggatggacggcgacggagaagagggccgacagccggggaggggattggggaggcagaaaggaactccgggggtggcagcgagtgggaggagccaacggcggcgcttggcgtgcgcggcggcgatggtggcaggacgatggcgccgactggtttcccctcccgcccgaacctaccgccggcatcacgggggctgcgtcaccccccggaggtgaggaaggcggccgtctcggcgtgggaccactgcgggaggcactcccacttgactgacagcgggtcggcggggagcagcggtggcggaggggtaattcggatgaccgtgatagttctgggggaattttgtgtcccgtttggcttgcgacaaagagagacgaggcaaggggccaagggcttatggtttgggaagtgcgtaaagtttggttcagtttag

SEQ ID NO: 26917 - DNA, 621 bp, Oryza sativa
  unsure (1)..(621): unsure at all n locations
  Clone ID: PAT_MRT4530_3165C.1
ctaactaatttnccccctacgttacgttacncaagattgttcgncccaccacaagaacgaggagcaagatggcagcagccggggcggcgcccaaggacgccgncgactatcgcaaggaggagaagcacnacaagcacatggagcagatcgccaagctcggcgccgccgcccgccggagcatacgccatgcatgagaagaagcaggcgaagaaggacccggagcacgcgcggtcgcacaagatgaaggaagggatcgccgccgccgtcgccgtcggcagcgccggattcgccctccaccaccaccacgagaagaaggaagccaagaagcaccgccgccatgcccaccaccaccactaatccatcccatccattcgtgcattgctacctttaagcatcttgcatgttgatgtctcgtgtgtatatattattagcccatcgagatatatacctctccgtcgtcatcgtatgtgctatatatgtgtatatacttgttatttgttcgttagtttgtcatcgctgagtgcatagctctcgttcttgtagtatagtttgtatgtacaaaataaataagagaatacatattatgttctcattgtcagggtaaaaaaaaaaaaaaaaaaa

SEQ ID NO: 26918 - DNA, 336 bp, Oryza sativa
  Clone ID: PAT_MRT4530_31660C.1
cgtagaccacctgggccgtcgacggccctaccgacgccgccgtagcttgagagcgagtcgctggaccacgacttcctgatgcaccccagctgcccgaccgaccgcgccgtcagggacgacgcctgaccgtaccggtacgcgcgccgttctctctccgggatcaccgggcttaccccgttcatcgctgcggatcaaaggtgtatctgaaggcggacaccgctgaagatgtggaagaagccgcaaggaaaaatctggctatttgtatgcgcagaaatggcgtcggcgtatggcacgtcggctactcgattcaacgccgccgtttcttccgaccttcca

SEQ ID NO: 26919 - DNA, 391 bp, Oryza sativa
  Clone ID: PAT_MRT4530_31661C.1
tgtgtaaagttggccccccccccccccggtaattggagcccacacccccccccccaggggggaaacaccccttgttggggttttttataatggccccatctgggggcccttgcccaaaccccgcgggggttgccccacaaaatggcccccatgtgtgtgtggttgtgtgccctgggtggaaacccctggtggagaaaattgggcccctttttgggagaaatttgtatttttttgggggaaaattggggttggcccccccaatggaatttgggtggaaaaaggtggtgccccgcccccctgcgtgggtttgttgttttgtgggaaatgcccccctgtcgccccgttgtatggggaattgggcccccccgcgaagtgccccctgcgtggtgtg

SEQ ID NO: 26920 - DNA, 3921 bp, Oryza sativa
  Clone ID: PAT_MRT4530_31662C.1
atggctctcctgggtgacccaagaacgcgccccctcgacgacgactgcatcatcctgtcttcgtttgttctccaggaagaacgtcgtgaatgggagaccacggcggcagtcacctgggcaatgcgagcaccagcggccatgacagccaaagacgtggagaacgccatcaaggaggagtttcgtcttcactctggcgacgttgaggtcacccaccaccaccccgaagcctacctcatcaagttctcccggcgcagccactgtgccgatgctctttggaagggcttcgtcaaacggcgagggattgaagtccacttcatcaagtggagatgtctaaaggacgcgatgggcgcggctctcatgtttcgtgtcaagctcttcctggacggcgtcccccgacatgcctggcagccggaaatcgtcgacaagatcgtcgcgcggcgttgcggtgtggagaaaatcgagactaacttggttcacccaagccacacgcgctacattagcttgcgcacgcaggacgctgacgccgactcggtggtggtcacggagtcgccaccggaccactggcagtacggggccaagtacccggtgctcatctacgtcgaggagatccatgactacaccacggcaacgattgacctctccaaccctgacgcggcgtgtgagccgaccaagcgccagctgtcggcttggcaccttggcgtggttgatggcgagcagccgcccccacgcgccttcgatggaccgcaccctctgccgccgcgcactcaagacagggaggaagacgaacgccgcaatgatgaatgcggctgcgatcgcacgcgtggtgtcgaccgtgaccgcgagcgcggaaatagtcgccgaaatgaagggaggcggtacaatgacgaccacccggacgagctgcgaggccagggctggagacgccatgatcgcgatgacgaccgtgacggccgcgacggcggcgacacgcgtggtggcaacagttcaaggcgcgcggggctgaacggcgtgcgacaccgcacgtgctcgccaaggagaagggactccgtaggcgggaactgctatggcagacgacaccatgaaggggcacgcgatccggtggaagcagctgaacctctggcgccggtgtccgaggctaaacgtgctgaccgcgaggtaactcaaactgggggcaggggggatgaaggctggtccaaagggcactctaccaagacggagcacaccattcctgcgagccgagctttttggcgcatcaagcaagctgcccagcggccgccgtccatccgtgaggtcgacgacgccctccgtcgatgggaagaaaatggggaagcggccctcgtcgttccatcaccgctggcatcacgaggtgcttctccaaccgtcgttggcgacaacttgccgctcacggtagacaaaggtgaattctccgatccggcttcggcatatttggctcttgtaaatgcagcggcacagggcgataaggaacatggagacatggttgcggctgcggtgcatggtgctgatgcggtgcacgatactgttgctgtggcacatgatgccgctgcggcgcgtgatgaagcggctgttgtggcagccgctgcagcactggcggatgatgtggaacgcggcacggcggcatgcggcactgcagtgcatgatgtggaacgcggcactgctgccgcgcacgacgtcgcggtggatgctgccgcggcgcacgacgtagcgatggaggctgccgcggcgcacgacgtcgctgtggcggacgacgacaccgcagacaaggagcaggatgaggcggctgcagcggcaacggcggttgctgttgcgcacgacgttgctatggtgcacgacgacaccacgtccaaggcgcaggttgaggtggctgcagcggcagctatggcgaccgctacggttcaggatgatgaggccgtcgcggacaagggagaggcgccggtggaggacgcagaggacgaagcggcaagtggcgacatgacaactatgccgcacgatagagtggccgtggtgacccgctctgctgttttgctgccgggcgacatggaccacgctgcgctagatgacatggctgtggtgattccccctgccgcgatgctactgcaagacggggagcaggctcctaccaccccaacatctccagttgtgccgtccacgccgaccatcagagctgctgtcgacggcgccatgagcgtgctgttcaagccattggaaccagcgcttctcaccattccactcgaagaacaacaggtgcaacagaatgaagtgcaggccgaggatggtgccaggcggagcgccagactcgccatgaaacctctcgccggcatcccgatggtcgtaaaggcacaaatcaatgtctgtcgccaaatgggtttccttccagtaggaggagtcctcactaaccaaacacttgctgactacaaggcgatgttcaacacgcccctaccgcaggatgcgatcgacgcactcaacaccctcttcaacctcaacaacgaacacatgcaagaaagagatgaagcgatggcagcctacttggggccggtggacgcagaggctgtcatggaaggtgcagagtgcatcgcggactaccgaccgatcagcctcatccacggagtagtaaagctcatctctaagaccctggccaacaggctacagcctttcatgaactccgtcgtcagccatgctcagagtgctttcattaaaaagagaagcatccatgacaacttcatgtacgtccgtaacctggcgagaaaattccaccagacgagaaagcccagtctcctgctcaagctcgacattacaaaggcattcgacacagtccgttgggactacctacttgatcttatgcagcagaaaggcttccctacgagatggagagattggataacaaatattctcaggagttcttcttcgcgggtgcttctcaatggagcccctggccctcctataagacatgggcgtgggctcagacaaggcgatcctctatcccccctcctattcgtcttggccattgaccccctacaccttctcctcgaaaaagcgacaagcgaggggctgctaactaaactcaacggacgagctgcgcggctaagaacctccttatacgccgatgacgctgcgatcttcatctacccctcggtccaggacatgaccaacctcgcgcaaatcctgacccactttggtgagatcatgggtcttaacacaaacttggccaagagccaaattgtgccaattcgctgcgaaaacataaatttgcagaacatcaccgaaatcttcccagcacaagtcacccatttcccgatgaaatacttgggtctcccactcgctctctccaagctcaaaaagagccccctgggacaacagcgtgacaccatcacctggaaactaactctcatcggggagtacaccacgaaatcagcgtacagacttcagttcttgggggcagcaaaatcctttttcaacgagacgatctggaaatgttgggcgccgccaaaatgcaagttcttcgcatggttggttatgcaaaaccaggtgtggacggctgatcgactccaaaaacgaggctggagaaaccaacagtattgcccactttgccacactacattggaaacggcagtccatctcctcgctcactgcagattctcccaacgcatctggctggatatccaaagatggactggtcttaatctcaacattcacaactgggacagatgtgcctccgtggaggattggtggtatctactcatgcacagtcggcaaaatccgaccaaggccgtcaagaccctaatcatcctcatctcctgggaactatggtgcacgaatcttttgacacaatggcagcccgccaacggcggtggtcaacaaaataaaaggagaagtggctacgtgggtccttgcaggggcatctag

SEQ ID NO: 26921 - DNA, 397 bp, Oryza sativa
  Clone ID: PAT_MRT4530_31663C.1
accatcagagaataaaagtttttcataaataagatgggtaatttcaagaaaacccataacccataggggacatacaaaagggggggatttctcaaccgggggataacaattgagaaaactattgggtttactacagaacgccaaattggaacgctggatgcaataatatgtcaagattggcaggttcaccgagaatttttggcgtcatcagaaaatttaagctttgccggggcatggaatacttccatattcaaggccatgcttagggtcttctattttttgctgacagggcttttaatttcccggttgcacacctttacacttactttaacaacaaaaataaccggcatgtatgatggaactataataatgggatgggcaatctgacgaccacatg

SEQ ID NO: 26922 - DNA, 307 bp, Oryza sativa
  Clone ID: PAT_MRT4530_31664C.1
gagaggattgggtttattctatatcgtgcaaggttcattgtctccgggttctacttggagactaaggtgacttatggtgtaaaaggcaacaccctctgaggggttcagatcatcgaatcatagcgccaacacacccgccaaagtctacgagccggaggacgcgaaacctactcgcccagggatctcatcgaatcatctcgacaaggatctagccgattagatctattatcttacgaggggtctgaaccagtataatctttgtctccttgtttgcttgatgtcgtatcgtgtagatcctcgtaccaac

SEQ ID NO: 26923 - DNA, 183 bp, Oryza sativa
  Clone ID: PAT_MRT4530_31665C.1
atcagctgcgaaacaacagagacacatccaagtctgtcaacagctcgcgctggtggcgctgcaatcatactatgatgacagttccattgttcaagtcatagagcagtatattcaactacatcagttcggggatctgtactgggatcggaaggtgcttcaagctcaatctctgctgggttttaa

SEQ ID NO: 26924 - DNA, 1741 bp, Oryza sativa
  Clone ID: PAT_MRT4530_31666C.1
gacgcacagcataatccagcaaagggattaactattaatgtttataggactacatgaattcttttacttcactgataaaggagccctcattgtactccgttcaacgaacaaaaaaacctctcaagaacaatgaagcaaacaattcctcaatgatacggtacaattcctcactatgatttcacctagttcaggtatgatgaacctagtagctgatgcctctccggcaaacaaataacaaatggaaatgaattccatgtttttttatttcctttgtcctagggtgtttctgaatctgttatctcaagcaggttgatcaaaagtttctcgtcagtgcttctgcaatgccatcagcaacaatgttttgagttatctagttaaccggggatatcttgaggccccttgttcgtccaggagcacctcctgagagagacaagtcgagcgataacaagtttgtggttcctttctctgcttcgttagtctcagattgcaacaaaatttctgagtttgttttggacaggattgagtaacatgcagtttctttcccgtccttgatgaaagaatcatttgaatcttcgtggtcatcatccaaagaaagcaacttcttcaaattttcataacaagcttcaaggtcatcatttaccaaaagatgatcgaaaagacctggtgaattggactggtcaagctctgcacgagcattcctcagtcgcttctggatttgctcctctgtttcagttccccgtgcccgaaggcgcttctctagttcctcgaacgatggagggcatacaaagatgaatattgcttcaagagaagaagccctcacagaacgagctccttggacatcaatgtcgagaatacacctcttcccctcatcagtaacagattcaactgcttcaacgctagtgccatagacatttccatgaacatgagcaaactcaagaaatttgccctcacttatctcttcctcaatcttgcttcgttctgtgaagtggtaatgaactccatctatttctttctcccttggagctcttgtggtgtggctaacagaaaatccaaactttgatggatattctttcattaattttgcaattaatgtccctttaccaacaccagaaggcccgctaatcacaattggcttttggccctcaccaattactcccttgctccatgcaacaacaactgtgcccttaattttgctctgctgcttaacaaaaggagtgtctacctcaaggaaccagatagaatcattcaagggaacacccttctcaataatcagtatcttctcattgtttacgagaaccgctgagtgtgagctggttggatttggaggtgccccaagtactgtaggtacaacccaagtctgagttagtttgtccaaaattttgatggtaatcgatgacttggggtcatctgatctgctgataacatacgtcttatcgcctatatctatggcattctgcaggcagtccttggattccaaggcgacgctctcgacacgaaactccggagcctcttcacccataaaatgcgccgtgatcagggcagacgcgcctccaatcctcccaaccactaaaccaagctcctgaaccccccacatttcaagacgacaccaagacaccgagagcacaaaatggaggacgccgtggggtgggatccacatagcaggagggggtcggaggcgggcggcgggcgtcggcggcggcgatggaggagaggagaggatcgaatcggagcctgcagcccg

SEQ ID NO: 26925 - DNA, 2023 bp, Oryza sativa
  Clone ID: PAT_MRT4530_31667C.1
gttgtaaagttgcaagagagagatcagttgttgagtgcgtggaagcagagatcaggaagatgctggagaagctgtgggacgacgtggtggccgggcctcgaccggagaccggcctggagaagctccatatggacgctacaacccaaacctcttgtcatcaacaaggatcctgccgtgagcgccaccgcggtggcgcccgctcttgtccaccgggatccaatgaggggcagaagcgatggggggcagagcaagaggcccatcttgctgctctgcgtgatgtgcctctgcccttgtggctccaatgggcaggctgggagtgccgcttagagtacgggacctctcgcgctcactcgggtggggaagtaggggacggatattggcaccgcagatgatgttgagctagctttcctgtgtgtgatgaccggttccctggtgaaataacagaagagctacccctcctcctgaaaggcgcttgaatgcctgattcccccaccacatggctataaggttcccataaaatggccaaaaagtcgtgatattgtgtggaaagcaaatattccgcacactcaccttgcacatgagaagtcagaccagaattggatgattgatgcaggtgagaaaatcaaatttccaggtgggaacacatttccatcatggagctgacaaatggattgcttcttcttgatggagggggatatcttctttcatctaatgaatatctatgcctttggcacgctcttgacagagggatcccatgtccacacacaagtagacgtcatgtcaatggttttcgtttcggataaacatgctagggcaccatacaaatcaaagtagtagttgggatttttctgcgacatgtcactcacatttttgctcagcctatgatcagtgtagaaattgaagagaagagtgggtctagcctctagcatccacctggtggtgcaaatggaatgcattatccacctccccgtttgtgatttgtatgtcactgctgacacatttgaaaaagacaaagaaagagtaagatatcttgatgtttaaaaccaaagataaaaccagacactattagaaacatcatggatatgaaagcaaactttgggtcatttgcagctgctctcaaggaaaaggatgtatgggtcatgaatgttgttccacatgatggaccaagcactctcaagataatctatgacagagggcttataggttctactcatgactggtgtgaagcattctcaacctatcctcgaacatatgatcttctccatgcatggacagtcttctctgaccttgacaagagaggttgcagcgcagaagatctcctgcttgaaatggaccgcatcgttaggcctagtggatttatcatcgtgagagacaaggacactgtcatcgaattcatcaagaaatacctcaacgcacttcactgggaagcagtaacaactgtagatgccgagtcaagtccagaatctgaggagaatgaaatgatcttcataatccggaagaaattgtggcaaccaggaggctcacaggaccccaaccccaagtagtctcttcttttgagtccctttcgcactgtgagcatctgcagctcagaagccaagaagcgaggctcggctgctccctcagatacgattcaatgtcgaaaccgctcctgaaatagattccagttcgtgattcctagtctacccacgtgaagatagataatttatcagcatatggcaaatgtctagcaggctaagcgaaggcctattttttgtttctacagatactgcaattgttaattgatgtttgttctctagtcttgttaggaaataaagataattttgtctagtcttttaggaaataaagataattctttttgtcgtgagcttcatctaggtatttcatgtccatctgaagtcttctgtagcgagtgatcagatctgttccggttagaaactttaattgtaaacagattttggttatgagcatagccacgggcctcaaggctgccacgttccactgcatctggattcttggattgtgg

SEQ ID NO: 26926 - DNA, 570 bp, Oryza sativa
  Clone ID: PAT_MRT4530_31668C.1
atgccggccgggctgtcgcgggccgcgcgcgcgtgcgcgcggtgcttcgcgtcgccggccggcggggtttacagagagaatgaggcatgggaggcaacggtgtcacaaaagtcgtggggacggaagagcgtggtgagcgcgcagtcggaggaacggctgggcggaggggcagcgcggtcagaggagcggtgcgggcggcgcaagggacggacggcgggaggcggccggtgggtccatctccctcctcctcccggcgagtccatctccctcctcctcccgctgatggcccgccgccaccaccacccagtctctgcgaaggggcggcgcgagcggcggagggacggcggaggagcggcgggacataggggcggcggggtcaaaggagcggcggcgcgggcggagacctcaagcggtggggatggcggcgacctcactgccagatcgttgcctctctgcctctactccggcgatctccacctccaaatccggtctgctggagcattgtttttcacctccatgcgtcaaaaaggggatagaggaccgaatagaggagctgctgggatgctctaa

SEQ ID NO: 26927 - DNA, 160 bp, Oryza sativa
  Clone ID: PAT_MRT4530_31669C.1
gtcttaaccaccactcgggttctggacctgggcggcacttttaaatctccaggagagcttagaaaccatgtacggaccttgcgacacaggtgcgtgcgcatcatcaacaagaacacaggtgggtctacacactacagcggattcacgaacacccttctgt

SEQ ID NO: 26928 - DNA, 213 bp, Oryza sativa
  Clone ID: PAT_MRT4530_3166C.1
atgtcgcccgtgtgtccctggacaacggcggctatgtataggcggcggtgggggcctcgtcaggccggcggaggtgcttggggagaagcggatgatttctggctggatttggggaagatgccaccagcagaggagcaggtcgaggcggtggcgaataatttgtacacgacgacttgcctggcgggagcatttgtggcaccgccgcgggaatga

SEQ ID NO: 26929 - DNA, 183 bp, Oryza sativa
  Clone ID: PAT_MRT4530_31670C.1
atgggggtatttgagtggcattttcacgtcttttggggtggagtggagctatggagcagcaaaaacccagctccaccccgtagttcattttctaggagtagctttgccaactccactcaaaaaatggaggatctggaccgtttggcacagctccggcttcagggatttataaattacgtctag

SEQ ID NO: 26930 - DNA, 248 bp, Oryza sativa
  Clone ID: PAT_MRT4530_31671C.1
gccccgcgccgccgtcgcgttgccgctaccacaccgcgccaacgtcgctgtcgctgcctcgcgccgtgcgccgccgctgagaccgagggagccgcggatccgggtgaaggccaagacccgcaagaccttgagcaaggcaagtcatcactattctttgatcacgttgatcccaattgcgaaattaatttttgtttacaaataagattgcatgcaatgatgaacatcctatttgtgattatgccatgcct

SEQ ID NO: 26931 - DNA, 528 bp, Oryza sativa
  Clone ID: PAT_MRT4530_31672C.1
atggcgtggatgaccccagatccgtggataagcctcctcgaggaggaggaggaggcgtgcgtgagcgtgaacaagcgccccaagggggaggatacagtgacgagcgacggcgagggcgaggcggcgtgcgcgaacaagcgactcaaggtggaggccacagtgacgagcgacggcgccgtggtgcgccagcgccatgaggccgctgtggcggcgaggggctatggcgacaggatgcccctcgtgccgcagccctttttgcgagtcaggcagattaccgagatgccggaccgataccggttcctcgatcgcttcaccgatgagcagctcgccaccatgcccgagagcctccacgcaactttggtgagaattgaggggggcttcaagaagagttgggttgaatctgagctcaggcgcatggagatgtacaaaaacctcccacgattatccatagttaaccagctccaaagtccaaacaggaccgacatctttctcaagattccaaagccggacgactccagcatgagttaa

SEQ ID NO: 26932 - DNA, 136 bp, Oryza sativa
  unsure (1)..(136): unsure at all n locations
  Clone ID: PAT_MRT4530_31673C.1
aagacggctaatgatactcccactatatgccaatgtatggcggcgcngttgtggtggttactcccaacgagacccgttcactattctgttggataaaagacaatacatcgaatggataaaatggcggagtcgccac

SEQ ID NO: 26933 - DNA, 468 bp, Oryza sativa
  Clone ID: PAT_MRT4530_31674C.1
gagggtgtagaggaaaaaacatgtgtgtcaaataagctatttggaattaattaaactgcataacattaaaccatttacaaaaaaagtaagaatctggttgaaccacatcttactgcgtgtactgactgttgaggaataggaccaggtgaaaatgcatccggacattcggggctccaagataagcgctcagtgcaggacagcctttggtgtacagcaccaacccggcaaaaataggctcacaaatgccgtggaaaacgctgttttttgatttttgaaagagtactacgccagtgctgagctggaagaaagtgagctgtcatcggtcattgggtatggagcccaagatgattcaaagcacatggagacagacttcaaagacgcactctgcacttggaactctgaggggctcataggcaaaaaagcactattacatgtatgcatattggaaaaaatgactgagtacagagg

SEQ ID NO: 26934 - DNA, 613 bp, Oryza sativa
  Clone ID: PAT_MRT4530_31675C.1
acctctcttcgttatcctctccccacagctctctttaccatctcctctctttcttcatcccgaatattcaagatgaagttctccctcgctgacctcctccccgtcgctggtgctctggctgctcctacgccgcctggtatccctagcgattctactgccagatcgcttttgagcggcctcactgtctctggtcccaccaacagcgacacctacaacacagatcttttccctcactggcagacatacgagggcacttgcaacactcgggaattcgtcttgaaaagagatggtacaaatgctgcgaccaactctgcatgtgccgccacgtctggcacatggaaatccccgtacgatggcgctacctggacacaggtcagtgacattgacattgaccatatggttcctctgaagaatgcctggatttctggtgctgcttcttgcactactgcaaagcgaactcagttcgctatcgatgtaacaaggcctcagctgtgggcagttaccgacaacgtcaaccagtccaagagcgacaagtcccccgattcggggaaccctcccctgaccagcttctactgcacctacgccaaaagttggatccaggtcaagagctact

SEQ ID NO: 26935 - DNA, 2448 bp, Oryza sativa
  Clone ID: PAT_MRT4530_31676C.1
atggcggccaacaataatagcgacccgatcctggacgagggagggggagggggcgtgaagcacgaggcggtgggggaggcgggagaggggaagggtggtggtggtggtgcggcggcgacgcaggcgcccgcggcgatgctgccccgatcgggctcgcggccgcagctggacctcagcggcgcggcgatccacggcaacctggaggaccgcaacccgaccatcctgctgcctaaccagtccgacgacatctcccacctcgccctcgacatcggtggttctcttataaaactggtatatttttctcggcatgcggagcactccagtgaggacaagcgtaagctatctacgaagaggagacttgggatgttaaatggtggcaggaggagctatcctgttcttggagggaggctccactttgtcaagtttgagactgggaagctaaatgaatgtttagacttcatttcttccaaacaactacatcgtggcggggttgattcaccttcgtggcgctcaggagctcagcctgacaacattgtaatcaaggcaacaggtggtggagcattcaaatatgctgatctcttcaaggagagattgggagtcagtcttgaaaaggaagatgaaatggactgccttgtagctggagcaaattttttgctgaagtctatacgccatgaagcctttacgcacatggatggccaaaaggaatacgtgcagattgaccagaatgatctgtttccattccttcttgttaatgtggggtctggtgttagcataatcaaggttgatgggcatggaaagtttcaacgagtaagtggaacaaatgttggtggtggtacatactggggtttggggaggttaatgacaaagtgcaagagtttcgatgagttactagagctgagccagcgtggagacaacagcacaatcgacatgcttgttggagatatatatggtggtctggactactccaagattggcctttcagcatcaacaattgcctctagttttgggaagacaatttcagatgacaaggaactgtcagattatagaccagaggatatttcactctctctgctgcggatgatttcttataacattggtcagatttcctatcttaacgcactccgatatggacttaagaggatattttttggtggattcttcattcgtggtcatgcctacactatggacacaatttctttcgctgtaaatttttggtcaaaaggagaggcaaaagccatgtttctgcgtcacgagggttttctaggagcacttggtgcatttatgagttatgagaagcatggtcttgatgacttgagaatacatcacttggttgaacgcttcccaatgggtgctccatatgttggtggaaaaattcatgggcctcctcttggggatctcaatgagaaggcaagtacatctactcttgatcatggtatgggaggttttgagaggcctaccgccaagggagacattttgcggtcagatgcaagtgcagctctgaatgttggtgttctccatcttgtacccacattggatgtatttccgctgttagaagatccaaagatgtatgaaccaaacacgattgatctcgacctgaatgagtacaagtactggttcaagattttgtcagaccatttgcctgaccttgtggacaaggcggttgctagtgaaggtgggactgatgatgccaaaaggaggggtgacgcattcgcacatgctttttctgctcatttggcaaggttgatggaggagcctgctgcttatgggaagtttggtttagccaacctgttggagctgagagaagaatgcctgagagaattccagtttgtcgatgcatatgttagcattaagcaaagggaaaatgaagcttcactggctgttttacctgatcttctgatggaacttgatagtatgaatgagattgatgactttgatatgtttaaaaagagaatgcttgctgataagaagggccaaccatacaaaagagcactgctttttgttgataactcgggtgctgatgtggtccttggaatgattcctttagcacgggaattattacgcaatggaactgaggtggttttggttgcaaattcattgcctgctttgaatgatgttaccgctaatgagcttccaggaattgtggctgaagctgcgaagcattgtggtatacttcggaaagctgcagaggcaggtggattgatctttgatgccatggctggcatccaagatgatctgaaagatgaaccagtatcagttccccttatggttgttgagaatggatgtggcagtccgtgtattgatttccggcaggttagctcagaacttgctgctgcagcgaaagatgcagatttgttaatcttagagggcatggggcgatctctgcataccaacctcaatgcccgttttaagtgcgatactctgaaggtacttgtttctgcaaacagctga

SEQ ID NO: 26936 - DNA, 189 bp, Oryza sativa
  Clone ID: PAT_MRT4530_31677C.1
atgggtaaaacaggtagttcaccaaggactgggttccccgagatggtccatggtaaaagcagagataagaacattcttcgagtcggtgagggcgacgcaacttcatcgaacgacgtgctcaaaggaggggatggtgttcctgaggtcttgataaaccctgagctgcactcaatacactcacggctatga

SEQ ID NO: 26937 - DNA, 2973 bp, Oryza sativa
  Clone ID: PAT_MRT4530_31678C.1
gctaggggacacccagactgagagctctactctccactgttttttttttttttttgctttctacaaattctttaaaaacctttattatgtcgctactccatgttcagaaaaattgttttgataacaatattcacaacaagtcaacaacacttctttgattctttaccatctaaaggagcatttagtacattgagaggatcttttagttcttatataagaaatttgttcttatggctttttgcttggatatgtgacactgctaataccatgaccccactggttacagattaagtgagatgtacctgttattagctgcttctgtgctagagcaaaccaaatccacggcacattcttccgcattgttcaaggaacaggttcaaatttacagatgcagtcatatatatttccattgaaaagtttttctgccaatcactgattcgtgaacatcggcagcttcagagtatcgcacttaaaacgggcattgaggttggtatgcagagatcgccccatgccctctaagattaacaaatctgcatctttcgctgcagcagcaagttctgagctaacctgccggaaatcaatacacggactgccacatccattctcaacaaccataaggggaactgatactggttcatctttcagatcatcttggatgccagccatggcatcaaagatcaatccacctgcctctgcagctttccgaagtataccacaatgcttcgcagcttcagccacaattcctggaagctcattagcggtaacatcattcaaagcaggcaatgaatttgcaaccaaaaccacctcagttccattgcgtaataattcccgtgctaaaggaatcattccaaggaccacatcagcacccgagttatcaacaaaaagcagtgctcttttgtatggttggcccttcttatcagcaagcattctctttttaaacatatcaaagtcatcaatctcattcatactatcaagttccatcagaagatcaggtaaaacagccagtgaagcttcattttccctttgcttaatgctaacatatgcatcgacaaactggaattctctcaggcattcttctctcagctccaacaggttggctaaaccaaacttcccataagcagcaggctcctccatcaaccttgccaaatgagcagaaaaagcatgtgcgaatgcgtcacccctccttttggcatcatcagtcccaccttcactagcaaccgccttgtccacaaggtcaggcaaatggtctgacaaaatcttgaaccagtacttgtactcattcaggtcgagatcaatcgtgtttggttcatacatctttggatcttctaacagcggaaatacatccaatgtgggtacaagatggagaacaccaacattcagagctgcacttgcatctgaccgcaaaatgtctcccttggcggtaggcctctcaaaacctcccatacctgttgtcacaggaaatccaacaggtacgggtgctgtaatctgagtacccttctgcacaaacttctccatccatgatataaaaccattaaggttaccatgatcaagagtagatgtacttgccttctcattgagatccccaagaggaggcccatgaatttttccaccaacatatggagcacccattgggaagcgttcaaccaagtgatgtattctcaagtcatcaagaccatgcttctcataactcataaatgcaccaagtgctcctagaaaaccctcgtgacgcagaaacatggcttttgcctctccttttgaccaaaaatttacagcgaaagaaattgtgtccatagtgtaggcatgaccacgaatgaagaatccaccaaaaaatatcctcttaagtccatatcggagtgcgttaagataggaaatctgaccaatgttataagaaatcatccgcagcagagagagtgaaatatcctctggtctataatctgacagttccttgtcatctgaaattgtcttcccaaaactagaggcaattgttgatgctgaaaggccaatcttggagtagtccagaccaccatatatatctccaacaagcatgtcgattgtgctgttgtctccacgctggctcagctctagtaactcatcgaaactcttgcactttgtcattaacctccccaaaccccagtatgtaccaccaccaacatttgttccacttactcgttgaaactttccatgcccatcaaccttgattatgctaacaccagaccccacattaacaagaaggaatggaaacagatcattctggtcaatctgcacgtattccttttggccatccatgtgcgtaaaggcttcatggcgtatagacttcagcaaaaaatttgctccagctacaaggcagtccatttcatcttccttttcaagactgactcccaatctctccttgaagagatcagcatatttgaatgctccaccacctgttgccttgattacaatgttgtcaggctgagctcctgagcgccacgaaggtgaatcaaccccgccacgatgtagttgtttggaagaaatgaagtctaaacattcatttagcttcccagtctcaaacttgacaaagtggagcctccctccaagaacaggatagctcctcctgccaccatttaacatcccaagtctcctcttcgtagatagcttacgcttgtcctcactggagtgctccgcatgccgagaaaaatataccagttttataagagaaccaccgatgtcgagggcgaggtgggagatgtcgtcggactggttaggcagcaggatggtcgggttgcggtcctccaggttgccgtggatcgccgcgccgctgaggtccagctgcggccgcgagcccgatcggggcagcatcgccgcgggcgcctgcgtcgccgccgcaccaccaccaccacccttcccctctcccgcctcccccaccgcctcgtgcttcacgccccctccccctccctcgtccaggatcgggtcgctattattgttggccgccat

SEQ ID NO: 26938 - DNA, 266 bp, Oryza sativa
  Clone ID: PAT_MRT4530_31679C.1
cccacgcgtgcgtttttttttttgaggagatagaggaccagaggaaggtgaacagccagctggaatcctaggaggaggcggaggccgctgctgctgcggctgccgccgcggtggcggaagaagagggaggggaaaccgcggattcggacgacagcggtgagcgaacctccgggggcctgacccataccatctgaactcggtcgaagccggtgctcgagggctaccgccgcgacatccaggacctcagtttgggcctccaacttaag

SEQ ID NO: 26939 - DNA, 390 bp, Oryza sativa
  Clone ID: PAT_MRT4530_3167C.1
ggtcaatgcaacataaattccgtactttatttgggttcatacaaaaaccatacggttcaacccagtcaaagagtgcggtccttcccataaattaaacaaatcgataattcgatgcggtcaagatgggaggccaaaagccgtgcgcgggcgattgctggggatcagcttagctgtggaggactttcactaacaaaaatgactcctgctacgactttatgtagtgccttttaatatggcagtggaaaagctgtttcatgccatcctgatgcgtgaaattcacctgctttgccagtgctgggactgaaattgaatgtgcatgcttgagtgacgattcccacaggaaacggttattttcgatgttatagcttgggacactgttggcattaaaat

SEQ ID NO: 26940 - DNA, 335 bp, Oryza sativa
  Clone ID: PAT_MRT4530_31680C.1
atggaccgtggtgggggtgggggtgatgcctccgtggcggcgctgctgctgccgtcggcgccgatggcgtacgcggtggtgactgacccggggacggtcgacacccctgacatgcccagctaccagccatacgtccgcgactgtgacgtccgcgtcgtcgtgcccatgggcgaccaggtggcaagcggaggtggccagaggaggagcgtagcgggcggtggacgagctccgccgggctactctgcccgccgcgtcatcgtcgtcctcaccatcggccgcgccatcatcccctacggcgcgcaccatcatcctctatgccgccatcatcctcggag

SEQ ID NO: 26941 - DNA, 193 bp, Oryza sativa
  Clone ID: PAT_MRT4530_31681C.1
gtatagtgtacagccgtcgccctttttttttttttgacaaaattggcttatgatatatcacataagaatgatggacaacttattctctagtgatatcacccaaagttttacatcgcacatatgaagatatatgagcttgttattaacttacggaccactcttctgttaagactgattacgagacaccgacaag

SEQ ID NO: 26942 - DNA, 635 bp, Oryza sativa
  unsure (1)..(635): unsure at all n locations
  Clone ID: PAT_MRT4530_31682C.1
cttctctctcccaacgctcgagtccggccgccgcctagggtttagggttttgcgccgccgccgccgccgccgccgccgggatggaggcgctccgggaggcggaggccgagctgacggtgtacgtgcacccctccaacgccgccgacgtacgccgcgccgtctcccgccagctcagcaccaccctcttctcgtatgaagatcgctttgaaggcgttttgctagctcatgaggttgttgtgaatggtgatcgagcgaagattctgaatggtttggtaccatatttcggtgtaccggtccatgcgaatctgctgctctattctccccaaccagacatgatccttgaagggaaggttgaactgcttgngaaggaatcaattcatgccattgtgctaggggttttctcagccgccatcatggcagatgatattaatgagaagttcaagttcaaaagaaaaggagatggaggaaaattcataagccggtcggacagacatcatgtgattagaaagggaagcatgatacggttttctgtaaaaagggtggatacagaaatgaattgtcacataactggatctttgctcccaccacatactggatccatgccttggctatcaactcatgatgctgaatatgca

SEQ ID NO: 26943 - DNA, 133 bp, Oryza sativa
  Clone ID: PAT_MRT4530_31683C.1
tttattaacataataaaacggggcagaatgacgcgagttcgtgaaggggcagacagggctctggagctaatcaccagtttcctctgagcagttacattgtcggacatagtgtacagcgcatgcaacagtgagc

SEQ ID NO: 26944 - DNA, 2207 bp, Oryza sativa
  Clone ID: PAT_MRT4530_31684C.1
atgatatgtatcaatatacgtaacacattgcgaagtgagtgtaactcgagaagggaggtcggactcccccatgactactgccctctgccacctccatccatcgatcctgagttcctgacaagcaggcgtagcaaccacccttctcggcccctcttccctgcatttgctgacgttgttcttgtttgcactctcaaggtaggggaggatatttctcggttttgccatgccgtacaacagcaagatgggagcgaggaaggacagcgaggcatgagggtcgttgtcgggttaatggtgtcgtcgcaacgagagaggcggggctcgtcgtactccaatgggagcggctcggatgacggcgacggtgggggtgactccgacaccacgtcgaccctctcgaggaagaggccgtcatcggtggtgcagggttatgcactgtttctccgcccggggccgtgccctccacacgatccccccccccctccactctctctctctctctctcgcccgagtctcctcctcccgcacggaagcagtagtcccgcaggcggagctctctctctctctccggcaaatcggcgaggatggaaatgttctttggcagttttcttaatgaatcagcatcacaagagtacttctctggtcgtccaaatgtcgagagatgcccattcctgagaaacatcaatggagctacaacattttcattttcttctgctttgccagtagctgcccgaggagccaagggtccaatttttgaggacggaccaggctttgattcagcatttaaacttttccatggacgggatggaatagttccgctttcaggaaagtcatatgtacctgatgagaacaacagcgagagcgttgatgccaagcctgaacctgctctgccgtttaacccattggctgctagagctgccacaataagtctatctgcatttgggccattcggctttaacttctttaatggcaagggcaaaaggcagaacaagaagctcaacaatctaaatcagtcaaacaagaagcccagcaatccgaatcagaattccatgaaacagaaaggaggtaattcatcatcgcacgaggcaatgagcaacgaatggctggaaaatgggcagtgcccacttgcccggtcttaccgagcaatgagtggcattctgccccttgttgccaaggctttacaaccaccagccggtgtgaagctgaagtgcccacctgctgtggtcgctgtgcgtgcagcccttgcacggactgaacttgtgaagtctctccgtccccagcctctgcctgcaaagatggtagccattgcgttgctcggaatggcagcaaacatccctcttggggtgtggcgtgagcacaccaagaaattctcccctcagtggtttgcagctgtccatgccgctgttccattcattggaatgctgaggaaatctgtcaacatgcccaagactgccatggcattcaccatagcagcctccattgttggtcagacaatcgggtcgagggcggagcgcattcgtctgaaggcactggctgcaaagagcgacgctgattccaccaccgtggctgacatgtatccaaacaagactggaaattgcagtgacaccgagggcaaggcatgggatccgctcgcgatgaagatgatggcgggacgggcttctggtggtgctgctgctccaacaccaagcatgtgtttctgattgctcactgattggaaaatttgtatctaccagtatccctggagagtggagagttgatattgagtctattttatcttgtgatgtaattgcctttgcttgtccctcagaagtattcgtttgtttgtggggtgagacaagtggaataagagtgctactatatacacgatcattctgttgttaagtttgccagttctgcagttcatgtatctgtaatttgatgatgctggatttctactatttatcaatcgtcattatactgtgtgtaacctgttgaaaaaaaaaaaaaaaaaaaaaaaaacgagtcaaccccgggggctgtgtatgtgcgagaggtgattgaaattctatttttatcttgtgatgtaattgcctttccttgcccctcagaagtatccgtttgtttgtggggtgaggcaagtggaataagagtgctgcagttctgcagttaagcttgccagttctgcagttcatgcatctgtaatttgatgctgcaggatttctgctattttaccc

SEQ ID NO: 26945 - DNA, 305 bp, Oryza sativa
  Clone ID: PAT_MRT4530_31685C.1
cccaccccaccgccattgccgccgcggcgatgctgccgcggtttcacggcgccatgtggatgcaggacgacggcgtgcggcgaccaagaacacgggcaggcggcgccgcctgggcaggagcagcaccaccacgaccagcatctcatggcgattgcggccgcggccgcgggcggcgccgggttccgcgcggcgcaggcaccggcgccgctgctcgatgaggactggtacttcgacgcggcgggtggtggtggtggtggcgcgcatgggtccatgatgctgggtttgtcgtccgtccatggcgggat

SEQ ID NO: 26946 - DNA, 1407 bp, Oryza sativa
  Clone ID: PAT_MRT4530_31686C.1
atggggtttaatttgctcttggttcctctacttttggtttggtgcgagtggatggaaatgttcttcagcagctttcttaatgaatcggcatcatcagagaacctctttggtcatccaaatgtcgagagatgcccattcctgagaaacatcaatggagctacaacatattcattttcttctgctttgccagtagctgcccgaggaggaaatggtccaatttttgaggacggaccaggctttgattcagcatttaaacttttccatggatgggatggaatagttccgctttcaggaaagtcatatttacctgatgagagcaacagtgagagcattgatgccaatcctgaacctgctctgctgtttaacccattggctgctagagctgccacaataagtctatctgcatttgggccatttggttttaacttctttaatggcaaggggaaaaggcagaacaagaagcccaacaatctaaatcagtcaaacaagaagcccagcaatccgaaccagaattccatgaaacagaaaggaggtaactcatcatcgcacgaggcaatgagcaacgaatggatggaaaatgggcagtgcccacttgcccggtcttaccgagcaatgagtggcattctgccccttgttgcaaaggctttacaaccaccagcaggtgtgaagctgaagtgcccgcctgctgtggtcgctatacgtgcagcccttgcacggactgaacttgtgaagtctctccgtccccagcccctgcctgcaaagatggtagccattgcgttgcttggaatggcagcaaacatccctctcggggtgtggcgtgagcacaccaagaaattctccccgcagtggtttgcagctgtccatgccgctgttccattcatcggaatgctgaggaaatctgtgaacatgcccaagactgccatggcattcaccatagcagcctccattattggccagacaatcgggtcgagggccgagcgcattcgtctgaaggcattggctgcaaagggcgacgccgattccaccaccgtggctgacatgtatccaaacaagtctggcaattgcagtgacactgagggcaaggcatgggatccgctcgcgatgaagatggctggacgggcttctggtggcgttgctgcaccaacaccaagcatgtgtttctgattgttcattgcttttgaaaatttgtgtctataccagtatctctgtatgtttgagagttgatattgagtctatttttatcttgtgatgtaattgcctttccttgcccctcagaagtatccgtttgtttgtggggtgaggcaagtggaataagagtgctgcagttctgcagttaagcttgccagttctgcagttcatgcatctgtaatttgatgctgcaggatttctgctattttaccaatcatc

SEQ ID NO: 26947 - DNA, 343 bp, Oryza sativa
  Clone ID: PAT_MRT4530_31687C.1
agacactaaactggatattgaaatactccaaattaagactgttacaagcctagtttacagcaaggggcacttccaccctcctgctagtgttctcggtcacagcctcataggcaatggaatgccctattgggtttccttcgcttaccaaaatttctctatacaacggtagtagaccatgcatctcagttccagaacctcaatagatgcctagaatcacttgtagctaagcagaacagaattaattacatgcatgaataagcggatgctggtgctgcctgatgggctggtggtggggagcgagcgtaggtggagcaatgcattgtagacttgctcgaaaataggc

SEQ ID NO: 26948 - DNA, 703 bp, Oryza sativa
  Clone ID: PAT_MRT4530_31688C.1
ttttttttttttttttttcgggctccaggactcggcaccaggcccccccccctttttctctttcctctttttttttttaatccacaaatagccaagcaacatgtactgtactgtatataaatattttttatccactcttataagatgccgagataatcacaacatccaaatttacatgcatataacattctaagataataaatatttcctcttttcgatttttcaggcattcatgaatgcgcagacttgcgaatttaactatgatccaccagcacctccactttgatcgaaaagacgagacgacaatttgattgtccgtctctccctgacgaagaactcgcaatatattcaccaaatataacacagcatcttgatatatattgacctgcagcattagtaatcattccaaatgaatatatataatggttatcgatcgaccggccggctgccgcgcgccgcttgtggtggatccctttgcctgcatcaggagagatcgatgagctaatatatataaatcatctgtaagtaacacatcattaatttgatgtatatggttattattatatgtatgtatgtgtgcctagggaggtagcagaaatttcctcggggaaatttggcagatcgatccatcgatctatcgattgacgctatgaacccgaagaaatcaatccgagttgagtttggccggccggaattggtgagg

SEQ ID NO: 26949 - DNA, 427 bp, Oryza sativa
  Clone ID: PAT_MRT4530_31689C.1
tagtggatccccgggctgcaggcctctcgcgccgccggccaatcgccggcaactcagcccacatcaccggagagacccgtcggctcggggtcgccgctccccttgccggcctcctccttcccaccgccccgcatccatttcttcctccagcgaggtcagttcccccgcaaaaccgcccttctccctcgtctccggcgcctcccgctgccggatccgccgccgacgcctcctcggcgggcctctctctgatcccgtattcaccggtgaccacctttactccaccggacagagcatgcagaggtggacagattgaagtaggaaaagaaaatgatcactcctcccgtcgccggtgacaccttcgccggagcgccgacgccgccgagtcaggaggaggatgctccgacgtacggctcggttgtcctcggcg

SEQ ID NO: 26950 - DNA, 2879 bp, Oryza sativa
  Clone ID: PAT_MRT4530_3168C.1
gttgggcgtctacgacttcaccgccggcctgcctccgtcgccgccgagtggtgcctccgcctacacggctggcctattatgccgccgctgttgggcgtctacgacttcaccgccggcctgcctctgccgccactgactggtgtcttcgcctatatggttggttggtcacaccaccgttgttgggcgtctacgtcttcaccgaccggccgcctcgtccgccgccgactggtgtctctgcctgcacagctggcctattatgccgccgctgttgggcgtctacgacttcatcgccggcctgcctccgtcgccgccgattggtgcctccgcctacacggctggcctattatgccgccgctgttgggcgtctacgacttcaccgccggcctgcctctgtcgccgccgattcgtgcctccgcctgcacggctggcctattatgccgccgctgttgggcgtctacgacttcaccgttggcctgcctccgtcgtcgccgactggtgtcctcgcctatacggttggttggtcacatcaccgttcatgggcgttcacgtcttcgccgaccggctggccttcgccgccgccgactggtgtttctgcctacacggctagcctattatgctgctgctgttgggcgtctacgacttcaccactggcttggttccactggcgccgactggtgtttttgtcactattgatggactgctttattcccacatcggctacttctgcttcaccaccggctcgcctcgaccgccgccgactggtgtttccgcctgcacggctggcctttatgccgccgttgttgggcctctacgtcttcaccgaccggcttgccttcgccgccgccgactggtgtttccgcctgcacggctggcctttatgccgccgttgttgggcgtctacgtcttcaccgaccggtttgccttcgccgccgccgactggtgtttccgcctgcacggctggcctttatgccaccgttgttgggcgtctacgtcttcaccgaccggccgcctcgtccgccgccgactggtgtttccgcctgcacggctggcctttatgccgccgttgttgggcgtctacgtcttcaccgaccggcttgccttcgccgccgccgactggtgtcctcgcctgcacggctggcctattatgaccgccgttgttgggcatctacatcttcaccgaccggcttgccttcgccgccgccgactggtgtttccgcctgcacggctggcctattatgccgccgttgttgggcgtctacgtcttcaccgaccggcttgccttcgccgccgccgactggtgtttccgcctgcacggctggcctttatgccgccgttgttgggcatctacgtcttcaccgaccggcttgccttcgccgccgccgactggtgtttccgcctgcacggctggcctattatgccgccgttgttgggcgtctacgtcttcaccgaccggcttgccttcgccaccgccgactggtgtttccgcctgcacggctgacttattatgccgccattgttgggcgtctacatcttcaccgaccggccgcctcgaccgccgccgactggtatttccgcctgtacggctggcctattatgccaccgttgttgggcgtctacgtcttcaccgaccggccgcctcgtccgccgccgactggtgtttcctcctgcacggctggcctttatgccgccgttgttgggcgtctacgtcttcaccgaccggcttgccttcgccgccgccgactggtgtttccgcctgcacggctggcctttatgccgccgttgttgggcgtctacgtcttcaccgaccggcttgccttcgccgccgccgactggtgtcctcgcctgcacggctggcctattatgaccgccgttgttgggcatctacgtcttcaccgactggcttgccttcgccgccgccgactggtgtttccgcctgcacggctggcctattatgccaccgttgttgggcgtctacgtcttcaccgaccggcttgccttcgccgccgccgactggtgtttccgcctgcacggctggcctttatgccgccgttgttgggcatctacgtcttcaccgaccggcttgccttcgccgccgccgactggtgtttccgcctgcacggctggcctttatgccgccgttgttgggcgtctacgtcttcaccgactggcttgccttcgccgccgccgactggtgtttccgcctgcacggctagcctttatgccgccgttgttgggcgtctacgtcttcaccgaccggcttgccttcgccgctgccgactggtgtttccgcctgcacggctggcctttatgccgccgttgttgggcatctacgtcttcaccgatcggccgcctcgaccgccgccgactgatgtttccacctgcacggctggcctattatgctgccgttgttgggcgtctacgtcttcaccgaccggccgccgcatccgccgaccgctaccactactgatggacatcatcatcttccgtcgccgactggttatgccgccgtcgactggtgtttttatcttcacaactgcgcgtcttcactaccagtttgcttctgttgccgacgactcgtgttcacttcatcacggcaatgcaactttgtcatcatggtagagcgacttcatctttattatcttcggcactggcaaactctattgctgctacttcgcaagttttgctacttcaccaaccacgacgtctttgtgagcctcgacatctcggcatgcgatgccatgttattttactacaacaagaggctctccaatattcaggatttctacttggacatcttcaacacatatcttcaatcaagcaatgactactcgacgacaagaagctataattctcgactctatgttcagttgtttcccaac

SEQ ID NO: 26951 - DNA, 294 bp, Oryza sativa
  Clone ID: PAT_MRT4530_31690C.1
ttcgctcacgcgtccgaattctgacgcatctgcccagcactattacacgcataaagatatagaacacattttaaccttgtcaggagaccagctctatcgcatgcactacacgacgcttgcccacaccaccgcgcagatttttttagccgcggtgtccccccccctcccgccctccccccagcccccccatcaccccccccgctccccgcgcccgcccacccccacccctgctcccccctccacttcctaccctgcgcctcccccctcccacccccccccccccccccccccccc

SEQ ID NO: 26952 - DNA, 240 bp, Oryza sativa
  Clone ID: PAT_MRT4530_31691C.1
atggacatccacttggcagatccaaccggaggggggaggccggcggtggcaactgcaccagtagagggcagcagggagaagggttttggattggggtggccgtgggatgggggtaacagccaacattggcaagcagggcaaagcagagcgtgtggttatgaggcagcggtcatgagcaatggggagccgctggagacggggaagatggtggtgcaagggcacctagctgccggcggatag

SEQ ID NO: 26953 - DNA, 182 bp, Oryza sativa
  Clone ID: PAT_MRT4530_31693C.1
ctcttgggcttacgcaaatatgaaacagagaattccttacctttacaccacacgcaagccacacatgcccaaaacgaggatccctaaacctatacttaaacatgcgcacaacagtattctgaaaaaaaccgccatccccccaccacaacgccgcaacatccccacccggaaccataaaacct

SEQ ID NO: 26954 - DNA, 833 bp, Oryza sativa
  Clone ID: PAT_MRT4530_31694C.1
cggacgcgtgggctgcaattgatttatcctcactgattgtcgttgatggaaaggtctgctgggatctctacattgatggacttgttgttagttctgatggaaatttgcttgatgcattggctgctgcaataaaggtggctttgagtgatacaggtatcccaaaagtcaatgtttctcttagtgctacaacagatgaggaacctgaagttaatgttagtgatgaagaatttttgcaatttgacacctccagtgtgcctgttattgttacattgacgaaggtaggtaagcactacattgtggatgctacctcagaggaagaatctcagatgagctctgcggtttcagtatcagttaataggcatggtcaaatacgtggattgactaagaggggcggtgcagggttggatccaagtgtcatttttgatatgatatctgtggctaagcatgtaagtcgacaattcatctcggtattggattcggagacattagctgctgaagcggctgagtagagaggaaggagagcagaggttttgattattgacatgccaagtttgcaatgcatctaccggtttcagtttggctcacaaagatgaatcgttgtcttctgaagcgtacaatcttactgtagcttcatgctgaagtgaacacgcatgggatgctggcatgctgctgaaatgtatgctttttaatttattcatagatgcatttaacttttttgagataagatacgtttaatttggtatgcttgctagataaattgttgtattgtactctccaaatataaatatttgatgtttagagcaagattcagttaaacttttaaggggcccttt

SEQ ID NO: 26955 - DNA, 420 bp, Oryza sativa
  Clone ID: PAT_MRT4530_31695C.1
tgtgttttttaattttttgggtttttttttttttttttttttttttttttttttttttaggtaaaacactggtggtaccaagaaaaagtttatccccctggagtactggccatcaaaaatttaccacttaacttaccccctcacccatgcattcaaaaccatgcatgcaggaaacaattaccacaacacacacaggaaggttgaattttatcacaaccatctttttttttttcccccccccaatttattaacattttaaacatgcataccccacaaaaaaaaaaagaagaaacaagaagagaacattttccatcgcccaaaaataggtttcaccaccctgaactcattaaggtccttgagatgccctggccctgaagaaaatgatcacacccttaacctgacaacttttggaaaatgggg

SEQ ID NO: 26956 - DNA, 1275 bp, Oryza sativa
  unsure (1)..(1275): unsure at all n locations
  Clone ID: PAT_MRT4530_31696C.1
atgacgtggcgccccgaggcgccccggccgcttctgcgactcgcgaggtgcggggtagggccagactgtagagccacgtggctggatgggaagcatgtattagattctagtgctcctaatatcgaggaacatcgttctactgttctgcaagtattgcaacagattggtgtttcacaggataaaatcaacagtatgatcgaagtttggaataagattgatattgtggacaacaatgataatgatgtaactgatgatattgaagatgagattttcctgaccgaaggtgaggaggataaggaggaagaattattttctgaaaacgatgtgcctgcagaagaatcatcatttgagtccttggatgatggaacagactccgaatatttatcagaggaaaatttggaaggcaacaatggtgaaatatcatcctcacttgagcctagtgagatgagagcaatgaactcagtatcatcatcatcaaaagattgttttggagagctttgtggtccagaaactattagtacagatagctgcagttcaacacaaccaatgtccacttgtcatgtgaaaacttctgcagtgacagggacaggattgcaagagttactggagctaatagataagaaactaaccgagcggcaaactattgtggagagaagctatgggccttttgatagaaaatggagaccatcttcttctgtggttggtgaaaaggccgcagaacagtagcatttgattcatgtggcaaagagccaaggagtggttcgaggcacatcggctgcttgtatcttctcgctccatgtgcctgacatttcaggcccgaaaattgccacctgagtcgtcccatcaaggcaatgcccgatgacttggttggcaaattcgagaaaaaagtttttgcagaaagttggcgcagtttggaatgctggaatttttgtttatgcctacaggaattgaagtgatcctcgtgaaaatcgttctactagtacgtcccgaagaggactttctccttacattagtacattacaggtgtttatactcagtcagtttgctggagagtttagttggatgatgcggaagtaataaagctgtcgtgtatgtatgatattcaaagcaatcatcggtagcttgaaaattctcaggatagaagtttaacccaatgcattactcgacagcctttaattcggcatgactaattcttgtgcttgtatttggcctattcgcatcgtgaaggagattgtgcttttaaagagattcagtaaaananaaaaaaaaaaaaaa

SEQ ID NO: 26957 - DNA, 168 bp, Oryza sativa
  Clone ID: PAT_MRT4530_31697C.1
atgccgccgaagcagggcttcgaggaggatgagggcgatagcagcaacaatagtacgaggggactgatatcagggttggtggctaagtcgatggccaatgtggaggaggtggcagccaacatggccaaggtggtggtcagcacggcggaggccaagtcgacggactga

SEQ ID NO: 26958 - DNA, 1589 bp, Oryza sativa
  Clone ID: PAT_MRT4530_31698C.1
ggcggacatcaccgccggcgacacctcacctcgccgcgcccccgcaccctccgatcctcctcccctgatcgcctatggcttcggcgagggcctctgacccgctcgcctcgcgcgatcccccaaccttgcccttgtaccttcctccgcctcctcctcctcccttgccctcgccatcgccccaccaccgtctcctccccgctcccatggccccgatcctcctgcacctccaccccgccttcctcgcccaaatggactcccgccggaccacctccctcctccagtttttgaaggacgaggggggcatcccgtcgccggaggcggacaagaagagggagcaggtcatccgcaagctcaacaagattgtgatggactgggccaaggtggtggcgtacgagcagagggtgcccccaaggcgagcaaccgctaccgttttgacctatggatcatacacgttaggggctcatggacctgaatctgacattgatgcactatgtgttggtccttgtattgcaacactgcagtaccattttttcattgttctgaggcaaattcttgaagacaggccagaagtatcagaactgcagactgtcgaaagtgctaaggttccattgatgcgatttagattcagcggtatttctgttgattttacatatgctcagcttccagttatcgatgcatcagaggcaagtttattctgtaatcaatatgtagttacaagggctataattacatctaatcctcatttgctccaaaaacttgattcgctgagttggagaagtttgtctggagttcgtgttaacgaacaaatcgtccagttagtaccaaacgcacagaagtttcaaattctgttgcggtgcatcaagctatgggctaagaggcgaggaattcactgccatttgctcggcttcttcgctgggattcatttagcgattcttgcagcttatgtttgtcagagatatccatatggcaccatcaatggtctgttcaccatattctttgatatatttgctcactggaattggcaaattccagtaagcttgcatggtcaaccaactaattgcaggcgtcctgatgggtctttcatgcccatactgttgccttgtactccaccggagttttgcacatccaatatgacaaaaggcaccttcaagaaaattagagaagagcttatgcgtggttatgctttgaccaaggagccatggaggcatgattttgagtgggtctggctttttgcaccgtttccatatgctacaaaatacgaagaattccttcgaattgctctatgtgccccaacgtctgaagagctacgcgattgggctggttgggtgaagtcccgcttcaaccttatcctcaagctggaaagtattggtgttgagtgtgacccagattccacagaggaagttgatcatacagtcttcgagccaagcattgtatgccactggggcctcatatataaaacaagcacccatattgatattagctcactgggagaagatttcatgaaggatgtcatcaatgatgtgtatggcaaggtgaaaggtcatgaatccaatggtgaatgcacagtggatttttcatggcagatctga

SEQ ID NO: 26959 - DNA, 342 bp, Oryza sativa
  Clone ID: PAT_MRT4530_31699C.1
atggatgccttctttctgctagtactcctcctctgcacccccaaactgtctcaggcaacgactgtcacctggcaactaccgaacctgcctctcggagtgccagtattggaaaaccgtgcttcaaagcaatggcatattgacaggcgagcgcgggaggagaagaaacgcgcgcgcagggagggcgatttggggatgaagcgcgccgggaggaaccgcgcggcaaagccacgcctcagcaatgcgccatgcccttgtttctccacgctgccccgcctcgatagcgccgaagaacgggtgaccaagtttggtcacacgcgctcgcgatttgtgggccaacgctag

SEQ ID NO: 26960 - DNA, 1853 bp, Oryza sativa
  Clone ID: PAT_MRT4530_3169C.1
gactttcggatttagatttcggagacttgaattgggagaggagatttgaggcggaggagcggcactactcttgccgactggtgcttccgtctgcatggctggcctattaagccgccgctgttgggcgtctacgacttcaccgccggcctgcctccgtcgccgccgattggtgcctccgcctacacggctggcctattatgccgccgctgttgggcgtctacgacttcaccgccggcctgcctccgtcgccgccgattggtgcctccgcctacacggctggcctattatgccgccgctgttgggcgtctacgacttcaccgccggcctgcctccgtcgccgccgattggtgcctccgcctacacggctggcctattatgccgccgctgttgggcgtctacgacttcaccgtcggcttgcctccgtcgccgccgagtggtgcctccgcctacacggctggcctattatgccgccgctgttgggcgtctacgacttcaccgccggcctgcctccgtcgccgccgattggtgcctccgcctacacggctggcctattatgccgccgctgttgggcgtctacgacttcaccgtcggcttgcctccgtcgccgccgagtggtgcctccgcctacacggctggtctattatgccgccgctgttgggcgtctacgacttcaccgccggcctgcctccgtcgccgccgattggtgcctccgcctacacggctggcctattatgccgccgctgttgggcgtctacgacttcatcgccggcttgcctccgtcgccgccgattggtgcctccgcctacagggctggcctattatgccgccattagtgggcatcttcgctttcaccgtcgacagccttcgtcgccgccgactggtgtcttcattgttattaatggacgactttgttcctacattggccacctctgccatcaccaaggggaatattacaaagctaagatccagatccagatatgcataaaagggattcatggctttaagcttatctcttacgctccaggaatggatcagtcagaacatcaccaaccggccgcctcgtctgccgccgactggtgcttccgcctgcacggctgacttattatgccgccgttgttgggcgtctacgtcttcaccgaccggcttgccttcgccgccgccaactggtgtttccgcctgcacggctggcctttaatgccgccgttgttgggcgtctacgtcttcaccgaccggcttgccttcgccgccgccgactggtgtttccgcctgcacggctggcctttatgccgccgttgttgggcgtctacgtctttaccgaccggcttgccttcgccgctgccgactggtgtttccgcctgcacggctggcctttatgccgccgttgttgggcgtctacgtcttcaccgaccggccgcctcgtccgccgccgactggtgcttctgcctgcacggctggcctattatgctgccgttgttgggcgtctacgtcttcaccgaccggccgcctcgtccgccgccgactggtgcttccgcctgcacggctggcctttatgccgccgctgttgggcgtctacgtcttcaccgaccggccgcctcgaccgccgccgactggtgtttccgcctgcacggctggcctattatgctgccgttgttgggcgtctacatcttcaccgaccggccgccgcatccgccgctgactggtgtcaccgcctgcacggctggcctgttataacgccaactgatgctatcttcttcacggctggctacatcgctgtcactactaataggcatcagtatcttcaacacaatctgcctacgtttgccatggctgccgactggtttcttcacttccat

SEQ ID NO: 26961 - DNA, 156 bp, Oryza sativa
  Clone ID: PAT_MRT4530_316C.1
atgcccaacaacgttgatgtgaccatcaaaccgtataggcaaaagcaccggtcggcggcgatgaggcagccagtcagtgaagttgtagatgcccaacagcggcggcataataggcgaaaacatcactcgacggcgatgaaggcgaaccggcggtga

SEQ ID NO: 26962 - DNA, 762 bp, Oryza sativa
  Clone ID: PAT_MRT4530_31700C.1
ccgtcgccggcgacatgctccgcctctcatgctgccggccgacggccggcggcggcctcgccggcgccatgctccacctcctcccgctgctccgcgcccgcgccgccacccatctccccacctcctctctggacctcagccgccgccgccgcctcctcctctccaccgccgccagatccgccgccgcgacccccttctctgtcgaggagtacctcgtcgacacctgcggcctcaccggcgcccaggcgctcaaagcatccaagaagctctcccacctcaggtcgcccgccaagcccgacgccgtgctcgccgtcctctccggcgtcggcctctcccgcgccgacctcgccgccgtcgtcgcctccgagccgcagctgctctgcgccagggccgacaacatcgcccgccgcatcgcctccctgcgcgaccgcgtgggcttgtcggacccccagatcggcagcttcctcctcgcgggcggcgccaagggcatccacgcgtgtgacgtcgccccgaggctggagttctggatccccttcttgggatccttcgagacgctcctcaggatcttgaaggggaacaacgtgctggtgctctctgaccttgagaaggtgatcaagcccaacatcgcgctgctccaggagtgcgggctaactgtttgtgatattgccaagatggccaggtttgctccacggatgttcacgtccaatccaaagcaggtggaagggtttgtgcggcgtgccgatgagcttggcgtgccacgca

SEQ ID NO: 26963 - DNA, 1822 bp, Oryza sativa
  Clone ID: PAT_MRT4530_31701C.1
atggcgtcaatcaggtcgtgcgtgtcggtgaagccggcggcggcggtgagcccggtcaagtacaaatccgcgagggtcggggcggccgggttggacccgaaaggcctgaggatatcttgctcttcgtcttcctcgtccttggccgcaggtggtggtgatgggtgcagggatgccgggtgcgccagtagcagcggcaggggcagcggtgtcgttggttcggttggcgatggttggtgggggaggaggggcgggcagcgggagcgggccgtcgccgccatgtgcagcgccggcatggagggggtccggcacggcgccgccgccgtggccagcgtgccggcggcgtcggcgtcggcgttgccggagcgggccaaggtggtggcgctggtggcggccgtgatgctgctctgcaacgccgaccgggtcgtcatgtccgtcgccgtcgtcccgttcgccgcgcagtacggctggtccagctccttcttgggcatcgtccagtcatcttttctttggggatatgttttctcatccatggttgggggagctttggcagaccgatatggagggaagaaggtgatggcaggtgctgctgccctctggtccttggccactttcctcactccatgggctgcttctcaatccacaattatgttgcttgccatacgtgctctctttggccttgcggaaggtgttgcatttccaacaatgagcactttcttaccaaagtggttcccaacacatgaacgtgctactgctgttggcatttctatgggaggattccatcttggaaatgtcataagtttcttagcaacaccgatcatcatgtcacatataggcctcgccgggacatttgccttctttgcatcacttggttacttgtggctttctgtatggttgttcaatgttgaaagtgaccctcttgacagtcgtacaataagcaaatctgagctgcaattaatcctagccggaagaagtgcatcaaaaattcagggtagcaaattcccatccttacgagaaattctgtcgaagatcgaaatgtgggccatcattgtagctaatgtggtcaacaactggggctattttgtactactatcatggatgcctgtctactttaaaacggtttataatgtcaacttaaaacaagcagcatggttcagtgccataccttgggcagtcatggctctgtctggttacgtcgcaggagcttctgcagatttcctgatcaaatctggtttctctgttgcattagttcggaagattatgcagtccatcggttttatcgggccaggcgtttcactgctttgcttaagatttgcccagacgccatcagttgcagcagtcctcatgaccatcgccctgagcttgagttccttcagtcaagctggatacttctgtaatgtacaggacattgctcccaaatacgctggatctctgcacggactgacgaacggcatcgggacagtggccgccatagttagcaccataggaacaggctacttcgtgcagtggctaggatccttccaggccttcctcaccctcacggcggtgctttacttcagcgccaccgtcttctacaacacctacgcccacaggcgacctaatttttgactgagatgatgacattacccctcgtgtaaaatctcgaagtgtagtacttccaccattgtttctctcctagtcctatggcgagccacgcgcgcggaaggaagcgccggggaggggcatggagcggcggtacccccatggcgcgcgcgcgcgcgcgggggggatgctcgctcgccgccggtggcgccccccacggaagacccgaagaggcgagcagccg

SEQ ID NO: 26964 - DNA, 1131 bp, Oryza sativa
  Clone ID: PAT_MRT4530_31702C.1
cttacgagaaattctgtcgaagatcgaaatgtgggccatcattgtagctaatgtggtcaacaactgggtaagattgataaatcagttatctacaaattggtgttgacatatctatctaaattttaacttccgcgagttcgaaatactatgcagggctattttgtactactatcatggatgcctgtctactttaaaacggtatgttgtctaaggtgttcaaattggtcactgtgacaacgctgctattaagctaattcctgactgctatcctacaacaggtttataatgtcaacttaaaacaagcagcatggttcagtgccataccttgggcagtcatggctctgtctggttacgtcgcaggagcttctgcagatttcctgatcaaatctggtttctctgttgcattagttcggaagattatgcaggtaacagcaacacctgaaattagacttgtgcagcacttggaagttactgatagcttagcacagccagaaacatacaacttaccacaattttgttctctattcatgcttggtacagtccatcggttttatcgggccaggcgtttcactgctttgcttaagatttgcccagacgccatcagttgcagcagtcctcatgaccatcgccctgagcttgagttccttcagtcaagctggatacttctgtaatgtacaggtagtgtttcctgcattaccctgctcataccagattccgccttaactcgaacaacctttttttttcttcttgttcaccacctcaattgcaattgtaccctatctgacggaatgtgttcttcttgattgttcgagcaggacattgctcccaaatacgctggatctctgcacggtgagtccacaaactcgatcagctgtacacaagacccacaccaaatgaacgcactccttggatcctgaaatctgacatatcttcttctgcttgaacaggactgacgaacggcatcgggacagtggccgccatagttagcaccataggaacaggctatttcgtgcagtggctaggatccttccaggccttcctcaccctcacggcggtgctttacttcagcgccaccgtcttctacaacacctacgccacaggcgacctaatttttgactgagatgacctgca

SEQ ID NO: 26965 - DNA, 657 bp, Oryza sativa
  Clone ID: PAT_MRT4530_31703C.1
cgagtgcaccaaatttcacaagaaatagttcatttcacacagaaattgagcgagaaaaattctcttattccaaacagagcctaagacagttttgaggctatctcaggtaacacagtttacttcaggggaattctcttaaaaaattctctttcagattacttcaggggaattgcaaagtgtgaggttatctcaggtaacacagttttgttttgggacgacatgtggaatgaccaaattaggagcatcacttacccacatctatgtggccatgccattgccagaaatgattccttggctgtcacctgtgctaaaccttttgaggattgttttaagttgccactgacccaggaagcttacacagaatttctgctgctaaagggagagctggatgctctgtccttagcaagtcagcagggggataattggagttttatatggggcaggaacaattacacctccaaagctttgtacaagttgaattttgcagccatgcaaccccccatacctttccgatggatctggaagaccaaatatgctggtgctagcaagattgagatttcagagaaaaggattcttggagatttgtttcattgcatgttggcacatttggaagcaaaggaatggaaagattttccagaatatagatccttcttttga

SEQ ID NO: 26966 - DNA, 999 bp, Oryza sativa
  Clone ID: PAT_MRT4530_31704C.1
atggctatcattgataaaaccattgctcacatcatggataaacaagatgataacaagatcaagtcctccaattattggaatccaattcggccacctgctactgtgctgaattcaaatggccgccaaatgtgcatacgagctccgttttgggtccatgagtacttgatagaaagctcacggagtcgtctttccaacggatctaccctcattgccaaattccttcttagtgggctgcaattgcagaaacaaggtgttgcgtcacctataatgggccaagtggggcccatgtggggtgtgccccaaccaggaataaggttgatctgcactggcaagatcaacaacccacagataggtgtatcgatcgctaaggcgcaacacaacaacccgtatagcaagtgtttgccaaggtatcgatacatccaaactccattgggatgcttggccgagttggtgtacgtcaccattccgcttgctttggattgcgcaaggggatacgagatggtcatgctcaacatcggcttcttcaccatcgacgagagatgccaacttctcgacaagatgcatatgagtggtctaaaagaatgcaatgaaaacacaatgcgtagatttttcaaagggcttagttctgaagttcaggtaattcatcacattcaacaaaagagggagaatggtgtacttgagaagaaagaggatgaagcacctgtggtgtctgaagaaagtttgcaaggagaaggggaggatgatgtgaccatggctaccattgatacaaccattgctcacatcatggatgaacaagatgataacaagatcaagtcctccaattattggaatccaattcagccacctgctactgtattgaattcaaatggccgccaaatgtgcatacgagctccgttttgggtccatgagtacttgatggaaagctcacgtagtcatctttccaacggatccaacctcattgccaaattccttctcagtgggctgctattgcagaaataa

SEQ ID NO: 26967 - DNA, 243 bp, Oryza sativa
  unsure (1)..(243): unsure at all n locations
  Clone ID: PAT_MRT4530_31705C.1
ctatataaaatcggctgggggtgtccactcanatgatacaaatacacactttgcactacaagcgttcaattatccatgcagttgtgtcatattacaaaggctctaggttcaagaatgtttttatggctgcccaatcattcgataatcattatcacatcatcaccacttcctgatgacgtttgttccatacttgaactttttctttccatcggcctcgatcctcatatcatttgatatgaaatg

SEQ ID NO: 26968 - DNA, 4530 bp, Oryza sativa
  Clone ID: PAT_MRT4530_31706C.1
atggcgctgttgccgccgctggcacctccaactgagacggcgcagtttccggaaggagcaggaatggcggcgtggttttcggaagcggcagggacggtttggagttgtggtctagagatggcgccttttccggcagcagcgagagcggtggcgctgtctcggtcgctaccctcgagagagatggacgagaaagtggagatttttgttgtggatctgacagaggtatcagagcagtacgaattcttggctcttgatttcatcagatctgaaccaggcggtggtagacacttctgcaagaggaaacaagggagggaactagttcctgaacttttcttgcagaaaaattggatggttactaagacccgatccaacgagacgattctggatatggaggagctaaatgagttcagggtggatatggcgaatctcaagaaggaggggttgctgttggaactctgcaagcagaagaatgtggaggaggttgacggtgacacagatgcagcagttgctgctgttgcggctgaaaaggctaacaaaactgttagttcagatactgggggtgcaggaccaagcaatcccactgctgggaatcctcctgaggtacgttttgccattgaacacaacaccatttctgttgagggagttggtagttcaagggggcctcaggatgcagcggctgtaatgaatggttgggtgtttgacactagtatgggcactcatcggcctaatgtgtttggaaatgggagtcagcaggggtttgaccgtgtgggaggaatacctagaaggtttcaggggaattctgggggcagagcactcaagtggtataggggaattggtcttccttggcaggtgatcacttggccacaatggtgtgctatggtttgcaccagtttttctgcagcagatgtgcatgaggcaatggaactttttcaaaatgtgaaacaacatggacaaattgtggaacattatattgacaaatttgaagaatacatggatttggtgagaagggaccatccatacttgcaggagcaatacctcaacagctgttttattggggggttgagaagtgacatcaagcatgatgaagcatggtttcctggacatcaatgcaaggtgaagaaggcactaaatgcactacttttggaggaggaggaatatgaaggaactgaggaagtaggcagggaaaagaaggcacaggagaaagtcttggaagaaactgaacatgcacctgaagaaattgatcaggaggaactgatgtatgtgtcacagaatgctatgcaaggggctaccagaccggacacgttctcggtgattatacaaatcaatggaagaagggcagtagggctggtagacagtggaagtccaagcactttcatggatcaggagtatgctatacgtaatgattgtcctctggtatctactgattctaagaaagttgttgtggcagggggtggagagctcaaatcagaagtacaagtccctgacattctgtaccaaattcagggtgaaactttctccaacaaatttaacttgatacctttgaaggggtatgacattatattgggagctgattggatttacaaatatagcccaatcactcttgatttgaagaaaagggaattgggtataactaagggagaaaaggtgatcaccttacaagatttcactaatactgggaaacatctgttagttgatagcagtaaggtggacaaaattatcaggaaaggtggtctgggatatttgtttcaaatcacccaagtggcagaagagagtgatgtggaagaaagcatcagcattcctgatgatattcaagatatattgcaaagatttcctactgttttggaaaaaccaaaaggccttccacctcagagagggtgtgatcatgttattactttgaaggatggagctataccccctaacctcaggccctatcgtgtacctcatcatcaaaaggaagccatggagaaaattattgctgaactgattgaatccaaggagattcaggttagcaatagtccctactcatcaccagctgtaatggtgagaaagaaagacggttcctggagattgtgtgttgactatagacagttaaatgcacaaacagtgaagaacaaatttccaatgcctataattgaagacttgttggacgaattgaatggagctaaaattttcactaagttggacctcatgtcagggtatcatcagattaggatgtcgagacctgacattcccaagactgcatttagaacccatttgggacactatgagtatcaagtcatgccctttggtctcactaatgcccctgccacatttcaatcacttatgaaccaagtgttagcaccattctttaggaaattcgtattggttttctttgatgatatacttatctatagcaaagacagggaagagcataaagaacatatcaggctggtactgcaagtgctgaaggcaaacaatctggtgatcaaacccaagaagtgtgcttttggtctgtccagtgtgtcttatttgggacatattatatcacaaaatggtgtagccactgatccaggcaaagttgagaagattgtcagctggcccattcctaagaatgtgacagatctcaggaaattcctgggtatgactggatattatagaaggtttatacaagggtatgtgttaatttgcagaccattacatgacatgctgaaaaaagaaggctttcaatggggagagaaacaaactgaggctttcaagtttcttaaacagaaaatgtgtagcagtcctgtcctgaccttgcctgacttttccaaagaatttacaattgaggctgatgcatgtggtactggaataggagctgtacttatgcagggtgacagacccatagctttttacagcaaatctcttggtcctaaagctgcagctcaatcaatttatgaaaaagaagccatggcaatattggaggctttgaagaagtggaggcattacttcctgggcagtaagctggttatcaaaactgaccaacaaagcttgaagcacatgatgaaccaaaggctggttgagggaattcagcacaagctgctgttaaaactgatggaatatgactatataattgagtataaggctggcaaagacaatgtggtggcagatgctctgtcaagacttccccaagatcagcttcaaactgaaatatgtaatgcaattacagtggttatacctaaatggatcattgatgttcaaaatagctatgaaggtgatgtgcaggctcacaaaattttgagtatgattggaaccaatagtgatcctgatcaacactacagttttgaaaatggaattttaagattcaagggaagaatatatgtcggtgaagagacctctatcagaactaacttaattagagattaccattgttctgcttttgggggtcattcagggatgagggcaacacatcatagaatcaaagctttgttttattggccaggtctcaagaagacagtggagatgttcatcagggagtgccctgtctgtcagatcactaaggtcgaacatatacatatacctggtctattaaatcctctagaggttctagacatggcatggacacatatcactatggattttatagaagggctgcctaagtcgaaatggaaagatgccatactagtggtggtggatcggttgacaaaatatgctcattttctggctttgtcacacccatacagtgtggaacaggtggtggagatatttatgaacaatatacaccgactgcatgggatgcctatggcaattatcatagatagagacaggatttttaccagccaactatttcaagaaatatttaaaagcatgaaggttcagctaagattcagtacttcataccacccacaaacagatgggcaaactgaaagagtcaatcagtgccttgaatcctatttgaggaacatgacatttcaggagccacatcaatggtattcttggctatccttggcaggatggtggtacaacaccacctatcatacatcccttcagatgacaccattccaagctctttatgggtatccacctccacaaatcaatgaattttcaatttcttgcaatgtgtctgctgaggcaaggacagaaaggagtctgaatgttggggacatggtgtacattaaactgcagccctacagacaaactgcatttggtatcaggggatcactgaagctgagatctaagttttatggaccatttaaggtactggagaagataggtcaagtggcctataaattacagctaccagaggatgccagtatacaccctgtgtttcatgtaagtcagttgaagaagcacttgggtcaaagagcagtgcctatgtctaatctgccttctatgggtcctgatggacagatcaaaacacaacctgtagctgtattgcagaggaggatgattcccagaaatggagtagcagtaactcaatggttgatactgtgggaaaatttgggaccagcagatgccacatgggaggatgctgctgtgattcaaagcatgtatccaacatttcatccttga

SEQ ID NO: 26969 - DNA, 455 bp, Oryza sativa
  Clone ID: PAT_MRT4530_31707C.1
tgagattaagggttgggctgttagagccgcagaacctattccacagggcacatttgtatgtgagtacattggagaggttttgaagatgaaggatgatggggccataagacatgtagaaagggaggcaaaaagtggtagcagctacttgtttgaaatcacttctcagattgacagggaaagagttcagactacagggactactgcatacgtgattgatgccacaagatatggcaacgtatcccgttttattaatcatagctgttccccaaatctcagtacgcgtttagtttcggtggagagcaaagactgtcagcttgcgcacattggtttgtttgcaaaccaggatatcttgatgggagaagaattggcctatgactatggacaaaaattgctacctggtgatggatgcccctgccattgtggtgctaagaattgccgaggacgtgtgtattgag

SEQ ID NO: 26970 - DNA, 2817 bp, Oryza sativa
  Clone ID: PAT_MRT4530_31708C.1
atggcgtcccgaggccggggcggcgggcaagagcggcatgaagaggaggccgacgcggggcgaggcaggcagcagtggggagcaaaggaaggtgttgctgccgccgccggccgctaccgccgggagaggagcatgaggacgagggccctaccgccgcgggcttccccgccccgccgcccccgcgattccgaccccgccgagagcaacggaggaggagcacccaagcctggcggggacaacggcggcgaccgctccccccgccgcgctagggtgcccgatgcggaggaggagggtggtgaccgcaggaggaggccgtcccgggtttccgacgacgacaaggagggcggccgccgccggaggaggcgctccaccgactccgacgacgagagaggcgaccgccaccggaggcgccaccgccgccggagccccagctcggagtcctctgatggtggccgtagccgtcgccaccgtcgtgacgagagctccaggcggcagagagatgagaggcgccgggacaggggcggtcgcgaggagcgacgcaggagccctgataggaaggagccgactccgccgctgcccccgccaccgccgctcttgccggagttgatacccggccgcacaggaggaatctacatcccgcctttccgcatggcgcagatgatgagggaggtagaggacaagtcgagtcccgagtaccagcgtctcagctgggatgctctcaagaagagtatcaatggtctggtgaacaaggtgaatgccaccaacataaagaatatagtgcccgagctgttcgccgagaacctggttcgtggaagggggctcttctgccaatcgtgcatcaagtcgcagatggcttcgcctggcttcacagatgtgtttgctgcacttgtcgcggttgtaaataccaagttccctgagattggccgcctgcttcttgttcgtgttgtgcttcagctcaagagggcatataagcgaaatgacaagccacaattgcttgcagcaaccaaattcatagcacacttggttaaccaggttgttgctcatgagctcgtggcgctggagcttcttaccgtgctgcttgagaacccaactgatgatagtgttgaggtagcagtggggtttgttaaagagtgtggggcaatgctacaggacttgtctccacaagggcttcatgctattttcgaaagatttcgaggtattcttcatgaaggtgaaatagacaagcgtgtgcaatttttaattgaaggactgtttgcaattagaaaggctaaatttcagggattccctgctatccgtccagagttggatcttgtggagcaggaagaccaatttactcatgagatatcccttgaagatgagctagacccagagactaatctaaatgttttcagggcaaatcctaattttgctgaagatgagaaggcgtatgagaacctaaaaagaagcatcctgggagcagaatcttctgatgatgaagaagggtctgatgatgcttctgatgaggacgctgaagaagaatctgacgatgaagaggatgaagagcagatggagattagggatcaaactgagactaatctcattaaccttcgaagaaccatatatttgacaattatgtcgagtgttgattttgaagaagctggtcacaagcttctaaaaattaaactcgagcctggccaagagagcttcggttccgtgcccatgggtaccgagatcgctgcggttcccaacatcagcgaaggccttgccaagatctcaaagaagatgatggacttggcggcgcaactccaggttttggcggctcaatcagccgagcaggccatgcctctcggagccgccgagcgatccgaccggcgggccatgacgttcctgcgcccacggcagcaggacttcaagcgccgtttgcggagcaggatgcgtcacatgcagcagccaaagatggaattgtgcatcatgcttctcgagtgttgcagtcaggagagaacttatcttcgatattatggattattgggccaacgattttgcatgattaacaaagtttaccaggagaactttgagaagtgttttgtgcagcagtattccatgatacatcgtcttgaaacaaataagctaaggaatgttgctaaattttttgcacatctgttgggtactgatgcacttccttggcacgttttggcctacatcagattgactgaggaggacacaacgtcttcatctcgaattttcattaaaatactcttccaggagttgtctgaacatcttggtattcgtctactcaacgagaaactgaatgatcccaacatgcaagattcatttgattcaatattcccaaaggatcatccaaagaatacaaggttctccataaattttttcacctccattggtcttgggggtatcacagagaccctgagagagtacttgaagaatatgcctcgactgataatgcaacaacagaaacccgcctcttctgagtcgggatcaagtgattcaggatctgcttcagacagctccagctcagagtcagaatcgagctctgatgagagtgacaagaagagaagcaagaggcggaagagcaactggcacggatatcaagggcgttttgtggatatgcaagtttatggagatattgtgaatatcacgcgtattttctgttccataaagagatgcaacatccaaaaataccctcccacctccaccacaaggccctccttccctcccacctccaccacaagcccctccttccttggacgagggcaaagctcgctagcttgcccgaggaaagtgaggcagcaactgtcggttttgattggttacaactaa

SEQ ID NO: 26971 - DNA, 239 bp, Oryza sativa
  Clone ID: PAT_MRT4530_31709C.1
cgccgccgccacgtgctccaccccgccgtcgtcgccggccgagctccatccgcgtcgtgccgtcgcctccgtcgtcgccgccagtcgccgtcaccgccgtaaggtgcgccgaggtgtggagaagcccggccgccggagccccgaagccgccgatcgccggagccccgaagccgtcgaccgaagccgcgccgccgctagacctcgtcgccggccgtcatcgttcgtcgtttggttcgagg

SEQ ID NO: 26972 - DNA, 1383 bp, Oryza sativa
  Clone ID: PAT_MRT4530_3170C.1
atggcgcagccaccggagttccaggacgtccaatcccgcgccgccggtgcggtggcattcctcggcaatgttaaggcccggttccggcggaggccggccgtagaccccgccgcccccgccgcgccggtgctccgccgcacggcggagctcctccgtggccaccctgatctcgtcgccgagatcaacgcggttatttatccccgcaacagggtcgagctcgtacccgccgccgacgacgacgatggcgatcatgcagcagcagcggcggcggcaaggacgcgtcggaggagcgacgcacagcggcgccgcccggacgatgccgccgtggcggagagctccgccgccgccgagcgacgagcgaaggtgtccaaggccgagcagttcttggcgagcctgaagatcgtaggcggcgtcgagcttcacgacagggtcgaacacgtaatccacgacgtgaacaaggacaaagggctggacgcgcatcaggtctacgcccggttggaggaagtcctcgccgcggaacacccctacctgctccatggcatcgatgaattcttccctcgaccgaagcaccagccgccgccacatgccgcagccgacggcgagccggatgtgggacaccggccgtcgtcgtcgtcgtcgaagtgcgccgccgccgtcgacatcaatcagaacggcgacgccaccaggccgagcaaggccagagccacgcagctcctcaccgccgccatcttcgacctccaaatcaaccacgtcgacctccatgtgaacaagaacagcgacgccgtcaggcccaagaagaagccccgcgctgccgacccccagaccagcaagagcgcgctcgacggcggcggcgacgacgacgacgatgacgacggcgccgtgttgccgagccgtgcggccaagaagccccgcgccgcggacatcaagatcaagagacgacaccccctcgacgacggcgaggagagcgacgcgtgctggcaagtcaccaccaccgacaacccgcacgacgccgcgcggacgtttaggaagaccctggagttcatcgcgtggtactcgaagctggtgaccaccatgaggcgcgctgaggagctggagaggagagagccacacccgcatggcgccctcaaggatctcttcccgagcagcgactgccatgagatcctcgaggagctctacggcggcggctggaggacagtgcaggtggcgctcgacgacggcggtggggggcgcgccggccgcacgacgttggcggcgatgcttgtcagtctaaggcagagggagaacgcagccgtggagcttgcaaggcgccgcgcggacaaaactcgctacggtgaagaaccagccgccgcgtggggatcgcggcggcggcgacgccagccgtga

SEQ ID NO: 26973 - DNA, 720 bp, Oryza sativa
  Clone ID: PAT_MRT4530_31710C.1
agcgtggctaactcctatgatatgttaacaattgttgttcatggagttaaaaaatggccatggtagcctcagaagaaagacggtcacggaggcgggcgcgggcgcgggcgccgccgctgttgacttggtacaggtgctgaactatgatgtgatcatggcaactatggatacaaccattgctcatatcatggatcaacaagaagacattaagatcaagtcctccatgtgctggaattcgattcggccacctactacattgctaacttcaaacggccgccaaatatgcatacgagctctgtttttggtccgcgagtacttgatggaaagctctccgaggcctctttctaatggatccaatctcattgcgaaattctgtcttagtgagctgcaattgaagaaacaagatgttgcgtcacctataaagggcctatgggcttgtaactttgtctgggaccccgactcaagtggggcccatgtggggtgtgccccaacctggtggagaacaaccctagggcacccttggtcgttctcccacccctataaatagctagtaataaggttgatttgcaccggcaagatcaacaactcacgaagaggtgtatcgatcgctaaggcgcaacacaacaatgtctatcatcaactcatcgaaagatcaggccaacaacagccttgagtgtctcgagtggagctcagggttcatcaggtggtaaaactcatgaa

SEQ ID NO: 26974 - DNA, 3606 bp, Oryza sativa
  Clone ID: PAT_MRT4530_31711C.1
atggtgtgctctaccaatatactttaccaaaggaacaacccaagaaaatggaatggaggacagatggaaccagaaaataagcacggttgtgaactgatagatacctccttcgcaatatcagaaggcctcatccactcagagacaagggtaccgagctcgaatcgccctatagtgagtcgtattacaattcactggccgtcgttttacaacgtcgtgactgggaaaaccctggcgttacccaacttaatcgccttgcagcacatccccctttcgccagctggcgtaatagcgaagaggcgcagaggagaagctcatttttcacaagaggatgatgctaacctcaacacattaagtgaagacccaaacaaaagtaacctccccagtatctccatcattcatgaagctgtaggaccattagagtcaagagatcagaataaaactgctgccttccccagtacttctggtgtccaggacactggagaaccaaatagtgctttacacaatgtcagacatgaattggattcattcaagagttctcggcagtgttctgcatatatagaagcaaaaggaaggcaatgtggtaggtgggcaaacgatggtgatatttactgttgtgtgcatcaaagtatgcattttgctgaccattcgtctagggaagataagtcacttactgttgaaactccactgtgtggggggatgactaatcttggtagaaagtgcaagcatcgagcccagcatggttttatcttttgtaaaaagcaccgcttccaaacaaatccagatgcaatgagctcagatagtttgttaagttcgtctgagggccgtaagtgggaagagtcacagaaaagcgtggagaagatgtcttcctcaaatgcaacttgtagtgtaggctcagagcaggcaaataatttccaggttgctgtgcacatgaaagtgacaccaaccatggctgttgagacaactagtgataaagttaacgtgtcagagaacgctgatctctgctaccccatgtcaacttccatggaaaactctaacttagatgcttctatttgcattggaattcgctctcatgacaatattgctgaatgccaggattatgccgtacgacacacactttactgtgagaggcacataccgaagttccttaaacgtgccagaaatggaaaaagtcgactcatctctaaagatgtctttatcaatcttttgaagtgttgcacgtcaaggaaagaaaaactgtgcttacatcaggcatgtgagtttctttattggttcttgagaaacaatctttctcaccaacgcccgggtcttggtagtgaccatatgccccagatattagctgaagtgtcaaaaaatcctgatgttggagaatttttgttaaaactgatctctagtgagagagaaaagctttcacatgtttggggctttggtacagatagctctaatcaaatgcattctgagaaccaagatggatcagtgatggtgttacgtgaagatgggacacatccttcacctggtctgaagtgcaaaatatgttctcaggagttctctgatgatcaaggacttggattacactggacagaggttcacaaaaaagaagtgcggtggcttttcagaggctattcttgtgctgtatgcatggactcatttaccaacagaagagttctcgaaaggcacgtgcaggaaaaacatggcgctcagtatctccaatattcgacactcttacgttgtatatcgtgcaacagcaactttttgaacacagatcttttatggcagcacattgtttcagatcattctcgagatttcagccttctggatcatgtccctcgacgacctaggggtcaatctatcaaaagaacagaaagggcaagtgatgagctcctttatgataaccataaccttggtaaggatgatggtttacagaagttcacctgcagattatgtgggatgatgtttgatcttttgccagatcttggccaccaccatcaagttgctcatacaaactcaggtacagtcagtgatatcccttcaggacgtgaaaagtatcagtttaaccgtggtcggcactattattcagccttcaagaaaagtttaagaccatccggctcattgaagaagaggactagttctggagttgagaaacattttaaggctcaaagcttggatctatctatggatacatcacacattgtggaatctgagaccaccacccttggtaggttactggatttccaatgctcagacgtggcattgactttattttcaaagattcaaaagacaagaccccacccaagcaaccttgatattctgtctattgcccgttctgtttgctgtaagacaagccttcgtgctgcattgaaagctaaatatggaatcttgcctgataacatatttgtgaaagctgcaaagctttgtagtgatgttggcatccaaattgattggcatcaagaagaattcttttgccctaaaggttgcaagtccaggtctagttctaattccttgctccctttacagcctacccaagttgattttgtgatgagtcctccaattggtgatgagatatggggcatggatgaataccactatgttcttgattcagagcactttggttggaatcttaagaatgagatggttattgtttgtgaagatgttagctttggcagggagaaagttccagttgtctgtgccattgatgtagatgcaaaagaatttccatatatgaaacctggagaaattttgcaaagtgaaaattctctgccctggcaaggtttccactacgtcacaaagcgtttgatggattcatctcttgttgattcagagaacactatggttgggtgtgcttgttctcatgcccattgcagtcctgaggaatgtgatcatgtgagcctctttgatagtatctatgagaacctagtggatctccatggtgtacctatgcgtggtagatttgcatatgatgaaaatagcaaagttattttgcaggaaggatatcctatatatgagtgcaattcatcatgcacttgtgatgcctcctgtcagaataaagtactgcagagaggactgctggtaaagttggaagtcttcagaactgagaataagggttgggctgttagagccgcagaacctattccacagggcacatttgtatgtgagtacattggagaggttttgaagatgaaggatgatggggccataagacatgtagaaaggctagaaatctattggaatttctccggtgcattccataaactgataagaaaattattggatctcagggaggcaaaaagtggtagcagctacttgtttgaaatcacttctcagattgacagggaaagagttcagactacagggactactgcatacgtgattgatgccacaagatatggcaacgtatcccgttttattaatcatagctgttccccaaatctcagtacgcgtttagtttcggtggagagcaaagactgtcagcttgcgcacattggtttgtttgcaaaccaggatatcttgatgggagaagaattggcctatgactatggacaaaaattgctacctggtgatggatgcccctgccattgtggtgctaagaattgccgaggacgtgtgtattga

SEQ ID NO: 26975 - DNA, 428 bp, Oryza sativa
  Clone ID: PAT_MRT4530_31712C.1
ttgcggtctgtacctgccgtccttttttttttttttggtttttttttttttttttttttggaacaaaacattaaatttcttaattgtaattcctggtttaaaccccctagggggattaatattggttttttccaaaaattttttaaatttacaaaccgtttaaaactaactggaatggcccggcccccattggaaaaacaattttattttaaaaaagccggatagtccgctttgttaaaaacaattcaattagagctttcccggaaaaaaattttaagggcccgggaaaataaaaatggaaaggaaaaatttttgggggggggggaagaatatacggggggttgatctttaaaaaacacaaaagctttttggggcacccgggggaaagccccttggattttttgaaaacggccagggttttggggttt

SEQ ID NO: 26976 - DNA, 114 bp, Oryza sativa
  Clone ID: PAT_MRT4530_31713C.1
gcgcccatcatggcgtgcatgagtcgccccataggtgggtttacagtttgctcgttgctcttgcgcgatggctccctagcgcactgggtgttagtggcgcagcactgctctatg

SEQ ID NO: 26977 - DNA, 1433 bp, Oryza sativa
  Clone ID: PAT_MRT4530_31714C.1
attagcatcgctggttggcacgaggctaacagtagccataatcatgggaaggctagtgacaacactgctcgtgctgtgcttgatctacgtgacgacatgttcgctctcgacgcgcacggcggcgttccgcgcgcacgacctccggcgaggtctagagcaagccatgcgcggccgcctcctcgccgacgcgacgccggcaggaggctcggccgtgcccatccactggtccagacacctctacaacgtggcgaacttcaccatcggcacgccgccgcagcccgcgtcggcgatcatcgacgtcgccggggagctcgtctggacgcagtgcaagcagtgcagccgctgcttcaagcaggacacgcccctgttcgacccgaccgcgtcgaacacctaccgggcggagccgtgcggcaccgacgcctgcaagtccatcccgacgagcaactgctccagcaacatgtgcacctacgagggcaccatcaacagcaagctgggtgggcacaccttgggcatagtcgccaccgacacgttcgccatcgggacggcgacggcgagcctcggcttcgggtgcgtcgtggcgagcggcatcgacaccatgggtggaccttccggtctcatcgggctagggagggcgccgtcgtcgctcgtctcacagatgaacatcacaaagttctcgtactgcctgacgccccacgactccgggaagaacagccggctgctcctcggctcctccgccaaactggccggcggcggcaacagcaccacgacgccgttcgtcaagacctcgcccggcgacgacatgagccaatattacccgatacaattggacgggataaaagccggcgacgcggcaatcgcgctgccgccgagcggcaacaccgtccttgtccagaccttggcgccgatgagcttcctggtggacagtgcgtaccaggccctcaagaaggaggtgacgaaggccgtcggcgctgcgccgacggcgacgccgttgcagcctttcgacctttgcttcccgaaggcggggctcagcaacgccagcgcgccggacctggtgttcacgttccagcagggcgccgccgcgttgacggttccgccgccgaagtacctgatcgacgtcggcgaggagaagggcacggtgtgcatggcgatcctgagcacgtcgtggctgaacacgacggcgttggacgagaacctcaacatcctgggtagcttgcagcaggagaacacgcacttcctcttggatctggagaagaagacgctctccttcgaacctgcagactgcagctcacttatctcctaactaatcaatggctgctgctacttaattactttcttcatatgtatgtgtacttctgaataacgccgccttgcggcatgagctgcagcatgctcatgttggtgaaaataaaaaaaaaaaaaaaaaaaaaaaaaaa

SEQ ID NO: 26978 - DNA, 375 bp, Oryza sativa
  Clone ID: PAT_MRT4530_31715C.1
atggaccacaagggcgcacacccaacagcccacatcggtcaagagctggatggtggtgaccggtgcgtggaagacaacggcgaccacggcgatggcggcgctggtccggcgaacgagggggtggccggtccccagtgcttgttggcgaccctagcggtggctcgaggcagccgcaagcagtggaatggtggaggaggtaaggtggctcagcgaagtggtttaagggagcgtaacagtggccaaggtgcgttgcgacttggtgaaaccggaggtggcaacggcatggccccacatggcctcgagcggcagtgcaagggtggcggcagcgcacagctggagatcggcaacgggcagcggatcaccggctcgtcctag

SEQ ID NO: 26979 - DNA, 575 bp, Oryza sativa
  Clone ID: PAT_MRT4530_31716C.1
gcgcactgttacactcccagtatgttcgctgcgacgacgcagctccaaatcggaaccctaaccctagtagtcctcctcctcccgcgctcgatccgaggtcgtcatcccgctgattccgaggctctctactgcggcggcggcggcgatggaagagcataggcttggcggcggcggcggcggaggcggaggcggggggaggccgccgatcccgggggcggcggggaggaagcttccggggctctcgcggcacgcctcgttcgtgaggagtcctgcaaacagtacaaaatctggaactgagaaaacttttgaaaacatggatgctgttgcatatatgcctgttgtaaggtctggaggttgggctgatattgggtcaaggcacacaatggaggatgtctttatttgttctgataacctcatgaaagagtttggagttgaaagttttgaagatggtccgagcgcattttatggggtttttgatgggcatggtggaaagcacgctgctgactttgtgtgcagcaatttggcaaggtttatcgttgaggatgaggattttccaagggagatagagaaagctc

SEQ ID NO: 26980 - DNA, 470 bp, Oryza sativa
  unsure (1)..(470): unsure at all n locations
  Clone ID: PAT_MRT4530_31717C.1
cccacgcgtgcgcgcccacgcgtccggtggaagcggcggggcagcaggcggtgggcggagcgacgacgggcggcgagaggcgggcggcgtagcgagagcgctgcgtgggaggaggtttcctcttcttcctcctctctcctggcatctttggcagtcggcgatacggcggcaggagcgctgggtgggtggggggagtcnncaggccacgggcgacgatgagacaatggccgtcgccggcggcgcagcgcgcgacgaggcgccttcccggggcggccgacggcgccggcgcgcgtcctgggcatgcagcggtggcggcgacgcgaccacggaagaaggggagcgcagatctggcggcgctgctgctgctgcggcaacaggcgtcagctccgaatccggaagctttccttcccttcttgccagcggacattcaccttcttttaccggctcaactggatatgtttagcttacat

SEQ ID NO: 26981 - DNA, 1493 bp, Oryza sativa
  unsure (1)..(1493): unsure at all n locations
  Clone ID: PAT_MRT4530_31718C.1
atggaagagcataggcttggcggcggcggcggcggaggcggaggcggggggaggccgccgatcccgggggcggcggggaggaagcttccggggctctcgcggcacgcctcgttcgagcaagcaggtccaagatactttgcttcaagatctaaaacgtcaactattttgatactggagggagtgaggagtcctgcaaacagtacaaaatctggaactgagaaaacttttgaaaacatggatgctgttgcatatatgcctgttgtaaggtctggaggttgggctgatattgggtcaaggcacacaatggaggatgtctttatttgttctgataacctcatgaaagaggtctggaggttgggctgatattgggtcaaggcacacaatggaggatgtctttatttgttcggtgtaacctcatgaaagagtttggagttgaaagttttgaagatggtccgagcgcattttatggggtttctgatgggcatggtggaaagcacgctgctgactttgtgtgcagcaatttggcaaggtttatcgttgaggatgaggattttcctagggcagatagagaaagctctgtcctcagcgttcttacagactgatgatttctggtagcaaatgctggtgattgtagagcagtactttgttgtcgtggaaaagccattgaaatgtccagggatcacaagccttcttgcaacagagagaggtttcgcatggaaagcactggttggtctggttatgatggctacctgaatgggcagcttaatgttgcgcgggcaataggagactggcacatggaaggaatgaaggcatgtgatggtcttggacctcttagtgctgagcctgaggtgatgatcaggaatctcactgaggaggatgaattcctcatcatcggttgtgatgggatctgggacgtattccgcagccaaaatgcggtagactttgcacgccgaaagctccaggagcacaatgatcctgttacctgttgtaaagaacttgttgatgaggccatcaagaggaagagcggcgacaacctttctgttgttgtcatctgcttcaactctcggccgcctcctgtcctaacaactccaaggcctcgtgtacagaggagtatatctgcagaaggcctgagggagttgcaaagctttcttgatagcttggctgattgacatgaggcttcttccttgatagaagcctgacatactgtcgctagtgtacttccattgcttagcatggaatttttaggtttagtgcggctattccaaggcttaatgccagctatctcacaaattctctgagatagcagctgttgagtgattctggtgttgtaatgtattatgcggctaattctatctgcagtttaagtatttattggttcagggatatgctgtcttaaagagtctggaattatcagggaacatttctaagatatctgaaatggcgagtgatgttgtctatngactgtattcaattttgacaaaaaaaaaaaaaaa

SEQ ID NO: 26982 - DNA, 291 bp, Oryza sativa
  Clone ID: PAT_MRT4530_31719C.1
atggccgggatgctggcggaccacccactcgacacgctccgtatccgccagcagcagccgtcgtcgcccgccatccgccatcagagttcgtgccccgatcgcaagcgcgcttgcgcagagccggaggaggagcgcaaggagtgggaggaggaggcggctgcggggggacactcattggaccaccaggggtatcctccattgtatgaggagttccccagaaagtgccctcagttagtgagggcacccatagagtgtccctggttgtgcatgcccatcaccttggaatattaa

SEQ ID NO: 26983 - DNA, 1894 bp, Oryza sativa
  Clone ID: PAT_MRT4530_3171C.1
ttccctgacctcatcgttgccggcttgcctccgtcatcatcaccgccggcctgcctccgtcgccgccgaccggtgtcctcgcctatacggttggttggtcacaccaccgttcatgggcgtccacgtcttcaccgatcggccgcctcgtccgctgccgactggtgtttccgcctgcacggctggcctattatgccgctgttgttgggcgtctacgtcttcaccgaccggccgcctcgtccgccgccgactggtgtttccgcctgcacggctggcctattatgctgccgctgttgagcatctacgacttcaccgccggcctgcctctgccgccactgactggtgttttcgcctatacggttagcggactccgccgccgttaatgggcttcatcatctacaccactggcttggttccactggcgccgactggtgtttttgtcaccattgatggactgcttcgttcccacatcggctacttttgctgtcaccgagggaatacgacaaagctaagtcgtcatttattttattctttatatgatattttgccttttcctttgcctcactacatcaactggttcgccgttgactagtgagtcgggggctacagatatccagatatgcataaaagggattcatggctataagcttatctcttacgctccaggaatggatcagtcagcacatcaccatcggcttgctgtcatcgcctgggtggtcacaccgtttttgttgggcgtctacaccttcaccaaccggccgccttgtccaccgccgactggtgttctcgcttatacggtcaggtggtcacaccgccgttgttgggcatctacgtcttcaccgaccggcttaccttcgccgccgccaactggtgtctccgcttgcacggctggcctactatgccgctgttgttgggcgtctacaccttcaccaaccggccgccttatccgccgccgactggtgtctccgctgcacgactggcctattatgccaccgttgttggacgtctacatcttcaccgaccagccacttcgtatgacgccaattggcgctatcgtcttcacggctggccacgtcgccaccatcgctaataggcgtcatcatcttcaacacaagctgtctacatctgctgccgactggtttcttcacttccatggctgcatgattttgctagtgttgattggccttatcgtcttcaccgtcggtcatctcgtctgcagctgactagtgcactcgcctctacgtctggtttacaccgctaccactattgatggacgtcatcatcttccgtcgccgacttgttaagtcgccgccgactgatatttttatcttcacaactacgcgtcttcgcaaccggtttgcttccgttgccgccgactcgtgttcacttcatcacggctatgcaactttgttaccatggtggagctacttcatcttcattgtcttcggcaccggtttctactcggacatctttaacatgtatcttcactcaagtgatggccacttgacgacaagctacagttctcgactctatgttcagttgtttcccaactaaccaaagagtcgggggctacacaaatacaagactctcaaaattcgacaagctgaagcaatcaattaatcagccaacgcacctctgcttcatcggccctgacatcaactctgttgctaatggatgactatgtcttcgccgacttattatttcactttcacggttgctatcgactggatcaccgacatcgttatcttcatcaacatcctgtcaagcctattcaacatagcccactctactgctattgatgggcaacttcgtcattatatttgattatctatgattgctgcttatcatcattactgtcggttgcgtttgtcatcgctgactattttcttcatcttca

SEQ ID NO: 26984 - DNA, 1459 bp, Oryza sativa
  Clone ID: PAT_MRT4530_31720C.1
cgcggagataagcccccccggcacccttatcaccaccaccaccgccaccatgctctccctctcccacccccacccccaccccgcctccaccacggcggcggcggcggcgcgccaccaccaccgccggaacgcccccttcgcgccgcaccaccgccgccgccgccgcttcgcgcacctgacgacctccgccgtcatcctgggccccgacgggcggcccatcggcggcgggccgcgcgacaacaagctccccttcacccctccccccaccgcgccgcccgaccagctctaccagccgttccatccgccgccgtcgccgctccccgacaagtacaaggacctcgacctcggccagcgcctcgctgtgctccgggaccgcctcgggctttggcacgagtacgcgccgctcatctccgcgctgtcgagggaagggttcacgccgtcgtcgatcgaggaggccacggggatctccggcgtcgagcagaacagcgtcgtcgtcgccacccaggtccgcgactcgctcgtcgccgacgagggcggcttccccgccgagctcctccgctacttcgactcctacggcgggcccgagctgctctacgagctccggttcctcaacgcgaggcagcgcgccgacgcggcgaggcacgccatcgaccgccgcctggagccacgcggggtgcgcgagctcgcccgctccatgaaggacttcccgcaacgccgcggcgacgacgggtgggaggccttcacgcgggacaaccccggggactgcctcgccttcgcgcggttccgccagtcgcgtgaggccatcgacgccgaggactccgtggcggagctggagcgcgcgctggaggttgtggacacggagcccgcgagggcgcgggtggaggcggagctcgaccgcgcgaggaggaaggccgccggggaggaggtggacgacgaggacggcgccgccaacgccgccgccgccgcgtcgcgccctgccgtgcccgtggtgcggctcatgtacggcgaggtggcggaggcgacgaccgtgctgctgctcccggtggtgcgcgagggcgacggcggcgaggcgctcgcccacgcgccgaggcggaccaggacggacgcggacctcggcatggtggaggtggacaaggggtggacgcggtgggcggtggtgcccgggtggggccccgtggcggaggtagccggcgaggcggtggtgatcgagctcgccgacgggcgcacgctgccgtggcggtcggcggaggcggagcgggtgctggtggtggcgaaccgcgggcggagggaggtggtcgaggacggcatctacgtggtggagagggaggggaggctggtggtggagaaggggaggaagctggcggcggagggcgtcggcgaggccgccgccgaggtgctcgtcgtcgtccggccgcccagggacgaggacgacatgatcagcgacgacgagtgggactga

SEQ ID NO: 26985 - DNA, 381 bp, Oryza sativa
  Clone ID: PAT_MRT4530_31721C.1
aaaaaaaaaaaggcctttttaggttaaccccaggtggggccatggttttatttaaacatacctatttggggtttttttacaaacccccttttaagggggtttttatttggggggggcacacaaaattcatttgttcggtcaagcttaattatgcatggtgggccttttgccatttgggggtagctgtttaaaagggggggttcccttctatgccaggaatagaaaaacttggaacctgcccagccggggcaggggcattagcatagttgccactggggaagggagggccattgaaggtggggccagacacagggacacttgggctggggcccatgttagagttttgcatgccgttaatgaccccctggtggatttttcctt

SEQ ID NO: 26986 - DNA, 507 bp, Oryza sativa
  Clone ID: PAT_MRT4530_31722C.1
atggcgctctctcactatctcaaatctcaattcgatttggatgcagcgcgagagtgggaggagagccggccgaccgcaccggcgggagaaggggccaagtcagaggagggcggccgcccacacccaccagtcgccgcgcccctgcccggcgccgactccgtgtggattggtccggagaaccacgtcctgagcttacaccgcctctcctgcctcgccccaccgagctccgggccggccaccgcccttcaccgccggagtcacgaccaccgtcgcctcgccagctcgccgcgcctcgcattgctcgacgcgagtgaagagatagaagagagagacgagaaaagaggggaaacagagaagatgacatgtcattctgacatgtggggcccacatgggtcccatgctgagtcagccgccacgtgggacaaaatcggggttaaaaccgccgagggacttattgtgaccagttttgtaagttgggggacgctggacgtccggttttacggttga

SEQ ID NO: 26987 - DNA, 1409 bp, Oryza sativa
  Clone ID: PAT_MRT4530_31723C.1
ccggctcggccgcacgcgctcgtcatcccgttcccggcgcagggccacgtcattccgctgatggaggtcgcgcacgcgctggccgaccgtggcgtcgccgtcaccttcgtcaacacggagttcaaccacggccgcgtcgtcgccgccatgccctcgcccggaaagctggggatggggcggaatcggatcaggctcgtggcggtgccggatggcatggggcccgacgaggaccggaacaacctggtgaggctgaccgtgctcatgcaggagcacatggcgccgcccgtcgaggagctcatccggcggagcggcgacgaggaggcggcggtggacggcggcggatcaggtgcgtggtggcggactacgatgtcgggacgtgggcgctggacgtggcgaggcgcaccggcgtgaagtccgctgccgtctggccggcgtcggccgccgtcatggcgtctctactcagcgttccggaactcattcgggacaaaataatcgacgctcatggcaaaagaaaacggcaagaggccttccagctgtcgccggacatgccgatgatgcaaccggcgcacctggcgtggaactgcatcggcaacgaccaggggcaggagctgctgttcagttgcgtcctcgctggcgtccgtgccgtcgacgagtgtgattacatcctctgcaactccttccgcgacgcggaggcggccacgttcgcgcggttccccaagatcctccccatcggcccgctcctcaccggcgagcgcccaggcaagccggtcggccacttctggcgccccgaggacggcgcgtgcatgtcgtggctcgacgtgcagccggcgcggtccgtcgtgtacgtcgccttcggcagcttcaccgtgttcgaccggcgccaattccaggagctcgccctggggctcgagctcaccggccggcctttcctgtgggtggtgcgcccagacatcgtccatggcgacgcgcacgagtaccctgacggcttcctggaccgcgtcgtcgcctccggcaatgacggcggccgtggcaaggtcgtggcgtgggcgccgcagcagcgggtgctggctcacccggcggtggcgtgcttcgtatcgcactgcgggtggaactcgatcatggagggcgtccggaacggcgtgccgttcgtggcgtggccctacttcgccgaccagttcgtcaaccgggcgtacatctgcgacatctggcgtgtcgggctcccagccgtcgccgacaagaagtcgggcatggtcacgaaggagcacctcgccggcagagtggaggaggtgatgggagacgccagcatgagagagaggattgaggcgatgatggtggtggcacacgagagcgttcaggagggtggttgctcccatggcaatttcgacatgttcgtggaatcgatcatgtca

SEQ ID NO: 26988 - DNA, 458 bp, Oryza sativa
  Clone ID: PAT_MRT4530_31724C.1
gccacgcgtgcggctaataaacaagtacaaaaaagactgatgacagaagcatcgacaacgaagacaacaaaatggggggggggcaactcgatcagacacatgctaatacacatatactggcagctcaagacacctcgatgtcgggcacccaatgttcgaggggtttcgctgctgacttataggtgactcaggaacacacgattgcagagcctcacgtaattctgcagcgggaacatccctattgagcagaggtggtgtattctactggatgcatagatctgtctactatcttatctactgtaactagctgtgcatgtatatgctgtcgttactaaaataaatattggagtgctttggttagtaagcatatgtacactgtatcaatgatctactgaaatgttcatctctctctcgtatatattatttgcttagctaaagatgcacgaactccactttgg

SEQ ID NO: 26989 - DNA, 123 bp, Oryza sativa
  Clone ID: PAT_MRT4530_31725C.1
atggccaccgtgttgttccggtgtagccaagctgacaagccgtcaagacaaagacttgaagagaagtacggctgtgaagatggtcagacagggacctacaggatgactcttgctgatggttaa

SEQ ID NO: 26990 - DNA, 366 bp, Oryza sativa
  Clone ID: PAT_MRT4530_31726C.1
atgtggaaaataagaggattcagattcggtgacattgctatagcatggcacggtgactccgttttcaccccacgcgcctacccttcctgccagacgacgtctccttcaatctcgccccaatctcgcgtgctcgcatcgccgtttccccacgccaggccgaagaggcgccaggccaccgcgccgcagcgagtggggaggggaccgggcggctgcctcgtcgcttcgcctccccttgcccgcgtcaggccaccgccgcgagctagctgggagccgccgccgcgccaggccggagaggcgcccaccaccgcgccgctgcgactggggaggggaccgggcggccgcttcgcctcccctcgcccgcgttag

SEQ ID NO: 26991 - DNA, 1157 bp, Oryza sativa
  Clone ID: PAT_MRT4530_31727C.1
acgcctgcgggtcccgtccggattcccggtcgaccacgcgtccgctccccaatctagcccgtgacctcctcgccggggctacttctccatcgccatcgacctcgacctcgccgcctcctcctcctcctcctccccgtgcgaactccgggctcgtgccgagggggtggacgcgccggtggtgagagcggacgcggtgcggtgggccatggcggtggggtggcggccggcgatgctggtggtggtggtggcggtggcggcgtggcgcggggaggcgctgtcggtgacggtgaccgacacggagtgcatccacgagttcgtgccctacgagggggacaccgtgtcggggaacttcgtcgtcgtcgaccacgacatcttctggagctccgaccaccccggcatcgacctcacggtaacttcaccaggtggcaacactgtgtatacattgaaggggaagtctggtgacaaatttgaatttaaagctccaaggggtggaatgtacaagttctgcttccataatccatatggagcacctgaaaccgtttctttctacattcatgttgggcacatacccaacgagcacaatctggcaaaagatgagcacttggaccctatcaatgtgaaaatagcggagctgaaggaagcattagaatctgtcactgctgagcagaaataccttaaagcccgtgaagctcgtcaccgacacacaaatgagagcacaagaaggcgtgtcatgttctacacaatagcggagtacctagctttcatgggtgcaagcgctttgcaagttgtttacatccgtcgcctattcagcaaaaacgtggcatacaacagggtgtagaacagagtctacttcaaggcagcagaaaatggttggagcaggaaaaaaatatttccaacatattgtgttagcttttgcagccattttttttgggtttagtctaaaacgtggcacttttaaatttattgccttgtactttagaacttcagtgagatatgaagcacatttgttgctgaacaagtgaacacagatccgtaactaatcttcaaagggttgatgtctcaaagcaaaaaaaaaaaaattgtgttaatatgacttatgagggtcttcgttctgataaaaaaaaaaaaaaatttataaaaaaaaaaaaaaaaaaaaa

SEQ ID NO: 26992 - DNA, 384 bp, Oryza sativa
  Clone ID: PAT_MRT4530_31728C.1
ttttgttttttgaatcttttggggtataactctttttttttttttttttagggaaaaaacacccagtttatccccttttggggaggagaaataaagaaccgacttcatggaattaccctacaaggtacttacattttaccgggtaatttttacttttttatccaagcaacaatgagcttaaattgccctcttggttgggaccccaattaacccaacccaggtttgcccttcttggttggtcgatgctttggaggtttgagctcctaccagaagcacacgggccaccacccggggggccccggggccgggggggccccccccgagagggggccctagaggcccaagggggccccccggcggtgggttttccggcggggggagacc

SEQ ID NO: 26993 - DNA, 555 bp, Oryza sativa
  Clone ID: PAT_MRT4530_31729C.1
atggaggagagggatcagctgcagggagcaagaagatcagcggtcggggattatctggagcagcagcagcagcaggatggagtgtacctgatccacagccaggtgatgaggatcaagaaggaggaggaggaggccagggagctcctcctcaagctgcagctgctggagacgcggccggccggcggcggccgctgcccggcgacgacgctccgggcatcccggtcgctctccccgctccgccgcgccggcggcgccatcccggacgcggagctccggcgacttagagtggagcacggcgccgtctggtcagcggcgcagcgccgtcgccgccggcgacccgtcccccgtctccgccgcatacggaggatgctcgggaacaccatccgcttcctcgcggggacggcgagggcgatgggggaggcggcggccagtggtgtgggcggagtcaccggctgctccgacgaaggctcgctccaactccgtccagtgcggaaaaagtgcgtcaccaagaatgctaatttcaacctcgagaacaatgttcagtggatgatttag

SEQ ID NO: 26994 - DNA, 594 bp, Oryza sativa
  Clone ID: PAT_MRT4530_3172C.1
atgggcgttcacatcttcaccgactggcttgcctttgccgccgccgactggtgtctccgcctacacggctggcctattatgccgccgttgttgggcgcctacgacttcaccaccggcctgcctctgtcgccaccgactggtgtcctcacctatacggatccagatctagatatgcataaaagggattcatggctttatctcctacgctccaagaatggatcagtcagaacatcaccaccggcttgccgtcgtcgccgccgactggtgtcctcgcctatacggttgggtggtcacaccaccgttgttgggcgtcgttgtcttcaccgaccggccgcctcgtccgccgccaactggtgtcttcgcctatatagttggttggtcacaccaccattgttgggcgtctacgtcttcaccaccggcttgccttcaccgccgccgactggtgtctccgcctgcacggctggcctattatgctgccgttgttgggtgtctacgtcttcaccgaccgaccgcctcgttcgccgccgactggtgtttctgcctgcacggctggcctattatgttgccgttgttggacgtctacatcttcactga

SEQ ID NO: 26995 - DNA, 303 bp, Oryza sativa
  Clone ID: PAT_MRT4530_31730C.1
atggcggcggcgacggcagttcccattggcgcggcgacggcgactcccggcggcacggcgacgacggctcccattgaagatggctgcaggctggcggcgcatcgacggagcctgccggccgctcctggcagcgagtggcggtgcgcgtggtggctggcgaacggcgccggaggtggctggcgaacggcggcgcgcgcggctcccggcggactggcgaccggcgacgcacgtgactcggtcgggtggctgtacagtcgggtcaccgtccccgcccccgtcatcccgatggtgagaggtttttaa

SEQ ID NO: 26996 - DNA, 559 bp, Oryza sativa
  Clone ID: PAT_MRT4530_31731C.1
ccgagtcacgtgcgtcgccggtcgccagtccgccgggagccgcgcgcgccgccgttcgccagccacctccggcgccgttcgccagccaccacgcgcaccgccactcgctgccttctcgccgggagactgaagctgccgtcgccggccgccttcgtcgacgcgccgccgggccgcgcgacgcctgaagccatcttcaccaggagcggccggcaggctccgtcgatgcgccgccagcctgcagccatcttcaatgggagccgtcgtcgccgtgccgccgggagtcgccgtcgccgcgccaatgggaactgccgtcgccgccgccatctgccgaccatggcttcggccttcagccacctcccccctaaagctacaatagcgacgatgcaagggatactttgatagccggccagcatttgatgctaaataaaggggctttccaagcacactttataagacctgataatttagcctatcggagaaactgtcccttcaatcaggagagttggataatgattttagggattccttcggattacataactgagactcacattcatag

SEQ ID NO: 26997 - DNA, 228 bp, Oryza sativa
  Clone ID: PAT_MRT4530_31732C.1
gggaacggccttccgaaccttcggcgacaaccgcgaaccacgcttcgagaacctccggaacgacagaagctacgcgcagcacacaagcaaagctacaagcctataaagaagcaataacaatacataaaaagaaaaccaagtacatagagacggtccacgggtcgacggaagcggaccccatgtgtcaaccgaggcaagtggcccacaaacggaccccactagacacct

SEQ ID NO: 26998 - DNA, 227 bp, Oryza sativa
  Clone ID: PAT_MRT4530_31734C.1
ttcttgcggccgacccgttcttggtggaattgttggcttgggaaaagtgttgtcctgctgtttgaatggaggcgagccgggcggaaattcccgccggcctgtaagacggcccagccgggcagtcttcctcctccgcaggaatttggccctcggcgggcttgagcaacgcctgcacgtcccgcccgatccgccgctgccgagggtgagcgggaggagaaggcacccac

SEQ ID NO: 26999 - DNA, 612 bp, Oryza sativa
  Clone ID: PAT_MRT4530_31735C.1
atgagcgaggcggacggaggcgagggggcgaagccgaagcggccggcgccgcggctgaacgagaggatcctctcgtcgctgtcgcggaggtccgtcgccgcgcacccctggcacgacctcgacaccggcgctgacgctccggctgtgttcaacgttgttgtggagatctccaagggaagcaaggtgaagtacgagctcgacaagaaaacggggttcatcatggttgatcgggtcttgtactcgtcagtggtttacccccacaactacggcttcatccctcgaacgctctgcgaagacaacgatccaatggatgttctagtgctcatgcaggagccagtgattcccggctgctttctccgagctagggccatcggactcatgcccatgatcgatcagggagagaaggacgacaagatcatagccgtctgcgtggacgatcctgagtaccgccactacaacgatctcagtgagctttcgcctcatcgcgtccaggaaatccggcgtttctttgaagactacaagaagaatgaaaacaaggaggtcgccgtgaatgaggtactgcctgtgaccgctgctcgggatgccatccagtattccatgtacactttctga

SEQ ID NO: 27000 - DNA, 5658 bp, Oryza sativa
  Clone ID: PAT_MRT4530_31737C.1
atggccgagccagcaaaggcgcacgacctctccccgagtatgagcggtgacgacggggagccaaacccacgccgtcgagctcgtactccaccgccccctccacgccaaagtcctaggcgggagaaggcgctcgagagggctgaaggatccgcgacttcgacatccacaggaggtggagaagggcggcgagatggggagcgtcgcctcctcgtctacggcgacggcagcacgccccagggcgcgctccaagctgcaggcgcgctcctacgtcacccgcccgtcgtccatgacccggagtctccagcccaacgttggctggacgatgtggccaaattggtcatgactgcacggcagcgcctaggtgctggtgggcggtcctccgccaccaaggcctctggtgctgctaccaccggctccgcgtcgtcaagacggagggcacgaagagcggcagccgctgttcgccattcggccgccactccttcgtcgactccttcgacccgggaagatctgcgtggggggccggacgcccgcaccagcatcgagcgccggcgtaatgaccgacgtgctgcccacgcaacggagggcgcttcctcgtccagagtgtcacctcaacacggacgcgggaatcagccctccgtgcccccggttggtggtgtcggctgtagagcctttgtggcgagtcttcggaatgtccgttggcccccaaggttccggcccaccatcgccgaaaaatatgacgggagcgtcaaccccgccgagtttctccaggtctacacgaccgggatcgaggccgccgggggtgacgacagggtcatggcgaatttctttcccatggccctgaaaggacaggcgcggggttggctaatgaacttgccacccgcgtctgtccactcttgggaggatttgtgccaacagttcaccatgaacttccaaggcacatatccgcgccccggtgaggaagcggacttgcacgcagtacagcgaagggatgatgagtcacttcgctcgtacattcagcggttctgtcaagtccgtaataccataccatgcatccctgcacacgcggtgatttacgcgttcagggggggtgtgcggcacaaccgcatgctcgaaaagatcgcctccaaagagccccagactaccgcggagctttttcagctcgcggaccgagtggctcgtaaggaggaggcatggacctggaacccctccggttccggtgtggcagcttcggccgcccccggatccgccgctcagacagggcggcgtgataggaggaggaagaagaggtcagcccataccgacgacgagggtcatgtcctcgccgtcgagggcgctccgcgggccacccgaaaggggaggcctgcgggtgacaaaaagaaagaggccggcgctcccagcagggagcgcccaaccggcaagtggtgcaccgtccacaacacttcccttcatgacctcgcggactgccgtgtagtcaaaagtttggctgagcggacgaggaagtgggaggaggagaggaggcaggagcgccgagagggaaagtccccggcggttccttccggcaatcggcgaagtgaggccaagcagaaggcccccgccgaggacatcgatgatggcgatgatgacctaggtttccaagagcctggggccaccattgccactgtcgatggggagcgagcagccctcaacatcctttcccccgcagcctttgacgccatcaaggccccggggatgatgctccggccgtcccagccgatcatcggtgtgacgccggggcacacttggccgctaggtcatatcgacctcccggtcaccttcggtggacccgccaacttccgcacggagcgggtgaacttcgatgtggcggacctcagtctgccctacaacgcggtcctggggaggcccgcgttggtgaagttcatggcggcggtccactacgcctacctccagatgaagatgccgggccccgatggccccatctctgtccatggcgacctcaaagtcgcgctcgcttgtatggagcagcgcgcggaccgcctcgccgtcgtgaccaagcccgagggtggcgacgagaggtttggcacatccgcccccgccgccccgaggcagcgggaagacgcgctcgtctctttcctgcgggcaaacgctgacgtcttcgcatggagaccggcggatatgcccggggtccccagggaggtgattgagcaccgtctcgccgtacggccgggcgcgaggccggtccggcagaaagtgctgcgccaggccccggaacgtcaagcctttatccgcgaggaggtggcgcgacttctggaggccggattcatccgcgaggtcatccatccggagtggctggcgaacccggtggtcgtccccaaggcgaacggcaagcttcggatgtgcatcgactacaccgaccttaacaaggcatgtcctaaggatccttaccccctgcctcgcatagatcagattgtcgactccatagcggggtgcgaccttttgtgttttctagatgcatactctggttaccatcagattcgcatggctagggaggatgaggaaaaaactgcgttcattacccccatagaaacttattgttatacaacaatgcccttcgggttaaagaatgcaggtcctacttttcaacgtactactcgaatttctttgggtagccaattaggacgtaatgttgaggcttatgtcgatgacttggttgtaaagacgcgcaaccaggaaacgttactttcagatctagcggaaacttttgagagcctccgctccgcccgcataaaactgaaccccgataaatgcgtgttcggtgtacctgcgggcaagcttctcgggttcttggtctctgcccgaggcatcgaggccaaccccgagaagatacgagctatagagcggatgcgcccccccagcaagcttagggatgtgcaatgcgtcaccagttgcatggccgccctaagtcgcttcatatcaaggctgggagagaaggcgctacccttatttaagctcctcaaacactccgggccgtttacttggacggaggaagctgaacgtgccctcactcagttgaaggcgtatctcagctctcccccagttctggtcgccccggagccaaatgaacccttgctactctacttagcggcgaccccgcaagtggttagtgcggcgttgatcgtggagcgcgatgaggacaatcttcattccgcgcacccccaccctgtgctggcttggcccgggagagagcagggaggagaggcccccgagccggacggtggcccaaggcccccgacgaccggagcaggccctctccccgcttgtcagacggtgccaggtgcccccgacccccaggacggccccgaggccactgcgggaaggccgcacctatcgccctctgacctcgaggctaaccctgtgccgattcgacccgggagagagcagggagaagaggcccccgagccgaacggtggcctaaggctcctgacgaccggagttggccctttgcccgcttgtccgacgacgccaggagcccccgacccccaggacggccccgaggccactgtgggaaggccgcccctgtcgacctccgaccccgaggtcgtcggcacagaagacgagtgcgccccgcgaggccgcttgggagaagagcgcctcagggatgcggcccctagcgaagaggatcggccccaccgaaaggtgcagcggcccgtctactttgttagtgaggccctccgggatgccaagacccgataccctcaggcccagaaaatgctttacgctattctgatggcctcgaggaaactgcgccattatttccaggcgcatcgggttacggtggttacgtcttaccccctcggccaaatcttgcataatcgagagggtactggacgggtgttcgacggctccctgtctcttcaaggcgccggtgcgggggtcacgttgacctctccgagtggagacgtcctcagatacttggtccgcctcgactttcgagcgaccaataatatggcaaagtacgagggactccttgccgggctcagagtggcagctggactggggatccgccgcctcctggtgttaggcgactcccagctggtcgttaaccaagtctgtaaggagtaccggtgctctgacccgcagatggacgcctacgtgcgccaagtacggcgtatggagcgccattttgacgggattgagcttcggcacgttcccagacgggataacatgatggccgacgagctctcacggctcgcgtcctcgcgagcccagaccccaccgggcgcctttgaagaaaggcttgcccagccgtcggcgcgacctaaccccttaggggagacggatgcgcctgaccggcccccgaggcccgtcggagtccaggcctcgggacccgaggggagtgctcccagctcccttagattgatcgcttggatcgctgagatccaagcatacctcacagataagactctacccgaggaccgcgaagggagtgaacgcgtccatcgcatctccaaacgctacgtgctggtagaagggaccctctatcggcgcgcggctaatggaatcctcctgaagtgcattcctcgggaacaaggcgttgtgcttcttgccgatatccatgaaggcgaatgcggagcccactccgcctcgcgcaccttggttggtaaagctttccgccagggtttttattggccgacagctctcaatgatgcggtcgacctggtccggcgatgtaaagcgtgtcaattccacgccaagcaaatccatcagccggcccaggccctgcagaccataccactttcgtggccatttgctgtctggggactcaatatcctgggaccgtttaggcgggccccgggcgggtttgagtatctgtatgtcgcgatcgacaagttcactaagtggcccgaggcttatccggtcgtcaagatcgataagcactccgcacttaaattcattaagggcatcacagcccggtttggagtgcctaaccgtattattacggataatggcacccaattcactagtgaactcttcggcgactactgcgaagacatgggcatcaagctctgcttcgcctcacctgcccaccccaaaagcaatggccaagtggagcgcgccaatgcggaaatcctcaaaggccttaaaaccaagaccttcaacatactcaagaagcacggcgattcatggatcgaggagttgccagcagtgctctgggcaaaccgaactacaccaagccgagcaaccggggaaacgcctttcttcctcgtctacggcgcggaagcggttctcccatccgagctcaccctgaggtctcctcgggccaccatgtactgcgaggctgatcaagatcagcttcgtagagatgacctcgactacttggaagagcgaaggcggcgcgcggccctccgagccgcgcgctaccagcagagcctgcggcgctaccatcagcgtcacgtccgggcccgatcactctgcgtcgacgacctcgtcctacgccgcgtccaaacgcgtgctggattgagcaagctctcaccaatgtgggagggtccgtatcgagtggtcggcgtcccccggccgggctccatacggctggccacgggcgacggcactgagctgcctaacccgtggaacatcgaacaccttcgtcgcttctacccctga

SEQ ID NO: 27001 - DNA, 291 bp, Oryza sativa
  Clone ID: PAT_MRT4530_31738C.1
agttatatctatagagaaatccatctcctctcctatgttcccgtaaccttggtttgacgtcgacggcgtcggccgctgcctcgcgcgcgcgatggcagggggtggtgcgcggcgttgctcctgcctgcccgctgaaaccctagcaagcaagccgtagatctcgcgcggcggcgcggcgcggggcgggggcggtcggatccagggggtggcagggggggggacgcgcggtgggatgccaagcgcgcgggaatggaggagatcggggagctcgacgagaagctgagggacttc

SEQ ID NO: 27002 - DNA, 5606 bp, Oryza sativa
  Clone ID: PAT_MRT4530_31739C.1
atggccaagccagcaaaggcgcacgacctctccccgagtatgagcggtgacgacggggagccaaacccacgccgtcgagctcgtactccaccgccccctccacgccaaagtcctaggcgggagaaggcgctcgagagggctgaaggatccgtgacttcgacatccacaggaggtggaaaagggcgacgagatggggagcgtcgcctcctcgtctacggcgacggcagcacgccccagggcgcgctccaagctgcgggcgcgctcctacgtcacccgcctgtctccagcccaacggcagcgcctagatgctgatgggcggtcctccgccaccaaggcctctggtgctgctaccaccagctccgcgtcgtcaagacggagggcacgacgagcggcagccgctgttcgccattcggccgccactccttcgtcgactccttcgacccgggaagatctgcgtggggggccggatgcccgcgccagcatcgagcgccggcgtaatgaccgacgtgctgcccacgcaacggagggcgcttcctcgtccagagtgtcacctcaacacggacacggggaccagccctccgtgcccccggttggtggtgtcggctgtagagcctttgtggcgagttttcggaatgtccgttggcccccaaggttccggcccaccatcgccgaaaaatatgacgggagcgtcaaccccgccgagtttctccaggtctacacgaccgggatcgaggccgccgggggtgacgacagggtcatggcaaatttctttcccatggccctgaaaggacaggcgcggggctggctaatgaacttgccacccgcatctgtccactcttgggaggatttgtgccaacagttcaccatgaacttccaaggcacatatccgcgccccggtgaggaagcggacttgcatgcagtacagcgaagggacgatgagtcacttcgatcgtacattcagcggttctgtcaagtccgcaacaccataccatgcatccctgcacacgcggtgatttacgcgttcagggggggtgtgcggcacaaccgcatgctcgaaaagatcgcctccaaagagccccagactactgcggagctttttcagcttgcggaccgagtggctcgtaaggaggaggcatggacctggaacccctccggttccggagtggcagcttcggccacccccggatccgccgctcagacagagcggcgtgataggaggaggaagaagaggtcagcccataccgacgacgagggtcatgtcctcgccgtcgagggcgctccgcgggccacccgaaaggggaggcctgcgggagacaaaaagaaggaggccggcgctcccagcagggagcgcccaaccggcaagtggtgcaccgtccacaacacttcccttcacgacctcgcggactgccgtgcagtcaaaagtttggctgagcggacgaggaagtgggaggaggagaggaggcaggagcgccgagagggcaagtccccggtggttccttccggcaatcggcgaagtgaggccaagcagaaggcccccgccgaggacatcgatgacggcgatgatgacctaggtttccaagagcctggggccaccattgccactgtcgatgggggagcgtgtgctcacgtttctcgccggagcctcaaggccatgaagcgagagcttctggccgcggccccgactcatgaggcgacgcgccgggcgcggtggtcggaggttgccctcaccttcgaccagaccgaccacccaccgtgcgttgcccggggaggacagatcgcaatggtggtttcccccactgtttgcaacgtgaagctggggcgtgtcctcattgatggaggagcggccctcaacatcctttcccccgcagcctttgacgccatcaaggccccggggatgatgctccggccgttccagccgatcattggagtgacgccggggcacacttggccgctaggtcatatcgacctcccggtcaccttcggtggacccgccaacttccgcacggagcgggtgaacttcgatgtggcggacctcagtctgccctacaacgcggtcctggggaggcccgcgttggtgaagttcatggcggcggtccactacgcctacctccagatgaagatgccgggccccgatggccccatctctgtccatggcgacctcaaagtcgcgctcgcttgtatggagcagcgcgcggaccgcctcgccgtcgtgtccaagcccgagggtggcgacgagagccttggcacatccgcccccgccgccccgaggcagcggatagtcacgtgcgatgaggtcccggaagacgcgctcgtctctttcctgcgggcaaacgctgacgtcttcgcatggagaccggcggatatgcccggggtccccagggaggtgattgagcaccgtctcgccgtacggccgggcgcaaggccggtccggcagaaagtgcggcgccaggccccggaacgtcaagccttcatccgcgaggaggtggcgcgacttctggaggccggattcatccgcgaggtcatccatccggagtggctggtgaacccggtggtcgttcccaaggcgaacggcaagcttcggatgtgcatcgactacaccgaccttaacaaggcatgtcctaaggatccttaccccctgcctcgcatagatcagattgtcgactccacagcggggtgcgaccttttgtgttttctagatgcatactctggttaccatcagatttgcatggctagggaggatgaggaaaaaactgcgttcattacccccataggaacttattgttatacgacaatgcccttcgggttaaagaatgcaggtcctacttttcaacgtactactcgaatttctttgggtagccaattaggacgtaatgttgaggcttatgtcgatgacttggttgtaaagacgcgcaaccaggaaacgttactttcagatctagcggaaacttttgagagcctccgctccgcccgcataaaactgaaccccgataagtgcgtgttcggtgtacctgcgggcaagcttctcgggttcttggtctctgcccgaggcatcgaggccaaccccgagaagatacgagctatagagcggatgcgccccccagcaagcttagggatgtgcaatgcgtcaccggttgcatggccgccctaagtcggttcatatcgaggctgggagagaaggcgctacccttatttaagctcctcaaacgctccgggccgtttacttggacggaggaagctgaacgtgctctcactcagttgaaggcgtatctcagctctcccccagttctggtcgccccggagccaaatgaacccttgctactctacttagcggcgaccccgcaagtggttagtgcggcgttggtcgtggagcgcgatgaggacaatcctcattccgcgcacccccaccctgtactggcttggcccgggagagagcagggaggagaggcccccgagccggacggtggcctaaggcccccgtctactttgttagtgaggccctccgggatgccaagacccgataccctcaggcccagaaaatgctttacgctattctgatggcctcgaggaaactgcgccattatttccaggcgcatcgggttacggtgattacgtcttaccccctcggccaaatcttgcataatcgagagggtactggacgggtggtgaaatgggcaatcgaactttctgagtttgatttgcactttgaaccgcgccacgctatcaagagccaggccctcgccgactttgtggcagaatggaccccggctcccgagctcgtctcggtccccgaagccagctcgggcccctcacagctgcctcacaccgcccactgggtgatgcagttcgacgactccctgtctcttcagggcgccggtgcgggggtcacgttgacctctccgagtggagacgtcctcaaatacttggtccgcctcgattttcgagcgaccaataatatggcagagtacgagggactccttgccggactcagagtggcagctggactggggatccgccgcctcctggtgttaggcgactcccagctggtcgttaactaagtctgtaaggagtaccggtgctctgacccgcagatggacgcctacgtgcgccaagtacggcgtatggagcgccattttgatgggattgagcttcggcacgttcccagacgggataacatgatggccgacgagctctcacggctcgcgtcctcgcgagcccagaccccaccgggcgcctttgaagaaaggcttgcccagccgtcggcgcgacccgaccccttaggggagacggatgcgcctgaccggcccccgaggcccgtcggagtccaggcctcgggacccgaggggagtgctcctagctcccttagattgattgcttggatcaccgagatccaagcatacctcacagataagactctacccgaggaccgcgaagggagtgaacgcgtccatcgcatctccaaacgctacgtgctggtagaagggaccctctatcggcgcgcggctaatggagtcctcctcaagtgcattcctcgggaacaaggcgttgtgcttcttgccgatatccatgaaggcgaatgcggagcccactccgcctcacgcaccttggttggtaaagcttttcgccaaggtttctattggccgacagctctcaatgatgcggtcgacctggtccggcgatgtagagcgtgtcaattccacgccaagcaaatccatcagccggcccaggccctgcagaccataccactttcgtggccatttgctgtctggggactcgatatcctgggaccgtttaggcgggccccgggcgggtttgagtatctgtatgtcgcgatcgacaagttcactaagtggcccgaggcttatccggttgtcaagatcgataagcactccgcacttaaattcattaagggcatcacggcccggtttggagtacctaaccgtattattacggataatggcacccaattcactagtgaactcttcggcgactactgcgaagacatgggcatcaagctctgcttcgcctcacctgcccaccccagaagcaatggccaagtggagcgcgccaatgcggaaatcctcaaaggccttaaaaccaagaccttcaacatactcaagaagcacggtgattcatggatcgaggagttgccagcggtgctctgggcaaaccgaactacaccaaaccgagcaaccggggagacgcctttcttcctcgtctacggcgcagaagcggttctcccatctgagctcaccctgaagtctcctcgggccaccatgtactgcgaggctgatcaagatcagcttcgcagagatgacctcgactacttggaagagcgaaggcggcgcgcggccctccgagccgcgcgctaccagcagagcctgcggcgctaccatcagcgtcacgtccgggcccgatcactctgcgtcgacgacctcgtcctacgccgcgtccaaacgcgtgctggattgagcaagctctcaccaatgtgggagggtccgtatcgagtggtcggcgtcccccggccaggctccatacggctggccacgggcgacggcactgagctgcctaacccgtggaacatcgaacaccttcgtcgcttctacccc

SEQ ID NO: 27003 - DNA, 819 bp, Oryza sativa
  Clone ID: PAT_MRT4530_3173C.1
atggcagtgactcgagagggcggtccacggcggaccgggtccacggaccggggaaaaccggcgtaccacgtggtgcacacgtggcaccgacgcggcgtacacgcggcggcaacgcggcggccgaaccgacggccccggtagatcggacggcgggggtggctcgcggccggcgcgcgcgggcacggctcaagccggcccggcggccatggcgcgcggtggcgcggcgcgcatgtggcggcggcgcgagatggcgaccggcggcggagagaggcggcgtcgcggcggctaagcggcaacgcggtggctagcggcgcgggagagagagagggagggggaaggggaggcctcaccgacggcgaccgacgacggggagcaatggagggcggcggcgacggcaggacgatctccggaaccacctagcgaacaccgtggaaggggttagtgagggagagggaattggaagagggtgaggacaccggccgaaggcggcggccatggcggtgctcaccggcgaacggcacggagtaggttccggcggcggacggggtggcccgtacgatggcgaatgcggcggcgtcgtcggcgcggatctgcgcggcggctagcggcgaccggagcggtggcggcggcggcgaagaggagggcgacggcgctagggcgttagagggcacgggagggctcggcgagatggggaaaaagagagaggggtggcggtgacgcttaaatagaggaggggaagctcggacgtggtcggtagaggcgggaatcgccggccgacgcgggggagtgggggaggagagagaggcgggattcgaattt

SEQ ID NO: 27004 - DNA, 2292 bp, Oryza sativa
  Clone ID: PAT_MRT4530_31740C.1
gccaccgccacgccccgcgcccaacgttgtacacagcctccctcatgtcgaactggttgatcaagaactggaacatgatctcctcctcgccgccgccgccgttgacaccatcgggtagcacctccaccgcggtggtggccgccgagaacttgttgcggaacgtgcgcgcgacgttccggctgccggcgccgtggcgcgagtagtcgatcctccgctccagccgccagctgctcgggtcggagtagtcctcgagcatccacatccccaacgcgctggcgctcggctcgtggacgaacgcgcacagcttgccggagcgccgagcgatctgtacactcatcatgtgcggcaggttcccatggcgagcccattgttcgggggtgtccatctgccggaactcctcccgttccatgtcgaacaccgataggagaggccgtgccgacgacggggcgaccagccagtgcaggcagccgtggaggctgacgggtggagcgccgcccaatcgaatcactccttcgtcgactccttcgacccgggaagatctgcgtggggggccggacgcccgcactagcatcgagcggcggcgtaatggccgacgtgctacccacgcaacggagggcgcttcctcgtccagagtgtcacctcaacacggacgcgggaatcagccctccgtacccccggttggtggtgtcggctgtagagcctttgtggcgagtcttcggaatgtccgttggcccccaaggttccggcccaccatcgccgaaaaatatgacgggagcgtcaaccccgccgagtttctccaggtctacacgaccgggatcgaggccgccgggggtgacgacagggtcatggcgaatttctttcccatggccctgagaggacaggcgcggggttggctaatgaacttgccacccgcatctgtccactcttgggaggatttgtgccaacagttcaccatgaactttcaaggcacatatccgcgcccaggtgaggaagcggacttgcacgtagtacagcgaagggatgatgagtcacttcgctcgtacattcagcggttctgtcaagtccgcaacaccataccatgcatccctgcacacgcggtgatctacgcgttcagggggggtgtgcggcacaaccgcatgctcgaaaagatcgcctccaaagagccccagactaccgcggagctttttcagctcgcggaccgagtggctcgcaaggaggaggcctggacttggaacccctccggttccggtgtggcagcttcggccgcccccgggtccgccgctcggtcagggcggcaggacaggaggaggaagaagaggtcggcccattccgacgacgagggtcatgtcctcgccgtcgaaggcgtttcgctggccacccgaaaggggaggcctgcgagcgacaaaaagaaggaagccgacgctccctgacctcggctacttggaagagcgaaggtggcgcgcggcccttcgagccgcgcgctaccagcagagcctgcggcgctaccatcagcgccacgtccgggcccgatcactctgcgtcgacgacctcgtcctacgccgcgtccaaacgcgtgctggattgagcaagctctcaccaatgtgggagggtccgtatcgagtgatcggcgtcccccggccgggctccgttcggctggccacgggcgacggcacagagctgcctaacccgtggaacatcgaacaccttcgtcgcttctacccctaccttgccgtcgctgtcgtctgcaccgtcgtcaccgcactcctcgtcggagttgaaggcaaacgcgagccgaggggccgctcattattgtcggtcggttttcccttgctgatgcgcgcgatttgcgaccgccgggattctgcccgaagagagagagagcagggaggagaggcccccgagccgaacggcggcccaacgcccccgacggccggagctggccctccgcctgcttgtccgacggtgccaggcgcccccgacccccaggatggccccgaggccactgcgggaggccgcgcctgtcgccctctgaccccgaggtcgtcggcacagaagccgagtacgccccgcgtggcctctcggataggagagcgccctggagatgtggcccctgacgaagaagatcggccccgccgaaaggtgcagcggcccgtctacttcgttagcgaggccctccgggacgctgagacccgataccctcaggcccagaagatgctttacgctatcctgataacttcgaggaagttgcgccattatttccaggcgcatcggcgtgttacctcccagagatgg

SEQ ID NO: 27005 - DNA, 241 bp, Oryza sativa
  unsure (1)..(241): unsure at all n locations
  Clone ID: PAT_MRT4530_31741C.1
taaaacaggnaccagngaagccatatgcccatatacgactaaagggnntncnnnnnnnnnnnnnnntnnnnnnnnnntnnnnnttttttggtacaaagagatagaaactcgaaaaacactcttaaaggagactagtagactactgtttttacacaagatctattgatgcatatttttcacatccatgacccatgggcaccagatatgtctagaagcaaaaacaaagagaaaacaccttttt

SEQ ID NO: 27006 - DNA, 6276 bp, Oryza sativa
  Clone ID: PAT_MRT4530_31742C.1
atggctgagcaagcaaaggcgcacgacctctctccgagtgtgagtggcgacgacggggagccgaacccacgccgtcgagctcgtactccaccgccccctccacgccaaagtcctaagcggggggaggcgctcgagaggaccgaaggatccgcgacttcgacatccacaggaggtggaaaagggcggcgagatggggagcatcgcctcctcgtctatggtgacggcagcacgccccagggcgcgctccaagctgcgggcgcgctcctacgtcacccgcccgtcgcccatgacccggagtctccagcccaacgttggctggacgatgtggccaaattggtcatgactgcacggcagcgtctagatgctggtgggcggtcctccgccaccaaggcctctggtgctgctaccaccggctccgcgtcgtcaagacgaagggcgcggcgagcggcagccgctgttcgccattcggccaccactccttcgtcgactccttcgacccgggaagatctacgtggggggccggacgcccgcaccagcatcgagcggcggcgtaatgaccaacgtgctacccacgcaacggagggcgcttcctcgtccagagtgtcacctcaacacggacgcgggaatcagccctccgtgcccccagttggtggtgtcggctgtagagcctttgtggcgagtcttcggaatgtccgttggcccccaaggttccggcccaccatcgccgaaaaatatgatggcagcgtcaaccccaccgagtttctccaggtctacacgaccgggattgaggccgccgggggtgacgacagggtcatggcgaatttctttcccatggccctgaaggggcaggcgcggggttggctaatgaacttgccacccgcgtcagtccactcctgggaggatttgtgccaacagttcaccatgaactttcagggcacatatccgcgcccaggtgaagaagcggacttacacgcagtacagcgaagggatgatgagtcacttcgctcgtacattcagcggttctgtcaagtccgcaacaccataccatgcatccctgcacacgcggtaatctacgcgttcagggggggcgtgcggcacaaccgcatgctcgaaaagatcgcctccaaggagccccagactaccgcggagctttttcagctcgcggaccgagtggctcacaaggaggaggcctggacttggaacccctccggttccggtgtggcagcttcggccgcccccggatctgccgctcagacagggcggcgtgacaggaggaggaagaagaggtcagtccattccgacgacgagggtcatgtcctcgccgtcgagggcgcttcgcgggccacccaaaaggggaggcctgcgagtgacaaaaagaaaaaggccggcgctcccagcagggagcgcccagccggcaagtggtgcaccgtccacaacacctccctccacgacctcatggactgccgtgcggtcaaaagtttggctgagcggacgaggaagtgggaggaggagaggaggcaggagcgccgagagggcaagtccccggcggttccttccggcaatcggcgaagtgaggccaagcagaaggcccccgccgaggacatcgatgacggcgatgatgacctaggtttccaagagcctggggccaccattgccactgtcgatgggggagcgtgtgctcacgtttctcgccggagcctcaaggccatgaagcgagagcttctggccgcggcccctactcatgaggcgacgcgccgggcgcggtggtcggaggttgccctcaccttcgaccagaccgaccacccaccgtgcgttgcccggggaggacagatcgcaatggtggtttcccccactgtttgcaacgtgaagctggggcgtgtcctcattgatggaggagcggccctcaacatcctttcccccgcagcctttgacgccatcaaggccccggggatgatgctccggccgtcccagccgatcatcggtgtgacgccggggcacacttggccgctaggtcatatcgacctcccggtcaccttcggtggacccgtcaacttccgcacggagcgagtgaactttgatgtggcggacctcagtctgccctacaacgcggtcttggggaggcccgcgttggtaaagttcatggtggcggtccactacgcctacctccagatgaagatgccgggccccgatggccccatctctgtccatggcgacctcaaagtcgcgctcgcttgtatggagcagcgcgcggaccgcctcgccgtcgtgtccaagcccgagggtggcgacgagaggcttggcacatccgcccccgccgccccgaggcagcggatagtcacgtgcgatgaggtcccggaagacgcgctcgtctctttcctgcgggcaaacgctgacgtcttcgcatggagaccggcggatatgcccggggtccccagggaggtgattgagcaccgtctcgccgtacggccgggcgcaaggccggtccggcagaaagtgcggcggcaggccccggaacgtcaagcctttatccgcgaggaggtggcgcgacttctggaggccggattcatccgcgaggtcatccatccggagtggctggcgaacccggtggtcgttcccaaggcgaacggcaagcttcggatgtgcatcgactacaccgaccttaacaaggcatgtcctaaggatccttaccccctgcctcgcatagatcagattgtcgactccacagcggggtgcgaccttttgtgttttctagatgcatactctggttaccatcagattcgcatggctagggaggatgaggaaaaaactgcgttcattacccccatagaaacttattgttatacaacaatgcccttcgggttaaaaaatgcaggtcctacttttcaacgtactactcgaatttctttgggtagccaaataggacgtaatgttgaggcttatgtcgatgacttggttgtaaagacgcgcaaccaagaaaccttactctcggatctagcggaaacttttgaaaacctccgctccgcccgcataaaactgaaccccgataagtgcgtgttcggtgtacctgcgggcaagcttctcgggttcttggtctctgcccgaggcatcgaagccaaccccgagaagatacgagctatagagcggatgcgcccccccagcaagcttagggatgtgcaatgcgtcgccggttgcatggccgccctaagttggttcatatcgaggctgggggagaaggcgctacccttatttaagctcctcaaacgctccgggccgtttacttggacggaggaagctgagcgtgccctcactcagttgaaggcgtatctcagctctcccccggttctggtcgccctggagccaaatgaacccttactactctacttagcggcgaccccgcaagtggttagtgcggcgttggtcgtggagcgcgatgaggacaatcctcattccgtgcacccccaccttgtgcagacttggcccgggagagagcagggaggagaggcccccgagccgaacggtggcccaaggcccccgacgaccggagttggccctctgcccgcttgtcagacggtgctaggagcccccgacccccaggaaggccctgaggccactgtgggaaggccgcacctatcgccctttgaccccgaggctaaccctgtgctgactcgacccgggaaagagcagggagaagaggcccccgagccgaacggtggcccaaggcccccgacgaccggagttggccctctgcccgcttgtcagacggtgctaggagcccccgacccccaggaaggccctgaggccactgtgggaaggccgcacctatcgccctttgaccccgaggctaaccctgtgctgactcgacccgggaaagagcagggagaagaggcccccgagccgaacggaggtctaaggcccctgacgaccggagttggccctttgcccgcttgtccgacgatgccaggagcccccgacccccaggacggccccgaagccactgtgggaaggccgcccctgttatcctccgaccccgaagtcatcagcacagaagacaagtgcgccccgcgaggctgcttggacgaagagtgccccagggatgcggcccctagcgaagaggatcggccccaccgaaaggtgcagcggcccgtctactttgttagtgaggccctccgggacgccaaaacccgataccctcaggcccagaagatgctttacgctattctgatggcctcgaggaaactgcgccattatttccaggcgcatcgggtcactgtggttacgtcttaccccctcggtcaaatcttgcataatcgagagggtacaggacgggtggtgaaatgggcaatcgaactttctgagttcgatttgcactttgaaccacaacacgctatcaagagccaggccctcgccgattttgtggcagagtggaccccggctcccgagcccgtctcgatccccgaggccagcacggacccctcgcagctgcctcacaccgcccactgggtaatgcagttcgacggctccctgtctcttcagggcgccggtgcgggggtcacgttgacctctccgagtggagacgtcctcagatacttggtccgcctcgactttcgagcgaccaataatatggcagagtacgagggactccttgccggactcagagtggcagctggactggggatccgccgcctcctggtgttaggcgactcccagctggtcgttaaccaagtctgtaaggagtaccggtgctctgacccgcagatggacgcctacgtgcgccaagtacggcgtatggagcgccattttgacgggattgagcttcggcatgtgcccagacgggataacatgatggccgacgaactctcacggctcgcgtcctcgcgagcccagaccccaccgggcacctttgaagaaaggcttgcccagccgtcggcgcgacccgaccccttaggggagacggatgcgcctgaccggcccccgaggcccgtcggagtccaggcctcgggacccgaggggagtgctcccagctcccttagattgattgcttggatcgccgagatccaagcatacctcacagataagactctacccgaggaccgcgaagggagtgaacgcgtccatcgcatctccaaacgctacgtgctggtagaagggaccctctatcggcgcgcggctaatggaatcctcctgaagtgcattcctcgggaacaaggcgttgtgcttcttgccgatatccatgaaggcgaatgcggagcccactccgcctcgcgcaccttggttggtaaagcttttcgccagggtttctattggccgacagctctcaatgatgcggtcgacctggtccggcgatgtagagcgtgtcaattccacgccaagcaaatccatcagccggcccaggccctgcagaccataccactttcgtggccatttgctgtctggggactcgatatcctgggaccgtttaggcgggccccgggcgggtttgagtatctgtatgtcgcgatcgacaagttcactaagtggcccgaggcttatccggtcgtcaagatcgataagcactccgcacttaagttcattaagggcatcacggcccggtttggagtgcctaaccatattattacggataatggcacccaattcactagtgaactcttcggcgactactgcgaagacatgggcatcaagctctgcttcgcctcacctgcccaccccagaagcaatggccaagtggagcgcgccaatgcggaaatcctcaaaggccttaaaaccaagaccttcaacatactcaagaagcacggcgattcatggatcgaggagttgccagcggtgctctgggcaaaccgaactacaccaagccgagcaaccggggaaacgcctttcttcctcgtctacggcgcggaagcggttctcccatccgagctcaccctgaggtctcctcgggccaccatgtactgcgaggctgatcaagatcagcttcgcagagatgacctcgactacttggaagagcgaaggcggcgcgcggccctccgagccgcgcgctaccagcagagcctgcggcactaccatcagcgtcacgtccgggcccgatcactctgcgtcgacgacctcgtcctacgccgcgtccaaacgcgtgctggattgagcaagctttcaccaatgtgggagggtccgtatcgagtggtcggcgtcccccggccgggctccatacggctggccacgggcgacggcactgagctgcctaacccgtggaacatcgaacaccttcgtcgcttctacccctga

SEQ ID NO: 27007 - DNA, 3303 bp, Oryza sativa
  Clone ID: PAT_MRT4530_31743C.1
cggcacgagggagagagagaactagtctcggtttttttttttttttttttgatactgacattattgatgcgagaaactgacgaaaaaaaaggtgaagtacatttgaacagttgcaacaccatatgacaagttgcacacccaacacctagtaccacatgacaggactcatcaaaagagaagtgaaagcaagatgagaactgaaacatccacccaagtgaccgatctggcttctttgcggtcgcagtctttgcagctgctctgggtgcgtttcagatgcttaccatcaagctaagagggcaccagttcctgggaatagaaccactggagttttgctaatccaagggctgccacatcactgaagatcagggcagtaatgtagttcgtagaatttagattgactattattgcggcattcagataaccttcagaccaacgcagatgaattataatttgcaaaatctggaggacatcaccaagggcatgttgctgcaagcacgatttctttaaaatagtcgcagcttggtaccttgactgagaattcttcattgctgaccaaccatcagtggatgatatgtacttatgaaccgcatctagtgtctccttcgaatgctttgcattgctatttgtcacattgacgcatttccaaatgctttcatctttcgcaacaaacaatggcatgtcatttactaacttcttcatgataacggcttgatgtcgaatggcaagctcaagagccttcttaacatcaaaacctgatatattcatctcgctgtaacgtatacagtctgcaatatttgattccgttgggaatatcttctcagccttcagtatgtgcaaagcatgtaatatatttcttatagtaacttcaggctcagaagaacttggtggagagccttccgtctctccatgatcgccagtgttttgcatgttgcaggaaggagatcgggcacactgacgagcactagagtgactcggatggaagctgacgacagaaccaggatggaaagtggatccgatctcatgaggaactctaagatgtccagaagtatttggcataccaaaagcagtatagttagaaggaataccttgaaaaggtggccttttctcacttgttcctggagggcactcagaaatagtcaatctactgaaatcagagcaaatatcaagcatgttttgaaaggttaagccgcttggcgatgtttgtatttgagcagaaggaacaccattaaacccagttgatgttgggtatgagctgccaacatctgaatttactgagttagaatggccagctgcactaggaggaattgatttatgtatttctggcaaaagagaagaatgggcttgctgacatgctggactattctgaccattaatgtcaccaaaataaaaaatcccatcttttggcatgcattcagttgataagctatgattactaccaaagatgaactctgatcccaggtgctgcaaatcagtaggtgtgacaggtttattaactgatgacagggagaagggaggatttttcagcggagttgaacaattcgcttttgcctcctccagagattcagaaattgacgatgttaacacagatttacttggattgctcaagatgcttcctttagaattaccagaaaatcctttaaccaaatctatttcattgtgtgcagaactagatacaatatttgccttctttatatattgttgacgctgtgtcaccttatgctgatttcttgcctttgccttgccaaccttatcacccatattatagttacaatgaagcgtatgttgtgccagagaagattgggattgcatagaggttgaatgataatgtccaatactaacacgagaatcattggttccatctcttgatgcgagctcagttgatgtgcaagagggctgcttgccaacaatcagttcatgtggttcttccactttatgcaaatgagtagacagcactggtgcttgagatgatgactggggcaaggtaaaaatacctagcgatctcgagtgatccacctttgtttcctccagtgattcagagtttggtggtggtaagacaggcaactgattcaatttacttggagtgttccccgtggaacactcaggcattccatctgaatcaagctgattgctagcaggactagatgtaatatttgtcttctttacatacctttgaattggatttgacttgctttggttacccttctttgcattcttttcagctatatcatactcagaatgaagcttactctttactgtcatgttcaatggtccaacttgttgagaactagtagacaccacaggctcctgagctgatgactgtgccaaaggaggagttcctagcagacttgggaggtcagccaaaggaggagttcctagcagacttgggagatcgacctccaatgattcagaacttgatgacgatgacgaaacagaactcttatcttgctcactaccagtgcttcctgcagaatcatcagaaaatccatcgaccacgactacttgaccttggttatttgtggaactcgatactgcattagtcttctttacatacttttgaagaggcttcaccttataccgatcacatgccttcacattactgtcaccgttaccacacacagcatgaactttactattcgagcacttcgatccatccaagctcttactctgcgagcacttcgatccatccaagctcttattctgcgaacacttcgacgcatccaagctcttattctgcgagcacttcgatacatccaagctatttaatttaggattgcaatccggcaatccatgcgtatgtgtggactctaccaacagagactctccagccacaagtttttcccaagaccagacagtcctcgccgccgcagcaagcactcgagatgacacatttgagggctgcgccagcaagataccgtatcgcttcatcctgagcctgtgaagcaggtcggagaagtcctgatcgcccgaaataagcaagtaattgcccggcggcgggttgtcgaatgcccagaagagcatgtcgacgagcatcttcttgtcggttccatccttagctccggcggggacgtggttgagggagatgccggtggaggagagggcggccaggacgggcggggcaacgcgggcggcgtcgccgtaggcgaagatcgagacggggcccgcgcaccccgcggcggcgagcgcagcgatgacgccgtgggcgacgcggtgcgggtcgcggcagcacgggggaaccccgcacctgtcgatgtcccaccacaccgacgtcttcgcctccgccgccgccgccgcgcgatcccccat

SEQ ID NO: 27008 - DNA, 5763 bp, Oryza sativa
  Clone ID: PAT_MRT4530_31744C.1
atggctgagcaagcaaaggcgcacgacctctctccgagtgtgagtggcgacgacggggagccgaacccacgccgtcgagctcgtactccaccgccccctccacgccaaagtcctaagcggggggaggcgctcgagagggccgaaggatccgcgacttcgacatccacaggaggtggaaaagagcggcgagatggggagcgtcgtctcctcgtctatggtgacggcagcacgccccagggcgcgctccaagctgcgggcgcgctcctatgtcacccgcccgtcgcccatgacccggagtctccagcccaacgttggctggacgatgtggccaaattggtcatgactgcacggcagcatctagatgctggtgggcggtcctccgccaccaaggcctctggtgctgctaccaccggctccgcgtcgtcaagacgaagggcgcggcgagcggcagccgctgttcgccattcggccaccactccttcgtcgactccttcgacccgggaagatctgcgtggggggccggacgcccgcaccagcatcgagcggcggcgtaatgaccgacgtgctacccacgcaacggagggcgcttcctcgtccagagtgtcacctcaacacggaagcgggaatcagccctccgtgcccccggttggtggtgtcggctgtagagcctttgtggcgagtcttcggaatgtccgttggcccccaaggttccggcccaccatcgccgaaaaatatgatggcagcgtcaaccccgccgagtttctccaggtctacacgaccgggattgaggccgccgggggagacgacagggtcatggcgaatttctttcccatggccctgaaggggcaggcgcggggttggctaatgaacttgccacccgcgtcagtccactcctgggaggatttgtgccaacagttcaccatgaacttccaaggcacgtatccgcgcccaggtgaggaagcggacttgcacgcagtacagcgaagggacgatgagtcacttcgctcgtacattcagcggttctgtcaagtccgcaacaccataccatgcatccctgcacacgcggtgatttacgcgttcagggggggtgtgcggcacaaccgcatgctcgaaaagatcgcctccaaggagccccagactaccgcggagctttttcagctcgcggaccgagtggctcgcaaggaggaggcctggacttggaacccctccggttccgtcaaaagtttggctgagcggacgaggaagtgggaggaggagaggaggcaggagcgccgagagggcaagtccccggcggttccttccggcaatcggcgaagtgaggccaagcagaaggcccctgccgaggacatcgatgacggcgatgatgacctaggtttccaagagcctggggccaccattgccactgtcgatgggggagcgtgtgctcacgtttctcgccggagcctcaaggccatgaagcgagagcttctggccgcggcccctactcatgaggcgacgcgccgggcgcggtggtcggaggttgccctcaccttcgaccagaccgaccacccaccgtgcgttgcccggggaggacagatcgcaatggtggtttcccccactgtttgcaacgcgaagttggggcgtgtcctcattgatggaggagcagccctcaacatcctttcccccgcagcctttgacgccatcaaggccccggggatgatgctccggccgtcccagccgatcatcggtgtgacgccggggcacacttggccgctaggtcatatcgacctcccggtcaccttcggtggacccgccaacttccgcacggagcgggtgaactttgatgtggcggacctcagtctgccctacaacgcggtcttggggaggcccgcgttggtaaagttcatggcggcggttcactacgcctacctccagatgaagatgccgggccccgatggccccatctctgtccatggcgacctcaaagtcgcgctcgcttgtatggagcagcgcgcggaccgcctcgccgtcgtgtccaagcccgagggtggcgacgagaggcttggcacatccgcccccgccgccccgaggcagcggatagtcacgtgcgatgaggtcccggaagacacgctcgtctctttcctgcgggcaaacgctgacgtcttcgcatggagaccggcggatatgcccggggtccccagggaggcgattgagcaccgtctcgccgtacggccgggcgcaaggccggtccggcagaaagtgcggcggcaggccccggaacgtcaagccttcatccgcgaggaggtggcgcgacttctggaggccggattcatccgcgaggtcatccatccggagtggctggcgaacccggtggtcgttcccaaggcgaacggcaagcttcggatgtgcatcgactacaccgaccttaataaggcatgtcctaaggatccttaccccctgcctcgcatagatcagattgtcgactccacagcggggtgcgaccttttgtgttttctagatgcatactctggttaccatcagattcgcatggctagggaggatgaggaaaaaactgcgttcattacccccataggaacttattgttatacaacaatgcccttcgggttaaaaaatgcaggtcctacttttcaacgtactactcgaatttctttgggtagccaaataggacgtaatgttgaggcttatgtcgatgacttggttgtaaagacgcgtaaccaagaaaccttactctcggatctagcggaaacttttgaaagtctccgctccgcccgcataaaactgaaccccgataagtgcgtgttcggtgtacctgcgggcaagcttctcgggtttttggtctctgccagaggcatcgaagccaaccccgagaagatacgagctatagagcggatgcgcccccccagcaagcttagggatgtgcaatgcgtcaccggttgcatggccgccctaagtcggttcatatcgaggctgggggagaaggcgctacccttatttaagctcctcaaacgctccgggccgtttacttggacggaggaagctgagcgtgccctcactcagttgaaggcgtatctcagctctcccccggttctggtcgccccggagccaaatgaacccttactactctacttagcggcgaccccgcaagtggttagtgcggcgttggtcgtggagcgcgatgaggacaatcctcattccgcgcacccccaccctgtgcagacttggcccgggagagagcagggaggagaggcccccgagccgaacggtggcccaaggcccccgacgaccggagttggccctctgcccgcttgtcagacggtgctaggagcccccgacccccaggaaggccctgaggccactgtgggaaggccgtacctatcgccctttgaccccgaggctaaccctgtgctgactcgacccgggaaagagcagggagaagaggcccccgagccgaacggaggtctaaggcccctgacgaccggagttggccctttgcccgcttgtccgacgatgccaggagcccccgacccccaggacggccccgaagccactgtgggaaggccgcccctgttatcctccgaccccgaggtcatcagcacagaagacaagtgcgccccgcgaggctgcttggacgaagagtgccccagggatgcggcccctagcgaagagaatcggccccaccgaaaggtgcagcggcccgtctactttgttagtgaggccctccgggacgccaaaacccgataccctcaggcccagaagatggtttacgctattctgatggcctcgaggaaactgcgccattatttccaggcgcatcgggtcactgtggttacgtcttaccccctcggtcaaatcttgcataatcgagagggtacaggacgggtggtgaaatgggcaatcgaactttctgaattcgatttgcactttgaaccacgccacgctatcaagagccagaccctcgccgattttgtggcagagtggaccccggctcccgagcccgtctcgatccctgaggccagcacggacccctcgcagctgcctcacaccgcccactgggtaatgcagttcgacggctccctgtctcttcagggcgccggtgcgggggtcacgttgacctctccgagtggagacgtcctcagatacttggtccgcctcgactttcgaacgaccaataatatggcagagtacgagggactccttgccggactcagagtggcagctggactggggatccgccgcctcctgatggacgcctacgtgcgccaagtacggcgtatggagcgccattttgacgggattgagcttcggcatgtgcccagacgggataacatgatggccgacgaactctcacggctcgcgtcctcgcgagcccagaccccaccgggcgcctttgaagaaaggcttgcccagccgtcggcgcgacccgaccccttaggggagacggatgcgcctgaccggcccccgaggcccgtcggagtccaggcctcgggacccgaggggagtgctcccagctcccttagattgattgcttggatcgccgagatccaagcatacctcacagataagactctacccgaggaccgcgaagggagtgaacgcgtccatcgcatctccaaacgctacgtgctggtagaagggaccctctatcggcgcgcggctaatggaatcctcctgaagtgcattcctcgggaacaaggcgttgtgcttcttgccgatatccatgaaggcgaatgcggagcccactccgcctcgcgcaccttggttggtaaagcttttcgccagggtttctattggccgacagctctcaatgatgcggtcgacctggtccggcgatgtagagcgtgtcaattccacgccaagcaaatccatcagccggcccaggccctgcagaccataccactttcgtggccatttgctgtctggggactcgatatcctgggaccgtttaggcgggccccgggcgggtttgagtatctgtatgtcgcgatcgacaagttcactaagtggcccgaggcttatccggtcgtcaagatcgataagcactccgcacttaagttcattaagggcatcacggcccggtttggagtgcctaaccgtattattacggataatggcacccaattcactagtgaactcttcggcgactactgcgaagacatgggcatcaagctctgcttcgcctcacctgcccaccccagaagcaatggtcaagtggagcgcgccaatgcggaaatcctcaaaggccttaaaaccaagactttcaacatactcaagaagcacggcgattcatggatcgaggagttgccagcggtgctctgggcaaaccgaactacaccaagccgagcaaccggggaaacgcctttcttcctcgtctacggcgcggaagcggttctcccatccgagctcaccctgaggtctcctcgagccaccatgtactgcgaggctgatcaagatcagcttcgcagagatgacctcgactacttggaagagcgaaggcggcgcgcggccctccgagccgcgcgctaccagcagagcctgcggcgctaccatcagcgtcacgtccgggcccgatcactctgcgtcgatgacctcgtcctacgccgcgtccaaacgcgtgctggattgagcaagctttcaccaatgtgggagggtccgtatcgagtggtcggcgttccccggccgggctccatacggctggccacgggcgacggcactgagctgcctaacccgtggaacatcgaacaccttcgttgcttctacccctga

SEQ ID NO: 27009 - DNA, 219 bp, Oryza sativa
  Clone ID: PAT_MRT4530_31745C.1
atgacggcggaggaggaagaggcggtggcagatgaagaggtggcgcaacagcagctcgacgacggcctcctcgacccgtccacaccggtgcggtccagcatcagagaagggagaagagctcaagcctgtcccgtacctctccgcgccgccgaactggggaagaaagtcgctggtgggaggaagagagaaagggtgattgataaaaagtacgagaactga

SEQ ID NO: 27010 - DNA, 6276 bp, Oryza sativa
  Clone ID: PAT_MRT4530_31746C.1
atggccgagcaagcaaaggcgcacgacctctctccgagtgtgagcggtgacgacggggagccaaacccacgccgtcgagctcgtactccaccaccccctccacaccaaagtcctaagcagggggaggcgctcgagagggtcgaaaaatccgcagcatcaccagtcgcgggtgatgcaggagaacggcgagatggggagcgtcgccttctcgtctatggcgacggcagcacgcctcagggcgcgcttcaggctgctggcgcgctcctacgtcacccgcccgtcgtccctgacccggagtctccagcccagcgatggctggacgacgtggccaacttggtcatgacggcacaacagcgcctgggtgctggtggacggtccgccaccaccaagacctccggcgccgccaccaccggctccgtgtcgtcaaggcggagggcgcggcgagcggcggctgttgcacgccattcggctgccactccctcgtcgacaccaccgactcgggaggatcagcatggagagccggatgctcgcctcgacatcgagcgccggtgtaatagccggcgtacgccccgcgcaacggagggtgcctcttcgtccagagtgtcacctcgacatggacgtgaggaccaaccctccgtgcccccgactggtggtgtcggctgtagagcctttgtggcgagtcttcggaatgtccgttggcccccaaggttccggcccaccatcaccgagaagtatgatgggagcgtcaaccccaccgagtttctccaggtctatacgaccgggattgaggccgctgggggtgacgacagggtcatggcgaatttctttcccatggccctcaagggacaggcgcggggttggctaatgaacctgccacccgcgtcggtccactcctgggaggatttgtgccaacagttcactatgaactttcaaggcacatatccgcgcccaggcgaagaagcggacttgcacgcagtacagcgaggggatgatgagtcacttcgctcgtacattcagcggttctgccaagtccgcaacactataccatgcatccctgcacacgcggtgatctacgcgttcagggggggtgtgcggcacaaccgcatgctcgaaaagatcgcctccaaagagccccagactaccgcggagctttttcagctcgcggaccgagtggctcgtaaggaggaagcgtggacttggaacccctccggttccggagtggcagcttcggccgcccccggatccgccgctcagacagggcggcgtgacaggaggaggaagaagaggtcggtccattccggcgacgagggttatgtcctcgccgtcgagggcgctccgcgggccacccgaaaggggaggcctgcgagcgacaaaaagaaagaggctggtactcccagcagggagcgcccagccggcaagtggtgctccgtccacaacacctcccaccacgatctcgcggactgtcgcgcagtcaaaagcttggctgagcgaacgaggaagtgggaggaggacaggaggcaggagcgccgggaaggtaagttcccggcggttccttccggcaaacggcgaagtgaggccaaacagaaggcccccgctgttgacatcgatgacggtgatgatgacctaggtttccaagaacctggggccaccattgccaccgtcgatgggggagcatgtgctcacgtctctcgccggagcttcaaggctatgaagcgagagcttctggccgcggcccctactcatgaggcgatgcgtcgggcgcggtggtcggaggttgccctcacctttgaccagaccgaccacccaccgtgtgttgcccggggagggcagattgcgatggtggtttcccccacgatctgcaacgtgaagttggggcgtgtcctcatagatggaggagcggccctcaacatcctgtctcccgcggcttttgatgccatcaaggccccggggatggtgctccagccgtctcaaccgattatcggtgtgacgccggggcacacatggccgttaggtcacatcgacctaccggtcacctttggtggatcagccaacttccgcacggagcgggtgaacttcgatgtggcggacctcagtctgccctacaacgcggtcttggggaggcccgcgttggtgaagttcatggcggcggtccactacgcctacctccagatgaagatgccgggccccggtggccccatctctgtccatggcgaccttaaagtcgcgctcgcttgcatggagcagcgcgcggaccacctcgctgctgcgtccaagcccgagggtggtgacgagaggcttggcatctccgcccccaccgccccgaggcggcggattgttacatgcgacgaggtcccggaagacgcgctcgtctccttcctgcgggcaaacgctgacgtcttcgcatggagaccggcggatatgcccggggtccccagggaggtgattgagcaccgtctcgccgtgcggccggatgcaaggccggtccggcagaaagtgcggcggcaggccccggaacgtcaagccttcatccgcgaggaggtggcgagacttctggaggccggattcatccgtgaagtcaaccatccggagtggttggcgaatccggtggtcgttcccaaggcgaacggcaagcttcggatgtgcatcgactacaccgaccttaacaaggcatgtcctaaggacccttaccccctgcctcgcatagatcagattgtcgactccactgcggggtgcgaccttttgtgttttctagatgcatactctgggtaccatcagatttgcatggctagggaggatgaggaaaaaactgcgttcattacccccgtaggaacctattgttatacatcaatgcctttcgggttaaagaatgcaggtcctacttttcaacgtactactcgaatttctttgggtagccaaataggacgtaatgttgaggcttatgtcgatgacttggttgtaaagacgcgcaaccaagagactttactctcagatctagcggaaacttttgaaaatctccgctccgcccgcataaaactgaaccccgataagtgcgtgtttggtgtacctgcgggcaagcttctcgggttcttggtctctgcccgaggcatcgaggccaaccccgagaagatacgagctatagagcggatgcgcccccccagcaaacttagggatgtgcagtgcgtcaccggttgcatggccgccctaagtcgtttcatatcgaggctgggagagaaggcgctacccttatttaagctcctcaaacgctctgggccgtttacttggacggaggaagctgaacgtgccctcgctcagttgaaggcatatctcagctctcctccggttctagtcaccccggagccaaatgagcccctgctactttacttagcggcgaccccccaagtggttagtgcagcgttggttgtggagcgcgatgaggacaatcctcattccgcgcacccccaccctgtgccgacttggcccgggagcaagcagggaggagaggcccccgagtcgaacggtggcctaaggcccctgacgaccggtgtcggccctctgcccgcttgtcagacggtgctgggtgcctccgaccctcaggaaggccccgaggccactgcgggaaggccgcacctatcgccctttggccccgaggctaaccctgtgctgacttggcccgggagcaagcagggaggagaggcccccgagtcgaacggtggcctaaggcccttgacgaccggagtcggccctctgcccgcttgtcagacggtgctgggtgcccccgaccctcaggaaggccccgaggccactgcgggaaggccgcacctgtcgccctttggccccgaggctaaccctgtgctgactcgacccgggagagagcagggagaagaggcccccgagccgaacggaggcctgaggcccctgacgaccggaattggccctttgcccgcttgtccgacgacgccaggagctcctgacccccaagacggccccgaggccactgtgggaaggccgctcctgtcatcctccgaccccgaggtcatcagcacagaagacgagtgcgccccgagaggccacttggacgaagagcgccccggggatacggcccctagcgaagaggatcggccccgccgaaaggtgcagcggcctgtctactttgttagtgaggccctccgggacgccaagacccgataccctcaggcccagaagatgctttacgctattctgatggcctcgaggaaactgcgccattatttccaggcgcatcgggtcactgtggttacgtcttaccccctcggtcaaatcttgcgtaatcgagagggtacaggacgggtggtaaaatgggcaatcgagctttctgagttcgatctgcactttgaaccacgccacgctatcaagagccaggccctcgccgattttgtggcagagtggaccccggctccagagaccgtctcaatccccgaggccagcacggactcctcacagctgcctcacaccgcccactgggtgatgcagttcgatggttctctgtctctccagggcgccggcgcgggggtcacgttgacctctccgaacggagacgtcctcagatacttggtccgtctcgactttcgagcgaccaataatatggcagagtacgagggactccttgccggactcagagtggcagctggactggggatccgccgcctcttggtgttaggcgactcccagctggtcgttaaccaggtctgtaaggagtaccggtgctctgacccacagatggacgcttacgtacgccaggtgcggcgtatggagcgccattttgacgggatagagcttcggcatgtacccagacgggataacatggttgccgacgaactctcacggctcgcgtcctcgcgagcccagaccccgccgggcgcctttgaagaaaggcttacccagccgtcggcgcgacccgaccccttaggggagacggatgcgcctgaccggcccccgaggcccgtcggagtccaggcctcgggacccgaagggagcgctccaagcccccttagattgattgcttggatctctgagatccaagcatacctcgcagataagactctacctgaggaccgcgaagggagtgaacgcgtccaacgcatttccaaacgctacgtgctgatagaagggaccctctatcggcgcgcggctaacggaatcctcctgaagtgcattcctcaggaacaaggcgttgagcttcttgccgacatccatgagggcgagtgcggagcccattccgcctcgcgcaccttggttggcaaggcctatcgtcaaggattctattggccgacagctctcaatgatgcagtcgatctggtccggcgatgcagagcgtgtcagtttcacgccaagcaaatccatcagccggcccaggccctgcagatcataccactttcgtggccatttgctgtctgggggctcgatatcctgggaccgtttaagagggccccgggcgggtttgagtatctgtatgtcgcgatcgacaagttcactaagtggcccgaggcttatccggtcgtcaagatcgataagcactctgcacttaaattcattaagggcatcacggcccgttttggagtgcctaaccgtattattacggataatggcacccaattcactagtgaactcttcggcgactactgtgaagacatgggcatcaagctttgcttcgcctcacctgcccaccccagaagcaatggccaagtggagcgcgccaacgcagaaatcctcaaaggccttaaaaccaagaccttcaatattctcaagaagcacggcgattcatggatcgaggagttgccagcggtgctctgggcaaaccgaaccacaccaagccgagcaaccggggaaacgcctttcttcctcgtctacggcgcagaagcggttctcccatccgagctcaccctgaggtctcctcgggccaccatgtactgtgaagctgatcaagatcagcttcgcagagatgacctcgactacttggaagagcgaaggcggcgcgcggccctccgagccgcgcgctaccagcagagcctgcggcgctaccatcagcgccacgtccgggcccgatcactctgcgtcgacgatctcgtcttacgccgcgtccaaacgcgtgctggattgagcaaactctcaccaatgtgggagggtccgtatcgagtgatcggtgtcccccggccgggctccatacggctggccacgggcgacggcacggagctgcctaacccgtggaatatcgaacaccttcgtcgcttctacccctga

SEQ ID NO: 27011 - DNA, 5697 bp, Oryza sativa
  Clone ID: PAT_MRT4530_31747C.1
atggctgagcaagcaaaggcgcacgacctctctccgagtgtgagtggcgacgacggggagccgaacccacgccgtcgagctcgtactccaccgccccctccacgccaaagtcctaagcggggggaggcgctcgagagggccgaaggatccgcgacttcgacatccactggaggtgaaaaagggcggcgagatggggagcgtcgcctcctcgtctatggtgacggcagcacgccccagggcgcgctccaagctgcgggcgcgctcctacgtcacccgcccgtcgcccatgacccggagtctccagcccaacgttggctggacgatgtggccaaattggtcatgactgcacggcagtgtctagatgctggtgggcggtcctccgccaccaaggcctctggtgctgctaccaccggctccgcgtcgtcaagacgaagggcgcggcgagcggcagccgctgttcgccattcggccaccactccttcgtcgactccttcgacccgggaagatctgcgtggggggccggacgcccgcaccagcatcgagcggcggcgtaatgaccgacgtgctacccacgcaacggagggcgcttcctcgtccagagtgtcacctcaacacggacacgggaatcagccctccgtgcccccggttggtggtgtcggctgtagagcctttgtggcgagtcttcggaatgtccgttggcccccaaggttccggcccaccatcgccgaaaaatatgatggcagcgtcaaccccgccgagtttctccaggtctacacgaccgggattgaggccgccaggggtgacgacagggtcatggcgaatttctttcccatggccctgaaggggcaggcgcggggttggctaatgaacttgccacccgcgtcagtccactcctgggaggatttgtgccaacagttcaccatgaactttcagggcacatatccgcgcccaggtgaagaagcggacttacacgcagtacagcgaagggatgatgagtcacttcgctcgtacattcagcggttctgtcaagtccgcaacaccataccatgcatccctgcacatgcggtaatctacgcgttcagggggggcgtgcggcacaaccgcatgctcgaaaagatcgcctccaaggagccccagactaccgcggagctttttcagctcgcggaccgagtggctcgcaaggaggaggcctggacttggaacccctccggttccggtgtggcagcttcggccgcccccggatccgccgctcagacagggcggcgtgacaggaggaggaagaagaggtcagtccattccgacgacgagggtcatgtcctcgccgtcgagggcgcttcgcgagccacccaaaaggggaggcctgcgagcgacaaaaagaaaaaggccggcgctcccagcagggagcgcccagccggcaagtggtgcaccgtccacaacacctccctccacgacctcatggactgccgtgcggtcaaaagtttggctgagcggacgaggaagtgggaggaggagaggaggcaggagcgccgagagggcaagtccccggcggttccttccggtaatcggcgaagtgaggccaagcagaaggcccccgccgaggacatcgatgatggcgatgatgacctaggtttccaagagcctggggccaccattgccaccgtcgatgggggagcgtgtgctcacgtttctcgccggagcctcaaggccatgaagcgagagcttctggccgcggcccctactcatgaggcgacgcgtcgggcgcgatggtcgggggttgctctcaccttcgaccagaccgaccacccaccgtgcgttgcccggggagggcagattgcgatggtggtttctcccaccatctgcaacgtaaagttggggcgtgtcctcattgatgggggagcggccctcaacatcctttcccctgcggcctttgacgccagcaaggccccggggatggtgctccggccgtcccagccgattatcggtgtgacgccggggcacacgtggccgttaggccacatcgacctaccggtcaccttcggtggatccgccaacttccgcacggagcgggtgaacttcgatgtggcgaacctcagtctgccctacaacgcggtcctggggaggcccgcgttggtgaagttcatggcggcggtccactacgcctacctacagatgaagatgccgggccccggtggccccatctctgtccatggcgacctcaaagtcacgctcgcttgtctggagcaacgcgcggaccgcctcgccgctgcgtccaagcccgagggtggcgacgagaggcttggcgcctccgcccccgccaccccgaggcagcggatgatcacatgcgacgaggtcccggaagacacgctcgtctccttcccgcgggcaaatgctgacgtcttcgcatggagaccggcggatatgcccggggtccccagggaggtgattgagcaccgtctcgccgtacggccgggcgcaaggccggtccggcagaaagtgcggcggcaggccccggaacgtcaagcctttatctgcgaggaggtggcgcgacttctggaggccggattcatccgcgaggtcatccatccggagtggctggcgaacccggtggtcgttcccaaggcgaacggcaagcttcggatgtgcatcgactacaccgaccttaacaaggcatgtcctaaggatccttaccccctgcctcgcatagatcagattgtcgactccacagcggggtgcgaccttttgtgttttctagatgcatactctggttaccatcagattcgcatggctagggaggatgaggaaaaaactgcgttcattacccccataggaacttattgttatacaacaatgcccttcgggttaaaaaatgcaggtcctacttttcaacgtactactcgaatttctttgggtagccaaataggacgtaatgttgaggcttatgtcgatgacttggttgtaaagacgcgcaaccaagaaaccttactctcggatctagcggaaacttttgaaagcctccgctccgcccgcataagactgaaccccgataagtgcgtgttcggtgtacctgcgggcaagcttctcgggttcttggtctctgcccgaggcatcgaagccaaccccgagaagatacgagctatagagcgaatgcgcccccccagcaagcttagggatgtgcaatgcgtcgccggttgcatggccgccctaagtcggttcatatcgaggctgggggagaaggcgctacccttatttaagctcctcaaacgctccgggccgtttacttggacggaggaagctgagcgtgccctcactcagttgaaggcgtatctcagctctccccgtgcggcgttggtcgtggagcgcgatgaggacaaacctcattccgcgcacccccaccttgtgcagacttggcccgggagagagcagggaggagaggcccccgagccgaacggtggcccaaggcccccgacgaccggagttggccctctgcccgcttgtcagacggtgctaggagcccccgacccccaggaaggccctgaggccactgtgggaaggccgcacctatcgccctttgaccccgaggctaaccctgtgctgactcgacccgggaaagagcagggagaagaggcccccgagccgaacggaggtctaaggctcctgacgaccggagttggccctttgcccgcttgtccgacgatgccaggagcccccgacccccaggacggccccgaagccactgtgggaaggccgcccctgttatcctccgaccccgaagtcatcagcacagaagacaagtgcgccccgcgaggctgcttggacgaagagtgccccagggatgcggcccctagcgaagaggatcggccccaccgaaaggtgcagcggcccgtctactttgttagtgaggccctccgggacgccaaaacccgataccctcaggcccagaagatgctttacgctattctgatggcctcgaggaaactgcgccattatttccaggcgcatcgggtcactgtggttacgtcttaccccctcggtcaaatcttgcataatcgagagggtacaggacgggtggtgaaatgggcaatcgaactttctgagttcgatttgcactttgaaccacgccacgctatcaagagccaggccctcgccgattttgtggcagagtggaccccggctcccgagcccgtctcgatccccgaggccagcacggacccctcgcagctgcctcacaccgcccactgggtaatgcagttcgacggctccttgtctcttcagggcgccggtgcgggggtcacgttgacctctccgagtggagacgtcctcagatacttggtccgcctcgactttcgagcgaccaataatatggcagagtacgagggactccttgccggactcagagtggcagctggactggggatccgccgcctcctggtgttaggcgactcccagctggtcgttaaccaagtctgtaaggagtaccggtgctctgacccgcagatggacgcctacgtgcgccaagtacggcgtatggagtgccattttgacgggattgagcttcggcatgtgcccagacgggataacatgatggccgacgaactctcacggctcgcgtcctcgcgagcccagaccccaccgggcgcctttgaagaaaggcttgcccagccgtcggcgcgacccgaccccttaggggagacggatgcgcctgaccggcccccgaggcccgtcggagtccaggcctcgggacccgaggggagtgctcccagctcccttagattgattgcttggatcgccgagatccaagcatacctcacagataagactctacccgaggaccgcgaagggagtgaacgcgtccatcgcatctccaaacgctacgtgctggtagaagggaccctctatcggcgcgcggctaatggaatcctcctgaagtgcattcctcgggaacaaggcgttgtgcttcttgccgatatccatgaaggcgaatgcggagcccactccgcctcgcgcaccttggttggtaaagcttttcgccagggtttctattggccgacagctctcaatgatgcggtcgacctggtccggcgatgtagagcgtgtcaattccacgccaagcaaatccatcagccggcccaggccctgcagaccataccactttcgtggccatttgctgtctggggactcgatatcctgggaccgtttaggcgggccccgggcgggtttgagtatctgtatgtcgcgatcgacaagttcactaagtggcccgaggcttatccggtcgtcaagatcgataagcactccgcacttaaattcattaagggcatcacagcccggtttggagtgcctaaccgtattattacggataatggcacccaattcactagtgaactcttcggcgactactgcgaagacatgggcatcaagctctgcttcgcctcacctgcccaccccagaagcaatggccaagtggagcgcgccaatgcggaaatcctcaaaggccttaaaaccaagaccttcaacatactcaagaagcacggcgattcatggatcgaggagttgccagcggtgctctgggcaaaccgaactacaccaagccgagcaaccggggaaacgcctttcttcctcgtctacggcgcggaagcggttctcccatccgagctcaccctgaggtctcctcagggccaccatgtactgcgaggctga

SEQ ID NO: 27012 - DNA, 264 bp, Oryza sativa
  Clone ID: PAT_MRT4530_31748C.1
atggcgggggcggcggagggagggagcgaaccctaccacgaggcgccaccggtggacggcgatcaacatatctcctcctccacggcatggcgtggtggcgcctcgccggagtgcgcggcggcgtgctccgatccccattcgctcgtgctctcgtcggcgtggagcagcaagtgcaagaagctgggcaggctagccaagatgtccagcgccgacgtggaaggggccgagaaggtggaggaactccatctcgtgatggaagagtag

SEQ ID NO: 27013 - DNA, 1334 bp, Oryza sativa
  Clone ID: PAT_MRT4530_31749C.1
tcaggcacgtgtgcacgagacacgacgccccgcctccacgcaagtctatttataaaataagtttttcataaaggaccaaaacgtaaaatatccaccacgctcgccaccccctcccgctatttatctcccacaccactcacctcgccatagagctcaccctcacctcctcctgtcgatcgctagcttagctcacctcgtcggcgccgccgcgcctcgccgcgccagccacgagggagagcgcgcgcgcctcggttaattatgaaggcggcggcggcgacgacgacgacgacgaggaggcggaggcggaggtcgtcgtcgacgatgaggcggctgcgggcggcggcggtggcgggggcggagaggagttgcgggaggccgtgatgctcgtggcgtgcgccgggaaccccgccatcgtgaggctccgcgagatgatttgccacccggagaccagcaagctccacctcgtcatggactacgtcggcgtgaagcagatgctcgccggcgtgaagcaactgcacgcgcgggggccagggggtcatccacggcgacatcaagccgggcaacgtcctcgtcggcggcgtcgatggctgcgttaggatctgcgacttgggcctcagcaagtcggccgcggcgccgccgccgcggacgcagctggtcggcacgctctggtacatgtcgccagagcagtacgccagtacctcagcagaaaattttagcacgaaatcaagcgaaagcggactcgtcgtagcacatgctctgcgtcctcttccactctacatctggccgccggctcgagctcaccaatcgaggagcaccatcgcctcatcgagctgtggcgagacgatggccagcttggcctcgtgggcttggtgctgctctggccggatctcgacaagaatgttagacggagctgtaacgccgcgaggagggtgagatcgagcattgaggccggtggcgtcgcggaagaggaggagctcgcgctcgcgggctcccacctctccttcatgcgcgggcagccacatcggctgccgtcttcccgcagctcccgctgtcgactccgcatcgcctgggggccagccttcgagactccgcttccgctgccgatgcccagttcctctccgccggtcgccacagctaggtccacctcccgccgcccctacctcttccgtccacagccgccagagccgagcctccgccgtcgcgcgcgtcgcgagaaaggagagggaagagagttgaagagagagggagatggggagatgaggaagaagaggaggctgagaatgacaggtgggggccacgtgggccccacctttttaaaattaatttttgggtga

SEQ ID NO: 27014 - DNA, 188 bp, Oryza sativa
  Clone ID: PAT_MRT4530_3174C.1
ccgcacgcgacgacctcgccggggctgagacgccgtcgccgccttcatggcgaggcgatccggggggaggaagctgtccttctttgcctcgaacgcctccacgtcgttctccaccaagcggacccgctcggcgcgccgcctcccttagctcaccaggccgtgcgcgtcgagctccccatccacggtgt

SEQ ID NO: 27015 - DNA, 201 bp, Oryza sativa
  Clone ID: PAT_MRT4530_31750C.1
atggcagcctctgccgttgccgcggccatcttcctccgcctccgccaaaacttcgaggatgtccatctcagggatttctctgagtacatggattgctctggagtgccacacagcaccgggaccaactctgacaatggcttcgaccttggccgcatgcatcacctcggccgcctttgtgaactccacactcccagtgactga

SEQ ID NO: 27016 - DNA, 522 bp, Oryza sativa
  unsure (1)..(522): unsure at all n locations
  Clone ID: PAT_MRT4530_31751C.1
cggacgcgtgggcggacgcgtgggccgcgcgcgcccgcagaaggttccagaggggcctgaagaggaagcccatggcgctcatcaagaagctccgcaaggcgaaaaaggatgcacctgctggtgagaagccagagcctgtgaggacccacctcaggaacatgatcattgtgcctgagatgatcggaagcatcgtcggtgtctacaacggcgacactattcacacaattgatacttttcaagatagtgtaatgtcagttaatttaaccaacacagaaataattgctggcagtgttgatggtactatccgcacatttgacattcgcatggggagactgtcgacaacttggggcatcctgtcaactgtatatctttgtcaaatgaccgcaattgcctattagctaattgtttggattctactgtgaggcttctagacaagtccactggggaactgttacatgagtacaaagggcatatatgcaagtccttcaagatggatggtgnctaaccaacgatgatgcattt

SEQ ID NO: 27017 - DNA, 460 bp, Oryza sativa
  unsure (1)..(460): unsure at all n locations
  Clone ID: PAT_MRT4530_31752C.1
cgttccgcccactgcgtcccggatggccatgggaccatatgggccatttggtgtccaagaggggtcagagatctcctccctattaagctgactgcaaatttatgaagagatggacacaaacaaacttcaactaaccattcgtacacagcagcatcgactgaacggtcgcnggccaccgaaccgcatgggactagagatactccgaaactccccctggcgaacgggaggcacaatggcacactcaccccgagcatgtcccgcctgtatctaacacacttcatctattaaggggcatcttattgtaatggacagcggatctcacgtctcataacaccatctgactctgtgttccagtcgtactacctcagcccacagtgatcaagcaggggacacgattctcttgattcggaaatttggggggatccttacagctgtctctgggaacctcgagatgaatatg

SEQ ID NO: 27018 - DNA, 475 bp, Oryza sativa
  Clone ID: PAT_MRT4530_31753C.1
tccaagcagctcgcgcctcggccctttttagagctccagctctcccttaccccttcaacaatggcggatgtcgaggtcgaggcggaggtggccgcggccggagcgccgaagaagaggacgttccgcatgtacagctaccgcggcgtggacctcgacgcgctcctcgacatgtccaccgacgacctcgtccagctcttccccgcgcgcgcccgcagaaggttccagaggggcctgaagaggaagcccatggcgctcatcaagaagctccgcaaggcgaaaaaggatgcacctgctggtgagaagccagagcctgtgaggacccacctcaggaacatgatcattgtgcctgagatgatcggaagcatcgtcggtgtctacaacggcaagaccttcaaccaggttgagatcaagcctgagatgattggccactacctcgcagagttctccatctcgtacaagccagtcaagcacggta

SEQ ID NO: 27019 - DNA, 2214 bp, Oryza sativa
  Clone ID: PAT_MRT4530_31754C.1
atggcggcggtctccgggaagaagcgacggtggccgtggatggcctcgctgggaagcgacgacggcgacgacgacgacggcgaggtcaagagtagccacggcgtcatgttcttgctgccgccggcggagagggagcggaagaacgtcttgggccgtggcggctgtaggatcgagatgtcgactagagggggggctgtcattgggccccactgccccggccggtcagaccgagctaatggcggtctgaccgagccatcagctcggtctgaccgaatacggctccgtcggctttgtatcggccaccccgagcaacaccatcccggccaccagagggccggtctgactgcgcatgtgccgccggtcaaaccggccttatgcaccggtcagaccaccgtcttgtggccggtcagactggccaaggcacgccggtcagaccgccactatgtggccggtctgaccgcccctggtcaggccgaacacagtgaaactcgtcgcagcggcgtccgcgggctggcgcaccaccgcacggagcggctgtggatgctggccttcccgcctccggcggaggtgggcgccgacaaggcggtggcgcacgacgtcgcagaagtggttgcagttgcggagaatgaggttgcggacgtcgaagtcgagacggaggtcgccgccggcgcacagccaaagaagaggacgttccgcaagtacagctaccgcggcgtcgacctcgacgcgctcctcgacatgtccaccgatgacctcgtccagctcttccccgcgcgcgcccgcagaaggttccagaggggtctgaagaggaagcccatggcgctcatcaagaagctgcgcaaggcgaaaaaggatgcccctgctggcgagaagccagagccagtgaggacccacctccgcaacatgatcattgtccctgagatgatcggaagcatcgtcggtgtctacaatggcaagaccttcaaccaggttgagattaagcctgagatgattggtcactaccttgcggagttctccatctcctacaagccggttaagcacggtaggcccggtattggtgccacccactcctctcggttcatccctctcaaatgagtcatgcagcttctagccatccagaatcagaattcagtgttaagcgcccatggcttgtccttccagtatcacttgttttttgagcaagttatatacctaaggcattttgttctgtttagctaagcagcactgtgcacaatgatctgttttgccaagtttatgtgagaatcttgttaacgttgtcgtgatcgtattgttgattcttaattcttaaaatcctggtttggaattttcattaaaaaaaaaaaactaacagaaccccacaccggcgccctcgtcaagccctacaagtcccacggccgcgaggtccgcgacgtgaactcctcctcggacaatgccaagctggtgtcgtgcggcggggacaggcaggtcttctactgggatgtcgcatctgcccgtgtcatccgcaagttccgcggccacaacagcgagatcaattcagtgaagtttaatgagtttaacacagttgtagtctcagctggctatgatcgcacagtgcgtgcatttgattgcagatcacagagcagtgaccctattcagacaattgatacttttcaagatagtgtaatgtcagttaatttaaccaacacagaaataattgctggcagtgttgatggtactatccgcacatttgacattcgcatgggtagggagactgtcgacaacttggggcatcctgtcaactgtatatctttgtcaaatgaccgcaattgcctattagctaattgtttggattctactgtgaggcttctagacaactacttcatttttgcatctgcagtttcctttaaagaaacaatttgggagtttgtattgcaaaatctggttagacctgcttctgttatagtacaatatggaatgtccactggggaactgttacaagagtacaaagggcatatatgcaagtccttcaagatggattgctgcctaaccaacgatgatgcatttgttgttggtggatccgaggatggttacattttcttctgggagttagtggatgcacctgttgtttcaagctttcgagctcatagttctgtggtcactagcgtcagttatcacccaacaagggcttgcatgctaacttcatctgttgatggcaccattcgtgtttggacctaa

SEQ ID NO: 27020 - DNA, 176 bp, Oryza sativa
  Clone ID: PAT_MRT4530_31755C.1
taggggcgatgggtattcttgaggccggccgggttcgtagaaacaaagctccagcaatcggcggcggcggcggcacccccgtgcgtatgtgtctccaccacccaactacgactacaatgatgcctgcgaatctcaatacgaagaagttgtcggctgggttcctgcgcctgatccta

SEQ ID NO: 27021 - DNA, 2070 bp, Oryza sativa
  Clone ID: PAT_MRT4530_31756C.1
atgccccccaccccctccacccgtctttccgatctgcccagccggaccgccgccgttcttcttctcctcgccgcccccgcctccgccgcctcccgcgcgccgccgcctgctagtcccggagacacgcggaaggcggcctcctcccccctccgccgctcccctcgcgcgcacgcccctgcgggcgggtttggagcggcggcggaagcggggcttccgtcccccgcctccaacttgaatcgagttgaagacgatcagattttagttgaaccagacctggcggcggagctagagcagagtcttgtagatcccacgcatgagttagagcagaatcttgtagagcaaggccttgtcatcgggcaagagtttgtcgatgtccacgcgtgccggagggccgtcaaggacatggccattgctatgcatttcgagctccgtgtcgtgaaatctgaccggagccggttcatcgccaagtgcgcgagggaaggctgcccgtggcgtgtgcatgtggcaaagtgccatggtgtcccgactttcactgtacgcacattgcacggggagcacacgtgcgacggtgtgcgtgacttgcatcatcaccaggctaccgttggttgggttgctaggtccgttgaggcaacgctaagagataacccacagtataagccaaaagagatattgcaggatatccgagagcagcatggagtagcagtttcttatatgcaggcatggcgtgggaaggagagaagcatggctgctgttcatggcacccttgaggatggatatcgctttcttcctgcctactgtgagcagattgtacagacaaatcctggcagtgttgcaatatacaaagggactggaccagataatagcttccagcggctgttcgtgtcgttccatgcatctattcatggtttcttaaatgcatgtagaccccttttggaaattgacaaggcagacctcaagggaaagtatcttgggacattgctatgtgcgtcagctgttgatgctgaaaacatgatgttcccgctagcatttggtattgttgacgctgaaagtgatgaaaactggatgtggtttttttcagaactgaggaagatgcttggagttaacacggataagatgcctgtcttgacgatactatctgaaaggcaatcacaagtggttgaagctgttgaagtaaacttccccactgcttttcatggattttgcttgagatatgtgagtgagaatttccgtgacgagttcaaaaatcctaaacttctgaacattttctggagtgctgtttatgctctaacagcagcagaatttgattcaaaggtaaatgatatggtccaagttcaagatgtcatgccatggttccaacgtttcccaccaaatctctgggcagtttcttactttgagggtatccgatatggccattttaatcttgggataactgagatattatataactgggccatggagtgtcatgagtttcctatagtgcaaactgtggagcatatcaaacaccaactgacctgctggtttgttgaacggcaaaacttggcgctatcatacaactcaattcttgttccatcagccgagaaacttatttctgaagctatcgctgattcaggatgctatcaagtccttcgagcaaacaaggtggagtttgaaatagtctcatctgagcgaacaaacattgtggatacgcaagccaggtgctgctcttgtcgtcggtggcaaatatatggcattccatgtgcacatgctgttgctgcactactttcctgtggtgaagatcctcgcttgtatgcacatgaatgcttcagcataatgaagtatcgggaaacttactcccagccaatctattcaattccagatagaagccaatggaacctcccgttttcttttgcacaaggtgcaggaagcaaagcatatgcggttcttcgcccgcccaagatccggaggcctcctggtcgtcccaaaatgaagattcttaagatagaaagcttgaaacggccaaaacgaatcgttcaatgtggccgatgtcatcttcttggacattctcaaaagaagtgttcgttacgaaactga

SEQ ID NO: 27022 - DNA, 639 bp, Oryza sativa
  unsure (1)..(639): unsure at all n locations
  Clone ID: PAT_MRT4530_31757C.1
ccggccgggatctgcccagccggaccgccgccgttcttcttctcctcgccgcccccgcctccgccgcctcccgcgcgccgccgcctgctagtcccggagacacgcggaaggcggcctcctcccccctccgccgctcccctcgcgcgcacgcccctgcgggcgggtttggagcggcggcggaagcggggcttccgtcccccgcctccaacttgaatcgagttgaagcggtcgaattgcgagcaaactttctatgtggcgcgataagtgattttgtaatcttgtggatgattgatggaagacgatcagattttagttgaaccagacctggcggcggagctagagcagagtcttgtagatcccacgcatgagttagagcagaatcttgtagagcaaggccttgtcatcgggcaagagtttgtcgatgtccacgcgtgccggagggccgtcaaggacatggncattgctatgcatttcgagctccgtgtcgtgaaatctgaccggagccggttcatcgccaagtgcgcgagggaaggctggccgtggcgtgtgcatgtggcaagaggccatggtgtcccgactttcactgtacgcacattgcacggngagccacgtgcgacggtgtggcgtgacttgcatcat

SEQ ID NO: 27023 - DNA, 585 bp, Oryza sativa
  unsure (1)..(585): unsure at all n locations
  Clone ID: PAT_MRT4530_31758C.1
cgcctctgctctcttcccccgttaaggcaggcgatcctgatcccctctccatccgccggcggccgacgcgggggcgcggaggcgcgcacgcacgcacggcggtgtggacggctcctctccttgccggagcccggcctccttccctgtgcggcctcctcgccccgccggcgagcctctctgctcgaatcgaaccggaggtataccccattcctgcctcgtagccctctctctccctccctccctccctcgctccggcgccgcttcatgcgccggcgagacctggatcgggaggaagactcggatcgagccggtggggcgcgatgaacagccagggattcggtccgggcgggagccccaagtcgttccgctaccctagggcggacttcgatctcgagtccgggatcgcccgcaagggcttacgcaagcccaagaaccacgacgcccccggtttgctcacctccacgctgatgaagatccggtacttctacgaggcgcaccccgtcgcggtcgccttcatcctgctgtccttcgggctcagcgtgctgatccttctgtcggtgtacgagacccggntcaggatgatgc

SEQ ID NO: 27024 - DNA, 298 bp, Oryza sativa
  unsure (1)..(298): unsure at all n locations
  Clone ID: PAT_MRT4530_31759C.1
gggacgtccaaatggacccatgtgacaatggccggatggtnatgaaaggaaaaccttatgggaaatgattggatgtggaggaagtgttggcgaactcatggatggaaatttgtggctggtgaccagactgcggacaacgtgagaatgaatgatgggatggactgtggtgaacactgcggaagtggtgatgagtgagtgtgctgttgcctggtgtgtgagcttgtaaccacctgatatgctcctgatatggcaatatagaaaagagatggctgtcctggaattaaaaaaaaaaaaaaaa

SEQ ID NO: 27025 - DNA, 3366 bp, Oryza sativa
  Clone ID: PAT_MRT4530_3175C.1
atggagtcgaggcgtctcagctttccggtcgatcgggcgcgagtccactctgtcggcttgtcttcgccaccgccattgctgataacaacaacgacttcaccgccggcctgcctccgtcgccgccgagtggtgcctccgcctacacggctggcctattatgccgccgctgttgggcgtctacgacttcaccgccggcttgcctccgtcgccgccgagtggtgcctccgcctacacggctggcctattatgccgccgctgttgggcgtctacgacttcaccgccggcctgcctccgtcgccgccgagtggtgcctccgcctacacggctggcctattatgccgccgctgttgggcgtctacgacttcaccgccggcctgcctccgtcgccgccgagtggtgcctccgcctacacggctggcctattatgccaccgctgttgggcgtctacgacttcaccgccggcctgcctccgtcgccgccgagtggtgtcctcgcctatacggtaggttggtcacaccaccgttcatgggcgtctacgacttcaccgccggcctgcctccgtcgccgccgagtggtgcctccgcctacacggctggcctattatgccaccgctgttgggcgtctacgacttcaccgccggcctgcctccgtcgccgccgactggtgtcctcgcttatacggttggaatggatcagtcagaacatcaccaccggccgcctcgtccaccgccgactggtgttttaccctgcacaattggcctattatgccaccgttgttgggcgtgtacgtcttcaccgtacggcttaccttccccgccgccgactggggtttcagcctgcacggctggccttttatgccgccgttgttgggcgtctacgtcttcaccgaccggcttgccttcgccgccgccgactggtgtttccgcctgcacggctggcctttatgccgccgttgttgggcgtctacgtcttcaccgaccggcttgccttcgccgccgccgactggtgtttccgcctgcacggctggcctttatgccgccgttgttgggcgtctacgtcttcaccgaccggcttgccttcgccgccgccgactggtgtttccgcctgcacggctggcctttatgccgccgttgttgggcgtctacgtcttcaccgaccggcttgccttcgccgccgccgactggtgtttccgcctgcacggctggcctttatgccgccgttgttgggcgtctacgtcttcaccgaccggcttgccttcgccgccgccgactggtgtttccgcctgcacggctggcctattatgctgccgttgttgggcgtctacgtcgtcaccgaccggcttgccttcgccgccgccgactggtgtccacacctgcacggctggcctattatgccgccgctgttgggcgcctacgtcttcaccgaccggctggccttcgtccgccgccgactggtgcttccgcctgcacggctggcctattatgctgccgttgttgggcgtctacgtcttcaccgaccggcttgccttcgccgccgccgactggtgtttccgcctgcacggctggcctttatgccgccgttgttgggcgtctacgtcttcaccgaccggccgcctcgaccgctgccgactggtgtttccgcctgcacggctggcctttatgccgccgttgttgggcgtctacgtcttcaccgaccggcttgccttcgtcgccaccgactggtgtcctcgcctgcacggctggcctattatgccgccgttgttgggcgcctacgtcttcaccgaccggcttgccttcgtcgtcgccgactggtgtctccgcctgcacggctggcctttatgccgccgttgttgggcgtctacgtcttcaccgaccggcttgccttcgccgctgccgattggtgcttccgcctgcacggctggcctttatgccgccgtagttgggcgtctacgtcttcaccgaccggcttgccttcgtcgccgccgactggtgtcctcgcctgcacggctggcctattatgccgccgttgttgggcgcctacgtcttcaccgaccggcttgccttcgtcgccgccgaccggtgtcctcgcctgcacggttggcctttatgccgccgttgttgggcgtctacgtcttcaccgaccggtttgccttcgccgccgccgactggtgtttccgcctgcacggctggcctttatgccgccgttgttgggcgtctacgtcttcaccgaccggctgcctcgtccgccgccgactggtgcttccgcctgcacggctgacttattatgccgccgttgttgggcgtctacgtcttcaccgacaggccgcctcgaccgccgccgactggtgtttccgcctgcacggctggcctttatgccgccgttgttgggcgtctacgtcttcaccgaccggcttgccttcgccgctgccgactggtgtttccgcctgcacggctggcctttatgccgccgttgttgggcgtctacgtcttcaccgaccggcttgccttcgccgccgactggtgtttccgcctgcacggctgatttattatgccaccgttgttgggcgtctacgtcttcaccgaccggccgcctagtccgccaccgactgctaccactactgatggacatcatcatcttccgtcgccgactggttatgccgccgtcgactggtgtttttatcttcacaactgcgcgtcttcactaccagtttgcttctgttgccgacgactcgtgttcacttcatcacggcaatgcaactttgtcatcatggtagagcgacttcatctttattatcttcggcactggcaaactctattgctgctacttcgcaagttttgctacttcaccaaccacgacgtctttgtgagcctcgacatcttggcatgcgatgccatgttattttactacaacaagaggctctccaatattcaggatttctacttggacatcttcaacacatatcttcaatcaagcaatgactactcgacgacaagaagctataattctcgactctatgttcagttgtttcccaactaaccaaagaacattctacttcaacaacttcaaatatttcggtttagacgagttgggcaacaacatcagctctcctccaattatttgtcttcacggttggcctactacgcaactgccgatagaggatctcatcgttatcatcggctgctacatcgctattgactggatcaccgacatcgtcatcttcatcaacatcttgttaagcctcttcaacatagcctactctgctgccgttgatgggaaacttcgtcatcatagtcggctatctctgttgccgctaatcatcattaccgtcggatgcgtttgtcgccgccgattattttcttcatcttca

SEQ ID NO: 27026 - DNA, 342 bp, Oryza sativa
  Clone ID: PAT_MRT4530_31760C.1
atggggggaatcatcagaataaaagatggatcgagactgagcaatggcagtgacctaggtgatgcaagcgaagtcaacaacagggatcaagacctttggctacgagatgctggtgatgcaaatagcggccaagacaacgaatcccgaatccgggaggagttcgttggagttgcacagaaaattcttgacagcctacgcaacggccagtcgacggccacatgccacatccgcgtcgtgttgcttgacgcttctgtccgatcaccgtgcgccggctacaagatcttggtatgtgaacaagcgccagatattatcgaggttggccaaactctatatgcaagctga

SEQ ID NO: 27027 - DNA, 468 bp, Oryza sativa
  Clone ID: PAT_MRT4530_31761C.1
atgtacagagtcgtacatgtacagttgtgcaaccgatcggtcgtgtttttgtcaaaaaggcgatcgaaagcaaagcaaagtcccaatactccatatgaacttgctgcgagtgcgtcctcggtgacattatcgtcaacacacatcttacgtacgtcgatcggttaccgtcgagaggcaacaagaagaacttggattgggcacgtagcgcactcatatcgcgagtgctttcgacgcgtcacgcgctcaacacgtactaggcgctctttcgttgctcactgctggtgccatcagcgggacctcatccaaaatgctatagggctatcctgccttgcttccgttgagaaaaggctagaccgagcttgtcgcactggtgctgttgaggacgagaggccattatgttgcattgctattgtggcagccaaggttaaccgcaagggcggatccagaattttcagtcaccggtgttat

SEQ ID NO: 27028 - DNA, 912 bp, Oryza sativa
  Clone ID: PAT_MRT4530_31762C.1
atgcagcatgaaaccaacacacacatgaaaaggattcatgaaccagcaacacaatgcaattgtgcaagcaagacaacgttatacgtcgccgtggtgaatgtgggcagcgtggagggcacggtcgcgaagccgtgggctggaccctactggtttgccgccgccagcgcgcgccgccgtgctcccaccgccgggtgctcccgcctgtggtcccgccgtcgcgcgccgcatctcccggtgccggcttgctccatcgcccgtctccccgtcgcccgcccccacgccacccgacgtcgccccaggtcgcccgacggccgacggccgtctcctcgttgcctgcccgacgccggccgacgccgccccatgccggccgatgatccccgacgccggccgacgctgccccaggctgcccaaagccacccctgcccgacgccgccccacgccgcccgacgctactacgactccttcgccactgctccggccggcatgaaaggttctgcacatgactcgcgcatcctcagtcatgcattggctaattttccttcatttcccatgcctcctacaggttatccaaaccgaatagggtatcctgcacctttcaaaggaaccacataccatataccagaatttcggcatcgttcgggacctcctcaaggaaagtatgagggcatcccaagtttctcacctactactcagaagcatatcatcatggcttgtcttgctatgcataacttcgtccgtgatagcaatttacgtgataaggagtttgagagatgtgatgctcatgaggactacttaatagaagatacaagtgacacgtcagacgatgagagtgaagatgcagagaatgatgataccatgaatactattcgtactaggatagctgatgctttgattagtgcaagaggaggatag

SEQ ID NO: 27029 - DNA, 1638 bp, Oryza sativa
  Clone ID: PAT_MRT4530_31763C.1
atgatgacgccgccgaagacgcttcgcatcgaggactcgagctccagcggcaccggtgatggcagcgcaccgcgtcaggccgtggtggagcgcgtcgtgcccaattccagcgtcgtggagctgccgatgctaaccagggctaactatcatcagtgggcctcggttatgcgggtgagcttggaggcgttggagttgtgggacgtggtggaggcggtcaccaacgaccgcgctaaggatcggcgggcgttggccgccatcttgcgtgcggtgccatcggagatgaaggccgggctcgccgtgaagacgtcggcgaaggaggcgtgggactcggtgaagaagatgcgagccggcgacgaccgcgtgaaatcggcgtgcatgcaacgcctcatgaaggagtttgagaacatggcgttccgcgacggggagaccgttggtgactttgcgatgcgcatcaataggctcaccgcgagcctgcgcgacctcggggaggagatggaagacagtcgcatggtgaagaaagtcctgcgcgtggtcccgaagaggttgaagcaagtcgcggtggcgattgagatgctcgcggacatggatgtcatgtccgtcgaggagctcgtcgggcgcctgcaagtggcggaggacgccgacgctgaagatcacgtggaggcccatggcgatgaaaatagagaaaagccggcattcgttgccagggcgttcgttgccattgtcaagcttcacaagctctgctactcactctcgtgtttgtgtgtctccgatcttggccatttccaacacgcacgggaggaggacaagacgaggatcctcttcttgtccttcgtggacgacgcgccaccgaggccgttccaccacggcgacgtctaccagcaggtggaggtggcgccacactacccgatgggattcaaggcggcggcggtcgcgccggatggcgtcccgccgagcttgctgaggttgaagggctggcaggtgagcaagacctcgcgtacgagctacgacggcctcgccgaccacgcgcactgggtagactggccgctccgccgccggatgccagacctcgacggcttcggcatcggcgcgggaggcggctcgccggccgccgtcgtcggcaaatggtactgcccgttcatgttcatcagagacggcgagcggcggctcaaggaccaggtcaaccggtgcatgttctacgagatgacgctggagcagaggtgggaggagatatacagctgcgacaacactcaccggggcagcatcagcggcaagcagccggatgatgaggtcaaggtgaacgtgacggtgcgccggtcgacggcgctgctaggcggcaccggtgcagtagtgcaagaaggtgggcctcaggaggtcgacggggtgatgtggtttcgaccggcggcgccgccgccgaactctggcgcggcaggtggagttggggtggacatggtggtgtgggagaagatgaagtgggagctggagagaggagggtgggtcgacggtaatggcgacgtggagagtatcgagagggtggagaggcgtgaggcgctgggtcggtactgggacaaaccaaatgggtatgagcaaacgatgtactactgcaactatcgaattttaattgtttctgttaatgtatga

SEQ ID NO: 27030 - DNA, 440 bp, Oryza sativa
  Clone ID: PAT_MRT4530_31764C.1
cggacgcgtgggcggacgcgtgggcggacgcgtgggcggacgcgtgggctcgcatcgatgaagaacgtagcgaaatgcgatacctggtgtgaattcataatcttctagagtacagattcatccatcatatttcatctgcttacccctttcttagttaacaattaacatgaagcacttctgtgattgtgttactattttttttctgtacattcagctgcttattcctttttttataatttatggtaatatctagagttaggaaaaataattatgttttataaggacagaaagatagctgacttcttccatggaaaaaaatacttcatgttgtttagtttagagattctatgtaaagaaggttcttctgggggaatagctctataacgttgtacttctttgtatcttcgtcactagcttcattccctatgtgtcaaataaca

SEQ ID NO: 27031 - DNA, 2298 bp, Oryza sativa
  Clone ID: PAT_MRT4530_31765C.1
atgtcatctctatcaggcacagtttcagttcctcgttgcccagttatttttgatggcatcaactataatcattgggctcagcatatgcgtctacatatgtgtggtcaacgcctttgggacgttctttttggtgagctagcttgcccccctttccccttggctcaagctatgcctactttttcagctcagactactgatgaagacagagcaaaggcacaagaggagtatgatgatgctttggaaacttatcagggtcagtatgttatgtacaagacttggttggatgaggatgcttgtgcttctgctattcttgtagctagtatggaggtccatcttactggtgatgtggttacccttgcttcagctcatttcacgtggacacaccttcgtgaccgttatgcacctactggtgatgctctatatcttgctatgtgttgtcagcgccagtggtctcacatggatcttcgccgcatctatgacttcctcacacgtcttcgctctgagtatgagtcgatccgtgcacagttgcttgctcggcacccccgtgttactttgatggaggctctaactgagattcattctgaggagattcgtcttcgtgaagcgggagatccttatgttactgcgttgcctcactgcttctgcttcgacaggatcgacgcatgggtctcctggttggtactggccctcgccgccatgattctcagcatctttgggagcttgactggcttcgtcttccttccgctgcgcttaccagtcttcttgcttctgctacctcccctaaaccctcttactcaagtctatagtcgtcgccctcgtgttatggagccttctgttgatgcttctcctgttgctcctccgagatacaatcttcgggatcgtaatttagttacgattcgtccagaggatcgctatggttatgttgcgactgttctcgctgagcctagttcttatcgtgatgctgttattcatcaagaatggcaacatgcaatggcagaggagcttgttgcacttgagcgtactggtacttgggatcttgttccattgccatctcatgttcgtcctatcacgtgtaaagggatctttaagcttgatgttaaaaatgcttttctcaatgggggattgcacgaggaggtttacatgcgaccacccctaggatattcggttcctgagggtatggtttgtcgtcttcgcggctctctttatgggctcaagcaggctcctcgtgcttggtttcaacggtttgcttctgtagtcactgctgctggtttttcggctagtgctcatgatcctgcactttttgtccatacttcgcctcgtgggcgtatcattcttcttctctatgttgatgatatgattatcactggcgatgatgctgattttattgcatgtctcaatgctcaatttctgatgtctgatcttggttctcttcgctattttctagggattgaggggactatcttttgttgtcatttctttcctcggtccacatctttacaacttcaagggtattctgatgctacttgggctagtgattcctctgatggcaaatctctttttgcttattgtgtttttcttggtggttccctcattgcttggaagactaagaaacaaacagcagtttcttgttctagtgcagaggctgagttacgagctatggcccttttgacagcagaggttacttggttacgttggttacttgaggatcttggtgtttctgtgacttccccgacctctttgttgtcggacagtacaggtgctattagtattgctcgtgatcctatcaagcatgagcttactaagcatattggggtggatgcttcttacacacgcacccaggtacaagatcaggtgattgctcttcagtatgtgccttccgagttgcagctggctgatttctttaccaaagcacaaactagagctcaacacaggatagcagaaggaatattatatgattcaaggaaagatctgaacaaactcaataatggacgaagtactgggttgcaagcacttgaagttgctggacttcttgaaagtggaatgaagaatatgctaactccaggggaacaagatttatatcctgttgaacaggctcttaacaagtgtgtttcgctttacaaagagcctcatacgcggaaattcgtgtcaaagactctcaagaacgagtatatcagatgcttgaggcggctcactggtattgttcagagcgatttcgctgtgtcggaggcattgacattgcaggggttgctagctgaagcgcaacagatacttgaagaacttggacacgagagcaactag

SEQ ID NO: 27032 - DNA, 552 bp, Oryza sativa
  Clone ID: PAT_MRT4530_31766C.1
atgggggattggcgtctgggatctcgcgaatcgaggcgcgacacgtggcaggtcgcgccgtgggccccactaagccacggacggcggagcggcgcgaagccggcggagagggaggcggaggcggagacggcggcacgcgaaggaggagtcggcggcggcgggtccgaagtcgtgcagctccggccgccgctccctcctctcccgtcggccgccacgggccgctcctctgccatcggccgccgcgccacgctttgcccgaggcccgccgcagctgcttcctcggatccaaggctgcctcattctgagcgtcctcgctgccgagatccaagggcgccgccactgcttccccggacgacctcgactcccgcgggctctccgccgccgctccgaccgccgtcgtgccgccgttgtcccgccagcttcgcgcgccgccgctccggccgccgtcgtgccgccgttgcccccgccggcttcgcgcgccgccgctccgaccgctgtcgtgccgccgctggccaccgctccgtccacgtggggaaaagagaagtaggatag

SEQ ID NO: 27033 - DNA, 201 bp, Oryza sativa
  unsure (1)..(201): unsure at all n locations
  Clone ID: PAT_MRT4530_31767C.1
agccagcataaatggcttccaagntggaagttggaactccaaacagagtaaaggttgttacagcagcagcagtgagcacctaaccgagtaaatctgcctagctagcccctgctgccatttttgtcatagtccaaaactgatacaatccgtctctcgcttgttttatttacagcattcatattattactacaaaccacgccc

SEQ ID NO: 27034 - DNA, 494 bp, Oryza sativa
  Clone ID: PAT_MRT4530_31768C.1
ccaacaaaaaagcgggaccgggcccgaggggctaaaaacccaaaccccccgttaacaggggaaaaaaaaaaatggtaataacaaagggcccccccccaaaaaggaaaaccccccgggggccccaacccaagggcacccgggcccaaaacccgaataaaggcgttcaaagggcaaaaaaaaattcccggggggaccggaaaaccaaatcccccgtaggccccgccccgttaaaaataaaaaaaaaccacccgggcatttttaaggggggggtttttttccccgttcccccagtcccctggggggaaaacaaaaacttttttaacgggaccaaaaccgcgggctcagaagggggggtatccccaaccacccctggatcgggaacgggaacttccggggggaccaaacccgaaataaaaggcaaccccccggaaaaccccgccaaaagtccccatggacccaaaacccccaaaaaaatccgggggttccagggaccc

SEQ ID NO: 27035 - DNA, 684 bp, Oryza sativa
  Clone ID: PAT_MRT4530_31769C.1
aaacggagaccccgaggaaatggaaggcggcggagcaaccgcacccgccgcgccgcacccggcggtggcgccgctggcgttcctgctggggaagtggcgcggggaaggcgaggggagcttccccaccatctcccccttccgctacggcgaggagctcctcttctcccaccacccctccaagccggtgatctcgtacacgcagaggacgtggaaggcggcgtcaggcgagccgatgcacgccgagagtgggtactggcggccccgccccgacggctccgtcgaggttgtcatctcgcagagcactggtctggccgaggttcagaagggttcgtttgatgctgaaaagaaaacagtgacgctccaaagcgaacttgtggggaacgcatccaaggtgaaacagatcacaagagcttttcaattggtagatggggagctctcatatgttgttcagatggcaacaatcacaaccagtctacagccacatctcaaagcccttctgaagaagatttgaacgatactgcgcccctctaggggcgcagtgcggcggcgtctgtggcacttctggatttttatgttaaaataagcctattatatctgggaattggggcaacctgcccctactagtttgacataatagacgctgaaaatacgcccttcagagttcagataaaaaaaaaaaaaaaa

SEQ ID NO: 27036 - DNA, 1013 bp, Oryza sativa
  Clone ID: PAT_MRT4530_3176C.1
aatcccgggagagagatggggcggcgccgacatgcgggccccacatggcagtgactcgaggagggcggtccgcggtggaccgagtccacggaccgggaaaggacggcgcaccacgtggcgctgacgtggcgccgacgcagcggccacgcggcagccacgtgggcggccgaacggacggccccgatctacctgggtagatcggacggcgggtgtggctcgcggccggcgtgcgcgggcacggctcaagccggcccggcggccatggcgcgcggcggcgcgagacggcgaccggccggcggcggagggcgacggcgtcgcggcgacgcgggcggcgaagcggctaagcggcggcgcgggagagagagaggaaggggaggagggacctcaccgacgacgaccgacgacggctagcgacggagggcggcggcgacagcgggacgatctctggaaccacctagcgaacacggtggaaggggttagagagggagagggaattggaagagggcgaggacgccggccgaaggcggcggccatggcggtgctcaccggcaggggtggacgcggtggcccgcacgatggcgaacgcgacggcgtcgtcggctcggcggctagcggcggcgaaggggagggcgacggctctagggcgttagagggctcgggagggctcggcgagatggggaaaaagagagagggggtggcggtggtgcttaaatagaggagggggagcccggacaggtggaggaggagagagaggcgggattcgaatttcgaatcccggccgtctcgagcgcgggcgcgggcgagagggagggggagtgggtgcgggagacgcggcgcatgcgcgggcgtggccgacgtggcccggaggaggcgggaacgtgggcgcggcggcggttgcggagcgcggcggcgccggctggaggaaggggacaggcccgacaggtgggccccacctgtcggtgaccccgggggagagaagggaggcggccggctcgcttatcgtaaccaccacg

SEQ ID NO: 27037 - DNA, 272 bp, Oryza sativa
  unsure (1)..(272): unsure at all n locations
  Clone ID: PAT_MRT4530_31770C.1
aaaatgtgttgantantcnncgttttccaattttttcgantcagtncngtatatgcagctatgcanctgtctgaantttnagtcngtatgcncgtgtgtgcncggnccagantgancgtcgnnccatgaancatctgtnctgtcantcagtgtcctgttcagtgtnccttcaaanttttttggnanaaancggcccatggnccgtcttccattgggctgttcgncaaaaaaaaaaaaaacaaaaaaaaaaaaaaaaaaaaaaaaaaaaaaaa

SEQ ID NO: 27038 - DNA, 208 bp, Oryza sativa
  unsure (1)..(208): unsure at all n locations
  Clone ID: PAT_MRT4530_31771C.1
cagacaggnctcnaacaccgagcatcaagcncagtacccaagtcaactgagctcagctacntagcatcctctggancaaacganatgacccgtacacananagtgttgntcnccgtgannacagctctantcctcnccgncccgnacaacgncgtggncatcacctgcggncaggtgaactcagccgttggcccctgnctcacctacg

SEQ ID NO: 27039 - DNA, 303 bp, Oryza sativa
  Clone ID: PAT_MRT4530_31772C.1
atggacaagcttcacctcattcacaaactgcatcagtttggcttaggaatcacaaataccttgacgttcaatgccatccatgaggaacagcagcctctgctagataagttctctaagaaggttgccaggtgtaagccaaaagatgctgccatcatgaggaagactgacactaatcaagacagtgctaatgtggtggacattgtctggtggcttggagccagaatgatcgcgcccatggacaaggacaatgctgaagaaacaagaacacgagactctggaaaacatcttcttcgcagcaactag

SEQ ID NO: 27040 - DNA, 441 bp, Oryza sativa
  Clone ID: PAT_MRT4530_31773C.1
atgcccgccgtcctcctcgtcatcgtcgtcgttgtcaccgtcgtcgctgctgtcctcatcctcgtccccgtccttgtcgtggggcgtagggggctagggttggctgggtctgcccactcccttcaccgtcgacgcgcgggagggggagctgaatccgctgcccccgtgcctcttcaccatcggatccgctgccaccgctcattcccaccaccggatccgccgttgtcggatccgtgcgggcgatggccgccgcgcctccccaccgtcggatccgccaccacacgcctcaccatcgtcggatccgtcaccgctgtcgcatccctcctccgccctctcccactgcctgagccctccaccgcatcgggagggaggagaggggagaggaggagtgggggagaagaggaggaagccgtcgtcgtcgcccttgcccgccgccggtag

SEQ ID NO: 27041 - DNA, 761 bp, Oryza sativa
  Clone ID: PAT_MRT4530_31774C.1
atacaccagcagcgccctgcagctgcaagcctgcaactagtcgctggccggccggccggccatgtactactgcctcgccgcgccgccggccgctgcggcaccggcagcgccagcggcgaggcgcgcgtcctctttcctcttcgtggtgtcggtccctcctccgactttatgggggagggtgacgggaggcgccgtgtccgcccagcggctggtgcggcggcggtgctcctccgccggcgagcccagggcggccggcgacggtggcctatccagtttttgcataattgaaggcccagagactatacaagactttgttcaaatgcaatcacaagagattcaagacaacatcaggagccgccgtaacaaaattttccttttgatggaagaggttagacgattgcgggtgcagcagcgaatcagaacttctgaaagcagaggtgcaagcagtgaagaaagtgaaatgcctgaaatcccgtctagtattccctttttgcctaatacgtcaccgaagacaatgaaacaactctatttgacatcattctcattcataactgggataatcttttttggaggcttgatagccccagtacttgagctgaaattagggctaggtggtacatcttatgaagattttataaggaccatgcacttgcctcttcaattaagtcaggtagatcccattgtggcatccttttcaggtggtgcagttggtgtaatctcggcattaatgttggttgaaattagaaacgtcaggcagcaag

SEQ ID NO: 27042 - DNA, 898 bp, Oryza sativa
  Clone ID: PAT_MRT4530_31775C.1
ggagagaactagtctcgagtttttttttttttttttttttgcttttttcgttgttgtagataaaatcgaccgatttcatccaattcaagattcttctgcatgatatgatagactagaataatgctaccccatttgtttgcaaccagctcgattaggcgacaaatccctggaccatatgtcccagacatcgcaacaaggaggtgtatatatcctactctactactacaatgagctatgaattcgcgaggtgtgttctgctattttatttgggcgaaacgggtgcctctggaaacgtttcattgtctcgtctattcactcatcagtacaagtctctgccgcatctgtcacaggattgtttttctgccgcggattctgtcttcttgatctgcttctgcagctgtggcaggtcatgctcaagcacatcgctgaacgccttcgatgcttctgcaagctcctcaggactgattgacagcggaggcgctaatctgattatggtgtcatgtgtgggctttgccagaacgcctctctccttcagcttgatgcagatgtcgtaagcagaagcaggggataaagcttcgttgcttagatccactgcattaagcaaacccctcccacgtacttcccttatgatttgcgggaatctctgttgaaccttctgtagctgatctctgaactcttgtcctaactttgcagccctttcaacgagaccttcatctgtaactactttcagcgatgcaactgccacagcacttgccaatgggttcccaccaaatgtacttccatgttctcctggtttgatacacagcataatatccttatctgcaagaaccgcactgacaggaactactccagcaccaagggccctgcctagaatcaccacatcaggtcgtatgttttc

SEQ ID NO: 27043 - DNA, 303 bp, Oryza sativa
  Clone ID: PAT_MRT4530_31776C.1
atgaggtaccaggcaggctaccccaaggtactagaccagaccataccctggtatgcaccggcgagtagaagtgatgggttggcaaggagcaagaagaaacccaactccaaggtagccatctacatcgagactagccgtctccaccctcctatcgacgctaaggacctcatccccctcggcctcaccgcctccctttccttctgctcacacatgacaacccccaacctcgcttccatagttggctccctcctttgctctaacccccatgcccttgccaacctccgctatcttatgtgctcctga

SEQ ID NO: 27044 - DNA, 264 bp, Oryza sativa
  Clone ID: PAT_MRT4530_31777C.1
atgatattggtggaagcagcagcacgtgccccgcgccggcgctcctgctcgcggtcacgggatggaggccggccccgccgctcgcgggatggggatcggcggcgtctcggcgcagcgcaggcggcggacgaagtgggcgaggagccgaggagacgggaggccgaggccgaggggagatcggacatcggactagggagggagcattgcgtaagccagaggtgggacttgggccgacccaggctagcacgtcacagcccattgtag

SEQ ID NO: 27045 - DNA, 200 bp, Oryza sativa
  Clone ID: PAT_MRT4530_31778C.1
ggcttttaacgggccttttagatttggtttctaccctaggtcctttggggcacccagtacctttaccacccttggcggggtttggtattgagttttaacagattaggggttcggaagttaaaattaagctcaattttattcttttgtgacttgggaaactttgggggttttaattagaaaaaaagtgggctttcttattt

SEQ ID NO: 27046 - DNA, 700 bp, Oryza sativa
  Clone ID: PAT_MRT4530_31779C.1
ctagcacctgacggggtcgcggtcctcggcgaggtactcgttcatgaagctaaggcgctccctcacggccacggcggggcccctgagccgccgtgcgagctcgctgtcctcggcgccagtgaagctctgagcggccagatccaccggggggagacgaagcgccgtatcgacggcctgatgcggccagccggcgagggtgagagaggcggccggcgcaagatggggaaggggataggcggctggcgtgcgatggcggcaggccaccgcatgggctgctgtcggtagtactggatctgcgcgcccgtggtcatcatctccgaggcgttgcaacacgtcgaagtccccccgagcagccgcagccgcggccaagcgcgaggcggacatcacggacggtggcgccattgtaaaagcagaagctgtccatgatggcgtcgacgtagccgaggaccaggttcgtctctcagtctctgccaggcacggcccgccgcagaacgcctctgccgccgtcgacggcacacgcagcgctccctccggccctagcctgtactgcccctggaacccgctgtatatcttcacccaaccaccaatgcaagaacacacgcatccaggattgcagaacttcagaaagcgttttctgcttgaactctttttttctttttcttttttggctgaagctgtttcaagtattgctcaagtttga

SEQ ID NO: 27047 - DNA, 2717 bp, Oryza sativa
  Clone ID: PAT_MRT4530_3177C.1
atgagacaacctgatcgtcagatcaatacacactcggcggattcaaatccccaaacaggattctcgtgcgctacccccttttattattgccgaaatcatgtttcgacagttggcgcgccaggtaggggttgcgtcgagtttcttatcaacaagcgcgatggaatcaatttcatgagtcgccgacttcgttttcgctttgggagttttcacttcctttccgtcgaccacttcttcaagctcctcttctctgacttgatccaaatcagtcagggggaaactcaatctgatttttatcattatttatcgtactgatttttaatcccagattaatctcttgctattttttgttgttgttcgcatataattacgcggcactattgaggcgattgatgctggtcatggactcgaggcgtctcagctttccggtcgatcggccgcgagtccactctgccggcttgtcttcgccaccgccattgctgataacaacaacgacttcaccgccggcctgcctccgtcgccgccgattggtgcctccgcctacacggctggcctattatgccgccgctgttgggcgtctacgacttcaccgccggcctgcctccgttgccgccgattggtgcctccgcctacacggctggcctattatgccgccgctgttgggcgtctacgacttcaccgccggcttgcctccgtcgccgccgagtggtgcctccgcctacacggctggcctattatgccgccgctgttgggcgtctacgacttcaccaccggcctgcctccgtcgccgccgactggtgtccccgcctatacggtcggttggtcacaccaccgttgatgggcatcgtcatcttcaccgccggcctgcctccgtcgccgccgactggtgcctccgcctacacggctggcctattatgccgccgctgttgggcgtcttcgctttcaccgtcgaccgccttcgtcgccgccgactggtgtcttcattgttattgatggacaactttgttcccacattggccacttctgccatcaccaaggggaatattacaaagctaagtcatcatttattttattctttatatgatatttttccttttcctctgcctcactacaccaattggtcttccattgagtagtgagtcgggggctacagatgttatatcatattttttataatatttatcttgattgcttgcgacataatctgagtacaaaagtacctatcgagttatggagttctatcttcctatgctttccgtttggtttgccaatggatggctgcctttgggccgattcctagcacccgggggctcgttggatggaccgagtaacgcaaggtgctaagtattattcggaataaatcaaaagcatagagataagataaattcattttctgctcttaataattgcaaaagtacccgagtagtaaattctgattcaaatattttaaaatacttgattttttctcgagtattatatttatatcagatactactcatcctatatgtttgttctgcaggatccagatccagatatgcataaaagggattcatggctttaagcttacctcttacgctccaggaatggatcagtcagaacatcaccaccggctcgcctcgaccgccgctgactggtgtttccgcctgcacggctggcctattatgccgccgttgttgggcgtctacgtcttcaccgaccggcttgccttcgtccgccgccgactggtgcttccgcctgcacggctggcctattatgccgccgttgttgggcgcctacgtcttcaccgaccggcttgccttcgtcgccgccgaccgatgtcctcgcctgcacggctggcctttatgccgccgttgttggacgtctacgtcttcaccgaccggcttgccttcgtcgccgccgaccgatgtcctcgcctgcacggctggcctttatgccgccgttgttgggcgtctacgtcttcaccgaccggcttgcctttgtcgccgccgaccgatgtcctcgcctgcacggctggcctttatgccgccgttgttgggcgtctacgtcttcaccgaccggcttgccttcgccgccgccgactggtgtttccgcctgcacggctggcctttatgccgccgttgttgggcgtctacgtcttcaccgaccggccgccgcatccgccgctgactggtgtcaccgcctgcacggctggcctgttataacgccaactgatgctatcttcttcacggctggctacatcgctgtcactactaataggcatcagtatcttcaacacaagctgcctacgtttgccatggctgccgactggtttcttcacttccatggctgcatgattctgccagtgttgattggccttaccatcttcatcgccgctaccactactgatggacatcatcgtcttccgccgccgactcgtgttatgccgccgccgaccggtgcttttatcttcacaactgcgtcttcactaccggttcacttcatcacggcaacacaactttgtcatcatggtggagcgacttcatctttattatcttcggaaccagcaaactctattgctgctacttcacaagttttgctacatcaccaaccatgacgttgttgtgaatctcgacatctcggcatgcgatgccgtgttattttactacaacaagtggctctccaatattcaggatttctacttggacatcttcaacacatatcttcaatcaagcaatgactac

SEQ ID NO: 27048 - DNA, 329 bp, Oryza sativa
  unsure (1)..(329): unsure at all n locations
  Clone ID: PAT_MRT4530_31780C.1
ctaggttggnaaatacttccctgtttcatattatanaactttttagcattacccatacattcatatatntatgttaatanatctagatatatatgtatgcctagatttattaacatctatatgaatgaatgtgggcaatgctagnaagttttatancctgaaatggaggtagtaataattatattttactaaggtaattactaattagtgatgcgtatatatttatatcattttagatgaactgtacaaacacaagaggagaggacaaggacttgtacttttccgtgtctccatatatacttgatgttaataataaaaaaaaaaaaaaa

SEQ ID NO: 27049 - DNA, 1935 bp, Oryza sativa
  unsure (1)..(1935): unsure at all n locations
  Clone ID: PAT_MRT4530_31781C.1
ttaatcacttgattcgtacccctcatgatgtggcacatagtcatcatcactttcatctggaacaaaatcatcatccgaagaatgagactcctcttcatctggaacatagtcatcatcttcggtagaccgatactcatcatcatcgacaaatccataaagggctggaagaaccacctcgtcccctacctccacagccacctcaagaacctcctcccctacctctacagcagcttcaccgtccaactgcccctcccctcctacagcagcttcaccatccaagtgcccctcccctccatctgctggctcaggcaagagaagagcagcccactgttcagggtctagatcatgtccttcaggaccggcaatggctgcaaagtgttgggcccgagcatctatggctagttcttcgagagcttcaccatgagcaaggcctgacagaatgctagccctaacggtggctctaacgtttggtaggaatttgtactgcaggaaatgatatattaccccatcttcttccataagcaccggcggcaagacgacacggcgtctgaatcgaatcccaccattgatctcgaaagtaggcaatgcaatgccattaggcaagacaagcgattgcacattgttctctggtgtcctggtcaaatcgtcatcagtatagaaacgccaaccagttgcatcagctccattgttgatcatcatcacatttagcaccgcatcatcatgcacaacatcaaaaatcaggtcaagtatgattaccgcatcagagactacgatattttcaaactctttgtggtcctcggagtccaatgggggatcagcaactgcatatcttgctccgttcattagtttggcacatacttcagtagcaaaagagaacctagaacccgcatttgccatagaatattccaaagcgccagcagaatcaaagcaatgaaataatactccacgccactcatcattggcagcaccagccatcatgaagtcgcgtactggccttggaagtaaaaactctattccattcctctcgctctcttccgtttctctttccatctctcgagcgagagacgggcgaccgcaaagggacaacaggcgcgggtggtctaggcgtttggcagcgagggccctcgtcggcgggcttggcggcgctgcgtcgtcgaggttgttgggacgtctccggagcccgaggtcggtgtagcatcgagggacggaggtcgccacgtttggtcggtccagcatattctttgcttgaagagaagaactctcgatcactccaaccatacatataatattgtgaaacgatggacccttgcacttctcaatctgcacaataataatcctgtttggactgttaaggtcaaccttgtgaggttgaggaacagatttggatactgcattgataattttcatcctattgattcttgtattcgaccttgcttcataaaacacaccaaaacagtcaacctgcatgcactgctttgaattgtgtccaaacaacccacaaacaaagcaaggcttcttccgccttttcattggatagctcacaactacatgatcctccctcctcagcaaggtatctcccaggatcaaaatatcttggtatgccctactcctcgatggcggccggttcagcctcgggtgcctccttccgcgctgcttctgctcctcctcctccttgcgcccggcctccacgggcacggcgcaaccgggcccgccggaatcgcgcggtaggcggcggcctagcggtggtctagtcacggccatagctacaaagnagtnacgtacgacggactatggcggccggttcagcctcggggcggtcggatcttggagtgttctgcgacgagggcgagtcctgcgatcggctgcagcggctgaacggagcggcgacgacgacggaggtgatcgggatcggcgacgagccgcggcgctagggtt

SEQ ID NO: 27050 - DNA, 840 bp, Oryza sativa
  Clone ID: PAT_MRT4530_31782C.1
atggcggggcacgacggcgacgagcgtcgacggcaggcgatgcagcgtggagtgcgaggtggagaaacgccggggacggggatgtggggcggcagactggacagcggtggaggaatagggttgatctgcactggcaagatcagcaacccacggagagtcatgatagagcatcaccaacgagcccaacgcaatgtaggaggtagaagaggttctatttcggggcatgtagtgattaatcgcgatagaacggaaagacttgcaagattaatgagggactatttttgtgataatcctacatatggtccggttttgtttcgtcgaaggtttagaatggctcaatctttgtatatgcgcattgtgcatgcagtacaaaatcatgattattattttgttcaaaggagaaatgctgctggagtacttggactacatccattgcaaaagattactgttgctttacgaatgcttgcttttggtgtgcccgttgattttttggatgattatcttggtatggctgagaacaccattttgtcaagtcttagaaggtttgtgagagctattgttgaaatatttggggatgaatatttaaggtctcccaatcaagatgatactaatagattgcttgcaattggagaacaaaaaggctttccaggtatgcttgggaacatagattgcatgtggaagtggaaaaactgtccaacagcttggtctggcatgtaccaaggccatgttcatgagcctactataatactggaagttgttgcttcgaaagatctttggatttggcatgctttttttggattacctggttctcacaatgacattaagcatgagtttgcttga

SEQ ID NO: 27051 - DNA, 3874 bp, Oryza sativa
  Clone ID: PAT_MRT4530_31783C.1
aaactgcaataactaacacatttacatgccactacagaacaattatatgtttacaatttttggcttaaaaattaaacatcgtccctttgtactgtgatgaactcataacttttgctttcaagtccacaacaattactgtatctcatcaaataaaaggatccgttgttgagtgttggaaattaacatgccactcaaggatcacaggacagtacagagatgaagttggcaaagcagtatggcccctggcccaaaattttcaaattcaggttggcaaagaagtattctctatcttgactatcaaatcatcctgccaagaaactatttaataggacaacttcttagaattcctgcatcgatggccagtgaacaaatttgcgttcatgcttcaaccttgctttatttagtggtaacccattacatcgtccgtttacaaactttgatgccagaaccatcttgctattaaacggctagtatatattgggcctgcccgataggcctaaatgtggcggcaatacagccagccgctaccaatctctacagcatcgacaacagctgcagcagtacgacaaccgaacaggcccatttcttgccgggcactgccgtgcagaaaccacatgaagcaacaggtccacccgctctatgacatggtttttcgccatcacgtgatgatgtggttcttgcagtacccgcagcagaaattgatggtttcttccatctcatcagaagggaaaactgcagatatcttaatcacaggttcaaatctttcgacatatttcttcacagaagcttggggatcgcaggtggcaggcaatttggggatcccatgaccatttccaatggagaaagccttgtgaagaaaatattaatatggctcctgtgtcaaccaaattcactcgtcttcacgaagacgtcaaaagttaaaacctcatctcactccttggtcggaaccatcttctttttcaaaatatgatctttcatattcaattactcccttcaaaatcaaaattgctgcctccttgtccaaaacctcattatattcaccgcatgttagtgtttggatacaatttggacagccggctgaactagtacagttgcattctgaaacaagttctaaagcagcaagtagtagttccccaaagagtgaattgatctgcaaagctatgccgatacaaccagggtgtttatcgtataacagaattctgtctggaataccacgggtttcatgaggatttgcacattctgtttctaggtcagaagcatcacacgtcatatgcagaggcactatgttcaggagagcatgtgaagcagcatgcgagccgcatcgaaactgtagtttcctttcctcgacattagttatcaccgagtgcgtgagtcgcacccaaacagcctgggaattgaaggaatatggaggcaggttaagctctatgctatcagatattttgttgtttgatttccatatgcgataaaaaccaaaccatttagtagtcactttgcaatcatttgcttgggcggttgtcttcaccccgttagttttacacatacttggtggaagatgagcaaactctcctccaaggacattgatgtctgtgtagtctcgtgtttttgtgtaatacttcaaatcagctttcctacagaatgctgtccttgatgacaaatcaagttcctcaactaagtaattgacaccctgatgcatgtatacagctccatcatacacctggaaaaaggccttactttcctcaatttcttccagtaaccggttatttaacttgtctattactctgtatttgtcatgctcaattgcccgtatgctcaccgcctgtgaaggtcttttctcaggtccaacataactccacatgcttgatgagaaaggtccagagggattgtttatgagacagcctttgtctttcagggccatcattacactgttcaggctagaacaaaagtaatccgcatcatattgcacacacaatggatgttcataagcagcacaagcaagatgctgttccaaaagcttctgattatgtgaatcgacttggcaatgctcaattggcttgccaaatagtttatgtgggaatttcatgaaatactgatctaaagggccctcaaaggcaacataaatggctaatgattgttttgctcttcttccagatcttccagcttgctgccacaggctagcaatactcccaggaaatccaagatgcaatgttgcatcgatatggccaacatcaatccctagttcaagagcattggtggcagcaacaccaagaagttttccctgaaaaaggttggcctcaatttttctcctgtcctcagcaatgtagcctgcacgatatacacagatagtatctaccaattctttggcagtctcttgaagaatttcacgcgtgtatgctagaacaagctcacagagcttccttgttttacagaatgcaatgcagcgaagcccgtgctgaaccatctcagataatagataagaaacctcaactattggacttgagcgtctagttaataagctatcttttgaactcccctccttcgtcatatgtagcgggggattccacaagaggaagtatttaaaaccacaaggacttccatcattctcgatcagctctacattatccagtttggctagctccatcacatgctcacgcgggtttgctgaagtagccgtacaaaatatgaaagtaggatgactgccataaatgtttgaacaaatgcgcttcaatcttctaagaataagtgcagtatggcagccaaatgctcccttgtatgaatgtgcttcatcaatgacaatatacctgagtatagtattgcagaaatggaaactcagacgggcattatctctgatccacgtacggtcttctctaggagtatcaccatcatatatgttaacatcaatatcagtgtgaagtgcattcttcatctcgagtaaactccttagctgatcttgagctagagcctggtggctgtacaacctagatactccaatactttttaatgcttccctcgtagcctctgaaagatgattaggaagttctgcaaaagatgccgctcgacatggtatctcttcaatatgtacaatctgtccctcctttccaagtccttgtttcagatggtcaaccatttcagcaggccctaaatggcacgtgccatggcaagatgttgcagcagatctggcaatgctacttttcttatctatgctaggctggccagcagcactgttcgctccagaggtaggcatttcgttgaatgcatttccattttccttacatggcttcctccttttatttgaattcccagtaggtaacctttgatctgttgacacatcctctacagaattcccagaacaagggatagtgctttgggcacaaaagtttttggatgcagaatcatcctgtgggctgctagagatcgatgaaagatcatccataatttcttgccaagctgaattagccccactcgaaaaatatctggacgccgtttcagcatgtgggctgcttgggattgatgagaggttatccgtaatgcctctccgagctgaattcgccccagttgacacttgcgatgatcttggtgattcagtaatctgcccttgttctgccattgccaccggagaacactgctgcgacttccttgcgaatggaacaaggacaataaattccccctcaccaacagcaagagtgccaatctcggcctccacgcgcaatttggtgcccttgaggaagaggtggaagctgggggagacctgcgcgggagggaaggagctccggagcgcggccttgagatcccgcacggaggcggcggcggcgagcgcgacgacggtggaccgcccgtcgagggcccggacatggagctccctctccccctccgccat

SEQ ID NO: 27052 - DNA, 598 bp, Oryza sativa
  Clone ID: PAT_MRT4530_31784C.1
ccctagcgccgcggctcgtcgccgatcccgatcacctccgtcgtcgtcgccgctccgttcagccgctgcagccgatcgcaggactcgccctcgtcgcagaacactccaagatccgaccgcccttctccccgacctcgcacggcagtccgtcgtccgtcactcctctcttttccatggccgtgactagaccaccgctaggccgccgcctaccgcgcgattccggcgggcccggttgcgccgtgcccgtggaggccgggcgcaaggaggaggaggagcagaagcagcgcggaaggaggcacccgaggctgaaccggccgccatcgaggagtaggaggcaaaaaccagcaccgtagagtcagtgctcactgaagatgggcctgatgcccctttatttgacagtactggcataccaagatattttgatcctgggagataccttgctgaggagggaggatcatgtagttgtgagctatccaatgaaaaggcggaagaagccttgctttgtttgtgggttgtttggacacaattcaaagcagtgcatgcagaacttgctctgttttgggctgcactggtgtcaaggattttgaattagcgacaa

SEQ ID NO: 27053 - DNA, 585 bp, Oryza sativa
  Clone ID: PAT_MRT4530_31785C.1
atgggcaccctcatcgtgcgctccacgccgactgctccacgccggcctccagcatgtcgcgttgcgccagcttaccgccaccgccagctatgtgttctcatgttgtgtcggcctcacgccacctccacgcagcactcgccggccacgagcctccaccaagcgctgatggcgccatcactgccagccgccggcaccgcccttccactgacgtcggtgtcgtccatgcacagtagcctgctccaccacacccccattgccggccgccagcgtcaccgcgctggcctcccgccgtgtcgctccgctccgtccactagctcttgccgcaccacacgtcgtcgccgcccacgccggctgctccccgcccagatccgtagggtgttgggtctggctacgctgcctaggaggggggatccggtcggggcagtgccggatccactgccccataccggagaagccgccacctcccacccgacgcgctctgctccgcctcccacatcaaggaggagcttcgccggctcggtttcccttgccaccaccttctcagtcgggctcgcggtttctagcggcagcaaggcgtcgagatag

SEQ ID NO: 27054 - DNA, 185 bp, Oryza sativa
  Clone ID: PAT_MRT4530_31786C.1
gttcctgtgacaaatccatatctaggagctgatcatgcgctggcatttccaggagctcagatagatctaagagttatcgtactagcacgcagagagcattcaccactaggtcttactgttggactatatttgaagagacacctgtgaccggcacagaggccagattaggcacatacacctacact

SEQ ID NO: 27055 - DNA, 242 bp, Oryza sativa
  Clone ID: PAT_MRT4530_31787C.1
ggaacacccgggggagggaaaaagttttttttttttggaaggggtaaaaatttaatttcaggactttttttgaattttggcccttttccaaaaggggaaaaattttactgccaaccaagtccaaaggtggttactcccccgcaggggggtttaacaaaattaccaaacattttttaaaaactaaggggttttggaaaaacttgcccctttttaaaatagttaacccaaagccaaattggttt

SEQ ID NO: 27056 - DNA, 240 bp, Oryza sativa
  Clone ID: PAT_MRT4530_31788C.1
atggcgctcatgaagaacaatagcatgatggttctgtgcttggcagttcttgtgcttatgtctgccacttccatatcttgccatgcaccaccagcaaggaatagtgatggaactatttgcatctattatccagcttgcacgatcgagggatgcgtgataatgtgtggaaaagttgttggcgcgaatacaggccattgcgacaattatggaaattgttgttgcccgaatttgacaaaatga

SEQ ID NO: 27057 - DNA, 375 bp, Oryza sativa
  unsure (1)..(375): unsure at all n locations
  Clone ID: PAT_MRT4530_31789C.1
cggacgcgtgggctcgccgcctccgactcaccggcacgaccgcgcggctcccatggacgccggcgaccagtcgccgaaggaggtgtactccgtgtgggcgctcccgcccgagcccgtccgcgcgcggctccgcggcgtcatggccggcctccgcgccgcgcacggcgggccggcgttcgagccgcacgccaccgtcgtcggggccatccgcctccgccgatccgccgccgnagaggcgctccgcgccgccgccgccggcgnccggccctacnccgnccgtgtggnncggcgtgcccgcggnggcttcgtgctccaaatccctttccttctgctccggccccccccgggggggggcgctgcgcgctctcnttgctg

SEQ ID NO: 27058 - DNA, 1880 bp, Oryza sativa
  Clone ID: PAT_MRT4530_3178C.1
atggcagtgacccgaggtgggcggtccacggcggaccgggtccacggaccggggaaaccggcgcaccatgtggtgcacacgtggcgccgacgtggcgcacacgcggcggccgaaccgacggccccgatctaccctacccaagggtagatcggacggcgggtgtggctcgcggccggcgtgcgcgggcacggctcaagccggcccggcggccatggcgcgcggcggctagcggcgcgcatgcggcggcggcgcgagacggtgaccggcggcgacggagggcgacggcatcgcggcgacgcgggcggcgaagcggcggccaagcggctagcggcgcgggagagagagagagaggaaggggaggggggagacctcaccaacgacgaccgacgacagcgagcgatggagggcggcggcgacggcgggacgatctccggaacctcctagcgaacacggtggaaggggttagagagggagagggaattggaagagggcgaggacgccggtcgaaggcggcggccatggcggtgctcaccggcgaacggcgcagagtgggttccggcggcgggatccaacggaagaggggtggacagggtggcccgcacgacggcgaacgcgacggcgtcatcggcgcggctcggcgcggcggctagcggcggctagcgacgaccggagcggtggcggcggcggcgaagaggagggcgacggcgctagggcgttagagggcacgggtgggctcggcgagatggggaaaaagagagagggggtggcggtggagcttaaatagaggagggggagctcggacgtggccggtagaggcgggaatcgccggccgacgtggggagtgggggaggagagagagaggcgggattcgaatttcgaatcccggccgtctcgggcgcgggcgtgggcgagagggagggggagtgggtgcggaggacgcggcgtatgcgcgggcgtggccgacgtggccggaggaggcgggaacgtgtgcgcggcggcggatacggggcgcggcggcgccggctggaggaaggggacgggcctgacaggtgggccccacctgtcggcgaccctgggagagaggagggaggcggccggctcggctgggcctcggcctctgatgaaaggatcaatatcaccgtccaggacagagttcaattctgacagctggaggcctgtgttgagatcatgaaccaatttctgaggcccaaatttgtaccttcttgtctctcggctgtacaattcctccaccgtctgcctcttgatcgtcttcaggttcgacgatcttaactctctggatataacaagtagctttgctttcagcctgcttatagctttcatcttgtttgcgaagtagcttcgctcacttgcctcagaagcagcaccatctgatccagcagtgacgatgatgcaagcgccttccttgtcgtacggacccttaagaagcttgtacatctgataacgatctagaaactcagtagcatctacggaggtcttgtatgcctgcttaaacaactcaacattgatgacatccatctctgagagttgactaatcagcttagcctcttcagcccaaagagggagccgcggggactcaccgagctccttgtaggaggcggcggtggaggcgccgtcgccgcggccgtccgccgggagggcggcgactcggccggcgctggaccaggggcgggagcgggagcagcagcggggcgacgccgcggcgcgcacggacgccggagagggcgccgtgggcgccattggtatggtgtagcgcgtagggtatagggggtagggggggtttaaagtagcggcggcgtagcggcggagggaggcggcgcgcaggctgaggggctgggtggcgcggcgtggctccctcgtgc

SEQ ID NO: 27059 - DNA, 516 bp, Oryza sativa
  Clone ID: PAT_MRT4530_31790C.1
atggccgaaaccctgaagcccgtagccttgctgctgctgatactcaacctctgcatgtacgtcatcctcgccatcatcggcggctgggccgtcaacatctccatcgatcgcggcttcatcctaggcccgggattgcggctgccggcgcatttccacccgatgttcttcccgatcggcaactgggcaacggggttcttcgtcgtgttctcgctgctcgccggcgtcgtcggcatcgcctccggcctcgtcgggttcagccacatccgccactggaactactactccctgcagccggcggcgaccaccggcctgcttgcctgggcgctcaccgtccttgccatggggctggcgtgccaggagatcagtctcgacagacgcaacgcgaagctgggaaccatggaggcgttcacgatcgtcctgacggcgacgcagctcttctacgtcctcgcgatccacagcgggagccgcggccccgtcccggtggagcggacacacgccgtggcggccggctactga

SEQ ID NO: 27060 - DNA, 555 bp, Oryza sativa
  Clone ID: PAT_MRT4530_31791C.1
gcctaggatgcacaatgcttaatcgtcatgttcattagaggattgttaccagatctacatgtgtgagtctactacagaactgatcagatagagcagagctgctcaagatgtataggagtctggcaggttgaactctgagagagccattcgatcccggatcattacaccggccttgggcatgacatgccagtgtagaacaagctgaactttcttcccgcgcaaactgcttccctggtcaatcagaggatacttgctcttcacctccacttgcaaattcgctttgtccttgtcgggtatgatgtggtcccacaatgaaacctgttttgtgctccaagtgaatagtgactccaaatttgcggacaagttgaaggtcagtgtcaccttgtcgttgccattgagctgcttgtggaatcggtttatctttgtaacatgggcttgcgcctggacggaggggacgtggaaggcgtcgagcgcggaggcggcgcagcaggcggcgaggaggaggagcgccgccgtcgtcgccgtcgtcaacagccgctgcacccaagagtgcat

SEQ ID NO: 27061 - DNA, 699 bp, Oryza sativa
  Clone ID: PAT_MRT4530_31792C.1
atgcactcttgggtgcagcggctgttgacgacggcgacgacggcggcgctcctcctcctcgccgcctgctgcgccgcctccgcgctcgacgccttccacgtcccctccgtccaggcgcaagcccatgtacgaatccgtctgttcttcttcttctttttgctccctttgcactatcacgcctggaatcatccgcgactcggaaccctcgaaattggggatcttctctgcattgcgcagcatgttgatatggctgagatagttctgaaatgtttagaattttggaaggttgggtgccaaattctgattctttcaacaatggttacaaagataaaccgattccacaagcagctcaatggcaacgacaaggtgacactgaccttcaacttgtccgcaaatttggagtcactattcacttggagcacaaaacaggtgttcgtttttctgactgctgagtatgagaactcgaagaattcgcttaaccaggtttcattgtgggaccacatcatacccgacaaggacaaagcgaatttgcaagtggaggtgaagagcaagtatcctctgattgaccagggaagcagtttgcgcgggaagaaagttcagcttgttctacactggcatgtcatgcccaaggccggtgtaatgatccgggatcgaatggctctctcagagttcaacctgccagactcctatacatcttga

SEQ ID NO: 27062 - DNA, 402 bp, Oryza sativa
  Clone ID: PAT_MRT4530_31793C.1
atggctacactgttgtcagagcagggcgtggaatctgttacgaagctggtgaatctaaaatgggtgtccaaaggccgcgtggctctacagcctagccctacccccgcacctcgcgagtcgcagaggcggccggggggcctcggggtgccacgtcatgcccctcgggccctcgcgctgccttgccccgaggccctcgcccaactaccatgtgtctgtgaccggcctgttgtcggccacgtccgattggacgggcggccgtgcccccacgtcgcctctgtattcggcggagtggaggtagggctgtcccccgtggcaggcggggggcggcgccggatcccactaaaggacggactgccgcttagcttccgggcgaaggcacggatcgtggtccggtcaaggtaa

SEQ ID NO: 27063 - DNA, 1584 bp, Oryza sativa
  Clone ID: PAT_MRT4530_31794C.1
agaaggcagtacttcactgacagtcactctgccagcacatgtaatgcatctctatgtgctcaatcgagctggggcaagaataaacgcagccgctgtttctgtgcttttcatatgctgcttcggttttccatcaattatcctaacgtatggcagatgccaaattggaaagagcattttgcctaggatgcacaatgcttaatcgtcatgttcattagaggattgttaccagatctacatgtgtgagtctactacagaactgatcagatagagcagagctgctcaagatgtataggagtctggcaggttgaactctgagagagccattcgatcccggatcattacaccggccttgggcatgacatgccagtgtagaacaagctgaactttcttcccgcgcaaactgcttccctggtcaatcagaggatacttgctcttcacctccacttgcaaattcgctttgtccttgtcgggtatgatgtggtcccacaatgaaacctggttaagcgagttcttcgagttctcatactcagcagtcagaaaaacgaacacctgttttgtgctccaagtgaatagtgactccaaatttgcggacaagttgaaggtcagtgtcaccttgtcgttgccattgagctgcttgtggaatcggcttatctttgtaacatgggcttttttttttttttttttaaacttcaaatccagcatgaatctgagacttgaagtggtgccaaacatggccttaaactaagtaaacataaaaccgtctacaagattcacaatcacaaccaaataagcaccaaatttttaaggtgctgagaaacactcttgggccggacaatcaatattatggcaatacagttcagttaaataggtcataacacgagatatgacaattgatatttgttgtagaaggcgtcaactaattaattacatcacattttcatggcaggtacaagctcagaacttgtctatggggataccatctctgactacctcatatgcgtcacggctgcgggtcttcttcacaccagcagtgaaatgaaccttcgatccctcagtcttgatggcagtcaccttggtccaaacaagcactttcgtcttcaagccttcgatatcagagagctttcccttctccaggtagccagtcacacaggtaaagaatcgcagaacagacgaatccttgtacccgacatcacaagctgaaggaatgtacacggttagcttctttgtctcctcattgaactcatagttagtagcatcccttgggaagaggcccgccggcatgtcatattccttgagaaggtctggcaatgctttctgcatcttccctttgatcttgttcaccatccatttagctcctgttccaatgcttgtagagattgagctgatgtcgtcgccgatggagtcgatctccttgcttgccctcttgctgaaccagtagctccccaccttgttcagcacctggtccatctcccccctctctccaatccaaatccaaatccccaatccgcctccacgaatccaaccgaaattggggggagattggaatgaggaagaagaagcagccgctcgcgatctagaaaaagt

SEQ ID NO: 27064 - DNA, 645 bp, Oryza sativa
  Clone ID: PAT_MRT4530_31795C.1
atggcatcctccatcttgctcctggtggtgcttgcagtagtgtcagctccagtggcgctggtcatggccggcgacccagacatcctgacggactacgtcatcccggccggcagcaacgccgagaacatcaccggcgacttcttcacgttcaccggcttccgcaacccgctgagcatgaacatgagcatgccgatgcccaacgccaacttcacggtgaccaaggccaccatggccgagttcccggcgctcaacggccagagcgtctcctacgccgtcctcatgtatcccccggccaccctcaacccgccgcacacccacccgcgctctgccgagctcctgctcctcgtcgacggcgcgctctccgtcggcttcgtcgacacgaccaacaagctctacacccaggaccttgccgccggcgacatgttcgtcttccccaaggggatggtgcacttccagttcaactccgggaaccagccggccatggcgctctcggcgttcggaagcgccgccgcggggctcgtgtcggtgccggtcaccgtgttcggcacaaacatcgacgacgccgtgctcgccaagtcgttcaagaccgacgtgcctacgatccagaagctcaaggcaggcctaactcctcccaagaaagcctaa

SEQ ID NO: 27065 - DNA, 645 bp, Oryza sativa
  Clone ID: PAT_MRT4530_31796C.1
atggcgttgagctactactctttgctactattgctgcttgcagtttgggccccagcactgaccctagtcatggccggcgaccccgacatcctcaccgactatgtcatcccggcgaacggcaaccccatgaacatcaccggcgacttcttcacgttcaccggcttccgcaaggtgttcaacacgagcagcgcgccggaaccgaacagcttcaccgtgaccaaggccaccatggccgagttcccggcgctcaacggccagagcgtctcctacgccacgctcgtcttccccccgagcaccgtcaacccgccgcacacccacccgcgctccgccgagctcctgctcgtcgtcgacggcgcgctctccgtcggcttcatcgacacgaccaacaagctctacacccaggacctggccgccggcgacatgttcgtcttccccaaggggatggtgcacttccaattcaactccgggaaccagccggccatggcgctctcggcgttcggcagcgccgccccgggggtcgtgccggtgccggtcacagtgttcggcaccggcatcgacgacgccgtgctcgccaaatcgttcaagaccgacgtgcccacgatcctgaagctcaaggcgaacctgactccgcccaacaagtcctaa

SEQ ID NO: 27066 - DNA, 684 bp, Oryza sativa
  Clone ID: PAT_MRT4530_31797C.1
atggcgagagatgaatctatgatagcagctgctacttacttctggtccacggccatgaacaccttcctcttctcccaaggagcgatgaccccaactctcttagatgtcatcatgatcactgacctagatgtcacctcatcggctaacctgcctagcttggatacccaactcacccatgagttcaaaaccaggagcataggtgggaacatgcagcctttccttatgatgtggcttgaaaaattcctgttctgcggtccaagctgtggtcctactgcaaactggcaacgtgtagctgagaatttggtagaaaagaagcatttccctcttggaaagtatctgctaggctacctatatcaaactctcaatgctgcaataaacaagatagtctctggaaaatcaattggcacagggggtccatggtggttacttcaaatctggttgaacctgcacaccaggatggttgccgatcgaccagcgctagccgatgcaaattttccaaggtttgagccgatcatcagagatgatggagaaaggagtactacacgccgatgtatgtccttcgaagaagcagcatcggtcagtaccgcatccaagttatcggctgagctcttcaaagaatggttcaacaacttttatgatgggttcgtgttgacagaaaacacgaggcctgggagatctgcttaa

SEQ ID NO: 27067 - DNA, 2623 bp, Oryza sativa
  Clone ID: PAT_MRT4530_31798C.1
atgttgaactccgccagtccaccgagcgcatcatccgccgaatatgttgagcatctcactcaccaagttgcgatccctagcataactgatgagttccagtttttccttggcccaatcggcaatctagaccccacaaagtttatcaatggagaaaccaaccgaattccttttagatttgccaatccagatctaagctcctggaaaaataccttcaaatcttggccatcggctgaaaagagttggcctgcctggtataagaggatgtccgctagcaaatcaactcactgggaagaaatcggcatatcccaagccttggccttaactgtagcagacatggcgagagatgaatctatgatagcagctgctacttacttctggtccacggccatgaacaccttcctcttctcccaaggagcgatgaccccaactctcttagatgtcatcatgatcactgacctagatgtcacctcatcggctaacctgcctagcttggatacccaactcacccatgagttcaaaaccaggagcataggtggttggttaggctatgttgtgaagaacatgggaaccgggccaatttctccaagggaacatgcagcctttccttatgatgtggcttgaaaaattcctgttctgcggtccaagctgtggtcctactgcaaactggcaacgtgtagctgagaatttggtagaaaagaagcatttccctcttggaaagtatctgctaggctacctatatcaaactctcaatgctgcaataaacaagatagtctctggaaaatcaattggcacagggggtccatggtggttacttcaaatctggttgaacctgcacaccaggatggttgccgatcgaccagcgctagccgatgcaaattttccaaggtttgagccgatcatcagagatgatggagaaaggagtactacacgccgatgtatgtccttcgaagaagcagcatcggtcagtaccgcatccaagttatcggctgagctcttcaaagaatggttcaacaacttttatgatgggttccccaagaacactagaatctggtttgcatatgaaggacatagcactttcgagcttcctggtgatttttggtttgacgagatcaattccaaaaaatatgacaaatccaaagaggtattctcaacagccatcaacccttgcatcatccctgtcggcatccaccaaggcaagaacatccagatgacctacgagttttgtcatccgacaagcgccacaaggcaatttggcatgggtcaactgccaattagcttattcttcaccgacaagatccaaaacagaggggaaattacatcactactcatgatggatcggctactgaaccttccaggacctcctttgggcagcatcaataatataaagctaaggatgttgagaagtgcaactttcgaccgatggtggatagagtggaaaaaacatttattcgatcaatcggcttccatgtatctgacagatctctttcctaaagttgttccccagacaacagatttttctcctctacatcacagtaatagtggtgtggaaatccaatatgctctagggcttctgcccaatggtggtggattatcccctcctgtcatcggctataatgcccccaagacctctacattgctgcacggcatgcctcgtgtgccgattgctcctattgctgggaagaagagatccaaatcggctactgccccatcggctgcaaagaagaaacccaagaagcagaaagctactacctatgacctgccagccatagaccaagataagaagaaagtagccaccaagaaaccacaaggggcagctccaccgccccctcgacccccaactcatgtttctgaatcaagtgaaaacactccatcggctgtaggaagtcatcatataggagaagaagaagaagaagttatagcaccagctccagccatccctatcttagccgacatgttttcctttgacatccggcagttcatggatgaagaagaagagaccacaagcacagctttggcacctctagccgatgatgtaaaaacaatcttgctagatatttcaaatcggctagaaggttcgttggagactctggtaaccagctgtgggtctattagagatagactccatgaaatagatgacaaaatcccagatgagctagccgatgccattactccaacggcataccttgagcaacatcggcttaagcttgaaaaagctcagaagaggattgctgatcgacgcgaaagaagagaccttgaagcaaccatccaagctaacagagcttccatcaataaagaaaaggctaagctggatgaactggaggctggtccgagtgcaactcaagcaaacattgatcggctgaataatcagaagatacagctcctagccgaactagagcaatgcaatgcacaacttgctcttgaacaagcaaagcttgccgatttgccaaaagccattgaagatcaaaaatccaagttaaagacttctatcaaacacttgactgagctgaccaaatctctgaagccgatctctagcaccgatgcaactgatgcccaaataatagatgaaatagatcaaattaggcaaagggcgatatcggccatccaaagatatgtatctggatga

SEQ ID NO: 27068 - DNA, 167 bp, Oryza sativa
  Clone ID: PAT_MRT4530_31799C.1
atgggtcggcatgacgagattcccgaaacggcccaagcacttggaccggccgaccggccaatcgcgccgccgtcgccgcgcggctcaggcatctactctgctgacgacggaatattcctcgcaaccatccaaaagcgcaagtccggcgacgtgcgctcacaacttcc

SEQ ID NO: 27069 - DNA, 2844 bp, Oryza sativa
  Clone ID: PAT_MRT4530_3179C.1
atgacacaacctgatcgtcagatcaatacacacccggcggattcaaatccccaaacaggagtctcgtgcgctaccccgttttattattgccgaatccatgtttcgacagttggcgcgccaggtaggggctgcgtcgagcttcctatcaatttcatgagtcgccgacttcgttttcgctttgggagttttcacttcctttccgtcgaccacttcttcaagctcctcttctctgacttgatccaaatcagtcaggggaaaactcaatctgatttttatcattatttatcatattgatttttaatctcagattaatctcttgctattttttgttgttgttcgcatataattacgcggcactattgaggcgattgatgctggtcatggactcgaggcgtctcagctttccggtcgatcggccgcgagtccactctgccggcttgtcttcgccaccgccattgctgataacaacaacgacttcaccgccggcctgcctccgtcaccgctgagtggtgcctccgcctacacggctggcctattatgccgccgctgttgggcgtctacgacttcaccgccggcctgcctccgtcaccgccgagtggtgcctccgcctacacggctggcctattatgccgccgctgttgggcgtctacgacttcaccgccggcctgcctccgtcgccgccgagtggtgcctccgcctacacggctggcctattatgccgtcgctgttgggcgtctacgacttcaccgccggcctgcctctgtcgctgccgactggtgtcctcgcctatatggttggttggtcacaccaccgttcatgggcgtccacgtcttcaccgccggcctgcctccgtcgccgccgagtggtgcctgcgcctacacggctggcctattatgccgccgctgttgggcgtctacgtcttcaccgccggcctgcctccgtcgccgccgagtggtgcctccgcctacacggctggcctattatgccgccgctgttgggcgtctacgacttcaccgccggcctgcctccgtcgccgccgagtggtgcctccgcctacacggctggcctattatgccgccgctgttgggcgtctacgacttcaccgccggcctgcctccgtcgccgccgactggtgtcctcgcctatacgattggttggtcacaccaccgttcatgggcgtccacgtcttcaccgctggcctgcctctgccgccactgactggtgtttttgcctatacggttggcggactccgccgctgttaatgggcttcatcatctacaccactggcttggttccactggcgccgactggtgtttttgtcaccattgatggactgcttcgttcccacatcggctacttttgctgtcaccgagggaatattacaaagctaagtcatcatttattttattctttatatgatattttgccttttcctttgcctcactacctcaactggttcgccgttgactagtgagtcgggggctatagatgttatatcgtattttttaaacaattttcataatatttatcttgattgcttgcgacataatctgagtacaaaagtacctatcaagtggatccagatccagatatgcataaaagggattcagggctttaagcttatctcttacgctccaggaatggatcagtcagaacaccaccaccggctcgcctcgaccgccgccgactggtgtttccgcctgcacggctggcctttatgccgccgttgttgggcgtctacgtcttcaccgaccggcttgccttcgccgctgccgactggtgtttccgcctgcacggctggcctttatgccgccgttgttgggcgtctacgtcttcaccgactggcttgcctatgccgccgccgactggtgttttcgcctgcacggctggcctttatgccgccgttgttgggcgtctacgtcttcaccgaccggccgcctcgtccgccgccgactggtgcttccgcctgcacggctggcctattatgctgccgttgttgggcgtctacgtcttcaccgaccggccgccttcgccgccgccgactggtgtttccgccttcacggctggcctttatgccgccgttgttgggcgtctacgtcttcaccgaccggccgcctcgccgccgccgactggtgtttccgcctgcacggctggcctattatgccgccgttgttgggcgtctacgtcttcaccgaccggccgcctcgtccgccgccgactggtgcttccgcctgcacggctggcctattatgccgccgctgttgggcgtctacatcttcaccgaccggccgccgcatccgccgctgactggtgtcaccgcctgcacggctggcctgttatgacgccaactgatgctatctttttcacggctggctacatcaccgtcaccgctaataggcatcatcttcaacacaagctgtctacgtctgctgctgactagtgccctcacctctacgtctggtttagacagctaccactactgatgaacatcctcgtcttccgtcgccgactggttatgctgtcgccgactggtgcttttatcttcacaactgcgcgtcttcactaccggtttgcttctgttgccgccgactcgtgttcacttcatcacggcaacacaactttgtcatcatggtggagcgacttcatctttattatcttcggtaccagcaaactctattgctgctacttcacaagttttgctacatcaccaaccatgacgttgttgtgaatctcgacatctcggcatgcgatgccgtgttattttactacaacaagaggctctccaatattcaggatttctacttggacatcttcaacacatatcttcaatcaagcaatgactac

SEQ ID NO: 27070 - DNA, 278 bp, Oryza sativa
  Clone ID: PAT_MRT4530_317C.1
tccactaccggaccagcgccctcgttgccgctcctcctctctccgcacctcctcacgtgtccccgcccgccgccgcactccaccgcagcctgccctcgccggcgccgtggtggttcccccttccgccggactagctcctaggactgctcccgaagaagccaaggttgttccccgccgccgccgccgcactccactacggcctacccccatcgccaccgaggtggtttcccccttcctccgaagcctcgcccgggactgcccccgacgacgccggggtg

SEQ ID NO: 27071 - DNA, 427 bp, Oryza sativa
  Clone ID: PAT_MRT4530_31800C.1
atggtcgaggtcttggaggtggaggaggcggtggcgtttacccccaccccatccaggagtggggactctagtgggagccacggccctcgtcaccgtcgccacgactccccaactccttcccgtcgcgaaccctcgcggagggaggattccacccgttcgagtggtttcgccctctctctgcccctgggcgaagggaggccaccacgggctcaggctcgagcccgtccccaattttggccttgacctcgggctcagggccgccttggcttccggccttggcttccgagagcgacctccctcgccccccgatcccgggtggcgctccgcatgcaccccagtctcggagccacccccgggagggacgtcaccaccatcgcccgcagcgagtcgagtagctaacacatatagaaatgcacaagtcattaca

SEQ ID NO: 27072 - DNA, 240 bp, Oryza sativa
  Clone ID: PAT_MRT4530_31801C.1
atgaaggagcagcaagacacattttgcagcgatggcaggacagaatgtcagatcatgttgaacatcctgcaagcaccgaaaggcaaggcaagaaccagggttcaggatgaactgattgactggctgaaaaatgcgaactcggatcaagtcaagcttcctgcagctcgtgaggctgccgcgcatgccagcaaaacgcaaactgttggggtgatccaagcacagaaggctctcactacctga

SEQ ID NO: 27073 - DNA, 379 bp, Oryza sativa
  unsure (1)..(379): unsure at all n locations
  Clone ID: PAT_MRT4530_31802C.1
cccacgcgtccgcccacgcggtccgnccacgcgtcccggttcttaatggtttggcagttttgcaaaacagctgtggaaaaatcctgatatctggttctaaaaagaaaatttggatgaaaataaacctatgtgcaaacggttgaatgtgaaagccttccttactccattttaccgggagctgacgcaattgaggcgtctatgttcctgcgaagttagaactgaagatgcatgtgtcaacactgtcgtgagatggtcacagtcggtgggtggctggatgcctgaggaaccgcaagctgcccgtgattgtctgtcaggcgctcgtctcatgtatttgtcatttttacctgatgactacgaaccactagagatatcagtttct

SEQ ID NO: 27074 - DNA, 461 bp, Oryza sativa
  Clone ID: PAT_MRT4530_31803C.1
gcacgaggccgcgacgagcagatctgatcgaagaggatagataggtagatagaaataatggcgggaggaggggtgtgggtgttcaggaacaacggggtgatggagctggaggagcaggcgacgagcaggaaggcgctggtgcatgtggcgacgagcgaggtgatccggtcgacggaggcgctggagcggaggctgggggcgctggggtgggagcgctactacgaggaccgcgccaccctgcagctccacaggcgcgacggcagcgccgacctcatctccatcccccgcgacttctcccgcttccgctccacccacatgtacgacgtcgtcgtcaagaaccgcgaccacttcaaggtcgtcgacctccacacctagatttatcacttattacatattaatgcaaaaaccatatatatatatatatatatatatatatatatatatatatatatatatatata

SEQ ID NO: 27075 - DNA, 537 bp, Oryza sativa
  Clone ID: PAT_MRT4530_31804C.1
atggccttctccgggcgctgtgaggtagaggtcgccaccggccagacgaggatatcccgtgttccggcggcgcaacggcgtgaggaagatgacaacaccgccgaagacggtcggcgagacgtttggcacggcgactccggcgagggaggcgtcatggttctgcgggcggcgttcgcgatgttgaggcagcactcaacgacggcgtgcgggcgccgtgcagcggtgctccggcattctcgtctcgtcgccatctcatgcatgcgtgaactgcaaaagaagaatcaacaagaaaatcacagaattctcacccatcgtacaaaagttgttgacgcctgcgatctgacgccgactcctatcgccggtgagttctccttccagccgccgagcagccgtcgacgtgcaccactcctgttcctgacggagtctcctcccgtcgagccgatcccactcggctgctccggcgaggctacgtcagtgagcgcagggagccctaacccacactacgaatccctcggcgccgccgcggccgagcgttag

SEQ ID NO: 27076 - DNA, 498 bp, Oryza sativa
  Clone ID: PAT_MRT4530_31805C.1
atggttcacgcatgcatgagatggcgacgagacgagaatgccggagcaccgctgcacggcgcccgcacgccgtcgttgagtctgccgagtcatgcaagagctgttcgccggaccggggagcaagccgccgtccgttgtcttgtccggacgaagggcctcgtcatgctacctcgccggaatacgctgcctcaacatcgcgaacgccgcccgcagaaccatgacgcctccctcgccggagtcgccgtgccaaacgtctcgccgaccgtcttcggcggtgttgtcatcttcctcacgccgttgcgccgccggaacacgggatatcctcgtctggccggtggcgacctctacctcacagcgccttcatcggtgcgcgccgtcatcctcctcacgcgcgctgtcgtcgagtccggacgtgccatcctccacctcgtcgaggtttgctgggttaacccggagaaggccatctccgtgccgtcttgctgtcatgccccgaactag

SEQ ID NO: 27077 - DNA, 327 bp, Oryza sativa
  Clone ID: PAT_MRT4530_31806C.1
aaagttggtatttttttttttttttttttttatttttttttcttcccccaaaagccggggaaaacctccccccggaaagaataattgccccccccgacacccaaatggggggggtccccagaaaaccccctggggggaacaccaagggttcccggggggggggagcatttcactcccgcgcccaatgggtccacatttttatgcaggacaggtaaggggaaaagggaggaccttcccctcaccaactgatagaaacatctgctgtcggggcgcagggggggggggtaagattctatgtccttctatgcaagggagacgccccccccc

SEQ ID NO: 27078 - DNA, 1032 bp, Oryza sativa
  Clone ID: PAT_MRT4530_31807C.1
atggatgtgctgagttccatcttctccaaagctgagggtgaaggtttgctgcagccgttagcgattccttttagtgtatccctatatgctgatgatgtggtcgcatttatacggccggttatggatgagattcgcactgccacgcaaattcttgccattttcgaggaagcgtctggtcttcaaacaaattttacaaaatgttcaacgcttccaatccagtgcaatgagacggatctccaaactctccatgatgaattgccatgtcaggtcgtttccttcccttgcacatatctaggattgcctctgtccatcttccacctgaagaaggaagacttgcagccactggttgataaaatcgcgcgccgtttgccttcttggatgtctcacttgatgacgcctattggccgggctaccatggtgaacactgtactgagctcaattcccgtctacctactcatggccatcaatgcaccgaagtgggttatcaaagggattgacaagatccgtcgcagctttctttgggctggaaaagcttctacaaatggcggcgtctgtcgggtcgcatgggctcgagtttgctcgcccaaggagtatggtggtttggggattcctgatctagagaggttgggaatcgccctgaggtcacgatggctctggcagcagagaacttcaccggaaaagccgtggcaagggcttagtattccggtctcacagaaggagcgcaatctagtatcgatttccatgggttcctccattcggtcgctagcgccggctgtctatgctgcagtccctgctcgtctccggaatcgtcgcacggtggccgaggcaatgactgacagaagatggatccaggacatcagttccgcgttgggtattcaagcgatcctagagtattcaagctttgggattgccttcgcagaccgtctccagagtcgtggtttgtcgcacccggatcgatgtgttctgtgtgatcaatgcgaagagacgattgataatctcttggtcgcatgcccggagtcgcagcaactatga

SEQ ID NO: 27079 - DNA, 338 bp, Oryza sativa
  Clone ID: PAT_MRT4530_31808C.1
aatatcttacttgttaaatacaataaatcccctgccaagggttcaacggagtccttttttctggccctggtccaaaaacatttaaggtgccctctccggacctcaagtcccaacgccaataaattaatttcttaagggtttgggcccaaaaggcaaaaaaaaaaaaccatggacccaaaacaaggccacggacaaaaaaaaggggcctaaacaaaaaggggcgcggaaaagccgcccggggtttcaagcccattcaaaaaaacaaccaaatggctcagaaaatacaagcctttctttttcctccatctataaacggcagcagcaccaactaaggccca

SEQ ID NO: 27080 - DNA, 277 bp, Oryza sativa
  Clone ID: PAT_MRT4530_31809C.1
agtaccggtaaaacagctcaaaacttaaattgcccagaaccaaaatatgattacaaatggcacgaatcctgtagaggattcgagaagtttagaagtgttttcagctttcgctgcctttatgaggttccacaaaattcgcagtattcggggcacttcgttgcgtcacaagtatcctgggttatttctttttccatgatgctgtcccaggaaagtgtcaaagaacgaacaccttcctgtcacctaatctgatgatcacttgctgattgcagttgaacat

SEQ ID NO: 27081 - DNA, 453 bp, Oryza sativa
  Clone ID: PAT_MRT4530_3180C.1
atgccgtcgccctccgtcgccgccgatcggggccgtcggttcggccgccgcgtgtgcgccacgtcggcgccacgtgtgcaccacatggtgcgccggtttccccggtccgtggacccggtccgccgtggaccgcccacctcggattccggctctcccgacgctccggtgtaccttgaaatagtcgccgaagttcctccagctgcagagcaaggcttcgtccgtgccgtcgaggatgcctgtggagtggtgttcccgctgcagtccaagggccggaggcaggcagtgaagttggccgatggcgaggcaaggaggttggccggcggtaggtctttggccatggaggctggtggctgcaccagggccaggggcaaaacagtccaaggacttgaaatctaccgtgaatttgagatatggagttatgctaaacaggacaataatacaagtataaaatag

SEQ ID NO: 27082 - DNA, 1047 bp, Oryza sativa
  Clone ID: PAT_MRT4530_31810C.1
atgcaagcttatgcaaacggcggcgtctgtcgggtcgcatgggctcgagtttgctcgcccaaggagtatggtggtttggggattcctgatctagagaggttgggaatcgccttgaggtcgcgatggctctggcagcagagaacttcaccggaaaagccgtggcaagggcttagtattctggtctcgcagaaggagcgcaatctagtatcgatttctatgggttcctccattcggttgctagcgccggctgtctatgctgcaatccctgcccatctccggaatcgacgcacggtggccgaggcaatgactaacagaagatggatccaggacatcagttcggcgttgggtattcaagcgatcctggagtatttcaagctttgggattgccttcggtcagtgcggctttccgaagagccggactctctatcttggcggtgggagacctcaggagaatactcttcccgctcggcttctcgtgttctcttttttggaagaactcgtctccagcacaagctaatttggcaatctttggcaccccctcgctgtcgctacttcctttggttggtactccctccgtttcacgatgaagtagctcttaaccgttgctggacagcagaccgtctccggagtcgtggtttgtcgcacccggatcgatgtgttttgtgtgatcaatgcgaagagacaattgatcatctcttggtcgcatgcccggagtcgtggcaactgtggtgggttgcgctcagagctatcgggcattcagagtgcttaccgctcaatgaacactctttcctctcatggttgtgcgactgtcgcaagaagatggtcaaggaacattgccggggtttcgacaccatcgtgacgttggttgcatggacgatctggaaggaaagaaacaatcgagtcttcaaccagaagagcagaacttgggcggaggttgcaagggttatgacgggtgaagcggagctgtggcggctagctagagctgcaatccccgttttggtagctcatgttagtggagaagggtcgcaaaatttagttggagattag

SEQ ID NO: 27083 - DNA, 510 bp, Oryza sativa
  Clone ID: PAT_MRT4530_31811C.1
atgggggataggaattcggtgctgttctgggaggattgttggctgcagggttcctccattcggtcgctggcgccagctatctatgcagccgtccctgctcgtctccggaatcatcgcacggtggccgagtgggagacctcaggagaatactcttcccgctcggcttatcgtgttctcttttttggaagaactcgtctccagcacaagccaatttggcaatctttggcgccccctcgctgtcgctatttcctttggttggtagctcttaaccgttactggacagcggaccgcctccggagccgtggtttgttgcacccggatggatgtgttctgtgtgatcaatgcgaagagacgattgatcatctcttggtcgcatgcccggagtcgcagcaactgtggtgggttgcgctcagagctattgggcattcggagtgcttaccgctcaatgaacactctttcttctcatggttgtgtgactgtcataagaagatggtcaaggaacatcgatga

SEQ ID NO: 27084 - DNA, 493 bp, Oryza sativa
  Clone ID: PAT_MRT4530_31812C.1
aaattccccctttttttttttttcccccgacccccggaaggccccaggaggttttgggggggcccgggggccccgggtgcccccccccccaacccccgggggagaaggggaacccctcccggggccggtttgggaaagggccccaaaatgatccccccccagggccccccacggaaacccggggccaaaccccccccccccaaaaagaaaagggaaaaaggaccccccggaaccccgggggggggaaacccccccccggggcggaaacccaaacctttaccgggccttttaattggggggggggaggggggggggggccaaagggggggggccgggtttaccggggggggggacccggccctaccaaggattccccggggaaaacccaaaatgggaaagaccccgaccccggggcccaccccgaaatttcggaccggaccccgggaggggaccaatttcccctttagggagggggtttaaaagcggggggtaa

SEQ ID NO: 27085 - DNA, 483 bp, Oryza sativa
  Clone ID: PAT_MRT4530_31813C.1
gcgccccctcgctgtcgctacttcctttggttggtcacccttaaccgttgctggatagcggaccgcctcccgagtcgtggtttgtcacacccggatcgatgtgttctttgtgatcaatgcgaagagacgattgatcatctcttggtcgaatgcccggaatcgcggcaactatggtgggttgcattcaaagctatcgggcattcggagtgcttaccgctcattaacactctttcttttcatggttgtgtgactgtcataagaagatggtcaaggaacatcgccggggtttcgacaccatcgcaacattggttgcatggacgatctggaaggaaagaaacaatcgagtcttcaaccagaagagcagaacttgggtggaggttgcaagggttatgacgggtgaagcggagctgtggcggctagcaagagctgcaatccctgttttggtagcccatgttaaacgtgcgcacagaaaacagaacggtc

SEQ ID NO: 27086 - DNA, 462 bp, Oryza sativa
  Clone ID: PAT_MRT4530_31814C.1
tcgtcgacgatctcccggcatgatggccgtcggcgcctgggtgcggcaacgcctggaggacgctggtggccccggaggaggagctcctcatcccgggcggtctcgtggttggtccggtgcggcggcgggggcggctacggccccttggtaggcgaacccagccggcgtgcccccccgtgcggctgcgccggcaagaccagcccaggtaggcgccgtacacccggtccgtgcacgtacggcaacacctgcttccggcccagctaagccactggctgcatttgcacaaagataattagcacgctgccagcacacatatctgcctggtgcctgctagctcgatttgtgataattgcactgcatgtacttaattaacttatttactccacatgcctgtattattatgtactccctctatttcaggtaacaggccgtttttatttctaaaaaaaaaaaaaaaaaaaa

SEQ ID NO: 27087 - DNA, 2040 bp, Oryza sativa
  Clone ID: PAT_MRT4530_31815C.1
atgcccagtctcgtcttgctcttgatgatgaatttcgtgatgatggtaattgccacctttcctgaattcacatacaacggattcagcggcgccaggaacctcctcctcgacggcgccgcttccgtgggagaagatgggatcctctccctgacgaatggcagcagcggcgcccagcagcaggggcgctgcttctatccctaccctattcccctgcagtacaccggtggtgagacccgctccttcacctccaccttcgtcttcgccgtcacatgctccggctccggcagctgcggggatgggatgacatttgtcatctcctcgaccgccgacttcccggccgcctcttcgccggcgtacctgggccttgccaacccgcacgatgcatcgtcaaaccctttcgtcgccatagagctcgacaccgtcgcagacccggacgcgacgaacggcaaccatgtcgccattgatttcaacagcctgacgtccaacttgtctagacctgcagggtacatctacgacgacgaaggagccgtcggcaactctagctttcaggcgctcaagctttccagcggcgacccgatgcaggcgtgggtgagctacgacgccggagcagcccggctcgacgtcacgcttgcgctcgtccccatgttcatgccctccgtgccgctactgtcttacaacgtcagcctctcgcgattgctgtcggcggccgacgattctcccatggcgaccaaagcatatttcggcttcaccgcttcgacgggtggtgatcccggtggcgctggcgccacccatcaagttcttggctggagctttagcaacggtggattgccactcgactactcgctgctgcccctgaaacgagctcatcagggtcaggattatagcagaagtagacgagccaacaggaagagcttcgtcacatggttgcctgcagctgcatcagtgctcgccgtgcttgcagccatggcagcgtgtcttgtgctccggtggtgctggaagaagaacgcccggagtcgggaaaactgggaagcagagctgggacctcgccgcttcgcttaccgagacctccgccgcgccaccgacgggttcaagcatctgctggggaagggtggctttggccgcgtctacggaggcgttctctccgcgtccggcatgcccatcgccgtcaagcgtgtctcgtctgagtccaggcatggtatgacgcaattcacggccgagatcatcatcctcggccgcctccgccaccgcaacctcgttcgcctcctcggctactgccgccacaaggaggagctgctgctggtctacgagcacatgcccaacggcagcctagataagtacttgcacgagcacacgtactccagcaactgcaggacgctgggttggcctcagaggcttcacgtcatcaagtgcgtcgcggcggggctgctctacctgcacgacgactgggagcaggtcatcgtccaccgcgacgtcaaggccagcaacgtgctcctcgacgccgacatgaacggccgcctgggcgacttcggcctcgcgcggctgcacgaccacggcgccgacgcgcacaccacccacgtcgccggcaccaggggctacctcgccccggagctcaccaggttcggcaaggccaccaaggccaccgacgtgttcgcgttcggcgccttcgtcctcgaggtggcgtgcgggcgccggccgatggggcacaacgcccgcggcgagctgctcgtgctcgtcgagtgggtgcgcgacgcgtgggcggcgggcggcggcggctccgtcgtcgacaccatggacccgaggctggaggagtactccggcgaggaggcggagctggtgctcaagctcgggctgctctgctcgcacccgctccccgccgcgaggcccggtatgcgcctcgtcatgcagtacctcgacggcgacgtgccgctgccggagttctcgccggattatctctgcatcaaagacgtcgaccaggtccaagttggagactactctccctcggtggtcaccacgatcacaggtctgtccggaggaagatga

SEQ ID NO: 27088 - DNA, 899 bp, Oryza sativa
  unsure (1)..(899): unsure at all n locations
  Clone ID: PAT_MRT4530_31816C.1
tttttttttttttttttttttttttttttttttttttttttttttttttttttttttttttttttttttttttttttttttttttttttttttttttttttttttttttttttttttttttttttttttttttttttttttttttttttttttttttggggaaaaaaaaaagaaagcccttttttaaaaaaaaacggagatatttttttttatcttgggactgatttttaaaaaacaaacgaggaaaaaccccaaaattttaagagggggcccgtctccttccagggggggttttaaaaaaaaaaaaccatgggggtggaaaattatttaaaaacgttccagcgaaaaaaaaaaaaaaaaaaaaccctttatataaaaaagccccttttttttggggggggccggctcccccaaaaaggtgttttttagaagaaaaaaaagataattaggagaatttttttttagggggaaaagaagggtggttctagaaaaaaaaaaattttttttttttaatttataaaaaaaaaaataattttttttatggaggaaaacctcaaaaaacaaaacaaaaaaattatttttttgtgnggggggggccccccttaaattatttatattgggggggcgcgccccccttgtagaaagaaatttataacaaggggctttaaaaataggggggggatattctttttaaacgaaaaacaccctttttgttttaattttccagaaaaatttataaaaaaaaagggggaagatgtgtgccccacaaaaaaaaaaaaaaaatggctatttttgaaccactttaattgaaaaaagattcttctcccgccaaatataaatggggggggggggggcccattatgaaagaggtgaaaaaaaaaatattttttgtgagggag

SEQ ID NO: 27089 - DNA, 189 bp, Oryza sativa
  Clone ID: PAT_MRT4530_31817C.1
atgcgtattaggtttgagagccagcaggatctcccttacaccctatctgttccatataccgtgatagaagaaccaagctgctgcaagggattttctctcaataaaggcctgatatgcctaccatgcgtgttaaacaagttccagaataagattacaaatcttgcggtgtcatcaaatggtgttgcttga

SEQ ID NO: 27090 - DNA, 441 bp, Oryza sativa
  Clone ID: PAT_MRT4530_31818C.1
atgcacgagatcgtccagtgtctcgttgcctactgcggcaacctgtctctcgccgactccaacctcttcgccaccgaagccacggcggcgccagatggcgccaaccatcaacgccggcgtcgcccatgcaagacaaccacactcgacctctacgatgccatcatcaaggcggagcaacaaagcctgtgcgccagcgtgcaagaagcctacgaccctgcggcgcaagcagcgttcctggcctcatgcaaggcgaggctgcaggaatcaccggtcgccatgtcgctgctggtgcaggagaacggagacaagactctatctctcgccggaggatgtcgggtacctcgccggcgtgttgctcgcagagcagaagccatctccacaagtagtccgcaagaagtccttctggctcgtcgtgcacggaaagatgcggtctatggctga

SEQ ID NO: 27091 - DNA, 378 bp, Oryza sativa
  Clone ID: PAT_MRT4530_31819C.1
cggacgcgtgggctaaaatataaagaactagtgtgccgcaataatcaagaacattgtcgcctccgatgtccttgatattgctgcatgcatggcctctgcgcagcgtgaaggtttatggcaaagctataggcaaaatcagctgcagttgtgtgtcctgctactgcaacatgtgataagccgatataattactgcctaaggcatcctaataccataagaactagccacttctttccttcagctgcgtgtgaactgaaaaacaaccaagtgtggcaacacttcgcgctggatgcgcaacaatctcactatccagacattaacattgttcaggccatagcgcatctgtctcaactccagcagtttggtgatctctactttca

SEQ ID NO: 27092 - DNA, 2184 bp, Oryza sativa
  Clone ID: PAT_MRT4530_3181C.1
atggccaatcttaaccataatccgcagcgcttcctaaggcagggtcacgctgtgaatgttgggggtgacttccgtatcccgcgggtcgacctcactatcctgcagcaccatgctcggcgccatgaagacttctatgtggccattgtagagccaatccccttggagcaggactgggatcatcatcgtgccctcattgccaactttgtacaagatgagctacactatgaggttcgtaatagcttccagcacccgtctacagtaggtttcttccagatgaagtctgctatgaatagggatgctctggtcctctctccgcccgagttctatgatggggttcactctgttacttttgttaatcatgaccaaggtcctaattggagggcggctaactaccatagagagggctggttcatgttcctagattttccgcttgatttcattgatcgccatcatgtgcacctggcagttacctcttttggtctgttaaccttttgggcggatgcagacagaatgttgggaagggtttttgttagggcaaagtacagggaccaggattttgtgctgagaaagattgttctctttgatcctcttggtgctgggggtgggggtgaatcttggacaatctcgattttcatgctacagggggattttattaatttcccccctgaagaggatctcccccctgccggtccgcagccgggccctgatgatgcagctgatgaggaccctaatgatggtaatgtttggcagtttggcaaccctaggaaccagggggctagaggcatattggacaagattgactttctctgtaaagcaaagggcatcatgcagactttgatccaggacaagcctatccctgctgctttgagaatggccaatcctttctcgacattggtcctgccaaggaagtacatctttgattcctctccctcagtgggccaacatgaacctgaatgggctttactgcctttcgagtctaattcccctcctctgccggaaagggtgattgaggatgttctaccaatcagtgtgaggcccccttctagcccaatcagtgtggcccctattgccctgcttccccccaaggcaccggacatggcaaccaaagaattgcagatggatccaagaatgggcattgggaagccaaggggcaggtctgctaaaaagcttaaggaattagcagtagaagagagaaacctttctttatttgaatggaatttcaaggaggtagttaaacatcgtatcttaaaacttctagaattctggaaaatatattggaaaaaatgttgtactaatagatggatgatgctgggagaagaaaacaccaagttctttcaatctattgccacaggaaagatcctgaataattcttacatcactcttgtgccaaaaaaaccttctccaaaaacagttaatgatttcagaccaatttccctaatgggtttgagtcttaagtttcttacaaaattgatggctgacagattgcaaggtgtcattctcaaagtggttagtgaaaaccaatatggattcattaagggaagggccattcaggattgtttagcatgggcttttgagtatatttatcaatgtcagcagtcaaaaagagaaataatcatcctcaagacaattgaaaaagcttttgatacaattgaacacacggccatcttatctgtaatgcaaagcatggggttcccacaaaaatggcttaattggatgcaaatggtattctcctcgacaagctctgtagttctgttgaatggggttcctggtatctcttttaattacaagagaggagttaggcagggagatcatttgtctccacttctttttgttctaggggctaaactcttacaaagaatagtaaacatggcttttaatcttgatttaatttcaaagccagtcaatgaaaatgatggaagtgggttccccaacatccaatttgctgatgacactttgatcctgttaaaagcttcaaaaaaagaaatcttctgcttcaaggcactactgaacatatttgctcaatcgattggcctaaaagttaattatgcaaaatccagtctttatcccctcaatctctctgaagaaaagccagatctaattgcaggatttctgggatgttctgttggaaaactgcctttcacatatgtgggactccctgggaactacagggcaaagagtgattga

SEQ ID NO: 27093 - DNA, 417 bp, Oryza sativa
  Clone ID: PAT_MRT4530_31820C.1
tttctgtcgccgctgatcggtcgctcgtgccgagggtgactactactgggggttacgtctggtcggttgctgcatcggtgatcattgcggccggtggattcatgtggatggcaaggtcgctgtatgggatgactcatgctgaggacgggtcgtcattactgctggaaaggatatcatcaaggctgtccatgcaactgacggcgacagctccagagcttttcaataactacgatggacttagatccatctggaagctctccacagctgtccctgttattgacactgcctacatatgccattacactggtcacagcattgacagtgagcttgacgaccgaacacatattaatccttattgtgcgaacattcctgatcctttgctccagcggttacattggtacaagcttttttgcatat

SEQ ID NO: 27094 - DNA, 1911 bp, Oryza sativa
  Clone ID: PAT_MRT4530_31821C.1
ctaggacggacggtcggcgtcagtggctcgcggcggcggcggtgcggaggtgaggcgagcgcggcggcggcggcgcggaggtgcgacgagcgcgccggaggcgagcaggccgaggagtacccccacgccgaccatgtcgataagccgcactacgccgagcaggaggacaaccaccacgccgcgcagggctaaatgagcagcgacggcgacgagctctagggcgagcgcggcggaggaggaggttagtctgcttttttggtgtatttttttttttttttatttttttttacacatgaaatcaacttgcccaacaatttatcagaaaatgcatagcagttcgcaacctcagttacacaaatagcagccaagagcgcctagaatacaaaagctgacccagaaattcgagagcagcacatcacaagagagtttgagagagggagagagccagcaaggtagagcatttatttagtaatcgttcacttgccattgccagcgttcaaaacatttcagctatctttgcacctacaggctcacggtcttcttgagggaattgcccttctcctccaagctcccaagcaggctgtcgaaggccttcttgaaggagtccacaccttccagctctagctgcttgccaacctcatcccaatctatacccagcttctccagggcactgtatacaccttcagcatccgaaacgtttgcgtcgattgtcctcgaaactgtgccgtggtcgatgaatgccagcagagcttggtcgggcatggtagaaacggtgtcaggtccgatgagaggatccacgtaaagagtgtctgggtatgcagggttcttcacactggtagatgcccacaacaacctctgcttcttggcacctttcttgaccaaagcctcccacctcgggccagagaatttcttctggtaaagctggttggctagctttgcctgtgctacagcagcctttcctctgagggcaagtgcctcaggtgttccgatcttctcgagcattttgtcaataagtgtgtcaactcggctgacaaagaaggacgctacactggtcactcgggataggtcactcaaaccagaggcctcaagtccatcaatgtaagcatcaatcacagcctcgtatcttgcaatcgagaagataagtgtgacgttgacactaatgccattagcaataacttccttgatagaaggaacacattctgcggtagcagggatctttatgtagacattgggcctgtcgaccactttgtgcaaccattttgcagcttcaacagttccctgggtatcatttgccagcctaggggagacctccacagaaacatacccatctgccccatcggtctggtcgtagataggctcaaaaagtttgcacgcatcttggatatccttgatgacaagttcccaataagcgctctctgcgtcctttccagctaatataagctgcttgaactggtcatcgtatgcattggaagtcgagatggctttctggaaaattgatgggttgctggtgactccacggacgccgctgccaataaggggcagcaaatcggtgacaggacggcagaggttgtcgtaccacggggactgaccctggagatcatagagatcatgaagggttgtcctcttcgttggggcaccatttccttccttggcagaagccatcgcaatgatggggctcctggcgcggccggcggcgatggagacggagaagcggcgcggggagggggcggaggcgaggaacgcggagcggacggacgccggcgggagcggcgcgggggccgccggcctcgggggggggaagttgggggcggcgccggtcatggcgggggccggggttggggggggagtgggttggtgcgggggggtgggcgtcggcctcggggcggcgagcttggagacggcgccggtcat

SEQ ID NO: 27095 - DNA, 412 bp, Oryza sativa
  unsure (1)..(412): unsure at all n locations
  Clone ID: PAT_MRT4530_31822C.1
ctgatggcgttctgccgcgcgcggctgccgcgatacatggcgccncggacggtggtggtggtggaggaggagcttccgaagacggcgacggggaaggtgcagaaggtggcgctgcgggagcgggccaaggccatgggcagcctccccgccgccgcctcttcctcctccaggcgcgcacccacagggacagctgggtntgggagaagcaagctntgaaccgagtttntcaatcgtaactgctgctgcgagaatgcgactacgatgttgcaaccagttaacgcaatattggcagtcgattctaatcagggtggatgtacatccatttattacatgacaaataaataattatgaaaaaatttgtcatatattattgacaagatcncctctaaaaaaaaaaaaaaaaaaaaaaaaa

SEQ ID NO: 27096 - DNA, 2443 bp, Oryza sativa
  Clone ID: PAT_MRT4530_31823C.1
cactaacctctactctcccccgtctcagttcccgatctgcagcggcggaggagagagagacaccgccgccgccgccgccgccctccggcgaactcggccgggaggcgcacggcgtgggacggacaccagcaccaccctccctctcttcctctccttcctcaccccccaacccccgacccccgacccccgacccccgtctcggttcatccgcgcggcctccattccatctcggcggctcgaatccaaccgaaggttgcaagattttcgggcattagctgtgcacccatttctcaattcagaagacctcaatctctggagggcagcagaaaactaaggtcttgctgctttattcaaacccgactgatagccatggctacaactctctccaatggtgtttcacagaatggccctcagaggaactatcaggtagttgttgctgctactcgcgacatgggcattggaaaggatggggtcttgccatggaagctccttggcgaccttaaatttttcaaggagcttacagtgactacagctgatcctgtgaagaaaaatgctgttataatggggaggaaaacatgggagagtttaccccttaaggctaggccattgcctggccgtttgaacatcatattgactaggtctggtagttttgagtttgcaacagtcgaaaatgttgttatctgtggaagcatgaactctgcattggaactactatcatcaactccatactgtttatccattgagaaagtttttgttatagggggtggacaagtactaagggaatctcttaatggaccttcatgtgaggcagtccatttaactgacattcagtcaagcattgagtgtgacacctttattcctccgattgacttatcggtgttccaaccatggtattcatctttgcctgtggtagagagcaacattaggcattcgtttgtgacctatgttcgggttagaaaaacaatggcagaaacacatgactcaaatggcaaggaatcagctaatgatggtatcaagagtgacaaatttgaaaccgagaatttctcttttctccctaagttgatatttgaccgccatgaggagtatcactatctcaatcttgttgaagatattataaggagtggtgctcagaaaaatgacagaacaggaacagggacattatcgaaatttggttgtcagatgcggttcaacttaaggaatagcttcccattgttgacaacaaagaaactagcccctcttaagctgtataataaggtattttggaggggtgttgttgaagaactcctgtggttcatcagtggctcgacaagtgcaaaggttttacaagagaaaggcattcatatttgggatggcaatgcttcgagagagtatcttgacagtgttggcttagcacatagggaagaaggtgatctaggtccagtttatggatttcaatggcgacactttggtgctgaatataccgacatgcatgctgactatactggtaaaggctttgatcagctaatggatgtgattgacaagatcaagaataatcctgacgataggcgaattatcctatctgcgtggaatccttcagatctcaagaagatggcccttcctccttgccacatgtttgcacaattttatgttgagagcggggagctatcgtgccagatgtatcaacgctctgctgatatgggacttggtgttccattcaacattgcatcatattctcttctgacatacatgattgctcatgtttgcggtatgttatcttctaccctgctatgtgactggataatcccaaagcaaaatgacgatcgaaaccaaaggtggaaaaccaaaaatgaaacgcctcaacatgcgaatcaacagtccacacccatggactgtctcaacttatatcacctcataacccgtttactgatcagcacattgagtacgaacaaagatactcaacaacaacagccaccacgatcagcactgacgcatcataccagcatcaatgatagcatacagacacactacctcccccaccctacctaccgcgcacagtcaagcattcttattgaacttcaatatactcttttctctcttttactcccgcaatcccttatatttagggacagagggagtacattctagtctcggtcgccgatctaaaccctacgaaaacaccggtcactggctcccccttttatttggacccagtgaatgatgttagagcttgtttcgagttgacaccatgttggaagaggccaaccgggcgttatgtgtagctcggcgatggatgtcatgtaccctgactgcgacacacattttggtcattttggtgaagcttcggagtgcctctggtgttgctggacgacacctactaattgtctccatctgagatttttctttccacatgtttggaactccagatgatgggtgatgatgctgacctgtggatttggagttgttc

SEQ ID NO: 27097 - DNA, 303 bp, Oryza sativa
  Clone ID: PAT_MRT4530_31824C.1
atggagggggcggccgaccctaccctgggcccgacccccttcaggagagtgccacgtgagtatagggggcagcctcctcatcccttaagtcttcataccctcgggcgaggagggggcagctgccactccaccctaggcccgaccctcatcgagggagtgccacgtgggtatagggggcagcctcctcccttaagtcttaataccctcgggcgaggagagggcagccgccactccaccctaggcccgaccctcctcgagggagtgccacgtgggtttggggcggcctcctccctccaaacatga

SEQ ID NO: 27098 - DNA, 1096 bp, Oryza sativa
  Clone ID: PAT_MRT4530_31825C.1
tcttgacagtgttggcttagcacatagggaagaaggtgatctaggtccagtttatggatttcaatggcgacactttggtgctgaatataccgacatgcatgctgactatactggtaaaggctttgatcagctaatggatgtgattgacaagatcaagaataatcctgacgataggcgaattatcctatctgcgtggaatccttcagatctcaagaagatggcccttcctccttgccacatgtttgcacaattttatgttgagagcggggagctatcgtgccagatgtatcaacgctctgctgatatgggacttggtgttccattcaacattgcatcatattctcttctgacatacatgattgctcatgtttgcggtctttctcctggagagtttgtccatgttattggtgatgcccatgtctatagaacacatgtgcgagctctggaggagcaaatccagaagctacctaaaccatttccagttttgaagattaaccctttgaagaaggatatagattctttcgtggcatcagacttcaagctggtcggttatgatcctcaccagaagattgaaatgaaaatggcaatataatttggtggctaagctgggacccccagtcactatgtgagcttggagaaacttaagcaggaaaaccttatgcgaacatcgcactagcttactttttttttttagtggtggtgctggatgttcatttggacctatgttctccatttatccgcgattgtacttttatctcggtcgccgatctaaaccctacgaaaacaccggtcactggctcccccttttatttggacccagtgaatgatgttagagcttgtttcgagttgacaccatgttggaagaggccaaccgggcgttatgtgtagctcggcgatggatgtcatgtaccctgactgcgacacacattttggtcattttggtgaagcttcggagtgcctctggtgttgctggacgacacctactaattgtctccatctgagatttttctttccacatgtttggaacaccagatgatgggtgatgatgctgacctgtggatttggagttgttcagcatatgttggcactttttctg

SEQ ID NO: 27099 - DNA, 223 bp, Oryza sativa
  Clone ID: PAT_MRT4530_31826C.1
caactatctacatgaaattattcactcggtaagagataatttacataatacgtgtcagccacaacttttattaccccaacaaaaataagagaaaaattaaagccgatggacatacatagcagcacaacaatatcagtacacggttcaatcaatctcgatcaattcggattcggattatacactcaaatcaaattgagtcctaattcctacaaaatagataaac

SEQ ID NO: 27100 - DNA, 677 bp, Oryza sativa
  Clone ID: PAT_MRT4530_31827C.1
tcgcccacgcgtccgtagaaaaccaccaggttttgcctttattgactttgatgagggtagggatgcataagatgcagttcgtgatttatatggcaagaatggatggagggttgagctgttaatcatagctggtattggttgtggtgcgagtattgctttgttttttttttcttctttattttgtaatctttctctttttttttctttttttttttttttttttttttactttctctgcttttttttttctttttttctctctctatttcttttttttccttttttctttcttgttccttttttttctttttctttttctttcctttttctcttttcttttttttttttatcttcttttcctttttattttcatttttcatttcttctctgtttttttttcttctccttcttttattttcttttttcgtttttattcgacctttttttcttctctttcacctttttttttttttttttatcattattctttttttttcattttttttctttttttcccttttttcttttattttttttttctctctttttctctttttatcttcttttctacattttttttttttacctctttttttctttattcttcctactattacgttttgtccttcttctttacttttatttttctttctcttactcttatattctttttctct

SEQ ID NO: 27101 - DNA, 365 bp, Oryza sativa
  Clone ID: PAT_MRT4530_31828C.1
tcgtttgaacatcctctactactaatcgtccgggagcatagcttaataccatctcctccttctccccccatggcgagtcaaggcggcggcgctcttctcctccccattcgagtgcttcaggcgcctttcctgccccgcggtgtctctccgctcccgttcgtcgtggttgcttgatctgaagttatgttgcctatgttattcttcaatttattttcttcttttcttgtttctttcccttattctttttcttattctatttcactttttttctcttttatttttttccattttttttctttttttttctttttcttcttctatttttttttctttctatcctcgtactttttctttttttttttttt

SEQ ID NO: 27102 - DNA, 177 bp, Oryza sativa
  Clone ID: PAT_MRT4530_31829C.1
atggagggacagccagagaacaagattggcatccgtgcactacgccggtgtttggtcttggacgccgccgtgcttatccgtgaattcttctatcacgacgaactccgcgtggagctcatcgccctccaccgcacggagctcatcacccttcacttcaccggcagacttgcccactga

SEQ ID NO: 27103 - DNA, 630 bp, Oryza sativa
  Clone ID: PAT_MRT4530_3182C.1
atgccggaggtggtagtggtgcagcaagccgacgagccggggaggaggaaggggcggccgaaaggacgccggcgacgaagaggatggagaggccggcgcggcgacggcgttccggcgaaaccgaggagcagccggggtggagggcgatgcggcgacgccgagggaggagacggcgacgtcggccgacgctcaggcgaggcggcagggatggctggagatggtggagtggtggcgacaccactagtcgtcggtgaggacgcgtctccggtgatttccccgcgaaacggaggcgaagccgggaaagaggaggcagctgcgacgccgggagaggtggcggcgcagccggagggtgcacgggcgaggcgggaggtgcggctggaggtggccagcacggaggaaagagaagggcgacggcgggaaggcagctccgggggtctccgcgggaaacggagggcaggccggggtggaggaggtggcggcgacgctggaggaggcgacggcgcggccggccggcgcacgggcaaggcggtaggggcggctggaggcgtccagcggcacgggagagagagggcgacggtggggaggtggctagggaccatgggagaccgcgggagggggctaaagcgatag

SEQ ID NO: 27104 - DNA, 488 bp, Oryza sativa
  Clone ID: PAT_MRT4530_31830C.1
ttgtcgacgagtggtacttgtggaccggatgagttgggtattgaggtacgttagaacgaggataagatcgtagtcgatgaattcgacgagatctcccggcgacttggctccgcgtactctggcttcgtgaactatggtgggtgtgtatgcaatgaaattcgatgccttgcacccctccctaggggtcccttttataccacggatcatcttgacccccaattaaggctccaagtaggattttggaaatcacttatctcgtagagatatttccgtaatttgcaacagattccaacgacgtatacggaaacaatccatatacgtgaaagtataccttatcggtatattccataagtcgtaggataggaggcatgttttatccgtaaccctgacacaaattatacgtataaatttaaaattatagaagtggtataaacaagatgattttttttttgccgggaacaagatgaaggttgttaactacttcctct

SEQ ID NO: 27105 - DNA, 685 bp, Oryza sativa
  unsure (1)..(685): unsure at all n locations
  Clone ID: PAT_MRT4530_31831C.1
tttttgggagatgtccccttgggggatggttngtttcctccagttaagagactgagagtactgaagacatctgccctatcttcctctcttataacttctggacggaaaagaccagcagctgagtgttgaccctcttttttcgatctgctttaacctttccantgncctgctgttcagaagatatgaccctctgagcttgtatcatcgtctctttctctcatgtcttgctgtgctgagcttgtaaccagccttagagaagacagtccgagattagggcaaaggatagctccatccaagagacgaaggccttccagtgagacattgcacacaataaccataagggtccaggttcttagtgagagatggtgaaacagaagggagccccagtagcatgttttggttcttgagccttgcacatttctagtggagtaacagcaaaataaccagaagctttgaagaactgcactttatgtagtcaggatacattatttcattctattcgattccaatttggccaattcatatgatcgacatttttgtcaggaaataaacagcaagcaatgtatagttacttaccaaagtgatacatgtttgagagattctttccatatgttgggttcaagatatagaaaaatattgttcttatgtggcttaaaaaaaaaaaaaaaaaaaaaaaaaaaaaaaa

SEQ ID NO: 27106 - DNA, 383 bp, Oryza sativa
  Clone ID: PAT_MRT4530_31832C.1
atccccgggctgaggatcatgtgttttgcaaggtctagagaaagcatatgctttagctatggtcagtgagtaaaagcataaatctcctacatttgtttactctagaaaagttctttccaggtaacatatcctatgcaagaatatactctatcttatccttttgtttgcactactctcttgatcccttttataccttgagattgtcattgggttatcacaaggtaacaaatatgttgctaaaatagtgtttttagtatatttgtaaaccttttggcatattctttttaattggatttaaggttttcttttactccaattcttcgcgtgctaaaaagcacttgctatcttttttcctttttgagcatgatcattaattaacacct

SEQ ID NO: 27107 - DNA, 794 bp, Oryza sativa
  Clone ID: PAT_MRT4530_31833C.1
attccccttctccatctcatctcactcccaacactctctctcctcgctgccgctgccgccgccgccgccgccgccgccgcacacacgcgccggaaatgaagaagatctttggagccaagaagagcaaggacccgcccccatccatccaggacgctaccgaacgaatcaacaagaggggggagagcgtggacgacaagatcaagaagctggacgaagagctcggccgttacaaggagcagatcaggaagacacgccctggaccctcccaggacgccattaaggcccgcgccatcaggcttctcaagcacaagcgcatgtacgaagaacagcgcaacatgctctacaaccagacctataatctcgaccaagtcgctttcgctgccgatggcctcaaagacgctcagcagaccatgaatgccatgaaggccgccaataaagagctcaagggaatgatgaagacagtcaagattgaggacatcgataatatgcaagatgaaatgactgacctgatggatgtgagcaacgaaatacaagaatcccttggtagaagctacaacatccctgacgatgttgatgaggaagaactaatgggagaactggatgctttggaggctgatatggagtttgagtcaagtgcagtcccatcgtatcttcaaccagacaaggaatccgatttcgatgcagagcttaatttgccagctgcacctaccgctcctgcagcagtcccagtaagcaggcagcaggtggatgagctaggattgccagcagtccctcgagcatcaatccgcagttag

SEQ ID NO: 27108 - DNA, 216 bp, Oryza sativa
  Clone ID: PAT_MRT4530_31834C.1
aatcccgagtaacagcagctgattgatgtatcaaacactgatcgactcacgaaacaagctttactacttatacactgtttccgacagtctcaactacacactcttcacacttgaccgcacggactctgatgttgttccttatctggcacaacagtctcgtcataatatatgtttaacttatcaatctccccgccgttatttataactaagttctat

SEQ ID NO: 27109 - DNA, 2463 bp, Oryza sativa
  Clone ID: PAT_MRT4530_31835C.1
atgtctcctggaaatctcttcgccgacttcacggtgctggtggtcgtggtgctcgcagttgccgcaccaccggtgtccgggcagcgctccgtctatcccagtgccaacctctcgacactgtgggtcaaaaacaaagtccttgacagcgtcccatatgaagatgggttggcaagccctgtaggagagaatgctacccttgagctgactggagatggcgacctggtcctccgtgaaaaagccaatggcagactcatctggtcgagcggcacttcagaccaatccgtgcgacgcatggagatcactgagcaaggcaaccttgtgctgtttggtcagaggaacatgacagtgtggcagtcatttgatcatcccaccgacgcattggtcccagggcagtcactgctgcagggcaagatgctcagagcaaatgcctcccccacaaattggactgagggtaagatatatataactgttctccgtgatggtgtacatggttatgttgaatccacaccaccacaactatactttaagcatgagctgagcagaaacatgagccagagagatccaacaaggattacctttacaaatggcagcctcagcatctttttgcagtccacacatccaggaaatccagatgaaagtatccaattccaagaagctaagtccacccagtacataaggttagagtctgatgggcacttgaggctgtttgagtggtctcgtggagaaccaagctggatcatggtgtctgatgtaatgaaggaattcctacatgttgatgattgtgctttcccaacagtgtgcggggagtacgggatatgcacaagtgggcaatgcatctgtccctttcagagtaattctagttcacgttacttccagctagttgacgagcggaagactaatcttggttgtgcaccagtgacaccagtatcttgtcaagaaatcaaaaatcatcagctcttgactcttactgatgtttcttactttgatatgagccaaatcatcatgaatgcaaaaaatagagatgactgcaagcaagcctgcttgaagaattgctcatgcaaagcagtagcgttcaggtatggtcagaatgattccaatggagaatgccggtcagtgacagaggtattctccttgcagtcaatacaacctgaaaaggttaattacaactcttcagcttatctaaaggtacagattactccctcttctgaccctacacaaaaaaaattgaagacaattttaggtgctacacttgcagcaattactactcttgttttagttgttattgttgctatatatgtacgaaggaggaggaagtatcaagaactagatgaagaattagaatttgatatattgcctggaatgccaacgcggttctcttttgaaaagttaagagaatgcaccgaagatttcagtaaaaagcttggcgaaggtggatttggatcggtcttcgaaggaaaaataggtgaagagagtgtagcggtgaaacgtctggaaggtgctagacagggaaagaaggagttcttggcagaggtcgagactattggcagcattgagcacatcaatcttgtcaggctaattggattttgcgcagagaaatcaaataggcttctggtatatgaatatatgccaagagggtcacttgataggtggatatattaccgccacaacaatgctcctcttgattggtgcacaaggtgtaagatcattatggatattgccaagggtttatgttatcttcatgaggaatgcaggcgaaaaattgctcatctggatatcaaaccacagaatattcttttagacgagaatttcaatgctaaattggctgactttggactttccaagctaatagacagggatcaaagcaaggtagtgacagtgatgagaggcacacctggatatctggcacctgaatggttaacatcgcagatcactgaaaaagttgatatatacagctttggagttgttctcatggaaataataagtggaaggaaaaatattgatctctcacagcccgaggagagtgttcagctcatcaacctattacgagaaaaggctcaaaacgatcagttgcttgatatgattgataagcacagtaatgacatggtgtcacaccaggaggaagtgattcaaatgatgaagcttgcaatgtggtgcttgcagaatgacagcagccggaggccttctatgtcaatggttgtcaaggtattggaagcatatgccaaacagctcatggcggcggtggcgctcgcgcatttcgtcgaacacctcccgtgcgggggccatggatggcctggcgcccgtcaaagccagagacgggacgaggcgcccgcaagcgagagcggagtggacgccatcgcggccacagcaggcggcgcgggtcttgataggttgttaaggccctttggggagcttctaacagctgcagcttcttctagaatcttcagttgccagaaactctcctaa

SEQ ID NO: 27110 - DNA, 335 bp, Oryza sativa
  Clone ID: PAT_MRT4530_31836C.1
ataatattaattgttttatggtattagtaaacaaaataactgttaactgccacaaagaactatattctctagtaaaaaaaggcgcaccactaaattatttatatatatatagagtaggattatatatagaaaaataataaaaaaaagcataagaagccactaaatattacaaaagggataaagggctcatcttacttccaaaggagggcaaagaagcaaacaactaaaaggggagagaagctcaaaacccaaaagaaaaaggaagctaaaaaaacaaaaaatagtttgaacacttcacccgtttatacaccataaaccaaaaaaagaactttgat

SEQ ID NO: 27111 - DNA, 458 bp, Oryza sativa
  Clone ID: PAT_MRT4530_31837C.1
atatcttgtgatgcacatgtttctgtttatgtgacagcaacaataccaactgcacaggatcttgaacctcaaacacaaaccattgccattttaaaggatgcatatcgatcgaactaaagacaggggggacaaacgattcctccttttacttataaaaaggccctgaaactccgaacatatgaagaacaagctgcaaggccaacctccttttttatagaaaaaggaaacgacacctgaactctaacccccattgaagcacaaaagcaggacttgagaaaacgactaaaagcattgcacacggacacagacacatgaccttctccactgtttataagacacaactttaattctagcaacaaaggcttagggcagaagtccacgttcgcaaactatgccaactgcacagatcacggcgacgaccattgcggctccagcacaccgaagttaccaggggacta

SEQ ID NO: 27112 - DNA, 324 bp, Oryza sativa
  Clone ID: PAT_MRT4530_31838C.1
aaagagcatggaggcggaggcggcaatggcgccggcggcggcgccagcggggggcgacaggggcggtgcgggtggagaaggtgagggggaggtcagcggtgaccaggtgcttcgccaagtacccgctcaagctcatcgccccctccaaggttccaccacctcctccatccattatatagattggcttcgcttgtttgctgcggggagccactgacctcacctcgtcggcgatcctctggcaggccgggcgcgcgtcctccgggcgccgcgtggctctacgccatcacctacggcggcgggatcgtctccggggacatcatctcc

SEQ ID NO: 27113 - DNA, 421 bp, Oryza sativa
  Clone ID: PAT_MRT4530_31839C.1
gtacgtataagacagcacctatgctatctgtccgtgcctatgcacgcaccgcagtcgcagccctcgtgttcactgtccataattctgtcgtctcggccctccacgtccgccgtgccatgccacgctcgccggtttcgcccttccgtcactggcctccctgccgccgcggatccgcgtttgcggcgtgcgtcgggtgcgccgtccatggcgctacccctccgatctctccggtcgccttcggccacgctcggccccgtcttccggtcacgttccgccatcgccagtctgatcgcgagtgaggtcgtcgcctccgcaacgtcctcattgtcgccatcgatctcattgccacggctgacaatctcctgtcgatgcgcgatcccacctcgtgtttcctcctccacatgtcttcttgttccaatga

SEQ ID NO: 27114 - DNA, 1122 bp, Oryza sativa
  Clone ID: PAT_MRT4530_3183C.1
atggcgcccacggcgccctctccggcgtccgtgcgcgccgcggcgtcgccccgctgctgctcccgctcccgcccctggtccagcgccggccgagtcgccgccctcccggcggacggccgcggcgacggcgcctccaccgccgcctcctacaaggagctcggtttgtactctttgaaaaagaggatcgaagatgccgttgtccgggtcgaaacgactgcatccagtgcactggagatggaggaagcgcggagaatcagacaggaagaggtgttgagggggcgcaacttgtgggacaatccagctaaatcgcacgagacactctctgctctggctgatgccatcagagtggtcgaccatctcaaagaccttcgctataaggctgaagaggctaagctgattagtcaactctcagagatggatgtcatcaatgttgagttgtttaagcaggcatacaagacctccgtagatgctactgagtttctagatcgttatcagatgtacaagcttcttaagggtccgtacgacaaggaaggcgcttgcatcatcgtcactgctggatcagatgccatagaaattgaatcagagtacatgtttggcacccttactggagaaaaaggaactcacagaatgatctatccttctgtcgataatgctggcacttatgaggcaacgtcagctagggtcgatataattcctctcttcttagacagaccagttaatcttcacttggacgagaatgatctggagatttctccttcccctagtgatcataagaggcgggatcacagaaattcagccattagggttcaacacattcgaactggagttactgctgaaagttcaggtgagcgaagctacttcgcaaacaagatgaaagctataagcaggctgaaagcaaagctacttgttatatccagagagttaagatcgtcgaacctgaagacgatcaagaggcagacggtggaggaattgtacagccgagagacaagaaggtacaaatttgggcctcagaaattggttcatgatctcaacacaggcctccagctgtcagaattgaactctgtcctggacggtgatattgatcctttcatcagaggtcgcattgtttcaagacttggatga

SEQ ID NO: 27115 - DNA, 699 bp, Oryza sativa
  Clone ID: PAT_MRT4530_31840C.1
atggcgtacagggccttggaggtgacgctcatctcggcgaggaatctgaagaaggtgaacttgatcactcccatggaggtgtacgccgtcgtctccgtctccggcaacccgctcgcccgccagtgcacgctccccgaccgccacggcggccgcaacccgacgtggaacgccacgctccacctcgccgtccccgccgccgcgccgggcgcgttcctccacgtcctcctccgcaccgagcgcgccctcggcgaccgcgacgtcggcgaggtgttcgtccccgtcgccgacctgcagctcgccgccgccgcgcactaccagtacctggtccacaaggtgcagagcaccaccgagcactgcggcgtgctcagcctgtcgtaccggctaggccccgtcgtcgtgccggcgccgccgctggcagcggacaccggcgctgtcccggcgtacctggtggtgccgtgctacgcgaacgcgccgccgtacgtctacctgtcgccggccaatcctgcccgcggcgaggccgcgtcggcgtcgccgtcgccgccgccgcggcgcaagaggagcggtgactttgggcagtggctcggcggcgccgtccggggaatgttgtccggcgaggccatgtcgccggacacggcggcctacgacgccgggtacaaaaccctgatcggggtggctgatggcagacgtgtcaagttctag

SEQ ID NO: 27116 - DNA, 669 bp, Oryza sativa
  Clone ID: PAT_MRT4530_31841C.1
atggccgccggaaatttctgggtccgttacgcgcggcagtttttcagacttcagtttaaactcactcatgaccattgggcttcacacgatgttctcgactatgtcctgtctctacgtcgtcgtcttcgtgttctacttcttcatcgcgtggtggtcttcgcgtcgtcgcaaaaacagcaacagcaccagctacctccacgagtccacctcggtcaccggggggcagccaccgccacgccgggtttccgcgaccgccactccaggggacccgttgatccacccaccaccgccgggagagcccctccacatccggtgcgccgctccggctgtcctcgccagtcgtcacggatctggcgcccaccaggctcgccactgcggccgctgcctctcggggtgttcgtcgtcatcccaggccgccggctggactcctactccctctgttttccacacgattggaaccgcctccgcaagcccgccgtacgcaccgaggtcgtcatcgaagcacgctccggttccagcacgccagggcacgcccggagcgaaagccgagccacgcgggtcttcttcatctacttcgagcatcgccgccgcgtctccaagcctgtcactgttgccgctctaggtcgatggtccagctacctctacatagctaccaatgtcgccgtctag

SEQ ID NO: 27117 - DNA, 317 bp, Oryza sativa
  unsure (1)..(317): unsure at all n locations
  Clone ID: PAT_MRT4530_31842C.1
ctcaccagtgagtatgagagnanngnnagaangagagaaagagaatgagaaggaagtaatgaaaaaggacaagccgcatcatctccacctggagccaccagtaggtgccgcacccggcgaccctctcatcagcgatagccctttcgatgtcaactataatattggatttcaccggccagagctcttgcatgaccatgaggacattgaccgtgtgtatagcacagacccctgccagtctgagagaagtgcgtgcaaggcatactccttaaccatacacgttgcggcgatcgtcaaaggctacatatagatgaatacca

SEQ ID NO: 27118 - DNA, 1161 bp, Oryza sativa
  Clone ID: PAT_MRT4530_31843C.1
atggctactatggatacaaccattgctcacatcatggatctacaagaagacatcaagatcaagttctctaaaagctggaattcgattcggccacctgctacattgctgacttcaaatggccgccaaatatgcatacgagctccgttttgggtccacgagtacttgatagaaagctctcggagttgtctttacaacggatccaacctcattgcgaaattccatcttagtgagccgcaattgaagaaacaaggaatagggttgatctgcaccggcaagatcaacaaccctctgagagatgctctaagccgtaaggtcgttcctccaactgtgaattgtttgataattgattttgaacggatgggtatctcctattgctacgccggagtggcgagtaccgagtcacgagtcattcttgagtctgtcataccacaacgagtgctagatgcccaacaacacgatcggttgctacaacaagttaagaaacgtgtaaaggaaggaaaaactagagatttcactttggagtcctcgagagttgagcgattccatgggcatttatgtgtcccacacattcgaatggcactctatgagacactttatggaagaaagtgtcgatccccattgtgttgggattccataggggagagagctgttttagaacccgattgggttcaacaaaccacagaacggatagcagaaatacgaaaacacatgctcgtagctcaaagtaggcagaagagctacgctgatgtcagaagacgggaattagagtttgaagtgggtgaccaagtacttctaaaggtatctcctaccaaaggtgttgtgagatttggaacgaaaggcaaactcagccgtaggtatattggtccattctcgatagtggaaatagctggaatcctagcgtatcgcctcgagttaccagagtccatgaaaggtgtacatgatgtgttccatatttccatgttgacaaaatatttgagagaccctgaacatcatattaccgtagagccggtgaccattgaccaagatttgacatttgagtcccgttcactaagaatattggaggaatctgagagggtgctgaggcacagaactatcaaatatgtcaaggttctttggacgcacaagaccgaacgagaagccacatgggaacttgagacatag

SEQ ID NO: 27119 - DNA, 323 bp, Oryza sativa
  unsure (1)..(323): unsure at all n locations
  Clone ID: PAT_MRT4530_31844C.1
acnacctnaccccttggatatngagtatgttgaatttgacaccgttgccaatctgaaagaacctcttattgcaaaggctgcagagaggctcctactgagccgtggagagctcagaacgcaatatgactgcttcaagaaaaatccaaatatttcaggttggcttgaagatgctgcactttttgctgctattgacagaagtattgatgcattatcctggtatgagtggcctgaacctctgaaaaaccgacatctcagggccttggaagacatatatcaaaaacagaaggatttcatagagatatttatgggctcaacaattctta

SEQ ID NO: 27120 - DNA, 369 bp, Oryza sativa
  Clone ID: PAT_MRT4530_31845C.1
acgccagctgagtgcttgacgcgtggcatcgataactatagctcgcttgatgggtttggatgggcctacctgaaatatgagcacaataagttcatttttagcaattcgatatttgaagtgattttgaatagatttaaacaagagacgtcggagtgggagtggttatcaagaattgtagaggggaagtacttctttcctcacggcggacccattttcacagcacctcagcccgaagaagttgaagtcatggcgtgcaaagaaggattggcattatcggctaaatggatcaatatgtctattatcctcgaaactgattgctcagaagtgattaagctcatggcccttgggcaaaataaggctttctttgtt

SEQ ID NO: 27121 - DNA, 234 bp, Oryza sativa
  unsure (1)..(234): unsure at all n locations
  Clone ID: PAT_MRT4530_31846C.1
tcggtcaaagcgacgcgagcgcgagagcgaggaggagagcccgagatctcggcggcggcggcggcggcgatggcgctctccgaccgctcccgcgagtcgctcctgccgagcttcctctactcgacggcgggggcgcggccgtacaccgcgggcggcggnggntccaacttaaaattccccgtggaggctgacctaggaggagtaacagtactcttaccaatctcacccagaatg

SEQ ID NO: 27122 - DNA, 518 bp, Oryza sativa
  Clone ID: PAT_MRT4530_31847C.1
ctccttccctcctctcctctccattccgccgccatgggcgccgccgccgccgccgccaccacccccaactccctcctcctccgccgcccggcggcacccaagccggcctccgcggcggcctcgccgctccgtctccccacgcgggcagccaggatctcctgcgcggccgtgaccacgcccgagcaggccttcttctaccacgtcgtcctggtcgacgaccgagcggcccgctaggtcgacgtgacaccgaatgcgttcaccctggactggctggtttggacgggaggctgaagaattaattcatggcggaaccaggtggaccgaatgggctctgattgccctgcgtctagagcagagatctctgacgttactgaccccaagattaaactcattgattttttcttatgcttatgtacgcatttattgaattcggaacagctcgcgcctatagaagaagccgtgccgggctctacaaattcttgaacgagtcctctcatcttttcctttttgtgcagctc

SEQ ID NO: 27123 - DNA, 369 bp, Oryza sativa
  Clone ID: PAT_MRT4530_31848C.1
attatgttaacagttgataatacactgattggtacatatcagaagaggacaacagcatcatattatattccacatattataaaagttttatcgagatcacataatttatttcacaggcgcaaatgcagacctttagactgtatgctacacttgcagtaattggacacattggctataaggtggaatgtaggtcaccttactacagggcaaactggcctaggacggcggccgggccggcgtcaggagggctcccctgctggccatcggattggctaaacgtgtggttaacatgccaacattgccgggccacttgctgaccagtgcgtactgcgaccggcctgtgaacaggtcctgtgcggaggggaacag

SEQ ID NO: 27124 - DNA, 147 bp, Oryza sativa
  Clone ID: PAT_MRT4530_31849C.1
gagggtatgcggagggcacagctggcggtggctttgctggcgtggcgggggacggtgcggatggggtggcaggtggcggtgctgagggacgaggtcagcgccggtgtggtggtcttcggcgatatctcgcgacttcttccggagtag

SEQ ID NO: 27125 - DNA, 2658 bp, Oryza sativa
  Clone ID: PAT_MRT4530_3184C.1
gcctcagtcttcgaatatactcataggggtaaggtttgcgtgcgtgcgttcataggggtgagtgtgccgcctatacggttggttggtcacaccaccgtacatgggcgtctatgtcttcaccaacaggccgccgctgttgggcgtctacgacttcaccgccggcctgcctccgtcgccgccgagtggtgcctccgcctacacggctggcctattatgccgccgctgttgggcgtctacgacttcaccgccggcctgcctccgtcgccgccgagtggtgcctccgcctacacggctggcctattatgccgccgctgttgggtgtctacgacttcaccgccggcctgcctccgtcgccgccgagtggtgcctccgcctacacggctggcctattatgccgccgctgttgggcgtctacgacttcaccgccggcctgcctccgtcgccgccgattggtgcctccgcctacacggctggcctattatgccgccgctgttgggcgtctacgacttcaccgccggcctgcctccgtcgccgccgagtggtgcctccgcctacacggctggcctattatgccgccgttgttggatgtctacatcttcaccgttggctcaccttcgttgccgtcgactggtgtttccgcttacacggctggcctattatgccgccgttagtgggcatcttcgctttcaccgtcgaccgccttcgtcgccgccgactggtgtcttcattgttattgatggacgactttgttcccacattggccacttctgccatcaccaaggggaatattacaaagctaagtcatcatttattttattctttcgggggctacagatgttatatcatattttttataatatttatcttgattgcttgcgacataatctgagtacaaaaatacctatcgagttatggagttctatcttcctatgctttccgtttggtttgccaatggatggttgcctttgggccgattcctagcacccgggggctcgttggatggaccgagtaacgcaaggtgctaagtattattcggaataaatcaaaagcatagagaaagataatttattttctgctcttaataattgcaaaagtacccgagtagtaaactccgatccgtgaaactttgttccattaatgacgaactcatgtcactcatatgcatgtttgggaagtgcttaggccgactcccagtgcttggtggctatgactagtcgggcagagtgtttaaacgtaatgagtcatctgctcggggaaatcaaaattgacaagaggagaaatacatatttataaatattttaaaatacttgattttttctcgagtattatatttatatcagatactactcatcctatatgtttgttctgcaggatccaaatccagatatgcataaaagggattcatggctttaagcttatctcttacgctccaggaatggatcagtcagaacatcaccaccggctcgcctcgaccgccgccgactggtgtttccgcctgcacggctggcctattatgccgccgttgttgggcgtctacgtcttcaccgaccggcttgccttcgccgccgccgactggtgtttccgcttgcacggctggcctttatgccgccgtagttgggcgtctacgtcttcaccgaccggcttgccttcgtcgccgccgactggtgtcctcgcctgcgcggctggcctattatgccgccgttgttgggcgcctacgtcttcaccgaccggcttgccttcgtcgccgccgaccgatgtcctcgcctgcacggctggcttttatgccgccgttgttgggcgtctacgtcttcaccgaccggcttgccttcgccgccgccgactggtgtttccgcctgcacggctggcctttatgccgccgttgttgggcgtctacgtcttcaccgaccggccgcctcgtccgccgccgactggtgcttccgcctgcacggctggcctattatgctgccgttgttgggcgtctacgtcttcaccggccggccgccgcatccgccgctgactggtgtcaccgcttgcacggatggcctgttataacgccaactgatgctatcttcttcacggctggctacatcgctgtcactactaataggcatcagtatcttcaacacaagctgcctacgtttgccatgactgccgactggtttcttcacttccatggctgcatgattctgccagtgttgattggccttaccatcttcatcgccggtcgtctcgtctgctgctaactagtgccctcgtctctacatctggtttatacagcctaccactactgatgaacatcatcgtcttccgtcgccgactagtgcttttattttcacaactgcgcgtcttcactaccagttcacttcatcacggcaacacaactttgtcatcatggtggagcgacttcatctttattatcttcggaaccagcaaactctattgctgctacttcacaagttttgctacatcaccaaccatgacgttgttgtgaatctcgacatctcggcatgcgatgccgtgttattttactacaacaagtggctctccaatattcaggatttctacttggacatcttcaacacatatcttcaatcaagcaatgactactcgacgacaagaagctataattctcgactctatgttcagttgtttcccaac

SEQ ID NO: 27126 - DNA, 465 bp, Oryza sativa
  Clone ID: PAT_MRT4530_31850C.1
atggcaggcgccatggccgcggcctctctctccgacgagctagagcccgcaaccgcccgaacccgcatccgatccatcccttccctcccccatggccgaagatgccacggtggccgctatgggcacgacctccctctccgacgtcctgaagtccgccaccacccgcacctgcatctggcgagcacgtcgtcatgggctggtgggtcaagactgggcgagagcaggagaagggctctttcgccttcctcgagctcaacgacggctcctgcgtctccaacctgcaggtcctcggcgacgccgctgtccatccgcttaggtcacttcgagctcctccgccaatcctccagcctaatctccagtagcggcgacacgccgttccccattcccctagccccctctctagcgccggcaacacgccaattcaccatcaccgtctccagcgccggcggcacgccattcccttaa

SEQ ID NO: 27127 - DNA, 515 bp, Oryza sativa
  Clone ID: PAT_MRT4530_31851C.1
agattggcagtgagaatcgtcagttcggtggcctctatgagagagggagaaagaaacttatggacggtgcccgggtggtgttccctgatgaagttgacccgccttcaatatcagggaaaattgttgagtgctcttggaataaagaagaggactgttggtcctgcatgcgcattcgaacagataaatcaactcctaatgatatcaatacttacagaaaggcacgtcttcctctcctctctcacacatgtactatatcaaattgttgaatactaccgtcagttgcactggttacaaggttaagagttttgtttgcttctgtagaactttacatttatgttctattcttctttcatgaaattgttctgtgatcaagaccagatcctgacagtgttcactgttgatgggctgtaactgcttgctttgaatgcaatatacctttatcttttacaactctgcgtgaagtttgcagctagggagtttatatgtgctgcaaatactgattcctccctattaat

SEQ ID NO: 27128 - DNA, 306 bp, Oryza sativa
  unsure (1)..(306): unsure at all n locations
  Clone ID: PAT_MRT4530_31852C.1
aaaagatcctgtnaaccctacgaaactaccgaagcgaagtanggcagtaatcggcggcggcggcggcggcggcggtggggagaagccatggagcggctgcagcggatcttcggcgcctccggcatggggcagccgccgtcggactcgccgctgctcgactcctccgagcaggtctacatctcctccctcgccctcctcaagatgctcaagcacgggagggccggcgtgccgatggaggtnatggggctgattcttggggagttcgtcgacgactacacggtcagggtngtcgacggtcttcgccat

SEQ ID NO: 27129 - DNA, 1092 bp, Oryza sativa
  Clone ID: PAT_MRT4530_31853C.1
atggcggccgcggccgtcgctggcgtcggaagggatggtagcttcgcctcccagaagcggccacgtcgggttagtgtgagaatggagagaagcagagtcggggacggttgctgctgctcctgctctggccgcggcggggtggcgtccactacggcggtccggccgtccacggggatggtggtgatcgtcggcgccacgggcacggggaagaccaagctttccatcgacgcggcgcaggagctcgccggcgaggtggtgaacgctgacaagattcagctgtacgacggcctcgacgtcaccacgaacaaggtgtcgctcgccgaccgccggggcgtcccgcaccacctcctcggcgcaatccgcgccgaggccggggagctgccgccgtcgtcgttccgctcgctcgccgccgccgccgcggccggcatcgcgtcgcgcgggcgcgtgccggtcgtggccggcgggtccaactcgctcatccacgcgctcctcgctgaccccatcgatgccgcgccgcgtgaccctttcgcggacgccgatgtcgggtaccggccggcgctccggttcccgtgctgcctcctctgggtcgacgtcgacgacgatgttctcgacgaatacctcgaccggcgcgtggacgacatggtcggcgaggggatggtcgaggagctcgaggaatacttcgcgacgacgtcggcctcggagcgggcctcgcacgccgggctgggcaaggccatcggcgtgccggagctcggcgactacttcgccgggcgcaagagcctcgacgcggcgatagacgagatcaaggccaacacgcgggtcctcgcggcccgccaggtcggcaagatccgacgcatggccgacgtttggggctggcccatccgccgcctcgacgccacggccaccatccgggcgcggctctccggcgccggccgcgccgccgaggccgccgcgtgggagcgcgacgtgcgcgggccaggcctcgccgcgatgcgtcagttcgtcggccgcgccgacttcaacgccgcagcggtcgaccagctagccgcgcggagtcggaggcaatgccttcgcggtggcatggtggccggctga

SEQ ID NO: 27130 - DNA, 143 bp, Oryza sativa
  Clone ID: PAT_MRT4530_31854C.1
gtttgcccaagcttagaaaaattcctagatccgccactggccacccttcacacgccggcccgccttccacgcacagtgacagggcgccatcgaggcttggccttgccgtcgccatcccggatggccgcacggtgctccggtga

SEQ ID NO: 27131 - DNA, 356 bp, Oryza sativa
  Clone ID: PAT_MRT4530_31855C.1
cggaaacaggaagaccagcgacggaaacattttgattagggacaacggagaagacgcagagcagaggaggaagaagaagcgcaggacaacaaggaaggcagcgggagacagaaccacaagaggcggggagggcaaaggcgcggaggcagagatacagggcgcagacaaccacccaagccgtctacacccgccgcaacgaagcactgagcaccgacgccgcagcgcagagaacagcgggcccggccgggcgcgaaccagactgcgacgcgagcccgagaacaccaagacacgaaagcgaagacgaggacgaaacgcatgaaccgcaagagggcgagagcccgaaccaagcgccggaa

SEQ ID NO: 27132 - DNA, 1401 bp, Oryza sativa
  Clone ID: PAT_MRT4530_31856C.1
tcaagctatcaaatgcgtccacaatctacttctctccgggcaggcccttgctaacacatcctccaggctccccaacgaatgtagcctttcttccagctttagtttcacagccggaacttgctttgatatccagagaatgtagagggctgcaagttcagattggacacatgcctcaccaaattcatcggcaggggcattcaggcagtctgacaggaggtatatctcctggactaggaagagatccaccagcgatgtgcctgcagcacactctgtttcctcactgctgagcaagaacttcatccaccattgtgagaggaacctacgatggatccacaaagactctctcccttggtagcgcctgataagtttctcattccacgtcagttcctccttccacagtaaatgaacttctgacttcctatcaagggaatcttctgtgtcctctacatggcaactgtctagtaatgcaagcagtagggactgttctcttgtcatgtagggaataagccagcagcgatgcctccacgcacggtagttcatctttgatttctctgctatctgtttcactagtacagattccatctctataagctccgacacatcctggttgtgctctgaaaccttcttgatcacccatctcctatggctccaggtgctttcgttttttggtgagtatgaaaggatcagagcacacaattgcagctcatccttgagcttagtgaaatcataattcactgatagcactatcttccttgagttccatgcggtgagcatgtcagggcaaagaatgagcagtgccttgctgtgcctcatcagatcagtttccatgaatgaaccatccttggctgctgctgaattggagtatgcatgctgtgcagcacggtagagcttaggtaagatttccgtggatatggcaagcttatggtctttgcaccacaggtatctctgaggacattcaggtacttcaaatgtccaattactagtctggctgtgttctagtgactggaactgtgtcgggtgcaagaaccccacttcatctcctccccgagctgcgccacttcctcttgcttggctgccaaagctgttgctgcttcttgttccattgctctcctcactcttctctgttcttgtgaaatctgtgctagtgcagccaaaggggcgcgtgtcctcaagagtgagcttcctcaatggcttctcagtgctttggggtatctgcgtcacaccagatccaccccagccagtggcaaaccgaggatctttaccctttgtgttctgacgcctcaagtgccaaatcaaagtttgagaattcactgggataagacttgacaagactaataattttgtctttgtcatatgggagtttattgggttcaaagctggcatacaaacaagcaacgccat

SEQ ID NO: 27133 - DNA, 1929 bp, Oryza sativa
  Clone ID: PAT_MRT4530_31857C.1
cgcgacgagattgcgggggcacgccgcacgggcaccacctcgccgcccgccaccaccgcttcctcacccgccgcagccaccgcctccacctcctcctcctccaccaccttcctagccctgctgccgcttctcgtactctccatccccgtagtcggcatccgtgcggcctcagcacacctcctccatctcccagatggccacatgactacacagtggcgctcagccacgtctcccctcccctacggcaagttcagagaagacggagctgggggtaggccggcaacgagtcgccatctcctccccacgagcccacgcctccccgcctcagccgccgcggcccaccactccggcttccacctcagattgcgaatcgcaagactttgatttggcacttgaggcgtcagaacacaaagggtaaagatcctcggtttgccactggctggggtggatctggtgtgacgcagataccccaaagcactgagaagccattgaggaagctcactcttgaggacacgcgcccctttggctgcaccagcacagatttcgcaacaacagagaagagcgaggtggggcaatggaacaagaagcagtgacagctttggtggccgatcaagaggaagtggcgcagctcggggagggtatcctccaccacttcgaggaaatcctccatcaagaccccctcatagatgaagtggggttcttgcacccaacatagttccagtcgctagaacacagccaaactggttattggacatctcaagcacctgaatgtcctcagagatacctgtggtgcaaagaccataagcttgccatatccacggagatcttacctaagctctaccgtgctgcacagcatgcatactccaattcagcagcagccaaggatggttcattcatggaaactgatctgatgaggcacagcaaggcactgctcattctttgccctgacatgctcaccgcatggaactcaaggaagatagtgctatcagtgaattatgatttcactaagctcaaggatgagctgcaattgtgtgctctgatcctttcatactcaccaaaaaacgaaagcacctggagccataggagatgggtgatcaagaaggtttcagagcacaaccaggatgtgtcggagcttatagagatggaatctgtactagtgaaacagatagcagagaaatcaaagatgaactaccgtgcgtggaggcatcgctgctggcttattccctacatgacaagagaacaggttctgaatgagttaaagaaatctacaagatggaacgagttacatgtcgctgacaactgttgttttcactaccgacggtccctactgcttgcattactagacagttgccatgtagaggacacagaagattccctttataggaagtcagaagttcatttactgtggaaggaggaactgacgtggaatgagaaacttatcaggcgctaccaagggagagagtgtgttggtgtagtctttgtggatccatcgtaggttcctctcacaatggtggatgaagttcttgctcagcagtgaggaaacagagtgtgctgcaggcacatcgctggtggatctcttcctagtccaggagatatacctcctgtcagactgcctgaatgcccctgccgatgaatttggtgaggcatgtgtccaatttgagcttgcagccctctacattctctggatatcaaagcaagttccggctgtgaaactaaagctggaagaaaggctacattcgttggggagcctggaggatgtgttagcaagggcctgcccggagagaagtagattgtggacgcatttgatagcttgactattgaaagcagaacaaggacatgcattgtagcaatatgtggtactcatatccaacggaaaacgacgcttggaatacaaccatttctgaggcgaaaaaaaaaaaaaaaaaaaaa

SEQ ID NO: 27134 - DNA, 2292 bp, Oryza sativa
  Clone ID: PAT_MRT4530_31858C.1
atggcgtcctcccaccaagaagaccgcgaggaggaggaggagcacagccatggcgacgacgagatcaccgccccgttcttgcggccatcgacgtcgagggggtcgccggagttggaggaggaggagaactcgccgatcgagcaggtggcgctgacggtgccggtgagcgacgagccggagacgccggtgctgacgttcaggatgtgggtgctggggacggcgtcgtgcgcggtgctctccttcctcaaccagttcttctggtaccgcaaggagccgctcaccatcaccgccatctcggcgcagatcgccgtcgtgccgctcggccgcctcatggcggcggcgctgccggagcgcgccttcttccgtgggcggccgtgggagttcacgctcaacccggggccgttcaatgtcaaggagcacgtgctcatcaccatcttcgccaactccggcgccggcacggtgtacgccatccacgtcatcaccgccgtccgcgtcttctacggcaagcacatctccttcttcgtctccctcctcgtcgtcctcaccacccaggttgtggatgatcaggtgcttggattcgggtgggcgggaatattccggcggtatctggtggagccggcggcgatgtggtggccgtccaacctcgtgcaggtctccctcttcagggcgcttcacgagaaggaagcaaggagcaaaggtgggctgacgcgcaaccagttcttccttgtggcattcatctgcagcttcgcatactacatcttcccaggctacctgttccagatgctcacctccctctcctggatctgctgggtcttcccccactctgtgcttgcacagcagctcggctcaggtctcagtggccttggcattggcgcgatcggtctcgactggtccaccgtctcctcctacctcgggagtcctcttgctagcccatggtttgccactgcaaatgttgctgctggcttcttcttcatcatgtacataatcacaccgattgcttactggttcaatttctacaaggcacaaaacttccccatattttctgatggtctcttcacctcaactggccaaaagtacaatatctcaagcattgttgattctcatttccatttcgacacaaaggcctacgagaagaatggtccactatacctcagcactttctttgctgtcacatatggcgttggttttgcatcccttaccgcaacaattgttcatgttctcctcttccacggaagtgaaatatggcaattaagtaaatcagctttccaagaaaaaaggatggacatacatacaaaacttatgaggagatataagcaggttcctgagtggtggtttgtctgcatcctcattgctaacattgccgtcaccatatttgcttgtgaatactacattgagcaactccagttgccctggtggggtgttttacttgcatgtgccattgccttcttcttcaccctcccaattgggataattacagcaacaacgaaccagactccaggcttgaacatcatcacagagtatatcatggggtacttgtaccctggacgaccggtagcaaatatgtgtttcaaggtatatggttacatcagcatgagccaggccctgacatttcttcaagattttaagttgggtcactacatgaagattccaccaaggaccatgtttatggctcaggtggtgggaactttgattgcagcatttgtgtacattggaacggcatggtggctgatggagacaattcccaacatctgtaacactgagctcctcccatcagatagcccttggacctgcccaggagatcatgtgttctatgatgcatcagtcatatggggtcttattagcccacgcagaatatttggggacttaggcacctactcggcggtaaactggttctttttgggtggagctattgcccctgtccttgtctggtttgcacacaaggcattcccaaaccagaactggatcttgctcataaacatgcctgtgctgattggtgccactggccagatgccgcctgccactgccgtcaactacacaacatggatacttgttggtttcttgtcaggttatgtggtctatagatatcgacgtgactggtgggagcggcacaattatctgctttcaggtgcattggatgctggtttggcattcatggctgttttgatttacttgtgcctaggcttggagaacatcagtttgaactggtggggcaatgacttggatggatgtcctctggcttcttgccccactgctaaaggtgtagttgttgacggatgcccagtctatacttga

SEQ ID NO: 27135 - DNA, 3644 bp, Oryza sativa
  Clone ID: PAT_MRT4530_31859C.1
atggaggccgtagcactctcggcgcaacacggacgccagcggtttgcggagggtacgattgtggaggagaaaagtggcatcaggcgagatgtaacactggctcggtccccctgctcagatttcacactgtggcggccggcggcggagcagagaaatgacagcattgttcatgcaaggtttgttgtttgtgttgagctcaagctccttagattcagtggcgaactccgtggagaattcctgctgagcctggtgaagcccacaagaaaatttgtagttcatcaacaaaccttcaattgtgctttttatggaggccaacaaaagggattacaggttattaagcggggctgcaaggaagaaaaaacaaaggcaactgccaatgacataagcaatcccaatggtaaattggcaatcctattggtcgatttcagggttggaaacctcgatcttgtgaacgagggtcggctctatgccggggtcatggatctggatggggatccacccctggaggatgagcatgaagtagtccactctcaacttccagagattgccacctctctggaagcgatgacaatcacaccaacaaaggagatcagagtgaggttgcaacagtctcctgaaacggcaacagttcaagccactcacaacctcctcatgaaggttggacattctggaggccagcagaggcagatccctttggaggctttgaagaaatcaatggcaaaagcttggcaaagagtttatcttgacatctctcaggtagaaagcaatctctttatggctcattttcgtaattatgaagatctgtcctgggtttggcaaaagcaaccgtggtcttttggcagtgatgtttttctgcttgaatgggtttctttggatgagaaaattaaacctatgtcagcttacactttcaagcatcttatggttaatgtgcgtatctatggcattcccccaagtcttagaaatgttaagaatgtcaagttggctgctgaaaacataggtcaaatctcaaaagctgaaccaatagatccagatagtttgctgaggaatcagaaatttgtttctattagaatcaggattgatgtggaaaaaccagttcctgatcatgttatcttggagcttcctgataaatctgaacttaaagcttttctgcattatgaaagaactcccataatatgtactttttgtggtctcctcttccataatgttcaggtctgtcctcaaagacaaagaattatcattcaatttccagatgcatccgaggaagatcttaaagataaactaggaaagtggatcactcagatcgattatatgccatcagaggcatttttggatatggaggaatccaacaaaaattcaattgtggaaaaattcaggcaacatttttcttctcctcaattcaagaacattcaagaacagcagaagcagcaagagagaggaagtgggaccagccagtcattaatgcccaagctagattggaaaaaagcgagtgagaaagctttgactttagctggttgcagcactgttcaagggcccccaagtcaagctgttcacactaccacagtaggcaaacaatgtgagaaaaaagacaaagaacctgatatacaaagtacaccagaagttggtaccgaagagatgttagtacatggaagtacagagaaaaagaagctggtttcaagtactatagaggatcatgtcagctgcaactcaaagaatgtcaatactgctggtaaggtgcatcagatggaaccagtccagtctgttccattggttcaccgagtttcacccagtgcaagtgcccatcagaacagtttagttaaccctgctattggcaccaacgaagtgcaacacagaagaagcacaagagctaccaagatttatgagacagcctcacaacatttaagtaagaagagagggtttcatgaagcagcccatgaatctaccaaacgccattgctccccaactacttcagctgcctcttccttctcgattgtgggaggtgaagaacatggagggattgaatcaagaagagctcctccaactaaccatcattcagcaccaatcagggttccaagtagaagaggtgggcagagagttacaagatgggatcagagaggaggttatggtggttgaatggtgacctccacttcttggagacctcttgctgctgctcattctgatgtctttcaaagagatgctccaagatcccctcaaagcattaacaatattcatagcaggaagcatacttggagtgctttggaggcgcatcatgatatctttgttgatcaagctgctggagatactcaagggggtggtgcaagtgatgctggagctagctccagactgatactggctatagatcctagggaatgcaatgtttcagagattcagcttgttgatcccagtgctggaaatgaaacaaaaagctctaaagttactgcttctgatctgatccatcattttcatgtagctaatagtcatgtggttcctgctgatcaagcttctggtggtttgtggctgatgtgggatgaagacatggatcttactatagttcagtctagtgttaattatattttagcttatggagtctataagaactctggtcctattttcaatcttctttgtatttatggtgatccctagtcacagggccactagtgccatgtggagtgaaatctcctcttttgttgtacatagtagtcacagaccgaccttttgtatgggagaccttaatgagatcatgcatgctaatgaaaagtatggtttggcccctcctaatcagaatcgtattaatatttttaagcatcatgtcaataatctggggcttatggatatgggttataatggtccagcttacacttggtccaataagcaacagggtaaggatctggttttggaaaggttggacagatgtcttgcaaatgtggaatggtgttttaattatccaaataccactgtttatcacttgcccatgttgtatggtgatcatgctcccatcattgccattctcaatccgaagaacaggaggcctaaaagatctttcatgtttgaaaattggtggctgcttgaaccagattttaatcagcatgctcattcagcctggctgcagtctgtaaactgtcattttcagagaagaacaacctttgttagcaatatccttaacttcttggagcaaaaagaagaaacctcttcagcagcaattggatcagttggaagaagatctgttgaaaattcagagttcccccgacagagaacatttgtactttgaggagaaaaggattgtgcaacagcatgatattaccatgcagaagctggccgattatcacaaacagagaaatgatgccactccttctaaggatcaaaatgacaatgatgtaatttttcctccccctgaaatcccttctgaaaatgacatcctggaaattctgaagcaaatgtaaagagatgcctccccagggccagatggtctcaatgttgcattttatagagctgcctggaattggataaaagacgatgttactaccatggtaggctccttctatgaaacagctcatcgagggaggtattcgtcaaggttgtcctttattgccttatctttttgtccttgcgattaatgaactttctgaccagcttgctaccaaatttca

SEQ ID NO: 27136 - DNA, 873 bp, Oryza sativa
  Clone ID: PAT_MRT4530_3185C.1
atgtctaccgggtccaccagattctccatgacttcgggcagcacggcatcaacatcttccggctcttctctgacctccgccgccagcaccggggagtccattggtgcaatcttcgtcaatccatatgccgccatcaacgtcaagactcacatcccaatcaccctggagctcaagcatcccaactttaccaagtggaaggccttcttcatctccatgtgcagcaaatttgatgccatcctcgacatcgccatggaacccgaacaaacatcccgcgatctatggctcgccatcgatgatctctttcatgtgaccaaggaaccccgcgtcatctatctcagtcatgagttccactcgatgacacagggcaacttgtcaattgctgactactgccataaggtgaagaccgccgtcggtgccctcctcgacttcagccaccccgttcctgagtctcagctcatcctcaacctacaaagtggcctcaacccacgtttctccagcaccgccgaccacatcgctggtgcccccatcctgtcgtccttcacttcggcgtgcaatacattgttgctcaaggaacttcgcattgctaatgaccacaagcgtcttgttgagtctgttgcctatgataagaccctgttcggccttcccattaagtgctttcaggcggataatggtaccgagtttgctaaccaagccaccaactcgttcttcgctagccacatcaccatgcttcgcctatcatgcccttacacctcccgacaaaacggaaaagccgaatgcatgcttcgcactatcaacaactctatttgcaccctccttatccaagcatacatgcctacatcctaccaggctgaagctctagccactgccacatag

SEQ ID NO: 27137 - DNA, 237 bp, Oryza sativa
  Clone ID: PAT_MRT4530_31860C.1
atggccatcgacgggggcttcggggtgggtttcaataacaccacttcaaactccggtagtagacgaaggaagcgtacaatcgatctatcaaactcttccgccctggatatctactttgcgtttgatgcgtcgaatagtgttggacttgaaaacttcgagaaaggcaaacgatttgccaagcttctagtgaacaagattatttttaattgtacatctagcattgaagtcactacataa

SEQ ID NO: 27138 - DNA, 264 bp, Oryza sativa
  Clone ID: PAT_MRT4530_31861C.1
agaccgcactcctgtcaccatgttggaacatcaacgctcacagcgtcgtgtatattactcaaggccgtgcccccgggttcaaggttgtcagacacacacatggaaagaccaggtgttcaaacgcgaggcttcgaccccggaccacctgcattattataccaccacacctatgcagtggtaaagaaggcacaaagacgatacggatgtcgcttacattgcattcaagaccaagcctaactctatggtacagccaccatggacagc

SEQ ID NO: 27139 - DNA, 855 bp, Oryza sativa
  Clone ID: PAT_MRT4530_31862C.1
ttaaagcaagaacgaacgaagccgctgttgaacgggggcctttgttgggcctgaggcccagaagagcagagcccactcaccaacacgagaaaccctaaaagctagacagagcgtcttctccatccatccatccatatatataaccagcgccgcctccctttctctccacatctcaaacccccgatccaatccgctcctctcttcctgaatcatgatctgtatggagtccccccctagcttctgaatccgctggctgctttgcttttgattttcttcttgctgtttgattttggtttggtttggtttgatttgggttggtggtttgctcgctggtacagcggcggcgagcgcggagtaaccacggcgctcggcgccccttcctgaggccagccacattagttttagccgatcatctgaccgagcgtctcctcgatttctccccacggattcgctcttgtcaagatctggcacatccacaatcctcttcttctccaccaccatcaagtcaaccgaaatcttactactagcttccgcccgcggatttgatttggatggatttttttttctttttatttgtttttggggtctgcttctcgttcatcgtttgagctggtgatgtggtgccaaggatgagcaaatcaatctgttcctcggtcacctcccatacccagcgagatggaaggaggattccggcagccattctttgcagctacgggtgagctcggatttgaatctctctctctcttccctgtgctcacccatgccccggctgccacattatttattaccaactcgcacacatgctttcctttcccatttcgaaataaatctcaatctttcacctcaaatttgatt

SEQ ID NO: 27140 - DNA, 331 bp, Oryza sativa
  Clone ID: PAT_MRT4530_31863C.1
gtagcaatctcccgcaccgcaacctccattggtgttcgagagatgattctactcgctagctggttgtcgaaccagtacgtagcaatctcccgcactgcatggttgagttacgactactacctggttcttgaccagaggtgtagcgattctcccattacctctacttcaacaaagttgatatcaggcctctgaggaacctaagggaacttcggctggggaagtctagagcggataaggtcttgtcggatcctttagagacgaaagaccatgaaaattctattcggcattatcaaagactccatgtctctatggttctacaccaagggggtgc

SEQ ID NO: 27141 - DNA, 1847 bp, Oryza sativa
  unsure (1)..(1847): unsure at all n locations
  Clone ID: PAT_MRT4530_31864C.1
gaacatttgatataagcccatctgtgtcaccatccgggaagaaagtagcggtggcttcgtaccaagggaagaaatgggacggtgagatcaagaacctcaacaccaacatctacgtgatgagcttggagaacccgtctcaggatcgcgagcgggtgatcgagaacggcggctggccgtcgtggggcagcgaggacgtgatcttcttccacaggaaggacggcgacggggagaacagctgctggggcgtgttccggcacaccctgagcaccggcgagaccgtccgggtgacgccggcggcgttcgactcggtgactccggcggccatcgacgagaccagggtggcggtggcggccatccgccagaagtccgagttcagtgatgtccgcgtcgaggcacagtacaggcacatcgaggtgttcgacatgagatcgccggagcagccgatgcagatcacccggaacaccaggccaaaggccgaccatttcaaccccttcgtgatggacggtggcaagttcattggttaccaccgttgcaaaagcgagctcctccagcacggcgatgatctcccgagaaaatttcacaagctgcaatccccacacgaagatgtcggtgtgttcagggtgtccggtgtgttcccaacattttccaaagatggttctcagcttgccttcgttgacaacgagttcaaatccgtgtggctggccgatagccaagggatgcgtgtcgtcttcaagactgatggcccagacagcgtcttctcaccgctgtggaattccaagaaggatatactctatgtgtgcatgggaccttctttcaaagccagtgaaacgttggagatccattccatacacaatgtatccactggtgaccggaagtcgcggcagctcacgttcggaggattcaacaacgccttcccttccaccaatccagacggaacgaaatttgttttccggtcgacaagagatggaggggcaaagtacagcaagaacctgtacataatggaggacgccgacgccggagaaggcgaggatggcagccagtcgacggtgacgcggatgaccgccggcgagtggacggacacgcactgccagtggtctccgaacgggaagtggatcgtgttctcgtcgaaccgggacaggccggcggacgcgccggagcgcgaccacggcctcgacccgggctacttcgccgtctacctgatggacgtggcgtcccggtcggtggtgagggtgatcaggagcgggtacgacgtcgccgggcacgtgaaccacccggtgttcagcccggacgggcggagcatcgcggtgacgtccgacctcgccgcggtgaccgccgacccgatgtcgctgccgctcttcctgcactccgtcaggccctacggcgacatcttcaccgtggacatcgacccggacgacatggcgaggaacgaggacgtggaggggttcgtccgcgtcacgcacagccggtacgagaactccacgccggcgtggaccgtgttctccacgcacgacccgcacgcgcagtggaacctcctcgtcgtggaggacgagcacgtcccgtcgtgcccgtacgcgcatccggacggaggcgagagttggcacatgaccggccagatttgcatccccaaaaggcactgttaattctctcgccattgcatactacgtttcttgtttagaagcgcttgttgtttgtntaacgtacgatactntattatctgaagacgttttcagcatttgcttggatgtacaaacgtgtgtatgaactgtttgcgatgtaaaattgtttatttgcttgagatgtacttttttctgtcagtaagactttngcataaatcgaaaaaaaaaaaa

SEQ ID NO: 27142 - DNA, 439 bp, Oryza sativa
  Clone ID: PAT_MRT4530_31865C.1
ttttgttgatcttttgactaacatgtgtatataaattcctcacatccatccctatatgcaagctagtaatcacagttattagcaactgtagcaaggatgtaacaattgacatgagctgagtcctcccacatgatgaggaggcatatatcgatcaaattgatgcaccacgtcatttgacttggcggctgatggatgatttatactttccccagagagggcgctcatatccacggccaaatggaagagaaatagctatccaaaaaatgtactggcgtactatagctggctagcaacgacaatgtggcttgtttgctcgccacccaggcagctcatcaaacccgaggagaaaccaagcaaccaaaacctgacgacatggggctcaattacgagcttccacgagcttaccatttgcttactactcatctcacagcttgccacc

SEQ ID NO: 27143 - DNA, 401 bp, Oryza sativa
  Clone ID: PAT_MRT4530_31866C.1
ttcttcaaacaggtatctaactaactacggggccggggcccatacaaacatggtgctgtaggacacaccactggctgtgtacctaggcataaagcacagcctcgctctggccgatagccgcggtttcacgaacttgatctatggatacctcaacgctggcgaatgattcaaatggatacggggataccctcgacaactaataaacaaaaaagataccctataagacccaccaccattaacggtggtggatcgcttgatacagatggagctcctgatagtatgcctgtggctatctggtctcgtgctgggtatgggggccccccgggagacgaggatccacatgtcgcgggggaaatacaatgacattttttagagccttttggaaatgcccatcttgggaa

SEQ ID NO: 27144 - DNA, 2169 bp, Oryza sativa
  Clone ID: PAT_MRT4530_31867C.1
tttttttttttttttgcataatgaaaagttaatttaacaatcatgaattagtatgtgttacaattttcctgcatgaatgaaggaacaagagaacaagtaagaatttctttttgtaatcataaaagtatcaactcatccttcaaacagttcatttaatttgttcctgatatcttcaagattgtcccctgatttctctaaatttggatgcttctccatgaattcacaataggctggcagaacatagtcacagacagtttgtctcagctcaatacggagctttggatcagggaccttccagtgcatctggagtctatactctgtttcgaaagaggaaataaattctttcaagggtgaaggttgcagaaaatttagtgaaatgctgatcttcttgtccaaacaagataccacagtagcccatgttgcttctatatatttcactttgtatcggttgatgttatgacagtacttttgaatccactcagttcctatcataagttttatgtcttcccgctcaaagtgctgaagaataaaatgctcattgttcataaggaacaggtactgcaatccttcaggtttgtacagcttagactgcttctgaagcatcgagccaagatcgaatatcaagccagaaattaggtggcttggcaacagcaagttgattccgtcagctgccaacagatggtcactatgatcatgacctagaatggtgttcagtgagctggtgttatgtgccaacaatgtgatatatctcatgaggtatgttgtaaccaagtgtacactgcctcctggtatgatcggtgaatcatgtgattgaatctggactttcagcttaccaagtatttcccttgcagagtcctccagcgtgtcaagaattctgtgaagctctctgacgaagaactctttctgttctcccaagagggcttgttggatcatcggagaagcttctgacaatgccttgtgcatctgcaacgtatggaagagcttctccggcgaaccattcaccttactgaccgtcgacgcaaatgtgagcaatcgattgataggcttggttgcagcatctgagaggccttcaagtgtcaggccactagaggcaccatcatgctgctcctggatttgcttcagtgagactgatacaatcttatggatgtactccagtagataaatccacttgattgtcttgtcctccatgtaggccttccagtacacctcctcaaggttcatcgaatcgactccgaggatcgagtcgataccgtgaatgaactggcggtttcttacttcctcattgcagcttacatcgaaattcaactggcgcaagtactgtgaatggccagacagtatgatctggctagctatctcatttaggccatggagggattcatgtctgataaggctgaagctgtcataatcgaacatgggcatcgcattttcgaagaattggtggtctagattttctggatcaagcccattgtcggtcatggtttgcgagtcggtgaggaaggaagaagatgtgacgctgctgcggtcatcatggtgccaaggaggaatgaagctgaaccaaggaaattggagggcgtgaaggagcggacgggagtatgcatacgtgatgcggaagcaaaaagtccttggcatgaaggaaaaggggggggccatgtggattaacatattcttacaagttatagcagcttctttcaccatggtgattgctagctttgtctttagggtgcttgttttctttgggacgtctggattccagtatattcctgctcccattatgggtctgctaatctttatatcaggaattgcccctgtaaggcgttgcgcattgttatcgttcgtaatatgtatagcctcagcttgaactttttcagatgtgcagatgtcgaggtataaataaaaaaatttttcagtaatcctcctctcttgctgccggtaagaagtgactatttcatccttgagaacaattgaaggcacctttgctctgaagattgggatcatggtggctggccggtgcacatacacgagcaccagcagcgcggtcttcttcctcccctccggcgccggggcgtggcgacgcagcgcccaccgcagcgtcggcagcgccttgttcctgttgccgctgaccgccacgtacaccaccttgccgccgccgccgtcttcttccatctccat

SEQ ID NO: 27145 - DNA, 235 bp, Oryza sativa
  Clone ID: PAT_MRT4530_31868C.1
acgcgtacacaaccaccatggtataatgctggctcatgagacatacatggaccagcaaccggattttgattatacttaaaaaagctttcaacatgtccatcaaaattcaccaggattatgagtgcattaaataaagattcacatcaaggcttaaacaaaataggggagcatgaatttattatacaccgatgagctccataaggataggtaatataaacatccacataaagggtat

SEQ ID NO: 27146 - DNA, 495 bp, Oryza sativa
  Clone ID: PAT_MRT4530_31869C.1
atgtctttggtgctctcgcggatgctgctcgacaggttcttccccggcgccggcggcgtcgtcgccggtgaagcccggccgccgatggactggagggagacgccggtggcgcacgtgttcgagatggacctccccgggctggccaaggaccaggtcgccgtcgaggtggtggacggccacatcctccgcgtccgcgccggcggcgaacacgaggacgccaataacgcagccaaggcggggaaggccagcggcgaggaggaggaggaaaacgacggcgtgaggtggcattgcagggagagggcggcggggaggcggcgcgcggccgtgacgcagttccggctgccggaggacgcggcggcggacgaggcgagcgcgcggatggcggacggggtgctcacggtgaccgtgccgaagcggaagggcaagaagcggcacgccggcaacggcaaggcggccggcgacgacaagccagtgtgctgccgcttctggccgtga

SEQ ID NO: 27147 - DNA, 2912 bp, Oryza sativa
  Clone ID: PAT_MRT4530_3186C.1
gttgggcgtctacgacttcaccgccggcctgcctccgtcgccgccgattggtgcctccgcctacacggctggcctattatgccgccgctgttgggcgtctacgacttcaccgccggcttgcctccgtcgccgccgattgccgccggcttgcctccgtcgccgccgattggtgcctccgcctacacggctggcctattatgccgccgctgttgggcgtctacgacttcaccgccggcttgcctccgtcgccgccgattggtgcctccgcctacacggctggcctattatgccgccgctgttgggcgtctacgacttcaccgccggcctacctccgtcgccgccgagtggtgcctccgcctacacggctagcctattatgctgctgctgttgggcgtctacgctttcaccgccggcctgcctccgtcgccgccgactggtgcctccgcctacacggctggcctattatgccgccgctgttgggcgtctacgacttcaccgccggcttgcctccgtcgccgccgattggtgcctccgcctacacggctggcctattatgccgccgctgttgggcgtctacgacttcaccgccggcctgcctccgtcgccgccgattggtgcctccgcctacacggctggcctattatgccgccgctgttgggcgtctacgacttcaccgccggcttgcctccgtcgccgccgattggtgcctccgcctacacggctggcctattatgccgccgctgttgggcgtctacgacttcaccgccggcctgcctccgtcgccgccgactggtgcctccgcctacacggctggcctattatgccgccgctgttgggcgtctacgacttcaccaccggcctgcctccgtcgccgccgactggtgtccccgcctatacggtcggttggtcacaccaccgttgatgggcatcgtcatcttcaccgccggcctgcctccatcgccgccgactggtgcctccgcctacacggctggcctattatgccgccgctgttgggcgtcttcgctttcacccaccggccgcctcgtccgccgccgactggtgttttcgcctgcacggttggcctattatgccgccgttgttgggcgtctacgtcttcaccgaccggcttgccttcgccgccgccgactggtgtttccgcctgcacggctggcctttatgccgccgttgttgggcgtctacgtcttcaccgaccggccgcctcgtccgccgccgactggtgcttccgcctgcacggctggcctattatgccgccgttgttgggcgtctacgtcttcaccgaccggccgcctcgtccgccgccgactggtgcttccgcctgcacggctggcctattatgccgccgttgttgggcgtctacgtcttcaccgaccggcttgccttcgccgccgccgactggtgtttccgcctgcacggctggcctttatgccgccgttgttgggcgtctacgtcttcaccgaccggccgcctcgtccgccgccgactggtgcttccgcctgcacggctggcctattatgccgccgttgttgggcgtctacgtcttcaccgaccggccgcctcgtccgccgccgactggtgtcaccgcctgcacggctggcctattatgccgccgttgttgggcgtctacgtcttcaccgaccggcttgccttcgccgccgccgactggtgtttccgcctgcacagctggcctattatgccgccgttgttggacgtctacgtcttcaccgaccggcttgccttcgccgccgccgactggtgtttccgcctgcacggctggcctattatgccaccgttgttgggcgtctacgtctttaccgaccggcttgccttcgccgccgccgactggtgtttccgcctgcacggctggcctattatgccaccgttgttgggcgtctacgtcttcaccgaccggccgcctcgtccgccgccgactggtgtcaccgcctgcacggctggcttattatgccgccgttgttgaccgtctacgtcttcaccgaccggccgcctcgaccgccgccgactggtgtttccgcctgcacggctggcctattatgccgccgttgttgggcgtctacatcttcaccgaccggccgcctcgtccgccgccgactggtgtttccgcctgcacggctggcctattatgccaccgttgatgggcgtctacgtcttcaccgaccggcctgcctccatcgccgccgactggtgtttccgtctgcacggctggcctattatgccgtcgttgttgggcgtctacgactccaccaccggcctgcctccatcgccgccgactggtgtttccgtctgcacggctggcctattatgccgtcgttgttgggcgtctacgactccaccaccggcctgcctccatcgccgccgactggtgtttccgtctgcacggctggcctattatgccgtcgttgttgggcgtctacgactccaccaccggcctgcctccatcgccgccgactgctaccactactgatggacatcatcatcttccgtcgccgactgattatgccgccgccgacttgtgcttttatcttcacaactgcgcgtcttcactaccggtttgcttctgttgccgccgacttgtgttcacttcattacggcaatacaactttgtcatcatggtggagcgacttcatctttattatcttcggcaccggcaaactctattgttgctacttcgcaagttttactacttcaccaaccacgacgtctttgtgaacctcgacatctcggcatgcaatgccatgttattttactacaacaagtggctctccaatattcaggatttctacttggacatcttcaacacatatcttcaatcaagcaatgactattcgacgacaagaagctacagttctcgactctatgttcagttgtttcccaac

SEQ ID NO: 27148 - DNA, 600 bp, Oryza sativa
  Clone ID: PAT_MRT4530_31870C.1
atggcggcaaggccatgccgctcggcggcggggcttggggcttcgtctacgcgtgttcgagaggctagccgagctaccacgcgagctggaggtggcgagagagagcgaggaaggggaacggaaggctatcgcgtcaggacgggcgctgggagatggccaacggcgcagggcgggctctccggcctcgggccagggaaggggaagaaggagggtgcccggagtcctcttcggctcctcgcgcgcacgccggcttcaccagcacgtgcggcggcgaagggaggcgaggtcggcagctgcaacgcggtaacaatggcgcggtttagacaaccaatcaggttgataaatggcacgcccctcccgaaggttcagcaaaggggtttagtgctgtttgctgcgcaaaaaactctgaaatcctgtgctactgctgtccaagctgaggcattggcatgtctagaaggattaagggcagccatggaatggattcatatgccaataatcttggaaactgacaacatagaggtgttcaaggctctgtcacaacaggagctgtcaagatcaccctgggcagcgacaataaaggaagcgagagggatgatgtag

SEQ ID NO: 27149 - DNA, 756 bp, Oryza sativa
  Clone ID: PAT_MRT4530_31871C.1
atggcggcgaggccatgccgggtggcagcggcggggcttggggcttcgtctacgcgtgttcgagaggctagccgagctaccacgcgagctggaggtggcgagagagagcgaggaaggggaacggaaggctaccgcgtcaggacgggcgctgggagatggccgacggcgcgagcgggctctccggcctcggaccggggaaggggaagaaggagggtgcctggagtcctcttcggctcctcgcgcgcaagcaggcttcaccagcacgcgcgatggcgaagggatgtgaggtcggcagctgcgaggcggcaacaatggcgcggcggcggtggaagagagatgccaagagagaatgagatggggaggctcggcctgggctttatagatggagaagaggcggtttgggagggggaactgacacagggcggtcaagggtgcaaggaccgcgagctggcggtcacgggcgcaagtgaccaggcggcgatagggcatggcggtggtggtcaggggaaaaagcagaaaagggagggaaaaaggggagctctgctccttgccgatttgggcgagcagaggaaggaggggagagcgcgtgagagaggcgctctgtctcggttttggaagcacgcggcgtggagtagtgggaccaggcggcagcgcgggcacgggcagcgaccaggcgactggccacgcgtctcaaatcaccacaaccccttcagaatcctacgtggcgctgatgtggcataccacacggacaaatag

SEQ ID NO: 27150 - DNA, 651 bp, Oryza sativa
  unsure (1)..(651): unsure at all n locations
  Clone ID: PAT_MRT4530_31872C.1
gaattgtaatacgactcactatagggcgaattgggtaccgggccccccctcgagttttttttttntttttttttttgtccanaacgcacaaaatcatatatagtactttatcaccagctattttgttttcaaaacatttcattattcattatttgttttgatcactatctcgttgcatgcaacacagcancggtgtgatcctactagctatgaanggcaagccactaacctaantactgggccggggggaaaaatgctggcatggcgggggntcancccggaantncaacggangtngccccnnttntngcnccncctngttcanctccnnccggtnctncccnggtngtnggtgntgnncccccntnatttacctcctcncgaanaacctcccncgttattncctggntccgaanaaaaaaccncccccgccgtttttttcccaaaaaaaaaaaaaaaaanacctttgtcccaggggtttgggntcctcccccttanccccccccacncggggaatngggggnaangggntnccgggcccttttntgnatttttgggaaattttttcccaggggaaaccccccggggggggaaatttggngaaaccccccngggngaaatttggttnaaancttngggcnttttngggng

SEQ ID NO: 27151 - DNA, 782 bp, Oryza sativa
  unsure (1)..(782): unsure at all n locations
  Clone ID: PAT_MRT4530_31873C.1
ncgagctcggnacccttttttnnntttttttttttttttttttttttttttttnttttntgtgtttntnngntttttntcgcnggggcncgaattncgctgaccaancgaggnggaaaancccncnagnaanaggacnacgngagnaaaaaaaaaaacgnaaacgaaaaancaagaccataaaangtncnngcactnnacngccagggancccaacngtanaatnganctttnaagccnnaagnttcancaggggngttcagnnngtnggacanatgcanggagnnagagnntnctcccanaggtcgtagttggggaaantgggctcgngaanccctggcccgggntcnggtgngtgntgtcgncntcttgntagnnanggggncccanncccntgtnnngggntngncnnnggtgnctttgtnnaaganggncccttgtgcgnntntttnngttnncttgacncntngtgtggnncccggngantgngnggnnttnttttttttntgtgtntgggtngtttnggttttnttgggnntnttannannctngntgntttgnttgtgggnnagntgtgnttncgngtntnntntntnnngnttatntnnngtggnnnnnatggnggnnntnggntganattngtttctnngngtttgngttttntnnngtgtnnnggnttngtcttgcntntnttntnttggnnggngtnngtnggnntgtnntntgngtnttgtnnntnannnnngtntggggtggnntnatgtgttnnnnggggcngntgta

SEQ ID NO: 27152 - DNA, 486 bp, Oryza sativa
  Clone ID: PAT_MRT4530_31874C.1
atggcggcggccatgcggcggatgcggttgacaccggcggccgtgcatgacgaggaagcccatgcgcagacacaagatatggcggtggtcgcctggtcgggccggacgtcgggcgtgcagataacacgggagacaagcgagacgaaggcggcggccgcgttggcggacgcagaagacgacggcggccgattcgagcgacggttgacgaggaagacggagacggccgaggcggacgacggtggccgtgcgacggacgcggaagacgggggcggcccagccggacgacagcagtggctgattcgggcgacggcggacgacggtggccgtgcggcggacgcggaagacgggtgcggccgattcaggcgacggctaacgaggaaggcggaggcggccgaggcagacgacggtggctgtgcaacggacgcggaagccggtggccgtgtggcggacgcggaagacggcggcggtcgatctggacgacggtga

SEQ ID NO: 27153 - DNA, 1510 bp, Oryza sativa
  unsure (1)..(1510): unsure at all n locations
  Clone ID: PAT_MRT4530_31875C.1
atggggtgtggtgcatcaatccctaagaaatgcaaggtaggagggaaggggaagaagcgccggagcgtcatacaggaggttgccatattcgtgccgacaattcgcattccggtggacagtgatgttgcccatccactcagaggactagtatccaaggagctcgtcgaccgcctctcaaagttcagagaccgcgttgtcgcgctctctgaagatatctattgcgcggatgtttcggatgtttcagagttacagcatgcccttgaggagtacttgccagttgttcttggtttaacaatgaaagaaagccgtcttgaatcatcggtggaattcagatggaggaccttggatgatgacgaagagtgttgtctttcaagtgcatggtatgaagttctgtcagtcatccacatgatggcgatgcttgcattgtttgaagccaacctgatacttattccgaagaacggtcaagttggaggtgaaaggaaggtatcagaagatgcaaagaaggatgtcgtcgattcgttgctcagagcatcaggatgtttagattactgcgtgcaccgtatacttgtacagatgccggcacaagtcaagaaaagttttcctagttattttcaggaaggtatgcttgaggccatttcaattcaagcattggctcagtgtgtagaaatacaacttggattggcttcagagtgtgagaaggcaactctgtcagtaaagaggaggctagcctgtgagctagtcagttatttctcacaggctcactattgcttatcgggatgcgacacgagcgactcgtttgggaagaagctcctgctgtttctgaagtggaaatgcatggaagccaaggcagtagcatactactaccatggccttgtgcttgacaaaggcaatgaagccagcagccacatcagtgcagtgtgctgcctctctgcagctgatgatctagttgcagatagcaagagggcttgtttgagcttctgcttggcaaaccccatcacaagggtacctcctccttggggtatcatgaggaatatgcacaagaaaatcccagattctgcgtgcaagagattccaaatgtatggatatctttttgaacaagacaataacagtgcacttcaatccttaccagatctaccagaatttgcgctgtcgctgagacccgaagggtatgaactgcctagcactgattcaatctgggataatgttgatagccagcctcagattcagagcctcaaggagcatctggatgatgaagacgaagtggaaacaaaatgatacttcagacatccaaaacgcttcatttcattgtgccatgaaaagtagcattagtactagcaaagacatcggaatgctcaattcagaagtgtttggattcagcatatggcattgagccaaaaagaaatcagaatatgtaccttctgtgtagttgaaagtatctatcactgattataaacagaatcaacaataataggaaagaagggtgtttcttaaaaaaaaaaanaaaaaaaaa

SEQ ID NO: 27154 - DNA, 270 bp, Oryza sativa
  Clone ID: PAT_MRT4530_31876C.1
atggcaccaagggaagaggacatagaggctgagttgaaaagggagatgatacagtacaataaagccatatgctgtaaagttgaggcttggaagcagcaagcagcagatggggtagaagagggcaaaaggaggaagctagagaacaagaaggaaacaaacaacaacagggaggggaggggccttttctctgccattctagttctgcagtttttttttttcagctcaggcctgcacattgatgaagctgtaaacagttgcagtgaggactga

SEQ ID NO: 27155 - DNA, 320 bp, Oryza sativa
  Clone ID: PAT_MRT4530_31877C.1
attgcagaatttgtgtttggaatgcttctgatgggagcttggtacattcattgattgggcataaagaatcaacatttgttcttgatgtgcatccattcaacccccgtatagctatgagtgctgggtatgatggaaagacaatcatatgggatatttgggaagggaagcctgtacagatatatgaaactgggcatttcaagttagttgatgggaagttctcaccggatgggacatcactgattctctccgatgaaattggacaaatattcattattggtacagggcagggagagtcgcagaaggatgcgaaatatgatcag

SEQ ID NO: 27156 - DNA, 255 bp, Oryza sativa
  Clone ID: PAT_MRT4530_31878C.1
atggcggctcagaggaggctgctcgccgaggcgcctccgtaccagccgcactcctcgcggcaccagcagggcgcactagggcaccatctgccgccggcttcatgggccgccggagcggaaggagtcgtaggattcgatgccccggtggagctcatcgtaggggtgcggcacgcggaggagggctacattggcgtgcgtgctgatgactcggggatcgacagtgaaccggtaggcctcgccgccggcgggagatga

SEQ ID NO: 27157 - DNA, 525 bp, Oryza sativa
  Clone ID: PAT_MRT4530_31879C.1
atggacgcaaagccaagctcatggactaacctctaccttcaacccaatcctggcactattatgtccctcagcttgttctcatcctctccgcatttgaacccaagcaccttgctccgcggtttgttagaaacagaggcacaattgtttgtgccagtaggcacacgatcaaaccatcgtagcccttatgagaacccccctctcccctcgaaccataatccaattggcggagcacagctaccacttttgctatcatcctccattgttaaccacaatggactaacctgttgtacgacatcgtcgaagtggatatttgggagaaaacacactcaaaatatagagcctcaagaatgggctagcctactcgtggatttcaggccaatagaggcaggatgttgctgccatgggctcgctggacaaggtggtagccaagttcatgacgccgacgatggattccatgctggagaaggtgcagaaggtaccaccatgctgctatctattgaggcggtgatgatctccatcacgtga

SEQ ID NO: 27158 - DNA, 498 bp, Oryza sativa
  Clone ID: PAT_MRT4530_3187C.1
gggcccaaaaaaaaattttgattgggggcagcgcacaaaccctgaccccttttgcaaataccacctaaaaccaatttccttttccaggcaacggaccccccaataccaagttcctttttttcattttaaagccccagatgaaccccggcccctcatcttggtcggtctcaagggcccccccccccccataacaccggggcccatccccctcgaccccaaaaaaagaacccccccatgaattcctacggaccctggggccttgcctacaaaacaaacccccctcggctcactggctacaacaggggggcgacgctcaacagcagcgccccgacaacggggcggacaaacaacaaaacgtccccgatcgcccggggcgccccggagtccccccccggggagttcgaccacggccccagcgatgggccgttcacaacaacgtcccgttcttcccaccactttcaggggaaacccaaaaccccgggctgggaacgggggggg

SEQ ID NO: 27159 - DNA, 595 bp, Oryza sativa
  Clone ID: PAT_MRT4530_31880C.1
ccggccgggacacataaatcggttctactcctcgtatctcttctgaatcataatcgcctacctatctcttcacttgtcgacataccaaactagcgaactttcctcttacacctgcctacctaccagatcaacttcgcaaccagttaaatactgtccactgcctatccgccctctctgagaatacgaattggcactgtaacatcgcctttatcaacccaagtcctgcttcaagaagtgtctcgtttttcatcatctcccactgcgagggcaagcgacctttgactgaacttgaagcaacaacatctcgtcttaagcatcccatacatatcctcaattaccgcactcgcaaatcgcctcgcgctaactacaccctctccatcctgcaaaatgacccgatctcacaaggccaacgaccgtgaccacaagggcatcgccgaggggactatgctccctacggaagctgtccctcgcttctttggtaagagcggctttgccgacgccgaccccaagaaggtgaagaaggacggttctggtcgaggcaactggggaactgtcaacgatgacatcggtgccgagcagttcacctttaccaata

SEQ ID NO: 27160 - DNA, 206 bp, Oryza sativa
  Clone ID: PAT_MRT4530_31881C.1
ggggggaacccttctactgaagttggcacaccccttttacacaaaccacactgtacagaggcgaaagaaaaaccaaaccctccttgcttgccaacacttttagttgaaactacttattcaacaaacaaaaaaaggcactttgccctttcttccaacatcagctttatcaacaaaacccatggtttatactaggctcattttttttc

SEQ ID NO: 27161 - DNA, 225 bp, Oryza sativa
  unsure (1)..(225): unsure at all n locations
  Clone ID: PAT_MRT4530_31882C.1
attaagnatatnaaaaacncctnnagatcactttctccganactcctgtctttgctgacccaatggcccggggttgcgtgcactgacactttctcagattgactctgatcttgatctggcgaggagcaccattgcatctaaactctccaataaaagccttcgactcaaatggactttctgaatcgagccgtttttcttacccatacaacattgagatcaagacct

SEQ ID NO: 27162 - DNA, 644 bp, Oryza sativa
  Clone ID: PAT_MRT4530_31883C.1
cgcacttgtttagtgtgaatgtgtggtagctttggtcgtgtttgcttcagtcttctgtggagcctccactttaaacaagctcctctcacaccatcatttttaggattaggacaaataacacactaatttttaggataaggagcacactatctattgcgatgaaaactagaccaagtcaagaattaagacacgagaaatagatttcttgttttttttttttgctgaaatcgttgtacttttagtaatttttttattaatgtgtagttggaacaagaaagttcagaatttgtgtgcttgaggcaagcggccagcaaataagaagaaatagatgaagcatcatcaaggctttcttttagctgtttaatatttgttgaaatgatcactgtagttagtaaaagaagttgcaactaattaatctccgcaacttttgacgaatgttgcaataattatggattcgggtgctacaacttaattagtgagcttaagcacatcaatgcggttacgtgttacgtccagatttccttagcagctatgagaacctacactcacatatgtcacacaccaaacgttccctaaagctaactaacaaagcttaaattctacagtagcaatggagtagctagcggcgaatcgtatcaagaaac

SEQ ID NO: 27163 - DNA, 287 bp, Oryza sativa
  Clone ID: PAT_MRT4530_31884C.1
gcttgcgatctccgatcctcaacgtctcgttgccgaagatgacgggcggcaacactggaagggctataccggagctgggatgtgtcgccaccgctgcacagaggggcatcatcttcgttatcgttgttgtttccgctccgacgggcgatggcggaagggggacgataggggaggcggggagaggagacgccggctcgtcagtggaaggggctggggcggcgtcggagtgtacagagagacggggaagagaaacggtgtgggccccgcggttggccagccgattttga

SEQ ID NO: 27164 - DNA, 1547 bp, Oryza sativa
  Clone ID: PAT_MRT4530_31885C.1
ctccacatgttttatatatgattagagaaatggaagtttttatttctgatatatacaaaaatggaacgaggaacatgtttcaaagtaacaaaccacccccaacacacacatgaagaccaattcgattcaatcagaagcagttcgaccatcacacataaccgagattttaatttaaagagattttacggcctagcagaacagtaaaatcactttaattttttttatcactccttaattcaatttaatttgagggctcgttttggcgccggcgccgctcgtcggagagctgctttgcgaacttggcaagctgatctctgttcgtgccttcgccggccacatccacgtaatggccggtctccaggtctactcgtgagacgttcttgtcgagaagcatttccccaatcttcaccaggttatccatgttttccttggagcagtcgtcgatcgagcccgcactgcccgtcaactgatcatactgtatgcgtaagtagttcttttcgcattgaagagcgctgaagagcacaccgaggtggatgtcaaccatgtcagcactagcagaagtaaacatgtcgatgatgggagctgagctacccttgatgagccagttgaagattccccacttggcagcgtccttggccttgtatttctgatcgtgattcgacccacagccgatggagatcaccatgaacttgccatactccgtcggcttcaccgggaagaagtcgcaatcttccttgtcctcgaggatgatatacttggacacttggctcattgcacacaatgtcgggttgttggcggcgaccccaccgtcgacgaggttgaactccctcgtctggccattgtcgtctttggtctcgaaatagtgcgccgggaagaaggtcggtgcggcggaggtgctgatcgaaatgtccgacaggagagcattcttcagtggcttgtacttcaactcgaatttggagaagatggttggttgcaggttagcgatgtcgaaggtgggaataaccacgttcgtcagcgccttgtccagcctcgtgtcgccgagcttctctcggagcagcgaatggaggtacttgccgtcgtactttgggccactcaccatcctcagcgtgccggcgatcttggacaagacccagttcttctgtgggaagatgctgggcgagtgttcgatgtagaatttggccaattcgtcggcggcgaacagtggccggttgttctcgtttggagcagtgagcatcgccgtcaggaggccaccggtgctcgtgccggcgacgacgtcgaagtagtcagcgatcctagcatccggaccatccagtttttggagctctttctcaaggaaggcgaggatggtggccgggatgatccctctgacgccgccgccgtcgatgctcaggacggtgaccatcttgaccttttcaggagagctcgaacttgcaccttccggtgagctagcacttgccatcgttttgctactttgatagctcaaaatcaggctaatattgatgcaacgacttatggaacgaaagaaagaacaatgcaagattggccgg

SEQ ID NO: 27165 - DNA, 207 bp, Oryza sativa
  Clone ID: PAT_MRT4530_31886C.1
atggaggatgaattcagcaaaatacagaaggaggggtatggaaaggatcgggcaaatttcaagagaatgagagggatcgagatttcaatgcacgtgggaacgaagaacattgcctggcctgctattttccgtgttcactaccatctgaggactattgagttccaaattttcaatgctggaaagaacatgagcttccgcgaggcctga

SEQ ID NO: 27166 - DNA, 1179 bp, Oryza sativa
  Clone ID: PAT_MRT4530_31887C.1
atggagttaccgccgccgccgccgccgccgccggcagccggccgcgactggtccgacctgctggccgacatggtagacaccgtcctctgcaagctcgagctccccgatttcatccgcaccgccgccgtctgcacgtgctggcgcgcccccgccctcgacctccgccgccgtggcgtctactcgttccctcgaaccccctgcctcctgtacatccccgccgccgccgccgccaatggcggcagcagcacgcgctccgccgagctctactgcctcgccgacgagaggccctacacggtgaccctcccggacccgccgatcgcggagcgcagcatcgtggggtcgtcgcacgggtggctggtcaccgccgacgcccgctcggagctgcacctcctgaacccggccacccgcgagcagatcgagctgccgcccatcgccacgctggagcaggtgaggcccatcctcgaagccgccggcgacggcggcgacctccgcgggtacgaagtctccttctacgacggcgacatgagggagtaccgagctcccggcatctaccggcccgacgagctctgcgacctgctcaacatcaaggccatcctgtcgtgcgacccgtcgtcgtcgtcgtcacgccgccgcggcggcggcggcggcgaaggaggagaagatggatgcggcggctgcatcgtgctgctcatctaccatgtctaccagcagccgtcgttcgcgagggtcggggacgacaagcagtggcactggatcaccacctcctcctactactggtctccctactccgacatcgcctaccgcgacggcgccttctacgccatgaacctcctaggcgggatccaccgctacgacatccaccattcccgcgccacgcgcacggtggttctcaccgacacgctggggtacacgctgcaccacgcgtacatggcctggacgccgtcgtcgggggacgtctggaggttgacgcatttgccagaagacgaggaggaagaactgcgtacggttggattccatgtatacaaggttgacttcgacagccaagatgtcgtgcctatcgattccttggaagatgaggcattgttcattgggcataatggcaccctttgtctttccaccaaggattaccctgccctgctgccaaatcacgtctattttaccgacgatgatgagtactag

SEQ ID NO: 27167 - DNA, 243 bp, Oryza sativa
  Clone ID: PAT_MRT4530_31888C.1
tttacttgccattctatctgtgcagaatcatccttttggttccataagaagtttatcagcgtcttgaattccccaaaaataaaatttggggaacctcattatactttatccttggtttattccggctggttgaacaaacttctatgtaaatgctggttggccttgactttccttcgatattatagtatatattctactgtactactgtttgttatatgttatttatccttgacggacttatta

SEQ ID NO: 27168 - DNA, 198 bp, Oryza sativa
  Clone ID: PAT_MRT4530_31889C.1
actctcctgtaggtagaaataaaggcccaatttaagtgattcttggacgaagtcaaaaaccctggaatcctgtgttagtgggctattttctttgccttattgggagtccaagtttactaccccacatatcttgatgtcaatgcatatagagaagaatgttttataatatatatggaacacttctaagactggaagcca

SEQ ID NO: 27169 - DNA, 468 bp, Oryza sativa
  Clone ID: PAT_MRT4530_3188C.1
atgagcaaaaacgcaaccggcacggctgcggctgtggcaaagcggcaagcagctgcagctaagcggctcagccggcacacgcgcagcagcggcacggcaagcagcagctacgacacagcgatgacgacacacacggagacgatgatgacgttagggccaaacaagattagattagatcggattaaggccctagggaaaacctcacaggtgaacggcaaaggagcggcggttgccggcgaaccacggcacaaacgcaaacggagggcaccgggagcgagaggggatcaaagtgacccttaccaccacttatgcgacgacagacggcgagggagatggcaggcgacgagctccaaaggcggcgaccttgggttgacgatggcgacggcttttcggcgacgagaggcaacaaccgagggcggacggtcttcacctcgctcctgcgatcccgagggtggtgacggtgaatga

SEQ ID NO: 27170 - DNA, 318 bp, Oryza sativa
  Clone ID: PAT_MRT4530_31890C.1
atggtcgccggcctcctcggcgacgccaccggcctgtggggcgacctcacctcactactggcggcgttcgcgctgctgctggcgctgctcctcgcgctgtccaggggagcggccgcaggggtggtcgaggaggtgctgctcacctgggagctcggggtcactggcggcgatgacgacggcttcgggtttttcttctccccgcgactgctctgcgactcttctccccgcgactgctctgcgactctgccgctatcgcggctaaccagctccaccaccacctgctgccgagggagaagaggaatagagaaggagatatga

SEQ ID NO: 27171 - DNA, 1999 bp, Oryza sativa
  Clone ID: PAT_MRT4530_31891C.1
atggcttccgacggcgacggcgccgcggcggtggcggcgctggggatttccggcggcggggtcgactacttggttttttttttttttttggaaaagaatcaaatcttgatgcaccatgaagcccatcagtgatacatactcctaccaagtagggccaaaggccagcagggttagatctaccacaattcctaagctactacatctgccatccgaatgtgcatatcatccacttcctttcaatttgcattcaccattccaaccaatcgacacaacaacagcagcagcaaagttatgagaattgagagactctatacacacagctccccattcacatggctcaaaatcagaacaaatggtggttaagaaaaaagcaggaggttagtcgaagctcgatgaccggctccagtacccgtcagctgaagtgtccatggtctgttcagtgctgcagtgcgagagggtgtcatcctccacgcccagcaacgcgaggttcaggtgtgactgcatgtttgagtcaggagccgccacagcctcctcgttccgatccgtcgaagctcgcggtgacctgggttcttgcccagtggatcgtctcgtcgtctccttcaagcagtttcaacatctgtgacatttcgggtcgggaaatgagaagatgtccttgtgcacagcgaaatctgcgaagcgtcatcctctccatttaatcacagtcaataatcaatttcccatgaatagaacaaccagctggtttaagttcccccacttgatagtaatgtcttggcccatccaactaagcttccgcgactcctagtacaaccaggttctaatgcgacttctgcctgaaatgatatccagaattaaaattcacaaagcgatagagcaatcaattcttctctatcaaaatttactcatgtaaatagtcgaacaatggtcgtcaatgacgagtacaatcggcacgattcgctcctccgtgcaaccggacatcctgatctaaatgcatctccagaaacacaattctcaatacacagtggaaatatataccagttgatattggagattggaacatatttggaggagaactagcaaaaactcgtggtgatgccagttcttgtactattgatcatggaagttgttcttagttactatgcgacaaggtatactgattctaccaagacagcatttaaatcgtccactcgtcttgagtgcatgatgcaggactatccaaaaacactacctccctctgcaaaagttggatttacggtgatggatgcgtggcttacttatgctcctgtaaagaataatcctgaagattctgctaaagttccaaaaggtaatccttaccatagtgctacttcaggagagatggcaatttacagggcaaacagccttattttaagaaaggctggtgcacagatagctgaccctgtaattgatactttcaatggccaagaggtagaggtttggccacgcataacctggatcccaaggtggggtcttatattcaaggatgtcaaagccaaagtccatagcaactcttcagtttctcagaggtcagccttggtcatcaatggcaagaacatcaccattcaaggcctctccttggatggcactcttatcgtaaatgccaaagatgaagccaagttcaatgttacaggtcatatagagaataaaggctggactatccagcacgtcgatcacaaggacacctcggagaaggaagagatcagaatccgcgggttcaagttcaacaaggttgaacagctagagttgaactactagccagggaagcattgcatgaacaaatcatccctggtttacatcatctgcaaccaaaatgttcagttgaaaataatccacattaggtggccatatatgtgataagctgatactattcgttggtctcccaagtgataaataaggagctaactgcttcaccaattaagcaattatcaatcctaagtgtaaatttttacagtagccgttatttacagccaagtcattttaatgt

SEQ ID NO: 27172 - DNA, 1536 bp, Oryza sativa
  Clone ID: PAT_MRT4530_31892C.1
ttacgcacagctggaagcaatgtgagtgaccggacacacatttaggctagtgtgtttataaaccagtagtccaggtgcctccctcatgtcaagatccttgtgcaacattccattgggcagcttccaatcaaaatggtagagaaggttagccaaggcaaactccatgttagctagcccaagatttattccagggcatactctgcggccagagccgaaagggagaaactcaaagttgctccctttgaattctatatcgttgttttcaaacctctctggcttgaattcttcggcatcctcccaatacttactatccctgcatattgcccacacattcacgaatgcagatgtacccttgggtacatcatagcccataatcttacatgtctcacggcatttgcgaggggctaagaggggcaatggacaatgcagtctcaaggtctcctttattaccatcttgagatagctcagttggacaaggtcatcttcagtgatggtgttttttccatcgaagatttgccgcatctctgattgcacctttgccattactcttggggaacggatcagctctgccatggcccatattagtgttgttgacgatgtatcggtgccccccgcaaacatatccatcaaaagcacgactataacctcatttgtgattgggatcggcgagccgccttccttctggagcctgagcaggtcgtccagagagcatgcgcatgacttgctgtcggccgcgcgatcatccgcctcgatttgggccttgcgttctcggatgatctgctctatgatgcgcaccatcttgtcgcggttggcgatcgcggcgcgcggcgccgcggacaccatcgccgcgagcctcgacgacgggaacaggtcggcgacgctgagccccgacgtgaggcgcaccacggcgtgcagcgcggcgaggtactcgccgctgtgctcgcaccggctccccacggagcaccggagcacggtgtcgttgaccatcctggtgaccatctcgctgaggttgacggcggcgccggcggtggcggcggcggacaggtcgcgcatgagccgcgccacctcctcctcgcggacgcggcggaacgagcgcacccgcgacgcggtgaggagctcctgggtgagcagcttgcggagctggcgccaccgctcgccgtacggggacagcacgacgtcccggccgccgaagctgaacgccgcggcggcggcggtcaggtggcggtcggcgaacgcgaggtcgtggctccggaggacctcccgcgccgcctccggcgacgacgcgaccaccgtgcccacctcgccgaaccagagctgcatcagcggggcgccgtgcctccgggccagcctccgcatcgcgctgtggacgctctccctggaggacacgacgtggtggatgctgccgatcagcggcagcgtccatggccccggcggcaggttgagcctcggctttgccgcaaatgatatcatcagcttggagacgacgacaaccaacaggatggatgcgcccatggcgagcaccaccttgtcctccat

SEQ ID NO: 27173 - DNA, 427 bp, Oryza sativa
  Clone ID: PAT_MRT4530_31893C.1
gttggttcgccatgccggcgcgaatgtccatcacatcggcgtcgcgtcgtctccgatgagtaaagctagtcggcggctgaaacaggaagggcgccttaacgtacgagaggacacaggaaaaagtacgaattaccctcccgaactatcgttgttaaccgaattaccccataaaccacaaaaccggacattcctcacccccaactatgcaaaccggacgaattacccctctcgacacaatccgcggtggttttggtctacgtggcgtacgcgtggcagtccgcggcgaggacgaggggccggaggcggaccggagtatcgtactttttcctcttttttttgtttacgagcagttggtttgatagccagaccggagtatcaattcatcatttcattgttgaatcgggccgttcaattcctctattggaat

SEQ ID NO: 27174 - DNA, 405 bp, Oryza sativa
  Clone ID: PAT_MRT4530_31894C.1
atggcgccacacacagggaaacccggcggacgaactcctgcacgcgcatcggcctggagcgccctgaggactgcggtcaccgtcgttcccaggccgctcgaccgccggcggcgatggtcgttgaggtgggcgaggaggcgggcaccgcagcggaatcgtttcgggagcagaaccgccagcggcgaacagttcgacgcctacttccccttcgccatccgcattcgccgcgccgacgccaccgatgccgacgcgacgacgccgacaccgtccccgccgcctgcatgcgtcgcccctacatcaagtgcaacagctgcgacgtgcgaccgcgccctcgacgactggctccgcgacgatttccccgaccgcctccgccaactctactactacaaggtgctcggcccctag

SEQ ID NO: 27175 - DNA, 380 bp, Oryza sativa
  Clone ID: PAT_MRT4530_31895C.1
aaaggcagaaaacaacccccaactttacaacacttagggcccataaacgcctaggggggacccccattggggggggacttatggggcatatcatggaaaaaaacccgctgcctaaaaaaacgggtaagacgcccaacacttgctttacgggaatattggggggggggggtaaacaaatcaacccgttttggtttgaaaacatatgggaaggtgaaaagggccggaagaaaacgccaaaaagaaaaaggctatccggggcaattgggttacaggttaaacactttctttaaggtggggggggctttttttaaagaatttttttcccgcgcttttggacgagcattaatggcatggtcttggcagaaggggggggggggctt

SEQ ID NO: 27176 - DNA, 225 bp, Oryza sativa
  Clone ID: PAT_MRT4530_31896C.1
atggcgacgagatggtggcggctgacatgggacgatggcgaggatggcgctccggcggccacgggcttcgtggaggaggtggtcggggtgcgttgcagcttggggaaggtggagaaggacagggttcaaaatttcgccgaaacagggtccagaatttctgaaaatcgggtttatcggtgggcacccaagaaaacagtattggccaaaaatttcggccccttttga

SEQ ID NO: 27177 - DNA, 385 bp, Oryza sativa
  Clone ID: PAT_MRT4530_31897C.1
ggaaggaacagggacttttattgcaatatttgtagttaatacaccttggaatcattcttacttaagactaaaacacattgaaaaatgccataattttaaactttaaaaggtttttttccaaaccatattttcgggggggaaccttatttccaaaccatttttataagggggtaattaaaatggccaaatagcttttttcaaccccattttttccccatctttttggaaacctggtacccaaaaggatccgaaagggccctaaggattttgcctggcattgaaagggttggaactctgggacttccttaaagccaatcaagggtttttccaaaacttaactttaaaaaagtttttgggcttccctttttttaacctaaatgggaaa

SEQ ID NO: 27178 - DNA, 272 bp, Oryza sativa
  Clone ID: PAT_MRT4530_31898C.1
atctgtttttagggtttcgcggatcaaggcggcgggggcggttagggtttcgaggcgggccacatggcctcaccggcgggggagggggacgcggcgagcgcgtggtctgcggagctggagcgtgcacagcacgctgctggcgagctgcacgaggctgtacaagcagatggaggagcacttctggtagctggagcgcgagctggcggcgaggttggactcgctgcctcacaagcaccgcgcggaggaggcgcgggctctcgccgccatggact

SEQ ID NO: 27179 - DNA, 339 bp, Oryza sativa
  Clone ID: PAT_MRT4530_31899C.1
atggcaatgcatcaacaaaacatgaacctccatgaccaaagcaataccaagaaaataagaaccggcaccaagaaacccaagaagcgaatggatccaacgatgatgagcatatacgaggacctccagaagaccatggttgcggacgctgctcagttgaaccacaaaatttcagagaattgctatccaatgacctttataggttgctctagctccaacttattcatccgtaaggtgtgccccacggaaagtgagaggcatgtcacgagggcctttagccaggctttccaaaaccacaagaaccatgaggtgttggccaagtccaggaggcaaagcagctga

SEQ ID NO: 27180 - DNA, 678 bp, Oryza sativa
  Clone ID: PAT_MRT4530_3189C.1
atggcgagcgtgtgggcgacggagcagccgggggtggagctcgaggtgaaggtcgtgagggtggccggcgtcgaggcgcggccggaggggggaggcggcggcggcggcggcctcttcgtgaggtactacgtcccggctggggacgggaagcggaggatccgcgtggacacgcgcgaggtcccgtgcggcggcggcgatggcgaagaggacggcgcgttctggggcgagctcgcccgcttcgagcgccgcggtggcggcgcgccggcttcggtaggcggggtcgtgttcgagctccggtggaggccgcggcggcgctcgccggcgttcctcgggatgctcgggaacgggaggccgtcgtcgcgcgtgctggcgcggggcgagctcgcgtgccaggacaacgccgccgccgccgtgacgcccgcgccggcgtcgtcggggagtacctggctgaggctctcgccggcgtgccgcgagctgagcgggtgcaaggcgcccaagctgctggtcgaggtcaggatgatccacgccgccgacaactacggagccgtgaaggcgacgaggtcgctcggcggcgtgaaccaccactactgctgcagcgacggcgagcggtgcgcgcagtgcgggtggatcgggaccgaggaggacatgttcctggcagcaacgttcacccacgaatga

SEQ ID NO: 27181 - DNA, 576 bp, Oryza sativa
  Clone ID: PAT_MRT4530_318C.1
atggccgacccagcggagcaccgtgaggaggagcaggaggccgcggcggcggcggcgggcgaggacgaggacaccggcgcccaggtcgcgcccatcgtcaagctcgaggaggtcgccgtcaccaccggcgaggaggacaaggaggtcctcctcgacatgaagtcgaagctgtacccgcttcgacaaggaggggaaccaatggaaggagagaggcaccggcacggtgaagctgctgaagcacaaggagaccggcaagtggcgacgaccacgaagatgcaggagcacgccggcagcgacaagtcgtgcgtgtggcacgcgctggacttcgccgacggcgagctcaaggaggaaatgttcgccatacgctttggatccgtcgagaactgcaagaagttcagggagatggtagaagagattgctgagcagcaaggaaagaacgaggagaaagaaaatgaggaagtctcctctactgcagggttggttgagaagctttcagtgaccgagacaaaaaaggaggaaaatgcagagaaagaggagactcctgcagaagaggataagaaggacgctaaagagtga

SEQ ID NO: 27182 - DNA, 1155 bp, Oryza sativa
  Clone ID: PAT_MRT4530_31900C.1
atgacgtccggcctccgcggcttctgttcttgcaccgatccgtgggaagatctgctagcgccctccgccgcttctgggcgagggaagggcgccgaggcgaggctgcggcggcgaggcgaggcggccgccgcagcagaggcagaggaggctgcagcggcgagaggaggctgcggcggcgaggtggaggactccgactccaccgcgctcttccgccgcccccttgcctcctccgtcgccgcgctcgcctccttcgagacgcgacggcggcatcacgcgggcacactggcgcgggtaagctccgccaccaccatccacaacagcaagagcactagcaagctctggcacaaacatctgcgggaggggataggattcgcgtgcggggggttgcagcggcaggaatctgaagttgctcatgagttcttctcgcagatctccaggatgcctgaagtgagaaattccggcggtagggcggcgctcgccgacccctcgggtggtgggttctttatcaggaggacgacgtcgccgccgggagccgtggcggtcaagccgctggctcggcgggccctgccgccgacgagcaacaaggagaacgtgccgccgtcctgggctgtgaccgtgagggctacacccaagaggaggagccccctgcccgagtggtacccgaggagcccactccgcgacatcacgtcagtcgtcaaggcagttgagaggaaaagtcgcctcggaaatgctgcggttcggcagcagatccagttgagtgaagattcttcacgatctgtggatccagcaactccagtacaaaaagaagaaggtgtccctcaaagcacaccaacaccaccaactcaaaaggccctggatgctgctgccccttgtcctggctcaacccaagctgttgcaagcacatcaacagcttacttggccgagggcaagccgaaggcatcatcttcttctccatctgactgctcctttcagacaccatccagaccaaatgatccagctcttgctgatctcatggagaaggaactgtccagctccatagagcagatagagaagatggtaaggaagaacctcaagagagctccgaaggctgctcagccttccaaggcctgcaactgcgaggttttcccacttgtctgctgctttcttagccgctag

SEQ ID NO: 27183 - DNA, 1822 bp, Oryza sativa
  Clone ID: PAT_MRT4530_31901C.1
atggcgacggcgcgcggcgcgagtgatggcgatggcgaccgcccctcctcgagttccttcgcgggatcgacgagccgccgagcaagctcgagctcctgcacgcgggatatacgagccaccgtaagctccgccaccaccatccacaacagcaagagcactagcaagctctggcacaaacgtaattcgatcatcaatggcttggaatcaactcctcttacagagttacgggtagtggcgcgagtccctaactggtggggccacccttacggtcccacatgtcggaggcacatgtccctacgatacgccaaagatctgcgggaggggataggattcgcgtgcggggggttgcagcggcaggaatctgaagttgctcatgagttcttctcgcagatctccaggatgcctgaagtgagaaattccggcggtagggcggcgctcgccgacccctcgggtggtgggttctttatcaggaggacgacgtcgccgccgggagccgtggcggtcaagccgctggctcggcgggccctgccgccgacgagcaacaaggagaacgtgccgccgtcctgggctgtgaccgtgagggctacacccaagaggaggagccccctgcccgagtggtacccgaggagcccactccgcgacatcacgtcagtcgtcaaggtgatgaaccattcccgtaggctgtgtgggaagttcagtgaaataacaggcttaaactttgaatgctcttctgatgcagttgagaggaaaagtcgcctcggaaatgctgcggttcggcagcagatccagttgagtgaagattcttcacgatctgtggatccagcaactccagtacaaaaagaagaaggtgtccctcaaagcacaccaacaccaccaactcaaaaggccctggatgctgctgccccttgtcctggctcaacccaagctgttgcaagcacatcaacagcttacttggccgagggcaagccgaaggcatcatcttcttctccatctgactgctcctttcagacaccatccagaccaaatgatccagctcttgctgatctcatggagaaggaactgtccagctccatagagcagatagagaagatggtaaggaagaacctcaagagagctccgaaggctgctcagccttccaaggtgaccatccagaagcgcaccctgttgtccatgagatgagatgagatgagatgagctgatcacactgtccagaggagagagtgaggcctgctcaggcctgcaactgcgaggttttcccacttgtctgctgctttcttagccgctagtcctagccaaaccctttgcatcagctgctcttcttccatccctgctgtgatcctgggcttgttgaggcatggtgctcagttttgtgtaccattgagggggatctctgcttgaggaccatgggaatcacttcttccttctcagcctcctggatggcaggcttctcgtttctcagcatttccacctgttcagcttcatacaccttcctagcttgcctcctcagcggtgagccggtgataccatgcgcccggccgcgcaagagacggttgccgccgtgccggtgccggcgccagagacgaccgcatgcagcgtgtgctctccacacgattacactggcgctccatgtcaggcctccacggagaagggcgcacgctgtcgaaatctctgtgccatctctgccgcctccggtgagagctgtccagggcctcctggctcggtgagcatgcatcccccacaccgccttctttgctgaccgccaccccaacggcgccgccggccaggagcccaggacaaccacggtctggatcagcagcggcat

SEQ ID NO: 27184 - DNA, 1762 bp, Oryza sativa
  Clone ID: PAT_MRT4530_31902C.1
cccacgcgtccgcttgtgttcattggctaatcctgcttatataacttgattggctatagggagagcctagctaactaaacgggcctgatctcagtacttgttgtttctgcagagtgtgatacaagtatagcaacaagctaagatggtactgttgaattcagaagaagtctcttgcaatgatcatcatcaggtagatgttgttgcagcagccgggctgcagtgcagtggtgacatgctgggagacaagcagcttgtaagccaagtgatattggaaggtttggagattgaagagcctcctgcagatgagatggaggctgcagagaagaaggcagggatatctaggttaatggctggctatgtgcagcacctccaacataggtctgcctaccatctcggttatccactcaactttgactacgactttagccccctcgcaccttttctgaacttttccctcaataatgctggtgatccatttgctaaggtcaacaacagtgttcactcaagacaatttgaagttgcagtattgaattggtttgctaatttttgggatgtacaaagagaccaattctggggatacatcactagtggtggaacggaagggaacttatatgggctattggttgggagagagctttttcccgatgggatcttgtatgcttcaaatgattcacattactctgtcttcaaggcagctaaaatgtatagagttaagtgcatcaggattgccactacagtttctggagagatgaattatgcagacttaaaatctaagctacaacataacaccaacagcccagcaattataaatgccaatattggtactacctttaaaggagctgtagatgatatcgaccagataataagtacacttgaaaaatgtggatttcaaaatcgttactacattcattgtgacagcgctctctctggaatgatgacgccctttatgaaacaagccccaaaggtgtcattcaaaaaaccaattggctctatcagcgtgtcagggcacaaattcttgggttgtccaatgccatgtggtgtagtcatcaccaggttggaacatgccgaagtcctgtcaacagatattgagtacatagcttctagggattccactatcactggaagccgaaatggtcatgctccaatcttcctctggtatacattaagcaaaaaagggtacaaaggacttctgaaagaagtacacatatgtatgggaaatgcacgatacctcgaggtattattgaaacaagttggtataagcgcatcttgcaatacattaagcaacatagtggtgtttgaaaggccaaaggatgaaagaattgtgtgtaggtggcaacttgcttgtgagggaaatttagcacatattgttgtgatgccaaatgtcacttttgaaaagctcacagtttttgttgaagagcttgctgagaagagaaaagattggtatcaggacaagggattcgatattccatgccttgcggttgacattggcaaggaaaattgttattgcaacctgcacgcaaaaaagttaagaattcctaaaatgtgactgtagaagtgttgcaagttacatattctttgtaacttggttgtttttttttacaagtgtaaccttatgataaacattacaaatgtagcttgttcttctttttttatggaaataacttgttattcctttcctcaaagcattaagaaaaaaatcattcttaggaagtatctttcttatttatcaccaacacaacacatcacactgcaggatatttaa

SEQ ID NO: 27185 - DNA, 560 bp, Oryza sativa
  unsure (1)..(560): unsure at all n locations
  Clone ID: PAT_MRT4530_31903C.1
cacccccccccccccccccccaccacaccaagcaccttttctacaccacacattgatgactaccacaaaattttcattcggtgccatggttacagtttcatgagttacagtaacactgaaacgctgcttcttgtgtggacggaacaaaatgaatcagtaacaattaacaaagaaatatcgacttatcgagtattgtatcccactgcatacaagcacacatgaccatgtctaacaaccatatatatgaccatatgcgcacagaaaatgtcatctgaaacaaaccaatctaaatgcataaatctatgaatcttttttcggcgcctttctcttcatccggctgaaaggaccaacagtttggtccatgatgtacatgtatatcacctggctccaagatttgtatgatttcagattgttgtaatactctggtgcgatttcccttaccttgtacagncttgttcctggaattcttgggaaatcatggtgctcattgtggtatccaacatgccatgtcatcagattcaaaggtccataatacgaataagtctcctggtctggattga

SEQ ID NO: 27186 - DNA, 921 bp, Oryza sativa
  Clone ID: PAT_MRT4530_31904C.1
atggtgaaaatcttaaaaacaacattaagggcaacaacaatgcttaaggtcttggtgaaaataaggttgagcctatttttaacatttagtgtcttatgtctaatgcctataatgtatatggctagtcataagacaataccgaatgaatttctacataatttcgggggcaaaataccaaaatctattaagctggaaacacgcagcggcctcacttttgatgttcaggttaccaagaattctggcagagtagtccttcaatcaggttgggcatcatatgtcagtgcccatgatctgaaaattggggacttcttggtattcaagtacagtggtgactctcaactgaagactctaatctttgattcgagtggttgcgagaaagtatgtgaaaaacctgttgacatgtcaggcagatcttacgatattgccatgagaaactcacaagatgaaaagaagaaacggaagcaaagggatatctcaaggcaggggacagtgaagccatcagaagaaggtctgaaagcggaacttgtaccgggttgcatcctcccatcccggaccgatcttactcgtttgcagaagaatatactgatagagaaggtgaaagctattaattctgaaaccccaatctatgggtatgtcatgaacaatagcagtattcatgggattccttgtaccgtggaaatttctaagaaatatgccgatgtatatctcccatttgaggatggaacagtcgtgcttcaacatcatggcaagagttggaatgtgcggtgttgtcttactaagcaaaactcgaaaaggtttttgaaagggtggagacagtttgcaggtgacaacaagctgcacctgggagatatctgcctcttcgacctactgaaagacaagaagaaatatgtgatggatgtccatatcattcgcagaaaatga

SEQ ID NO: 27187 - DNA, 247 bp, Oryza sativa
  Clone ID: PAT_MRT4530_31905C.1
gcgacatgtaactcacgtgtttgctaagcctatgatcagtgtaaggatctaagatatgagtcgctctggcgtttaccattcacttgctggggtgcactgtacccataatactgtacttaaaccattatcctatatctgcattggggagagagagagagagctcacatagccttcagtttctcgctgtcaatgaaaaacattggtgaggcgccaatgcgttggccgtggaacgggcggcccctctaaa

SEQ ID NO: 27188 - DNA, 701 bp, Oryza sativa
  unsure (1)..(701): unsure at all n locations
  Clone ID: PAT_MRT4530_31906C.1
ccggccgtctacattcccctagagaagttttacctggttatttaatccttgagttgttgaattagctcatggtaaaaaaaaaaaaaaaaaaaaaaaaactttctccttcatctcttatttcttcttcctcaactctaacaaaacagatctagagggaagctatgggcaaaaataccatggcccctagcaactcatcggaggatacaaaagaatcaatggagcatttgaagggaaaacaagatagttttgtggtgacaacaaagaatgatcatgttgattattctgtgctagaatcatcaagcatgcttaatctaggaaagcaagatgaacctgacagagtggaaattctagccaaggctaccaaggatgtacccgaggaactggaaactattgaaacaaaatccatgaattcagtcaagaatacaagcaagaatgttgggaagagaactcgacaagataacggtgggagtaaaataaagaaatcctctgatcataatctgcgaggtcaaggtcctactcagtacccaaggggaaggggaccaactagaggcaatcttccatatggttttgtgtaattgttattggaagatgtgatttcctaagaattggagtttctgctgaagttctggaatgttgcgcaatagttgctcaaggatgntcttntctaanngatgggtgtcttgctgaagtttcaaaatttg

SEQ ID NO: 27189 - DNA, 757 bp, Oryza sativa
  Clone ID: PAT_MRT4530_31907C.1
ccggccgggataagaaagaaaccggccgggaactttctccttcatctcttatttcttcttcctcaactctaacaaaacagatctagagggaagctatgggcaaaaataccatggcccctagcaactcatcggaggatacaaaagaatcaatggagcatttgaagggaaaacaagatagttttgtggtgacaacaaagaatgatcatgttgatcattctgtgctagaatcatcaagcatgcttaatctaggaaagcaagatgaacctgacagagtggaaattctagccaaggctaccaaggatgtacccgaggaactggaaactattgaaacaaaatccatgaattcagtcaagaatacaagcaagaatgttgggaagagaactcgacaagataacggtgggagtaaaataaagaaatcctctgatcataatctgcaaggtcaaggaacagataggtctgtgaaaggaaggacaatagagacaactccaggtcctactcagtacccaaggggaaggggaccaactagaggcaatcttccatatggttttgtgtaattgttattggaagatgtgatttcctaagaattggagtttctgctgaagttctggaatgctgcgcaatagttgctcaaggatgttctttcttaagattggtgtctttgctgaagtttcaaaatttgcttctcatttaagaattggtgtgctatctgtcaacttgtgttaattcagtagcattcaaaatgttagcatttcctttc

SEQ ID NO: 27190 - DNA, 513 bp, Oryza sativa
  Clone ID: PAT_MRT4530_31908C.1
atgcggcggcggtgggcggcgctgaggagggcgttggacagcgccggggggcggacgcagcttggggcggtgggacggcgacaagcggtggcggaggctgctcggggtcactggttagcgctgtccgacggcggcggtggcgagcaggatgaggaagacgctccggtcaaaggcggcggaggtgccactgccgcgcctcttccgcttcttcatctcgaccccgtgagttcgattcgtggcaaagctacggcgaggccgccgccgtgggcgccgtcggcgcacgccgcctccccctgcgccaagttggccgcccatcccagtgccgagctcgttgctcgtggccgtgggtggggtgaggatgttgtcggcggtgggggtagaggaggcaaggagggaggtttggggtgggggaagaatatgacaagtgggcccgagggcatttttgaccttttacactgtttatctcttctattgaaccagaaattaatattttattgcataaacaaaatataa

SEQ ID NO: 27191 - DNA, 243 bp, Oryza sativa
  Clone ID: PAT_MRT4530_31909C.1
ctcatgcgtcggctaggtgtacgtggaggggtgcggaaatccagtacgactagttggacacggagctcaccccgctcggatggtgtctaccaagagtcccccaatctccgtgtagctcggaaaacaaaccaccgtactgtaacaatcccagacgctgcagtgcccgcatgcgctacatggtatgagccatcgataaggagaggaccatgagccatgaactgggcatcaatccatatgggtgga

SEQ ID NO: 27192 - DNA, 291 bp, Oryza sativa
  unsure (1)..(291): unsure at all n locations
  Clone ID: PAT_MRT4530_3190C.1
gcggcggcngcggaggaggagaggagcaatggagagggcggtgcggtgaggaagccgcacacctcgacggcggacctgctcacgtggtcggcgacggggcccgacgcccgcctgccnccttcgccgtcggcttcttccancccagnctcaaggtaagctatgactaagccntactcgaatnctgctctgcttccccgtgcnttcgagtgcgacacgcgaggcttacttttttgagggtgcgtnttggttgtttgtnctggtgttgtggtgtnatgtcttggcggccacaac

SEQ ID NO: 27193 - DNA, 1659 bp, Oryza sativa
  Clone ID: PAT_MRT4530_31910C.1
atgcctgaggcaaatgcgggtgggcgggcggcgccggcggcggagcagcggagcaagaacacaacagagatggatttcttcagtgaatatggtgactccagccgatacaaaattcaagaaatcgttggtaaaggaagttatggagttgtttgttcagctattgaccaacataccggtgacaaagtagcaatcaagaaaatacacaatatctttgagcatctatctgatgctgctaggatcctccgtgagatcaaacttctccggcttttacggcatcctgatattgtcgagatcaaacatataatgttacctccatctagaagggacttcaaagatatttatgttgtcttcgaactgatggatacagacctccaccaggttattaaggctaatgatgacttaacgaaggaacatcatcagttctttctgtatcaaatgcttcgagcattgaaatatatccatactgctaatgtttatcatcgtgatttaaagcccaaaaatatattagcaaatgctaactgtaagctcaagatatgtgattttggactagcaagagttgcatttaatgacactcctacaacagttttctggacggactacgttgcaactagatggtacagggctcctgagctgtgtgggtctttcttttctaagtattcaccagctatagatacatggagtattggttgcatttttgcggagattttgactggaaaacctttgttccctggtaaaaatgtggttcatcaattggacttgatgactgatctcttgggtacaccatcaatggatgctatttcaagggcgttggctgatccatattttaaaggccttgcaaaagtggagagagaaccatcatgccaaccaatttcaaaaatggagtttgagtttgagcgaagaaaggttaccaaagatgatatcaaggaacttatattccgtgagatattagagtatcatcctcagcttctgaaggattacatgaatggctccgaaaacacgagctttctatatccaagtgctgttgataatttccggaggcaatttgccatcttagaggaaaacggaggaaagagtggtgcactagataggaagcatgtttctcttccaagggctacaacagttcactctacatcaattcctccaaatgaaggcctagatgcaacatcccaagttactcaaaggatcccaacagctagaccaggaagaacggttggtccggtattaccattcgagaatccaggcgccgcagatccgcacagcgcacggagggtggtgaggaatccgatggttcctccagcagctgccaacaagtcaggatacagctacaacctaaagtcagactactctgataggcaacatcaggaagagcttgagaaagatcgtgtgcagtacaggcctgcacaacacttgatggatgctaaagttgctccagatacagccccggacatacggtcttcacaatactactttacgaggagtgctcccagaactgatctaacagacagggctgcactccaggggagcatgctatacggcattgctccgttcaacggcatcgcagcagttgctggtggatacagcaaggcgaaggttgaagaaaggagaagggaaactcctattccatctcaggcggccattgtccatttgaaatggcagtga

SEQ ID NO: 27194 - DNA, 1239 bp, Oryza sativa
  Clone ID: PAT_MRT4530_31911C.1
atgaacaccctcctccacatgcagtccgagggcgacgacggcgtcgtggaccacttcgtcatggagtggaggaagcagctccgtgagctcgcctactactcggaggactgcatcgacctcagcctcctccatatcaggcggtgcgacaccagcggagtcgcgtcgccgcgtcgcgttccaaatccgatggcgaagcgagcacagtcctcctcctccggatcccagctcatcccgtaccggcggcggaccaagcggccgacgagggagagggactggtacaatctcacggacggcccggcggggctgatcgccgagcgcgtcctcgccggcgacgtggcggattacatgcgtttccgcgccgtttgcaccgcttggcggcagtgctccgccgaccctcgcgaacacaactccttggacagccgcttccatccaaggcgatggttcatgctccgggagtggccagagcgcgccgcccctcaccgccggcggttcatcaacgccgccacggggcagtgcgtcgccgtggacctcccggagatcgagggccaccgctcgttcggccccaccgccgagggcctcctcgtcctcgtcgacgaccgcaccctgttcgtccgcgtgctcaaccccttcacgcgtcggctcacggagctcccgtcgctggccacgctgctaccacgggacaggtacctcgtcggcggcgatctatcggtgtgcggcgccggcctcgccggtggcgatggctgcttgatcgcgctctacttctccaacaccaggaagctcgccgtcgccaagcccggcgatgagaggtgggcgctggtcgatcatcgtgtccctcgtctcgcgtcatcgctgtcattcgcaggccgcttctactgcgtctccgacgacgccgacgctgtcatgacgcaccgttgtatatccgcgagctatatcatcggcggcgatgacaacgagagctactacgagatgtggaaatggaagtatgaagtgtacattgttgatctggatgcgaggaagacgacgcttgtccatggcctcaacgggcgagccttgttcgttggcttgtcccgtgcattgtcagtgtgccctaaggtgttcccttctatcagcgccgacaccatctaccagggctttgaattggatgataaagaggaaactgaagcctaccatctcacagatgcaaccactgaaccctccaccttcactagaacggataccctcatctcaatcgggcggtaa

SEQ ID NO: 27195 - DNA, 517 bp, Oryza sativa
  Clone ID: PAT_MRT4530_31912C.1
accacaaaaccgcttttgcgcagattggtcacccagtgcagacggccatccaggcaccagccatcgccttgatcgcgggcccgcagttgcagcgactcgatgcccgagaggaacttcatggcattcgacagtccggtggcgccggccagttcaccgctgagcaacgacggcagcagatgctcgcgcaatgccgtgttgggactgtgcagcaggtactcgataaaagcccgttggccccagaacacaaaggccgccgacagggaatggctggccacctgggcgatgctttccaccgcatcggccaccgtgccgccgctgccgccctgggcctctggaacaccgatgcgcagcaccttggccgtcgccaatcgggaaatcacatcctgtgggtcgcactgccccagatccagagcctgggcttgtacgtcgagccattgactcagtgccggattgagcatgtcgttttctccttgaagacaacgtcgaataatagccgacgccgatgaatcattgatct

SEQ ID NO: 27196 - DNA, 386 bp, Oryza sativa
  Clone ID: PAT_MRT4530_31913C.1
ttcacatccacatccgtgctctctctttgattgtttctatatactctctctcagagaggcatagtacaagtgtatatataaggttgctggagttggatgggtagtgctattggccgctatatcatcatctatctcttcttccagttccagctctctatctctcgtgttattgatggacgccgacaagttttcgttgggcatgaggatgagggagagcaacgcggaggagaagaagagcgtgtgcatgatggacgcatacggaccgctcggacacgccctcgtcgtccgtctcctacgccgaggctacaccgttcacgccgtcacctacccctaccaccaccaccattcagaagaagagtacccagcagcacactcgcctgaagctg

SEQ ID NO: 27197 - DNA, 1026 bp, Oryza sativa
  Clone ID: PAT_MRT4530_31914C.1
gctaatcttgccatggatcgtcggctccttctctctgctctactggccatcgctctggcttgcagctccaaccgcgtccatggcgcactcaacaggcacagcttccccgtggggcgccgctgccgcaccgccgcctccccgtagccctgccagggtgctgtcgactagcgggcccacaacgccccgggccccccccgccgccgccccggtcgaagcgcacctggcagctgtgctgccatagccactccctccgctcttcgctgccggggccttctgagccgcctcaccgcgacgcacctcccccccttcccgttccccttggccggcagccggctttcgccatttgggcccggtccgcgggcgatagcccggccacgcgtcgccctcttctacccccccctcccccccgcccatcgctgccgcgctcccgcctcccgcccccttctcccacttcgacaccgcacagggcgtccgccgccacacagccgggctttctacggccaccgcaaagaacgatctcattctaccctgatcctacatagattggcacctcaccacctactttcccccgcggcttacctcaacaacgctgtatcacataggccccacagacacacgaacgtgtaatcccatcgattaacgaaccagagtagagtcctacccgtctctctctcttccctccctctgtctccactccaccctcgctctgcacctcagctcgacctccgccgataccctccgacatcctcccctcccggcatcgccttttgtccacccatccacctccaacccgacgacaccctccaaccagtccacccttcaaacctagcgccaatgactaataaaaacgtcagaaccccagtcacgcaccatatataagtacgtcgtccatccgcccacagtagataaggagtctcacacacccatcctacccctccacagctccgtcgcgcacactccccaaccgaagtgagttgtggtcacgaaacgagaatatttattcaaaatatatatataatatttatg

SEQ ID NO: 27198 - DNA, 262 bp, Oryza sativa
  Clone ID: PAT_MRT4530_31915C.1
aaagcggctcaaaacatgtcttattttgatatactaataataatcctcgcagttaaaatggggagataattaagaatgatttattattcagtaatcaaatattctcgcatggctgtgaggagctcggccaggtgttattcttctgtgcttgcatgaggtgctcgagcttggtctggagcttggccctttccttcctgagccgggcgttttcgcagtggacattactgcatcccttcattgttttgtttatctcatcaaggtt

SEQ ID NO: 27199 - DNA, 672 bp, Oryza sativa
  Clone ID: PAT_MRT4530_31916C.1
ccggggatcccgatccgctgtaaagataattacaatcaaattttttgactctggctttgtccctggactcaagaaaatttttgcgaggcattgcactttggcgttggtgattacttggggctagaacggtcagaatgctgagggtggcggctccgagcaatcgttaagatatattacaattgtgagtaagtgggggtagtccctcccgttgctgatctcaccctaccagtgccccaacgccatgatcgatcgccttttgtacgttcgtcttccctgtaacccgattttccccattggggtgatttatctggcggaccatgtccataaatgttttccggcgaccgcccagcggattttcgatttaggcaccattcctcccctggatttcaaccgggcccttgatgaatgtattgatgaatttcagccgacaattttggttttttcctggcgggacattcaaatctatgctccggtggggggtaggggtggtaatcccctgcagaacgcgtttgagttttactacggaaaaaatcccttggtgaagctgaggggagccttaggtggtttgaaagttaccagtgcctattacggcgaattatggagtaatttaagacgaataaaccggggattgcggagggcaaagcgttagtgcagtgatcctaatagagtcga

SEQ ID NO: 27200 - DNA, 1620 bp, Oryza sativa
  Clone ID: PAT_MRT4530_31917C.1
atggcggcggcgcagcagcagcagcagaaggaggggggcgcgaggcgcacgagggaggaggtgccggcggtggggagggtggcgatcatcggcggcgggatcagcgggctggcggcggcgaagcagctggcggcgcacgacccggtggtgttcgaggcgacgccgcacatcggcggggtgtggaagcactgcgcgtaccggtcgacgcggctgcagacgccgcggccggactacgagttctccgacatggcgtggcccaaccgcgacgacccctcgttccccacccacgtcgagatcgtcgactacctcgaggactacgccgacaggttcggcctctggcgctacatcgcgctccgctccaaggtcgtcggcgtcaagttcctcggcggcccctccgccggattcaccgagctctggagcggctccggcgagcccctccagggcaagcccatgtgggagctcgccgtctcctccaccgacgaccccgactccgacgacgtccagttgtacaagttcgagttcgtggtgatgtgcacggggaagtacggcgacgtggcgaggatgccggtgttcccgccggggaagggaccggaggtgttcaaggggaaggtgatgcattcgctggactactgcaagctcaacgagcaggagaccgtcgagctcatgagaggcaagaaggtcgtcgtcgttggctacaagaagagtgctattgatctagcccttgaatgcgccgaggccaaccaaggtgagggagggcagccgtgcacgatgctggtgaggaccctgcattgggtggtgccatcctactcaatctggggcttgcccttcttcctcttctactccactcgcttctcccagctcttctacgagaggcccaaccagggcatcttcagatcactcctctgccgcctcatgaccccattgcagaaggctggggtgtccaagttcatcgagtcgtacctgtcatggaagcttccactgagcaggtacgggttgaggccggatcacccgttcgtggaggactacgcgagctgccagatggccatcctgccggacggcttcttcgacatggccgaccgcgacctgatccgtttccggcgctccgccggcggctggtgcttctccgagaacggcgtcgtcctcgacgacggcacccacgtcgacgccgacctcgtcttcctcgccaccggcttcgagggcaaggacaagctccgctccgtcctccccgagcccttccgcggcctcgtcgtcaacaaatcctccatgatgcccctctaccgggggacgatacatccgctgataccgaacatggcgttcgtggggtacgtggagagcgtgtcgaacctgcacacgtcggagctgaggtgcaggtggctggcggggctgctgggggggaggttcgcgctgccggcggtggaggagatggtgaggcacgtcgacggcgagacggaggcgatgcggcggacgacgcggttctaccgccgccactgcatctccacctacagcatccacgacagcgacgccatgtgcgccgacctcggctcccgcgtccaccgcaagtccaacttcctcgccgagctcttcgccccctacaacaaccaggactacaaggaagagtag

SEQ ID NO: 27201 - DNA, 159 bp, Oryza sativa
  Clone ID: PAT_MRT4530_31918C.1
atggatgacattctcgtgacctgcgagaactgcctcctgatgacgacgaaggcaatgaggaattaccgtagtcggaggttccgttcctggacctactacctcatcctcgagccctctagaatcctggacgttgtcgtcctggtgacaacggcgatctag

SEQ ID NO: 27202 - DNA, 195 bp, Oryza sativa
  Clone ID: PAT_MRT4530_31919C.1
atggccaacaactccgccaacccaatggggaagttcgacctcaccggccaaagccaccagctaatccacgttattgtcatcgccggagtggtctacttcagctggagggacagggcactgggcagacgagcacacggtgacggttccgacgagaggatggttggggggggggggactgttagtgatatgtcctag

SEQ ID NO: 27203 - DNA, 2340 bp, Oryza sativa
  Clone ID: PAT_MRT4530_3191C.1
atgagaggtagacaacttaacaaggagagtgaaaataggagactgaaagtgactctactcaaagagatgcagaagtgggatgatgcagctgactcaagaaatctgtcccagggtgagtggaagcagaggtatgagctggaggatcacctaaacatgatcttccaggaggatgaaatctattggcaggaaaggagtggggagaaacggcttcttgagggggatgctaacacagccttttttcatggagtagctaatggtaaaaagaggataagtaccattagaagtttagaagaggatggaagagtgattgaaggtaactcagaactgagagagcatataacccgttattataagggcttgtttggttcggagttaccaccaaaagtgttcctgagccaggatatgcggagggataggggaagggtggatcaagaagataatgactttttagtcagacctttctccgtggaagagattgagagggctttagcagaaatgaaaaccaatactgccccgggtcctgacggcttgccagtttgcttttataaggagttttgggagcagttgaaggatcaaatcaaagagatgctggattctttgtttgaggggagactggacctttggagacttaactatggggtgattacttcaattccaaagataaaagaagcaaataacatcaaagctttcagacctatttgcttgctcaatgtctgctttaagctgctaacaaaggttctgacgatgagaataactcatgttgctaataaggtgattggggaaagtcagacagcctttttaccagggagattcattctagatggtgtggtcattcttcatgaagtgcttcatgagcttaagaattcaggtcaatctggtattattttgaagcttgacttcgaaaaagcttatgacaaggttcaatgggactttctatttgatgtcctacaaagaaaaggtttttgtgagaaatggattgggtggataaaggcagcaacaacaaaggggagtgttgccattaatattaatggagaggtggatcaattctttagaactcacaaaggtgtgcgtcagggagaccctctttcccccctaatgttctatctggtggctgatgcccttccagagatgctaaataaggccaaagaggctggacacttgcaaggactggtaccacatctagtccctggaggattaacacacctacaatatgcagatgacacgatccttttcatgacaaactcggaggaaaacattgtcacagtgaagttcctgctctattgttatgaagctatgtcaggtcttaaaattaattttcagaaaagtgaagtgattgtcttgggagtggaggaaatggaggcacagagggtggctgacctctttaattgtaagaggggagccctacccatcacctatctaggcttgcccatcaaagggaagaagaaatatcacttgatcaaatgggaagccttatgcagacccaaggaggatggggggctgggcttcatcgacactaaaattatgaacgaagcactcctctgtaaatggatttataagttggaatctgggaacgatagtccctgctgcaatcttctgaggaagaaatatttaggtcagggaggtggcttctttcaatcttctcccgaaggaggttcacagttctggaaaagtctacttgaggttaaaaattggatgaaactgggtagcgcctacaacattggtaatggggaggctgtcaggttttgggatgatgtttggttaggggaggtgcccttaaaaatccaatttccttacatttatagcatttgcgctaaccctgataagacagtcagccaaatgttgatagaaggggagtggaaaattaggttaagaaggtcgctaggtcaggcagagttgaatgaatggtgtgagttgcactcaaaactcagcacagttcagttgacctcagaggaagataagatgttctggaagttgacaaaatcaggggagaattcaggtggcaaaacagttaaagaagatgaaatggccagagatacctttagctggccgcatatccctgcttctaggaaagatttgcttaatttggtgcagttacagaggcgagacaaggccaaagttctttggcttctttttgccgctggattttgggcaatttggcttatgagaaatgattgggtctttaataacaaattgacgacaaatgtttcttctttgccttataaagctctttcgtttgtaacacagtggaaaaaactagctccggcaaagctaaggggggaggtggagactgtacaagggttgtttcttgccagcattcgcgagacagaaggctcaaactga

SEQ ID NO: 27204 - DNA, 1212 bp, Oryza sativa
  Clone ID: PAT_MRT4530_31920C.1
atggcgccaccgccgcggaaaaggcggcgagttgacggcagcggcggaaatggtggcaactatcctctcgtcgccacccccaacgacggcgtcctgccagtggacctgctcaacgccgtcctcctccgcctcccggcgaggccggcgtgccgcctccgcgccgtgtgccgcccgtggcgcgccgtgctgtccgacccgcggttcgccgccgcgcacgccgccaggcacccggacccgcacctcgtcgtcgccgcctgcgaccgcctcgacgccggcgggatcgagctggtggacgtctacctcgtgggcgcgtccggcgacgtcgccaagagggtgcccgccgggaggtgcgacacggacgcggtgtcgtcggcgcgcgacggcgtggctctcctcgtcggcaacgaccggcggctccgcgtgctcgacgcggcggcgtccgccgccgtctccctcgttcccgacggcgagcaccaccccatcaactgctcgttcacgctcggccgggccgcgtcgtcgtcgggagagcacaaggtgctccgcatcggcacggtcgtgcacggcgagccgcaagtctgcgcggtgctcaccctcgccgtcgccggcggccgtggtcagaacgcgcggtggagggaggcgccgagcccaccgctcgtggtcagaacgcggcgcggggacgtggccgtcgccggcggggtcgcctacttcttgctgcgccgcgcgtacctcgcggaccggatcgcggcgttcgacctcgaggcggagcaatggcggccggccctcgtcggcggcccgccgctcgccgcgtggcgcccgacccggccggaccgcccccgcgtcacgctcgccgagctgggaggctcgctggtggtggccatcgacgaccaccgagctgccaccctggacctgtggttcctcctcgccgccggcgacggcgagcagcactggtcgaagcagtacacggtcaccatgccgtaccaccggcggccatggcggtgcgacggagagagggcggagccagtggtggtgctcgacgacgggaggatcgtcttctgggtgtgggccggcggcagcggcgggacacggcacggcggcggcgtgatgcgggtgtacgatccgatcaccggcggccacaccgacgtggcgacggcggcgaggtgcgcccacgtcggcgtgtacacggggaacctgctgtccctagtgtcggagtag

SEQ ID NO: 27205 - DNA, 789 bp, Oryza sativa
  Clone ID: PAT_MRT4530_31921C.1
ccggccgggctgctttcggtcacttcgggattgctgtcgaggacgttgcaaaaacagtagatctcattaaagccaagggaggaacggtaacaagagaaccaggacctgtaaaaggtggaaagtctgtaattgcttttattgaagatcctgatggttacaaatttgagcttatagaaagaggtcctacacctgagcctttatgccaggtaatgcttcgagtgggagatcttgatcatgctatcaatttctatgagaaggcatttggcatggaacttctccggaaacgagacaatccccaatacaagacaaaaatgctgtactggagttgacctacaactatggtgtcaaggaatatgataaaggaaatgcttatgcacagattgctattagcacagatgatgtctacaagactgcggaagtcattagacaaaatggtggacaaataactcgtgaacctggcccattacctggaattaatacgaagataactgcttgcacagatccagatggctggaaaacagtatttgttgataatgtagattttctcaaggagttggaagaatgagtttttgccaatgatctcatcttggtacaggattcagaggtttttccccttgatttgacatcttgcgcccttgaaatcttgtaaaagccacaccacctcgaactgaggtttgtagataggccatgcaaatctaccattccacaggttggtagtttaatagagcattagattacaacattccaagcgatgtagatgcgcaatccatttttgtagcgaagtcaaat

SEQ ID NO: 27206 - DNA, 1771 bp, Oryza sativa
  Clone ID: PAT_MRT4530_31922C.1
aatagtggatccccgggctgaggaatcggcacgaggctctctcgcccccaatccccctcctcctccgccaccgccatggctcgcctcctcctccccctccccatcgccgccgccgccgcctcccgcctccgcctccccgtcctctcctcctccgtggcgcggcgtgaggcgctgctcttcggggggagggtggcggcggcgagggcgccggtgaggctggcgaggagaggggtgagcgccggggcggaggcgggcgggtcgtcgtcggccgccgcggcagcgcaggtgatcgggcaggacgaggcggtggagtgggtcaagaaggaccggaggcgcatgctccatgtcgtctaccgcgtcggcgacctcgacaagacgatcaagttttacaccgagtgcttggggatgaagctgttgcgcaagcgcgacattccggaggagaggtataccaatgcttttctcgggtacgggcctgaggactcgcattttgttgtggagctcacttacaattatggtgtggaaagttatgatatcgggactgctttcggtcacttcgggattgctgtcgaggacgttgcaaaaacagtagatctcattaaagccaagggaggaacggtaacaagagaaccaggacctgtaaaaggtggaaagtctgtaattgcttttattgaagatcctgatggttacaaatttgagcttatagaaagaggtcctacacctgagcctttatgccaggtaatgcttcgagtgggagatcttgatcatgctatcaatttctatgagaaggcatttggcatggaacttctccggaaacgagacaatccccaatacaagtatactattgcaatgatgggatatggtcctgaagacaaaaatgctgtactggagttgacctacaactatggtgtcaaggaatatgataaaggaaatgcttatgcacagattgctattagcacagatgatgtctacaagactgcggaagtcattagacaaaatggtggacaaataactcgtgaacctggcccattacctggaattaatacgaagataactgcttgcacagatccagatggctggaaaacagtatttgttgataatgtagattttctcaaggagttggaagaatgagtttttgccaatgatctcatcttggtacaggattcagaggtttttccccttgatttgacatcttgcgcccttgaaatcttgtaaaagccacaccacctcgaactgaggtttgtagataggccatgcaaatctaccattccacagttggtagtttaatagagcattagattacaacattccaagcgatgtagatgcgcaatccattttgttagcgaagtcaaatcatatgtacaaattttgttttccgggtcagaactattgttcttaatcaatccattttacattcgaaagttagcattcctgctgtaggacttcttgtcatttgtattctatgtcatggaatatgaatgaatggtggtaagtatggaatcagcgagtgaggagcacaaacgctgagaactgaaaagtcttttgtgctttatccatgggcgccctggaagaaaggagagaaaggttacatgtgatcttttacgttgatatggtgcccatttgacatggagcgagatggcgacagtgttcatcactgttaacatatgaaggcatattatatagcaaaagattctatgaataccagcgtcagtgtaagttgagtttgacctagttttattgacaataatattggcaaagttgtactttcatccag

SEQ ID NO: 27207 - DNA, 165 bp, Oryza sativa
  Clone ID: PAT_MRT4530_31923C.1
ccggccgggaacccgccatagctcccggcctccgaagatggagacctcctccttcctccgcaccaccctccccaccgcgaatggcctcccggagttcgagacgatcgcactgttcccttaaggcgacatgggctggctgtcctctctccccgtcgcgttggtgtt

SEQ ID NO: 27208 - DNA, 3708 bp, Oryza sativa
  Clone ID: PAT_MRT4530_31924C.1
catcgtatgtataaattgctcgcgcaaaaatgatgaatatttaatgcgatcatccggccgcacagagcgcacaaccatggatatgatccattgcagaaacctagctagattaacaccgatcgctcgatagattaccaataaacaccactcccaaaacacgaccaacagtataattcttcacaccagaaagccactctgccactggatatatcacggcgagacgaacagtacatctactttataccagaaagccaactacgatgttttagttctgatggacacaatttaataccaagaaatccatacaataccactaatcctaaaatttgtaagcttaaatgtaccctaaataccccctgttaatttctatccaggagcactcctttctcaaaggagaggattcaaacaaatgcatcagggcaacaacattcctgaatcccaagattagaatgccgagcgcccttttgaatctgaggaattggagaagtggcttgaccttttccttctaagggtcttccatgtaaaactgcccccctgcaaaacacttgtggtggattcatcttcggcatcgtcttcattctcatccttgctatatgaagaaaccccagcccttactttttctggtgtccacattggaatgctggcatcatctgcaatgttcactagagatttatgccttttcctcctctcactgaaatcgacttcttgtacatcagacgaataagcgctccgctttgctcttggagccatccttggagtctcttcaactacatcatctgctttcatccactgatcaccaaaagagtctgagtagacaacctctttcctgcgtctcttcgtagttagcagaacattctggggttcatctgcaggtatcttctctgttaaagtatcattggcaaacacccagtctggaacctcaattccctccatgagcctcggtttgtagttttctctttgccgcctttcttcatccatcttctcaaccaaccagaattcttcatcattacgagcagccaaacgatttatttcacgctcactagggatatcagttcccagtgagcttgttcctctcctcaggatctcctgcagcaatgctcgcctatcctgagctgtggaggttgtgttgaacagcccagcctggataacttttgcatcaatacccatcttctgttttgcacggtccaagatctcttcttcaattgagccaacactaacaagaacgaatacacgcacttcattcttttgtccaatacggtgggcacggtcttcagcctgctgatccatttgaggattccagtcactgtcaaaaataataacagtgtctgcagtctgcaagttcaacccaaggcctccagctcgggtgctgagaagaaacaagaaatattctgagtccttcttgttaaaatctgccaataatctccctcgctcttcagtcttcgtagatccatcaagcctcatgtacttgaactggtacatttgcaaatatacttctaagatatcaagcagttttgtcatctgagagaaaagcagaaccctgtgaccagctctctgcaattttggaagtagccggtcaagcaattcaaacttccctgatgatctaacaatttcctgccgttgatacatgttataatgctcaacgaatagatagggatgattgcaacattttctaagttgcatcgacagattttgcaaagcctttgatttgagtccagatcctagactaacccttccattgctagtgacttgttcatagtatgctttttgccaagcagacatgtcacacttgagtattacttgtgttttcacaggaagatatttttccacttcatctttcttcctcctcagcaaaaatggacgcagcacttgatgcaaacgatgtataattagcagctgttcctcatcattaaggctgacttcacatgcaaatggtgcattaaaccattcctcaaaattcttcttcaggaacttcagatctttcagtatcaagtcatagtgcgtgagcaaaacattaaactgccgttgtccaaaattcttttcccttagagccttcctatcatctggacgaccatcatacagaattgtcccaatgctaggagcccaagttttgaattcattagaccaatttggtaacacggcctttggtgctattattaagtgtggtcctgtaacctccttcttctccaatagataggcgatcaaagctatggtctgaattgttttccccaaacccatttcatcagccagaataccattcaaattattgttgaataaagaaagcatccattgcaggccctctaattgatatggtcttaactccccaccttcaagagctgatggttgttccgttaccttctcttcaatagagtggacggtagaatcaagcctatggccagcattaaatttactatgatcagcagaactatgatggtctgcatcaacatctgatggggactcttcatcaggggattcaaccttgaggcctgatatttgagaacaatcatcagattctgacccttttggcagttcagatccatcagggcgactaacatgctcagcatctttttgtctctgcacagctttccctattccttcaagaagctcatttgtttttccaaggagcagtttcaggcgctcgttcttgctctcctcaaccatacgcaaataagcttcttggtcaccagccttcaaaacttgtaatctactcttttccatgcgatttatacgttgacgtgcacgaacatgccatgccagaactccatcattgcgctgtttttttcgtttgtaagaagccggtacttgtagctgatactccctagcagcattaagaatttctgaaaaaaatttcctcttcctgatctctgcctggttcttttcctcctcttcaagtcttgagatcctctgttgttcccaaataccaaaaagggagtcctctgagaatctctttttgcggttgatatcatcagcatccattgaaaaactatctccaattccatacatggtaaaaggataccgtatacgcatcatcccccagtcaaacaattgcctatcagggtgtgcacattttttgtgtagccagtattctgcactgatatcagtccttactttcttctgcaagtctaataacttaagcccgtacaattcaagcaaacacttcatttgcaaatcttcacccctagtagatggtaatccttcaagttcagtcagcctatgctgaatggaagtgttgaagcggtcttcttttaaagcagtcaactctgagtatgacatatacggtccttgattcttcaatacagcatcttcaagctcttgaatcaaggtgactccccaatcatcgcagtgacaatatggtgctttgaaactacaaccctcatccgcaccgggagaagcatccgcgcggtcctcctccccctccccgctctcgccgcatccatccccgacagccgccgccgccgccgccacctcctcttcacccccctcctccccttccccctcccacgcgtcgccgccgtggtagatggacgagacggcgtgcaggacggcgggcggcagcgggaggttgcgggagagcaggttgagcgcgccgatgagcgtcctggcctgctccgacgccccgccgccgccgccgccgacgacgacctcgtcaccgcccacggaggcgggcggggccaccaccgccgccgccgccgcctccaccgaggcagccat

SEQ ID NO: 27209 - DNA, 332 bp, Oryza sativa
  Clone ID: PAT_MRT4530_31925C.1
gatgtgtaagcaggggtacactcaacactctggggggtactgcttcgatgaccatggacatgtgtctttgatatgctgtaacatgaatgatgacactttatggtggtctatcatgtttttttttgagatgagctgagcatgagggcttgaagcttgcctggaatactttactggtgactggatatggcaaggccatttaaactctatgataatgggtagaccaggtctatactaaaatacaggtgggactaaacattgatgcactagatatggagagttatgctccctacgcagccaatccaagagagaaacccggaaatgtgggctacaaa

SEQ ID NO: 27210 - DNA, 777 bp, Oryza sativa
  Clone ID: PAT_MRT4530_31926C.1
atgacaccatcgggtggatacaggccgttgtgcctggtcgtctcctgcgcttgggcgatggtagctcgggagagctgtggcggctgtgctcgggggagtgacggaggcagttgcaatgagggagatgatgaccacgacgatcacgatctggatgctgtcggaggccgccgtgttttgatggttctcatgagctgttgtcccatctgcatgaatttatattttgatttggatgatattgagcttgtgtttagaggtgttaaagaggaaatacttacaagaaggaggtgtgttccaggtgaaaaatggtgttggctcccaattttggagagaagatcttttggtccagctgaaataactgaatgggaggaactcaagaaagtaattgataatctggagacttcccctgttcctgacactttactttggggcctagctactaacaagaaatataccaccaaatctatgtacaggaccctgacctttaggggtataagagagctgaacacttcgatgtggctttcagtaaaaagccgagtctctgaccttttctctaaaaaaaatttggatgatattgatgccgatctagaacgtttcttgcacgaacgattcaagaatttgaatattgttttgtttttctccggaaatcctccgtacaggtggttaaggttttcatctattacaatcgattttcccaagcggaccatattcgcttacaaatcatggactgtcataggcgttcagtcgcaggcggtcatcatgattgccagcaaaaattga

SEQ ID NO: 27211 - DNA, 492 bp, Oryza sativa
  Clone ID: PAT_MRT4530_31927C.1
atgggaggctggggcagtgggctagaggaggagatggtggagacaacgaaccgaagagcgctcacgcgagtcaccgctggtagagagatcggactggaaaggcagcctgagcatcccgattggtacgttgccccgcatcaatggtcgtcatcgtggaatttgatcgatgccatgaaggtcgatgggtgcgtgccggggagagggccgtcacggccgtcaacctccactccagtgccgcctgggcctctccgcatgctgtcgcggcctggtcaactagctgagagagagataagggaagtggagagtttgactagtgggttccacaccgtttttcaccccgagttgtcacattggtatgtcacatggataaaaatgaagtggcaaatagttaaattttcgtttacaaccaatgctatgtatatcatcggtcaagaaataatacttttccctatgtcggtactagctatactctcctaccgatcatctatatga

SEQ ID NO: 27212 - DNA, 297 bp, Oryza sativa
  Clone ID: PAT_MRT4530_31928C.1
ggtcaggggtcccacatgtcggcagaggttgagtggtggtggagcatcgctgtagggcgatctcgtctatgttcctttattggtctagcgtcggccggccacgtttagcggtggccggtccggtgctagccttctcctggtcgtgtgtgttggcgctgtcgatgtataggaggtggtatattttttcttttttcctagttatgaccctccaggattgtaatcttgtaattttattcctactctatcaataaaactttgcaccgtctcgtgcgagtcgttcgaaaaaaaaaatcatct

SEQ ID NO: 27213 - DNA, 276 bp, Oryza sativa
  Clone ID: PAT_MRT4530_31929C.1
tgaaattgtgtagtattaggatatgtcacattcgtgtattaattcgttttggaatagagggagtataatatgttttctttgtcgccatagaaaagaaatcaccggtttctttggttggatattaacctggcctaaagagagaatcctaggagaagcagagtcgccagcactcaccttttgcatccaccgacacggatggacggctaggatggatctaccgacggtctggattgcgcgctggaagagtcacccatctatcctcccagtcgctgattc

SEQ ID NO: 27214 - DNA, 698 bp, Oryza sativa
  Clone ID: PAT_MRT4530_3192C.1
tcgtatagaacacaagtacaagaagctatcagaaatcagaaacgctagctagcagtaggaacaaacaatgaggtcgtccccgatcatcttcctgctcctggccgccgccgccgccatcgccgctccgtggcaggttgcgcacgccgcgggcaagtgcggcaagacgccggcggagaaggtggcgctgaagctggcgccgtgcgcgaaggcggcgcaggaccccggggcccggccgccggccgcgtgctgcgcggccgtgcgcgacatcggcacgcaccagagccacgcgtgcctgtgcgccgtgctgctgtccagcaccgtgaggcgctccggcgtcaagccggaggtggccatcaccatccccaagcgctgcaaactcgccaaccgccccgtcggctacaagtgcggcgcttacacgctgcccagcctgcagggctgatgacgacgtacgacggccttgtttaggctctggcgccactaaaagctacctacagatcgcttacagcatactactcctataatactgttgcttaagtgtgctagctataccctgcactgctgatgaataagtatgatcgagctagcaaagcaactctacatggttgggacgtcaacactggttaatctcgtgcgctgcaaatggtctgctagtgtaatcctgtccgcatatgctgcttgaggttgtaatgagaatggac

SEQ ID NO: 27215 - DNA, 281 bp, Oryza sativa
  Clone ID: PAT_MRT4530_31930C.1
aaagttccacaatttatacaatgaacaccattatacattaccaacttaccacatgtaccacaacaagctactgctaaacctgagtttttgcagctcaccctaccaacaaaatcacccctataaaaaacacccccaaaataaatacaacaaaacatcccacccaaaacacttaccgccataaaacatactacccaaaaaccaaccatactataataataacctttgcccctcccccatcttcctccccctctacaatctggcccacaaccttctcaataaac

SEQ ID NO: 27216 - DNA, 1887 bp, Oryza sativa
  Clone ID: PAT_MRT4530_31931C.1
tgcaggaatcggcacgagggcggcagtaggcgacgcgtcggcggctcaggcgtgcgcccgcggcgtgtggtgccagtgcggctgcgagccggcgactgcggcgtgcgacgacgtctgcgagccgggccggcgactggggtgtgcggcgtgcatctgcgagccggcgtgaagcagggtcacgggcggcgcatggacgaccgttgaggcgtcgcccacagccggtcggcccctctcctcccgtcctctcccctcggcccttgcatgcctcctctcccctgtcctgtggccctatgctcccactggtcacgctgctgcggccgctcactcgcgccgtgctccgccgccgttgctaggccgtctcgccgatcatgcctgactcgattcaatcgattgccggaggtgaggtttttggactttggagtagcggtgtgaaaaaggattagatttcttattccctctcatttccttttccgactacacgaactagagatttccccgcgccccccgtacatatcctgtccctaacccaaatgcgtgatgtggccgccgcttgcagcgctgctccgtcgcctatcctctcacccgtttgactctcccgccatccacgctaaccttgtcaagtcctcctccatctccagccctatccctgccaccgccctcctcaccgcctacgccaatgcgggcctcccagccgcggcgtcccgtctgttcgacgaaatgcccacccgggatgccgtcgcctggaacgcgctcctcgcctgcctggtcttccatgctcggccctgcgccgccgtggccgccttccgtgacatggccaccgcggggttcacacccacggctacaaccctctgcaccatggccaaggcgtgtgccacgtctcgcgcccttcgtcctggccgtcaggtccacgcgcgcagcatcctcgcgtgtcaaggcgatgtcatcatggcaacaacgcttgtagatctctacatgagctgtggccttgttgaggaagcgctgaggctgtttatgtgcacggattgcccgaaggatgttgctctatacaatgctgttatttcaggttgtgtggagaatggcagattcagggaggctttctttattctggggaggattgagcttaatggaattacgctgacatgtgctctcactgcctgctcagcaacagcgaatttgatgtatggtatgcaggtgcattgcaaggctctccgtggtgggtttactttagagacgatcttatgcaatgcacttattgatatgtacgcaaaatgtgggcggacaacggctgctcgtatggtgtttgatcgaatggcttgcaggaatgtggtttcctggtccagtatgattgatgcttatagtcaccatgggcatggggaagcagcattagatttgtttaaaaggatggatgaaactgtaccagtggtcttgccaaacgccattacatttcttgctgttctttctgcttgtggacaatctggtcttgtggatgaaggcagagctatgtttcatttgatgaaaagacaatatgggattaatccgggaccagagcactatgcatgttttattgatttactaggccgtgcaggccagattgatgaggcatgggatctctattgtagtttcagtacaacccgaagtgagctttctggttccatctgtgtggctatgttgaatgcatgtagagctaatatggatgtggtgagaggcaacaaagtagctctgcaccttctggaggttgatccagaaaatccaggaagtcatgtgctaatatcgaattttcatgctgctgctagacaatggtttgaatcggatgaatcaaggaggattataattgataagggtctcaggaaagaagcagctagtagtcatatctcctccactggctag

SEQ ID NO: 27217 - DNA, 315 bp, Oryza sativa
  Clone ID: PAT_MRT4530_31932C.1
gttgttttttttttttgtgttttttcataagagcaactggaaatgctgctacatgcaacatatgaaaaacttagtcgacagcaaggtttgagagtgactaattctaacttaaaagagtaaatagacggagatcttagatgcaacttcaggtataggcaaggattaacctatgaccatggggtggtgtctcactcggagcctaggaccacaagaattctctgggtttcaccgagtgttcgggtgacatctgcatgcgcagcaagcgcacggtggtcccggtcagcggcagggggttggtggccccgacgagcttgc

SEQ ID NO: 27218 - DNA, 444 bp, Oryza sativa
  Clone ID: PAT_MRT4530_31933C.1
atggagaagcagccgttcgcgctggtgggcgacgccgccgcctcagccgccgccggcggcggcgcatcggtcaagctcgtgcgcgagggtgagaccagcaactgcttccgcgtgcggctggactccgtcgcccacgtcgcgctgcgccactaccccaaggatcagcggaaccacggcgacatcgagcgcagatgcgccagcttcgggcatctgctcgaggtcgacccggcctgctacgcggcgcctgacctgtccacggtccgcgtcgtcgtcaagaacgggagccctcgggagatcccgcgagaaatccggatcaggtatgcttccgattttaggttttggcacgtcgtgccggtccagatcctcaaggtttgggacaagtccctgtcgttcgacgccaacggggagtacgtgccgatctacacgcccgccggcgccgcctag

SEQ ID NO: 27219 - DNA, 3497 bp, Oryza sativa
  Clone ID: PAT_MRT4530_31934C.1
atagcgggcgccgcaccagctccggcggacgcacgctgtcgcggacgctgctgttccgccctggcgttgatgatgagccttcgcttcgcccccccagcgtccgccgctgctccgccgccccgacgaccacgagctgttgcctcttcggcgtcctctccggcactccaccgccgccgcccgcagaacgtccccggcgacttcttcgtcgatcaccgatgcatcgactgccagacctgccgctggatcgccccggaggtgttccagagggtggacggaaaagccgccgtcgccgcgcagcccatctccgacgaacacaggaccaaggccctgcaggctctgctctcctgtcctacttcctccagtcacaccgagtaacctgcaacgatcattcttcaagtgcgaaacatcttcccgttccccatccgagcaatcaatcttctccctggtgttgacctctgtggctatcattcgctagattcatatggagcaacttcttatcatttaacccatccagatggaaacatacttcttgacactccaaggtatacaacgaacctggcatagatcatggaaaaactttgtggaccacgatgaatgtatttaagccacataaatggcctctcggatcttaggaatggggctgagcggcttgaatgtgagaggatcatccattcgggcgatgtagaggatgttactgcagatgttgagtggaaacttactggaaatggcccatgggacattggagctgatttcgaacttatccataccccaggtcatactgaaggttcagtctgcttattctacaaaccagtaaaggcgcttttcactggagatcatgttgcaaaatcagaagaatctgatgatttagatctctttcttatgtacagcaagcaatcagtgggcttgcagctggacagcatgagaaaattgttgaagttagacttcgagtggtttttacctggtcatggctatcgaatccattataaagacgtacgtgctaaggattcagcaatcgagtccctcatagctaactacacaagctaggagcgtattataattctctctaccttcattgtgtataaataacgaccgattctggaatgaaggggcaagagagaatgcacttgccattttgtcagcgagagtggcacttcatatccttggaagatgatggtactgtttttgcttcacgacatttgcaatatatcaagtcgaaaatgtcattgatgcacaagaatctgtgcctttaatgttctttttttccagaaaaagaataaatgataatgatgaaatgaagtttcctgaggaaagtgtcggagctgcagcttcagtcagagatgaggttgcagccactcaccttcctgcacaacaaataccccatgattgtttggatgtatgctcctgggaactcaattggactcacgataccgccatccatgtccatggcgctgagccttctcttcgccgctgcaccacgagctgttgcctcgttccgcgcctcttcggcgtcctccccggcactcgacagcggccgccgcccgcagaacgtccccggcgacttcttcgtcgatcaccgatgcatcgactgccagacctgccgctggatggcgccggaggtgttcaagagggtggacggaaaagccgccgtggccgcgcatcccatctccgacgaccacaggaccaaggccctgcaggctctgctctcctgtcctactgcctccattcacaccgagaaacctgcaaaagacattcttcaagtgcaaaacatgttccccctccccatcgacactcatcttctccctggtgtttatcattgtggttatcattctgaagactcgtttggagcaacttcttatcttataacccatccagatggaaacatactagtcgacagcccaaggtatacaacgaaactggcaaataacatcgaagaacttggtggagcacgctacatgtttttgacccacagggatgatgtagcagatcataggaagtgggctgagcggctaaaatgtgagaggattatccattcgggcgatgtagagcgtgctaccgtagatgttgagcggaaacttactggcaatggtccttggaacattggagctgatttcgaacttatccatacccctggccatacccaaggttcggtctgcttgttctacaaaccagtaaaggcgcttttcactggagatcacgttgcaaaatcagaagaatctgatgatttatatctctttcttattgagcttgcaactggacagcatgagaaaattgttgaagttagacttcgagtggtttttacctggtatgcgctcattcaagcattgcggatagaaccgccgacaatgggccggtcagacctgcggtgtgtggccggtctgaccggcagagtccgagctctcttcgggtctcgagttttcttgctcgggaaagctatatttcgtgtttactttggtttctatcccgagttggacgtggagaagggctttcgtgagggtcgttttgtgcatctgctgccctgcgcagagcgaacgctgctagttgtagcacgcacgctgtcgctgacgctgctgttccgccatggcgttgatgatgagccttcgcttcgcccccccagcgtccgtcgctgctccgccgccgcgacgaccacgagctgttgcctcttcggcgtcctctccggcactccaacgccgccgcccgcagaacatcaccgatgcatcgattgccagacctgccgctggatggcttcggaggtgttcaagagggtggacggaaaagccgccgtcgccgcgcagcccatctccgacgaacacaggaccaaggccctgcaggctctgctctcctgtcctacttcctccattcacaccgagaaacctgcaaaggacattcttcaagtgcaaaacatgttcccgctccccatcgacaatcatcttctccctggtgtttacctctgtggctatcattctcaagattcatatggagcaacttcttatcttttaacccatccagatggaaacatactagttgacagcccaaggtatacaacgaaactggcagagaacatcgaaaaacttggtggagcacgctacatgtttttgacccacatggatgatgtcgcggatcataggaagtgggctgagcggctaaaatgtgagaggatcatccattcgggcgatgtagaggatgttactgcagatgttgagtggaaacttactggaaatggcccatgggacattggagctgatttcgaacttatccataccccagtaaaggcgcttttcactggagatcatgttgcaaaatcagaagaatctgatgatttagatctctttcttatgtacagcaagcaatcagtgggcttgcagctggacagcatgagaaaattgttgaagttagacttcgagtggtttttacctggtcatggctatcgaatccattataaagacgtacgtgctaaggattcagcaatcgagtccctcatagctaactacacaagctag

SEQ ID NO: 27220 - DNA, 2520 bp, Oryza sativa
  Clone ID: PAT_MRT4530_31935C.1
atgccgacgacaccgccggtgactcgcagcagcgggcgcgcgcctctccacactccagcgagcgtgctggtgggcgtgcctgcaaccaccgccatcatctcgtcctacccctcaaccatacttagcgccgcatcgcctcctcatctcgcggctgcgtcgcctcctcacctcgccggcgccgccgccgtcgactccgcatcaaatccccgcgacctcgccccatccgccccagccggcggcggccgactgccagatccccgcgtcgcctcctcacctcgccgccaacgccgccgccgtcgacgttgccgctgcccacccgccccagccggcgacgctgccgctgcccacccacaactcatctcgcggctgcgtcgcctcctcacctcgccgccaacgccgctgccgtcgactccgctccagatccccgcgttgcctcctcacctcgccaccaacgccgccgccgtcgactccgcatcaaatccccacgacctcgccccatccgccccagccggcggcggccgactgccagatattttcttgtcaatcaatatagttgatgtgtgtgagtctgacacacacaagcacaccatccagatcgacctgaagctatgcggctatgcatatcgctgtagaggaaatagggctcaatcttatatgggaatgtgggataagtccggtgagcccgacacggtgagggataggatactgctggagctcgagcatgagttccttgaggtctacacgacaaaaattgacaaggtgaaccagagccgggtgcagctgaggcaggccattgccgaggccgagcagagcttgctgacatctgttcgtccatggagtgctactggctttggtaaagacccggtccaccatgacaacataaatcttgcagagaccgtcggtagttggtcggaaattcattacaaactttcacagtgcaaagcgggaggagtgagcttgctcgctgttgccgcggaggcggaggcggaggcggatcggggcgccgcggctgctcggctcggcggcggcatgatggatccggagatgatgcggctggcgcaggagcagatgagcaagatgtcccccgctgacctcgccaggatgcagcagcagcttctgtcaaatcctaacctagtaaagttagcatctgagagcatgaagaatatgagagctgatgacttcagacgagctgcacagcagatgaatcaaacaagaccagatgaaatgcttgatatggccgaaaaacttgccaatgctaatcccgaggaggttgctgctatgaaggttcaagcagagcaacagatgtcatatgtgatatctggtgccaagatgttgaagcagcagggaaatgaacttcataggtgtgagcagtatagtgaagctgctgccaagtacaagcttgttctaacttatgattcaagcaatgtcaaagcatactaccggagaggccaggcatacaaagagctaggaaacctggaagcggcggtgggtgacttgagtaaagcacatgaactttccccagatgatgaaactattgctgcagttctgagagacgcggaagaaaaacttgcagtggaagggaaaggagcgaagcatccaaaagatgatgcttctgagccatcaagcagtcaaagaagttcatcccctggatacactgtttcacaacctcctgaagaagggaactctagaccttcagggtcttcaagcatagatgctaatggcttatcgaagctgggaatgcagggaatgtcacctgaattagtaaaaactgccagcgatatgattggcacaatgaaaccagaagaacttcagaaaatgtttgaagctgcttcttcgttgcacggaacaagctccagtcctccaaatttgggacctaatatgccagaaatgtctcctgagatgtttaagatggcatctgacatgattgggaatatgtctcctgatgaattacaaaatatgctgaattttgcttctaatatgggtggacctagtgcttcccccttgagaccagagaataagcttcaatcttcatcaagagccacaacaagtagtacttcccagagatcagtggataacagccaaccttcatcttctcaaaatgtcatggaaaatcctcatgaaatattaagcaaccaaaggatgggtgaatcatcatcccctggtgcaccttctacagctgatatgcaggaaaccatgagaaatgctatgaaagatcctgcgatgcggaagatgtatgcatccatgatgaagaacatcagtccagagatgatgtcaagcatgagtgagcagtttggaatgaaaatgacgaaggaggatgctgccaaagctcaagaagccttgtcttcattatctcctgaggctttggatagaatgatgaaatggatggaccgagcacagcaaggagtagaagctgcgaagaaaaccaagaactggctgttaggcaggaaaggattggtccttgctatcgtcatgctgatcctggccttcatccttcgccagcttgggttcatcggtgggtga

SEQ ID NO: 27221 - DNA, 2254 bp, Oryza sativa
  Clone ID: PAT_MRT4530_31936C.1
gaagagcacaaaccccaattcccaacacctccgcgacgcgagcgagcgaagcacgaggaaaaaaaaaaaatccccgaatccgcgacgagcgaggcggcgagctcgctgcttcgatcgatccggagagggaggtagggaggagtgagcttgctcgctgttgccgcggaggcggaggcggaggcggatcggggcgccgcggctgctcggctcggcggcggcatgatggatccggagatgatgcggctggcgcaggagcagatgagcaagatgtcccccgctgacctcgccaggatgcagcagcagcttctgtcaaatcctaacctagtaaagttagcatctgagagcatgaagaatatgagagctgatgacttcagacgagctgcacagcagatgaatcaaacaagaccagatgaaatgcttgatatggccgaaaaacttgccaatgctaatcccgaggaggttgctgctatgaaggttcaagcagagcaacagatgtcatatgtgatatctggtgccaagatgttgaagcagcagggaaatgaacttcataggtgtgagcagtatagtgaagctgctgccaagtacaagcttgccaaggataacttaaagagcataccatcgcaatcagcgcattctctgcagttggtgtgcacccttaatttaatggcttgttacctgaaaacacggaattttgaggaatgcataaatgaaggctcagaggttctaacttatgattcaagcaatgtcaaagcatactaccggagaggccaggcatacaaagagctaggaaacctggaagcggcggtgggtgacttgagtaaagcacatgaactttccccagatgatgaaactattgctgcagttctgagagacgcggaagaaaaacttgcagtggaagggaaaggagcgaagcatccaaaaggtgttgtcattgaagaagttgtagatgatgcttctgagccatcaagcagtcaaagaagttcatcccctggatacactgtttcacaacctcctgaagaagggaactctagaccttcagggtcttcaagcatagatgctaatggcttatcgaagctgggaatgcagggaatgtcacctgaattagtaaaaactgccagcgatatgatttggcacaatgaaaccagaagaacttcagaaaatgtttgaagctgcttcttcgttgcacggaacaagctccagtcctccaaatttgggacctaatatgccagaaatgtctcctgagatgtttaagatggcatctgacatgattgggaatatgtctcctgatgaattacaaaatatgctgaattttgcttctaatatgggtggacctagtgcttcccccttgagaccagagaataagcttcaatcttcatcaagagccacaacaagtagtacttcccagagatcagtggataacagccaaccttcatcttctcaaaatgtcatggaaaatcctcatgaaatattaagcaaccaaaggatgggtgaatcatcatcccctggtgcaccttctacagctgatatgcaggaaaccatgagaaatgctatgaaagatcctgcgatgcggaagatgtatgcatccatgatgaagaacatcagtccagagatgatgtcaagcatgagtgagcagtttggaatgaaaatgacgaaggaggatgctgccaaagctcaagaagccttgtcttcattatctcctgaggctttggatagaatgatgaaatggatggaccgagcacagcaaggagtagaagctgcgaagaaaaccaagaactggctgttaggcaggaaaggattggtccttgctatcgtcatgctgatcctggccttcatccttcgccagcttgggttcatcggtgggtgatgtcctgaatgcagagatcggctgtaactagcttgcaatttgcaaataatcgtcgggtagcgatattgcgtgcttccactttctaacacctgctgaaattctccatgggaaggaaggggtatgaattcgatggatctgctgctttcttgtaacactgttcgttcttattctttttgtcgtgtcgagtcataattatttgtagcatcaattcatcggattcttgtatttcgagagcgtgaaggaatcgacttcaaattgaggtagcactgttattcagattcagataacttgccgacatgtaatgactaaatgagataccactgttgttattatgcacctgagatggttgagaattttttgctggaaggtcctccaaaaaaaaaaaaaaaa

SEQ ID NO: 27222 - DNA, 627 bp, Oryza sativa
  Clone ID: PAT_MRT4530_31937C.1
atggcggcggaggcggggatgcgcgtgaacgtggcaaatctgctcgccctcggggacgacaccgtggagtttctaggcgaggggaaggacggcgaggcccacccgcaggcgtgcgccggggcgcggatgccgcgttccgcctgccgctcggactccgattacctcgaggtgcaaatgaaagcaggaggtaacgggcttgataaacgggattgccaaagaacttctatagaacaaaggaaggaaggtctaaggaagatggaagacgaaatgacgtcaggaccggtggcctcgattggttctcctgattctcagagcaatgaactgaccacatttctatgcagaaatatgctttccatgtatattgttgataagaacatgaagaaactagagaggttcgagtttgacaagacgacgccccctgttgatatctgcaacaacctttggaagatggtttagcgccaactttgccccccgatgccctgtggtctctgcgaaaagagatggaggagaaacttcccgcgggccaacgccttcgccaggatttaagagcagtacgtgatgagcttgataacctagatagccaaagagattctatagaacaaaggaaggaagctctaaggaagatgg

SEQ ID NO: 27223 - DNA, 466 bp, Oryza sativa
  Clone ID: PAT_MRT4530_31938C.1
gtttttttttctttttttttatacaaatcctaccgactcgtggctgaattctaaggatcttggcttcaaggccactttccaacttacaatgcccagtgtaatatctaagttgcctaaagagatatatccctcacatccattgggaagggacttattgggcggtctggcctcggtgaaacctgccgtgcctgcttggttagtgaatcgggcccttgggggctagagcccctaacgcgtattgggccctcttgcggttactcgctcactgtattctagtgttctattttcacttagatgcggccagccttattacgtcactcagaagctgtgctccagtggttttcaaactcatgggatgacccaatagagaaaatcaaagcatcatgtcatcctaagggcaataacctttgaaaggccggcttgctggcggtaaaacatctgctccaagcccttgacatcatggcac

SEQ ID NO: 27224 - DNA, 129 bp, Oryza sativa
  Clone ID: PAT_MRT4530_31939C.1
ccacgccgtccggttttttcgcgagtaacccacgacccccctgcggtgctccccttccgtgctgcagtggagcccagacacagcggggtgcgcggctcctctctgtgccttcgcgccgtggcggcgccc

SEQ ID NO: 27225 - DNA, 771 bp, Oryza sativa
  Clone ID: PAT_MRT4530_3193C.1
gacgaggatccaaccaaagcaaagcaaaggagagagatcccggagaagaagtttgcgtgcaaggcgatcgatccatgagcctgaggcacatgagccgagtgggcgcgcgcgcggcgcaggccgtgcgggagggcgcggggaggtcggtgaaggacaaggcgcagtcggcgacgacgtcgacgtcgtcggcggcggcgaggagcagcggcggcggcagcagggcacccgccgcggggtcggtggagaagggcagggtgagcgcggcggcggcggcgagggcggcggaggagaagcggaggcgggcggagcagtcgctgcgcaccgtcatgttcctctccgtctggggtcccaacacctgatgaagactagtactagtagatgtgtaggctagcgatagcttatctgcatacggtggtgtgaaggttttgttctgcgtctgtgaaaatctcagatgtgaatgaagatgtaattaagtatgtgaatcatcgtctatggatgccgaaaatactgtttattcttggatctcgcttgtgttgtaatccttctttgttgacttcttgttaatactgtctgtctgttcatctatggtacagaaaatactagtactgtttattcttgtacctcggttgtgttgttaagcctcttctctttgttgtaaatactgttagtcagtctgtctgtgtatacacatcctgtagtgatttttcttaagatcattgtgctctcttctgcaagcactggatcaattatctgaagattgttttgctctcc

SEQ ID NO: 27226 - DNA, 437 bp, Oryza sativa
  Clone ID: PAT_MRT4530_31940C.1
aaagcccacaaaaacattcctggtactttttccactactaaattatgggggcttatacaaagtcaagtgggggttcaaagggggggaatccttaggcaaagaaagattttagcccattttcttgctaagggtggaaggcgggggggattataaattacatatcgggtgtcatctgacatggaaaaaaagggggggaaaactttttttccgggtaaggggtaacaccgtaccatcaagggtgggggcagatgcaaggcaaggctctaaaccttttaactttatttttcaggaagacaactgaagccggcagcaaaatgccatatttgcacaatacacaagcggttaaacgaacagtttcaacatacagttgacagggctcaaatgctttgttgtcgcgaatgatttcttttttcatgacagcatttttgcaaagacca

SEQ ID NO: 27227 - DNA, 137 bp, Oryza sativa
  Clone ID: PAT_MRT4530_31941C.1
cgatgtgcagtttttgttttttgatgtcttctgtgtgtatgtaagcaagcccgttttgaaaatggccaagttcagttgaaacttgtaatggtttgtggacttgtgatacacactgtttgtttcaactaattgctagt

SEQ ID NO: 27228 - DNA, 315 bp, Oryza sativa
  Clone ID: PAT_MRT4530_31942C.1
cgacccagcgtccggggagctccaagctgtggaaacctgtgtgggtgtgccacttcatgatggttagctactgccagtcgaggggcaagggttgttatccagtgccgaacgggtaagtatcgcgtaccaacctgaccttgggaggggaacaacaactggaaacggttgctaatactccctaatttgaggagcgggtggagaaatccttccaatgaggggctcgagtatgattatctagtgggggaggcaataacttaccaaggcgatgatcagcaactgggccgacaggatgaccatacaaactggtgctgagac

SEQ ID NO: 27229 - DNA, 162 bp, Oryza sativa
  Clone ID: PAT_MRT4530_31943C.1
atgcacgagaccgacacgcggtgggacgcgctctcgcgctgtcaaagagactgcttggggccctgccggtctgggttcgcgtcagacggccgcgaaattgctctacgatcgtgcgagaccgagtcgttctcgagcttttggaatgcgagactgatgcattag

SEQ ID NO: 27230 - DNA, 1543 bp, Oryza sativa
  Clone ID: PAT_MRT4530_31944C.1
gaagaacacactcttgaggctatcagcaaccagctccactgctagctccaggccggtcatggcggcggctggtcacgatgtgcagctcccccacgtcgccatcttcccgttcatggccaggggccacaccgtcccgatgacccacctcgcctgccttctccgccgccgcggcctcgccaccgtcaccttcttcagcaccccgggcaacgcgccgttcgtccggggacagctcgacgacgacgtggccgtcgtggagcttcccttcccggaccatgtcgtcgcccgcggcgccgcggagtgcgtcgaggccctcgactccctgttcccccttccggcgttcgtcgaggcggtgtcggcgctccggccggggctggaggtgtcgctcgccgccgctcggccccgcgtcggcctcctcgtcgccgacgcgttcctgcactgggcgcacgcctccgccgccgcgctcggcgtcccgacggtggcgttcctcggcgggaacatgttcgcgacgatcatgcgcgacgtgatcctccgcgacaacccggccgccgcgctgctgtctggcggcggcggcgccgaggcggcgacgttcgccgtgccggagttcccgcacgtccacctcacgctcgccgacatcccggtccccttcaaccgcccgtccccggagggtccgatcatggagctgaacgccaagctatggaaggccatcgccggcagcaacggcctcatcgtcaacaccttcgacgccatggaaggccgctacgtcgagcactggaaccgtgaccaccgcgccggccccagggcgtggcccataggcccgctctgcctcgcccatggcggcaccggcaccggcaccggcgccgtcgagccctcatggatgaagtggctggacgagaaggcggccgccgggagagccgtgctgtacgtggcgctcggcaccgccatggccatcccggacgcgcagctcagggaggtcgccggcgggctggaagccgccgcggccgcgggcgtctacttcctgtgggccgtgcgccccagcgacgccgacctcggcgccggcttcgaggagcgcgtggaggggcgaggcatggtggtgcgggagtgggtggaccaatggcggatcctgcagcacggctgcgtgaggggcttcctcagccactgcgggtggaactcggcggtggagggcgtcgccgccggcgtgccgctggcggcgtggccgatgggcgccgagcagccgctcaacgcgatgctcgtcgtcgacgagctgcgcgtcggggtcagggtgccggtgccgacggcgatggcgacgggcgggcacggggtggtcgggagcgaggtgatcgcgcgcgtggcgagggagctgatgatgatggccggggaggggaagggcggcggcggcggcgaggaggcgaggaacgtcgccgcgctggcgtccaaggcgcgagaagcggtcgccgagggcgggtcgtcgtggaaggcgctggaggagatggttgccacgctctgccgccctgttgaaggagatacaccgaaacccacaaaataa

SEQ ID NO: 27231 - DNA, 465 bp, Oryza sativa
  Clone ID: PAT_MRT4530_31945C.1
tttttagaccgcaagcgggcaaggttcctttgttggtttagggtccaatgccaacgctatttacttgaacctttctcaattgtcacgaactgtacaaaagttgcaaaagtggtgggacctatggtgttgcatatcacaccagaatagggaatcacaggctatgatccagatatctagcagaagttgggtcatgcgttaagctaacgataatggcatttttatcgatggatggagagcacattaatgcgccagccataacatgttatggcttcagcaccaagaacatgacattaactacctcgaaggttgatgtaaacaatatggacataagggccataaatacaaaatcgacctttcatgattcaggacgatgtgagcatggaaggctaagctaagctgcaggcctatgaacttccacttctgccgctgcattttgtgccatgagaattgtgcacactcttttag

SEQ ID NO: 27232 - DNA, 271 bp, Oryza sativa
  Clone ID: PAT_MRT4530_31946C.1
gcgaagtcgcgatccgcgcggggaggggggggatctctttaagcttaaggcgcggcggcccgcgcgcggtgtcggtcggtcggtcgcggcgagagcgagagcgagggcgagggcgagagctggagtgtgcgttactccacagtccagtggtggggtgtgtgtgtgtggtggtgtcccagtaggtggagcggttggtgggagctcgtggtcgctcgcggtgggggagaaacgcaacgaaacgggggaggagaaggagaggggtgagcagtga

SEQ ID NO: 27233 - DNA, 537 bp, Oryza sativa
  Clone ID: PAT_MRT4530_31947C.1
atgaacggctgccacgcctactgctcctccccccactgccctgggaagccatatccaagcgtcaccgtcatattctcttcacctcctcctcctcgtgtgagctccagggaggccagattcaggcgcgcgtgctccccggccgacatcaccgccatcttcaccacctcctccttgcacgagctctggggaggctggatccaagcgtcgcataatcaccttctcctcgtgctagcttcgaggaggccgcatctagcctccaccgtcatcagccgaatccaggcgctgctgccatcttcacctcctactccttactgtgttattgccgtcatcgcttgttgctccgccgtccccgacgccatcctcaccgcgccatccttctctgtcattgactttcctcgctccttaggctttggcgctggcggcctcgcctatttcgtcggagctcgctggtcggcctctgacctctctcgctccatgggctttggcgccgccagcctcgcccgctccaccggagctcacggcttggcctctttgtag

SEQ ID NO: 27234 - DNA, 1176 bp, Oryza sativa
  Clone ID: PAT_MRT4530_31948C.1
atgtcggcgcacgtcgccgccgcgctcctgctcgcgctgctgctcgcgccctcggccgccaccgacgtgccgtcgtacccgctctcgcaggcgcagtccccggccaacacctcctcgggcggctccacgtccccgccctgccacctcgacctctccgcggagctgttcggcggcgtggccgcggcgtgcggcgcggggggcgggcccggctcgctcgaccgcgggaggtgctgccccgtcctcgccgcctggctgttcgcggcgcacgcgcgcaccgcgctgtccgtgccggccccggccccggcgctcgccggggagggcctcgacggcggggaggacgagcccatggtgccctacgacaaccagcggtgcgtggacgcgctggggtccgcgctcgagcggcgcgggatcggctcgctccgctgccccgccgcgttcgccgtcggcggcggcggcgccgcggcggccaagaacgccacgccgaccgccgcggtgaaggagctggagaagagctgccgcaacgcctcctacgccggctgctcccgctgcgtccagtccctgcaaaagctgaaggggaacgtgagccgggaggtcgccggcggcgaccgggcgcggcggatgctggggcgcgactgccagctgatggggctgacgtggctgctggccaagaacaagacggtgtacatccccaccgtgtccgccgtgctgcgcgccatgctctacagcgcgcgccccaccgagtcggcggcggccggcggcgcgccgccgcggtgcagcccggaccaggagaacatgccgctcgccgtcgactcgctgcagttcgagcgcgccagcgccaccagctcgtccgccgccgccaccgtcctccgcggcggcggcgccggtgtcgtcgtcagcctgctgctcggctgcctcgcggcgtgcggtgggtggtcggaactgaagggggatatcggcggcgtgcaaatcggcgactggtgagcaaaaccgatatactccaaccatcgccgttgctcgagctggcgggagatggcagaggggagaggccgcctccacctcatctaccgccgcgctcgcccggcggctgccgctgctacttttgtgctggggaggagaggggtggcaagcgacaagcagcgctccgactagaaaactcgagactagttctctctctcc

SEQ ID NO: 27235 - DNA, 1272 bp, Oryza sativa
  Clone ID: PAT_MRT4530_31949C.1
ccgatctgggcggccactagctcaaccaatcaagcaaccaagcaagcgagctcggagctcgtcgcctcgcccatggttaccctctggaagcggaaacccaagcccaatccggagccggaggagaaggagaaggaggaggagaaggatcatcggatgtgcaagaccaagagctccgtcgccaccgcctccatggccgcctccgcctccaccgccaccaccccaagaaagcatcagcatcagcatcagcggtcgcctcgcgccacggcaacccagctcttcgcgattctctccccgacctccccctcctcctcaccttccacgagctcgccgccgccaccgccaacttctcctcctcccaccggctcgcccccaattccacctccttccgctgctccctccgcgggcactccgcggcggtgttccggcgcccgctccggcgggaccaggcgcacgtgggccgcccgcctcgccgccctcggccactgccaccacgccgccatcgcgcggctcctcggcgccgccgcgtcgcccgacggctcgctcttcctcgcctacgagctcctcccggacgcgtcgccgctgtccgcgctcctccgcaaccccaacagcccgtccttcaccccgctcgcgtcgtggcagtcccgcctcaaggtcgccgccgacgtcgccgacgcgctccactacgtccacctccaggccgacaccgtccacaaccgcctctccgcctccaccgtcctcgtctccggcgacggccccaccctccgcgccaagatcgcccacttcggcgccgccgatctcgccggcgagctcctgggagaccgccgggggaggcggatcgagggcacgcgcgggtacatggcgccggagctcatcgcgggcgccgccccgtcgcggcgatccgacgtgtacgcgctcggcgtcgtgctgctggagctggtgtccgggcaggaggcggtgaggtacgagcagaacaaggcgacgggggagtacgagaggacgtcggtgatcgagagcgcggaggcggcggcggaggggggaggaggggaggcgatgcggcggtgggtggaccggaggctgagggactcgttcccggtggaggcggcggaggcgatgacggcggtggcgctgcggtgcgtggcgagggacgcggcggcgcggccggacatgtcgtgggtcgccgccaaggtgtccaagctcttcctggaggcgcaggattggtccgataagttccgcatccccaccgacatctccatctccatcgctcccaggtga

SEQ ID NO: 27236 - DNA, 860 bp, Oryza sativa
  Clone ID: PAT_MRT4530_3194C.1
gaacgttcttatagggatggttgtgtatccgcttgcagggtgagcggtgccgggaatttcccgtggttctgatcccaatggcgttggcagggcaattgtgtgcatacttcatcccgttagcagagtacaatcaggtgtctgtgagcctacagtatgtagcgcttgctgaaccgtgcaaatgcaatgcaagtcttttgccgctccggcgggtgcggaggttgatcatgtatcgggctgttagaattcagatgggtctgcattcggtgatctgttttgtcctcgctccttcttttgcctcgcgccaggtcgtggtggcacggcagactggcgtgccaaagtgggtctgattccactgacagtcagggttgcatggactttcttggcagtgccagggatcaccagggcattggcagtccaggtggagcatcatgccattgctcaccaggcacatacccagttgcagggagcaccacatgcacatacacttgacaggcagggcagacattcagcacattcatccaggcagtgcagcagcacagcaggggaacattcgtcgcacaggagacaggggtttctgcacaggcagtgttcacagtcacaccacaggcgcaagttcccgggcactgcacacactggggatgtcacttcgcccgcgccagacactctcgcggcacggcaggcgtcaaccacaccagcactaccacaccgcgcgcacacacgagacggcgctcgtcactcagccggcacgcgtgtacaccgggttcgtcgactccgcggccagctctagaggatcacaagcttacagtacgcgtgaatgcgacgtaatagctcttctatagtgtcacactaatcattcatgc

SEQ ID NO: 27237 - DNA, 1227 bp, Oryza sativa
  Clone ID: PAT_MRT4530_31950C.1
atggcggcggcggcggcggaggtagcagcagcgggaggaggaggagagatggtggtcgtccgcctgcctcccctttcccaggacgaccccctcttccaagacaagaaggatttggtttcaaagggatttctcttgttctgtgtttacttcactcgtggtaagaagctgcagacatctcgaaaaattttacttgagctttattttactggagacgatgatttcgggccattatctacaaggaatgaacttgaatctctaaatttgttgctcaaaattttgaacacgttgcttctgactgccaatgttggtgccatgggagttttgcaagtcctacgtgatgaaatacttattaggctcagatctcttgagttggaagacaatgaccaaatggtagttcaaatacgaaaccagaacatggaagattctcttctgaaatggggggagcaacatggtgttaaaactaaattgcaaatagcattttttgaaggagctgggagaggaatggtagcttctgaaaacatagatgtgggggatattgcacttgaaattccagagtcttctatcatatctgaggaacttctctgccagtctggcatgtttcttgcattaaaagatttagatagcatcaccactgagactatgctattgttgtggagcatcagagagcggtacaatccatcttcaaagtttaagatatacttcgaggcactcccagcaaatttcaatacagggctgagttttggaattgatgcacttgctgcattggaaggaacccttctttttgatgagttaatgcaagctaggcaggcaatatactgttatggtattgttatattaattcttcagatcactattcaactggtttctcctcacattcttaactatggtcgggtagataaagttacgaaatctttgaaatttcctctgtctagaccatgcaaagcaggggagcaatgttttctcagttatgggaagcatccaggatctcatcttatcactttctatggttttctaccaagagacaacccttatgatgttatacctttagatcttgatacatctgtggatgaagaagacagttcatctccgtccgtaactacaagccaaaccagtcatatgggagaacgcatgttgggacgtcaatctcgcactggactacaaagatctacaaagaaggatagttttgtccattgttacttcgtgtacctcaggcttggccatgcttga

SEQ ID NO: 27238 - DNA, 795 bp, Oryza sativa
  Clone ID: PAT_MRT4530_31951C.1
ccatcctccaaaaccacagacaacatcaccaaaccacaaatcaagaaagaaaaaaaaaacagcagcagcaatggagaacaagaagagatcaccaccattgccaccactgtcatcagtagcagcagtagtagtactactggtactcctgctactgttcactttcatggcaacggaggccaacgcccaggtgttctgcaggtcgcagttcaacctggcaaacgaggcctgcagcctccggaccttctccggccccaacccggcggtgccgctgcgccagctcaacgagtcggcggtggcggtaatggcggagcaccgcgagcgcgagcacggccatggcggtggcggtggcggcggcggtgggcggctgcgcagccaccgcgccgacccctacgacacggcgtgctgccggcgtctgatgggcatcgacaacgcctgcatctgccaggccatgtcctacctcccggtgttcatgagcagggtcaagcacgccatcaagctcacccccgtccccggctgcgacgtctccttcgagtgcgccgccgcctactgatcgccggagcgccgccggcggtggcggcggcggccatgggtctttctttctttctccacagcattttgcatcccacagctgaattcagagaagttaacaacatctagagaaatatgtattcatgttcttcagatgctgcatcattagactactactacatggtgtttgtattagcagtaatgtggctatgtcaatcattttgaatttgaaactaattccatgcactaagagaagcaatgttggat

SEQ ID NO: 27239 - DNA, 549 bp, Oryza sativa
  Clone ID: PAT_MRT4530_31952C.1
gaaagggggcgtttgcattaatttatgaaagccagaatggttggagttcaccttggagatcagttcctttcaatacaccatggcatatatggtacaagaatagattgagaatcctatctgtcattatgtgctgccaacggccgacagtgtgggctcaaaaatctataaggcttcaaacaaaagcgctacttggaattgtgatgcagagtcatcatacaaatgcctctcgcgattcagtaggcagtgtcaactcaggctcaaattcacccaggggagcaaagtaagaatcgaccatgtccgctgatacatactcaagggcaggtggatcccactttggagctaggcccttctccacaagacgtgctctgacaccctcacgaaattcatgagaaaatttctttgagattccattgatagacatgcggtattcacgcacaaggcattcattaagtgtttggtttctaccttcacgtatcgatcgcagtgaaacttttaacggaagaggagaagcctttttaaacgtttagggccaagtagaccaatcttatt

SEQ ID NO: 27240 - DNA, 257 bp, Oryza sativa
  Clone ID: PAT_MRT4530_31953C.1
atgtcctccaagccaattagttgggaaccgcagggggcggaattcgagctcggtaccccgcgattgcactttgtcatcatggtggagcgacttcttctttattatcttcggcactggcaaactctattgctgctacttcgcaagttttactacttcaccaaccacgacgtctttacattctacttcaacaacttcaaatatttcggtttagacgagtggggatcctctagagtcgacctgcaggcatgcaagcttga

SEQ ID NO: 27241 - DNA, 1330 bp, Oryza sativa
  Clone ID: PAT_MRT4530_31954C.1
cccgggcccggccgggactctcccacttttgcttactctctccgccctcctaaaccctacgaccatgccgaccctcgccgccgccgccgccgccgcccgccgcgccggcggggcactgcgatacgccgtgctgggcggggttcggtcgctctcatccctccagccgtcatcctcctcctccgccgcagccgccgccagcgaggaggtgctggtggaaggcaaggccagcgcgcgcgccgccgtgctcaaccgccccggccatctcaacgcgctcacgaccaccatgggagctaggctcaataagttttatatgtcatgggaggacaaccctgatattggctttgtcatgatgaagggcagcggccgagcattctgtgctggtggggatgttgttaggttgcaccagcttataagtgaaggaaagttggacgagtgtaaggatttcttcaagactttgtacagttttatttatgttctgggcacctacttgaagccacatgttgccattcttgatggtgttaccatgggtggaggtggaggtgtttccattcccggaacatttcgcattgccactgatagaacggtatttgcaactccagaagtacatattggcttccatcctgatgctgctgcctccttttatttgtcccatctgactggtcatgttggtgaatatttggccttgactggtgaaaaactcaatggagtggatatgatcgcacttggccttgctacacactattccatgagtgatcggttgaatctggttgatgaacgccttgcaacattgttaactgatgatccatcagttattgatacttcccttacacattatggagatcttgtgtatccagataagagtagcattgttcataggctggaggttatagataaatgtttcagccttgaaacagtcgaggagattgtggatgccatggaaattgaagcagctaggttaaatgaagattggtctaccttggccctgaaacggttgaaagaggcttctcctcttgcgttgaaagtttcactgcgatcgatacgtgaaggtagataccagacacttgatgaatgccttgtgcgtgaataccgcatgtctatcaatggaatctcagagaaattttctcatgaatttcgtgaggtttatcgaatattatttattgatgaccaaggtgtcagagcacgtcttgtggagaaggacctagctccaaagtgggatccacctgcccttgagtatgtatcagcggacatggtcgattcttactttgctcccctgggtgaatttgagcctgagttgacactgcctactgaatcgcgagaggcatttgtatga

SEQ ID NO: 27242 - DNA, 241 bp, Oryza sativa
  Clone ID: PAT_MRT4530_31955C.1
gccattgtgtacgcttggattaggggtggtaggtaagctatgaggagctggctggacatctaccagggcgaccacaagctcacatacggggtagcaggaatgcgaaacatacccttcctcagagctggtgcacgcggcaccgttgcggacaaccaccatgccttccttcgtgatcagtacaggagccatgggggtcacgatcgacgtggacgcctggtacatggagatcaaaccctgctga

SEQ ID NO: 27243 - DNA, 102 bp, Oryza sativa
  Clone ID: PAT_MRT4530_31956C.1
cccatgcgtccgcagaatcttgattacacacgtcctagtcttttatgctattctaactacatattttcagtaaatcttccatggtccattttgtttgccatt

SEQ ID NO: 27244 - DNA, 432 bp, Oryza sativa
  Clone ID: PAT_MRT4530_31957C.1
atggtgacgtgtccggccgggtacggtgacatgccggtggattgtgtcttgtggaagtgtagtgcttctgagctgaagactaagttagaagaccaaggctcagaccccaacaagtttgttaaggttggatctcacttccgaaagggaagagataccactagtggaaggtacaaccacaagaggaaagggttagtgaagacccagctctttcaagaggttgggatggatgtggccctcatcctccgcgtcgggcggcctcgatctggtagtgccgcaaatccctcccgccgccaccgccgctccctccctccacgagccgccgccacggccactccccttcggattctactatccgttgaggagctttcaaagagccgggtcttcactaaccctttcctcttgaggcaaaccacaattagatcggtgccttaa

SEQ ID NO: 27245 - DNA, 322 bp, Oryza sativa
  Clone ID: PAT_MRT4530_31958C.1
gcctggccacaattaagaacaacgtccacattctgaaccgcaaatcactgatcgatacgaggcgaccccactccacaggtatccttgacggcagcgacgaaaccaacttctccgagaaagctccaactaggaaggacttcagctctggcgaggatgacgtcagcaagggggggaggtgcggcgccggcaagcgggccccgcatatcagcggctcaagggggagggagtggcggttgactggtgggccccactgggcagcgacacaagaggggccggtccaccgtggaccaagtccacagggccgcgggtggtgcgccacatg

SEQ ID NO: 27246 - DNA, 555 bp, Oryza sativa
  Clone ID: PAT_MRT4530_31959C.1
gcgtccgctcttttttaatctcgctctcaagtcgcagcagcactcagcatcgtggcggtcggtgcccggggcaacggctactaggcggtgcgccgtcagcgcggtcgcatcggctccaagcagatactcaaatatttcctgttaattagagtattttttccctttctttggtgtataagaaataatttttttttgttttgttttcttctttattttttccatttgtcttatggacatgttagtttctttttatttattttttttctatctatatttattttattcttacttctttttatttttattattttattattatttatttttttattttttatttttattatccatttttttttttatatttttttttatatttattattttatttttttttttttttttttttttttttttatttttatttttttttttttttttgtattttttatttattattattattattttattattttattcataatatatttttttttttttattattttttttattatatattattaattatattttttttattattttttt

SEQ ID NO: 27247 - DNA, 338 bp, Oryza sativa
  Clone ID: PAT_MRT4530_3195C.1
gtccttggtccttacactctttttataggggcgtgggtcccacgtctcagggagagtgagagaagctttttttttctacatctgagacgttcgccggagatggcgtctgagctcacgtaccgcggcggcgcgggggccccgctccgcctccgacggcggtgagtactcccccaagccctccaagccgctctcctggttcacccgcgccgtccgttacgccgtcgccgagcaccgtcccgccttcgccctcgccgggatgctcctcgccgacggccttttcttcctatacgccccttccttcgacgccttattcttcggcgtcaccaccaccaccacca

SEQ ID NO: 27248 - DNA, 379 bp, Oryza sativa
  Clone ID: PAT_MRT4530_31960C.1
aactttatttttataaccaacaacaacaaaaaaaaaaagggagggttttctaaaaggagggaggggtaaaacaaggggtgtccctctgcggggcccggctttccgcacccgtgcccgtggaagcgctcctcctttttcgggagacctgatttccccttaggggcgcgtgttttccatccgatcctctcggttactttctgaggctgccattttgatgatgtgccacaccgtctgccttcactctcagaggctgtctgcaaggagcgccctcattgacatcagtaacgcttgttccctctaccatttacagcgttgagaacagtcttgtgctgtgcactttcaagattcctgcagaggttgtcacttctattgagacagc

SEQ ID NO: 27249 - DNA, 1677 bp, Oryza sativa
  Clone ID: PAT_MRT4530_31961C.1
atggccgccgtcacgctcctcgcgctcggcaacgacgcgcccgacgtcgcgggcgaacgacgacgcgggagggacggcgaacggcacggcgatgagcgcgacggccccgacgacgaacgcggagatgaacgggcgtcggcggccagcgacgggcgatgcggcggcggagacggcggcgaccagcgggtcgggaggaggtcggcgtggcgaggagggagaggagaagcggtgtttctgttataccttgttttccccgtgcaatcagtagagttcttcaagagtgttgggtgggctccatatcatgttttggattacgacttcttcagaaacagttactatgtcaatttttacatgtttcgagacgatgtaattgctacctcaagtcagctacagattgataataggtatatccttagcgaacaaactcccaatcgtgcgccagtagattggaagatgggacatctgattgggagaggggatgacaatgcaatgttgtcaatccgagcagataacttgtatgtaaccggatttgccaacagaaccggtcattggcatgtatatccaaagtttgcagatcaaattcccgaacccaaaacactcctgacttttggagacgactaccattctcttctaggtgatggttccagccaaaatctacccaaaataaatctcggactgcatgccacattaaatgccatcgagactttgtccaactaccagccatcctcagataacacggccatcaaaatagcattaaccacgctaattgttaccctgccagaagccgtacgtttccggcctatccgataccggttattggatggatggtttacagggactcgtcttactagtcatttggcaaaggaagtggttagctggcgagacatgtcctgtgctgtccttatttttgacaagtatggaaggtggtgggcaagtgcagaggccggaatattgcaggggaagttccagattcgaagcaaatttgataccctccaataccttgatgtgactctgcattctacaatgatatactaccctttaaacaaaaaaacactaacctttggattcgctaaatcacgcattcaacgccccccaaccccttctcctcgatcttccttctcccgacctcaccgccggcaaggccgcccccagctgctactgcgccacctcaatccccagcgacatgggacggatggtactgcacgagtcgctcgacggcgcggggggcgcgaccccgggagggaacgaagcagcagcatgtcgggcgggcggctcgacaccagcgtcgccaacaacccaaccggtgaccggacctcgcatgcgccgcgctctgcgtcgccgcagccgcaggccgcagcggacgactggctcgctcgtctcccgatcctgcgtgctgctcccccatcggacaactacccttcttgtttgcgcccaccggtgcgccgcctgatcacgtcttcttcgaccacctcggctgttccatctacatccacaagatacactgaagatgaagatgatatgattggctttactggtttttacaatgtggatattttcttttcacatgatcccaacagccttcctaggggttatgagaaacacaaaaacaagttgggcaaagaaccacatattatgacatcaaagtcacttcagctgtttatatctcaggaaaggtag

SEQ ID NO: 27250 - DNA, 552 bp, Oryza sativa
  Clone ID: PAT_MRT4530_31962C.1
atggaccattatacccattccgtggcaccattcacccgctcccccattctgaaaccaacgacatggcggctgcggcagcggcgcggcggctgggtggggcgaggcgaggagcagcagatgcctagagcctgggttgctctaggcgggccgacgcaccgagcatcaggcgacggccgcggctgcgcgaagcatcccaacgcggccaggagtgagcaggtgccaggcggtgaaggaggcgctccggcggcggcagcgcgcgagcaggtgaggggcgcggatgcggaccatgcggtgacctcggcagcagcacgcgtgtatgagcagctccagcggcagtgcgcgagctcgcggcggcggcggccttggcagctgcacgccagcacgcgacgatttgggcggcgagcgagcatctcgtcgacgaggcatgtcgagcggctcgtccacgggcagcttgcaacgtgtggggcccgggcccaagttgctccacacctggctccgcccctgactacaaggaatttatttggtgatcttttttatggtgaatgtgattaa

SEQ ID NO: 27251 - DNA, 7659 bp, Oryza sativa
  Clone ID: PAT_MRT4530_31963C.1
atggcgaatactaatccaaacccttttcggttccttcgtgcggggcaagttgtgcatcaaggaggggatcagcgtcttcccagagtcgatctttctgctgctacaagacctcctcggcaacatgaacagtatgttttggagttatgggatgatcatagggttcttattactaattttcttgagcaagtccagcattttcaagttaggcgcagtttcccacatggttctgctgttgggttgtttaagatgggttctgctgtcataagagatttgttggtttattctccgtcttttgtctatgatggcattcaccaggtctgttttgttcgccatgatcagggccctaattggcgtgcttctctgttcactaggaagggttggttcctactgcttgacttccctttggattatattaatatgcaatatatatgtctggctacttccacctttggtcagttagattattggtgggaagaggatcccattaagggcagagtcatgcttagagcaatgtataaggatgctgattcagttcctaagaagattgtcttgcaagatcctacggctggggctggtgaatcctggactatatctgtttttattcttgaaggagaatttgcagacatgttcccgccagatgaagacctgcctccagttgggcataatcccggcaatgatggggacagtggttatgatggtggcccagatgacgacaatatttggcaatttggcccaaatgtgcatgtggaagaagatcacccttgggaccaagctgtagggcaggtccatgatgatgcagaaaatttggatcaggctattgataacatgggccaggttgttaacaatgacaattggcagttagttactattgagcaaacgaatttgggtttattttctgaccttgcttctgctttcactcaatttgttcatcaatggtctgtaaatttgattccttctgctgtgattagaaatgggttagtctctctgccaaggggcccgccagttgtggagcatcatctgttgctggagccaactcctttggctgtcttgccccctgacaaccctctacttcctgataacccttttgatatgccttctgatgttgttgatgttaatccaagccctgttacacctaattcaaggattatcacgaagctgaaccctgtttctccctgcaaaagaaagaggaaaatggtaaccccattggtggattcttctgtcaggagaagtggtagactattagctatcagagatgggtttaggcaagagttagctgaagatccaaacatgggggttggtaagccaagagggaaggatgtcagaaagcttaagcagttggctgatgctagtggagtggtatttcctaatgaactgattccttttgtggatctccattctgatatttctattgataattctagtgatttgtccactgttatccctgctgattgttctgttgatttaattcagagaattggattggacatatgtggtgcttccctggaggaggagacaaagaggagcagttttgatcattcttgtattaggaagcttgctcctaagcgttttgataaatttgcattttcaccttctaggggagcttctgggggtgttttgatctgttggaatagctctatttttacagcctcaaacattgttattgagagttttggtatccaacttacttttacttctactcactctaatctttcttggaccctggttactgtctatgggccttgtgctggtattgagagagacaattttttaacctggcttcatgatctccaaattttggatgatgatctctggttactcttaggggattttaatttctatcggtcagtcttcaacaggaataagtcaggtgcagatataaatgatattttccttttcaacgaggttattagtgatctgggtttggttgaactccctattaagggcaaagcttttactttgagcaatatgcagcaacagcctttactagagcaatcagactggtttttcacttcccccagctggacactgtcttttccccacactttggtgaaacctttggctagatccatttctgatcatacaccttgtgtggtccaaattggaactaatattcctagagctaatgtgttcagatttgagaatttttggattgaacatgaaggttttttcgacttggttcagtctatctgggataaccatggttcctcccatgattctgctaaaaatatttcttcaaagcttaaagctttaagaaagggactaaaaaaatggagtaagaatctttccagactccagaagcttatctctaactgtaataatgttatctcttttctggacagtattgaggaatacagatatctttctttgttggagtggaatttcagagtttttattagatctaagctgcttacttacttaagatataagcaagtttactggcaaaagagatgtaccattagatgggcaaaatttgggggagaaaacacgaaattttttcatgccatggcaactgagtcctacaggaaaaattctattgcttccttgatagatgttgatggtactataatctttgatcatgagggtaaagctcatgtggcttgggatacttttaaaggtagaatgggagtttcaaattttgtgtctatgccttttgatctctattctttaattacccctcaaaatggtctggaagttcttgaggctccttttcccaaatccgagatagataatcttgttaagaatcttccaactgatagagctcctgggcctgatggtttcaatggactttttatgaagaaatgttggcccataatttgtcatgattattataatctttgtcaagattttcattctgggtcacttgatttaaactccttgaaccactcttttatcactttggtccccaaaaagttgacccctgaaaccataaatgattacagacctatatctctcatgagtatctctctaaagtttttgacaaagttgttggcagatagattacaaaagactattctcaatagagctttctctttggggttgctctctaagccctttccctcaaatcaggatcagaatttccctatggttcaatatgcagatgatactctcctttatgctaaggctagtggaagagaactctttactttgaaagctttgctccaatattttgctcaaggcactggtttgaaagttaattaccataaatcctgcttaattcctataaacatatctgatgaaaaggctgatttgctggctggagtgtttggttataaggttggttctcttccttttacttatcttgggctacctttgggaaccactaagccgagggtaattgattttgcccctttggttgatagagttgaaagaaggttgtcggcaaatgctgctttcctctcttatggtgatagacttaccttggttaacacagttttttcctctctgcctacatattatatgtgtactcttttgttgcccaagactgtaattgacaatattgatagagcaagaaaacattgcttgtggagaggttcagaggtaaactctaatagaaagtcgttggctgcctgggataaagtatgcaaaccaaagatgaaaggaggtcttggagtcattaacctttcaatccagaatcaggctttactcctaaagtttcttgataaattttataataggagaaaggcttataatgaatatttggaactgaccgagtttctcagcaacatcaacttgtctcatgagaatgatgtttggtcttacatttggggtggccttaagtatacctcccaaaaattctatgccctcaattttagatcactgcagcctccgaggcatttcctctggttatggaagagtaaggtttctcaaagggttccgatggagggttccgaggcagcgcagcagaaggacagcgtgaaggtggtcgtcaacatccgaccgctcatcacgccggagctcctcctcggctgcaccgactgcgtcaccgtcacgcccggcgagccgcaggtccaaattggcccacatgtcttcacgtatgaccatgtattcggcagcacaggctctccttcctcgttaatatttgagcaatgtgtgcatcctctcattgattcattattccgtggatacaacgctacagtcctagcttatgggcagactggctccggcaagacatatacaatgggtactaattatactggtgaagctaattgtggaggaataattcctcaagttatggagacaatattcaaaaaggccgatgcattgaaggatggcacagagtttttaattagggtgtccttcattgagatcttcaaggaggaagtctttgatttgctagatgcaagtcatgctgccctcagacttgattcagggtctgtagccaaagcaactgcacctgccagagtgccaattcagattagagagactggtaatggcggcattacacttgctggtgtgacagaggctgaggtgaagacaaaggaagaaatggcctcatttttggcacgtggttcttcctcgcgtgcaacaggaagtacaaacatgaatagtcagtcaagccggtctcatgctatctttacaatttcaatggatcaaaagaagacctcgagtgcctctgacaagttatctaacgatgactatgatattttgtcctcaaagtttcatctagttgaccttgcgggttctgaaagggctaaacgaacaggagctgacggattacggcttaaagaaggaatacacataaatagaggccttctagcccttggcaatgtcattagtgcattaggcgatgaaaagaagagaaaagaaggagcatttgtcccatatcgggacagtaaattaacacgtcttctgcaggattcgcttggaggaaacagtaaaactgctatgattgcttgcattagtcctgccgattcaaatgcagaagaaaccataaacacactcaagtatgccaatcgtgcacggaacattcaaaataaagctgtggtatggtcattctccttaaagataaaccgtgacccagttacagcagagatgcaaaaattaaggagtcagttggagcagttgcagactgagctcctgttctcccgcagtgggagtgctgctctagaagaactgcagctgctgcaacaaaaagtgtctctacttgagctaaaaaactcagagcttaaccatgagcttaaggaaagggaattgtcatatgaacagttggcacaaagtgcacttgccgcccagcttgaaaaggaccagttgatgttgaagattgaatcagcacgcaatgggaaatcatgggatgacattgagaatactgatactgaccaggatgtggaggtcatgaagagatatattttgaaaattcagcagttggagagtgaactgacaaggcaaaagttctctagtacctgcaaaaatgatttacatgatcggtttgccatggacaaggatttgcttctcgatgacttgggttcaggttgtgaagtaggaacacctgatgcttcaagtgccgtaaactttagaataactccagtacctgcaggtgaagccgatgaagaaaaggaaagagaccattcatccatgcaagacaaacttgataaggaactccaggaactagataaaagacttcagcaaaaggaggcggagatgaaagaatttgcaaaaagtgacacctctgttctcaagcaacattacgagaagaagttaaatgagatggagcaagaaaagaaggctcttcagaaagaaattgaggaacttcgtcatgcattaaccaatattacttcttctactgatgagagtgcacaaaaactgaaagaaaactaccttcagaagctgaatacacttgaatctcaggtctctgagctaaaaaaaaagcaggaagctcaacagcagctaatacgacagaaacagagaagtgatgaggctgctaagcgcttgcaagaagatattcatcgtataaaatctcaaaaggttcaacttcaacaaaagattaagcaagaatctgagcaatttagatcttggaaggctgctcgggaaaaggaagttcttcaggttttacagcggaaaactgaagaagcagcaatggctacgaaaagactgaaggagtcgcttgaagcaaaaaagtccacccgtgacacatatggaagtgcaagcggttctgggattcaggctttaatgcgggccattgatgatgaacttgaagtgactgtaagggcatacgaattgcgttcgcactacgagcgacaaatgcaagagagagcagcaatctccaaggaaatagcaaagctgaaagagtgtcctcaggctatgtctcctagtgctagaagttctaggatatcagcgctagaaaacatgctgtcatcatcctctagtgcaatggtgtctatggcttctcaactgtctgaagcggaggagcgagagcgtgcattcaatggtaagggcagatggaaccatgtaaggtcccttcctgatgcgaagaacacaatgaattacctttttcagttggcatcatcttcaagatgtcaacaacttgacaaagaggtgatgtgtaaagagaaagaacacctcatttgtgacctgaaggaaaaggtggttgcacttaatggtagaatcagacaattagaaactcaagtgaaggatttgaataaccaaaatatgctgttatttactgctataagtgaagcaaaaaatcctgttggcacttccagaaagggtactgttggttctgaagatggtcaacattatgctatgcgaaagagcattcgagcttcccatagtttacattatagtaagaacagcttcttgtggtctgatgacatggatatatcagattctgagaaatcggaaggatctgatgcagattgggaagcatctgatgcagactacggagcatctgatgcagattgggaatgttcgaagaaggtcagaagacgtcggcaaacagtgtccagccatctgaatcctaacccgggtagtggtactacacaaaaaagtgcaaaatcagaaatggccagtcaagaaaagtctacttcactggaccttgctccacagtgctgctcatgctcgaaatactcatcctgcaagacccaaaaatgcgaatgtagagcttcaggttcacattgtgggggtgattgtggatgtattacctccaggtgttctaatagggtggatatgaaggaagaaaaggaaggtggtggggtggttgaagtatcttcttcagatgatgtggatgatgcaaaagttcaggaaattgtgaaggagggcgtcatgcttcttgagaattctatgtcagagaaggaagctcaagagacaaaatcaagaaaaccactggctgatattggaaatggtgtggtgaaacaaactggggcaaaaccaaagcaaaggaagaattggcgcaagtctaccgttcagctcgtcccttcagcgccacctctcccacccacggcgccgcagaacaccgagccggttccacggaacagagacatacccctcaggctgccccgagcaatgtcctcaccagctgtggacagcatccctctcacggaccgcaacgccgcgaagcctgacgaatccatgagcagcaacaaggagaacgtcactgccgttcgtgcgagatctcctgctcggccgagaaagaacgccaacgagaaagagaatcacttgcgatga

SEQ ID NO: 27252 - DNA, 1698 bp, Oryza sativa
  Clone ID: PAT_MRT4530_31964C.1
gcagcgcgaggagttgcaaaacatgcataaagtattttcttttataattgagcaaacatttcaactggtctaccaagagtctgtattaaattattacaaaatggtcatagtttaattcacacaaactcagtttacaaatccgaatctgcatattgaaaagctatatcatggttcgttattaaagcatagttgttcagttcgttacttaacacaaaaaacagttttggtgatgcttgtagcagaggttaaaagtagcatcatattgtgttatttgcgacactcctcaatagcagaacgcagcgcccgatttggaacgagtttcttgtgttcaagttcaacattggtaattggtgatgtgttatggcctctgcggaaccaatccctgataaacttagcttcgtaggtgtgtccatcagctgccataagaggatcattcatgacttcatgagatataggacaggtgaaatgttgaagtatgcggttttggatcaattgaagccgttcaaaacgctctctgcattctgagagttcgcgttctagatttgcattccgctcattggctgacctaagttgttcaacttggcttgacaatgtcttgaccagcttttcagatttcatccgccttgagcgctccttggatgctttgttctcaccttcgttcagttgtttatgcagacattctatttctctttggtgcttcgtcaagtcctttgctatggcatcactgtctttagccattttaatgcgtgctgcacattctcttaggctgttatgaatactgagattttgtgggtcatgcttcaaaccgtctacgagagttgcaatagcatcctcatatttggccatcgcaatctgaaccagacctttacggagatatcccatccctaaagtatcatccagctcaatgcatcgatttgcatcttcaagcgccttaggcaatgaatttagctcgacaaggcatcgagctctgtcactgaagttctgggtgatcatatcggtcatgaaaagatgaatgccaaaattaaaaaggagcagctggagacatatcttgggataccttgggttcctttttatagcttcagaaaactgcatttctgcttccttatactttttcttacggagaagttctaggcctctgtctcggtgggtcttggcagcttcctgatcgagccgctcctgctccgcaaacgcgtccctgttcctcttcgccatgtccagcttagcccgcgtctccttgctgccggggcgcagctccagcgacccctccagcgccgtgatcgccggctcgtgatccgcggcgcagacggcgaggttgagcagcgccagcgccttgaggaacagcgcgtcggcggccagcttctcgtcgcagccgcagcgcgcgtccctcctcctcctcctccccaacgcctcgtcgcagtccgccacgcactccttgcacttgatcgcgccggcgtcgagcggcgaggtgaatcggagcggttttctctcgcgaattgcgtgtgggattggaagtgaactgaccttgttcatgctgaagttggctgcggcgcgtttgatgaggcaggaggtgtcgccggggtcgaggtcggcggcggcggcatagtgggcggcggccctcttgtacagctcctcgccgtacgcctcgtcgccggcctccttctcgcgctgcgccgcctccttccgctccttcgcccccat

SEQ ID NO: 27253 - DNA, 2362 bp, Oryza sativa
  Clone ID: PAT_MRT4530_31965C.1
tacatgctactccataaacatgggggctgaggataaatgcagtagacaggcgagtcgtgttcaggtccaagctcgagaacccagcatgcctgatgatttcgcctgtttctctggtgaggtggcacccgtcagagacaaactgctgcagaggattaagggcaccttgcacgaatcggaggaaggatccatcaggcgcagcgacatgctcaatgaatatgtagagaccaccaggcttcaggactcgttttatttctctcaatgccatttcaacgtcacttacagaacacattaccagagtgccaacaacagcatccattgaattgtcctcagctggcaaagcttcacccacccctcttctgaaggtgaagttcgaaggtggaagtccagcagacactgcagctgctctggcatactcctccatgtgtttattaggatccaccccaactatgttaacgccatcggcatttgcatagtacttgagattagggcctgttccaacaccaagttcaagaatgttcttcccagcagtcatcaattgggaaaagagctttgatttatactgtgcaatttgtgaattctgatatagtgatatctcagcctcgtaaggtttcatgaacttgtccatggccgtggcgtagaacttctcgtaccactcccgcatcagggccagggccggcaagaagcttacttcggggtcgacgggcgaggcggcgggcgacgggagggcgagcagggggaggagagcggtggccgaggtggagccgatgaggtggcgccggccacagcggcagaggggagggagagcagcggtggtgcacacgcggctggttttgacggtgagggatggccggctcccgaggccggtcgccggcgtgagcgcggcggcgccctgctgctgcatgccgtcgacgagcggcggaggacgggggcctcgtctttgtggtggccgaggccaccgcgcgcgaggtgttactatgggtggtgcccatggaggagacggagtggtgccggcggttggggcggtggtggtggagaaggccaacgtagaggcgaggtagtggccaagaaggaggctctggggggggctctcgtgatcgtgcaaaaggtaatgctggcgctggtggcggcggtcgcgtcggcgtcggcggcgatcgtgtacctggcgcacaagggcaacgtgagggccaagcgtgtggtggggtgtgtggtggggacgacgcaggaagcggtggcaatggtggtcaccatcgatctccgggaggtcaccatcgatctccgggaggaggacgaggcggcggcggcggcggcgatgaaggccatcgctgggaggagcgacgaggaggtcctcgcggcggtgctcgcgcgcaagggtggccctgtcccgttcctccaggcggcgatcgacgccgcggcggcggcggcgacgaaggccatcgctgggaggagcgacgaggaggtcctcgcagcggtgctcgcgcgcaagggtggccctgtcccgttcctccaggcggcgatcgacgtcgcgcagcggcgatccgacctgttcctcgacccctccgcaccgggggtggtggcggagatggcggtggaagcccaggccaaggcggaggcggaggagaggcggaagagggcgaagggggagccgaggaaggcggaggagatgctgaaggaggaggagccgatgaaggcggaggagatgctgaaggaggaggagccgatgaaggcggaggagatgctgaaggaggagccgaggacgccgatgagagaggcggggagggacaaggtggagagggcagcggtagtggagcgcgtaagagaccctaagcctaatgctggaaatggtctggacttggagaaatattcctggactcaggaaaggccagaggttaccataaccattccagttccccaaggaacaaaatcaagtcttgtcacttatgagattatgaagaaccatctgaaggttggactgaagggttgctcttttataattgatggggagctttttgagccagttaaagttaatgactgcttgtggaccattgtgataaaaggtgaccctgaacttgacccccgggacatgaaagtacctgaactccgtgattgtgatgttgaggccaaagagactattgtgaggatactattctgcaagggacatcggcagcatggccgggcgattgaacgttgccatggactgatgaaccgccttgcttggatgggaatgaggaatgggcacaacagggaggcatggcgaccacgacaacgggtcctgcctaatctttggaagccctatcagattatcaatgcggccatcactacacgatcttggagttgctgggcttcccacatgcacgggctataa

SEQ ID NO: 27254 - DNA, 1372 bp, Oryza sativa
  Clone ID: PAT_MRT4530_31966C.1
ccagaagccaagaggaatcaaaccagcacaagggtcttcttctcaacctcccctcctctcccctcccccaccgtctctcatggccgatttcccgccatgggcggacctcgccgacgccgtcgtgcgcgagatcgccaaccgcctcccctgcgtgtacgaccgcgtgcacctcgccggcgtctgccgaccatggcgcgagtccctcgagcggctcccgcccctgcacccgcctcccaagctgccgtatctcatcctgccgctcgccgagcagccggccttctcctgcgtcctgagcggcggcgccacccaccccttcttcgtcccggagcggattcgccacgcttgctacttcggctcgtacgacggcggctgggccttcctctccactcttcatcctcgagctcagggttatcgagattatttcctcaccaatctccaccaaaccccgaataccttcgttctccccgtctggatccagttggaccgcgaagagcctgtattgcggcctaggcagaagcggctgcgcccgcgcgacccgctgttcatcaacgccgccaccctctcgtcggacccatttatggatggatgcgtggtcgccggattcgtcaacaattgtgctcccgtaccgggccaccaccggcagaagattgcgttctggcgaattgacgataaggtggtcatcggctgcttcttcatggaggacgcgtgctgggatgcggtggacgtcgtgcgccacaatggagccttccatttcctcaccaacgggcagcacatcgtcgtgggcaatccgggcttcgatgacgaagcgaacgcgccgcctcaagtgcaatgggagtatcgctgcttctcgtcgcaggggcgcggctacgacgggcagcacgtcgtggcgcgctacctcgtggagtccagcggagagctgctcatggtcgtgaggtgctctcctcgtcccggagagtccacgtcggcgttcaaggtgttccggatggcacagcccgaggaagacgacgacggcgacggcgacgcgcccttactggatggccggacgatgctgttcgtcggggatccctgctccagatccgacggcgacgtggttcgatacatctggagggagctgccctcgctggagggcaggatgctgttcgtcgggcgcggctgctccagatcgtacaacacggatcagtaccccggcttcgagggcggcgtctacttcttcgatcatcggattcccgggcagggcggcggcgcaccggcgctttacccctgcagagactgcgggaaatggacgggaaaacctgcactccaggtggagctctgcttcccggagcaagacccatcgaactactcctctcaagtttggttgctcaacgggtaa

SEQ ID NO: 27255 - DNA, 561 bp, Oryza sativa
  Clone ID: PAT_MRT4530_31967C.1
ttttttttttttttttttttttttttttttttttttttttttttttttactggaagtttaagcatttcatatcaaagcgggaaaagaggggtaagctaacaacacgagtttgagatccacaaaacattgggggagagctagctagtacacaaaacggggggtaccaattactaatacaaccttcagagagacaacctccccaaatcagtgcataataatagggcgcccatagatctgaagcaggaaggtgcaacgcacgcatcatggggagcaacttcattctttttagtacctaaaaagtgagcgactgcggggcctatcatagacagggctggcttcacggtgttcacggacatatttgttaggggggctgcccctttaatcaactttgtggcccccttgcagacttgcaccacggtgataatcagggctacctttgttaccagccgtgccataatccgggctgcccctttccctgccttttccatagtcaggggtgacccttttaggccctctggcataaagacttgcagaccgcccgggatagcccctcccgtctgg

SEQ ID NO: 27256 - DNA, 1001 bp, Oryza sativa
  Clone ID: PAT_MRT4530_31968C.1
cttatttatttgttctcgtaattaatgaactttctgagtctcttttagatgcaggcaatcaggttatattaaagggataacgacgacaggaggtacaattcttcattctctgatgtatgcaaataacctaatcactgtgggtcaggcaaatgatggagaagctactagaatttttcaaactgttcaaacttgttgtgctcaatctgttcaaactcctaactgggggaattttctattttctttagctcaagcactcctaatcaacaaaaacatcaaattctcaatatttttcatgtccctctgatagaaaattccactaaacatcttggtcaccctttgattattaacacaagaactagagcttctgcttataagtttattatttccaaattcaaagctcgtcttacctctcttaaagctaacatgctctctcatgctagccacttgtctttaattaaatatgttttcgcttcaatccctatttactgtatgtccacgattttacattctaagagcttattgaacaagttgacagctattattagcgcggttttggtggacaagagtgcataatgaaggctctaagaaaggtatttcctggcggtcttggaatgatttttgcaaatgcatctcctaatactatttctcagctttgggatgacaggacatgttgggaactgagcaaactcaatcaaatatttgatcagccaatggtacaacatataatgaaagttcagatcgttcctcgggacaatgaagacaaaatttgctggattcataattcttcaggtgaatgtacttcaaagagtgcatacaagcaggtatataatctatcacattcagttttcacaattgttacttctttgcagcttaatattcttttgaaaatctgttccactaagtgcattcctcctaaatttaaaacttttatttggagacttaatagaaaggctcttccaactgttgccaatcttcacttaaaattctgtgacattcctgat

SEQ ID NO: 27257 - DNA, 211 bp, Oryza sativa
  Clone ID: PAT_MRT4530_31969C.1
cacaaaccaagctccaagggatgttcgcccaaacaagtgttgcactggccaaggccaatttgaccacagtggttcaagggcagattggtgcgcaagcaaagctgacaagctgacaaacaaagtgttggctgggcagtgttgactgtgcgatgcaaggctcaaagctgcaagcccacagctgaatggtgtggcgccctgaaactgcccgtgc

SEQ ID NO: 27258 - DNA, 213 bp, Oryza sativa
  Clone ID: PAT_MRT4530_3196C.1
ctgcaggaattcggcacgaggatggctcaatgcatttaattcccttactatgtgtgctggataaccttttgtcccggttgatggtgtggcttgtttgttttttcctgtcaactagcgacatacccatgctttgctattggcagaagaaacaaaatattattgtatgtcatagtaaaacatattttatcaaatatcttagcatcacttgttggg

SEQ ID NO: 27259 - DNA, 343 bp, Oryza sativa
  Clone ID: PAT_MRT4530_31970C.1
aattcggcacgagtttttgatgatgtatgaggctttaccctttggtttattattacagttatagktagaaaaagtagtagccattgaagctattgcattgaagtctagacaatcatcccataaatgttgctagtggcagttagcaacttatgtttttggaatgtgcacatctaccttggagaacattttaggtacacaagctgaggccagcagaagaaagggtgtacagtacagagtgattcactttcagagtttctaaaactaggaatcctttgctgtacagcaactcatgktttccaaagkgaaccctttggctgtkactacatccacatccattattgcc

SEQ ID NO: 27260 - DNA, 282 bp, Oryza sativa
  Clone ID: PAT_MRT4530_31971C.1
ttcggcacgagggcactgtagtctgtgtaggttatcttgaatataccatttgaggctctgatactgttatctttgcatccttgctgtctcatctatttttcagttgcttcgcatatgcaaataattaccatgatacagggtgcatgcattgcagtctagttggtgtaaagtacacaagtcagtgggagtgtagaaaccttatctttcttctttgtttccaaagtcatcctcccttgatttcccctcctcaaattgtcaaatgtattaatctgcattgcacgt

SEQ ID NO: 27261 - DNA, 253 bp, Oryza sativa
  Clone ID: PAT_MRT4530_31972C.1
agtagtttcacctttcccgcatctgccgccgtgggagagggagcaatcggcaagccaatccaatccggttgcttctcctccatccaacctcgtcggcggcgacaaggacatgaacatggtgaggatgtggaagatcaagtatgggaagatgaacacgacattgaaggtggttaaaaagtatgaagacaaagaaaaacgagtgattaagaagtaccagaaagaagacgctgatatgcactacaggtccgtgaag

SEQ ID NO: 27262 - DNA, 457 bp, Oryza sativa
  Clone ID: PAT_MRT4530_31973C.1
atgaagagaatagtggaaagtaaaccgaatgtaaagaaagtgaatccaagttgcttgttcgtgagaaccattcccagttatgaaccaagtgatatgttcgaagataatctatagatgggtaacttgtatgaggctgacgccaaagatatgaactatgagaagttctagaactaaagccccatcttcaagtgccgcaacccagtcgaagtcagctagaggtgcaaccagggacaagtcaggtgaagagaagattccatctgcaacagaagatcaagccaagcagttcagactggggaagttttgctgggcaagtttgttaaagaagacgcaacggaagaagtcagaccagaagagaagactgcccacctatcttcttgctagccttctcgaatcttgggtgcaagattcctgtaagggggtggatttgtcacgtcctgataaattcatcccgaattaa

SEQ ID NO: 27263 - DNA, 330 bp, Oryza sativa
  Clone ID: PAT_MRT4530_31974C.1
atgaatgagcgaatgataacggagtcaatctccaacgcagataacatccgttcaagactgatagtgacctggtctaaatatcttcaagaaagggaggaaaaagaagaaaacaactccatcgctaaggatcgcagtagctttcgcgcacagccagccacacaaacaaaacagctcctcccgaaatgcagagtaaagctcaaagattcatacagcatccaagaaaactacatgggatccaaaccacgagagatggcgatctcctcatcagcatctaccacgaatcccagacacaaaggccaagaaatcccgcaaaagaattcacccccataa

SEQ ID NO: 27264 - DNA, 1626 bp, Oryza sativa
  Clone ID: PAT_MRT4530_31975C.1
atggccgaagcggccaccaccaccccgctgctgacgagccatgaagcagagccgtccatcgacgacgtcatcgaggcgtacatcggcgccaccggcgcccgccagcttctcaaggccatgctgctggccttcgcttgggctttcgacgcgcagcaggtgttcatgtccgtgttcacggacgcggagccgccatggcactgcaccggcgtcgtcgacgcggctgcggcggcggcggccgactccggctcgtcctgctcgccgccggccgcttccgcttcgccgtgcgcgctcccgcctggcacgtgggagtgggaccgcccggccgagacgtcggtggtgtcggactgggcactcaactgcggcccggcgctcgtctccctcccggcgtcgtcgttcttcgccggcaacctcgccggcggcttcctactcgcaacgctcgccgacactcacctgggccgcaggaagatgctcctcctgtcactggtgaccatgtccgtcgccgccgcgctcacggcgttctcgccgaacgtgtgggtgtactccgccctgcggttcgtgtccgggttcggcaggtccatggtgggcacgtcagcgatggtcctgtccacggagctcgacgggaagcggtggcgcaacacggtgagcgccgcgggattcgtcttcttctccgtcgggttcgtgtcgctcccggcgctcgcgtacacgttccgcgaggcgtcgtggcggaacatgtacgtgtggacgtcgctcccgtccctctgctacgccgtcctgctctacctgctcgtccaggagtcgccgcggtggctgctggtgcgcggccggaagcaggaggccatcgaggcggtgcgccagatcgcgtcgctcaacggcggcggcggaggcatcacgacgtcgagcttctccatgctggacgcgtgcgccgtggagctcggggacggcggcgagggcatgttcgccacgctgcactcgatatgggagcggcggcgggcgctccggaggctggcggcgatcactgcggcgagcttcggcgtgggcatggtctactacgggatgccgctcaacgtgggcagcctgagcccctccaacctctacctgagcgtggcgtacaacgcggtggccgagctcccgtcgtccatcctcgcgtggctcctcatgggcaggtggttcaaccggcgcggctcggtggtcgcgctcaccacggcgtccgggctgtgcagcctcgccgcgtgcgtccccgccgtcgtcctcccggacggcgcgcggatggccgccgaggtggcctcgttcttcgcgtcgtgcacggcgtacgacatgatgctcatgtacaccatcgagctgttcccgacgtcggtgcgcaactcggcggtggggctggtgcggcaggcggtggcgctgggcggcgtggtggctcccgtgctcgtcgcgctcggccgcgagacgacgagctactggtcgtcgtcgttcggcgtgttcgggctcgccgtcggctgcctcgggctgttagtcacctgcctgccggagacgagggggaggaggttgtcggacaccatggaggaggaggaggccgccgtcttgtccagctctggcgcgagcgacatggataacaacggcgagctcgtgtaa

SEQ ID NO: 27265 - DNA, 198 bp, Oryza sativa
  Clone ID: PAT_MRT4530_31976C.1
ccggccgggatcggtacacaaacaaaaaccaccactaggagtcgaacatagattccatccatatcgtatatgcttctctcgtatgctctccctcctactctacccatggaagtcccgctgcgcgatgcaagtgccatcactctcctggataagcaacgaacctcccgcctctgcatctcatgctgcaggttcggatgc

SEQ ID NO: 27266 - DNA, 407 bp, Oryza sativa
  unsure (1)..(407): unsure at all n locations
  Clone ID: PAT_MRT4530_31977C.1
tcattaaaagtgtnnanacctnaaggttgganggcaagcacggtngtntttgggagtttgtntccggtttngaggatgtttcaagaaattgaggcttttggntccagaagggggacccccaagaccaaggtagccattgaaaaaggtggtacggtgtaaatcggtcctttgaggtganaggtttttttggtnctgattgngtgagtgcctagtcgggagagnggggttnatganttagtanttgggtanagtaggtggattnaaggtgnnaanntgatnnggttggagggtagaaacagttgtganatnggatatgaatggttncaatcctatagngttagttaccagtaacttaaaaagggntcncttatgtttngcnccnncaaaanaaaaaaaaaaaaaaaaaa

SEQ ID NO: 27267 - DNA, 232 bp, Oryza sativa
  Clone ID: PAT_MRT4530_31978C.1
gggagagtgtcagaacccctggaacctttccggaagtgtctcaacggagctcaccgcggaaagttcccccattttccgccgcccggggcgctcgggctgcggattcatgctgccacaactgcagaattaacccattcgcttcgccgccatccgccgatgttaagactcagaacatgccatcccctgacaagtggtcgtctctctcgatcttctgcgggagggtctctcgaca

SEQ ID NO: 27268 - DNA, 307 bp, Oryza sativa
  Clone ID: PAT_MRT4530_31979C.1
ctgcgtttgactgccaataagggtttcatcggggttttagccgattttatggcatcggacctccagccgatgtgtgctttaaccttcggataagtgtttattctatcatattattgttagtcgattggtttctactggattatattgctatattatattatcatcagccgattgccttcatatcattatctacattggacatatagccgatttcttacaccctatcgctatcggctggtatcggcatcggctattatcggctatcggctggaactactccatcggcttgttagccgatcggctgttt

SEQ ID NO: 27269 - DNA, 497 bp, Oryza sativa
  Clone ID: PAT_MRT4530_3197C.1
ggctcagcaaatatagctgagaagaaccaggataatgagatgtctacagatgctggtgagcctgaagaagtagcagatatatttatttatagagaagatgttgtcagcttgaagtcaaaagaggacacccgtgggttggttttggaggtagcaggagaatatgattctgaaggtagcatcactgatgatgatactgatactgaggagcatgaacacaaaagttctcataggactgaaaatggtggtgctgatggtgataatgtcagtaatggagcttgatgttgatagtcagagttcattgcctgataacaaggttagggttctatggattgatggtgtcgagaagacggaagatattgacagcgtggttgtcatggacagaagtttccttcatggagatatagtggcttctgccacagatccaactggtcagatgggacttgttgctgatgcaagcttgtggctgatttgaaggacctcacgggaaataataaggt

SEQ ID NO: 27270 - DNA, 891 bp, Oryza sativa
  Clone ID: PAT_MRT4530_31980C.1
atggcggcgaagctgcagggaggaggaggaggagcggcggtgatggcggtggtggtggtggcgatggtcgccggcgcggcgtccggcggcaacttctacgaggagtgcgacgcgacgtgggagccgcagaactgctggtcgtcggacaacggcaagagcctgtcgctggcgctggtcagcaactcctccggctccatgatccgctccaagcggcagttcgtctacggctccgtctccacctccgtccagctcgtccccggcaactccgccggcaccgtcaccaccttctacacgtcgtcgctgggtgacaagcacgacgagatcgacttcgagttcctgggcaacgagaccggacaaccctacaccatccacaccaacgtctacgccaacggcgtcggcgacaaggagatgcagttcaagccgtggttcgaccccaccgacggctcccacaactacaccatctcctggaccccctgcaggatcgtgtggtacatcgatgggatgcccatcagggtgttccgcaactaccagagcagcaacggcgtggcgttcccgacgtggcagccgatgtacgcctactcgagcatatgggcggcggaggactgggccacgcagaaggggagggtcaagacggactggagcaaggcgccgttcgtcgccaactaccacggcatcgacctcgacgtctgcgagtgctacggcggcgactgcgtgtacggctgcgccgccgcgttcaaccagggcggcggctgcgccggccagcagctcaccggcgacgagatggggcagatgaagtgggtgcaggacaacttcaggatctacgactactgcgtcgactacaagcggttcaacggccagatggcgccggagtgcagcctgccacaatactga

SEQ ID NO: 27271 - DNA, 618 bp, Oryza sativa
  Clone ID: PAT_MRT4530_31981C.1
gccattcctccgcacacgcgtcctattagagcaaccaggccatcgtaatcactggtaaggtctgcacgatgctagcattgttgccaaagataaacacacagctgctgttgcatctgatgacagccgtctaagctggctcgctactcagaaaatactgaagcgaaatcttgctgatgttattaacatcaaactatcacagctagggatgctagcagccctgcaagtgctcgatgctgcatgaaaagcccgcatcgcgctgataataggcggtatcgctgcaactaggatctctatgggctacgctgttcatcttgcagccagtctcggtagtatgagcatggctgacctgtacacacatattttactgtctgaagatctaatatgccgtggctatgagactactagacctgtatacaagtctacagatgctcggagccatggtggttaccctcacttacacaacaatagcttgacatacggtaatgcctaaccctttgggagcttaacaaacaacggtgacacgttcaatgaacaattaattgttcattatgtaccttcaacaatgatcaattgtagtggaaaccaacagagcacttggacacttgtaatcctatatga

SEQ ID NO: 27272 - DNA, 112 bp, Oryza sativa
  Clone ID: PAT_MRT4530_31982C.1
gtctcggggtgctggctaccatcggaacaatctggggctgctgattagtgaagctcggaaaccctagcgcggtgcatagtgtataacacaatggggggccgtagacatgacc

SEQ ID NO: 27273 - DNA, 120 bp, Oryza sativa
  Clone ID: PAT_MRT4530_31983C.1
atggggaaggggaacgttctgttttttatgctgtggggatggatctgtttggattgtgaggagtatcagaggatgaaaccttataacaatcttaggacaccttctgacacagtgctataa

SEQ ID NO: 27274 - DNA, 738 bp, Oryza sativa
  Clone ID: PAT_MRT4530_31984C.1
aggccacacctctccacgccgtccttatctccaccggcaagaggagggaggagaggggagagagatgaagagaggggagatggggagagagaaggaagaattggaggggattgaggatgacattttcaactacaaattgatgaagacatcccagctacacttggcgtaaacaagggtgatggtgtacgtcatacatcacataaagaaaatgaagatgacgtaaaccaagttgatggattacgtctcagtaagaacgatcaagcatatcatggtacaattatgcgcagccatgctaaggaaaatacaacaagaggtgaactcgctattttctcaacttaacccaaattttagtgagaattttatactgcctaaatgctctacctttgtattgctaaggtgcacgcccgaggacatcatcactacgataagaaggatgggttaagttgaggactacaagggttacgccgaggaggaatcagcccatgcccaaccagcagctgtttacgcaaacaagaagatggtttgcgctgtaaaggctcaacttccaaggcttgtgtgacctagccagtcaagatacggggtgcatggcatacattgttggaaagagggacaactcgcatcaaaccccacctcaatatcattttccaataagaagttatgccatttttactgaagaccgcacatgaactgaagggttgtgcgcgaacccgagaaaactctttgcattctcatttatgt

SEQ ID NO: 27275 - DNA, 573 bp, Oryza sativa
  Clone ID: PAT_MRT4530_31985C.1
ctcacacccagaatttccccattctgaatcttgacagatgagtccagtcaaagtaaatctataccagacgcactcctttcaccattttggaacatcaacgctcacagcgtcgtgtatattactcaagccgtgcccgggttcaagttgtcaacaacacatggaaagacagtgttcaacggcgagcttcccgcggacagctgcttattataccaccaccctatgccagttgtaaagaaggcacacaagagaaggatgtgcttacattggcattcaagaccaatcctaactctatggtaagccacttgcaggaaagagttccatctttccgtgctctcccaatgatgtttctacaaatgcatatcgccattctcaagagaagaggctccagaggctcaagcataaccagaggagatgattcgggccatccactcccaacccaataccagagctcccagacgtttataatccgccaggaaccctctttagtcggcttccggataaagaataacttaaataaataattccaaccattgtttgcggctatgtacggccagtcttcgactaatgatgata

SEQ ID NO: 27276 - DNA, 291 bp, Oryza sativa
  Clone ID: PAT_MRT4530_31986C.1
atggaggacgctgacgttccgcaatgtctcttgagcgacgccggcctcaaccttgtcaatgattggatgtatgaggcaggttgggagccaacaggggatgcaattagtcccctagatcaagtgacgggagagatccaacacaaccttgaggaacacatagcacagacgcaagaatggcagcagactgctgatgctcatttcaccaacatcaacaacctgatgcagcaactgcacgatgaccttcaagtgtacgtcttcttccagggattcaatccttaccaaggaccctga

SEQ ID NO: 27277 - DNA, 411 bp, Oryza sativa
  Clone ID: PAT_MRT4530_31987C.1
cgagttctcttcctgacggcgacaatggcgacgaagaacagcaagctctcggtgtcaccagtggcggcggcgctgcgtggcactgatggaggtggtggtcggcgccgtcgtcgacggcggctgctgctgcgaggaccactacggttgtagagctcacgcgtgcaacagacgcgagctcgcgcaaggcgcgcagccaaaagaccaaatgccgacgcgccctccgtaccttctgccgatgagcgatgataactacacggatcggacgcgcctgctgcgctgcaaccatcatacagaggtgtgggctatcaaccgttgatactcgcatagcgccataccataggtgctactcgagacggagaatgagcctttgactcccaagaaggagcctaagaacaccataccacatgcaat

SEQ ID NO: 27278 - DNA, 1302 bp, Oryza sativa
  Clone ID: PAT_MRT4530_31988C.1
atggctgacacgagaggctccacttcctctggcggtggcgatgacaggggcagagaaggccacgatgacttcacagggggcggccaatacaacaggtaccataggatccttgaggccgtgccgtcaccccttgttaggagtgagaatgttgtgcatcatcagtaccccactggcctaatccaccacccgtcgtcgacaatgccggtggcgccatgctcctacgtgccccggtacaccatggtgccaacatccgccatgctcccgctgcagcaccaccaccgccaattgcagatatctcaagaaaacttccaagaccgagttccctccaataatgttgcagctccgcatcttcctagcaattttcaggatttgaggccaatgtgcaatgggccgccattcatgtcttatggccagactgcttccaatagaaatgttctttatcagaatctgacgccatactccttcaatgcatgggctagcaataacatgccgaggaaccctgtctacactagttaccaccctactgcaattgaggatccccatgctactccattccacatcaacaatcatgacacagaccaaggtttcttcaccgtttctactagcttcagggtggatcaatcatttgtacatgctccttcaccctttccaccagtgtcttcatcatcccgcagtttctcttcagctcaaatttcaaatggaccgacagacgctaagaaagccaagaaatcagatataaaagatcaaccaattgttttaagaagaagtgatacagagagtgaaaaaaatgatgaactaaatcaaactccggctagtgagccttcaagcatgagtcataacagtgcaaattcgactattagattcaactgtagagaataccgtgttatcttgcgcaaggagttgacaaatagtgatgttggtaatattggaagaattgtgatgccaaagagggatgcagaggctcatcttccagcattgcatcaaagggaaggtgtgatgctgaaaatggatgacttcaagcttgaaactacttggaattttaagtacaggttctggcccaacaacaagagcagaatgtatgtcttggaaagcacgggtggctttgtgaagcagcatggtctccagacaggggacatattcatcatctacaaaagctcggagtctgagaaattagttgttcgtggggagaaggccattaagccgaatgtcatcatgcctattgtggactgcagctgcaaaaatgatctcaacaacagcgaagaatgcgggttcgctatcagcctgctgactaagaaaacctga

SEQ ID NO: 27279 - DNA, 252 bp, Oryza sativa
  Clone ID: PAT_MRT4530_31989C.1
atgagctctacagtatttccacgggaatttcctgtactaacagttctattgtggattagagatttggcgcaagccacaatttcaactttgctggctctgacgcaacgtagaaagaactacagctacgagctaaaaactacagtaccgatggcaatagctcggcccaattccacggatgacggatggaagtttctgcagagggaattatcgagccagcagttgagtgtagaccaaatcatcgtctccaacaac

SEQ ID NO: 27280 - DNA, 4220 bp, Oryza sativa
  Clone ID: PAT_MRT4530_3198C.1
atggtggttgaggcatccggaggcacagcagatcacgcctgtcaggaggcagcatacctgatgatggccagattacgggagcgccacaactacatcttctgcaacacggcgtaccggtttcaccctcgtcaagcaagtggcgacgacgtcagcaccttccgttcgacagccggcgagaacgacaccacctttggtcatatgtgtgccgtgatgaggggaatggacaggatgcactcggatctgcgcaaggcatccagggccttgaatgacgggaagctcgtgaggatcatagctctgaaggatgagatcgcacgcctgaagaaggatgagatcgcacgcctaaagaaggagaatgctcagttgaagaatccgcaacacgccccgcaagtcgacgacggcacccctccagctccagtcccagctcctgtcccagtgtcagctcccgcgtccgctctctccttcgctccagcattagccgccaggggtccagccagtggcaacgggggttggttgcctgctactcccagtggcagccgcgaccacagcagcagcagttccagtggctcggagccgggcagcggcgagatgtatctgccaaactccaggagccgctcagagggacgtggtgacgagcaggaggacgccctcgactccaccgaccgcaggagccgttccgagtctgttcgcttggggatggtctacaccaggaatggtagccgtacagcaggcgagggcagcaacggcgaagaacgcattgatggtgtgcatcccaacagcgactccggcaatggtccgccactgctccccgagaatccgactctggcccaatccaaactgccggagtttctacacgtcaggccacccaccttctctagcaccaccaaccccatggaggcgaatgactggctccatgccattgagaagaagctaaatctcctgcagtgcaatgatcaggagaaggtcgccttcgccacacaccagctccagggtcccgcgtcagcttggtgggacaatcacatggctacccgcccgccaggcacggaagtcacttgggcggagttctgtcgcaacttcaggaaggcgcaggtgccagacggggttgtggcacagaagaaaagggagttccaggcactccaccagggcaacaggacagtgactgagtatctccatgagttcaatcggctagcgcgatatgcatcggaggatgtccgcactgacgccgagaagcaggagaaattcctagcaggcctagatgacgagctgaccaaccagttaatctctggaggctacgccgattttgagaagctggttgacaaagcaatccatcaggaggatcagtgcaacaaaatggacaggaagagaaaggcagcgcaattccggtccaaccaaggaagccacccgcgaccgcgcttcactcccagacagcaaagtggacctaccaccatgatcgtccgccagcaccgccctttcaactcgagcagcttccaccagggcgccagtggcagccagaaccaccatggaggtcagcccaaccgcagagcagctccgcgcccaccaataacaccagcacagtcagctccatccgcccaagccaagaaggagactggaacaaagccagggtcctgcttcaactgtggcgagcttggccactttgctgacaaatgcccgaagccaaggcgtgtcgggccaaggtttgtccaggctcgtgacaaccacgcgtccgcagaggaggcgcgagcagcaccagaggttgtactggtcaccttgaccaatgagaagggagagaccgtggtgtacatgtcaccagtctcaccaaagcagagaatctccttaaaccagattgaagtggaaaaccctgtgaccaccgagcagaagggtttgcagaaattggaggatatccccatagtctgcgagtatcccgaagtgttccttgaagacctcactaccatgccacccaagagagaacttgaattccggattgatttggcaccaggaactgccccaatttacaagaaaccgtacagaatggcaaccaacaagctagcacaggtcaagaagcaggttgatgagcagctgcagaaagggtacattcgaccaagtactttaccttggggtgctccggtcatttttgtggagaagaaggataagacgaaaagaatgtgcgtcgattatcgcgcactcaatgaggtcacaatcaagaacaaatatcctttgccgcggattgatgatttgttcgaccaactaaaaggggctaaagtgttttctaaaatcgacctgcgatcaggctatcaccagttgagaatccgggaagaggatattcccaagacagccttcaccactcgatatgggttgtacgagtgcacggtgatgtcttttagacttaccaatgcacccgcattcttcatgaacctgatgaacaaagtgttcatggaatttctggataagtttgtggtggaacaccagttatatgccaagttcagtaaatgcgacttttggctattggaagtcaaattcttgggtcacgtcattacagctcagtgcgtggcaatcgatccgtcgaatgtggagtcagttaccaagtggaccccacctaagaccgtgtcacagattagaagttttcttggactcgcggctgagtgtgaccagagttttgagaagctcaaaaagaaattagtaaccgccccagttctgattctgcccgaccagactaaagacttccaagtctactacgacgcgtcccgccacgggcttggatgtgttctaatgcaagagggcagagtggtcgcttatgcctcgcggcagttgcgtccacatgaagggaactatccaactcatgacctggaattggcagcggtggtacatgctttgaagatctggaggcactatctgattggcaaccgttgcgaagtatatacggatcacaagagtctgaagaagagctactgcaatgccctatgcaccgagggcatgtgtaaagaattgcagcaggagcttgaacacctcaacttggggcttgtagaatacgggtacgtggctgtcctcgaggcacgacctacactcgtggatcaagtcagagcagctcaagtaaatgatcctgaaatagcagagctgaaaaagaacatgagggtcggaaaagcccaggattttcacgaagatgaacacggcacaatctggtttggagaaagattatgtgtaccggacgataaggaactaaaggatttgatactcaccgaggctcatcagactcagtactccattcatccaggcagcaccaaaatgtaccaagacctcaaagaaaagttctggtttactccagcctcttcagatcccggaatggaaatgggaggagattggaatggactttataacaggactgccctggacatcatctggccacgattcaatctagaagagaaagttagaaccgtcagagagaggttgagaattgcccagtctcgacagaagagctatgcggacaaccgccgaagggaactcacttttgaagcaggggattacatgtatctccgtgttactccgctccggggagtacaccgtttccagacaaaaggtaagttggcaccacgcttcgtgggaccatacaaaatcttggaacgaagaggagaagtggcttatcagctagaacttccatccaacatgatcggtatccatgacgtgttccacgtgtcccagttaaagaagtgtctaagggtactcgaagaacaagccgattcggagcacattgacatccaagaagatctgacctacgtggagaagccagttcgtatccttgagaccaccggcgccgacgcgctccacaaccaccgccgcgcccacgttcccgccttctccgggccacgtcagccacgccagcgcatgcgccgtgtcttccgcacctactccccctccctgtcgcacgcgcccgcgcccgagacggccgggattcgaaatttcgaatcccacctctctctcctcctccacctccccaccaccaccgccaccccttctctctttttccccatctcgtcgagccctcccgagccctctaacgccctagcgccatcgcccttctttttgacgacgacgccaccgttccggtcgtcagtagccgacacgccgagccgcgccgacaacgccgtcgcgttcgccgtcgtgcgggccaccccggtcacccctttttcgttggatcccgccgccggaacccaacttcgggccggtcaccg

SEQ ID NO: 27281 - DNA, 450 bp, Oryza sativa
  unsure (1)..(450): unsure at all n locations
  Clone ID: PAT_MRT4530_31990C.1
nggcctntttgcaagagtganngtctgccccanttcgnnnattnganctttggctgcatccatctgtcaatgcaanctgtacgatgcattgcttgggatgtctganaggtncattgtgaggtaaagaatcaccactgaggantttgtggatntcagggangtagnagatnctcgcctctcactgtatnantcccnnggggtntnnggacgatacagctgcagtgcgngggnagaaaagatgcctcaattangngacttactatgagagctggtctccccgtnacaaatttnccnacaaatccgtggngttnagcgatgaccccccattcgancggggaanctananaagctaggattgacaatcagnnatntgacgaagnnctcccggacactgttataatctcatngaacngccgtgtcctgcattgagcntntggtntcctatntttg

SEQ ID NO: 27282 - DNA, 192 bp, Oryza sativa
  Clone ID: PAT_MRT4530_31991C.1
atggcgagctctgtcgaaggcgacgacgctcggggagatggtggggagtcggagctcgggcttgctggcgcacgccggcgcatggatgaggaggcacttggggagacagctggaagacggagttcgagctcatcggcgcctatctcatgggctcgagctccccagctcttgcctcatcagggaaggaaatga

SEQ ID NO: 27283 - DNA, 478 bp, Oryza sativa
  Clone ID: PAT_MRT4530_31992C.1
attccctgctttatacaacattacccatactagacatattactcttgcaaaactgaaggagaaaggctgggagactatcaaattcaggactttgcatggagacaaacttagagactggaatgggattaaacagatgtggaggcttttgaatctgcaagaaggaataaaagatagaatgtggtggaacttggaaaagaatggctattttactgtcaaatccttttataaagctcttaaaagggagcaaaaatcggaggcaagacaaagaagcttaatgttgggagccaagctggcgagacaagtggcaaatgaagtcttcagttccagatttggatggagaatttatacaagacgcttggaatgaaaagtttaggagtttagtgatgctgagttctttgttttgctctggcagtcagttaggtttccccttctcattttgttgtctctgatctgttgatctctgtaaagcttgccctgc

SEQ ID NO: 27284 - DNA, 351 bp, Oryza sativa
  Clone ID: PAT_MRT4530_31993C.1
atggctgactggtgcagcgagcagagcggaggaggtagtgcaacggtgagggagggagggtgcggcggcgagggagtagcaagggaaggaggggaggctcaacggtggagggctgtcgaggaagacgaggctggccgcgctcctgtcgtcctctgctgcccgtgttgctcccgccgtcgcagcctccatcctcgcgccacactctcgtcgtcctccaccgcccgcaccgctcccgtcggcgccgccttcatccccgcaccgctcgagtcgtcctccgccgccgcgccgttcccgccggtgccgcctctattctccccacgccacactgcagagaagagaggagaggaatag

SEQ ID NO: 27285 - DNA, 462 bp, Oryza sativa
  Clone ID: PAT_MRT4530_31994C.1
gtattttttagtgtcttactgccctctcgaatggggcagcagaatgcttaaactggaccttttagaacatttactctgaaaaatcttctttttttttccaggaaatgcgctctctcagtttggaccattgctagcaaagttctttagtaggtcttgtgcttcccatggttcacatgatgaacaggcagttctacttgatctcagtccactacaggaagagagactgaggttcttgagacaaagattaaatgtgccatttgacagttcctctgtcaagcatcaggttccgcttctgtacctaactacctataggcctttggtattcttgttctattgctctcaccaatgggacaccaattttcttgctcagaagaaatgataaactgaacaattcatatactaacattcatgatagtaaaatattgcattttttctatgacaggatgctctgaaagaactttg

SEQ ID NO: 27286 - DNA, 254 bp, Oryza sativa
  Clone ID: PAT_MRT4530_31995C.1
ctgaaacttacatcaggaaagaaaagaataaagaattaaaaaaggaaaacacttagatgggccggattacttatcgaaattttgatgatttcgatcggaatttcaccaaaaccgatcggttttcaagaacttgtcggcaaactcagggaatttgtattcaaattttggtttatgaaatttgttcggaatttaccagttttccaccggatttcgcgaaattccgaattccaccggtgcccgaaacggaagcgtct

SEQ ID NO: 27287 - DNA, 515 bp, Oryza sativa
  unsure (1)..(515): unsure at all n locations
  Clone ID: PAT_MRT4530_31996C.1
aattcttgcacacgcgcagctcgagccatggccgggagttgaagcaccaancgtccctccggcctcaaagcccgcccgcggcggttgcccgcanttcgggncgcctccgcccgggtgcccaaaacgcntttcaccttctcttgttgcccgcccaaangaagaacaagggcggtggcangcgcncccccncctgcttngggtctcncccgcccgtgttcgcccgccaccgccgccggggcangccaaaggccggcgttnttccaacnaattacctccnagggggggcccgggtaccccaattccccctataattgaatcgtatnncaattccactnggccgtcnttttacaacnttcttgactggggaaaaacctggcgtttacccaacttaatcnccttgcnagcaacatccccctttccgccancttggcgttaatancccaaaaagcccncaaccgatcgcccttccccaacaattngcgcnacctgaatggcgaaatgggcaaaattgttaa

SEQ ID NO: 27288 - DNA, 507 bp, Oryza sativa
  Clone ID: PAT_MRT4530_31997C.1
atgcggcggctgggtgacgtcgtggaggcgcctgcgctggtgctgacgccggcctccatgcagcaggccggcgggagggggagctccggcgccttggacgccagcatggtcgtcatcctcgccgcgctgctctgcgtcgtcatctgcgccctcggcctcacctccctcatccgctgcgcgctccactgcgcccgcggcctctcccccaccacggcgacgccgacgccgtcggtgtcgacagctgccacggccgggctgaagaagacggagctgaggaggattccggtggaggtgtacggcgccaagcaggccggcgtccccgacggcgagtgcgccatctgcctgggcgacttcgccgacggcgacaaggtgcgcgtgctcccgaggtgccaccacggcttccacgtccgctgcatcgacacgtggctcgccgcgcacacgtcctgccctacttgccgggactccattctctccgtccatggagtcgtcgccggcggccaaacatag

SEQ ID NO: 27289 - DNA, 490 bp, Oryza sativa
  Clone ID: PAT_MRT4530_31998C.1
tccgacgatcaaatcagtaatcttgaatatggcggctttgaacggtaaggtggtggtggcggtgatggtggccggcgggagctccggcgccttggacgccaacatggtcatcgtcctcgccgcgctgctctgcgtcgtcatctgctccctcggcctcagctccctcatccgctgcgcgctccactgcgcccgcggcctctcaccctcacccgccatggcgacgccggcagctgccaccaccacgggcgggctgaagaagaaggagctgaggaggattacggtggaggtgtacggcgccaagcaggccggcgtccccgacgccgagtgcgccatctgcctgggcgacttcgccgacggcgacaaggtgcgcgtgctccccaggtgccaccacggcttccacgtcggctgcatcgacacgtggctcgccgcgcacacgtcctgccctacttgccgggactccattctctccgtccatgccggagtcaccggc

SEQ ID NO: 27290 - DNA, 1143 bp, Oryza sativa
  Clone ID: PAT_MRT4530_31999C.1
atggatggccatcagttcgggccatggaacctcttgcccgacgacatcctggagttgctggtcggccgcaacctgtgcgagatcgaccgcctccacgcgcgccgcgtctgccactcctggcgcgcggcgttcgcgaggatcgagcccccgccgccgcctccaccgctgccgttgctcctcctcccggaagccgacgacaacgagcacggtcttgccttctcctgcgtcctcagcggctgggacacccaccccttcttcctcccgcgcgccgcgcggcaccgcgcccgctgcttcggctcgtgcgatggcgtctggctcttcctcgccatggaggacggcctgcaaggcgaccgagctcgagaccacgtcctcgtcaacctccacagcttccagttcctcgacctccccaacgtgatccgcctcgaccacacgttcccgcaattgatgaaggacatcgagatcgcgatcgtcgccgtcacgctctcgcgccagccaacccagcaaggatgcgtcgccgccggcatcatcgagctccctcccttccccatcggagtgcggccgttcgcgttctggcgcatgggggatcgggtgatcttgcctttctacgaagacgtgttcggggatcaagcagtagaggacgtcatataccacaacggctacttcctcttcctcacccaggacgaacacattcgtgtgtgccaagagccggtcttccacgacaccaacgtggacgtggactcgatcctgttgcgattcgagccgcgcgtcgacgacggcgacgccgtccttgctcgctacctcgtgctgtgccgggggaaggtgctcatggtcgtcaggttgggctgtccacatcgccgctcgccgacgtcggcgttccgggtgttcgagagagtggactatctggtggtgaacgccggcgtggtcgaggtgcttgagcacacctggagcgagattgacgagctcggcggcaggatgctgttcctcgggcgaggctgctccagatcctacgaggaggccgatgggtatcccggcatggagggcgtctacttcttggatgaccggagcttccgtgacccgatcttccacgacccggacatggtgttcgatcacacctaccattgctgcgacaatggcagatggtag

SEQ ID NO: 27291 - DNA, 252 bp, Oryza sativa
  Clone ID: PAT_MRT4530_3199C.1
gagaacaaccgccgtttaatggactttgacaatgtatgcgacagcagtattgctcactgggctggctacggtaagaatcaacacctacagcaggtgggttggtagataaattgatacttaatggaaagagacaacccggcatcttaatgaagcatggtggcttaaagataagcttactcctggcagttattatgaagaggatcctgggctaccaccaagtttatgagagctcttaggacgcggatgtgaaca

SEQ ID NO: 27292 - DNA, 976 bp, Oryza sativa
  unsure (1)..(976): unsure at all n locations
  Clone ID: PAT_MRT4530_319C.1
gctgcaggaatcggcacgaggtgttgagtgacagggcatcaccgtccaaattttggacaacccaaaccgtgcccattccaaaagcaacttcaaataattgtacaaacatgctgtgcccccactccgccaccccatctcggataaacaactcaaggtttaagtaacagtgtagtaaccaagaacccgactgatacaactcaaattttgcctagcacaaacattcatccaaaagaaaacacaatgaaaatttgtgaaaggaagaactttgaccacaaaatgaatgaaatgacgctcatttaacacttcactcgcttcaggcatatcaaagctgcctagaggttgcgggtgctttcactctttagcgtccttcttatcctcttctgcaggagtctcctctttctctgcattttcctccttttttgtctcggtcactgaaagcttctcaaccaaccctgcagtagaggagacttcctcattttctttctcctcgttctttccttgctgctcagcaatctcttctaccatctccctgaacttcttgcagttctcgacggatccaaagcgtatggcgaacatttcctccttgagctcgccgtcggcgaagtccagcgcgtgccacacgcacgacttgtcgctgccggcgtgctcctgcatcttcgtggtcgtcgccacgaggtgattggcgcagatcttgagcgtcttagcctggcgcatgacgagacggaccttgccggtctccttgtgcttcagcagcttcaccgtgccggtgcctctctccttccattggttccccccccgggcgaagcggtacagcttcgacttcatgtcgaggaggacctcctcgtcctcctcaccggtggtgacggcgacctcctcgagnttgacgatgggcgcganctgggcgccggtgtcctngtcntcgcaccgccgccgccgcggcctcctcctccncntcacggtntccgctggntcnncc

SEQ ID NO: 27293 - DNA, 447 bp, Oryza sativa
  Clone ID: PAT_MRT4530_31C.1
atgcacaacagtgtatttttcagcttcagcagggatgtgaagtgtggcaatatactggtgcataggaatggatctgtgaaacttgccgactttggtcttgctaagcagataaacaaattcagcatgcttaaatcatgtgaaggaagtgtttattggatggcacccgaggttgtcaatcccaagaggacatatggaacggcagctgatatatggagtctcggttgcacagtcctggagatgttgacacgtcaactgccttacccaaatttagaatgggcacaagctttatttaagatcggaaggggtgaaccaccagcaatcccaaaatacctttcaaaggaggctcgtgatttcataagccagtgtttgagaccatatccggatgatagaccttctgcatccaaattattggaccatcctttcgtgaatagatgtggactagtgtag

SEQ ID NO: 27294 - DNA, 561 bp, Oryza sativa
  Clone ID: PAT_MRT4530_32000C.1
tgtcggcgacaacgccgatagtgcgccagcttctggcaccccttcgacaaggagcgccagtccggatgcctggcggcagcccgtgagggggcggcgacgactgggagcgtgcggcgctgctcggcgcgacctatgcgacgccggtagcgggcggcggcggctccgcgcgacctcgggcgacgccgggcagccacagcacccgacgaggcgacagaccgggagcggcgccatcccggtcccccgccgtgcgccgccggcgaggaggaggaggagcggccgggatggcccccgccaccgggatgctagggtttctttttttttgagattttttcggttttttatttttgtgtgagcacccgtatttttccgtgcgggtgcgccacctgcacgcggggcagacgggccttcggtccgcacacgaattttttttttggtatgaaaaaatagtttctgttttctgtagtaggaggcggcccactagattgaagaattagacatagattgtccttaatgaaaagtactgctcagtactatttctgtcaaaaaaaaaaaaaaaaaaaa

SEQ ID NO: 27295 - DNA, 346 bp, Oryza sativa
  Clone ID: PAT_MRT4530_32001C.1
cttgggtggtttttttttttttgtttttttttttttttttttgttttcatttttttttttttttttattttttatttttgcacagtttttttttttgtttattttgtaaccagatcttgttatcattttcatacaccatcttcttcgttgaaaaaaaaacggggcagaatttttttaggtaatttgttgggcgctacaagaacaacccccccagggggggaagagctctgtatttaaaaaacaacataattggtgtggggctccatggagacgccccccaccaaaagggggattcctcgggggggcaccaattgtgggggggggaagccaccaagagggggggggg

SEQ ID NO: 27296 - DNA, 1650 bp, Oryza sativa
  Clone ID: PAT_MRT4530_32002C.1
cccttgtggcgttgccccccgccgccgccgtctgccgcccggctcccccgcacccgcgccgcgggccaggggggcgtcggtatggagcacggtggccacgagctcgccgtcgtcgtcctcgtcttgctgcttctcgtgtccgccacctcgtgcacgttcctggaggaggacgtgattcttggcacggtggaggaggcgaaggtggcgaggctgggtggcggcggcggtggcggcagcaagggcgcgaacgcgagcacgaggagagcggacaacacctgcgccggcgtcggcgtcggcgtcggcggcggcggcggcggtggcggtggcggtggagggggtgggagagggaggttttacttggggtggaaggaggagattgccgggatggcggggcggccggagacggcggcgtggctgcgcgcggtgcggcggcggatccacgagcggccggagctggcgtacgaggaggtggagacgagccggctggtgcgcgacgagctggacgccatgggcgtcgggttccgccacccggtcgcccgcaccggcgtcgtcgccaacatcggcaccggccggccgccggtggtcgcgctccgggccgacatggacgcgctgcccatccaggaagcagtggaatgggagcacaagagcaagaacccagggaagatgcacgcctgcggccacgacgcgcatgtggcgatgctcctcggcgccgccaagatactcaaggctcgcgagcaccatctcagggatttcaacttatatagtacgataataggacagccgggtacagtgaggctactgttccagccagccgaggagtcgggcgctggcgccaagcggatgatcgaaggcggcgcgctggaggacgtggaggcgatcttcgccgtccacgtgtcgcaccagcatccgacgtccgtgatcggctccaggaccggccctctgctcgccggctgcggcttcttcaaggccgtcatccacggcggccgccgctccggcgacgccgtcctcgccgccgcatccaccatcatcagcctgcagagcatcgtgtcccgcgaggcggatcccctcgactcgcaggtggtgtctgtggccatggtgaacggcagcgatcacccggcggcgacggcgagggcggcggcggcggaggaggaggaggagttcgtgctgggcggcacgttccgggcgttctcgaacgcaagcttctaccaggtgcggcggcggatcgaggaggtgatcacggcgcaggcgagggtgcacgggtgcgaggcggcggtggacttcttcgagaaccagagcttctacccgccgacggtgaacgacgcgcggatgtacgcgcacgtgaaggcggtcgccggcgagctcctcggcgccgggagctaccgcgacgtgccgccgatgatgggcgccgaggacttctccttctactcccaggtcgtccccgccggattctactacatcggcgtgcgcaacgagacgctcggctccgtccacaccggccactccccctacttcatgatcgacgaggacgtcctccccaccggcgccgccttccacgccgccatcgccgagcgctacctcgccaaccactcgccttcctcctcctcctcctccgactccgacgacccggatgtcgagctggaggcgtcgtga

SEQ ID NO: 27297 - DNA, 210 bp, Oryza sativa
  Clone ID: PAT_MRT4530_32003C.1
atggagctatatcgtgattatgtaggggcgtctactcttactagcgagtcatggacagagtctggagacttcacctgttccaggtatggagctatatcgtgctgcgtgctgtcgatcgacgactccaagttggagatgtcgctactaggaaaagcattatcgcaagcggtcaaaaagggtcttcacagacgggggaccgtccgcctgtaa

SEQ ID NO: 27298 - DNA, 177 bp, Oryza sativa
  Clone ID: PAT_MRT4530_32004C.1
atgcaagaggccaaggtcgaggcaaccacagttgctcttcctccacgacaccctcgactagatctaggtcctcgcctcactcacttttcgctccctgtcgctgctgccctcactatcggggcctaccccaccgtctccatgcctgacttcgacacagccacaatgaccctcttctag

SEQ ID NO: 27299 - DNA, 210 bp, Oryza sativa
  Clone ID: PAT_MRT4530_32005C.1
ctcacaagatagcgcctgaccgagatggtgatgcaaacccggcaactgacccctggaaactgagtcgccccaaagtgggatggaacgtgcctctgaggtggctttgctctgtggtggggacccagactacctgagtcgcccaaaaattgataagggccccccctgccccatgattatgttggccaagttgctgatggaaatatgtgatgt

SEQ ID NO: 27300 - DNA, 498 bp, Oryza sativa
  Clone ID: PAT_MRT4530_32006C.1
atggccgccgccggcgaccatcggggcgcgggcgcgccgcctcccgccgaccgcgcaggcgtggccgccctcgggcgcgccgagtggctgccgcgtggggcccgtccgtcagccgcccgcgccctcgggtataatcgcgccggtctgatcggcccaaggcccggtctgaccggcatccagaggcgcgatcggatcggattgagtaccggtctgaccgccagggtaatacccgctttgcggtcctcttcatcaaaatcctccaatgtgaccggtatcacattggatggctccacctccgtcttggatggcggcttcgtcatggagcggccaacggcgcggaggcggacgcggtcggggagggagcgcgaggaaggcggcgtggagcgcgagcaggaggcggctgggcgcgaggttggcatcggtggcggtgacggcggcgcggagcacgagcaggaggtggccgtgcgcaaggaggctgttaaacgctggccgatatga

SEQ ID NO: 27301 - DNA, 213 bp, Oryza sativa
  Clone ID: PAT_MRT4530_32007C.1
atggacaatcgatgggagggcgcgctgacgggcggcgtgtcggcggacgacgggaggacatgtggccaggcggacagcggacggcgaccggcgtgcatgtcggcggtggttggagtccttgcgacgacgggcaacggggcacgagcacgcggcagcagcagctcactacaggcctgcagcgagagcagcagctgcaacaactccctacgatag

SEQ ID NO: 27302 - DNA, 753 bp, Oryza sativa
  Clone ID: PAT_MRT4530_32008C.1
atggatcatgaaccaccgcctcgccgcgccgccgccgccggcggagagagagagagaatgctcacccgaaccctcgccggccgcgtccgccccctcctcgctgccgcgggcctccgcggctacgcgccccgcgcggccgccgacctcgtcgtcgtcggcgacgaggagcccccgccgcgcaccgcgtcctccgcctccgccgccgccaccgtctccatcgcggccactgcgcccaccgtcctgcagccgcgcgtgctcatctacgacggcgtctgccacctctgccaccgcggggtgaagtgggtgatcaaggcggacaagcacgccaagatcaggttctgctgcgtgcagtccaaggccgcggagccgtacctgagactggtcgggatggacagggaggacgtgctgcggcgagtcctcttcatcgaggggcctgaggcctactacgagggatccacagtaccatctagtgtctgtggttatggctttgattttctgaatgggatcacctctgaacttctttctgctgctttgaaagttgcatcgtacctgcctcttccctactcagctttgagctccctgctgatcatccccgccccactgcgggatgcaatctacgattacattgcaaagaatcgctacgattggtttggcaaggatgatgaatgcatcgttaccaagaacaaggagcttcttgagcgcttcatcgacagggaggagatgcttggaggtggtcccagcaatagcttctga

SEQ ID NO: 27303 - DNA, 199 bp, Oryza sativa
  Clone ID: PAT_MRT4530_32009C.1
catccactagaccgggataggatatcgaaaccagttatcccttggggacctgtgatattgttggcaactgggtcattttctgatgcgaccgtgttatcatatcatgctactggctgcctcatagcgctgatgtgctgcgtacatattcacatgcatatgctgcctacattaccaaatactccaggatgacatgtgccat

SEQ ID NO: 27304 - DNA, 450 bp, Oryza sativa
  Clone ID: PAT_MRT4530_3200C.1
atggcgaacggcgacggcaagccacgggaggatacggcaaccggcggacgagcttccggcggaaacagcggcggcaagaggttgcacggcgcgggagcgatgggaggctcgggagaggaggcggagacgtgggcgcggcagcggttgcgggcgcggtggcgcgccgggagcggcgggaggtgggggaaggacccgacagagtgcgacgaattcagctatttctctcctcatgctgacccaccaaaacttttctttgaggtcttgatacattttagtgctgcctgggtgaatggagtactgggtctgatgagcctcggtgagtatcagatccttcagttccttgtcgtcaggccgtgcctccagagcggctacgaacccgagttcaacaattcccacgttgagatgctcaaactcctgccgcaattcctcacacatgccctcgatgcatag

SEQ ID NO: 27305 - DNA, 309 bp, Oryza sativa
  Clone ID: PAT_MRT4530_32010C.1
aagaaccaatggaggacacatatgaggcctgtctattacattattagagaaacaagcttataaaaggaaagccttacaaacggcttgctgatactacagttaatgtaagtcactaacgcagaatttattaacaaaccggtgtgcttcgatcaggctggatgggcagacccaactgattttacttgatgtaattggcaggggcactagtgtcagagagaattcaataagctcttttagcaatgatggaacttctcagcacattgtacaaacaaggccttacatctttgatattgacaccgatgtgcgact

SEQ ID NO: 27306 - DNA, 261 bp, Oryza sativa
  Clone ID: PAT_MRT4530_32011C.1
atggggatggacaatcgatgggagggcgcgctgacgggcggcgtgtcggcggacgacgggaggacatgtggccaggcggacagcggacggcgaccagcgtgcatgtcggcggtggttggagtccttgcgacgacgggcaacgggcaacgctcgcggctgcagcacgagcacgcggcagcagcagctcactacaggcctgcagcgagagcagcagctgcaacaactccctacgatagcagcagcaagccagcaaggtggtag

SEQ ID NO: 27307 - DNA, 279 bp, Oryza sativa
  Clone ID: PAT_MRT4530_32012C.1
tggacggccttaccttctctttttctttttttttaagctaatgactatcttaacggaacatcacacggaaacacatcgccctcttaccatccttgaggataccaggaccgggctccgattagaactgacttgagaagctacgtactttttctacagaaggaatacttagataggacacagggaggagatctgttctgtcaagatcgtcgaagtacacacactatgggaggctgttagcagaggcaacaactaacccacgggctggtgggttgccggcag

SEQ ID NO: 27308 - DNA, 582 bp, Oryza sativa
  Clone ID: PAT_MRT4530_32013C.1
atgtcgcggatggagcaggggctgcggccggtgctgcaggtcaccgacgtgcggcctgccgccggtcgatacctcgtggcgctcttcgacggaaccaagtcggggcagggggtgctcgtggcgtccatggcgcacctcgtcagggcatgcgccatccgcgccggcaccatcatccgcgtcctcgactatctctgcatcgacacaagcctaacacccattgctgcactgagcccatacaagtgtaaatggacaatcaaggccagggtgactgcaaaatctggtctccagcacttgagcaatgacagaggtgaagcaaagttcttcgactttgatctgcttgatgagcagggcggtgaaatgctcgcaaaatgcttcagttcggctgctgaaaagttctatggcctaattgaagttgataaggtctacttgatatccagaggattagtgaaacctgcacaggagcctttcaacagtgattatgaattagctctggatgcctcagcatcagtagagggctcgtctccagtccatgctgcttcaggtgcaaatcaaaggttgtccagggctatgtctgctcactaa

SEQ ID NO: 27309 - DNA, 120 bp, Oryza sativa
  Clone ID: PAT_MRT4530_32014C.1
atgtccatccaccgtatgccatctcgtatccaacttcgtcacccgtcggtggtgttccctgctgggcactggctcaaagaaggtggcaacgatgccatcgccagggaggaaacaacatag

SEQ ID NO: 27310 - DNA, 244 bp, Oryza sativa
  unsure (1)..(244): unsure at all n locations
  Clone ID: PAT_MRT4530_32015C.1
cccacgcgtantgtaactcgtgggatatntcatggncagatacgtggtccaactcatggacatgttcgtgggtcttgtacagcgcattaccggcttccgacgctgtgatgacaaggacgtatttgtaggtgtaaatgaacccagcaagttgtcatgtgaagaggttgcagtaagcatcgaataggttgttattgtacatcgtattgagattagatcaataggagtatatccatgcttgttaggc

SEQ ID NO: 27311 - DNA, 447 bp, Oryza sativa
  Clone ID: PAT_MRT4530_32016C.1
atggcacggcattcagtggcaactgacgtggcgctgaggtgtctaagttcagcgccatatgatttggcgttgagcaaaaagttctaccaaatggcttccggcgccgccgtcaccgccgccgccgccatgtgcaccgtgctggtgatcctctcaaccggcggccagccaccggcggcggcggcgcagaccgattactgcgccaccgcttgctcctcgagttctaatggaacggtgacgtgctacaacaacgctatcaacacatgcagctcaaactgcagcatcacacctcagtattgcgaccagtgccgcagagagtccaaccagcagtgccagaactactgctacaatggctgcttgtacggctgcagcttgcagcacccgtcggtaaacacccctaaccatcatcagggaccggtggggaagtgccaaatggaagctggtggttag

SEQ ID NO: 27312 - DNA, 732 bp, Oryza sativa
  Clone ID: PAT_MRT4530_32017C.1
atgggaagggacgagcgtggaactaaacagagccaaagtatgatgaaaccactgaggagaggaggcgtatgggtggatggggcgatggggagtgaagaaaaggacaaaggaaacgtgcggcgggcttggtgggcgatggaagaggacaaaacatggcatgatggatatgttttgctgctcgaggccctcctccacctcaggcaccacgccgccgacgtccaggccgcgctgcgcaggcgtgacgccgccaggctctcctccgcggtgcgctcccagcgccaagcacacaaggacctcgccaggctcgccgcctccgtgcgcggggccgccaccaagtggccggcgcagctgccgtcctccgccaccgtcgccgaggtcgaggtgtccggtgtcctcgccgacgcgatggccgctatcgcatcagcgtccgcggccgtcttctccgccgtcgagaccatgtcaaccatggccaccgcggcggccgcgtccacgtgctcctcctcctcatcatcttccagcaagacaccactactcatctcgctagtgaggaagaagaacagaaagtcggctgctgccgtccccgacgaggagaaggagatggcggcgtcggagagaatggaggagctggaggaatgcatggcggcaatggagagcggcaacgacagggtgttcaggacaatcctgcacaccagggtcgctctcctcaacacgcatgctaccctaattaactaa

SEQ ID NO: 27313 - DNA, 561 bp, Oryza sativa
  Clone ID: PAT_MRT4530_32018C.1
agctcggcaccctgggaggctgtagagtcgacctgcagttggctgccctctgctggcttggtcgactccttcctgcttcggcgcggctcacagcagcccagcggacggtggccacagcaggctaaccccggccaccctgcgcagcgtgcccaggcccagccccggctgcacgctctcagcagaccaacacagcgcccagcatcagcagtcggccgtctgacgcccaagctcagcaagccagcagccggagatggagccgctttctcctgacggtgcccaggcttgaatccgtggctggctccgccactgatctctgcatgcttgtattgactcaaatggttaattcggatagtttgttcagataaatgtagtaagtttgaatagcatttggtttagaaacctatcatttggcacttattcttcatcaattcatctctttttggcgggaggaaagtgtattgctcttagattagaacaattcttgtgtcatgttgatgtagaaaggaaagtggatgcagaattaatgtgtggtactcaaggagcgtgtccaaatacaaagga

SEQ ID NO: 27314 - DNA, 1133 bp, Oryza sativa
  Clone ID: PAT_MRT4530_32019C.1
gaaaaaccggcctgcaggaagtgcgtttggtaagcctcgtctcgaaatggcgacttgctccgctgcttgcgctcgcccagccgtcgtcgtcttcgcgtcgccggccgccgcgcggcggcgcgccgcctcctccgtctacctccctggtcggcctctgcgcggcggcggcgtcgtgcgatgcagcgctgggcctgtaagcggtgggatgatctcgaagaaggtggcggagctgtgggcggcggcgaggagcgcttcgccggtggcggtgatcgccgcggtggccggagcggcggtggtctacaaggtggggtccagtctcctcgcgccgcctcctccgccggcgaggccccgggaggagcccagcgaggaggccccgccgcctccggagccggtgcaggtgggggagatcacggcggaggagttgctgcagtacgacgggtccgaccccgagaagccgctgctcatggcgatcaaggggcagatctatgacgtctcccagagcagattgttctatggacctggtggaccatatgcattgtttgctggtaaagatgccagtagggcgttggcgaagatgtcctttgagccacaagatctgactgatgatatatctggcctaagtttacttgaactcagtgcccttcaggactgggagtacaagttcagcagcaagtacgtgaaggttggaaccataaaaaaggtgctcgtagaacagggtggcgatagcactgccgatgcaatagaggaggcagctgtcgatggtgaagacagcatcctgactgctaagatgtctaatcaattactatatgaggaagaaatggaagtcggtagtgatgatccatgaaggcttcaggagttgaaaactgaattgccttctagcagctaacttcacgcatcaagaattcaagacaaataatcgcagaatgatgtttcatgaattcatgtgtctataggtgtagattacaagaagatactgcattactgctgtcgatttccctttgtcaatactcaaggatatgttgccgtaatgccatgttattagttggctgtcctgttcgtcaataatttcatatttctacctgcccaaaaaaaacaaaaaattggttacatcctaattcttcattctttcttgt

SEQ ID NO: 27315 - DNA, 501 bp, Oryza sativa
  Clone ID: PAT_MRT4530_3201C.1
caagtgaaactacattttttataactgagatatacgtgtaagaaatgttagttctccttttatttattacagtagtcgatgttcgaaatcggtacttaagaactgtcaacaataccacataggtgattagatgatgagatggagataagtagagagatgatgaatctattgtgtatgttacctcttaatttgttgatatataatatgtatgaaaatagagataatagtcgcctctgctataaaaagtttgctcttggacagtaccagaataaattagaggtggaccatgctttaaaatgcgtggcaaatattggcaagaatcaagatggggcctcgggaggttggcttcaaggccctgtcccatagattttttttttcccgctgagacctgattaatgatccgatcatattcagatacgctgctgctcaaatccgccagttcgagaggactgattggccggtttgaaatgatcaagtgatcgttaaaacccccaaaacttt

SEQ ID NO: 27316 - DNA, 1215 bp, Oryza sativa
  Clone ID: PAT_MRT4530_32020C.1
atggccgaagccgaggttaaggacaacgaggtttacgaggaggatctcgtcgactacgaggaggaggtggagaacggcaccgacggtggcgccaacgccgccaacgcctccgccgatgtcgtcaagaagtgcgtaccccccaaggtgcaacacgaatgcatcccacaagccattcttggaatggatgtcatctgccaagcaaaatctgggatggggaagactgctgtttttgttctctcaagtcttcagcaaattgatcctgttgctggtcaagttggtgcacttgtgctatgtcacacaagggagctagcttaccagatttgccatgaatttgagaggtttagcaagtaccttcctgaggtaaaagttgcggtcttctatggtggtgttcacataaaaaaacacaaggatctgttgaagaatgactgccctcatattgtggttggaacacctggaaggatactagctctagctagagagaaggatctttccttgaagaatgtgaggcatttcattcttgatgaatgtgacaagatgctcgattcacttgacatgcgtagagatgtgcaggagatcttcaaaatgacaccccatgataagcaagtgatgatgttttcagcgacccttagcaaggagatccgcccagtttgcaagaaattcatgcaagatcctatggaaatttatgttgatgatgaggctaaactgacccttcatgggctagttcagcactatattaaactaagtgaggcggagaagaaccggaaattgaatgatctcttagatgcactggacttcaatcaagttgtgatatttgttaaaagtgttagtagagctgcagaactgaacaagctgctttgtgaatgcaactttcctgcgatctccatacattctggaatgacacaggaggagaggcttacccggtacaagaacttcaaggaaggacacaagaggattcttgtggctactgatttagttggcaggggaattgatattgaacgtgtcaacattgtcataaactatgacatgcccgattctgctgattcgtatctacacagggttggaagggctgggcgttttggaaccaaaggacttgcaataacatttgtttcctctgcctctgactctgatgttcttaatcaagtgcaagaaagattcgaggttgacataaaggagcttcctgagcagattgatacttcgacatatatgccttcttaa

SEQ ID NO: 27317 - DNA, 1706 bp, Oryza sativa
  Clone ID: PAT_MRT4530_32021C.1
cccacgcgtccgccgcctccagcttctctccccgcagcgcgcaggcaccatgggcgaagctgaggtcaaggacaacgaggtgtacgaggaggatctcgtcgactacgaggaggacgtcgagacccccctcgacgtcggcgccgccgccgccaacgcctccgccgacgtcgtgaagacgccgctgccgacgtcctcgctgccgccccgtccacttcggctcccgtcgacaggtttgctctctccagcgagcaggcacccaaggccgaagccgaggttaaggagaacgaggttaacgaggaggatcacgtcgactacgaggaggaggtcgagtccgccgccaacggatcctgttgctggtcaagttggtgcacctgtgctgtcacaaaggaatagatctagcttacccgatttgccgtgaacttgagaggtttagctaatacccgcctgaggtaaaagttgctgtcttctatggtggcgttcacataaaaaaacaccaggatctattcaagaatgagtgccctcatattgtggttggaacacctggaaggatacttgctctagctagagaaaaggatctttccttgaagaatgtgaggcatttcattcttgatgaatgtgacaagatgctcgattcgcttgatatgcgtagagatgtgcaggagatcttcaaaatgacaccccatgataagcaagtgatgatgttttcagcgacccttagcaaggagatccgcccagtttgcaagaaattcatgcaagatcctatggaaatttatgttgatgatgaggctaaactgacccttcacgggcttgttcagcactatattaaactaagtgaggcggagaagaaccggaaattgaatgatctcttagatgcactggacttcaatcaagttgtgatatttgttaaaagtgttagtagagctgcagaactgaacaagctgctttgtgaatgcaactttcctgcgatctccatacattctggaatgacacaggaggagaggcttacccggtacaagaacttcaaggaaggacacaagaggattcttgtggctactgatttagttggcaggggaattgatattgaacgtgtcaacattgtcataaactatgacatgcccgattctgctgattcgtatttacacagggttggaagggctggacgttttggaaccaaaggacttgcaataacatttgtttcctctgcctcagactctgatgttcttaatcaagtgcaagaaagattcgaggttgacataaaggagcttcctgagcagattgatacttcgacatatatgccttcttaaagatccgggtggattgcttaaaagcttacattcgaaccggaaacaggagtatctccttgagatacgccatattaagaatctatcggataactagaaactaaaacttagtgtgagaaatgctgccctatctatacttagacagcagtttagatctgctgctaagtgctgaatgccccgtaataatacttgaaatgatgtatctgggcaattgggcatgtacgtatttgaattgctgtcgttcattgtaattccgagaattttattaggatttgtttgtgttaattttgctactccgcagatgctaacgtaggttagtttattactttgtttatggtacttttgaggatttcaaaaaaaaaaataccgcgtttcttaccgtcgtgccgattcctgcagcccggg

SEQ ID NO: 27318 - DNA, 1365 bp, Oryza sativa
  Clone ID: PAT_MRT4530_32022C.1
ccggccgggaatttccatccgccgatcccctccgatctcgaattctcgaccttccctcctccttctccgccggcgccgccgccgctcgtcgccggccacctccaccgccgccatgaactacatcgtcggagcgttcaagccgccctgcgacatctccatcgccttctccgacgccaggtcgcggaagcagatcgcggtcaagaatgacaatgggaggacggtgatggtgccggtcttccagagcctggagaccatatccggggaggtgtcggtagtgccggttccgggcaagaggatcgagcacttgggtgtcaagattgagttactgggtcagatagagctttatttggagcgaggcaaattctatgacttcacttcattggtgcgtgagctagatattcctggtgaaatttacgagaagaaaacatatccattcgagttttccactgttgaaatgccttatgaatcttacaatggaacaaatgtcagattaagatatattttgaaggttacgatcagccgaaacattatgggcatgggcagcattgtggagttccgtgagttctgtgtaagaaattactctcctgcccccacaatcaacaacagtatcaagatggaagttggaattgaggattgcttacatattgagttcgaatacagcaaaagcaagtaccatctcaaggatgtgattattgggaagatctactttcttcttgtcagaataaagataaaaaacatggaactagaagtacgtcgtagggaatcaacaggagcaggctctagtgcatatgttgagactgaaactcttgcaaagtttgagttgatggatggtgctcctgtcagaggagaatccatcccggtgaggctattcttgacgccttacgagctgaccccttcgtatcggaacataaacaacaagttcagcgtcaagtactacctgaatctggtccttgttgatgaggaagataggaggtacttcaagcagcaagagatcaccatgtatcgccttctagaaaccccccaggcttcctagattccaaactggagcagcaagatgtttttcgattctcaggttttgtacaagctagcatcgaggttagggcaatggcgtacttacatgtatataaactccagaagagctcggcagttcactagtgctgctctccaaatcacatttctttgtttctgtatcttcttgtcctctgtgtgcttatggtagaccctttgattcatgtggagtatatgtgcattacctccccctgtttatttctgtttcttgaaagtaatctgtccgaagaccttatgtgtattatctcacaaggatctttgttaattcacttgattgaagttttgcagtgatgattg

SEQ ID NO: 27319 - DNA, 524 bp, Oryza sativa
  Clone ID: PAT_MRT4530_32023C.1
ctctctctctctctctctctatctctctctctctctctttgcagccgccgccgccgccgccgccgccgccgccgcgtccgcttcgactcccgccgccaggttctctctctccagcgcgcaggcaccatggccgaagccgaggttaaggacaacgaggtttacgaggaggatctcgtcgactacgaggaggaggtggagaacggcaccgacggtggcgccaacgccgccaacgcctccgccgatgtcgtcaagaaggggtacgtggggatccacagctcggggttcagagacttcctgctcaagccggagctgcttcgcgccatccaggactgcgggtttgagcacccttccgaagtgcaacacgaatgcatcccacaagccattcttggaatggatgtcatctgccaagcaaaatctgggatggggaagactgctgtttttgttctctcaagtcttcagcacattgatcctgttgctggtaaggttggtgcacttgtgctatgtcacacaagggagctagctta

SEQ ID NO: 27320 - DNA, 1159 bp, Oryza sativa
  Clone ID: PAT_MRT4530_32024C.1
gcacgaggggcaactctcaatccggccatcacatcatggatactgcttcttcctcctccctgttgctgcattcatctcgcaccatcgtagacacgaccctttcagttgaattcattattattgcaagattgatttcttctttgttttttctttatcctcttttgctttagcttcgatagctagcttagctgcttgaattggtgtttgtttcaactctctgaagctctctggaagaacgggcggcggcggcggggtatatcatgacgtggtgcaggtgatggtggggatgatggagacgagcccggacgacggcggtggcggcgaggcgatggcggcggcgcagcagacggaggaggacatggggccaccgtggctgcggccgctgctgtcgacgagcttctttgtggcgtgcgcgtcgcacccggagctgagcaagaacgagtgcaacctcttctgcctcggctgcaccggcgacgccctctgcgcctactgcctccccgcccaccgcgaccaccacgtcgtccagattcggaggtcgtcgtaccacaacgtgatcagggtgtcggaggtggggaagctgatcgacatatcgcacgtgcagacgtacgtgatcaacagcgccaagatcgtgttcctcaacggccgcccgcaggcgaggcccgggaagggcgtcaccaacacctgcgagatctgctgccgcagcctccccgactccttccgcttctgctccctcggctgcaagctagctaccctacacctcgatctctgtcgtccatggcatctgtctctggaagtgtcattagcaaacatgacagcccaggggggggtgcaacaagctaatgagacattctccatggaatcgctgggaggaatgcggtgggacccaagcctgacattcgccatccggccgaagcgcgggcaggactccggcgacggcggctccggctccgactacgactccttcagccccaagaaggcgaggagggcggcggccggctacgatcagctcggccggttcgaccggggcatgatccggtggtccgacgacgagggcagcaagtccaacacggcgccgatcacgccgaccacgccgccgatcagccggtgccggccgtcgaggaggaagggcatcccccaccgtgcacccttctacggttag

SEQ ID NO: 27321 - DNA, 370 bp, Oryza sativa
  Clone ID: PAT_MRT4530_32025C.1
cacgagggcttgttacagtctgatataaaagcggctcttaaaactgcctttgccaacatggacggtccattattagtgactgattggtgcaggggtcgaagtaatgcagctgaatatgcatctatgggagatgcatactcttttcagcacccaactggtgatatccgggagtcctcaagcagtatatccataggtggagattcaatgagcccaccccaatcaagtcatgttatatctaatgaccgaggcacttcggagctggagcaccataggggatatcaccgtgttagaccaaccgttgctgtcctccctttgccttctctgcttgtcggttaccaggatgattggttaaagacctctgctaattgtc

SEQ ID NO: 27322 - DNA, 392 bp, Oryza sativa
  Clone ID: PAT_MRT4530_32026C.1
agaaacaaaatccaatcacagatagtgtaaagttgcaacacaaaagtattggattcaaatccacagcaagttaacaacaatgaacaatatgtaaacttaaaagaagacatcgtcgccggtgaactcctccgttgcatggggtggccgccgccgccacagcctcctccccccttcgtccggatctgggaggggtgggttggggtagcaagcccacacagccgccgccgacacgtacccctcccctccgccagatctgagaggggaggggtcgaggggaggggcagcgacgtggccagtggttgtcatcgtcgtcgcgtggtagtcgtcgtaggcgccgtcgccgacgccctctgcccgcgccgctgccgaccctctccgcccgtgccatcacc

SEQ ID NO: 27323 - DNA, 196 bp, Oryza sativa
  Clone ID: PAT_MRT4530_32027C.1
atgcatgctatccgcgcccatcaccacgtgtctcagccgatcgatgccgctgtgctgccgagtgccgaaccggacaccgcatgccacgtcgtcgtacggttcccgcccgctcctcccgcgcatggcaagaacggacagctggagatcgcaggccgcatggctcgatcgtccaagccatacaaggttgccaacaaag

SEQ ID NO: 27324 - DNA, 414 bp, Oryza sativa
  Clone ID: PAT_MRT4530_32028C.1
aacgaaattctaattgagagtcaaaaaaaaaacaaatcttacatgcttatgtaacacattccatgctggagcacaccagcaacgcttgcatgccgggaacatgctcgtggctgagaacaataaatcagataacacgtgcgttttgtggaactagctaaaaaggctccatgggacacaagtccgacgcaccacaaaaagacacatcttatcagaaaaagacccaactggaggcatgttctttgatccctcaacatgaacactgagaaccgcattctaaatgttgactacacttcagaaaatatgctccatcatggtattaatctaactattgtcattcctaacaagcaccactaaggtcaactacctgaatatatcacgtgctaacgcaccaaggagcatggcatggataacttg

SEQ ID NO: 27325 - DNA, 211 bp, Oryza sativa
  unsure (1)..(211): unsure at all n locations
  Clone ID: PAT_MRT4530_32029C.1
ccgcatgtcgcgctggggcccgccgccgcccgccggggagatgaggggcggtggcgtgntcaagtgctgcttgtcgcggacgcgtgcctggcncaggaggttcggtactggtcgtcgtcgccgttttcggtttccttgcccggcaagccttcaactatttctaactcctgtctggctctccataggtggggataaaaaaattttttttttt

SEQ ID NO: 27326 - DNA, 1203 bp, Oryza sativa
  Clone ID: PAT_MRT4530_3202C.1
atgggggaaggcgcctcctcatctggagtgccacattcctcctcacgaggcggccctccccccacgctcacccctggagggacaggttgtagggccttcgtggcgagtctccggaatgtccggtggcccccgaagtttcaccctaacctcacggagaagtatgatggcagcatcaatccctccgagttcttccatatctacaccacgatcatcgtggcggcagggggcgacgaccgggtcatggcgaattatttccccatggccctcaagggtcaggcgcgcggctggttgatgacccagccccccgactccatctactcctgggaggacctgtgccagcagttcgtcacgaacttccagggcacatatccccgcccaggagaagaggcggacctgcacgctgtgcggcggaaggacgatgagtccctctgctcgtacatacagcgcttctgccaggtccgcaacactattccatgcattccggcccacgcggtcgtttatgcatttcggaatggcttgcagcataaccgcatgctggagaaaatcgctttcaaggagtccaagaccaccgctgagctcttcgagctggcggacaaggtggctcggaaggaggaggcgtgggcctggaactcccctggcatcggcgcggcggctgcggctacccccgagtctattccccgctctaagcgcctgagcatcatctccccagctgccttcgacgcgctcaaggccccggggatgaagctccagccgtcgctgctgatcatcggcgtgactccgggacacacgtggcccctcggccacgttgagctcctggtaaccttcggcgactccaccaacttccgtaccgagcggatcgacttcgatgtggcggacctcaatctgccctacaatgcggtcctgggcagacctgcgttggtgaagttcatggccgccacccactacgcctacctccagatgaagatgccgggccctagtggtcccatcaccgtctttggtgatgtcaaagtcgccctcgcctgcgcggagcagcgcgccgacaacctggcggtggccacggagccacaggccctggaggcctccgcgtcccgcgcctccaagaagcacctcacctcggctgacgaggtgcccgtcaaggagatcccccttggagatgatccatccaagaccgccaaaattggcgggaccctggatgccaaatag

SEQ ID NO: 27327 - DNA, 378 bp, Oryza sativa
  Clone ID: PAT_MRT4530_32030C.1
atggacgggacagggaggtgccaagccgacatggaaagcaggcgggagttggggtcacctacggcgatggacgggaccggcgaatgtctagccagctgcgtggaagatggagccaccggctgcttgggaatagcatcacgtttccggtcgttggcgagggagttggggtcacctgcggctgctggacaggtcaatgcggtggtggacgacctcgccgaggaccttctgacgggcaggattcccctagcgcgcaccaaatcgcgacggtggaggaaattgggagggagagggatgcccgatttgtggagaacgagatatgcggagaagggaatgtcaatttttgggaggaagagtagggatcctgttggagagaaatag

SEQ ID NO: 27328 - DNA, 240 bp, Oryza sativa
  Clone ID: PAT_MRT4530_32031C.1
atacgaatcaaagggcacaagcgggtcgagcacgacgcggaatgggcaataagatggcgcaaccatgggcagggatcaaatgcccaacgcctatcgcggggacaaccatcctctctaacaggagcccgaaaaaaggaaccgccactcaccttcgcccgctatggatatcgtaatataaggccccatgggcccaaggaaaaagaaggggggggaaccggaggtacgggggaggaactatga

SEQ ID NO: 27329 - DNA, 174 bp, Oryza sativa
  Clone ID: PAT_MRT4530_32032C.1
ccaccccctggcggtgtcttgtaatgacgtctttaacccgtattagtggttcggaagctttaaaataacgcctcacgatactcactcattatgtgaccacatgctgaaactttggcgtgaatataaatagaaataaacttttctttcataatttaaaaaaaaaaaaaaaaaaaa

SEQ ID NO: 27330 - DNA, 1935 bp, Oryza sativa
  Clone ID: PAT_MRT4530_32033C.1
atggcgattacgaaggttctcggatcgaaacctgccgactgcttccaatttcaagatcctaattcctggacttgcatgactgagcttgtaagcgatgtggtcgttgaggttggagatttctccttccatctccacaagttcccattgatgagccgaagtggcacgctgcaaaagctgataagcgaagcagccgccggcgccgacgacggcgagccgtgcagcgtcaagctccacgacgtccccggcggcgccgcggcgttcgagctggcggccaggttctgctacgacgtcagggcggagctcgacgccgggaacgtggtcgcgctgcggtgcgcggcggagcacctcggcatgaccgaggaccacggcggcgagggcaacctcgtcgagcaggcggaggcgttcctccgcgacgtgctcggcagctgggacgacgccttgcgcgcgctgcggtcgtgcgacggcgcgctcctcccgctcgccgaggagctcctcgtcgtgccgcgctgcatcgacgcgctggcgagcaaggcctgcgccgacccgaccctcttcggctggccgatggtggagtactacacggcgaggggcctcgaggagacggtgatgtggaacggcatcgccaccgccggcaagccgaggtcgccgggcccggactggtggtacaagcaggcgtcgtcgctgaagctgccggtgtacaagaggctcatcacggcgatgaggtccaagggcatgagccccgagaacatcgccggctcgctgacgcactacgccaagcgccacctctccggtctgacccgccactccggttacgtcggcggcggcggcgcgtcggggaccgtgctctcggacgtggagcagagggcgctcctggaggagatcgtcgcgctgctccccgtcgagaggggcgtcgccacgacgaggttcctgctcgggctcctccgcaccgccacgatcctgaacgccggcgcggcgtgccgcgacgcgctggagaggatggccgggaaccagctcgaggaggcggcgctggaggacctcctgatccccaacaccggctacgccgtcgagacgctctacgacgtcgactgcgtgcagcggatgctggagcagttcgtcgccgcgaacacgtcggcgttcgccgcctcgccggagatcacggacgaagcccagctggtcgacggcccctccggtgagctcatgccgatcagcacggtggccaagcttgtcgacggctacctcgcggaggtcgcgacggacaccaacgtcaagctctccaagttccagagcatcgccgagctcgtcccggactacgcaagggccatcgacgacggcatctaccgcgccattgacatctacctcaaggcgcactcgtggctgacggcgtcggagagggagcagctgtgcaggctgatgaactgccagaagctgtcgctggaggcgtgcacgcacgcggcgcagaacgagcggctgccgctgcgggtggtggtgcaggtgctcttcttcgagcagctccggctgcgcaccacggtggccgggtggttcttcgtcgccgacaacgtcgaccagggctcccccatcgccgccggccggtacgcgccggagaggagcggcgagctggacttcggggcggggccgccggaggaggaggatggcgacgacgacgacgacgaggcccggaacaacgtgcggtcgtcgtcgtcggcgacgatgagcgtggacgacatcaggcagcgggtggtggagctcgaggaggagtgctcgagcatgagggaggagatccaccggatcgggaagcccaagggcgcgctgagtaggctgttccggaagctcgggctcggcgggaggtcggcggcgaggcggcagcagcagcagccgccgccgccgccgacgagctccggcgacgagaggcggaagtcgatgtccttggagtgttaa

SEQ ID NO: 27331 - DNA, 522 bp, Oryza sativa
  Clone ID: PAT_MRT4530_32034C.1
ggccaccgcccacagacagacccgtcagaaaacctctccctccggcgatgtacggcgacaccgagccggccgccgccgccgccgcggagcgcacggcgttccggcgagccgagaagcagtacaagctctacaagccgctgaagcccaagggcggcagggcaaggagcaagccgggaggcggcggcggcggcggaggattggaggacctgtccgcggtggtcgacttccacgcgctgctcgctgccgccgccggcggcgggggggagctgcccgccgggatcgggaggcgcgacgtcgccgggttcgacctcttctgcttcttggaccgacctggattctatttcatacctggtgctctatctattgaggaacaatgctattggatcagggaaagcttgaaaaccttcccacagcctcctaatagaactaacctgacagctttgtatggtccaatttttgacttactcactgctgccaaagtggaaagattttagtcgaagtgggaatcccatgaccaaaaag

SEQ ID NO: 27332 - DNA, 114 bp, Oryza sativa
  Clone ID: PAT_MRT4530_32035C.1
tttgggggttttaaactacttcggtgcatacctttcatcacattatatcaatatcacacgttattaaagcatgaaagcacccacatgattggcacagattaccaggtatacatg

SEQ ID NO: 27333 - DNA, 548 bp, Oryza sativa
  Clone ID: PAT_MRT4530_32036C.1
gtatggttactggatacaacgctgagtggtggagcgcgcgaagcatctgtaactactacacgcgcacgagacgtctgcacagaccaaggacagggaagactggaaagaccgagcacaggagatctgaacacacacgtcctgggaacgtaggacgagaacgcttcgcacagactccagcgttgtaggaggcgtcgaactggagctccgatatggacgagtaactacatcgctaacataggcactacagcatcaccacacacctctgtggcctatagaagggcatcatgtctaactcggcctcatgacccttccacaatctgctgcatagaagatgtaacacaagagcactatcacgcttcagagcggtgatcttattcacctgcaggatagtcagcttctcctctatatttcggatcccgtggtgcgactcatcagcggagatgaagctgttgtggtctcttgaccacaccagggaggcctgcttgagatcttccaatgaatcagtggacttgatacttgcgaaccgtgaaagtgagaaacttaggaaa

SEQ ID NO: 27334 - DNA, 400 bp, Oryza sativa
  Clone ID: PAT_MRT4530_32037C.1
gtcaaagtggactttttccccttagaaaatttgtccaagttaggggttaaaacggtcggaaacgatcggaatcggtagcatctcttcggaaacgatgctcaatcggccggtaattgaccatatttatcatttaaactactcggtattgacattaatacgatgcagaaagaattgtgaaaaaacaaaatttaaaaatagccaaaaacggtacggtcagaaacggtacaccatatacggaaacggcactcggtcgatcgggaactcgtacgccgaacacgacagagatatcgctaaagttatcagcatatgaagaaaaacggatttgattttagtcacctttttattacctcgttttggattacgacgcagtcgatggagtttattaggtgaatttcacttc

SEQ ID NO: 27335 - DNA, 446 bp, Oryza sativa
  Clone ID: PAT_MRT4530_32038C.1
ataaaaccaacactccacactctctgtaaatgccaccacatggtttatagcacatatcctagcagaatactacaaaggctaactactcattaacaccaacaacagcgataaccttacaatgtagcacaacccgacgatgggtcccatactcatcacacccgcatgcgcttccaataacacccaaatgctgaagccatgccaccagccacctacacatataccattgacatgctatgtgacagaaccatgatacagtcgctagaagcaatgaaattgcgtactggatgcagatctagctaaatctgccgaacccgagagagccagttgaatcttatgcggtgacggccataagataaagggagctagaacacggaccttgccagcacgggcacgcatgattacagctgggtgactatggcacatcgcgcaaaaagctctcaccattg

SEQ ID NO: 27336 - DNA, 173 bp, Oryza sativa
  Clone ID: PAT_MRT4530_32039C.1
atcaatccaatttacgcttattaaccgcgaggaaaaaaaatcatccctcaatatgctgaaacgagaggtgatacagctatggattcgcaatgacaaaatttctccaaccccaaatatttcagtattccattctaaattctcatttttccattcttatacaaaatggaggttac

SEQ ID NO: 27337 - DNA, 3207 bp, Oryza sativa
  Clone ID: PAT_MRT4530_3203C.1
atggtcgaggtcctggaggaggaggtggtggcgttcacccccactccgtctgggagtgaggatgccagcgagagccgcggcccacgtcatcgtcgccgcaactcttccactccaccccgctgcgaaccctcgcggaggggggaccccacctattcgggtggttcgggcctctccccgctcccgggcggagggaggccaccacgcgtcggggcacggcgccgcctcacttacggtgatggtggctcgccccgaggtgcgcttcaggcggcgggtgcccttctgcggcatccccccgtcaactcggagccggagacccctatccagcgctggttggacgacgtggccaacttggtcaccacagctcagcggcagttggccgcgggcggccgacccgccgtcaccggtacgtcgcgtacccccattaccctctcctcatcggcaaggaggagggcccgtcggtcagccatggcctcgaggcggtccacggctccaacatcgatgggggcctcgggaagccggaggcgtcacgacggtctctatggggagcaggacgctcgaatcaatatcgagcgacgccgggacgagcgccgagctcttcgcatgggggaaggtgcctcctcatctggagtgccacgttcctcacgaggaggccctcctcccacgctcacccctggagggacgggttgtagggccttcatggcgagtctccggaacgtccggtggcccccgaagtttcgccccaacctcacggagaagtatgattgcagcatcaatccctccgagttccttcagatctacaccacggtcatagtggcggcgggaggtgacgaccgggtcatggcgaattatttccccatggccctgaagggtccggcgcgcggctggttgatgacccagccccccgactccatccactcctgggaggacctgtgccagcagttcgtcacgaacttccagggcacatatccccgcccgggagaagaggcggacctgcacgctgtccgcaacaccattccatgcattccggcccacgcggttgtttatgcgtttcggaatggcgtgcggcataaccgcatgttagagaagatagcctccaaggagcctaagaccaccgccgagcttttcgagctggcggacaaggtggctcggaaggaggaggcgtgggcctggaactctcccggcaccggtgcggcggctgcggctacccacgagtctgcccccgctctaagcggcgagataggagaggaaaccgtcgccacgcttgacggggggaggggggcatgtgctcacacctcccgccgaggcttcaaggccatgaggcgagagcttctggccgccgttccaacccacgaagcggctcggaaggcgcgctggttggaagtgaagctcacctttgaccagagcgaccatccaacagtgctcgctcgtggcgggaaattggcccttgtggtctccccgaccattcacaatgtcaggatgaagcgcgtcctggttgacgggggggccagtctgagcatcatctccccagccgccttcgacgcgctcaaggccccggcgatgaagctccagccgtcgctgccaatcataggcgtgactccgggacacacgtggcccctcggccacgtcgagctcccggtaaccttcggcgactccaccaacttccgcaccgagcggatcgtcttcgatgtggcggatctcaatctgccctactacgcggtcctgggcagacctgcgttggtgaagttcatggccgccacccactacgcctatctccagatgaagatgccgggccctagtggtcccatcaccgtctttggcgatgtcaaagtcgcccttgcctgcgcggagcagcgcgccgacaacctcgcggtggccacggagccacaggccccggaggcctccgcgtcctgcgcctccaagaagcgcctcacctcggccgacaaggaaagcacgctcgtcttcttcctgcgggcacattccgacgtcttcgcatggaagccgtcggacatgcccggggttcccagggaggtgatcgagcaccgcctcgccgtgcgaccggacgcgcgacccgtccggcaaaaagtgcggcgtcaagccctggagcggcaggccttcatccgagaggaggtggtacggctcctggaggctgatttcatccgcgaggttatccacccggaatggctggcaaacccggtggtcgtcccgaaggccaacggcaagctccggatgtgcatcgactacacagacctcaataaggcatgccctaaagatcccttccctctaccatgcatagatcagatagtcgactccactgcggggtgcgaccttttgtgttttctagatgcctactctgggtatcaccaggttcgcatggctagggaagatgaggaaaaaatagcttttattactcctgtgggcaccttctgttatacaactatgccttttggcttaaagaatgcaggccttacttttcagcacatgactcgcattactttgagtaatcagatagggcgtaatgtagaggcgtacgtcgatgacctggtggtaaagactcgccaccaggacacgttgctgcaggatttggccgagacttttgatagtcttaggtccacacgtgtgaaactgaaccctgataagcgccggagtcacgctgacttcggcaagcggggacgtcctcaaatacgtcgttcggctcgacttccgagctacgaacaacatggcggaatatggcggaacaacgtcctgaagaaacacggggattcatggcttgaggaattgctcgccgtgctatgggcaaatcggaccactccaagctgcgccacgggggaaaccccctttttcctggtgtatggcgcagaagcggtcctaccctcggagctttccctgggatcgcctcgcgtcgcgctgtacaatgaggccaaccaggacgaacttcgccgcgacgacctcgactatcttgaagagtggagaaggcgtgcggccctgcgtgccgcgcgctaccaacaaagcctgcggcgctaccatcaacgccacgtccgggcccgatcactgcaagttggcgacctcgtcctacgccgcgtgcaatcgcgtctggggctgagcaagctctcgccaatgtgggaagggccatacaaagtgatcggcgttccccggccaggctctgtccgactgaccacggaagacggcacagagtttcctaacccctag

SEQ ID NO: 27338 - DNA, 432 bp, Oryza sativa
  Clone ID: PAT_MRT4530_32040C.1
cgaccacgcgtccgcggacgcatttgtcgactacagtgatgagtaccgggttgtcacgtcgaaggcgcacagtgtggggggggcccattgtaccattgctgatgctttggagataaccgaatacctgaactcagacttatacttggacaagtatgacagccagtgccactgaattatgccaatgttactgatgatcttatcgacatgtattatactgatgatcattataaccagttcattctattaaattgatggaagcaaggtcactgtggtgtacagtgaataacacattgcattcacgctccttgagctttaccgttctgtgcatgttatagaagattttcattcttagtaataacagtggctcttctggatactgaatgaatttgtatttattggacacaaaagcttgcaagatgttaaatgattttt

SEQ ID NO: 27339 - DNA, 290 bp, Oryza sativa
  unsure (1)..(290): unsure at all n locations
  Clone ID: PAT_MRT4530_32041C.1
aggaggtccagcggcggcggtngcgaccgtcggaggtggaccatcggagaagcccgggagcgtcggcgacgagantacgggataagggaggcggcggcggctgcgactntngatgaagggagaggcggccggcgncanctgcggtganagaagctgtcttcgtcgtcgtgcccgctccgcccgccatcgcctgctccgcccgccgctgccccgcaatcacatactcccgccggcgacgcntgnacagcgcgggcgatgnatctgcggccatggacgacgacggcggcggc

SEQ ID NO: 27340 - DNA, 402 bp, Oryza sativa
  Clone ID: PAT_MRT4530_32042C.1
atgcccggtacagacaggagaagtcagggattccgcgacgcagccgactccggcttcatcctcgacgaaggggtcgacgtcggcgccagcaacgcgaagccaacgaagacgcgtcgccgccgccaccggcatcttcatcctcgacgacgacgacgacggcgccaacaacgcgaagacaacaacgacgagacgccgccgccaccggcttcatcctcctcgacgacgacgacgacgatggcggcgccaacaacgcgaagacaacgacgaaaaaaagccgccgccaccggcttcatcatcctcgatgacgtgacgaaggcgccaccgacttcctcctcgatgacgacgcgacgacggcgggtgaatctaccacctgtgaagatgtcatccacctgtaaaagttga

SEQ ID NO: 27341 - DNA, 165 bp, Oryza sativa
  Clone ID: PAT_MRT4530_32043C.1
atggtcgttgttgagctgctccttgcgactgttgctgtattggttcaaactgattatattgagaagcaaactgaggttgggttagccctccttgctgatactgaacttgaggggaaggatgctgatactgacaatttatattgccccttggtaattctggtgtga

SEQ ID NO: 27342 - DNA, 1475 bp, Oryza sativa
  Clone ID: PAT_MRT4530_32044C.1
tccgtgtacagtgtggcgacgcacgcgacgccaatggccgccgccgccgccgccgccgtgggcgcccgcggcggcatccggcgccggccgaacctgtccctcctggccgaccgctgcgcgaccccgcgcgcgctcgccgccgtccacgcggccatgctcgtctccggccgcctcgccgacgacgccttcgcggcgtcccgcctcctcgccgcccacgccgcgctctcccctccgggagccgtgctccgcctcctcgcctccctcccctgcgccccaaactccttcatgctcaacatcacgctccgcgccctcgcctcctcccccgacccggcctccgccctccgcttcttctccctcctccgccgcggcagcggcggcggcggcggctcgtactctcccggcaggcacaccttcactttcctcctcaaggcatccgcccgcctccccctccgcgcctccgagcagctccacgcgctcgccgtcaggcacgggctggagcgcgacgcctacgtcgccaacggcctcgtccgggcgtactcgctcgcgggcctcgtccccctcgcgcgcagggtgttcgacggattgcccgagcggagcgcggtggtgtgcaccaccatggtgtccgggtacgcgcaaaacgggatgcacgaggacgccatgcggtcgttcgaggagatggtcggcgacgggatcgagccccacggcgcagcgctggcgtccgtgctgtcgtcgtgcgcgcggtcggggtcgcgcgggctcgagatggggcggcgcgtgcacgagctcatggagtcgaggcgggtgacggcgcccgtggtgggggccatcctcgggacggcgctggtcgacatgtacgccaagaccggcgccatggaggaggcgacggcggtgtttgaccggatgcccgagcggcaaacggcgacgtggaacgccctgatcaccgggctggcgcaccacggccacggcgaggtcgcccttgctacgttccaccggatgaggcgggacggcgtgccgccgaacggtgccacgctcgtcggcgtcctgtcggcctacggctgcacggggcgtctcgacgaggcccgccgcgtgttcgcgtccatggagaaggacttcgcggtggcgccgaccatccagcactacggctgcatggtcgacctcctcggccggagcggcctcctcacggaagccgaggagatgatccgtggcatgacgacctgcgacgccgacacggtgatctggggagccctgctgaacgcctgcaagaaccacggcgacatcgacgtcgccgagagggcggtgcaggagatgctcaagctggatcccggcaaccatggcgtctacgtggtgctctccaacatgtacgccgaggccgggaggtggcaggacgtggacaggctgaggaaggtgatgaagcgggcgcggctttccaagatccccggctccagctcagttgatgggtctcttccttgccatcc

SEQ ID NO: 27343 - DNA, 2323 bp, Oryza sativa
  Clone ID: PAT_MRT4530_32045C.1
cccaaacccagaaaccctcgccgccgccgccgccgccaccacccaccatggctacgaccgccgcggccgcggccgccgccctgtccgccgccgcgacggccaagaccggccgtaagaaccaccagcgacaccacgtccttcccgctcgaggccgggtgggggcggcggcggtcaggtgctcggcggtgtccccggtcaccccgccgtccccggcgccgccggccacgccgctccggccgtgggggccggccgagccccgcaagggcgcggacatcctcgtggaggcgctggagcggtgcggcgtcagcgacgtgttcgcctacccgggcggcgcgtccatggagatccaccaggcgctgacgcgctccccggtcatcaccaaccacctcttccgccacgagcagggcgaggcgttcgcggcgtccgggtacgcgcgcgcgtccggccgcgtcggggtctgcgtcgccacctccggccccggggcaaccaacctcgtgtccgcgctcgccgacgcgctgctcgactccgtcccgatggtcgccatcacgggccaggtcccccgccgcatgatcggcaccgacgccttccaggagacgcccatagtcgaggtcacccgctccatcaccaagcacaattaccttgtccttgatgtggaggacatcccccgcgtcatacaggaagccttcttcctcgcgtcctcgggccgtcctggcccggtgctggtcgacatccccaaggacatccagcagcagatggccgtgccggtctgggacacctcgatgaatctaccagggtacatcgcacgcctgcccaagccacccgcgacagaattgcttgagcaggtcttgcgtctggttggcgagtcacggcgcccgattctctatgtcggtggtggctgctctgcatctggtgacgaattgcgctggtttgttgagctgactggtatcccagttacaaccactctgatgggcctcggcaatttccccagtgacgacccgttgtccctgcgcatgcttgggatgcatggcacggtgtacgcaaattatgccgtggataaggctgacctgttgcttgcgtttggtgtgcggtttgatgatcgtgtgacagggaaaattgaggcttttgcaagcagggccaagattgtgcacattgacattgatccagcagagattggaaagaacaagcaaccacatgtgtcaatttgcgcagatgttaagcttgctttacagggcttgaatgctctgctacaacagagcacaacaaagacaagttctgattttagtgcatggcacaatgagttggaccagcagaagagggagtttcctctggggtacaaaacttttggtgaagagatcccaccgcaatatgccattcaggtgctggatgagctgacgaaaggtgaggcaatcatcgctactggtgttgggcagcaccagatgtgggcggcacaatattacacctacaagcggccacggcagtggctgtcttcggctggtctgggcgcaatgggatttgggctgcctgctgcagctggtgcttctgtggctaacccaggtgtcacagttgttgatattgatggggatggtagcttcctcatgaacattcaggagctggcattgatccgcattgagaacctccctgtgaaggtgatggtgttgaacaaccaacatttgggtatggtggtgcaatgggaggataggttttacaaggcgaatagggcgcatacatacttgggcaacccggaatgtgagagcgagatatatccagattttgtgactattgctaaggggttcaatattcctgcagtccgtgtaacaaagaagagtgaagtccgtgccgccatcaagaagatgctcgagactccagggccatacttgttggatatcatcgtcccgcaccaggagcatgtgctgcctatgatcccaagtgggggcgcattcaaggacatgatcctggatggtgatggcaggactgtgtattaatctataatctgtatgttggcaaagcaccagcccggcctatgtttgacctgaatgacccataaagagtggtatgcctatgatgtttgtatgtgctctatcaataactaaggtgtcaactatgaaccatatgctcttctgttttacttgtttgatgtgcttggcatggtaatcctaattagcttcctgctgtctaggtttgtagtgtgttgttttctgtaggcatatgcatcacaagatatcatgtaagtttcttgtcctacatatcaataataagagaataaagtacttctatgcaaaaaaaaaaaaaaaaaaaaaacaacaatttctgaacttcttcgtgc

SEQ ID NO: 27344 - DNA, 393 bp, Oryza sativa
  Clone ID: PAT_MRT4530_32046C.1
gcaaaacgagaattaatctaggctagctactaccacctgagtttgctgttgctgttgctgttgttgcatgcggctgtgacggcggcggcggagatgatgtgcgggaaggaggagaagctgctcggggtgcagaaggcgccggggagttgcccgtactgcggcggaggggtggcggcgacggacgtggaggccaagtgggtgctctgcttcctcccgctctgcctcaacaacaagcggaggttctcctgcaccgcctgcaaccgccgcctcgtctcctaccccgcaattgtccatgactagtagtagtagcgacctctctttctcttctcttcctttttcttttcttttgttttattttcttttcccctgattcggagatttgtcgtcgtctat

SEQ ID NO: 27345 - DNA, 339 bp, Oryza sativa
  Clone ID: PAT_MRT4530_32047C.1
aaaaactcccaatgggtgaccacccttgcaagggatagaactcaaatgatgtccgtggccatgcccatgtcggatgtgatcgctaatggcttacccgctataatcgagggagcacacgcacgaacccttgaagaataaataaggggagaagagctgcggtggccttgcatctgcctgagatgatgcaaccacaagacctgaccccggcttgctgcaaaatggagtgcggagaatgaggcctcagagtggatggtgactgaatggaaatgagtatgagggtggtgatgcacaaaaaaaaaatgaaaatggccccccagtgatgtgaaactttgtggcggt

SEQ ID NO: 27346 - DNA, 240 bp, Oryza sativa
  unsure (1)..(240): unsure at all n locations
  Clone ID: PAT_MRT4530_32048C.1
cttccttccgccaccacccatgtcgtccgcntcctccgccgcgtcgacaatcacgtcggcgggggggcgcgccggcgccgccgcgctccccatcctccgacgaatcggcggcgcgttccgccgccccttctcgtcggagccggacccggcatcctccccggcggtaccacaatcacacaactgggggggcggtgggggctccacaacaatgttctgntancccncctcgccctctcaccc

SEQ ID NO: 27347 - DNA, 1553 bp, Oryza sativa
  Clone ID: PAT_MRT4530_32049C.1
atggcggcattgcgcgtgggcacgagggcggtggaagggaggttccaagcgagcaacggcggcggcggcggtggcggcggcatggcgccgtcgtcgcgcctcgtcgcggcgcaccgggaagcgaagccgaggagcagccactcggcggcgccgtggaagctgccgcggcggcgagccggcgccatgccgctgtggcgcgtcgcggtgttcgcctccgtcgcattgaacgtcgccaccctcgcactcctcctccaccactacgccacctctcctcctccccaccaccaccaccacgacgccggactcgccactcgcagcagcgacgccgccgtccaccggcgagccaggacggcgtcgtcgatggcgccgtcgaccggcaagccggcggtgacgacggattccgttatcaaccttgaccacggcgacccgaccatgttcgaggagttctggagggagaccggcgacgcggcggaggtcgtcatcccggggtggcagacgatgagctacttctccgacgtgaccaacgtctgctggttcctcgagccggagctcgaccgccaggtgcgccgcctccaccgagtcgtcggcaacgccgccgtcgacggctaccacgtcctcgtcggcaccggctccacccagctcttcatggccgcgctctacgccctcgcccccgacgccgccgccgctgccgccggcgagcccatcagcgtcgtctccactgcgccctactactcgtcataccccgccgtgacggacttcctccggtcggggctcttccggtgggccggcgacgccgacgccttcaaaggcgactcctacattgagctggtctgctccccgaacaatcctgacggcgccatccgtgaagctgttcttgatccaaagaccggcaatggcaggacggtccatgacctggcctactactggcctcagtacacccccatcaccaagcgtgcttcccatgacatcatgctcttcaccgtctccaagagcaccggccatgccgggaccaggatcgggtgggcgttggtgaaggaccgggcgatcgcgaggaagatgacgaagtttgtggagctgaacacgatcggggtgtccaaggactcgcagatgcgggcggccaaggtgctcgccgccgtctccgacggctacgagcggcggccggagcagacgaaagagacgatgaccactcctcttcgcctgttcgactttggtcgacgcaagatggtggagcggtggagcatgctccgcgctgctgccgccgcctccggcatcttcagcctcccggaggagacctccggcttctgcaacttcaccaaggagaccgccgcgaccaaccctgcgttcgcgtggctgcggtgcgatagggaggatgtggaggattgtgcggggtttctccgtgggcacaagatcctgacgaggagcggggcgcagttcggggcggatgcgaggtacgtgcgggtgagcatgctcgacagggacgacgcgttcgacatcttcatcaaccgcctctcgtcgctcaagtgaacgaagacggctgatagagagaggacgct

SEQ ID NO: 27348 - DNA, 326 bp, Oryza sativa
  Clone ID: PAT_MRT4530_3204C.1
caatgccgggcgcggtggtactgccggcatcagcggttgccgtcgccgttgtgctgttacaggccactgctacttgaagcacaccaacgggcacgcggacaactgggccttctacaccgtccgcctcagcctccacctaggcctcctcgctggggagagaggaggatgcataattgctgatttaacaaggatagggaaacggttccctgacagcatgttaaagaccatacccatgtggtgttgtgactcttaaccgggcaattgagaggtatcggcggtacactaacaacaagccatctgatgcaaccaacaaagacgctgaaaag

SEQ ID NO: 27349 - DNA, 522 bp, Oryza sativa
  Clone ID: PAT_MRT4530_32050C.1
atgcatttctggcaattgcatcactcccaaaagctccgccgtctctggcccaagtccggcgacgactacctcctcggctcctcttctggtctcactggcgttgaggcggagaggaggatcgccaagacgatgacggcgacgatgcactggtaccagaggtgcccggacctgcggcgagctctgggactcatcgcacacaccgactccggcttatgctccagagcattgtcgtataccaccgcgccgtcgtcaaccgcgaccgtgacaggatatcgctcggatacttcctcggcccgcctgccggacgtcaaggtggcgccgttgacggacgccgtgtcgcccggccggagcgccgcctaccgcgccgtcacgtggccggggtacaaggccgtccgcaagaaggccttcaccaccggcggctccgccctcaagatgatctccaccgccgccgccaccgacgatcgaacacaacgacgtaaccgacgttgccgtgatgtcaaatttacccctaatctgtcttag

SEQ ID NO: 27350 - DNA, 153 bp, Oryza sativa
  Clone ID: PAT_MRT4530_32051C.1
ccagcggagggagacgccggcgctctagcggctggcgacgtcagcggaggggcggtcaaggatcgggacgacaggcgcgggaacatgggtgttcagcgggttctaggtgaaaagtggtggcggccggggaacggcttggcactgcggtgctga

SEQ ID NO: 27351 - DNA, 457 bp, Oryza sativa
  Clone ID: PAT_MRT4530_32052C.1
atggcacgacattttggcccaacccaaacacggcatggcctgacggaggtcgggcccgtgccggcccggcccgaccaccgggccatgcctgggcccctccaccagcacgttgggctggcccggcacggcacgatgggccggcagccaggcccgataggaggaagaaaaatagatcttattttaaaaaaggcccgatgggccacctgtgccttcgggccggcacggcacggcccaccagccggcccgacagctggtgggccgtgcctgggcgggaggagcagcccatgggcccgcacggcccgacacgaagtgcccggattgcgggccggggctgatggctggtgcctggtggaccaggccgtgccgggcgggccttttggccatctatatacatgcgaggcgctcccatgatttcttcaagcaacccagccagccaaacaccttggcacgtcgtaga

SEQ ID NO: 27352 - DNA, 432 bp, Oryza sativa
  Clone ID: PAT_MRT4530_32053C.1
agacacataagtaaattctttatttcttcacatatacattatacagtgttgttgcatacatcaaatgcatctcatacattattcgtctaaaatagaaatagtgaaaattaaataaaaatgttggtgtgatctgtgaccacacctaattgctttaggagatttcaaatataagatttaggcaaaagagaaaatttagagttgcttgatgtcacatattttgcaaccaaaccattttggggcacaaaatttgtaacattagccatctcttagtactttccaaaactatttatttcttaggtaaactctgagtttttgggcaattgaaaatcagtccctaaattcaaagtaatctccatatttttaaagtctatggtactataatgcaaaagttacaaatatcatacttttcactagatttttatttatttgcaa

SEQ ID NO: 27353 - DNA, 384 bp, Oryza sativa
  Clone ID: PAT_MRT4530_32054C.1
atgttagccctgatagcgcaggccattgagacgggttacctcttgcgaagaactcgctagaaaacgagaaaatacaattgccttaattgagctctatctcttattggcaatggcaattatcccaatctaggcccatgctgagcccaagttatgttatatcggctgtattggctatcggcttcatcaaccttgatcaacttcatactttgttttctaccgatacggtattcagctgatgcacagtccaactccaagttcagttcaattcaattaccaaattcacttcgatcttcttccttctactctgaatctgatgacaaattccattgttaacacatgccccccccccaatttctgtttcaagatgtctctacccccccccct

SEQ ID NO: 27354 - DNA, 393 bp, Oryza sativa
  Clone ID: PAT_MRT4530_32055C.1
atgtgggacccatcctctcttccccaggagctcaccaatggggagaggggcgacagcagacgaacctgtttgcgggaggcggcaacggcggttggagcatacattgacgagctccttgccctcgaggcctgcgcgaggcaagctactgcggtaaggtgggcattgagctctgacaacggcggaggcaccccctcctaccacggtagcgccgcctccaccctctccaggctcaatgaggacgtggaggtgtctgacacccaaattttgttcaagaactgtggaaagggcggtaatagtgggactgactttgagatgcactgcgacaccgccttcgcacatatggaggccaacatcggcgggagcaacggtgggttctatggcaccagctactag

SEQ ID NO: 27355 - DNA, 358 bp, Oryza sativa
  Clone ID: PAT_MRT4530_32056C.1
caaggaggagggcccgtcggtcggccacggcctcgaggcggtccacggccccaacgtcgtcaggggcctcaggaagtcggaggcatcacgatggcctctacggggagcaggatgcttaagcgacgccgggacgagcgccgtgctgcccgcatgggagaaggcgcctccttgttcggagtgccgcattcctcctcgcgaggcgccccctgactccatccactcctgggaggacctgtgccagcagttcattacaaacttccaggtcacgtacccccacccaggagaggaggcggacctgcatgctgtgcagcggaaggacgatgagtccctctgctcgtatatacagcgcttctgccag

SEQ ID NO: 27356 - DNA, 5223 bp, Oryza sativa
  Clone ID: PAT_MRT4530_32057C.1
atggtcgaggtcttggaggaggaagtggtggtgcacacccccactccctccgggagtgaggatgctagcgggagccgcggcccccgtcaccaccgccgcaactctcggactccgccccgccgcgacccctcgcggagggaggatcccacccggtcgggtggctcggccctctccccgcctccgggcggggggaagccatggcgcatcggagcgcgacgtcgcctgacatacggtgacggtggctcgccccgaggcgcgcttcaggcggcaggagcccttctacggcatcctcccgtgaactcggagccagagacccccgtccagcgatggttggacgacgtggccaacctggtcaccactgcctagcggcagctggccgcaggtggccggcccaccaccactagtacgtcgcgtacccccaccaccctctcctcgtcagcaaggaggagggcccgtcggtcggccacggcctcgaggcggtccacggccccaacgtcgtcaggggcctcaggaagtcggaggcatcacgatggcctctacggggagcaggatgcttaagcgacgccgggacgagcgccgtgctgcccgcatgggagaaggcgcctccttgttcggagtgccgcattcctcctcgcgaggcggtccgccccccacgttcacccctggagggactagttgtagggccttcgttgcgagtcttgggaatgtccggtggcccccgaagtttcgccccaacctcacggagaagtataatggcagcatcaatccctccgagttcctccatatctataccacaatcatcgtggcagcatcggggggggggggacgaccgggtcatggcgaattatttccccatggctcttaagggtcaagcgcgcggctagctgatgacccagccccctgactccatccactcctgggaggacctgtgccagcagttcattacaaacttccaggtcacgtacccccacccaggagaggaggcggacctgcatgctgtgcagcggaaggacgatgagtccctctgctcgtatatacagcgcttctgccaggtccgcaacactattacgtgcattccggcccacgcggtcgtttatgcgtttcggaacggcgtgcggcacaaccgcatgctggagaaaattgcctccaaggagcccaagaccatcaccgagctcttcgaactagcagacaaggtggctcggaaggaggaggtgtgggcctggaactcccccggcaccggcgcggcggctgcggctgcccccgagtccgctccccactctaagcggcgagataggagggggaaaaggaagccggtccgctctgatgacgagggccacgtccttgcggccgatgggccctcacgggccccgcgcaaggaaaaagccaccggcgacaggccgagctccaccgctacatccggcgagggtcggtcggcagacaagtggtgctcggtgcacaacacttatcggcacagccttgccgactgccgcttggtcaagaacttggccgagggtttcggaaagccgatgaggagaagcggcagggtcaacgggagggcaaagcccccgcgagccctgccaatgaccggcgaggggaggccaagaagaaggcccccgccgatgacgatgatgacgggaccgtcgccaccctcgacgggggtgcttgcgctcacacctcccgccgtggcttcaaggccatgagacgtgagcttctggctgcagtcccgactcacgaggcaacacgaaaggcgcgctggttggaggtgaagctcaccttcgaccagagcgaccatccgacagcccaagggatgaagctccagccgtcactgccgatcatcggcataacctcggggcacacgtggcctctgggtcacgttgagctcccggtaaccttcggcgactccactaacttccgcaccaagcggatcgacttcgatgtggcggacctcaatctgccctacaacgcggtcttgggcagacctgctttggtgaagttcatggccgccacccactacgcctaactccagatgaagatgccgggccccagcggccccatcaccgtcttcggcgatgtcagggtcgctctcgcctgcgcggagtagcgcgccgacaacctggcggcagccatggagccgcaggtcccggaggcctccgcgtcctgcgcctccaagaagcgcctcacctcggccgacgaggaaagcgcgctcgtctccttcctgcgggcaaactccgacgtcttcgcgtggaagccgtcggatatgcccggggtccccagggaggtgatcgagcaccacctcgccgtgcggctggacgcgcgacccatccggcagaaggtacggcgccaaaccccggagcggcaagccttcatccgagaggagctgacgcggctcatggaggccggcttcatccgagaggtcatccacctagagtggctggcaaacctggtggttgtcccgaaggccaacggcaagctccggatgtgcatcgactacacggaccttaacaaggcatgccctaaggatcccttccctttaccacgcatagatcaaatagtcgactccacttcagggtgcgaccttttgtcttttatggatgcctactctaggtatcaccagatccgtatggctagggaagatgaggaaaaaaaatgctttcattactcctgtaggcacattttgttatacaactatgccttttcatctcaagaacgcatgtcctacttttcagcgcatgactcgcattactttgagtaatcaaatagggcgcaatgtagaggcgtatgtcgatgacctggtggtaaagacgcgccaccaggagatgttattataggacttggctgagactttcgacagccttaggtcaacgcgcatgaaactgaaccccgaaaagtgtgtgttcggtgtgccgacgggcaaactcctcgccaggggcccccatgactggcgatggaccctcgtctcccgacggctcgttgcccgaagccccccaaaccccgggagggccccgaggcccccgggggaggaagggaggctctggcgggtggccccgacgcctataatcctgacatggcccgagatacccccgaggcccctaagcacgggcaccccggaccggctgctcctaacaacaaggaccggccccaccgaaaggtgcagcggcccgtctacttcgtcagcgaggcactccgaaacgcgaaaacacgatatccacaggcccagaagatgctttacgcagtcttaatggcctcaaggaaactgcgccactacttccaagcgcatcgggtttccgtcgtgatgtcttaccctctcagccaaatcttgcacaaccgagaaggtactggtcgggtcgaaaagtgggccatcgagctcgctgagttcgaccttcacttcgaaccacggcacgcgataaaaagccaggttctggctgatttcatcacggagtggaccccggtggacgaccctgttgcatccaatgccccccccctcctcggagatggaggagacccaaacgccaacattcgcgccgggcactgggttatgcacttcgacggctccctcaaccttcaaggtgcaggggccggagtcacgcttacctcgccaagcggggacgtcctccagtacgtcgttcggctcgatttccgagccacgaacaatatggcggaatacaaaggactcctagcgggattgagggcggcggccggaatgggcatccgccgcctcctggtcctaggcgattcccagctggtcataaatcaagtctccaaggagtaccagtgcaccgacccgcaaatggacgcttacgtccgcgaagtgcgacgtatggaatgccacttcgacgggctcaagctccggcacgtaacccgacgcgacaacgcagtcgctgacgagttgtcacacatcgcatcagcacgagccccactctccccggggaccttcgaggaaaggctcgcacaaccgtcgttgggacccggcgccacggtctctgccccaatccccgacgacccatgggcctcggggcccaagggggtcggtcccgaccctcctagtcaggttgtttggatgactgacatccaggcatatctcgacgataatactcttcctgaggatcgcgcagaagctgaaaagctcgcgcgtatctctaagcggtatgtgctcgtagaagggactctaccgacgcggcgccaacgggatactcttgaagtatatttctcgggagcaatgcgtcgagctcattgccgacgttcatcaggacatcctaggacccttcaaagcggcccgaggcgggtatcagcacctgtacgtcgccatcgacaagttcaccaagtttcccgaggcttacccagttgtcaagatcgacaagcattccgccctcaagttctcaggggcatcacatcccgattcggagtgcccaaccgtatcattacggataacggcacccagttcactagagagctgtttggcgactattgcgacgacatgggcatcaagctgtgcttcgcctcgcccacccaccccaagagcaacggccaagtcaagcgagccaacgccaaaatcctcaaaggcctcaagaccaagacatacaacgtcctaaagaagcacggggattcgtggctcgaggaactgcccgcggtactatgggcgaatcggacaactccgagtcgcgccacgggataaatgccctttttcctagtgtatggtgccgaggcggtcctaccttccgagctttccttgggttcgcatcgtgtcgcgctgtacgatgaggccaaccaggatgatcttcgccgcgacgatctcgactatttggaagagcggagaaggcgtgcagccctgcgagcggcgccctaccagcaaagcctgcggcgctaccatcagcgccatgtccaagcccgatcactgcaagtcgacgacctcgtcctgcaccgcttacagtcgcgcttggggctgagcaagctctcaccgatgtgggaatggccatacaaagtgatcggcgttccccggccgggctccgttcggctaaccacggaggacggcacggagttgcctaacccctggaatatcgaacacctccgccgtttctatccatagagttgcgcgtcttttgctttcctagagctcgggccaacccccgcgcatcctttggcttgtgctggcttggccgggggctaccactgttaaatatgttgtatcttttcccctccccatcaataaatttttccgcttaagcg

SEQ ID NO: 27357 - DNA, 690 bp, Oryza sativa
  Clone ID: PAT_MRT4530_32058C.1
atttgcagaaggaagcattcatttgggcattagcatgtctcatgtgctgtgtacatccaagtggatgtagaggccgggttatttaatctattatcttaaagattagcaatgtctcatttttctttaattatcgtgagtgggatattcctaaaagaacaattccaagcggttagagcgcaatccatctatgcaattggtatccagacaaagctaattaatcagatgtctacagaatctggatttggggactaaacctcgaatccagacatgaaattcgcttaatcggaagaggctgcgacagcggaaccctacatggatcgatctcgccacacgtccggatggattgacaggcatacgtggggttgcgcgtacctgctactctcggagttcgagctgccaccgagcgccggcgttcctgcggagggagcccggtccgccggcgtggggtcgtctctgtctctcggcttggctctatctgggcttgactctatccccgggaagtggatgcccagaacccatacgctcctctttgctaggatcgatcaccggaacagctggagaggcttcttgagacttggcggccggagcagctggaagatcactgcctggaacgggcaccggcgtcgcagacggaggatcaccggatgaataggccaccggaatgggggaggcggcggagctgtcagccat

SEQ ID NO: 27358 - DNA, 339 bp, Oryza sativa
  Clone ID: PAT_MRT4530_32059C.1
gaaataccacatacacccggacccgtcaggaggacacgaagaaccctaacaaaagcgcgaatcgcccaaagtcgctccccccgggaacgagagaaaacggaggacagcccaaaccggagccagtaccgcgctgaacagcagcaagagccacgcgtaccgggctcaacaacggccggtacggccacacaaccagggcacaacaaaaagccaccgagcaaacaaaggaccaccgagaaaacgtggaaaggagaaagggacgctgcacagcccaacacaaaaggacggagcactccaaagcaaatccggcagacggcaaacgcggaaaactgggaagcgtga

SEQ ID NO: 27359 - DNA, 191 bp, Oryza sativa
  Clone ID: PAT_MRT4530_3205C.1
gaagagagcgacaagcaaactaccactgtgaccggtgatgtcattgggtagcacagacacatggttcttggctctccaacaatgcggagcttacgaaaggcccatccaaaaccgtacgcagctgaacattggctaattgtctaatgtgtggtcccccctcacgtacggacatggcagatcagagcttatta

SEQ ID NO: 27360 - DNA, 177 bp, Oryza sativa
  Clone ID: PAT_MRT4530_32060C.1
tcgtccacgcgttcgtccatgtccaacgattcgagaaggagcaggggggatgagcaccgaggtgatccgtaggcgttcggcgcggccgaggaagagttctgcacaagtgaggcagcattgcgcagggccgagatgcgccggggctctgtgctgtcgggctattccagacaccttact

SEQ ID NO: 27361 - DNA, 1458 bp, Oryza sativa
  Clone ID: PAT_MRT4530_32061C.1
atgacgagctcgtcggggcagctcaagaggctgaagccgctgtaccagctggcggtgaacaacatcctcgccgtcgtcgccgtgccgctcgcggcggcggtggtgttgaaggcggcggagctcgggcacgaggagatcctcgccagggcgcgcgcgctcccgccggcgcacctgttcttggccgcgttcgtcccggccgcggcggcggttgtctacctcatgctccgcccccgcgcggtgtacatggtggactacgcgtgcttccgcaccagccccaactgccgcgtcccgttcgcgacgttcctggagcactcccgcgtgtggccgggcttcgaagagcggagcgtccggttcatgacgcgcctgctcgagcgatcgggcctcggcgaggagacctgcctgccctacgcgcagcactacatcccgccgtcgcgcgacctcgagtcatcccgcgccgaggccgagctcatcatcttctccgccatcgacgacctgctcgccaagaccggcatctccccccaggacatcgacatcctcgtcgtcaactgcagcctcttcgccccgacgccgtccttcaccgacatgatcatcaaccggtacaagctccgcaaggacgtgcgcaacgtgcacctctccgggatgggctgcagcgcggggctcatctcggtgggtctcgccaggaacctgctccaggtcgcgcccaagggcgcgcacgcgctggtggtgtccacggagaccatcacgccaaactactacatgggccaggagcgtgccatgctgctgcccaactgcctgttccgcatgggcggcgccgccgtgctcctctccaccaacggtgccaaggcgcggttccggctggcgcgcgtggtgcggactctgaccggcgcccaggacggtgcgtaccactgcgtgtaccaggaggaggacggccgcggcaacgttgggatcaacctctccaaggacctgatgagcatcgccggcgacgcgctcaaggccaacatcacgaccatgggcccgctggtgctcccggcgtcggagcagctcctcttcgcgctctccttcatggcgcgcaaggtgctgagcgggcggatcaagccctacatccccgacttccgcacggcgttcgagcacttctgcatccacgccggcggccgcgccgtgatcgacgagctgcagcgcagcctcaccctgtcggacgagcaggtggaggcgtcccgcatgacgctccaccggttcggcaacacgtcgagcagctcgctctggtacgagctcgcctacgtcgaggccaagggccgcatgcgcaagggcgaccgcgtgtggatgatcggcttcggctccggcttcaagtgcaacagcgccgcgtgggagtgcatccgccccgccgccaacgccgacgggccatgggccacctgcatccaccgctaccccgtcgacatccccgacgtgctcaagcactaa

SEQ ID NO: 27362 - DNA, 1044 bp, Oryza sativa
  Clone ID: PAT_MRT4530_32062C.1
atgaaggtgatgacactgcggcgcggcggcgccggcgccgggatacgcatcaagaagaaggcccgcggcttcatgtgcggcggctgcggcggctccaaggccgtctccgtctccgacggctccgacaagcagtcgcccatggccacgccgccgccgaacacgtcgagcactaccactaccacgaccacggggagcgccgggaacaagacgacggcggcggcggggtcgtcctcgttctctccctcctacgactacgactacgtcgacaccgacgccgacacgagcgtggggagcacgccgagcgtggccgcgctcctgcggcagctcggcgagctggagcggagcgtccggtcactgcaaggcgcggtggcagaaggccgcggcgccaagaacgacggccgcggcggcgggaggcggcacaggcggacggtgagcgacggaggcggcggcgggtcggggagggtggaggagagcgtggcggtggtgaaggagtcggccgacccgctcttcgacttccggcgatccatgctgcagatgatcgtggagaaggagatcgtgggcggcgccgagctccgggagctcctccaccgcttcctgcccctcaactcgccgcaccaccaccacgtcatcctccgcgccttcgccgagatctgggaggaggtcttcgccggctacgagcgcacgccggacttcctcgtctcctcccgccaccgcaggccgacgaagaagaagctcccggcctcctacaccgccgccgacgatgatgacgacgactcgtggaacgccgcctaattaacaaacgctcaagtttttcgtcatcgtagccgttgagaaaattcagcaccggttccgttagcttctcgatgcatttctttcgtcgatttcagttcgtattttcgtaggcgtgtgtacagaacagctgagtggtttttgcaaactccaaaagccttcgtttcgaaaaagatgtgtttttccggatttttatttctgatagaaaaatcagatagctttgattgtagcaacaaaaaaaaaaaaaaaaaaaaa

SEQ ID NO: 27363 - DNA, 714 bp, Oryza sativa
  Clone ID: PAT_MRT4530_32063C.1
atggcgtcacgtggcgcctacatgccggcggcaggcggcgagaacgagcggcgacgacaggatgggcgagggcaggaacggcgagccgtgcagccgcccccgccgctgccatactcctccttccgaggcgtcgcagccgccgccaccctgacacctctccccgccgtcgcagctttcccatgctccatcaagaagatttgtcaactccacctaagatacgagtgccggcggctggggcagcacgtggagctcgtcggcggcctgctgcgggagctcgagctcgccgagctgatgcggcgggaggccaccaggcggcccctcgagcggctccaaggcgcgctgcggccgtgctgccggcgctcgcggcgcccatccactgacgacgcgtgctcgttctcgctgcccgccgcccgccgttggggaagaaggggagagaaagggagagaagggagagagggaggaggaagaaggaagaggaccccacatgttttgccgggctttacaaccaacggttcgacgtcggggatagtaaaccgcgagcgtccccatggaaagcgtaaagttccaactggtggctttttagtggctaaaggagagagccgagagaagagagaggagaaggggagcggggtggcggcgctccggtggctggagggcggcgacgtcggaggccacgcgtgttcccgagcgtcgcgtatccggggaaggcagtag

SEQ ID NO: 27364 - DNA, 465 bp, Oryza sativa
  Clone ID: PAT_MRT4530_32064C.1
ttttataggggcggggaggtcgggaacgacccgagcgcgtccgatttcgccggcgacgtgaggaaggagagagggaaggtgggggaggattcagaatcgaatcccgcccctctcgtgcgcgggcgcggctgggagacgcggggagagggggcggcgacgtggcgtgggcgcgggcgacgcggcgtgagcgcggggaaagcgggaaaggtggggcgcggcggcagcggttttggggggggtggtgaccggcgcgggcggcgggaggttgggggaggacccgacaggtgggccccacctgtcggcgaccccgggagaggagggaggcggggcggcctggctcagggaggagggggagaaaaaggagagaatgggccggcggcccattcggaaagggaagggaaaaagaaaaagaaaaaggagaaagggattttccctggaattagaatattgcttgctcaattttaa

SEQ ID NO: 27365 - DNA, 3073 bp, Oryza sativa
  Clone ID: PAT_MRT4530_32065C.1
aaagctgaaagctagctgagactgagtgccagtatcaagcagaaggaagctaatttaagagaagatcagagtgaaccatcgtcatcaatggcgccggccgctcatcgggatggcgcggcggaggcggtggggcagagggtgttccacttcggcaagggccggagcgacggcaacaagaccatgaaagacctgctgggagggaagggggcgaacttggcggagatggcgagcatcgggctgtcggtgccgccggggttcacggtgtcgacggaggcgtgccagcagtaccaggcgcagaaggcgatgccggcggggctgtgggacgagatcctggcggcgctcacctgggtggagggcaacatgggcgccgtcctcggcgacccgcgccgcccgctcctcctctccgtccgctccggcgccgccgtctccatgcccggcatgatggacaccgtcctcaacctcggcctcaacgaccacgtcgtcgccggcctcgcccaccgcagcggcgagcgcttcgcctacgactcctaccgccgcttcctcgacatgttcggcaacgtcgttatggacataccgcattcactatttgaggagaaaattgaagccatgaaagcagctttaggtttgaggaatgacaccgagttgactgccagggatttgaaagaacttgttgctcaatataagaatgtttatgtggaggccaaaggtgaagaatttccctcagatccaaagaagcagctgcatttatctgtgttggctgttttcaactcatgggacagcgcaagggcaaagaagtacagaagcattaaccagatcactgggttaaagggtactgctgtgaatgttcagtgcatggtctttggcaacatgggtgacacttcaggcactggtgttctctttactaggaaccctagtactggagagagaaaactttatggtgaattccttgtcaatgctcagggtgaggatgtggttgctggaatcagaactccacaagatcttgataccatgaaggattgcatgccagagccttatgcagaactagttgagaattgcaaaatcttggaaagccactacaaagaaatgatggatattgagttcactgttcaagaaaatagactttggatgctgcaatgcagaacagggaagcgcacaggcaaaggtgctgtgaagattgctgtagacatggtcaatgagggactgattgaccggcgttcagcaattaagatggtggaaccacggcacttggaccagcttcttcatccccagtttgagagcccgtcgtcatatggagacaaagttattgctacaggcttgcctgcatcaccaggagctgctgtaggccagattgtcttcacagctgacgatgctgaagcatggcatgcacaaggaaaatctgtcattctggtgaggactgaaacaagcccagaggatgttggtggcatgaatgcggctgctggaattcttacagccagaggtggtatgacatctcatgcagcagtcgtagcccgtggatggggaaaatgttgtgtggcaggatgctcgggtatccgtgtaaatgatgctgagaaggtggtactggttgccgacaaggtgctttgtgagggtgaatggttgtcactgaatggttcgactggagaggtcattttgggcaagctgcctctatccccaccagcacttagtggtgatttgggagaattcatgtcttgggtggatgaagttaagaaactcaaggtcaaggctaatgctgatactcctgcggatgcactgactgcaagaaataacggtgcggaagggattgggttgtgcagaacagaacacatgttcttctcttctgatgaaaggataaaggccatgagacagatgataatggcggaaacaattgaacacaggcagatagcactagatcgcctcttgccatatcagagacttgactttgaaggaattttccgtgcaatggatggacttcctgtgactattcgactcttggatcctccactccacgaattccttccagagggtaacgttgaggatatggttcgtttgttgtcttctggaaacgtatatactcaggaggaaattcttacaagaatagaaaaactttctgaagtgaatccaatgcttggcttccgtgggtgcaggcttgggatatcatacccagaattgacagcaatgcaagcccgtgctatctttgaagctgctatttctatgactgaacaaggtgttaaagttttcccagagataatggtgcctctcattggaacacctcaggaactcgcccaacaagtagatgtaattcgtgaagttgccgaaaaggtttttgcaaatgcagaaacaaccattagctacaaaattggatccatgattgaggttcccagggctgctcttatagctgatgagatagcagcactagccgaattcttctcgtttgggacgaacgacctgactcagatgacatttggttatagcagggacgatgttggcaagtttctgccaacctacttgtcaaagggtatcctccagaatgaccccttcgaggtgtttgaccagaagggagtgggggagcttgttaaggttgccgtagagcggggccggaaggcaaggcctgatttagaggtgggcatttgtggggaacatggtggtgagccttcttcagttgcatttttcgcgaaggttgggctgaactacgtttcttgctccccattcagggttccaattgcaaggctagcagcagcgcaggtgatgctgtgatcggcgagtactaatgaagcaaaccgttggtgcatcttgtaaatatacgaagagtaaataatgcttaaataatttatgttacgatggacactcgcaacatgctttgcttgacgaaatgtatgatgacctgcaaatggaggtttgcatgtgtataaataatattttttgtttgtgtgcccacggtaattgctgccataaacatcaaacagctatcagaggttgcatgttaaggcacctgaaataattgtaatttatttcgagaattactcaaatgaaatgtcatgtttttttgtacctaaaaaaaaaagaaaaaaaaaaaaaa

SEQ ID NO: 27366 - DNA, 489 bp, Oryza sativa
  Clone ID: PAT_MRT4530_32066C.1
atggcaagcctcggcagatcagccggatctagcctcgcaggcggtggatctgggcgccacctgccactcccctcacctgccctatggcaagcctcgacagatcagccggatccagcctcgcaggcggtggatctgggcgccacctgccactcccctcacctggatggtcagcatgacgcaccggcccctaggcagccggtccgatgcactagcctaggcgtagtcgacacaaacgcctggtcgatggagggagaaggcccttgcgacgccatccaagttgttcgccggacgctcggtcaacagcctccagatctgaagtggagaggagctagagagagaatagaaggggatagaggtggagagtggaaggaggtggggagtggagggggacactgccagtggtggcagagagcatcgtggctggcgatggtgaggtggttggctgtggtttctcgggggttccggcttatggcctcctatcccacctga

SEQ ID NO: 27367 - DNA, 435 bp, Oryza sativa
  Clone ID: PAT_MRT4530_32067C.1
atgaacatagaaccaggcaaggtgcaaaactcctgccacaacaattctcaaaagggtccaaatctcatcagcggcgacctggcgacggaaggacctcgtgtggcggggatcggtggagcaaaatggccgcggcgacctggcgacgggaggacctcgtgcggcggggaggcggaggacaagcgatggggatcatggagggcgagccggcggcggggatcggtggcagatcggcgatgcagagggagagttgccggggggaagggcgtccggtggcgcggtgatttgccggagggagggcgcggtgatctggtccggcgacacgatgcgaaggaggcgcggcgagacggcgaggtcgagagagtcgcgcgtcgcccggatgcggaggaggcgcagtgcgggagaggatgcggagggaggggtgggcacgcgcgctaa

SEQ ID NO: 27368 - DNA, 115 bp, Oryza sativa
  Clone ID: PAT_MRT4530_32068C.1
atggtcaccgccacgctgtgcgctcgccgctgccagcttcgccgtcgtacgagctaccccgtccaccgctcggtttccgcaaatcaccgccgtagctccaactcctcgcatgccg

SEQ ID NO: 27369 - DNA, 451 bp, Oryza sativa
  unsure (1)..(451): unsure at all n locations
  Clone ID: PAT_MRT4530_32069C.1
ttcttattgagtagaccctatgcatttggttgtgttctaaggttgagaacatcttcagattttgaacctggcaattcttatggccatttcttccctgatcctcaatatgaacatgtgcaacatatcatctgctgcgattcatttgctacttatgcatatgactttaacttttcacaccctgagggcttttccaggcacacagatcctgctgttgtacaaattgcatttcagtatagtgttattgaacctgtcaagcatacatcagagaatgaaacacaatcatctacaagtaacatgttttgtctaaagaggcggttgagaataaggacattgcagtatcgaccagctaaaaatatcaacgaaatatatgacagtgttgatccagagactctnctacatattctagtacataaggttattttaatttcattggataaggagttaaagaggg

SEQ ID NO: 27370 - DNA, 1554 bp, Oryza sativa
  Clone ID: PAT_MRT4530_3206C.1
atggattggctgactaagttcaagggtgtcattgattgtgcgaatcgcacggtcaccttgaccaatgagaaagaggaaacagtggtgtacaagtcaccagtcgcactgaagcagggaatctccttaaatcagattgaggtggagaattcggtggtcaccgaggagaagagttggaggaaattggaagatatccccatagtctgcgagtatccagaggtgttccctgaggacctcactactatgccacccaagagagagattgaattccggattgatttggcaccaggaaccgccccaatttacaagaggccgtacagaatggcagccaacgagctagcagagctgaaaggaaccaaggtgtttttcaaaatagacctgcgatcaggctaccaccagttaaggattcgggaagaggatattcccaagacagccttcaccactcggtatgggttgtatgagtgcacggttatgtcttttggactcaccaatgcacctgcattcttcatgaacctgatgaacaaagtgttcatggaatttctggataagtttgttgtggtatttattgatgaaattctaatctattccaagtcggaagaagagcatcagcaacatcttcgtctggtactcgagaagttgcaggagcaccagctttatgccaagttcagcaaatgcgacttttggttatcagaggtcaaattcttgggtcacgtcattacagctcagggcgtggcagtcgatccatcgaatgtggagtcagttaccaagtggagcccacctaagacagtgtcacagattcggagtttccttggacttgcgggttattatcgtcggttcattgaaaatttctctaggattgccagacttatgactcagttgcttaagaaagatgagaaattcaagtggacagccgaatgtgacaagagttttggggagctcaagaagaaattagtgtctgctccaattctgattctgcctgacccgacgaaagacttccaagtctactgcgacgcgtcccgtcacgggcttggatgtgttctaatacaagagggcagagtggtcacctacgcctcgcggcagttgcgtccacatgaaggaaactatccaacacatgacctggaattggcagcggtggttcacgccttgaaaatctggaggcattacctgattggcaaccgctgtgaagtatatacggatcacaagagtttgaaatatatcttcacccaacctgacatgaatctccgacagcgaagatggttggagttaatcaaagattatgacatgagtattcactaccatccaagcaaagccaatgtggtggcagatgcattgagcaggaagagctactgcaatgctttgtgcaccgaaggcatgtgtaaggaattgcagcaggagcttgaacatctcaacttgggaatcgtagaacacgggtttgtggctgctctagaggcacggcctacgctcgtggatcaagtcagagcaactcaagtaaatgatcctgagatagctgaactgaaaaaagaatatgagggtcggaaaagcccgggatttccttga

SEQ ID NO: 27371 - DNA, 534 bp, Oryza sativa
  Clone ID: PAT_MRT4530_32070C.1
atgggtgctgagatcgctgcggttcccaacatcagtgaaggccttgccgagatctcaaagaagatgatggacttggcggcgcaactccgggccttggcggctcagttagccgatccaacggctttccttgaggaggccgaaccattataccggcatgcggtgaccttgcgtccgcgagggcgtgtcttcaagcagcacggatgggggcaacattcagtggtgacgctgcaaccacgcggggacggcgtgactcgtggcgaggcgctcatgtttcctcttccggcggtgccaagtccgggagtggcagtgcatcttcgacctcgccgctgggactggcgatggcgccgttgccattggcgccctcaacggtggcggagaagacgatggcgatttccacttcgacagcgatacaactcggtacaggcatctgattttcaggcgctattttccagcgatgcggctttgtttccacaggtggaggcgcacataccggtgatggttggatcagagcttggcggcgtgcgtgtggtgtaa

SEQ ID NO: 27372 - DNA, 1189 bp, Oryza sativa
  Clone ID: PAT_MRT4530_32071C.1
ttttgaccatctcactagctaatcgctggtactggaagctgtagtagcagctggccaaaaatggcgccatttcttgttgtgttcgccgtcatggccgcggcttttgcgtcggcctccggctccggcgagctcaccccggacttctacagcgagacgtgcccgcaggcgctgacgaccatcaagctcgtcgtcggcgccgccatcttgaaggagccgaggatgggcgcgtccttggtccggatgcacttccatgactgcttcgtcaatggttgtgatggctccgttctgctggacgacaccgacgacatgatcggggagaagctggcgaagccgaacaacatgtcattgagagggttcgacgtgatcgacgccatcaaggtggcggtgaacacggcctgcttggggaatgttgtctcctgcgctgatatcttggcagttgctgctcgtgattcaatcgtcgcgctcgggggaagctcgtacgaggtgctcctggggcggcgcgacgcgacgacggcgagcatcgacgacgcgaacgacgacatcccgaacccgttcatggacctcccggacctcgtcgacaacttcgagtcccacggcttgtcgctgcaggacctcgtcgtgctctccggcggccacacgctgggctactcccgctgcctcttcttccgcagccgcctctacaacgagaccgacacgctggacccggcctacgccgcggcgctcgaggagcagtgccccatcgtcggcgacgacgaggcgctcgcctcgctggacgacacgccgaccaccgtggacaccgactactaccagggcctcacgcagggccgcgcgctgctgcacacggaccagcagctgtaccagggcggcggcggcggcgacagcgacgagctggtcaagtactacggcgagaacccggacaagttctgggaggacttcggcgccgccatggtgaagatgggcaacatcagcccgctcaccggcgacgacggcgagatcagggagaactgccgggttgttaaccagtgagtgatcgatcgatcctggtgtggtcaagcgacacacgacacgagtcatcgccacgaatttgcatggcacctgtggtagctggtggattcttgaagggtgtgcttgcatgtacttctgattttgtgatggcctgctcctgtatttgaattgtttgaaaaatatt

SEQ ID NO: 27373 - DNA, 430 bp, Oryza sativa
  Clone ID: PAT_MRT4530_32072C.1
cccacgcgtacgctcaagggctggggatgacaaacattgaacgatggcaacgcgcaaaagggcttatttggcccctgcaaggtcaaccttgaagatacctcttggacataccgtggatgatcctggactcacaaaaatacctctcactgcgctttgtgtagagactcaatgggctgacatgttctgggtgaaggacagagatccagaccgactatcctcattggcatataacaagctctcacgcagctatttgaattcactcctgcaactcttatagaacacgataccaaaagggcattaactcggtaccctgtctctcatctgagcaatacctgagcatatgaagtcactaaatggtgttgctgagaaaataagctgtatgtggaaaaactgctcatctggtctaaaatcatgcaacagcatcacagat

SEQ ID NO: 27374 - DNA, 261 bp, Oryza sativa
  Clone ID: PAT_MRT4530_32073C.1
ctacgtctctgcggctgaggcggcggagcgggagccgtgcggcggcggcgcgcctaggagggaggagaaggagcggtggcgccaggtgctggtcgtcggctgcctggtggcgctgctcctcttcgcgttcttggtgctcgggcgggagagcgcgtcggaggttctgcagatagcgaactccaagctgtccgccatgaacggagggtttacgacgaaaaacccttctcatggcggtggcgccgccaagcatgccgacgagct

SEQ ID NO: 27375 - DNA, 4720 bp, Oryza sativa
  Clone ID: PAT_MRT4530_32074C.1
gcgagtaaccgttccaaatcgctctcaaccgcgccatggccggctagactgcatgctaatctacacatttatattgtacaaccccgccggtggggaggaagagagagcgagagagcgaatcatcatggctagtcatgtcttcatgatccggcaagagacggcgccggcgcagtggtggttcctctcgctggctttcgtcggcgccgcctacgccgccaccgtcacgctccgtttcgtcgcctacctcgcgctctgccggtgtcaccggccgaaggacgacctccgccgccggtacggcgaatgggccgtcgtcaccgggccaacgtccggcatcggccgtgccatggcgctggagctcgcgcgccacggcctcaacctcgtgctcgtcggccgtgacccagccatcctccgggagatctccggcacggtcaggtctctccacaaagtgaagaccaagaccgtggtgtttgacctgtccctcgtctggacccccgatggtgatgagccgctgcggcggctgcgggaggcggtggaggggctggacgtcggggtggtggtgaacaacgccggcgtggcgaagcccggcgccgtctacctgcacgaggcggacgtggaggcgtgggtgaggatggtgcgggtgaacatgtcggcagtgacggaggtgacggcggtggtgctacctgggatggtgtcgcggggtaggggcgccatcgtcaacatcggctcggctgggtcggagtacatcccgaccttacctctctacaccatgtacgccgccaccaaacggtacgtggctcagttctcccggagccttcacgtcgagtatgcaagtaaagggatccatgtgcagtgccaggcgccgttcttcgtggatacgaggctgatgttcaggttcgaggaggcggcgggcggcgtatcgctgttcacggtgacccctgacgcctacacagctcgtgataaccgtacggatatcgctgttatcgcggcgattatcatggttatcgtcctaccgcggggtggtggtaaccctggtccaaacgataaggtattctgcttcttccaccccaaacttcccgatcccttcttccgctgcctctccatggatcatcagctccgtcccaacaacgaggccgctgcagccgcgggcgctgccgccggtgcccctgctggtggtgccatcgtcattcccgctgcgggtgccgctgccggtgctgccgccggtggtgccgtcgtcgttccccacggacctgcagcagcagcactcaccatcgctagtgtcaggacgcatgtgcctgtaaccctagagatgaaaaaccacaactacaccaagtggcgtaccttcttcgtggcattcctcggcaagttcgctcttctcctacacatcgtcggcccgatcccccccattcacgatgccgcctgggcccaagacgacttcgccgtcctcaccgccctctactactccatcgccgacgacgtcctggacatcatcatggagcccgagcagagcgctcacgctctgtggcttgctgcggaggaccttttccgagacaacaaggagactcgcatcatctacctcgagaccgaatttcgcagtctcaatcaaggcgacatgacggtgacggagtactgccgtcgcctcaagactctcgccgactccctccgcgacctcggcgagcccgtcaccgaccgcgcactcgtcctcaacctcatccgtggtctcagtccccgcttctccacccaggcggacctccttcccctgcagacgtcgttccccaccttcgcccgtgcccgctcggcgctgctgctggcagaaatgcgccacaccgctgacagcatcaccaccaacaccactgccctcgtcgccacctccgactcctcgtccggcggccgttctttctccaacaatgggggtggaggaggaaaagggcgcgggaacggcaaggggaagcgaaccggtggcggtggcggtgggagcggaggaagcagtggtggcaacggcggatccggaggccgcaactccaacggcagtggcggtgttcctgcctcgtctggcaaccgcgcagggggtggcggcggtgggggcgaccagaccgggtctggtaaccctcgcccacccactggaccgtgggttgtttacccacagtgggccgccgcttcgtggcccaccgcaccaccgcagccctgggaccttataacagtggctgggttgttgactccggtgcttcctcccacatggcctcctctgatgtgttttcagaccgacaacggccgtgagtttctcaactccgccattttgtccttcttcgacagccatggcatcattctccgcaccacctgtccctacacctcccaacagaatggtaaggctgaacgttctatccgttctaccaatgacatcattcgctgtcttctgtttcaggcccatatgcccggctcctattgggccgaggctctctccgctgcaacctaccttctcaatcgtcgtccatgtcaacccattcagttcgccacaccctttgagcgcctgttcggtatttcaccctccctagaccatcttagagtcttttgttgcttgtgttaccctaacttatccgccacagcaccacacaaacttgcccctcgctccacatcttgtgtttttctcgggtatcctcattcccaaaaggggtaccggtgtctcgacctcaccacaaaaagggttcttgtttcacgacatgtttatttcgatgaaacgatttttcctttctctactgctgcagcaccatcgaagtcttcttcactagacatggacttgtccttccaggatgatgcacctggacaaggtgttgggccagctgcagcccacggacagggtgcccctgctggagggccaccctccccacgcccgggtcctggtgcacgtgctcctgaccacgggccggcctcgccaccatcgactccacggcctgcttcaccatccgctgggctggcctcgccaccgactccacggcccgctgggccgacgctgcctggctcgcctccagatgggccattctcgtccactgggccggttggtgcgacctctccatcagctgggcggatcgctgccgccagtccaccaccagcgggcgatgacgcgccatcgtcgtccgcatctacgtgccatcctccaggggcgccgtccgagagcggcgctctcccacggcctgctcctggccctcatccgatggtgactcgtgcgaagacgccgctccgctcccgaagacgtaccgcaccgccttgcaagctccatgcaatgcgtgacgaatatgaggcgctggttcacaacaacacatggaccctggttcctcgtctccctggggtcaatatcgtcaccggtaaatgggtcttcaaacacaaatttcatgcagatggctccctcgctcagcacaaggcgcgttgggtggttcgcgggtactcgcagcagcccggcatcgactatgatgagacttttagtcctgtcgtcaagctggctacaatccgagtcgtcctcagcctcgccatctcccgcgggtggcccattcaccaactcgacgtgaagaatgccttcctccatggcaatttggaggagacggtctactgtcaacaaccgtctggcttcatcgaccccgtccaccccgactacgtctgccacctccacaagtcattgtacggcctcaagcaggcccctcgtgcgtggtatcaacgcttcgccagctacattcgcacacttggcttcactccatcggcctcggacacatccctattcatctacatgaacggggctgacatggcgtatctcctcctctacgtcgacgacatcatcctcactgcctcctcgacacggctacttcaccacctcactggtcgtctccatgacgagttcgccatgatggatcttggggatctctaccacttcctcggcatctccgtccagcgcacccccaacggccttcatctgtctcagcgacagtacgccgtcgaccttctccagcgggctggcatggccgagtgccatcccacggccaccccgtacctcactctcacccggcccgacctcgcctacgccgtccagcaagtgtgcctacacatgcactctccgcgtgacgctcacttggccttggtcaagcgcatcttgcgctatgtcaaggggtcactggatcaagggctctttctccatgctaccacggcatcgacgctcacagcctacagcgacgccgattgggctggttgccctgactcgcgccgctcaacatcaggttattgtgtcttcctcggtgataatcttgtctcttggtcctccaagcggcaagccatggtctcctgctccagtgccgaagcggagtatcgtgctgtcgctcatgctgtcgctgagtgttgttggcttcgcaagcttttggatgaactctgcacccctctccgctctgcgacagtggtcttctgcgacaacgtcagtgccgtctatctctccgccaaccctgttcaacataaacgtacgaagcacattgagatcgacatccactttgttcgtgagaaagttgctcttggccttgttcgtgtccttcatatgccgtcgtctcatcagttcgccgacatcatgacaaagggactaccagttcagctttttcaggattttcggtccagtctctgcgtacgggaacctcacgtctcgactgcggggggtgtcaaagatagcatagtatcttctatatttggtgattga

SEQ ID NO: 27376 - DNA, 870 bp, Oryza sativa
  Clone ID: PAT_MRT4530_32075C.1
gcgcggctcccctcccctcccctcccagatccggccagagggaggccgggggagggcggcggcggtgaggcgaggcgcggggcgacgacgacgacacgcggggcggcggcggcggcggtgcggctcccctcccctcccagattcggccgaagggaggccggggcagggcggcggcagcggcggcgaggcgaggcgcagggtctctctgcggcggaagcagttagcatggcgggggtgatggccatccgggcgagctccacctctgctgccggccacccgggcgagctccgcctcagccaccggtcgcctgagcgcacgcgagagatagagcaagggctggggagggattgggttgagggggatgcggcggcggcagatggcgtcgccgacgccggcgccggcgccggcatgacgcacctccacttcttcttccacgaggtgttcacggccggcccgaacggcacgacggcgacggttgctccgccggcgcgcagcggcgacgggagctccttggggttcgtcggcgtggtggacgacatgctccgggagggcgcggacccggcgtcgcgcctcgtggggcgcgcgcagggggtcaccgccggcacgtcgctcgccgccgccgacggcgcgggcgcgatcacgacgatgctgagcctggcgttcacggaggagggcccgtacgccgggagcacgctgcaggtgttcggccgcgcggtgctgggcacggtgatggagcggccggtggtgggcggcacgggcaagttccggatggcgcggggtcacacgctcagccggcgcgtgaactcgtcggaccccgacaacctcctcgtcatcgagtacgacgcctacgtcaccacgtctcccatttag

SEQ ID NO: 27377 - DNA, 705 bp, Oryza sativa
  unsure (1)..(705): unsure at all n locations
  Clone ID: PAT_MRT4530_32076C.1
aaccgttgcagancccgncaccgtctacctncacgaggcnnacntggagtcgtggattaannatgttncgggtaaacatntcggcantgacgnaggtgacggcggtggtgctacctgggatggttntcgcggggtaaggggcgccatcgtcaacatcggctcggctgggtcggagtacatcccgaccttacctctctacaccatgtacgccgccaccaaacggtacgtggctcagttctcccggagccttcacgtcgagtatgcaagtaaagggatccatgtgcagtgccagattatgatgaaatctggaaagcataagggaatcaaatngctaggagtatgtatgatgctatgtatgtgcatgcgcgcaggcgccgttcttcgtggatacgaggctgatgttcaggttcgaggaggcggcgggcggcgtatcgctgttcacggtgacccctgaccgtacgcgcgcgcggcggtggcgtggatcggccgcggcggcgcgctgtgcacgccggccgtccggcaccagctgctacggcgcatggccgccgccgcgccgactccgtccacgactggatcctcctgcgcttagccacctggaacagaaaacgttgtttcagcggatctgagtgacagatgacagattatgtgatgctaaagaattgccaacaaataaataatgtgtcttcgaaaaaaaaaaaaaaaaaa

SEQ ID NO: 27378 - DNA, 360 bp, Oryza sativa
  Clone ID: PAT_MRT4530_32077C.1
atgcgtcctgacactagcgatggtgagtgctgctgctgcaggtccgtggggaacgacgacggcaccaccggcggcagcaccggcagcggcacccgcagcgggaatgacgatggcaccaccagcaggggcaccggcggcagcgcccgcggctgcagcggcctcgttgttgggacggagctgatgatccatggagaggcagcggaagaagggatcgggaagtttgggctgtcagtcgaggagtcggagagagtagcgcggtggcacggcgtgacggcgaccctgcgcggtggccgctcctccccaacacgcgccaggccgatcttcctccccaacacgcgccaaccactcctcctcggctag

SEQ ID NO: 27379 - DNA, 344 bp, Oryza sativa
  Clone ID: PAT_MRT4530_32078C.1
cccacgcgtccgcacgatcattacgaggatgagcgcaaggtaggccgaggggaatacagtggagtcttcaaaggaattaatgtgacaaatgatgagccctgcgtcattcacattctcaagcctgttcagaaaccggagatgaagagggagataaagattcttcagaacctctgtggtggcccaaatattggcacacttcacaatattgtcagcgatcaacactcaaaacctccaagtttgacatctggatatgtaaacagctctgatttcagcgctctgtatccagcattgactgactctgagactcgcttctacattcatgaactccttaaggcactggatta

SEQ ID NO: 27380 - DNA, 410 bp, Oryza sativa
  Clone ID: PAT_MRT4530_32079C.1
gcgatccaacagatttagacctcttaatcagatagctcgggattagctgcgcttgtgatcgactgatctggggtacgtagcaatggcgttcaacgtgttccgtctgttcatggccgcgaacctcgtcatgctctgtgtggaaacgcgcctgcagtgctagcccgtgtagcacgacgccgacgccgccaactccaacaccgtcaacgccgacgacgaccccgtcggcgttcgtgaggtgcacgacttacgcgctgaagctgggcactcgcgaacaagatccttcgagactacaaggtgatcgacctgatcaaggacgccctatagtctcggagcacaggcgtcatattctagccctacttattctcagtatgcgaacactaggcagttatcatagcaatgggcccacacta

SEQ ID NO: 27381 - DNA, 3177 bp, Oryza sativa
  Clone ID: PAT_MRT4530_3207C.1
atgcgcattcagcttgcgcctaggaacccacctcctcccgcagctcctccagtacctccagcagttcttgcagtgcccgcagctccagctccagccccagctccagtcccagtgtcagctcctgcgtctgctctctcctttgctccagcgtcagccgctaggggtccagccagtggcaacggaggttggttgcctgctactcccagtggcagccgcgaccacagcagcagcagttctagtggcacagagccgggcaccggcgagacgtttgttcgcttgtggatggtcaacaccaggaatggcagccgtgcagcaggtgagggcagcaacggcgaagaacgcaccgacggtgggcatcccaacagcgactccgtcaatggtccgccaccgctccccgagaatccgactctggcccaagagaaagtcgccttcgccacacatcagctccagggtcccgcgtcagcttggtgggacaaccacatggctacccgtccgccagcgcggtatgcaccagagaatgttcgcactgacgcagagaagcaggagaagttcctagcaggcctggatgacgaactgaccatccagttgatctccagggattacgcagacttcgagaagctggtagacaacgcaatccgtcaggaggatcaatgtaacaaaatggacaggaagagaaaggtagctcagttccggtccaaccaaggaagccatcagcgaccgcgcttcacacccggacagcagggtggacctaccaccatgattgtccgccagcatcgcccgttaaactcaagcagtttccaccagggcgcaagtggcagccagagccaccagggagccaacctcatccttcttgaatccaaagacctagatgtcattcttgggatggattggctgaccaagttcaagggagtcattgattgtgcgaattgcatagtcaccttgaccaatgagaagggagaaaccgtggtgtacaagtcaccagtctcaccgaagcagggaatctccttaaatcagattgaggtggaaaaccctgtggccaccgaggagaagagttcgaggaaattggaagatatccccatagtctgcgagtatccagaggtgttccccgaagacctcactaccatgccacccaagagagagattgaattccggattgatttggcaccggggactgctccaatttacaagagaccgtacaggatggcagccaaagagctagcagaggtcaagaagcaggttgatgagcaactgcagaaagggtacattcgaccaagtacttcaccttggggtgctccggtcatttttgtggagaagaaggacaagacgaagagaatgtgtgttgattatcgcgcgctcaatgaggtcacaatcaagaacaaataccctttaccgtggattgatgatctgtttgatcagctgaaaggagctaaagtgttttctaagatagacctgcgatcaggctatcaccagttgagaattcgggaagaggatatttccaagacagccttcaccactcggtatgggttgtatgagtgcactgtcatgtcttttggacttaccaatgcacctgcattcttcatgaacctgatgaacaaggtgttcatggaatttctggataagtttgttgtgtctgaagaagaacatgagcaacatcttcgtctggtactcgagaagttgaaggagcaccagttatatgccaagttcagtaaatgcgacttttggttatcggaggtcaaattcttgggtcacgtcattacagctcagggcgtggcagtcgatccgtcgaatgtggagtcagttaccaagtggaccccgcctaaggcaatgtcacagattcggagtttccttggacttgcgggttattaccgtcggttcattgaaaatttctctaggattgccagacctatgactcagttgcttaagaaagaagaaaagttcaagtggacggccgagtgtgacaagagttttgaggagctcaagaagaaattagtgtctgctccagttctgattctgcctgatcagatgaaggacttccaagtcaattgcgacgcgtcccgtcacaggcttggatgtgttctaatgcaagagggcagagtggtcgcttatgcctcgaggcagttgcgcccacatgaaggaaactatccaacacatgacttggaattggtagcggtggttcatgctttgaaaatctggaggcattatctgattggcaaccgctgcgaagtatatacggatcacaagagtttgaaatatatcttcacccaacctgatctaaatctccgacagcgaaggttgctcatttcataccagtgcacactacttatacaggcaaaaggaagaattggggacccgtttgaatttcagtacagcttaccatccgcagacagatggccaaaccgagagggtcaatcagatcttggaagacatgttgcgagcgtgtgcgctcgatttggtggggcatgggataaaagtctgccttatgctgaattctcgtacaacaacagctatcaggccagtctacaaatggcaccgttcgaagcgttgtatggccggaagtgccgcacgcctctcttctgggatcaaacaggcgaacatcaaatgttcggaacggaagtgctaacggaagcagaagagaaagtcagaaccgtcagagagagactgagaattgcccagtctcgacagaaaagctacgcggacaaccgccgaagggagctcacttttgaagcaggggattatgtgtacctccgtgttactctgctccggggagtgcatcgtttccagacgaaaggcaagttggcaccacgcttcgtgggaccgtacaaaatcttggaacgaagaggagaagttgcctatcagctagaacttccatccaacatgatcggcattcatgacgtgttccatgtgtcccagttaaagaagtgcttgagggtacccgaagaacaagccgattcggagcacattgacatccaagaagatctgacttatgtggaaaagccagttcgtatccttgagaccagtgaaagaaggactagaaacaaggtcaccaggttctacagggttcagtggagccatcactcagaaaaaaaagcaacctgggaaagggaagatgagttaaaggccgcccatccgcacctcttcgccagctcttccgaatctcggggtcgagattccgtttaa

SEQ ID NO: 27382 - DNA, 2490 bp, Oryza sativa
  Clone ID: PAT_MRT4530_32080C.1
atggcggaagagagagaaagcttcgagagccaatgggcgccttccgatgtaacggaggaaaatctgatggagatggtggcgcacggcgttcttccagcaaaagagatcattgggtggcgaccggcatttggcgaagcattcccgacccccaacacgcatgaagtcgtggtattttctcatttcttctatggcggattttctcttccaacctcaagattctttcggggaattctgaatttctatgggattagcctgcatcacttgaacccaaactccatagtcgacattgccaactttattcatgcatgtgaagcttttttgggcattagaccacattttgccttgttccgccgcatcttcttactcaagccccaaccgaacaagagtaaaccatgtgttgttgggggcgccggtttccaactcaggggaactttgagccaaaaatacttttccatgcccttcaagacttcaaacaaaggctggcatgcaaattggttctatgttcaaaatcctgagcctgcactccccgagtactcctgtcttccttcggtctaccaggacacatggaattcattgcctatgggagatgaagctgctcaggccgtggaactgatggaacgtatgctgaagctcaaggagcaaggtttgcagggtgaacagatcactcgacacttcatcaaaagtcggttagctccaatcaaagagagatcccgcacggcttatgagtttgatggcaaacatgatccaaatcgcgaagatccggactccctggactttaaggtcatgaaagaaaggatgtacaagatcttctcaaatgccatcgtcgtcagttattcacatctactgccagttgtgccatataatgcattcaaccctcctccaccggaattcgctttgatgaagtcagacccgccaatcgtccagcgccgatcacctcaccgtcaaactgttcaggggagcgggggaccaaagatctggtccgaatcccagcccaacacttctaatctagctggccagtcagattcccgcaagaggaagctagtgctgagtgacgacgaaggcgacgacggcaaaaaatctggagataaagaaacacccagaaaactgccgaagcaggctattccgaagaagaaaacatccagtcgccctatgccaaagatcagaaaatcttccaggaaaccgtctgatatagatccatctggaaaggactctgatccggctaacatggaaatgagttcttccaaagaaaccgggccgactgccaaaggtcatccgagtgacagccagccggcaaccgacaatgtagactctggtgatcaacctccgactggaaaccagtcagctgaagctgaaaccggagccagtcaggagcccccgactggaaaccagtcggaaacagggccaagccaagagattccagaggttgatgccagccctcgcagacaagatgccagcaatgactcgaagcctggatctccggctaaagcacaaggatcgactcgccctcgcccgggaatcatcacaggaccaatgattggtgacaaagaagaaattctctggatacgagcggctgaaaactcacgccctcccattctggtcaaatggtgggacgatgacttgcaacctcagggcattgtaataaaccgacaaaaggaggacgaagaggtgtgccaactgaaaaaggcactcggtcaagcaactcgtatcgtaaacaggatccatcttaggaacgaggcgaagaccgcaaccctggagaagctagttcctcatcttggaacccttgaagctgtcagggatcaactgtacgaggcgaaagaacacgccaagaaaaccgagcacgatctaagagatcggatcgcccagctccaggaatctaacttcgaactgagtggctcgtcaaaaggtaaatacaaagtctgtccaactaactggtgcagtcatctccgtaatcttcaattaaccggagtcaatatagtgcaagccgccaagatgtctcaattggagaaacaaattcaaactctggagagcgataaagcagagctggcaagacagagggactcggccttgaaggacgttgaagtttccgatgttccggaggagagcgtttccattgaggaagaccgcaagatcaaatcacaagctctgttcgacgtcctggtcggcaaaatcaaaatgcttgaaggggccagggacgaagttgccaacgccgctactccactcgtccaagcaatgttctttaataacaacggtccgagtagattcgacgcttccgagatcttcgacaagctaagagtcgctccggatacatacttcaagaacatcaaggaagccgggaacgggacgagcaaagaagccactctcgatctcatcaacgatgcgcagaaagccgctgacaaaatagcagttgatgtagtagagagattccaggacaccgatcttcgaccgactggtcctgacagttctgatgatgaaaagactgacactgattga

SEQ ID NO: 27383 - DNA, 466 bp, Oryza sativa
  Clone ID: PAT_MRT4530_32081C.1
tcgcccacgcgttcgcccacgcgaacaaaaatggagactaaagattatctgcaaacaaaaagccatggtttccaacaagggaaagctctcggtgttgatcctcatcatagagtccgagctcgacgtgactgtgaccatggaggaccaccacatagaccaggtggtgtacagctctccgcgagcgtagacagccatgaatgaggtacacgatgaactcgctgacacgctgccaggctggcggtgaagcgctagagcgtgggctcacggggcacccgggagcaccttggacaagcaactccgaaaagactggtgccggcagttcgtcgagatcgatgacagcttgtgcatgagctcggagctcaagcacatggttggaggcatctacaggaagctcggcgccaccgatggtgggcactgcatggccaaggtgctccccggctggcggagaggggactagtagcgctcg

SEQ ID NO: 27384 - DNA, 263 bp, Oryza sativa
  Clone ID: PAT_MRT4530_32082C.1
aatctagtattaaagaacgtcaacttttaaaagaatcagaacaaagtaacttctaaagcaattggcataaacctatgatttgcaccacagatttcagaacactgtccataaaaaactcctactacaggaaaattataacttaaaatacttaaaatccctcttatagcatcaagtttaatagaaaggttagaaagtgcccaagcgtgaataacatcagctgctgaagtgctgacaccaatattagtatctattgggattcgcgg

SEQ ID NO: 27385 - DNA, 483 bp, Oryza sativa
  Clone ID: PAT_MRT4530_32083C.1
atggtgtgcgacagcgcggtactgaactggcagtcccatggattcagcggcccagggctgaggctcatcagggaaggattaaagagcaagggaacaagagagaaggggctcccgccgcggcgctgccatgggtcgcccgtccctcctcctccacctacaccctgccccagcacctgtccctcctcctcctccctccctcacctggcgccgctctcttcacaggcacttcttcttcctcctccacctgctccctcccctggtgtcgctccatcctcccccgacgcccgtccatcctccgcccgcttgcgaagctcctccttccctacacgtgctcgctcgcccacgccgctcctcattccgccgttcaccactcacgcccgtgcctactcgctcgcacgctgctcctccttccatccgcactgccggtcgccgctcgcgcccgtgccgctcctccttccgccgctccttcctcactgggagtag

SEQ ID NO: 27386 - DNA, 387 bp, Oryza sativa
  Clone ID: PAT_MRT4530_32084C.1
atgaggaggatgggggatcgtcgttgctccgcgttgccaactcccttcacctcggcttctccaccagatcctcagagttctcctcgatctacaccgccacgctgccttgtcaaggtcgccgtcgccataagcagagaaggtggaagaagagagcagcgtcggggtagagggagggagagtagcgccgaccgacggatgggtgtggaggcgaaggtgaaatggtggcgattgggtgcaaatgaagtggtgaggagccacccacttgccttgtctccgccgagctcccgccgttttctcctcccataccgccgacctcaccatgtcatgctccacgccgctgagctcatcggcgtgccggccaagggagtagggtcactagtcgggtga

SEQ ID NO: 27387 - DNA, 355 bp, Oryza sativa
  Clone ID: PAT_MRT4530_32085C.1
gtcaaccccatcatctgcacggctgaaccgggggacggacgacgacgacgacgacgaccggaagagacggctgctggctggttcccccattcttcgcctcatctcacccggtcgccacccaacttttgcctcccaaatcatcgtcgaaatggcgggccatctgctcctgctcctcctgctcgctctcctcctcgcctcctccgtccttgccaaagctgccgccggcttcaccgaggagaagggcgttgctgggatcagaggcgtgatagggtcgaggccgccgagctgcgaggggaggtgcaggtcgtgtggccactgcgagggcggtgcaggtgcccattaaccccacagcagc

SEQ ID NO: 27388 - DNA, 379 bp, Oryza sativa
  Clone ID: PAT_MRT4530_32086C.1
cggcacgaggcaaacagcaacatgaccaagttagcttcttgatggcttcatgcgggtggccttgtacttccacagcctttcgttggcctttcctctattccggcatgcttgtggctgtgtgaggaaatggatgttgataagctagtgtgttagctttaggttttggcgtttggttgggtaactttgcaggtgttgttcatcaattgttatcttcttggaaggtttttctttatttgttctctcctctttgtattccccgtgtattctattctcatatcctccagggctcctgcgcttgcgtaggtgaagcctgccctgtgtaagatcatttggctcaatatattcaggtggggattctctcccccccggtgatttagtc

SEQ ID NO: 27389 - DNA, 365 bp, Oryza sativa
  Clone ID: PAT_MRT4530_32087C.1
gtgcattggttaaacacgtggtatgtatattaaacgctttagattaggggagccaggggtaccacatacattgaatcgcaaagaaaatttttattatacaaattttttacaaaattaaagttagagtttgatcctgggctttaaatgaggggaacccccggtggcaaaaaaactggggggccatcaaaggggataattttggaaaatggacccgggaaacgggagggataaatttgccctttagtagttgtttttttaaaaaaactactggtaggggcacgcaaaaaccgggttcaagttttaggtccttcagccgggaagatttccgcgctcccttgaaagcagggggtttttatgggggtacc

SEQ ID NO: 27390 - DNA, 157 bp, Oryza sativa
  Clone ID: PAT_MRT4530_32088C.1
gacctaaaaaaaccaccagtttgatactatttgaaattactgcaatgagggagggacacaagggagcaacaccaagagtgcactggaaagccggaaaagaacctaacaccaaacaaggtgagagggagacacacccggggataatcgggggtacaac

SEQ ID NO: 27391 - DNA, 257 bp, Oryza sativa
  unsure (1)..(257): unsure at all n locations
  Clone ID: PAT_MRT4530_32089C.1
gtattcttaatcctgcataatggtgttctcatctttggcctttctaattttgacagagctgcaagaatctgcttccaacaatcatcaaccagttgggtatgagactttnttcttgggtttactgaatatgagttcaatattgcacaccttgccctaatcctgaaatatctgaaccaagcattagtctttaaagtacgtcctactcacatagtagtatatacatactctttgtttgatcaccccttaatttacctatc

SEQ ID NO: 27392 - DNA, 4995 bp, Oryza sativa
  Clone ID: PAT_MRT4530_3208C.1
atggctacgtggggacttgcctcgctaacatggcgggttgaggcatctggaggcacagcagatcacgcctgtcaggaggcagcctacttgatgatggccagactacgggagcgccacaactacatcttccacgacacggcgtaccgctaccaccccagtcgagccaacggtgatggcgtcagctccttccgtccgacagctggcgagaacgacaccacctttggtcacatgtgtgctgtgatgagaggattggataggatgcactcggacctgcacaaggcgaccaaggccttgaatgatgggaagctcatgaggatcgtcgctctgaaggacgagatagcgcgcctgaagaaggagaacgctcagctaaagggtctcccagcaccaggaggagtccggatccgcactacgccccgtaagaggacgactgcacccgtgcgcatccagcttgcgcccaggaacccacctccaccagcagctcccgcagctccggcagttcccgcagttcctccagctccagctccagctccagctcccgcgttcactctctccttcgctccagcatcagccgccagaggtccagccagtggtaccggaggttggttgtccgctactcccagtggcagcgacgagactgatctgtcaggctccaggagccgctcagagggaccaggttgcttgtttgggatggtctacaccaggactggcaaccgcacgacaggcgagggcagcaacggcgaagaacgcgctgatggcgtgcaccccaacagcgattccggcaatggtccgccaccacttcccgagaatccgacgcttgcccaagttatggcacatcagactcagatgatggcagccatgatgcagcagatgcagcagcagcaccagcagatgcaccagaggatgatgcagcacgccgaacagcagcaccagcagtttggtccccctccccctcagtccaagttgccggagtttctacgtgtcaggccacccaccttctccagcaccaccaaccctatggaggcaaatgactggctccatgcgatagagaagaagctgaatctcctacagtgcaatgatcaggagaaggtcgctttcgccacacaccagcttcagggtcctgcgtcagcttggtgggacaaccacatggccacccgcccaccgggtactgaagtcacatgggcagagttctgccgtagcttcaggaaggcacaggtgccagacggggtcgtggcacaaaagaagagggaattccgggcgctccatcagggcaacaggactgtgacagagtacctccatgagttcaatcgcctcgcgcgatatgcaccagaggatgtccgcaccgacgccgagaagcaggagaagttcatggcgggtctggatgacgagctgaccaaccaactgatatctggggactacgccgactttgagaggctggttgacaaggcaatccgccaggaggatcaacgcaacaagatggataggaagaggaaggccgctcagttcagggcacatcagggaagtcaccagaggccgcgcttcactcccgggcagcagggtggacctaccaccatgattgttcgtcaacaccgcccattcaaccccagcaacttccaccagggctccagtggcagccagaatcaccatggaagtcagcccaaccgcggtacagctccacgcccaccgatggcaccggcacagtcaggccagcccgcacaagccaagaaggagacgggagcaaaaccagggtcctgcttcaactgtggcgagcttggccacttcgctgacaaatgcccgaagcccaggcgtgccggaccaaggtttatccaggctcgtgtcaaccacgcatctgcggaggaggcacaagcagcaccagaggtcgtactgggtacgtttcctgttaactcaatccctgcaacagtactttttgattctggtgcaacgcattctttcatctcgaagaaatttgtcgggatgcatgggttaataagagaggaacttagcacaccgatgcgggttcataccccagggaatagctccacttcggttcaattcagcccttctataacaatagaaattcaaaggtcaccatttctagccaacctcatccttctcgaatccaaagacctagatgtcattcttgggatggattggctgaccaagtttaagggggtcatcgattgtgcgaatcgcacagtcaccttgaccaacgagaagggagaaacagtggtgtacaaatctctagtctcacccaagaaaggagcctcgttgaatcagattgagacgaaaatcccagtggacaccgaagagaagaacttgagaaaattggaggacatacccatagtctgcgagtatccagaggtgttccccgaagacctcaccaccatgccacccaagagggagattgaattccggattgatttggcaccaggaaccgctccaatctataagagaccgtacagaatggcggccaacgaattagcggaggtcaagaagcaagttgatgaacagctgcagaaagggtacatacgaccaagcacttcaccttggggcgctccggtcatttttgtggagaaaaaggataagacaaagaggatgtgcgtcgattatcgcgcacttaacgaggtcacaatcaagaataaatatcctttgccgcgaatcgacgatttatttgatcaactgaaaggagctaaagtgttctctaagatagacctgcgatcaggctaccaccagttgagaatccgggaagaggatattccgaagacggccttcaccactcggtacgggctatatgagtgcacggttatgtccttcggacttactaacgcacccgcattcttcatgaatctgatgaacaaagtgttcatggaatttctggacaagtttgttgtggtattcatcgacgacatacttatttattcaaagtccgaggaagaacatgaacaacatctccgtctagtactcgagaagttgaaggagcaccagctatacgccaagttcagcaagtgtgacttctggttgacggaagttaaatttctgggccatgtcattacagctcagacgaaagacttccaagtctattgcgatgcatcccgtcacggacttggatgtgtcctaatgcaagagggcagagtggttgcgtatgcctcgcggcagttgcgtccacacgaaggaaattatccaactcatgacttggaattggcagcagtggtccatgctttgaagatctggaggcactatctggtcggcaaccgctgcgaagtatatacggaccataaaagtctgaaatacatcttcacccaaccagacctaaaccttcgacaacgaagatggttggaactaatcaaagactatgacatgagtattcactaccacccgggtaaagccaatgtggtggcagacgctttaagccggaaaagttactgcactgctctatgcatcgagggcatgtgtgaggaattgcgacaggagcttgaacatctcaacatgggaattgttgaacacgggttcgtagccgctctggaggcacggcctacgctcgtggatcaagttagagccgctcaagtaaatgatccggaaatagcagaactgaaaaagaacatgagagtcggaaaggctcgggatttccttgaggatgagcatggcacaatctggatgggagaaagattgtgtgtaccggacgacaaggaattgaaggatctgatactcaccgaagctcatcagacccagtactccattcatccaggcagcactaaaatgtatcaagacctcaaagagaagttttggtgggtcagcatgaggagagaaatagctgaattcgtcgcactctgcgatgtttgccagcgagtgaaagcagagcaccaaagaccagcaggtttactccaacctctccaaatcccggaatggaaatgggaggagattggaatggactttataacaggactgccccggacatcatcgggacatgattcaatctgggtagtcgtggatcgactcaccaaggtggctcactttataccagtacataccacctatacgggaaagagattggcagaattgtacctcgcaaggatcatgtgtttgcatggggtacccaagaagatagcatccgaccgaggtagtcagttcacctcaaagttctggcagaagctgcaggaagaattggggacccgtttaaacttcagcacggcctatcacccgcaaactgatggtcagaccgagcgtgtcaatcaaatcttggaggatatgttgagagcttgcgctcttgattttggtggagcctgggacaaaagcttaccatatgcggaattctcgtacaacaacagctaccaggccagtctacagatggcaccgtttgaagctctatacggccggaagtgccgcacacctcttttctgggatcagacaggcgaacgtcaactgttcggaacagaagtattagcggaagcggaagagaaagtcagaatcatcagggaaaggttgaggattgctcagtctcgacagaagagctacgcggataaccgtcgaagggagctcacttttgaggcaggagattacgtgtatcttcgtgtcactccgctccggggagtacaccgtttccagacgaaaggcaagttggcaccacgcttcgtgggaccatacaaaattttggaacgaaggggagaagttgcttatcagctagaacttccatccaacatgatcggcatccatgacgtgttccacgtgtcccaactaaagaagtgcttaagggtacctgaagaacaggctgattcggagcacattgatatccaggaggacctaacatacgtggagaagccggttcgcatacttgataccagtgaaaggagaaccagaaacaaggtcacccggttttgccgagttcagtggagtcatcattcggaagaggaagcaacctgggaaagggaagatgagttgaaagccgcccatccgcacctcttcaccagctcctccgaatctcggggccgagattccgtttaa

SEQ ID NO: 27393 - DNA, 623 bp, Oryza sativa
  Clone ID: PAT_MRT4530_32090C.1
cacgaggcaggcaagtgagcaacaacgaacacgtacatacatacgattgagaggaggatcaattggagtagtaagtgatgggtttgagctgcttgggtgctgggatgatggggaagaagaaggtgtcgccggcgaagcagcagcagcagcaacctgtagatcagaatcagcagcagaagaatctgtactgctcgaagtcgaaggatgcagatgctgctgaagttggtgagaaggagaagaagattggaggaggatcagatggtgatcatcatgctggtgtggagaaggtcgagatgaggaagaagaagagtggatcatcatcatcatcagctccaatcttgatgtaccagttccccttccactcccgccctggcttgctctgaattattggttcagatgaattcagtggcatagaaattcggttttaatttgattttaggaacttcttgttgattcaggccttttctttggccgtttctttgtttgttcttctctctttctttttagctgtgtaatcacaaacaacacacattgtaagcttataaattaagtcttgaggtattttgcgaacgaatggatatatatacgaatttgattcccgtgtctagtctctctctctctct

SEQ ID NO: 27394 - DNA, 812 bp, Oryza sativa
  Clone ID: PAT_MRT4530_32091C.1
tatatttttatttttttggaccagctagaacgtttttcaacttctgcttaatgacacattacaaggaactatcaaagcatattgtacttcttcaatgtgctgatcagttcgggatatccatatctttggaaacatttgaatgaattgtcactgaaaaaggtttacacacttacaacaacagggttaacaaggttaaggtttacacacttacaacaacagggttaacaaggttaactccctcatctcatgcaaacaggatggagatgatattctgcccagttgaactgaacttaattagttgctaaaagtttctttcattgtttcgtcttcccttgtgacttgtttgttctccaaagaattgttcttacatggaaacatggtttccgacaaagatgactgcgcagcaccagcttaacttacgtttggtacagctagacttcccatctgaagtattctgggcagtatctccccacatcttgcattaattttcaaggataaaatactatcagccctggtctcaccaatggtgatcgccgcaattggagcattcgcttcatgtgcaagccttgcgagcctaaaagcagacattgtcattagtgctgaaccaaccactagaagagcatcacaatttcttgcagcctccttagtgctttcagctctctcttcaggaacattatcaccaaacatcacaacatcaggtttcagcactccaccacattggttgcaactaggaatatcaaaatcttgctcccagaacttctcatcaatctcaatatcaccatcaggtcgctgctgcattccgaaacttttgt

SEQ ID NO: 27395 - DNA, 273 bp, Oryza sativa
  Clone ID: PAT_MRT4530_32092C.1
atgcaccgttgcgacgtttgcacggacgggcgggcgatcaggtttttggggagcgcaaggcgcgactactcactgttcgtcaacgtctactttatcttcaccaacatgtcgaacactggagacaacgacaacactggattcaaggagaaggaggttcccaaggagaaggaggttcccgtcaacaccttagaggcaatactgcctcaaactccagcggaggactattcttggggttttgatgcgatggaagcagcgggaaagccaggattttga

SEQ ID NO: 27396 - DNA, 1724 bp, Oryza sativa
  Clone ID: PAT_MRT4530_32093C.1
cgcttagtatagcttagtaagagactcacagtgcacagtatatatctaattgagtagtggattattggagaggagatcgatcttctacaagctaagctaagctagctaattaagctagagtacaaaacgagagagagatcgatatgaaggggaggcacgagcgtatcaagaagggttggagcggatcagcggcggtgtggcttctgttagtgcctctcttcgttctcatcgtcctcaagaccgatttccttccccaggttgctcgccttggagacaccagcttcaccaaagttgcagatgaaatggttcagaaggtttcatctttaggtctagacagagcaagatggcagcagcaacaaacacttgacgtagcaaagctagaagattccgttgtcgggacgagtgacgagttgaccggccacgtcgatgcgaataatgaagattccaaccaaccaaaccagcaaatccttgccatgagcaggtcgaaagacagccgtttgataaattcagatgtagctgcagcaaagacgagccacttaagctgcaacttcagcagcgcgcacatggacacctgcgccatggacggcgacatccgcatccacggccggagcggcgtcgtctacgtcgtcgcgtcgtcggactaccggcccgagaacgccacggcggtgatccggccgtacccgcgcaagtgggagcaggcgaccatggagcgggtccgccagatcaccatccgctccaccgcgccgccgggcgccgccgtcgcggacacggacggcggcggcgccatcatcccgctgcggtgcacggtggcgcgggacatgccggcggtggtgttctccacgggcggctacagcgtcaacttcttccacaccatgaacgacatcctcctcccgctctacatcacggcgcgcgagcacggcggccgcgtccagctcctcgccgccaactacgaccgccggtggacggccaagtaccagcacgccctcgccgcgctctccatgtaccccgtcgtcgacctcgacgccgacgccgccgtccgctgcttcccgtcggcccgcgtcggcgtcgagagccacagggtcctcggcatcgacacccccctgacgggcagcaacggctacaccatggtcggtttcctcgccttcctccgctccgcctactcgctgccgcgacacgccgtgacgcgcacgacgccgcggcggccgcgggtggtgatggtgctgaggcggaagtcgagggcgctgacgaacgaggcggaggtggtggcggcggtggcggaggccgggttcgaggtggtggcggcggggccggaggaggccggcgacgtggcggggttcgcggcgacggtgaactcgtgcgacgtgatggtgggcgtgcacggggccgggctcaccaacatggtgttcctcccgcggaacggcaccgtggtgcagatcatcccgtggggcgggatgaagtggccgtgctggtacgactacggcgagccggtgccggcgatggggctccggtacgtcgagtacgaggtggcggccaacgagacgacgctcagggagaggtaccccatggaccaccccgtgttcgccgaccccgtgtccatacaccgcaagggcttcaaccacctctggtcgacgttcctcaatggccagaacctcaccttggacgtcaaccggttcaaggcggtcatggcggaggtctacacgtcgatcacggcggcgccggtttaa

SEQ ID NO: 27397 - DNA, 460 bp, Oryza sativa
  Clone ID: PAT_MRT4530_32094C.1
catgaaagcttatgctacacaaggcataacttatactcacttatctaatcaaatcttataccatgtctgcctagtacggcacctgcgactgcgctgacacgagcctgtgcgtgaagacagctacctgctatggcgttggattacacaaagccgaaaataaccacttataggaggacacccacaccaaagagaactgggggtgctatatcggcaactaatgcatgtgcaccacactgcaagtgcggaatgtgaagtcactaagcaacctaacactcgccacttgcgagtgacctaccatcattagttcacactaatagccacccatatgattgtcgcctgcgtgtacgctgattattgctgtattaaacccttgagctatcgcaacatcaagcatgtgaccgtttttgacactatgcgtgtattaacggcagaatcagtgtgatgagatgtaccccatcta

SEQ ID NO: 27398 - DNA, 321 bp, Oryza sativa
  Clone ID: PAT_MRT4530_32095C.1
atggggaagctaaactttttggatatttcagatattccgaaaatctcagtttttagcaagctaaaaatttccaagttgatatcactaggatttttccaagttgatgtgttaccaaagttcaaatccttgaggggattctactcttcattgaggagctcacaatgaaccgagtcttttccaaccttatccttgtgaggttgcacaaatacactcctacttccactaagggttgactccaagctgtctaggtgtcctcaaccaccaagagtaacaaatgccacaaagatttcttggggatgaaataagtgcccaacaaatctt

SEQ ID NO: 27399 - DNA, 580 bp, Oryza sativa
  Clone ID: PAT_MRT4530_32096C.1
gtcgattataaagaaaaatcatcactgatattattggtaactttttttaaaaaataacacctacaatatattataggtaccggttaattaaaaaaggtactgttaacgatccttaaatcataatatctgaccgtcaatgtctacatataataatataaaatatgatatccaacttagtagtagggattattactaattatttccactagtgttggtgaaatatgagtatgcaggtattttaaggagaaaacacaccagtcatataagaaaacatacatccggccaattagacacaagtacacggattgaaggacccacaagtcaagtgaaaccatcatggaatgggtcataactgtcgtaactgccatcaggacccaccactcaatctcctagctaaaggagaggctaggaggtggggcccagggttcggccgaaccaccactggcgcctttgatcctggtcttccacgtgtatgctactgataactttacaaagatggttggacggcattttggaaatttcgcatacctataaccatcatatggagcaaataaaaggagtagctcatctcatttttaga

SEQ ID NO: 27400 - DNA, 219 bp, Oryza sativa
  Clone ID: PAT_MRT4530_32097C.1
agatggtgttataacggatctcgctcacactgtgataaagagctgtctgcgtgtcggcagatgccaactgaaaacgtcgtgcgactatgggtggcctttctggctgaacaacagaggccacatggaaggaagggggcttctggtacccggaccgcactgacctttcatatcagcaggcggagaaagacggtgccggcatcatcgcattgcgcggtccgg

SEQ ID NO: 27401 - DNA, 408 bp, Oryza sativa
  Clone ID: PAT_MRT4530_32098C.1
cccacgcgtccgtcaatcctttcttcctgatctaccttagctaccaggagctgctatctcgcttaattagttatagaagtcatggcggcgacagcactgaccagccaggcccggttgccgatgtccctgcggtttgttactgcgccggtgccggttcacgtgtaggggctgccgacgagcacctagctgggagacaggctgcggatgcaaacgacgtacaacgtgaagctgatcacaccgaaactgcgaggtggagctgcagagtgccagagacgtgtacatcctggaccatgcggaagaagaagggaccgacctgacttactcctgccgagcgggctgctgatcgtcctgcacagggaaggagaactccgtctggaccgaccagtccaaccagagcttcctcgacta

SEQ ID NO: 27402 - DNA, 434 bp, Oryza sativa
  Clone ID: PAT_MRT4530_32099C.1
cggacgcgtgggcggacgcgtgggcagcaactgctcttcgatcaaatggatcgaaataaatggaaaaggagctctcatctgacagctttgggatctgctatggtgaagtgcttctaggatgtctccagagaaaatgctctagccatttatctactccacttgtgatatttgtggaactctcttcctctccattttaagttaatgcagcattttcatagtcaagctgcttatttctgctctaccataaagattgatattactaatgatagttgccatgatcatacagaacagtttgaggtgatatgcttctgtgatgacacattttctcacatgctggatgtttggccattttcagtcttttagcagaaccaaagacatgacctggagacctgatctgtttagtgatagtatggcagctagtggaattgaaactg

SEQ ID NO: 27403 - DNA, 2097 bp, Oryza sativa
  Clone ID: PAT_MRT4530_3209C.1
atggcgccgccacaaatgtatgagcgccgcctcctcgccgccgcctccctcctcctctccgccgatgcgcagggccaaccaccccacgccgccgcccaactcggagtcggagtcacggccgagctcaagccgcaccaggtcgatggcgtcgcgtggctcatccgccgctaccaactcggcgtcaacgtcctgctcgtggtcttatgtcctctaagtgtcaccgatggctggctctcggaattcaataaattttgtccttctttgagggttatccagtatgttggtgataagttgcaccgtcgtgatctccggagaatgatgtttcaggatgtccaaaaatcttcatcgtcatctcattccactgagttaccgtttgatgtcatgatgacaacctatgacatagccttaatggaccaagaatttctttcacaaattccttggcactatgttgtcattgatgaggcccaacgtcttaaaaacccatccagcgtactgtataatgtccttgagcaacgctttatcatgccaagacgtctgctactaacgggcacccctatccagaataacctttctgaactatgggcattgatgcacttttgcatgccctcgatttttggtaccctggatcaatttctttctactttcaagcaatcaggtgattcattgacaggtggcgaaactaataaaacggacaaacagtttaagatccttaaacatgttatacaactgcgaaaagcttctagtcatccatatctattcagtggcattgaacctgagccttatgtggaaggggagcatttggttcaggctagtggaaagcttgtcatgctagatctcattcttaagaagctccatgaagtaggccatcgagttctgctatttgctcagatgactcaaacactggacattcttcaggacttcttagaattgcgtcagtacacctatgaacgtctggatggttcagtgcgtgctgaggaacggtttgcagcaataaaaagtttcagctctcaacctaccaagggtgttgtcagagatgataatcagagtggagcttttgttttcatgatatcaactagagcagggggtgttggccttaatctcattggtgctgatactgttattttttatgagcaagattggaatcctcaagctgacaaacaggccttgcagcgtgcacaccgcattggacagttaaataatgtcatcatgcgaagagcagaaagaaaacttaagcttagccacagcgttattggagaggaggatgcaacttatgggaaggggaaatatgtagaaaatgaagctagcgacatgcgctcgattatatttggcttacacctatttgatacttcagatacgactgcagagacaatgaatgatgacacagcttcggagactatcaaagaagagactatgttgaagctgaaatcaatgtctgaaaaagtagtgttgatgcgtagtcatgaaccttcagaaaaggatgaacgggcattcgaaatcaatccaaatatgacagacaacagtggggctgttgttacgagggtatctgattccgttaatgttgatccggattttaatgaagccgcatacttatcctggcttgagaagtttaaagagtcttcgcattctaaggaaaataccagagctgaactagaaaggcaaagaatagcacctgaagaaaagttcctaaaacgtgaagctattaagaaaaaggtggaagaaaagagattagccaaatgggaatccttggggtaccagacattaaagatcaaagatcctgacatcttaccgaaccagaatattccagactctggatccgtccaacttgtatatggagattgcactaatccttcagtagtttgccctgcaaagcctgccatcatattcaggtattattttccgagagtgaaatatgttacattctatgaaagggaattactccatcctaggattgttgaaggaaatgttgtgttgataattcaggaacctggggacatggaggaatgttcgatgctttggccaatctctcaacatgcattccagatgcttataatcgtgcttctgaatttgatgatctccacctggcagatcttcacttga

SEQ ID NO: 27404 - DNA, 966 bp, Oryza sativa
  Clone ID: PAT_MRT4530_320C.1
gatcttcaaggcaccatgtatttcagggaactacctcataatactattttactgaaacactccatatctctcaaaaatgtttagaaacactggaagtaaacatgccaagataccatagctggcgattatgttcacaattcttgaccaaataaagcaaagccttacattaaagaaactagccagaacatccacaagactattgctttaaccaacttggggtttctgacttctttgatcatgtctaattcaggagcaccacacacaattgccactttttgtccaggtccgtaggccttaaattaaggagctccatacaatccggggcctacaccaacctcctacggggccatgtgtgttccatagacgatatgatgcaaaatctcagtaatatgaactagaaccactaccgccatagtagccactgctgctacctacattacgccctgagtaaagtgatgaatatgaacttccaccaacatcagacccacgagacatgtagctaccactgaaatttgatgagtacattccaccagcatcattactgcttgcggaacctccataactcatgccatgccgaccactactgtacactggatcatgaccagagacagatctgccaccactgtatcccgcatgtgatcgtccaagcctctcgctatatgtatctgcataccgggcactgctgccaccaacatcatagtctaagcgtgccttagactgacgaacactaatgtcatgatatcgaggtggcacatcatccatctcagcatatgagcgttttgaaccagacattgtatcataatcacgaccacggccctccctatatgttggtaaaggacggtcaatcttccctccataaccatcatcaatatatgctcgcctatcagaaaggcggggagcactacgaggacctaggtccgaataggctgacccccggggtgaataatcatccctataggggcgtct

SEQ ID NO: 27405 - DNA, 275 bp, Oryza sativa
  unsure (1)..(275): unsure at all n locations
  Clone ID: PAT_MRT4530_32100C.1
gtcgtcacgaccgcgaaaaagcccgagaaacggctcgtaactatagggaggcgtcaaacaaggagtatgacaagatgatcgacatcaagcaggtgtccaagttacgagcatctcataatactccttgtatgacgcctgcctgtagttacgagcgttctcacggcgctagggtggaaggtggagagcgtcttctcgatcttctatgcgtccatgacaaccttccacnagaggaagaggttggtacatatccggtgcagtgcggagttgtactctga

SEQ ID NO: 27406 - DNA, 2365 bp, Oryza sativa
  Clone ID: PAT_MRT4530_32101C.1
cccagaggcatctctcctctctgctccgcgagtggccttttgcccacctaagccgcctccccatcctctgcttgctccggcgggcggcgagcgccccgccggaccgacgacgacctcgccgtcgagctggtggccgctcaacctctagcgctcgcagggatcccgggaagcctccctcggccgcgtcaccaccggcatctggtgctttccgctcccaccacagtgtgctgctctcgtcagttgccaccgcccgactcggcgctccggagcccagatcttggttccggaggatcctctccggcgatggatttcgtgaaggttttcgatcaggccgtgcgggagataaagagggaggtcaatttgaaggtgctcaaggttccagagctcgaacagaaggtacttgatgcaacaagcgatgaaccttggggccctcatggtactactctttcagagctatcacatgccaccaagaagttcgctgaatgtcagttgtttaagttcttctttggtaactaggctgatagcggcgctcaaagtggtcatcaagatttggctttgacaattattgagtacttaatagccaatggttctgagcgggcagttgatgacattcttgatcactattcaaagatctcggttctttcaagttttgaatatgtggaacctaatggaaaagatgctggaataaatgtgagaaagaaagtcgaaactatattgggactcataaatgacaaggagaaaataaagtctgtaagagagaaagccgccagtaatcgtgacaagtatgttgggctatcatcgacagggataacatataagtcaagctctgcttcatttggtagcaactatagttctggtgaacgttatgggagttttagtggtacaagggaaggtgattcatacggtgacagttatagggataaagaacctgttaaatcctctccaagttatactggcagccagaaatctggcagcaggataaaaaaggatgtgaatagaaggaatgaggattcaccgagctccttgaagtctaatgcaaaaggcaatgaggacgattttgatgattttgatcctcgtggatcttcttcaaatggtgcagctaatacaaacaccagtggcgtggatctttttgccccaaacttattggatgatttcatcgatgtgcctgcagcagcaactcatgaaacaaacgactctgcagacgctcaggttgatctgtttgctgatgcagatttccaatcagcaataccaagtacagaaacagctgcgggttcagatgtccagggcaatgtagacctttttgcggaacagccagccttcacagcagcctttccaccacagacagggtttattccaccaccaagttctgggacatctgaagcaaatacttccacgtctaagaacacaactcctgaaccttttgatccttttggtgctattcctataaacagctttgatggatctgatccatttggtgccttcaactccgatgttggatcatctagtataccaccacccacgcagagttctgttggaaatatcagcacaccaagtcagaaccctcaagcagcatctgactttggtggctttgtgtcgagcactgtagaaacagcagctaaggacccctttgatttttcaagtagcaatcttgggaaaacacctttggcagatccaaaggctgatgcatccgattttggtgcctttgtatcgcacagtgaggaagtagccaaggatccttttgatctttctttgagtaccagctctggaaggacaaaccaagcacctctggcggctcccaagtcagataccaagaaagaaaattttcaggtcaagtctggcatatgggctgactcattgagccgtggactgattgatctgaacataactggaccaaagaaggtgaacttagccgacgttgggattgtcggtggcctcgatgacgggtctgatgataaagctctgccctcatggaccatgggtgcaggaggttccagcctaggaatgtccggaattccttcatctacacaaagtggtggcattgagagcttagctaactacaacaagtaccagtttggctttaaatgagctttcatgtgaggctttctagtatatgccggttattgtcggaatgtcggcttgtgccttatttattttttgttgattctattctcccctcttttgatgcttacattcctttacaatcgcctccaaggatcgtgatcttggttcgtcttgtcgcgcttgtattgtatttattggatttgcggatgagagactcctacctatatcacaccctgattcaatttaactgtactgttatttcaaaatcgtgttaaaccaattgcacatctctatattgcgattt

SEQ ID NO: 27407 - DNA, 1284 bp, Oryza sativa
  Clone ID: PAT_MRT4530_32102C.1
atggctcccgccggcgactacggcgcctcggtgagcatgatgatcagctacggcggcgcgatcgtccaggccgacggcaaggccaaggcggcgtactacgccggcggagtccaccgcatcgtcaaggtcggcatgtccgagcggctgcccggcctccgcgcgcggctcgcggcgctcgccggctgcgccgacgtgttcatccgctacgcgctccccggggagggcctcggcgtcatccgcgacgtggcggacgacggcgacctgtggggcctcgtgtcgctgctcttctactacaaggaggtgcccgtgtcgtccaagcccggccgcatcagggtcttcctgttcgccgccgatcacgacgcgccgccgcaccgaaccgcgtcggcgccgtcgttaccggtgctggtatctggaagtgcctctgctgctcctcccgttacactggggttgccacgcagcgcgtcttcaccgtcgctggcgacgtcgggctcgggcaccgccgtgaggatgaaggtgagctacggcggggagatcatccagcagcagcgcggcggatcagcggcggcgtcgtgctactacgccgggggagttcaccggatcgtcagggtcggcctgtcggagcgcctcgccggcctccgcgcgaggctggcggcgctcgccggcttctccgactccgacgacgtccgcatccagtacgcgctcccgggagaggagggcctccacctccacgacgtggcgagcgacggcgacctgtggagcctcgtgtcgctgctcttcttccacgaggcggtgatggcctccagcaagcccaagcaaggccgcatccgcgtgttcctcttcgccgcccacgacgccccggcgacgtcgtcgacgtcgcccaccgcggcgccgctcaggaggagcgcgtcgtcgccgttcttgccgacattggtggaggaagacgaggacgacgacgacaacgacggcaacacggacacggcggctgcaactcagacgagcactagccgtgtcaccgccaccgtgggcatgcggcggagcgcctcgtcgccggcgctggcgacgacgtcatcgagctcggacgcggcgactgcctcgacgtccggtggtgcaacatccggttcatcaggagacagcgacacaccggcgatgacatcttccacggcagcggcggcggcggtgcagttcggtccggtggtgcttgtgccggtgatggtggtgttcccggtgatccccgtgtacgcgattggcgtggtagattatcgtagtgtgctccttgtagcgtag

SEQ ID NO: 27408 - DNA, 1011 bp, Oryza sativa
  Clone ID: PAT_MRT4530_32103C.1
atgatccaccacacgggcctgctcatgcccccgtcgtcgccgcgcgccgcgttccagctcgccgagccaccgtgcgcctcccacatcctcgtccccgagcacctcgtcgaaccgcagccctgcccccccggcatgatgcgcgcctgcagttcccacgcccgcgcctccagcggcgacggcctcctcgtcctcgacttcacggacggcctcaccgcggcccccgccgccggtgcgcgcggcccgataccgctcgacggcaagcaactgaagcccgacgtcacgcgcttcgtctgcaaccctctcagcggcgagctgttccgcgtcccggacatcgacgggacgaagaagaccttgaagtggcaactcgtcggcatcctcacccaatctgaccgccccaacgggccgccggataggtacgctctcgcttcgttcagctcaaacgccgccgccgccgacaacgatgagtggtccttcgccgttcggcggtttctctcgcaaaagggggaatgggacgagccggtggttttcccgtccccgctcccgctcgagcggccattgttcgtggatcacgatccggtgaccttcgccggccgtatttggtgggtcgacgtgagctggggcgccatttccgtcgatccgctcagcgaccaaccggagctgcgctttgtcgagctgccagggggcagtgtgatggagcccgtgaaggatgagaagcggaggggcctagtcaggtaccgccgcttgggcgtcagcgaggggaggctgcgctacgctgaggcgtcccagaaggagccattcgtgctcagctcctttgcccttgacgacaatggcagcagctggacgctggagcaccgggtggcgctcagccggctccgggtggatgggggactcccattgcagcaggaggacacgccacagattggtgtcattgacccactgaatgctagcataatgtacctcaaaatcggcgtgcaatgtatctccgttgacatggagagggatttattgtag

SEQ ID NO: 27409 - DNA, 216 bp, Oryza sativa
  Clone ID: PAT_MRT4530_32104C.1
atggcgatcgtccgcgtgtcgtctgtttactggatcaagggagaccagggaccctggctggaccccgtgcaagccacactcacggcacaccccaatctccctgataggggccgcgcggccacgccccaccgccatccacacctcgccggccaccgcaaggtcgtggcgccgcccaacctcgtcgtgccctcgtcgggctgcgccaccgtcgcctag

SEQ ID NO: 27410 - DNA, 291 bp, Oryza sativa
  Clone ID: PAT_MRT4530_32105C.1
atggcggagagtaagaagcgcgggattagggattggattggtgactcccagcggaagcggaaccgcaagccaggccgactgttcttcctcctcccgctctcctcccgccctccgcggcttcgccttcgcggccgtgaaaccgacggaggcttcgggatgcggccgcggcggcgagaaatgaactccggcgaggggaaaaactcgaagcacttatcggtattgacggtcaaatattatgatttaaggaccgtcaagagtactccgttttcagccccggttggacgaccataa

SEQ ID NO: 27411 - DNA, 317 bp, Oryza sativa
  Clone ID: PAT_MRT4530_32106C.1
gcggcaagctgacgtggcagatggcgggtcgaccgcgccagggagaagcagaggtctaatgtggttaggataccatgtgagaaggtgactagagttaggattcttcgaggtcaacttcggtcaacggtggggatcgggactagtcgactcagggaggagttgaggtctagacgatcaaggataccagatgacgaaattaggtacgagatggcacatggcacatgacacatgatggatggacatcgtgtgggagagatcttcgcaacgggtttcacgaggtgtgtgtgcaagtttcggtgtctgcgaaggagattgga

SEQ ID NO: 27412 - DNA, 330 bp, Oryza sativa
  Clone ID: PAT_MRT4530_32107C.1
tttagatattctgcggactaggaggacacaggccaggtggaggacttgcaccaaataaggcttaacttgctgcatgtgacacaaaagaaggccagaacagcaaacgcctatgcaggaggcgatgagctattgtgcatgtgtgcttctgtgggagaagcaactgttgattggacaggacggcaacgatacaaggaactggatctgagaccaactccatttgaggcactaccaactctcataggaagtgagagctctgtatgcacgatgagttgcagaacacgcaattgactctacctactgatgaataatggcaaatgtgggaaattgtag

SEQ ID NO: 27413 - DNA, 2133 bp, Oryza sativa
  unsure (1)..(2133): unsure at all n locations
  Clone ID: PAT_MRT4530_32108C.1
atggtggtgaacagccggccgctgaagagggcgaggacgcgggtggaggccagggacttcgctgggttcccgccggcgggggacggcggggctgccgggacgttccgggaggcggtgagggggttcctcgcgaggtacgcgcggctgctgcctctcccctctatcttctcgccggcggccgccgcggcaccgccgcatctgttgacgtggagggtgtcgctgcgggtcggcgaggagggggacgaggagggcggcggcggcgccgtggagctcaacgtcgttgaggaggatgtgctccgatcgcgatctgtgtattgtgaccagtgcagagtcgtgggatggagtggtcacccggtctgtgggaagcggtaccatttcatcatcgagaacgacaacaaccaggtgtgcggcaagcgccacagctgctgcctccgctgcgggactcccacagtcgctggagaatcaagatgcctcctatgcaactttgatatggatggcgaggagctggaggagtgcgggtacatgcatctggacgacaacacccacctgctgcacgctgtggtgcatgcaaatggttatggccaccttctgagggtaaatggccgtgaaggtggctcaagatgtctcacgggccgtgacataatgagtttctgggatcgcttgtgcaaggtgctacatgtgaggaaagtaactgtcatggacatatccaagaagcatggaatggaatacaggcttctgcatgccatcacaagtggccatccttggtatggtgaatggggatacaagtttggcgctggtagctttgcactaacctcagatacttaccaagaggcagtggatacgctttccggtatacaactcgcgttgtacttctcacatcgccagcccattcggacccctctgcagaacacgattgctctgtactgggcactctctgatcgccagcttgtgactgttcgggacctcttccggttcataatgcacctgcttcatcaagcacgcaagaagaacgagacatcaaaacccacaactgatgaacacaaagaagttgcatctaatgtgctctgcaagtggacaaaggaagatattgatcgggcagaaactgcaatgctcaaggtcctacgggttgttcagcctggacagtgggtatcatggcgtgcacttcggggagctgcatcgaaggctgttgattcacaggagctacttgactattctcttcgaggactgggtggaaaactgatggacgatggccatttcatagctgtccgctgcaatgctgagacgagtgcaattgaatacaggctggaagataactccaaccagtcagttgatgcggctgcgtttgggccttctgttgatcatcttctgcacgatctgaagttcctctataacgctttgctgaacccagaaaccatgttggcttcacagccagaggttataggtgcatcatcacacagtgcagcagcaaagattctcgactgcaagcagttcatcaaacattacgatcagcacaccccacgggctcctttgaacccattcctactttctgtgaggtgttccattgaacttcttgatcacccaaaagactacactgcaccaccggtggaactagtgcttttaccagcaagtgctacccttgctgaactgaaaatacaggctacaagggcctttcaagaaacatacctcatgttccaaagctaccaggttgaacagctccctgacttcccaaattttagtgacacaaccctcgtgaagcatgtgcttggctcaagccagctcgtgagggtaagaggaaggtgcactggggataaccgaagaattgtgcaattcaggatggaaagggggttggagaactggacggtcgactgcacctgtggagccaaggacgatgatggcgagaggatgcttgcatgtgatgtttgtggagtttggcaacacaccaggtgttcagggattagtgattttgatgatgtccctgagaagttcatctgcaggaagtgtgctagtccacgcagagaaangggtcgtgtgggtgnaggtgcaatgtggggtagcagaatgaatgcttccatgtcgtggctttacactatgaaaggcagccatatagtagaaagtggtgtcctgcaattttaa

SEQ ID NO: 27414 - DNA, 1056 bp, Oryza sativa
  Clone ID: PAT_MRT4530_32109C.1
tcaagcttggaggtcacccttctcctctggctcgagctctctgagctcgtcggcctcgcttctcctgcaactccggtagaacatgcagctcacgatgatctcgagcacgacgcagagcgcgtggatgtacgcgatggagaacgcctcgccggcgacgcccgccgcgagcctcttgccgtcgccggcgccggcgaggcggtggcgttgcgcctgcgacacgacgcggagctggaacagcgcctccgcggcggccatgccgaggttggtcgggagcgcgagcgccagcgcggtgggcacgcggccgcggatgacgacgcacgccctgagcaccgcggcgtggcccgcgcggcgctccatggcggacaccaccacggcgaggttgcagaccacggtggcgatccccacggccaccgagtaggcgatggcgcccgcggcggacagcgcgagcgtcgccgcggcgtgggaggtggtggtgaggcccaggaggtcggcgccgttgaaggcgaggaacatgagggagaacacggcggcgttcgcggacagcatcacgaacgcgccgaacaggtgcgtcgccaccgtcgccgggtacgcgcccgccacgctcccgcacggcgggagccgcgtcgccctcgccacgccgcgccctcgccgcgccacgccttcgccatcgtcgtccggccggagcatcgccgcgacgcacgccttggcgaggagcaggaacgtgagcgtgaacggcagcgcggcggcgaacgtgaacaccgtctgcgacagcttggcgttgaacagcgcgaagaacgacgacggcgggaacccggcggcgtcgaacatgcgccgtatcctcgccgacaccgccgccagcgctcccgacgacggcgacgccatggcgcccgacgccagcacggcggccgagaacggcagcaccagcagccccgccacggaggtgtagcaatggtagccatggaagaacgccgccaccgccgccctcatcaccctccccgccctcgccaccgtcgtcggcgacgccgccgccgcgccatggaagcctcctctcctcat

SEQ ID NO: 27415 - DNA, 1003 bp, Oryza sativa
  Clone ID: PAT_MRT4530_3210C.1
cttcttgttgttttaaaaatgttgttttcctaaatttaagcaagatgcacatacaaatcttaaccttcaaccatgtgaattacacatcacaccacatgagaataagagaagcgcagattagcactggaaatctggaataataataaactggggtaggggtatcactgctttagcaagcgtgccaaaatgccaggcaactgggttgcagggggtatcacatttctcagctctaaagccactgctttccagttatgtccaggtagtgctctaagcacctatgctctcatctcacgagctctacaaaaaatttacaaactatacacaagcacaatcaaagtggggaaaaacaatcatgcttgtatgtacaaatgatcatgtccagtttggcaggggctcaaaaagaagcctccaatcaacgtggaagtatgccctacaaaagcctaaaagctatttcgtggaggagggtcctcttctgcgacgctgtgatgatgccgttattctcggcgttttccagaacgtcggccattatggaggccgcatggccgataggttcttcggagactctcttcagcatgaaagcctggcagtgatgtgaaactactatggtgcatggatcctgcgaccaaggctctccatcgacttgaatgggcattttagttttgatctcgatctttatatgatgaccttgagctaacctctgcgcgcgagaaagccctacctgcagccttccaagatgcagcattccagtgaagctaactacttctagcatcttgtcatgcattgactgagggtggaaattgtcagaaacatcatcctcgttcttccacaggtcaactcctcccatgtagctctgaatattggcaacaaggataccttcagagtcctgaggaatattaattttggatccatctatctcaagcttgacatcccatggaaaataatcaaatgtgttatccatcatattctttgctccctcttttgcataaagcaccttgttcataaa

SEQ ID NO: 27416 - DNA, 567 bp, Oryza sativa
  Clone ID: PAT_MRT4530_32110C.1
attattcttagaaaggattgcttccaaggaggatagattaacatcatatcactggtcagaaagacaagattccatgaaggttcacacaggcctcagcgctcacatccattctgctaccaccattgccacctccaccaccacgaccctttcctctgcgtggactagcacacttcctgcagatgaacttctcagggacatcatcaaaatcactaatccctgaacacctggtgtgttgccaaactccacaaacatcacatgcaagcatcctctcgccatcatcgtccttggctccacaggtgcagtcgaccgtccagttctccaaccccctttccatcctgaattgcacaattcttcggttatccccagtgcaccttcctcttaccctcacgagctggcttgagccaagcacatgcttcacgagggttgtgtcactaaaatttgggaagtcagggagctgctcaacctggaagctttggaacatgaggtgcattatgaaccggaagaggtcccgaacagtcacaagctggcgatcagagagtgcccagtacagagcaatcgtgttctgca

SEQ ID NO: 27417 - DNA, 2474 bp, Oryza sativa
  unsure (1)..(2474): unsure at all n locations
  Clone ID: PAT_MRT4530_32111C.1
atggtggtgaacagccggccgctgaagagggcgaggacgcgggtggaggccagggacttcgctgggttcccgcaggcggtggacggcggggctgccaggacgttccggtaggcggtgagggggttcctcgcgaggtacgcgcggctgctgcctctcccctctatcttctcgccggcggccgccgcggcaccgccgcatctgttgacgtggagggtgtcgctgcgggtcggcgaggagggggacgaggagggcggcggcggcgccgtggagctcaacgtcgttgaggaggatgtgctccgatcgcgatctgtgtattgtgaccagtgcagagtcgtgggatggagtggtcacccggtctgtgggaagcggtaccatttcatcatcgagaacgacaacaaccaggtgtgcggcaagcgccacagctgctgcctccgctgcgggactcccacagtcgctggagaatcaagatgcctcctatgcaactttgatatggatggcgaggagctggaggagtgcgggtacatgcatctggacgacaacacccacctgctgcacgctgtggtgcatgcaaatggttatggccaccttctgagggtaaatggccgtgaaggtggctcaagatgtctcacgggccgtgacataatgagtttctgggatcgcttgtgcaaggtgctacatgtgaggaaagtaactgtcatggacatatccaagaagcatggaatggaatacaggcttctgcatgccatcacaagtggccatccttggtatggtgaatggggatacaagtttggcgctggtagctttgcactaacctcagatacttaccaagaggcagtggatacgctttccggtatacaactcgcgttgtacttctcacatcgccagcccattcggacccctctgcagaacacgattgctctgtactgggcactctctgatcgccagcttgtgactgttcgggacctcttccggttcataatgcacctgcttcatcaagcacgcaagaagaacgagacatcaaaacccacaactgatgaacacaaagaagttgcatctaatgtgctctgcaagtggacaaaggaagatattgatcgggcagaaactgcaatgctcaaggtcctacgggttgttcagcctggacagtgggtatcatggcgtgcacttcggggagctgcatcgaaggctgttgattcacaggagctacttgactattctcttcgaggactgggtggaaaactgatggacgatggccatttcatagctgtccgctgcaatgctgagacgagtgcaattgaatacaggctggaagataactccaaccagtcagttgatgcggctgcgtttgggccttctgttgatcatcttctgcacgatctgaagttcctctataacgctttgctgaacccagaaaccatgttggcttcacagccagaggttataggtgcatcatcacacagtgcagcagcaaagattctcgactgcaagcagttcatcaaacattacgatcagcacaccccacgggctcctttgaacccattcctactttctgtgaggtgttccattgaacttcttgatcacccaaaagactacactgcaccaccggtggaactagtgcttttaccagcaagtgctacccttgctgaactgaaaatacaggctacaagggcctttcaagaaacatacctcatgttccaaagctaccaggttgaacagctccctgacttcccaaattttagtgacacaaccctcgtgaagcatgtgcttggctcaagccagctcgtgagggtaagaggaaggtgcactggggataaccgaagaattgtgcaattcaggatggaaagggggttggagaactggacggtcgactgcacctgtggagccaaggacgatgatggcgagaggatgcttgcatgtgatgtttgtggagtttggcaacacaccaggtgttcagggattagtgattttgatgatgtccctgagaagttcatctgcaggaagtgtgctagtccacgcagaggaaagggtcgtggtggtggaggtggcaatggtggtagcagaatggatgtgagcgctgcagggaggtgcaaggatgagataggatcatctgttggcggtgcaggcaaatttgggcgcatggcaactgttggatgactgtacataatgtgtgaaatgtaaatactgaggggagagtggggagtagcacctgaggcctgtgtgaaccttcatggaatcttgtctttctgaccagtgatatgatgttaatctatcctccttggaagcaaaaaacaaacagaattgttcagcacgctcaattccattcaagtgcagcataaagagggtgggatgaaagatgacaatcttgaaatgaataataagatatctaacgaacactcattaaattcttccaggcttccatgtcgtggctttacactatgaaaggcagccanatagtagaaagtggctcgtgccgaatt

SEQ ID NO: 27418 - DNA, 1273 bp, Oryza sativa
  Clone ID: PAT_MRT4530_32112C.1
ctagtctctggatgaaactccagtctttgcatctagcgggccacggcagccaaacagtacgcctgactcatcgtccgatgtgcacacacgctattttcgagaaacttttaggaagctcaagctttgacccaagccttcctggaggtgtagttagcgtctccttggtctgtgaatcgaaggtagggttgtctatgatcacattgaggaagacccatagatagcgcttcacatcatctacattgaagttacactcctcatagtgctcattcagaaggttcatcagatgggtggtaatcagctccgtgacgtaatcaacatgggttccaccttttagtgtctcaaatccatttacaaagctgacctgctgaaagtgtccatcatcactcaggctcaaacagacctcacaccaatcatttaacttctcgtaaactcttgggaaccctgctcctgatctgtcactgacaggggaatcgatatacaggcgcacataatcgttgaagctgtttatacgcagcctcacgccatcccactcaacttgcacggagtctcctagaattcctgccatatcaaccactctcttccacatgagcgtcacgtgatcctcttcgaggtaggtcatgttgaacccagcaagatctggcttgaaggtgattatggtccagttctccccttgattgcagtctgtaatatggggcactgatttcttccccatattctcagagaaaacctgcttgtacttcttcatgcggcacccatcggcggtctcgatgatgaactccgtggagaacaggttggcgagcttgacaccgtagccaccgccgccgtcgttcgtcgccttgttctgatcatcctcttcgtcgtcgtcatggaggtggccgaagaacatctccggcgcgtagacgccgcgctcctcgtcgacgagctcgacggggacgacgccgcggccgttatagaagacggagacgctgcgctcgacgacgtcgacctcgacggagagggtgtccatggaggggtcgcgccgcttgttgctcgcggcgtggacgaggacctcgtcgaagatcctgtggaggcccgggcggtaggtcacctcgcgtggcaccatgtagtagccgtcgttgatccagaacgtctgcgtactgcgcttctccggcgagccgatgtagccgtctggccgccggaggatgcgctcccgcagcgtcgtgtcgccgccgccgccgccgtgcgcggcggcgatgcgggcggacctccgccgcggcggcgcctggcgattcat

SEQ ID NO: 27419 - DNA, 3492 bp, Oryza sativa
  Clone ID: PAT_MRT4530_32114C.1
tgatagtactattctcaaggaagtctgatttcgagatgaggctgaatgttcgtgtgatcgaagcccgcaacctgcgggccatggattccaacgggttcagcgatccgtatgtgaagctgcagctcgggaagcagcggttcaagaccaaggtggtgaagaagaacctgaacccggcttgggatcaggagttcagcttctccgtcggcgatgtccgggacgtgctcaagctgtatgtctacgatgaggacatgattggaatcgatgacttcctggggcaagtcaaggtgccactggaggatgttctagctgctgataactactcgctcggcgcgcggtggtttcagcttcttccgaaaggcaaaaccgagaaggcgattgactgtggtaactgatggaaatttccctacttcttaatttggcacacgaatcttttgctttggacaactgtagtcaagatactgacagaaatcaaactactgcagaggacaaatctaatgggattcctgctgcagcttccactgggattgaagtttctaaaacggataagtccaataagccatcgtttgttgatcgtgtctgtcaaatgtttgtcaggaaaagcgatgatgtggtaactacccccttggtaacaactgacaaatcagaagatgttcaagaagcaacaacaggatatgaagctcctgcaactggaagccaaacttatagtgcatctacagacactccttttgatgaactattgaagtactttgaatcaaaacatcaagaagttgaaatgcctgtagatttacaaggaattcttgttgacaagtcgtacattacatcgcctagtgatctgaacaattttctcttctcgccagattcaaattttcgacaaacagtggttgaactccaaggttgttctgatgtcaaaatggaatcctggaaaattgatagtgatggggagtccttgaagagagtgataacttatacaactgcaccatccaaattggttaaagctgttaaagcaacagaagaacagtcttatttgaaagctgatggaaatggatattcagttttattgagtgttagcacccctgatgttccttgtggtacttattttcggacagaaattcttttccgtattttgccaggtcctgaacttgattctgagcaactgacgtcacatttggtaatttcatggcgcataaattttcttcagagtactatgatgaaaggtatgatagaaaatggagcaaaacaagggttgcaacaaaattatgcacagttttctgatttgctgtcacagaagatcaagcctattgatgtagatgctgggtctgacaagggacaagtcttagcgtcattgcagagggggcaggagtctgattggaatatagcatttctgtacttctgcaactttggtgttttatgctctctttttgtaaccatatacattgctgtgcatgttcaactaaggagttcaggtgcacataaggggctcgagtttcctggattagatctgccagattctctcagtgaaattgtcatgggtgggcttttgtttcttcaattacgacacatctataaaaaaatctcatgctttattcaggcaagagagcaaaaaggtgcagatcatggtgtcaaggcacaaggtgatggatggttgttaacagttgccttaattgagggaaccaaactggctccagttgatgctactggtttttctgatccttatgtggtatttacttgcaacggtaaaagtaaaacaagctcaatcaagttccaaacactggaacctcagtggaatgacatctttgaatttgatgccatggatgatccaccatcagtgatgaatgtacatgtatatgattttgatggaccatttgacgaagttacctcacttggacatgctgaaattaactttgtaaaatcaaacttgtcagagctagcggatgtatggattcctcttcaaggtaacttggctcagtcctggcagtcaaagttgcacctgagaatttttttgagcaactcaaaaggatccactatggttactgagtatctgagcaaaatggagaaagaggttggcaaaaaggtgagcaggttccttcctgtttctaaggagtgccagatgacactgcggtctcctcgaactaatactgcattccaggagctgttctctctgccagcagaagaatttctcatcagcagttttacctgctgcttgaagcgaaaattgcacacacagggccatctgttcttatctccaagaacaattggattttactcaagcatgtttggccggaaaacaaagtttttctttttatgggaagatattgaagagatacaggcagtacctcaatcaatatcatcatggagtccatcccttgtaataactcttcacaaaggtagaggcatggatgcaaagcatggtgcaaagagcgtcgacaatggaaggctgaagttttgtctgcagtcttttgcatcatttagtgtggccaataggacaatcatggccttatggaaagcaagatctttgagttccgagtacaaaatgcagattgctgaagaacaatcccaaaacaatgatactcttcagagtgaggacagtggaatatttgttggagtcgaggatgcaaagaaccttcagatgaacgaggttttctcctcctcgatttctgccaatatggcctcactaatggaagtgtttggaggaggttcatttgagatgaaaatcatgaataaagttggatgcctaaattattcagccacacagtgggaatcagataagcctgatgaatatcaaagacaaattcattacaagttcagcaggaagttgtctcccattggaggtgaagtgactggaacccagcagaaatctcctatgcccaacaaggcagggtggattattgaagaggtgatggaactacaaggaatccttttcggtgacttcttcacgattcatatacggtatcagatcgaagaccttgctcctaaacagagggcgtgtagtgtacaagtctttcttgggattgaatggtcgaagaccactaggcaccgtaagagaatcgagaagagtgttctttccggttcatctgctcgcttgaaggagatgttcattctagcatcgaagcagctgccacatgccagataagaattctcacctctacagtccctgtgcataatactgaacgactgaacattcctgaccaccagtatgaccccctgtatatatattgcttgattgaagatacggccgattcatttgttagacctcaagagtgggttttgcgtattctgcaatagcttaggcattgtgatcgattttttttttgctttcaatcaggatgccaacccaaagtttgttgtcgtagaccatatatagttgcaattgcatagattgcaggatttagataccataccattcattatactgtgtcaacatgaagtgatggaatataatctgactggatcaaaaaaaaaaaaaaaaaaaaaaaaaaaaaaaaaagggggggg

SEQ ID NO: 27420 - DNA, 861 bp, Oryza sativa
  Clone ID: PAT_MRT4530_32115C.1
cttggcgtcggcgtcggacgcgacgtcggcgcgttcccccttgtcgccgccttgttccccctcgcttttgaacggcgcgcggctccgccgcagcccaccgccgttggcgaacaacccgacgagctcttgcttgtagggaagatacgatctccgacggccgccgctgccgccgccgccgcccttgctgtaatagctccagccgtggcggccggcgtcgcccttgccgacgctgccgccgccgtttgcatcgtcgttgtccttgggcgggtgaggcgacggggcgccgccgccgggggcgttgaggaacacgaacttctccttgccgtcgctgtggctccggcggacgaggcgctcgctgatgcggcgccaccggagcaccgaccccgtggagccgctcttccggcaccgccgcggggacgctggcgtcgtcgacggctgcccgcccggagcccagaggcagtagctctccggcggcaccccctccagctcgccctcgtcgtccggccgccgccgctgcggctgcaccggcgacgttcccgagctctcccgctgcctcgcccggaactcccgctcttccagcagcagccggcccaacggcacccgcagggttgccgtctccggctcatcctcctcctcctcctccaccaccgcctcccgcggcggcggggacatcggccgaccaaacaccgggtacacgggcacgatgaacgcgtccgcggcgaacggcgggacggggaaggagaaacccccaccatcatcctccacctcgtcctccccgtccacagctgcgacggcggcggcggctggtcccggggcgtcctcgtcggcgccgccgcggtggtcgcggtctctgtcctccat

SEQ ID NO: 27421 - DNA, 713 bp, Oryza sativa
  unsure (1)..(713): unsure at all n locations
  Clone ID: PAT_MRT4530_32116C.1
ttttttttttttttttttttgttttttttttgaagaaaaggaatgaacgagcaaggtgacatatcacatcactagaacctcacaacatatgggtaagcagaaattctaactttgtaaaagcgctaccgttggtactaaacaatgactttgcatcagggaaggtataccatcagagccgagttcgataattggtttctcatacaagcaaaatatcacatcctttgtgaaaacaacagtttattacagcaccgcagttgaaattgcgagccgggtgttgatacggcgactacagatggatggtccaaaccatgtgtacagaccatacaaactgaaaaaaaagagtctggtggctgacaaaccaatatgaaaatagctaatcatcatcatcatcaaagtaacgccgctcgttggcttgctttgcacgctcaagcatcttgtcgagatcctccttgagcttctcatcccacttcaccagctggttgacgaacaccgcacccaggcccattcccaccacatgctcccagggatggcgcatgtaggggagcttgcggagggcgttggagtacatctgggtgccgaggcccaggagggcgccgatgatcgtcggcgtcgccggcatcttcggccgccgcgctctcgatttctcctctttctcgaggcggcgtggggggaaggagaggggagacgaagacgagatgggtgggagggggtng

SEQ ID NO: 27422 - DNA, 1193 bp, Oryza sativa
  Clone ID: PAT_MRT4530_32117C.1
aaaatagaaaagatccataccataccggtatgcttgctactagtagtactttatacaagaagatggagtacattacatacatatagttataggtgccattgattgtacgctaggaaacataatctccattcatatatgctacaaaattattagtaacaaagagatgagatgaccgtaacataacaaatatgccagcattgctgcagctcaaggcgttgtcattcccattggggcagccatattccagtctctacccatcatacagccgctgctcttcatctcctctccagcttctttacagattcggtccagcatggcaaggaactccctcacactgccaaaaactctcgccatgtgcccttcgtcgccgctgctcaattcaccatggaagtactcagtcacctccttcacacaagacaggcagatgctctcttgcgcctggagcttcaggatctcctcctctgcctgcctcaggaacatgctcattgtgttgtggaaccgcctcgcgctgtccgctgaggtcaccatgctgtttagcctcaacacgtcgtggatctttccaagccctacgccgagctctgaaacatctctgctgagcttcatcatatcgatggatgaagctttcttggtattgctcagctcagccgcaagttttgacacaacctgaagaccatgttttgggactgtggcctccggtttcacaatttcatggacaacaaattgcaggagagcagccttgccatcagctcctttcacatcaacgatcttcagcagagtgttgggttccatggcatgtgaattcggagatcctgtatcgatactcatcaagttgccaaagttcaaaccagcctcaaggaccttgtggaacaacctgctgtttttcagctcctggcaagctgcctcaagagtagcatatgacattctgagctgattgacctccaaatagaagttggcaacatagagcatagcatccattctcttgaacgcaaatggaatatccagcactgcctttagaaaagcttccacagggcaaagtttggtggatagatcatctttgaaatatttcagtttaagctcttcctcattggtgaggaccatttgcatgagcattcgcaaggcttcaactcccaaaccatgtgcattacctatatccagcagacacaaatccattccaaaggcccccacaataggtg

SEQ ID NO: 27423 - DNA, 551 bp, Oryza sativa
  Clone ID: PAT_MRT4530_32118C.1
gcaaatctggaaacagtacagcaagtatattaagaatgaaatcaaactcacgaaacagagaaaagcttcactcgagatgtaaccatcgttccacataccagtagcacacatggcaggttggcattaacggggctaaataacatctcgtttaattctgtacatatatgtatccactaagcacaacaaatcgtgcgttgataggtcattcgtcaaccatttgctacacttttgagacacagagttgggggataaacacaccggaagctaagctagcgccttcagtttcaagttcaaacctacatgatttttttttcttaacatgaaaaaaagcatttaaaaggaaaagagacgaggtgaaagtaaaaccacttgccatgtccgaagcatccgttcttctcttctttcgctccgatcgcttcgggagacgtgcatgcggcaccgcaagcgacccaccccgccaatgccgcgacggcgaccgtgcgcctcacggccccgggcggttctactcctttatccggagccagtggccgagctgcgtcgggttgacgacg

SEQ ID NO: 27424 - DNA, 1584 bp, Oryza sativa
  Clone ID: PAT_MRT4530_32119C.1
atgatgactacgccggtgatgatgaggagggccggagcgaggcggccgttcgccgtgttggcggcggcggcgccgccgccgccgtcggcggggaggaatcgggagaacgtcgagggcgaggcgatgtcgttctcgcagtgcgttcgtcggtacgggaagccggaggccaagaagggctcggcgaggacgccaagacgtgcgtctccggtggcggaggcggcggcggcggcgtacgacgcgccgcgggcgccgctgtgggtccgattggaggagctgatgaggatcagggccaggctgtcgtctcccgaccacggtggcgagaaggaggaggagtcgtcggggaagaagaggaagaggacgatgacgaggacaaggacgaggagaagcggggcgctgtgggaggccatggcggggctcccgtagcacggcgatggccgcgtgagatacctagtcgacacgttcgagaggctcctctcgctctccagcgacccgggggagcagagcaggaggaggaggaagaagaagacgccggtggcgaggaagacgggctcctcgtggccgccgccgccgactccgactccgacgacgacgagagcggacgagatcgacgtgtcgtacccctccatcgcctcctcctccgaggtctccttccccatcaacggtgtcgtgctcaggagaagcatcgcacgagatgaaccacccaggaggcagaagagatgcagcagcatctgttcgtcggagaggagctggagtaggaagaagataggcgtgacaatccagcgtcctttcaatctcaggaccgagagaagagggaagatgaaagaggagagcttggttcagagaatgaagaacaagctgctggaggaagagaggctgcgcaacccggtcgcgcaaggtctcccatggaccactgatgtacctgagaacccagtgaaacctctggggaaagagcccactgaaccgattgatgttgtgctacatagcgagattcgctctgtcggtcgcgccaggttcgatcaccaagtggccgaacgtaacagcttcctggagaaactgaacatggagagggagaggcagcaaaagctggatgaagagcttgagattaagcagctgaggaaggagcaggtgccaagagcgcatccaatgccggatttttccaagccgtttgtgccgaaaagatattttgttttcattgcaaatccagatcgccgggtgaaaggcgccgaggtgttcgtcggcgggttgccgcggtcggtgacggagcgggcgctccgagaggtattttctccttgtggagagattgttgatttgcggataatgaaagatcagaatggcatttcaaagcttcaaggaaagagacttgctgttgatctttcgttggatcaagatacactcttctttgggaatctttgcaaagactggggcatcgaagaatttgaagaattgattcgcaagtccatgcttgaagatgttgtcgaatcgtgcaactctagaatgatgatgaagatggaaatccatcccttcctcaatgaagaggaccttggagccttcacaaactgttcttcagctcctttggtaccttaa

SEQ ID NO: 27425 - DNA, 6678 bp, Oryza sativa
  Clone ID: PAT_MRT4530_3211C.1
atggtcgaggtcctggaggaggaggaggcggtggcgttcacccccactccatctgggagtggggattctagcgagagccgtggccctcgtcaccaccgccgcgactctccaactcctccccgccacgaaccctcgcggagggaggatcccacccgttcaggtggttcggccctctccccgcccctgggcgaagagaggccacgacgcgtcggggcacggcgccgcctcacttacggtgatggcggctcaccccgaggcacgcttcaggcggcgggcgcccttctgcggcatccccccgtgaactcggagccggagacccctgttcagcgctggctagacgacgtggccaacttggtcaccactgcccagcggcaattggccgcgggcggccgacccgccgccaccggtatgtcgcgtacccccgttaccctctcctcgtcagcaaggaggagggcccgtcagtcggccatggcctcaaggcggtccacggctccaacgtcgtcgggagcctcgggaagccggaggcgtcatgacggtctctacggggagcaggacgctcagatcaatatcgagcgacgccgggacgagcgtcgagctgcccgcatgggggaaggttcctcctcatctagagtgccaggttcctcctcacgaggcggccctccccccacgctcacccctggaggaacgggttgtagggccttcgtggcgagtctccagaatgtccggtggcccctaaagtttcgccccaacctcacggagaaagaagctcgcctccaaggagcccaagaccaccgccgagctcttcaagttggcggacaaggtggctcggaaggaggaggcgtggggaactctccagacaccggtgcggcggccgcggctacccccgagtctgccccccgctctaagcggcgagataggagaggcaaaaggaaaccgggccgctccgatgacgagggccatgtccttgcggctgatgggcccgcacgggcaccgcgcaagggaaaggccaccagcgacaagccgagctccactgctccatccggtgagggccggtcggcagacaagtggtgctcggtgcacaacacttatcgacacagtctcgccgactgccgctcggtcaagaatttggccgagcggttccgaaaggctgatcaggagaagcggcagggtcgacgggagggcaaagcccccgcaacctcagccggtgaccagcgggaggaggccaagaacaaggcccccgccgatgatggcggtgatagtgaggatctggatttccaggtacctcagggaaccgtcgccacactcgatgggggggcttacgctcacacctctcgccgaggcttcaaggccatgaggcgagagcttctggccgctgttccaacgcacgaggtggctcgaaaggcacgctggtcggagaaaatggataggaagaggaaggtggcgcagttccggtccaaccaagggagccaccagcgaccgcgcttcactcccggacagcagggtggacctaccaccctaatcgtccgccagcaacgccctttcaatgccaacaacttccatcagggcgccagtggcagccagaaccaccatggcggtcagcccaaccgcagtgcagctccacgcccaccaatggcaccagcacagacagctccgtccgcgcaagccaagaaggagactgggacaaagccagggtcctgcttcaactgtggcgagcttggccacttcgctgacaaatgcccgaagcctaggcgtgccgggccaaggttcgtccaggctcgtgtcaaccacgcgtctgcagaggaggcacaagcagcaccagaggtcgtactgggtacgtttcttgttaactcaatccctgcaacagtactttttgattctggtgcaacgcattcgttcatttcaaagaagtttgtcgggatgcatgggttaataagaggggaacttagcacaccaatgcgggttcataccccagggaatagctccacttcggtacaattcagcccttctataacaatagaaatccaaagatcaccatttctagccaacctcattcttctggaatccaaagacctagatgtcattcttgggatggattggctgaccaagttcaagggagtcattgactgtgcgaatcgcacagtcaccttgaccaacgagaagggagaaacagtagtgtacaaatcaccaatctcaccaaagcaaggggtctctttgaatcagattgaggtggaaatcccagtggtcaccgaggagaagaattcgaggaaattggaagagattcccatagtctgcgagtacccagaagtgtttcccgaagacctcactaccatgccacccaagagagagattgaattccggattgacttggcactgggaaccgctccaatttacaagagaccgtacagaatggcagccaacgagctagcagaggttaagaagcagggtgcaccggtcatttttgtggagaaaaaggataagacgaagaggatgtgcatcgactatcgcgcactcaacgaggtcacaatcaagaacaaatatcctttaccgcggatcgatgatttgtttgatcaactgaaaggagctaaagtgttttctaagatagacctactatcaggctaccaccagttgagaattcgggaagaggatattccaaagacagccttcaccactcggtacgggctatatgagtgcacggttatgtctttcggacttaccaacgcacctgcattcttcatgaatctgatgaacaatgtgttcatggaatttctcgacaagtttgttgtggtgttcatcgacgacatacttatctattcaaagttcgaagaagaacatgagctacatctccgtctgttactcgagaagttgaaggagcaccagttatacgccaagttcagcaagtgtgacttctggttgtctgaagtcaaatttctaggtcacgttattgcagctcaaggtgtggcagttgatccatcgaatgtggagtcagttaccaagtggaccccacctaagaccgtgtcgcaaattcgtagttttcttggacttgtgggttattaccgccgattcatcgaaaacttctccaggatcgcccgacccatgactcagttgcttaagaaagatgagaagattaaatggacagctgagtgtgacaagagttttgaggagctcaagaagaaattagtatccaccccagttctgattctgcccgaccagatgaaagacttccaagtctattgcgacgcatcccaccacgggcttagatgtgttctaatgcaagagggcagagtggtcgcatatgcctcgtggcagttgcgtccacatgaagggaattatccaactcatgacctggaattggcagtagtggcacgacctacgctcgtggatcaagtcagagccgctcaagcaaatgatcctgaaatagcaaagctgaaaaagaacatgagagtcggaaaagcccgggatttccacgaagatgaacacggcacaatctggttgggagaaagattgtgtgtacctgacgacaaggaactgaaggatctgatactcatcgaggctcatcagactcagtactccattcatccaggcagcaccaaaatgtatcaagacctcaaagaaaagttttggtgggttagcatgagaagggaaatagctgaattcgtcgcactctgcgacgtttgccaacgagtgaaggcagagcaccaaaggccagcaagtttactccaacctcttcaaatcccggaatggaaatgggaggagattggaatggactttataacaggactgccccgaacatcatcgggtcacgattcaatctgggtagtcgtggatcgactcactaaggttgctcacttcataccagtacataccacatatacgggcaaaaggttggcagagctctacttctcgagaatcatgtgtctacatggagtacccaaaaagatagtatctgatcgagggagccaattcacttcaaagttctggcagaaattgcaagaggaattgggaacccggttgaatttcagcacagcctaccatccgcagaccgatggtcagaccgaacgagtcaatcaaatattggaggacatgttaagggcctgcgcacttgattttggtggagcttgggacaaaagcttgccccgccttcgatgcgctcaaggccccggggatgaagctccagtcgtcgctgctgatcattggcgtgactccgagacacacgtcgagctcccggtaacattcggtgactccaccaacttccgcaccgagcgaatcgacttcgatgtggcggacctcaatctgccctacaacgcggtcctgggcagacctacgttagtgaagttcatggccaccaaccactacgcctacctccagatgaagatgccaggccctgctgttcccatcaccgtctttggcgatgtcaaagtcgccctcgcctgcgcggagcaacgcgccgacaacctggcagtggccacggagccgcaggccccggaggccaccgcgtcccgtgcctccaagaagcgcctcacctcggctaatgaggaaagcgcactcgtctccttcctgcgggcaaattctaacgtcttcacatggaagccatcggacatgcccggggtccccagggaggtgatcgagcactgcctcgccgtgcggccggatgcgcgacccatccggcaaaaagtgcgacatcaagccccagagcgacaggccttcatccgagaggaagtggtgcggctcttggaggctgacttcatctgcgaggttatccatccggagtggctggcgaacccggtggtcgtcccgaaggccaacggcaagctccggatgtgcatcgactacacggacctcaacaaggcatgccctaaagatcccttccctctaccatgcatagatcagatagtcgactccactgtggggtgcgaccttttgtgttttctagatgcctactctgggtatcaccagatccgcatggctagggaagatgaggaaaaacctaccttcattactcctgtgggcaccttttgttatacaactatgccttttgggttaaagaatgcaggtcctacttttcagcgcatgactcgtattactttgagtaatcagatagggcgcaatgtagaggcgtatgtcgatgacctggtggtgcagcggcccgtctactttgtcagcgaggcactccgagatgcgaagacccgatacccacaggcccagaaaatgctttatgcagttttaatggcctcaaggaaattacgccactatttccaagcgcatcgggtttccgtagtgacatcctaccctctcggccaaatcctgcacaaccaagagggcactggtcgggttgtaaagtgggccatcgagctggctgagttcgacctgcacttcaaaccacgacacgcgatcaaaagccaggtcctagctaacttcatcgcggagtggaccccagtggacgaacctgttccacccaacgtctccttcctccccagagatgtaaaggacccaaacgccgacattcatggcgggcactgggttatgcatttcgacggctccctcaaccttcaaggtgcaggcgccagagtcacgctgacatcgccaagcggggacgtcctcaagtatgtcatttggctcgacttccgagccacgaacaacatggcggaatacgaaggactcctcgcgggattgagggcggtggccagaatgggcatccaccgtctcctggtcctaggtgactcccagctggtcgtgaatcaagtatccaaagagtaccagtgcaccgacccacaaatggacgcatatgtccgcgaagtgcggcgcatggaacatcacatcgacagactcgagctccggcacgtgccccgacgcgacaacacagtcgctgatgagttgtcgcgtgttgcatcggcacgagccccactccccccggggaccttcgaggaaagactcgcgcagccatcggcgcgaccgaacccctcgagggaccccgacgacacgccctctgccccgacccttggcgactcgcggccctcggggcccgagggggtcgaccccgacccccctcatcaggtcgtttggatgactgacatccgggcgtatctcgacggcaatactcttcctgaggatcgcgcagaagctgagaagctcgcgcgcatctccaagcggtacgtcctcatagaagggaccctctaccggcgtgccgccaacgggatactcttgaagtgtgtttctcgagagcaaggcatcgagctcatagccgacacccatcaggacatccttggaccattcaagacggctcgaggcgggtatcagcacctatacgttgccatcgacaagttcaccaagtggcccgaagcttacccggtcgtcaagatcgacaagcattccgccctcaagttcatcaggggcatcacatcccgattcggagtgcccaaccgcatcattacagataacggcacccagttcaccagtgagctatttgacaactattgcgacgacatgggcatcaaattgtgctttgcctcgcccgcccaccccaggagcaacggccaagtcgagcgagccaacgccgaaatcctcaaaggcctcaagaccaagacgtacaatgtcctgaagaaacacggggattcgtggctcgaggaattgcccgccgtgttgtgggcaaatcgcaccactccaagccgcgcaacggggtaa

SEQ ID NO: 27426 - DNA, 191 bp, Oryza sativa
  Clone ID: PAT_MRT4530_32120C.1
gcgcccacgcgttcgattactcgtgagttcatacactcatcttgttgatattttactgctgtttgcgggcaggcgcacagcttaccaacgattgattacactcttgtagttggttctaaacgaaagcatgtaccaaggagatttaaccctacctcttgttgtgcatgcagtaaaaggtggttgtgtgcttg

SEQ ID NO: 27427 - DNA, 2597 bp, Oryza sativa
  Clone ID: PAT_MRT4530_32121C.1
aagatcaaaattgagatatacgcaatcctattgtgtaccagatgctagtatactagaacatttcttgcttcaatccttcacctgccctcttcctcgctcttgagcatctttgagaatactctcttcatggacatgccgtcgaggtcccccaggttcgcactcacggtggcgtctgtcacgacgcttgagatcgacgagctgcgctgaagcgtcgtgacagagctgtccggcgacgccacctgcagctgcagcgcgtactcgaggcaccagagcacgtcccccatgctcggccgctccacgccgtactccgcgaggcacttctcggcggtgtcggcgaacttcttgagcgagtccggccgtatcgtcccggcaattttctggtccacgatccggtcgagctcgccgtccctgagccgccgcgtcgcccactccgccaggttcaccatctcccggggcagcgtcgggtcgatgacggcgcgggcgcagagcacctcgagcaggacgacgccgaaggagtagacgtcggacttctccgtcagcatctgccgccggaagtactccgggtcgaggtacccgaagctgcccttgacggcggtgctgacgtgcgtcttgtccagctccggcccggtcttggacagcccgaagtcggcgaccttggccatgaagccgtcgtcgaggaggatgttggccgacttgacgtcccggtggatgatcgccttggccgagccggtgtgcaggtagtgcagccccctcgcggccccgatgcacgcctccagcctctgcttccacggcagcggcggcaggtcggagccgtacaggtggctccggagcgtgcccttcgccatgtactcgtacaccaggatcatctcgccgcgctcgtcgcagtagccgatgagcgagacgaggtggcggtggcgcagctgggacagcagctcgatctccgtgcggaactcgttgagcccctgctgcgacagccggttcccgcgcttcacggccacctgcgtgccgtcccggagcgtgcccctgtacaccttcccgaacccgcccacgccgatcaccatctcctcctcgaacccgcccgtcgcctcctgcagcgccgcgaacgggaagcggtacccggcgccggcgccggcgccgttctgccccagcgtgacgacgttgacgatgctgctcctgccgaagctggtgcgagagcgggcgcccagcgcgctcgccgagaacggcacccaggtgttcgacggctgcttcaccggcttcttcttcctccgcagcatcctgacggcgacgcacccgagagcaatcgccaacaccgccccgcccacggccgatccggcgatgatcccggtcttgatctttgagccgcgcggcgacgtggcgccgtcgatggagccggtgctcccgacaattctcatgatctcgaggccgttcaggaagccgccgggcaacgcgttggttgccgtcgatgacccgatgctcaccgtgattgtacccttcgccgcatcactggcggcaaggacgaagtccttatagagcggcgtggcaagaaggctgaacgtgtcgccggaagactcgtagtcttggagaacccgccactggccgacgtagacattgaacaccacaccgagcgtcgccttgctgacgatgtcgcacaagtggagccggaggaggtagtccgagacggccggtgcgttgaacttccacgtcaggttgagctgcgcctgcgtgttgccgaccatcgccgccgtcgtgttcaactccgtcacggtggtgtacaccgcggagggcgccgtcagcgaggtcgcgtagccactttggtacttgatcatcgccggagacacttgattgtgcgccgcgaagctgctctcgtgcaggaaggtccagtccggcagccatgtcctccacagcgtgtcgttgttcggcgtgaccttgggctctcccatgttgatccggtgcaccgtctccagcgccttcgccgtcaacccggtgtactgggactggttccgcggattcaccatcggcgcggtgtcgccgatgagctcgtcgggatgggacaccacctcgatggcgttgacgaacgccaccttcttgcccgtcggcgtgaacgcgatcaccagcgccctaccggtgatgttcacggagaactccctgaccacggccgtgccgttcttgggcgtgtacccgtcgacgaacaccacgccctgcacggacacattgaacgccgcgtccgcggcgaggtcgtaagactggtaccggaaggggaagaagcggaggcggacgaagtggcggccaggcttagcggagaacgcgtagttggccggcgccgtgaacacgcgcgctgactggtacagcgccggcgagtcgtcgccggcgccagtgacctggttcgccggcatgttggcctcggtgctctggggcgccatcagcaccgaggccggcagaccagcgtccccgacgaacgtccggccatcgacggtggcgttcccggacgtgccgcagaggaagaggtagctgtccgccggggtgtacgctcgcacggcggcgcatagcaccgtgacaacgacggcgagctgcacgagcatctcaagaacggttgccat

SEQ ID NO: 27428 - DNA, 381 bp, Oryza sativa
  unsure (1)..(381): unsure at all n locations
  Clone ID: PAT_MRT4530_32122C.1
cgagatccttctcctccctatctccccaaactctccaaacccgcctcctacccatttcgctcgccgcctccgacgccgcggccgccgccaccgacacccatggagcccgcgccgctcgcctcgctgcaggaggagggtgaggatgtttncctatcatatcccttaaaagaagctgcattaagttgatgattcaagtgctgccacaatactggagcatggagtaacacattggaactttcttttgcaacaagctttaaactatggcgtggcctgttggttatttggccgtcaagctattcctggctttccatttttaaacatatggggcaagcattaaaatttccattccctgtagcattgacagcttttacagttcttcac

SEQ ID NO: 27429 - DNA, 376 bp, Oryza sativa
  Clone ID: PAT_MRT4530_32123C.1
aacgaaaatgcaaccaaacattctattttaagggggtacccggacatacgtgaactaacatccttactataaattcacacgtgctgatagcacacctcatagtcctacatccacatcaattgaacaagctcactgagcaaccaaactggtcccagcatacaacagacagccatgatgcacgaacgatcatgcgacgctagcctgcaaaaacaccactttgcgctgtcacgagtacacggaccaatcagcagaccacaccgggaatgcacaaaaacctcttacgcccgctcatgagatcaacggatgctgcattgctatgcacactgctcatcactgaaggaacgccgacggtttgccgccgagctaaacatgaagc

SEQ ID NO: 27430 - DNA, 1560 bp, Oryza sativa
  Clone ID: PAT_MRT4530_32124C.1
atgaacggcgaggaggctccggccgggagcggcggcggcggcggtggaagggcggagatcgacacgtcggcgcccttcgagtcggtgcgcgaagccgtcgaccacttcggcggcggcgccgccgccgtctggagctcctgcctcgtcaaccgcatgctcactcccccgaaggaacatgaccagatgaatgggcagaccttgcagctagagaaggagctcatcatcaaggaaagccagacgcttgatgtgctcaaagaattagagtcctccaaaaggatcatttcggacttgaagctaaaagtgcagaatgattcagccatcactggacacccgggccaaactgaagcaccaggtgcagggcctgaggagaggcgctcttctgaaaatgttgaaactgatggggaattgggtggcctggattcacagaatctgcagcctccaagttcagtgctaatgcagcttgagcaggcaaaagcgtacttgaccagaaccacagctgatctagccgagataagagcctccgttgagtcgctgtgcaatgagatagcaaaagagaaaatcttggtggagagaagtcgagagaaggtttgctccaacacatccttgatctcttcgctggagggtgaattggatcgcactacacataagctgcaaacgctgaatgataggcaaagaaggcgcgaggattcgtcacacattctgatggagatcaagaaggtgacatcagagatagagcagctcaagagcgcatcaaatgcatcgaaatctgaagctacgatgttggctgccgaaattgagcagacaaaggcaagcattgcaaccgctgaggtgaggtgtcttgcagccaagaagatggaagatgcagcaagagcagcagaagctcttgcacttgctgagatcaaggccctacttagcggtgaagcttcagctggagatctccagggtactgatggagtgaacttgtccttggaaaagtattttgagcttgcttcaaaagctcaagagtgtgacgtcagctcgaggaagaagattgaagcggcaatgttgcaggtggaagaagccaaccgatcaaaatccaactcgctcaacaagctggaggaagctaaattggaatttgagaaatgcaaaattgcactgcaggatgctctgaagagggcacacgctgccaatcgggggaagctcgcagtggaagagtctgttcgtagatggctatctgagagtggctacaagaggcactcatttcatgattcttccaagttaaaaaatgcagcagatatcactgacgtttcaaagagcttcttgaagccaacactgtcaattgggcagatattgaatctgaagctaatgggacctgatgggtatgacaaaagcgtttgggatgatacaactgaagcttcaaatgtttcacttggtcagatcctgaaccggaggaatgctgttttctgtaacagtgatataacttctcagaagatattgtcaggaaaaaggaagaaatttgccttcacagggctttcagttttgttggcaaaacaagccaagaggcaagagcaagagaaatag

SEQ ID NO: 27431 - DNA, 2550 bp, Oryza sativa
  Clone ID: PAT_MRT4530_32125C.1
atggcaacgctcgcgagctgccccaagagttgtgggcagatgagcatccactaccccttcggaatcggagcaggctgcttccggcagcctgacttcaacctcatctgcgacaactccactcagcccccaaagctcctcttgcatgatggcaccaccgaagtcgtcggagatgaagattcactacgccggaccaggtatcccgtcagaggtgtgaggatctggcgtagtgattccagtattggcatggacgtaggattatcggagtggatcgatatcaacatttctgccactatccctatggtacctggcgttgctgagtacaattattcatggaaccttagttctttcagtatctttgatgcttctctgaatattactggttgcgagttcgacacatatataatcaacaacaagagctatagtcccactacagcaatctgcaaaagtagctgccccaacaaagagatcactgaaacggtagctcgacaaagctgtaatggtactggatgctgcacaatttatgttggaatagatgttgctaacttgcatctccgtttcgtccgccatggcagagaaggttttcttggagtgaactctagtcgaagctccttatggaatagaattaacatagttagcagttatgccagcgttatgtgggggataaacaatcgaccgacgtgcgctagcgtaaaggatcagaaccaaacggattatgcatgtgcgagcgccaacagtcaatgcgtggacagcatctcatctaccgatcttggctaccgctgtgaatgcaacagtggttatatcggcaatccttatgtacttgatggctgcacacgtgacgaagtactaaatgtgtcaagcgctagtggtgaggtttatgaactttgttcgctgaaagcaggctatcacccagttcaacaaaaggcaaactgctcccgatggtgtgggaatatcagtgttccatttccttttggtctagaggaaggctgcactgcaagaaaattatttgaactcaattgcacaaatgtgacatcttctacgctccaatttaaccgcggtcatgttgtgacagacatagatctcgcagaaggggttgttggcatcaaacttattacctcatattacgtagagcaggtgtttaggatgtacatatcaggagaaccttacctatatgcaagtttcggagaagcagtgatctctgtgcattgggctgctgccaatctgacatgtcaagaggcccagaagaaccactctcgatatgcatgtgttagtgcaaacagcacatgtttaggtgtcaactctactgatggttatgttggatatcggtgcaaatgcatggatggttttcatggaaatccttatgatgctaatggttgtgaagatgttgacgagtgcaagaaaacaccaggcatcttcaaaggcatatgccacaataacattgggagttaccaatgcatggagtgcctagacaaaacagagtatgatgtgacagctatgcagtgtgtttcaagaaaaaaacaaaatcttctgataggtattgtaattggacttagtgttggattcaccattctactctttgtaatgagtgggatgcttcttcttcggagatggaaaagggacattcaaagacaattacgaagaaattactttcgaaaaaatcaaggtcttctattagaacaactaatatcatccgatgaaaatgcgagcgataagacaaaaattttctccttagaagagcttgaaaaggcgacaaataatttcgaccccacacgtatcctcggacgtggagggcatggcatggtatacaaaggaatcttatctgatcaacgtgtggttgccattaaaaagtcaaagataattaagcaagatgaaattgataattttatcaacgaggttgccatcctctctcaaataaatcatcgtaatatcgtaaggctctttggatgttgtcttgaaactgaggtcccactacttgtctatgacttcattccaaatggatcattatttggaactctccatgctgatgcaagcacctttggctatttagatccagaatactaccacaccgggcaattgaacaagaagagcgatgtctacagctttggagttgtacttattgagctactacttaggaaggaacctatttttacaagtgaaacaggtttgaagcaaaacttgtcaaactattttctttgggaaaaaaaggtgaagctgattagggacatagtggctgatcaagttcttgaggaagcaactgaggaagagattcacactgttgcctctcttgcggaagattgcttgagtctacgccgggatgaaatacctactatgaagcaagttgagtgggcactacagtttttgctaaacaaaaggttgaattcatactgtactgttcaagcaaacaaggaagagatggatccctttattatgacaaaagtccaacatagtactgagaattcaaatgttgaatttctgagcaataaagcaactatatcgtcttatcagcctggcttggagcacgagtttatgtcatctgccactataccacgctag

SEQ ID NO: 27432 - DNA, 114 bp, Oryza sativa
  Clone ID: PAT_MRT4530_32126C.1
atggagactatgctggccagccatcaaggacaagtggcaaacttggaaagagggagcaatattagtgaagtttggacggcttcagcagttccgctggaccaacgaaaagattga

SEQ ID NO: 27433 - DNA, 2409 bp, Oryza sativa
  Clone ID: PAT_MRT4530_32127C.1
atggcaacgctcgcgagctgccccaagagttgtgggcagatgagcatccactaccccttcggaatcggagcaggctgcttccgtcagcctgacttcaacctcatctgcgacaactccactcagcccccaaagctcctcttgcatgacggcgtaaccgagatcatcggggatacagattccagttttgacatggacgtgggctcaacggagtcaatcgatgtcaacatttcctccaccatccctatgctatctagcatctctcattacaactattcttggaatctcagttctttttctatcgaatatgttattctgaacattactgggtgcaacttcgacacatatatcattaaccccgacaccgatattcgcacaaggatctgcaggaacagttgccccaaggaagaaatcacagaagcagtggctcgacaaagctgtaatggtactggatgctgcacatatgatatttacggtgttgctaacttgcagctcagtttcgtccgtggggatgaaggtttacttggagggaactctagtcgaaactccttatggaacataatcaacataagaagctggtacgcctatgtcacgtggagcataatcgatcaaccgacatgtgctagtgcaaaggataaccgaacggattacgcatgtgtgagcgccaacagtacatgcatagacagcttcaattctatggaatatcttggctacctttgttattgcagcagtggtttcataggcaatccttacgtacttcatggatgcacacgtgacgaaggatattatccagttcaacaaaaggcaaactgctcccgacggtgtgggaatatcagtgttccatttccttttgggctagaggaaggctgcgctgcaagaaaactatttcaactcaattgcacaaatgtgacatcttctacactccaatttgaccgcggtcatgttgtgacagacatagattttgcagaaggggttgttggcatcaaacttgcctcatatttcgaagagcaggagttcaatattgacgagtgcaagaaaacacctggcatctgcaaaggcatatgccacaatgacattgggagttaccattgcatggagtgcccagacaaaacagagtatgatgtgacagctatgcagtgtgtctcaagaaaaaaacaaaatcttctgataggtattgtaattggacttagtgttggattcaccgttctactctttgtattgggtgggatgcttcttcttcgtagatggaaaagggacattcaaagacaactacgaagaaattactttcgaaaaaatcaaggtcttctattagaacaactgatatcatctgacgaaaatgcgagcgacaagacaaaaattttctccttggaagagcttgaaaaggcgacaaataattttgaccccacacgtatcctcggacgtggagggcatggcatggtatacaaaggaatcttatctgatcaacgtgtggtagccataaaaaagtcaaagataattaagcaagatgaaattgataattttatcaatgaggttgccatcctctctcaaataaatcatcgtaatattgtaaggctttttggatgttgtcttgaaactgaggtcccactacttgtttatgactttattccaaatggttcattatttggaattctccatgctgatgcacgtagtagttttcggttatcttgggatgactgcttaagaattgccactgaggcagcaggagcactctgttatcttcattcagcagcttcagtatcagtctttcatcgtgatgtgaagtcagctaacatacttttagatgcaaactgcacagccaaagtttcagattttggtgcttcgagattggttcccattaatgaaacccatgttgttacaaatgtacaaggcacctttggctacttagatccagaatactaccacaccgggcaattgaatgagaaaagcgacgtctacagctttggagttgtacttattgagctactacttaggaaggaacctatttttacaagtgaaacaggtatgaagcaaaacttgtcgaactattttctttgggaaaaaaaggtgaagctaattagggatatagtggctgatcaagttcttgaggaagcaaccgaggaagaaattaacaatgttgcctctcttgcggaagattgcttgagtctacgacgggatgaaagacctactatgaagcaagttgagttggcactacagtttttgctaaacaaaaggttgaattcataccgcactgttgaagcaaacaaggaagagatggatccctttattatgacaaaagttcaacatagcactgagaattcaaatgttgaatttctgagcaataaagcaactatatcgtcctatcagcctggcttggagcacgagtttatgtcatctgccactataccacgctag

SEQ ID NO: 27434 - DNA, 318 bp, Oryza sativa
  unsure (1)..(318): unsure at all n locations
  Clone ID: PAT_MRT4530_32128C.1
aaaagaacaaacagcttactgtcaatagcgggaacaatgtgggttcttaactgcacataagaatgttgcctggcaagcattaaacatgtacagcaccaaacatattatttcttttgtggtgtggtggtttgtgcagccncatccctcctctcacaccatccccctccatttttttacccataaatatactttgcacctgggtgggtggaaggagacaagtaaccacctttcgaacacttatcatgtttgctttgttgtgtaattaaaaatttttttttaggccgccaaagtcaccctgatgagtttttttggggagca

SEQ ID NO: 27435 - DNA, 435 bp, Oryza sativa
  Clone ID: PAT_MRT4530_32129C.1
atggcggcacatgtagcgtcgcctcccgagttggcaaccttgtggagttatgaagcgaacgtaggtagactagcccaccaccttgtgaagctagctggaaaacccctggaccaattgccactgcaaattgatgatgtgcagcatgcagcatatggggtcttgcagttgcaggcattatggagcatgcacccatgtgatgtgatatattgtgatgggatggatggatggatgagattcgtcggattggaagatctgacagtggagagagcagtgaggctctcttcgacgatctctttcatgcgtacaaggccgaaggttggaaactggggtgctgatgggctgcgtccgcgaagggaggcggcccatgtttgcagcctgcaaagctcccctgaaaggttggcccagattgaagaagtttcaaatcaacaattgtag

SEQ ID NO: 27436 - DNA, 689 bp, Oryza sativa
  Clone ID: PAT_MRT4530_3212C.1
gtctttccaaagtatgagcgccgcctcctcgccgccgcctccctcctcctctccgccgatgcgcagggccaaccaccccacgccgccgcccaactcggagtcggagtcacggccgagctcaagccgcaccaggtcgatggcgtcgcgtggctcatccgccgctaccaactcggcgtcaacgtcctgctcggtgattttttgggacttggcaagaccctccaagcaatctctttgttgagctacctcaagatccactccatctcacctggaccatttttggtcttatgtcctctaagtgtcaccgatggctggctctcggaattcaataaattttgtccttctttgagggttatccagtatgttggtgataagttgcaccgtcgtgatctccggagaatgatgtttcaggatgtccaaaaatcttcatcgtcatctcattccactgagttaccgtttgatgtcatgatgacaacctatgacatagccttaatggaccaagaatttctttcacaaattccttggcactatgttgtcattgatgaggcccaacgtcttaaaaacccatccagcgtactgtataatgtccttgagcaacgctttatcatgccaagacgtctgctactaacgggcacccctatccagaataacctttctggactatgggcattgatgcacttttgcatgccctc

SEQ ID NO: 27437 - DNA, 1572 bp, Oryza sativa
  Clone ID: PAT_MRT4530_32130C.1
ctactgtatgtcagataatatctcattttggttaccatcccccacccacattctcactgcatctttaaccttcttttcttctctcattcgagcccttgacaaagcgtcagtcatatctgagttcagtggcacagcaactttcagcagatcaacgaaaatttcaacctcctcgacatcaccttcatctccaagatacttaagtatcatctcaatcatcccaggcctagggatccaaccagtatttggagcatatacacatagggcattctttgtcagctcatatgctttcgcagcatcacctttctccgcatagccagctgccacaattgcccagctggttgaaggaggcatctttcccttcttcaagaaatcatccagaagtgcctcagccttgtccagcaagtccttctggcggtatccagtgagcaggacatttggaacttggaagtcaaatgcatttccgctcgactcccactctttcagcaacacttcagcttcttcaatctcattaagtttcacgagcactgcaagcattgtagtgtaatccttattaatatgcctattgcagttcgacatttggagcgcccacagcctattgacctctgatttgtcccccagatgtccatacaaggaaatcaggtggttataggaatctgaatcttttatatttatttttgcttctgctttctttaaggcagagaatgctttctcccttatgttgcccttaatgtagttgcttgccacgacagcatacgtgttccaatcaacaacgattttaggttcacactccatctcttcaagggtgttttccatcccgaaaaaatcagcccttgtgccataagagttaatgcatattctgtagctgaaattgtcaggaacgataccattgcttttcatctctgcaattactgaaggaaccttttcatgctgccctaggttcgtatacagacccatgatgttgttgtaggggagtgtggaaaacacaaaacccaactctttcatcttctgaaaatgagccaacgatttttcaaccaggagttcccgtgtgtagcagttaagaagtgcaccatagggtttttctgtcttatctttatctggcaggttgttgaagtaagtctcggctgcactgcttccatgaatttcaccaatcaaatccaggtgaacagcgtgatcctttggcagaaattttacatgtcccttggcattcatccattcagagacctcgagggcctggcggtggcggcgtcgcttgcggagctccttgacgatgcgctcgagctcgacgtggcggaggcggttgcctggcttggccgcccaccgctcgatctccggcaccaggagcgtgcccgggtggcccagcggccacagcgtggactgcaggctcgggggccgcgccggcttcctccccccgctgtggccgcgaggagaggcgggggaggaggcggcggcggcggctcgaatgagggcaggggtggagccatgggatcgcgcgtggccggcggggaggagcctgccgcagccgaggcggatcaggcggcggccggcggcgaggaaggaagaggaggcggccat

SEQ ID NO: 27438 - DNA, 833 bp, Oryza sativa
  Clone ID: PAT_MRT4530_32131C.1
cagataaacagagaaaaagaacaaaacgcgacgagcaaaaacaccgtggcgtggcgccgcgcggtcggctccggcgatctcagcggcggcgccccaccatctccggccgccatgccggtgccctcctcccccatcttgcccacgtcgttgaacgcctgccccgtcatctggtccgccgccttcacccgcatcatcacctcctccgccgccgcctccccgccggtgttcgtcgccgtcgccgtcgcggcggctgttcccttgttcccgccggcggcagcctcggcgcgcttctgctccaccacgtcctccggcatcgtcatcttctgcctgaacgcctccgccgcgctcgccgccgacccgtagatgttctccgtcgccgacctccccctgcgcacgagcacgacacgtcccggattctcctccgacgacggctgaggctcgctccgccgccgcgcctcctcggccttctccgcggcgcgccgccgcacgtcctccccgtgctgccacgcggactcgtccgtctcgcccttcctcgccgccgcggatcccgcgagcgcgcgccgcgcgccctccgccttgtccgccgcgaagcccttcgcctcggcggccttcccctccccggcggctgcgcctgcgccagcgccgccgctgccgggcccggggatcttgtcgcggacggcgccgaggagggaccgcgcgctctcctgcacggtgcccagcatgccgcctccgccgccgccaggctcgtcccgcctggcggcgtggagctcgtcggccgccctgtgcgccgccgcctccgcgcgctcctcgcggctcttctgcatggacgccat

SEQ ID NO: 27439 - DNA, 1180 bp, Oryza sativa
  Clone ID: PAT_MRT4530_32132C.1
cgccacctcatccacagccatggcgacctcctccgccgccgccgcgctccggcttcccgcctcccagctccccctctccgcgcgcccctcctcctcctccaccctccgcttccctccccgccgccccgcgcgccggggaggcctcgcggtctccgccttcacgaagctctccgaggcgtcccccgtcgccatcccaccggagcccgcgcagccgttgccggacgaggaagccctgccccccaagcccggggtctacggggtgtacgaccccgccggcgagctgcagttcgtcgggatatcgcgcaacgtcagggccagcgtcgagggccaccgccggaaggtgcccgccgacctttgcggctccgtcaaggtttcaatagcagatgaggagacaccagatcgaactgtcctgactaatgcctggaagtcatggttggaagaacatataacagccaccggaaaggcaccgccggggaatgttgctggaaaccacacctgggttggacctccacagaggcctccggacttgcgattgacacctggccgccatgttcagctaaccgtgccactggaacaattgattgatcggttagtgaaggacaacaaagtggtcgcgttcatcaaaggatcaaggagcgcaccccagtgcggtttctcgcaaagggttgtgggaatcttggaatcacatggagtagattttgtaaccgttgatgttcttgacgaggagcacaaccatgggttgcgagaaaccctgaagacatacagcaactggccgactttcccacaggtttttgttggaggggagcttgtgggtggatgtgacattgtttcatccatggccgagaagggggagcttgctgccctttttaagaaataggactcactctggagtgcttaagtaatgccttgaactactgttacctgatgcgaatcgctagcttggcagctaccatcattttacatgctgcagtaatgcttcatttactgcaaggcacattggtttggatcagttatacatatacacgtttctttgattcagatgaggaaatgctgtaaattgtaatatggtggttgctttttgagagaggatttgcaagggccagagggctgtcagtattttgtggtcgtttcagattttgtacgtgaaaatttgtatcgttatgagaaaaaaaaaaaaaaa

SEQ ID NO: 27440 - DNA, 274 bp, Oryza sativa
  Clone ID: PAT_MRT4530_32133C.1
ggccaggaaaccaggctaaaaagcctttttatttaaattcccgggccgcccagctaaaaaaaatcccataggggtcggaaacccttgggcaaacttaacaaacaaattcaaaagttaggaaagatttctacaaaacatgctgccgggcaaagggcaagggtaaaaaataaggcccagctttctcatggggcacccccccaaggcgacccaaaatccccgccccaggggaaagaaaagaagggaaatccagacgagcaaacaagcccggccccgg

SEQ ID NO: 27441 - DNA, 369 bp, Oryza sativa
  Clone ID: PAT_MRT4530_32134C.1
atgtggctagcaggcgcggtggcgggtgagctggcgaggggcggcggcgggtgtgtggccgagggttggcagcggccgggcgggcgaagggcagctggcgaggggcggccgcgggcgtgcggcggagggtcggcggcggtgggtgtgtggctgagggtcggcggcggccaggcggatgggcgaggggcggcggcggacaaccggacgagggcgcggatgggcggggaggaggcagacggcgggaggagaagctcgagggcactgctgcgggtgttcgacggtgggaggagaacctgggcgcgggtggctgacgacgggagctcgtgctatcgcgaaacctccagatctgttcctggatccaaacagtag

SEQ ID NO: 27442 - DNA, 262 bp, Oryza sativa
  Clone ID: PAT_MRT4530_32135C.1
gggcgtgcgtccacgcgtccagccacgcgtccgcgccattgcttctcacctctgctttgcatccatccatccatcagagatcaggtagaacagagagagtgaggtgcagaaaaattagagctgaagctgaggatggctacatccattttcacctcggcggtggtggcgccggcccgggccaagggcctgtcgtacatctcccgccggggatccgccttaaccatacgctgcaacggtggtaagaagatcaaaaacgacaagc

SEQ ID NO: 27443 - DNA, 478 bp, Oryza sativa
  unsure (1)..(478): unsure at all n locations
  Clone ID: PAT_MRT4530_32136C.1
tggatcacgtattccgtctctcaaaactacaacaacagtcttacccctacatggcccaaagcgcgacttcacagcgaacgtataccacctaggaaatgatgctcaactccagcatctcttggaccctacccgaacaccccggctcaccctcggaatacgagaccacctacgaatgcgcttgacatatggtgcgaggactacgcccactactacaacgtgcatgcatgacgtgcagacaacccagcatcgtatacgctccataatggcactcccgatggaccgagattatctgaaggccatggaacagttggagtacatcccatctaatacgacatgacnctcatggagcagctccacaatgtaccagccgatggacacatatttgctcagcgagtttcccatgctgacctgggtcctgcctccgacaatactatgatgaagacgagcccaattgacccaaagaatgagtcgacgacga

SEQ ID NO: 27444 - DNA, 154 bp, Oryza sativa
  Clone ID: PAT_MRT4530_32137C.1
cggatccaagcgagggtcaagacccgcaggacttcgaccaacgcaagtcatcaccattctttgaacatgtgcgctaccgtgggacagccgttgaggtagggccgagaggcgtgccctacatcggtgtcgccatgggtaggactgccatgagtgc

SEQ ID NO: 27445 - DNA, 543 bp, Oryza sativa
  Clone ID: PAT_MRT4530_32138C.1
atgatcagcgccaagagacttgttcagctggccaagaagtggcaaaggatggcagcccttgggaggaagagggtcatggcagcagctcaagaaactgaagaatgctccacttctgtagcagtcaagggccattgcgtcatgtacacagctgacgggaggcggttcgaggtcccattggtgtaccttggcatgagggtcttcattgaactcctgaggatgtcccaggaggagtttggcttcacgagcgatggcagaatcatgctgccttgtgatgctgcagagatggagtatgccatgtgcttgctcaagagaaatgcctcagctgatgtggtgaatgcattgctaagctctatgctgacatcttgccgctacactgactggaacatcgcacatgatgtgctcatgaccttgtctccttacccagcgtttccaaccatgcctaacttggctggatacctccttctctccaactataaatccatggctaagtggcctccaaacaccatcacttcatccacgaacaaagcactgcaactcaggtag

SEQ ID NO: 27446 - DNA, 402 bp, Oryza sativa
  Clone ID: PAT_MRT4530_32139C.1
atgtcacctttgagccaattcaggtctgaacagcacaagagaaagttctcagaaaaaggaggagcaacacaagagaagacggtgcacggatgggagaacaccggtgaacaccaaaggctcgacggagtggtgacggtggcagaccagcgaggcgagttgggaagcaggtccatgtccattggaaggctcgacggggtggagatgctcgcagaccagcaaagcgtgttgggcagcgggtccagcggaagggaggaccacctcaaagatgaacatctatatgctttcaaaaggaaaaaaaaatctataatcgatttgcactcgggttcacatgtacctacaatctacatcgttgatgtgttccaagattcgtactgcaaaatgtacctaatcttaaccaaatga

SEQ ID NO: 27447 - DNA, 438 bp, Oryza sativa
  Clone ID: PAT_MRT4530_3213C.1
atgaagcgtgtcctggttgacgggggggccagcctgagcatcatctccccagccgccttcgatgcgctcaaggccccggggatgaagctccagtcgtcgctgctgatcattggcgtgactccgagacacacgtcgagctcccgacctacgttagtgaagttcatggccaccaaccactacgcctacctccagatgaagatgccaggccctgctgttcccatcaccgtctttggcgatgtcaaagtcgccctcgcctgcgcggagcaacgcgccgacaacctggcagtggccacggagccgcaggccccggaggccaccgcgtcccgtgcctccaagaagcgcctcacctcggctaatgaggtgcccgtcaaggagatcccccttggcgatgatccgtccaagaccgccaaaattggtggaaccctggacgccaaatag

SEQ ID NO: 27448 - DNA, 2047 bp, Oryza sativa
  Clone ID: PAT_MRT4530_32140C.1
gatgagtcacttgtgagagtcctaactggccctaggctagcggagaccaacacctctgatggtccaagctattccttccctggcctcgccgccttgcccgcatccgtcgccgtccgtattcgctcgctgtcgccgccttgtccgccttctcagtcgccgtccgtctcctctgcccgcgtcgccttctccgcccccctccgtcgccgtccgcctcccccgccctccctgccctcgccgctgtctcctctccctccgtcgccgtacgtctccctcaccccttccgttgccgtccgtcggcccggccctctcccccctcccccttcggttcgcatctggtcggaggcaggcaccggcaggcggcggcgcggccggcggcgctgccagcggctgggcgcggggaaatcatcaggtgaggtttgacataatgtcttcgagctatgtgagcctagaggatcaggaagagtataaaatgataggtactgtggttttttcaagcgaggaggaaagttacaaagagttgaagcactttgagaggacagaccagaaaagggagccacgggcactgatccgctgtggttacttagctaagattgagattgactggaacgaggagaagggtgtgtggtttgttcaggagtttgataaccaacatacgcacgaacttgcaaatccttaccatgttgcttttttaggagttcatcgtgtgatgagtgattctaagaaagcccaagcggttgagcttcgcatgagtggccttagaccctttcaaatcatggaggttatggagaataaccacgatgagtcagacgaggttggttttgtgaggaaggacctttataatttctttactcggtatgagatgaagaatatcaagggtcgtgatgctgaagatgtgttgaaatatctaacaaggaagcaaaaagaagatatagattttttcttcaaatacaccacggatgagggagggcgtcttaggaatgtgttttgggcagatgttgaatcacgtttagactatgctgcttttggtggtgtcgttattttcgatagcacttaccgtgtgaacaaattgtgtacttggcatatagaggagaatatgagtcgtcaccttcgtaagccaaaactcgatgagctaagaaaattaatttatgagagtatggatgaggatgagttcgagagacgttgggctgaatttaaggagaatggaggcacgaggaatggtcaatggatcgctctgatgtaccgactaagggagaagtgggcagctgcctatacagatgggaaatacttgttggttatgcgcagcaaccaacgtagtgactcactaaactcaaagcttcacacccttctgaagagaaacatgtcactaatgtacttagtcaaacatgttaagttgtgcatacaacgtctgcgtaagaaggaggctcagttggacgctaagtctatcaattcggtccctttttgtagaatagacgctgacccattggagaaatacgctgcccgtatatacacagcagtcgtgttcaagaaagtccgtgcacagatacggctaattgctggacttgaagtcatcagtgggactaatcaagatggttcgtcactgtatgctgttggtttgaaggacgataatgaggtgtgggatgaagtgagggttacttttagaggccaggctttggaaggtgtggaatgtcactgttgaaagatggagtgcgaagacatcccttgctcacacatttttgttgtactcaagttccttggtcttgacaccatccctcgttgttgtgtcatggataggtggacaatgggagcaaaggcggcatttaggtcatacaggaataccgatcctaatgtgtggtctgaacacatggttcgttatcgtagcctccgaaatctgggtagtgatgctttctttgaggctgctaggaaccctgagcagacagaaaaggcgatggatttcttaaagggggttttggataaaggatcgtcatcccatgacgaaacaacatactataatctaggtccaatgaatctaagatacagtacacgcaat

SEQ ID NO: 27449 - DNA, 3729 bp, Oryza sativa
  Clone ID: PAT_MRT4530_32141C.1
ttattggttatttgtgtgcaatgtctcacggaatggccttcgtctcttcgatggagctccttttgccctaatctcttcaggatcaagtactctcttctctaatggctggttactagacgaaaagtgagttggcataggaccaaaatctccggccacgatgttctcatcggatgacgatcctttatccaaaatcccctttaagaaatccatcgccttttctgtctgctcagggttcctagcggcctcgaagaaagcatcactacctagatttcggaggctacggtaccgaaccatgtgttcagaccacacattaggatcggcattcctgtctgacctaaatgccgcctttgctcccattgtccacctatccacgacacaacaacgagggatggtgtcaaaaccaaggaacttgactacaacaaaaatgtgtgagcaagggatgtctttgcactccatcttccgacagtgacattccacaccttccaaagcctggcctttaaaagaaaccctcacttcatcccacacctcattatcgtccttcaaaccaacaacatacaatgacgaaccatcttgattagtcccactgatgacttcaagtcctgcaattagccgtatctgtgcacggactttcttgaacacgactgcggtgtatatacgggcagcgtctttctccaatgggtcggcgtctattctacaaaaagggaccgaattggtagacttagcgtccaactgagcctccttcttacgcaggccttgtatgcacaacttaacatgtttgactaagcacattagtgacatgtttctctttagaagggtgtgaagctttgagttcagtgactcactacgttggttgctgcgcatacccaacaagtatttcccatctgtataggcagctgcccatttctcccttagtcggtacatcagagcgatccattgtccatttcccgtgcctccattctccttaaaatcagcccaacgtctctcgaactcctcttcatccatactctcataaattaattttcttagctcgtcgagttttggcttacgaaggtgacgactcatattctcctctatatgccaagtacacaatctatggtaagcacccggcattaccttactgatagccttcgccattgctaggtcgccatcggtaattaatgattttggatgcacttgacgcattgcctccaaaaaagtctcaaggagccaacagtaagagttgacagactcatttgatagaattccgcacccaaaaattgttgtacttctgtggtggttaactcctatgaaaggaatgaaaggaagattgtacttgttcacacggtaagtgctatcgaaaataacaacaccaccaaaagcagcatagtctaaacgtgattcagcatctgcccaaaacacattcctaagacgcccttcctcatccgtggtgtatttgaagaaaaattctgcatcttcttcttgcttccttgttagatatttcaacacatcttcagcatcatgacccttgatattcttcatgtcgtaccgcgtaaagaaattataaaggtccttcatcacaaaaccaacctcgtctaactcatcgtggttattctccataacctccatgacttgaaagggcctaaggccactcatgcgaagctcgaccgcttgggctttcttagaatcactcatcacacgatgaactcctaaaaaagcaacatggtctggatttgcaagttcgtgcgtatgttggttatcaaactccttaacaaaccacacccccttctcctcgttccgctcaatctcaagcttagctaagcaaccgcagcgggtcagtgcccgtggctcccttatccgctctgtcctctcaaagtgcttcaactccctgtacccttcacatgagcatacgaattgcctccatataatttcaccgtccttccgtttaaggttgtttttcctcacactgaaacccttcccctttgcatagtctaaatagaatttgtaaccttcctcctcgcttgaaaaaaccacagtacccatcattttatactcttcctgatcctctaggctcacatagctcgaagtcattatgtcagacctcacctgcgatgcgaaccgaagatgcgaaccaatgcgatacggacggcgacggaggcgggcaaggcggcgaggttgggggaggaattgggggacggtatccacacctgcctttgtcaagcaggaaatagaccttcgtagctcggcttttaagccaccttgatctgtatttttattttgctcgctctggtctgtattgcacggattttcttttctcaaatcaaattccggcagagctcctgccgtcggtttccaaacacccgcatctctcatgctatacacaaatgtatcataaggcttccaatcatcagggacaaagtagatatggtcaccttcaactccatgatgtagaccagcaggaaaggacttgcagccacctaagccaacaaagatacagtcaccattcaagctgtgaatctcagttagtccataagggtttgtgttaacatccagtgcaaacacttcaactttaagaacttctcggtcacggtaattgtcgctgtagtgtctgatgattaataatagctctccacgccacacaaccatattacaacttattgcaccacctccctggtagggatgatggagaggcagcgcactcagacaacgcttaacgcgagagaccatgagcccaccattgtcctccccaacttcaaaagcaaagaggcgtatcttatatctttggagcacatacagcttcccaaggtaaaaagtgagatctcttgggccatcaatgtcaacgccagcgcaaatatgccatgaaatcatcccaggctgccagagagcaagttttgatgcacacttgtggtcagaggaagcagctacaatgtacttgcctcttgagtcaggtgaagcagatagtgccacattgcatagtgacattgtgtatatatcattgacacgaaaatagacctcaccagaaccattgatgatgcggagggtcttactggagtaagcaggaaaattgtaacgcatatggcacagctgcggtaggcggatgaccttgcgagagaaaacattcaccaggaagcagtcaccatcggcatctctgttgtactcgtcgctgcgatccttgttaggagtcacacctacaagccatccatcaaaataacccacacatcggagatcatcagctgcaacttccttaggcaccggcacgcaccgcacaggcatcaaatcccccttatctgataggctcgagaacttgaaaccaggaagcatcagcaggggcagcggcggtggcaggacgtggccgttcgcgctggctcgccagtgacggcacacggaccgcatcctcgcacggtcggcaaggcatggaaggaagtggagcacgattcccagaatgtccggttgaaggcctgcccacagtgacacccccgcgtccaactctaaccttgatctcttcttgggcattccgccgagcaccacacagtgtctgtcgaagccgtgttccatcgccgccggtgacgggctccgggggcatcctcgatccgacgaacggggaggcatttcgtcgaacagcttgcctgagtttcctccggcagaatccatggcgaccggaggtttcatagcggcggcctaggggaaggagatggggagagagtcaccgaagcgaagggggtgagcggatggctaggcttttgtcccggccgg

SEQ ID NO: 27450 - DNA, 357 bp, Oryza sativa
  Clone ID: PAT_MRT4530_32142C.1
cgcataatcattatctttaaaagcatacgattatcagcgccgtcaacataaaggcagtggttcaatatctcctcatatctccctggctcgcacttgacaagaatccttatctcctaacatgccctcaacccaagcatacatttaatcaaatggtgcacaatgtttaacacaccttctgcatataagaatgctatatctagtgcgatttgacttactcctgcactatgttaaggccctaagacttttcaccatactccttcacatccactcatgagcactccacaaccttacttgcctagcccttagaggcaatcttgcaaagccctccccactcgccacgagttctaacactaggca

SEQ ID NO: 27451 - DNA, 1180 bp, Oryza sativa
  Clone ID: PAT_MRT4530_32143C.1
tccgctgccctcgtcggtgtcactgctatcatctggtttgaatttagggcgacgctccggtgcaatatacttgaagtgtggataccgtcccccaattcctcccccaacctcgccgccttgcccgcctccgtcgccgtccgtatcgcattggttcgcatcttcgggtacagggagttgaagcactttgagaggacagagcggaaaagggagccacgggcactgacccactgcggttgcttagctaagcttgagattgagcggaacgaggagaagggggtgtggtttgttaaggagtttgataaccaacatacgcacgaacttgcaaatccagaccatgttgcttttttaggagttcatcgtgtgatgagtgattctaagaaagcccaagcggtcgagcttcgcatgagtggccttaggccctttcaagtcatggaggttatggagaataaccacgatgagttagacgaggttggttttgtgatgaaggacctttataatttctttacgcggtacgagatgaagaatatcaagggtcatgatgctgaagatgtgttgaaatatctaacaaggaagcaagaagaagatgcagaatttttcttcaaatacaccacggatgaggaagggcgtcttaggaatgtgttttgggcagatgctgaatcacgtttagactatgctgcttttggtggtgttgttattttcgatagcacttaccgtgtgaacaagtacaatcttcctttcattcctttcataggagttaaccaccacagaagtacaacaatttttggaatagacgccgacccattggagaaagacgctgcccgtatatacaccgcagtcgtgttcaagaaagacgataatgaggtgtgggatgaagtgagggtttcttttaaaggccaggctttggaagtcaagttccttggttttgacaccatccctcgttgttgtgtcgtggataggtggacaatgggagcaaaggcggcatttaggtcagacaggaatgccgatcctaatgtgtggtctgaacacatggttcggtaccgtagcctccgaaatctaggtagtgatgctttcttcgaggccgctaggaaccctgagcagacagaaaaggcgatggatttcttaaaggggattttggataaaggatcgtcatccgatgagaacatcgtggccggagattttg

SEQ ID NO: 27452 - DNA, 171 bp, Oryza sativa
  Clone ID: PAT_MRT4530_32144C.1
atatcagatatgctctagatacatatcttgtgtgtatatagccggacggctttgctattcacatacttcctcagcccaaacgactacgtttgtaagtactcttaacaactaataacccgatcggacgacgggacgggacacgacgacttacttaccactactgtgttaacg

SEQ ID NO: 27453 - DNA, 1344 bp, Oryza sativa
  Clone ID: PAT_MRT4530_32145C.1
atgagcgacggggcgcgcgtggaggcggcgccgcggctcgcgcaatggcgcgtcgacgtgctcccctgctacacctaccgcaagtccgagcccttccgcatcggcctctggaactggtacctatctgtggagagaaataacaagcaaacttgtgttaagaagaccatagttcatccaggaatttttgacaagccgctgaaacacgaaggttttgtgtgggcaattgatagtactgttacaggaagatttgtgattgagatagagtttcttgacctgaaaattgcagatccatcttacaattcccttactggctctaattctgcattccagggtggtgaaccagcctcaatttgggcttcccaccaaatcaagaaatcttcagacaacactgcactgtcatccttggcgagaatgctgcaagaaggcatcctcaccgacatcacaatcaacgctaccgacggcagcattatggcccaccgtgcaatcctggccagccgttcccctgtcttcaggagcatgttctcgcacgacctcaaggagaaagaactctcaacagttgacatctctgacatgtcccttgaagcatgccaggccttcctcaactacatttatggtgacctacgcagcgaagagttcctcacccacaggttagctcttctcagagctgccgataagtatgacatctctgatcttaaggaggcatgccatgagagcctgttagaggacatcgacacgaagaatgtgctcgagaggcttcagatggcgcacttgtaccgattgcaaaagctcaaggatggctgcttgagatttctggtagatttcagaaaggtgtatgaaatgcatgacgatttcaaggtgttcctccagacagcagacagggatatcatagctgaaatcttccaaggcactggagcaacgacggcggcggtgctcgggctgagctccacggcctcctcgccgatggcgacccacgcgcggcgagcggcggaggcgcgggtgtggcgcggcggcctgcgagcgacggagacgcgggagtggcggcgcgcccccacgcgacgtgacggccccatctccctcgatggtcgcctcgccggaatagtactaagggcacgcagccgcaactcgtcgccgcaccggttgaatccgcgtagctcgagcggtagcggcgtctacgggagcggcggcggaggtgggcgcgctgatgagaccgccggtcttaagggcgacccttacgcggttggagtcgatgccgtcatggagttccccggcagcccgtcgtacggccccgaccgcgtcatctacctccgcccgctctccggtgagttccccggctactacggctga

SEQ ID NO: 27454 - DNA, 2061 bp, Oryza sativa
  Clone ID: PAT_MRT4530_32146C.1
atgcatggcatcaggtcagaggcaggcaccggcagtcggcggcgcggccggtggctattcctcccggcaggtggcgtcgcggccggtggcgcggtgcggcgcatctgtccgacgcaagcaccggcaggcggcggcactgccagtggctcggcgcggcgaaatcctcaggtgaggtttgacataatgacttcgagctatgtgagcctagaggatcaggaagagtataaaatgatgggtaccatggttttttcaagcgaggaggaaggttacagattctatttagactatgcaaaggggaagggtttcagcgtgaggaaaaacaacttgaagcggaagacggtgagattatatggaggcaattcgtatgctcatgtgaaggggtacagggagttaaagcactttgagaggacagaccagaaaagggagccacgggccctgacccgctgtggttgcttagctaagcttgagattgagcggaacgaggagaagagggtgtggtttgttaaggagtttgataaccaacatacgcacgaacttgcaaatcctgaccatgttgcttttttaggagttcatcgtgtgatgagtgattctaaaaaagcccaagcggtcgagcttcgcatgagtggccttaggccctttcaaatcatggaggttatggagaataaccacgatgagtcgggcgaggttggttttgtgatgaaggacctttataatttctttactcggtacgagatgaagaatatcaagttttgtgatgctgaagatgtgttgcaatatctaacaaggaagcaagaagaaaatccacaatttttcttcaaatacaccacggatgaggaagggcgtcttagtaatgtgttttgggcagatgctgaatcacgtttagactatgctgcttttggtggtggtgtcattttcgatagcacttaccgagttaaccaccatagaagtacaacaagttttgggtacggaattctatccaatgagtctgtcaactcttactgttggccccttgagacttttttggaggcaatgcgtcaagtgcatccaaaatcattaattaccgatggcgacctagcaatggcgaaggctatcagtaaggagaatatgagtcgtcacctacgaaagccaaaactcgatgagctaagaaaattaatttatgagagtatggatgaggaggagtttgagagacggtgggctgattttaaggagaatggaggcacaggaaatggacaatggatcgctctgatgtaccgactaagggagaagtgggcagctgcctatacagatgggaaatacttgttgggtatgcgcagcaaccaatgtagtgagtcattgaactcaaagcttcacacccttatgaagagaaacatgtcactaatgtgtttagtcaaacatgttaagttgtgcatacaacgtctgcgtaagaaggaggcccagttggacattaagtctaccaattcggtccctttttgtagaatagacaccgacccattggagaaagacgctgcccgtatatacacaacagtcatgttcaagaaagtccgtgcacagatacggctaattgctggacttgaagtcatcagtgggactaatcaagatggttcgtcactgtatgttgttggtttgaaggatgataatgaggtgtgggatgaagtgagggttacttttaaaggccaggcattgaaaggtgtggaatgtcactgtcggaagatggagtgcgaagacatcccttgctcacacatttttgttgtactcaagttccttggttttgacaccatccctcatttttgtgtcgtggataggtggacaatgggagcaaaggcgacatttaggtcagacaggaataccgatcctaatgtatggtctgaacacatggttcgttattgtagcctccgaaatctgggtaatgatgctttctttgaggccgctaggaaccctgagcagacagaaaaggtgatggatttcttaaaggggtttttggataaaggatcatcatcccatgagaacatcgtggccggagattttggtcctatgccaactcacttttcgtctagtaactag

SEQ ID NO: 27455 - DNA, 2135 bp, Oryza sativa
  Clone ID: PAT_MRT4530_32147C.1
ccgcgtgggcgcgcccccaccgcctcctcctcctcccatcccccttgcgcccggtccaccgcgcctcgccgcgccggcccaccggggccgcccgcccctgccgggggtggacggacggggtcggccgcgtcggtcccccacccgcccccccacccccaccaccatcgttctccttctcttctccctctcccacctttctccccccgcgcgcccgatccttcccttcccccaactccctctcgcatttcccagctcggatcctcttctgacttctctctctctctccgtctgtctctctcctctttcgaggtcttcagtcttcagtgttcttgacgaccttgctgcttcttgcctctgtttcgcctcctacttgccgtcttcttcttcttcttgctgctgctgctgctgctgctgaatttttcttcggtcagttagtcggtcaggccggtgccggtctgggagcgattccgccggacgcacgcatcaacagtggagggaggggaggggaggagcttcccctttttgatctagcaagtcgtcgtctccaaaaatacacttttttttgttgggtctttggaacaaaagggtctcctccttttgatctttctgtctcatcactaaattagcaaagctttgtgcttcgcggcgatctcttttcagctaattcagtctctgttgatagcttcgttgcccaagagagatcccccatgtcagaggcgagcggatgacaccgcaattcgggtccggttcttccgcctgagctgcagaattttaagcttcctccgtggtgccgccatggatgcccttcctgacgccgccgacgcggcgcagttggcggcggcggcggcgccgccgcagaagcgcgacgagtggagcgagagcggcattgtgcggctgctggaggcgtacgaggccaagtggctgctgcggaaccgcgccaagctcaagtggagcgactgggtcgacattgcccacgaggtgtccgcccactgcgccatggagaacgccgccgccacggggaagcccgggagcagcacggccaagacgcccaaccagtgcaagaacaagatcgagtccatgaagaagcggtacagggcggagtccgccgcggcggcgcgcgccggccccgccgccgccggtgctggcccgtcgtggcggttcttcgcccgcatggacggcttgctcaaaggccccgccggctccggccagccgcaggcggagttgagcaacagcatagacctgcgagctcctcctcctgcaaaggttgaggtcgatgtcgatgcagatttcgtcagtcagttagctgatgcagggccgggtgcactttctgaattggtgagtgcatatgcaaacggctcgattcaagagaaattggacaaggttgagaacagtgggcatgttgaggggagagctgcagagagtgatgtcaatgtgagctctccgaggatcaaggaggcgaacgaggatgccgaggaggtggacaaggtatgggacatgtccaagaagaggaagaacacggagtttgatatcgcgaagagcatcgagttgctggcaagctcattcttgaagattgagcgcgcaagaatggacctgtacagggaaacagagaggatgagggttgaggctgagattaagaagggtgagatggagctcaagaggacagagattatggcaaagacgcacttgcagatcgctaagcttttcgcaaagagattgaaggagtgcagcagcaagactggtggtagctcatctgtaacagctgaagtggacaaccatgccaagaaaggagaaaatggttcagggtgattgaaacaccaactgatcgtccagaatccagaaagcaggcttgtagtttttggtgttcttgtgcaccaaatgtatgtctttgattgatccgacttcaccatgtacgaagagatagttagctgtaaaagtaaaatgcaataaatgatatgattgtccccattcagtgggggattatagaagcagttttagaatcagtaactagcctgaagaaagttgttgagttccttttgttaatattttttgactgacagccatcgtatgtatcattctactttttttagataatggattttcattaatccggccccaaaaaaaaaaaaaaaaaaaaa

SEQ ID NO: 27456 - DNA, 533 bp, Oryza sativa
  Clone ID: PAT_MRT4530_32148C.1
cgcgtggaggcggcgccgcggctcgcgcaatggcgcgtcgacgtgctcccctgctacacctaccgcaagtccgagcccttccgcatcggcctctggaactggtacctatctgtggagagaaataacaagcaaacttgtgttaaggtctttgcggagttatcgaattctgccaagaatacaaccccagcccctattgcttgcttcatcacaaaacttctcatatcttttcctccaaatcagaagaccatagttcatccaggaatttttgacaagccgctgaaacacgaaggttttgtgtgggcaattgatagtactgttacaggaagatttgtgattgagatagagtttcttgacctgaaaattgcagatccatctggtggtgaaccagcctcaatttgggcttcccaccaaatcaagaaatcttcagacaacactgcactgtcatccttggcgagaatgctgcaagaaggcatcctcaccgacatcacagtcaacgctaccgacggcagcattatggcccaccgtgcaatcct

SEQ ID NO: 27457 - DNA, 1029 bp, Oryza sativa
  Clone ID: PAT_MRT4530_32149C.1
atggatctcaactatcctatccagcatcaagaccaaacccggcagccatcatgcaggcaagctgttcgacggaatgcatctttgcttgtcggaacaaggatccccgcggacccagtcgccggcggcggtggatcccagcttggacagatccggtgtggtgctcggcggaatgcccaagaagatgtcaaggttggagttggacgcgggggtgtcgctgtgggcaggccttcaaccggacatactgggaatcgtgctccacttccttccatgccttgccgaccgtgcgagggtgcggtcagtgtgccgtcactaacgagccagcgcgaacggccacgtcctgccaccgccgctgcccctgctggtgcttcctggtttcaagttctcgagcctatcagacaagggggatttgatgcctgtgcggtcattcgcctaccgcagctgtgccatatgcgttacaattttcctgcttactccagtaagaccctccgcatcgtcaatggttctggtgaggtccattttggtgtcaatgatatatacacaatgtcactatgtaatgtggcactatctgcttcacctgagtcatccaagtacatcgtggctgcttcctcagaccacaagggtgcaccagtaccagctctctggcagcctgggatgatttcatggcaggtttgctctggagttgagattgatggcccaagagatctctccttctaccaggggaagctttatatgctcatgaggcacaggacacgcctattcacttgtgaacttgaggaggatgatcgtgggttcatggaaggtggtgcaataagttgcaatatggttgtgtggcgtggagagctattattaatcatcagacactacaatggcgattaccgtggctgcaagtcctttcctgctggtctacatcatggagttgaaggtgaccatatctactttgtccctgatgattggaagccttatgatacatttgtgtatagcatgagagatgattatcttttgtatttcctgttgaactggcaaccatga

SEQ ID NO: 27458 - DNA, 487 bp, Oryza sativa
  Clone ID: PAT_MRT4530_3214C.1
cccacgcgtccggccttaatctcattggtgctgatactcgcaggttattttttatgagcaagattggaatcctcaagctgacaaacaggccttgcagcgtgcacaccgcattggacagttaaataatgtattatcaataaatttggtatcacaacgcacaattgaagaggtcatcatgcgaagagcagaaagaaaacttaagcttagccacagcgttattggagaggaggatgcaacttatgggaaggggaaatatgtagaaaatgaagctagcgacatgcgctcgattatatttggcttacacctatttgatacttcagatacgactgcagagacaatgaatgatgacacagcttcggagactatcaaagaagagactatgttgaagctgaaatcaatgtctgaaaaagtagtgttgatgcgtagtcatgaaccttcagaaaaggatgaacgggcattcgaaatcaatccaaatatgacagacaac

SEQ ID NO: 27459 - DNA, 1956 bp, Oryza sativa
  Clone ID: PAT_MRT4530_32150C.1
atggccactgccaagaagttgggagagaaagatgtggcctacctcagtgtgcttcctttcatgttgctaaggattctccatagccaggtctggctaaccatctcccggctcatggatgcccgtggcaatcggcgccggattgtagaacgtggtattgaattcgagcaaagtggatcgtgtgattcaattttgctccatgccttgcaggggttgatcactacagactatgcaaagggtaagggtttcagtgtgaggaaaaacaacttgaagcggaaggacggtgagattatatggaggcaattcgtatgctcatgtaaagagtacagggagttgaagcactttgagaggacagagtggaaaagggagccacgggcactgacccgctgtggttgcttagctaagcttgagattgagcggaacgagcagaaggggatgtggtttgttaaggagtttgataaccaacatacgctcgaacttgcaaatcctgaccatgatgcttttttaggagttcatcgtgtgatgactgattctaagaaagcccaagcgatcgagcttcgcatgagtggccttaggccctttcaaatcatggaggttatggagaataaccacgatgagtcggaagaggttagttttgtgatgaaggacctttataatttctttactcggtacgagatgaagaatatcaagggtcgtgatgctgaagatgtgttgaaatatctaacaaggaagcaagaagaagatccagaatttttcttcaaatacaccacagatgaggaagggcgtcttaggaatgtgttttgggcagatgttgaatctcgtttagactatgctgcttttggtggtgttgttattttcgatagcacttaccggctccttgagacttttttggaggcaatacgtcaagtgcatccaaaatcattaattaccgatggcgacctagcaatggcaaaggctatcagtaaggtaatgccgggtgcttaccatagattgtgtacttggcatatagaggagaatatgagtcgtcaccttcgtaagccaaaactcgatgagctaagaaaattaatttatgagagtatggatgaggaggagttcgagagacgttgggctgattttaaggagaatggaggcacgggaaatggacaatggatcgctctgatgtaccgacttagggagaagtgggctgctacctatacagatgtgaaatacttgttgggtatgcgcagcaaccaacatagtgagtcactgaactcaaagcttcacacccttctgaagagaaatatgtcactaatgtgcttagtcaaacatgttaagttgtgcatacaacgtctgcgtaagaaggaggctcagttggacgctaagtgtaccaattcgatccctttttgtagaatagacgccgacccattggagaaagacactgcccgtatattcacaacaatcgtgttcaagaaagtccgtgcacagatatggctaattgctggactcgaagtcataagtgggactaatcaagatggttcgtcactgtatgttgttggtttgaaggacgataatgaggtgtgggatgaagtgagggttacttttaaaggccaggcgttggaaggtgtggaatgtcactgccggaagatggagtgcgaagacatcccttgctcacacatatttgttgtactcaagttccttggttttgacaccatccctcgttgttgtgtcgtggataggtggacaatgggagcaatggcggcatttaggtcagacaggaataccgatcctaatgtgtggtctgaacacatggttcgttttcgtagcctccgaaatctgggtagtgatgctaggaaccctgagcagacagaaaaagcgatggatttcttaaatgggattttggataaaggatcgtcatcccatgagaacatcgtggctggagattttgctcctatgccaactcacttttcatctagtaactag

SEQ ID NO: 27460 - DNA, 1992 bp, Oryza sativa
  Clone ID: PAT_MRT4530_32151C.1
atgcgtgtgcgctcgctactcctcctggaaggcagcggcgcagtgaaaatcgccggtggcgctgccagtggttcggcatggcgaaatctcagagggatcaaagaacggcgacatgattatttgtgctggatgagaatcacccaggtcatagcaacatcagttatcttaggtctactctggtggcactctgatccctcgacaccaaaaggtctacaagatcaggtgaggtctgacataatgaattcgagctatttgagcctagaggatcaggaagagtataaaatgatgggtaatgtggttttttcaagcgaggacgaaggttacaaattctatttaggctatgcaaagggcaagggttttagtgtgaggaaaaacaagttgaagcggaaggacggggagatcatatggaggcaatttgtatgttcatgtgaagggcacatggagttgaagcactttgagaggatagaccggaaaatggagccacgtgacctgacccgctgtggttgcttagctaagcttgagatcgagctgaacgaggagaagggaaaagcccaagcggtcgagcttcgcatgagtggccttaggccctttcaaatcatggaggttatggagaataaccacgatgagttggacgaggttggttttgtgatgaaggacctatataatttctttactcagtacaagatgaagaatatcaagggtcgggatgctgaagatgtgttcaaatatctgacaaagaagcaagaaaaagatgcagaatttttcttcaaatacaccacggatgaggaatggcatcttaggaatgtgttttgggcagatgctgaatcgcgtattgactatgctgcttttggtggtattgtcattttcgatagcacttattgtgcgaacaaaatagatgccgacccattggagaaagacgctacccatatatacacagcagttatgttgaagaaaatccgtgcatggatacggctaattgttggacttgaattcatcagtgggactaatcaagatggttcgacactgtatgttgttggtttgaaggaagataatgaggtgtgggatgaagtgagggttacttttaaaggccaggcgttgccaggtgtgaaatgtcactttctgaagatggattgcgaagacatcccctgctcacacatttttgttgtactcaagttccttggttttgacatcatccctcgttgttgtgtcgtagataggtggacaatgggagcaacggcggcatttaggtcagacaagaataacgatcctaatgtgtggtctgaacacatggttcgttatcgcagccttcgaaatatgggtagtgatgctttctttgaggctgctaggaaactagagcagacaaaaaatgtgatggatttcttaaacggggttttggataaaggatcggcatcccatgagaacatcgtggccgcagattttggtcctatgccaactcactttttgtctagtaaccagccattagagaagagagtccttgatcctgatgagattagggcaaaagaagctccatcgaagagacaaaggccattccgtgtggagcctgccagtacatatcctaacctaggaatgtcacctgaatggtatggatcattagaatgggtgtttccagaggtgcagtatagtagcatgtgtataaagattgccatctcaactggaggtcatgcttgttttggtgacccaggttttgaaggatggatgagatccatagaatcagagtacaaggataaatttcgtggatgggttggatttactgttctagtttcccaccgaataactgcatgttgtgatatattgttgatgtcatccagattcgaaccttgtggcctcaatcagctatatgctatgcaatatggtatagtgcctgttgttcatggaactggaggcctcagagttaagaatcaagagggagtggctaactttgatgatatcctggcaaaatctgttgcttttatggttgcaagagttgattag

SEQ ID NO: 27461 - DNA, 318 bp, Oryza sativa
  Clone ID: PAT_MRT4530_32152C.1
tggatccgatacaagtggacgggcttatctttcttttttttttgacgctgataataacgctctacacagataatattatagttccgcaacggggaactaaaatgaagcagtacattttgcaggaggagctcgcagcatcctactcatcctatcttcttgcttgtttctatccaactttcaagatggaccaccactccaacaacaacataaggatcatcatatcgatcctgcttaggttgatgcatctttggtcacccatctcaattacttaccgcccgctttctattcttgccaattaaacctttgataagctttgag

SEQ ID NO: 27462 - DNA, 1578 bp, Oryza sativa
  Clone ID: PAT_MRT4530_32153C.1
atgacttcgagctatgaggaaggttacaaattctatttagactatgcaaagggtaagggtttcagtgtgaggaaaaacaacttgaagcggaaggacggtgagattatatggaggcaattcgtatgctcaagtgaagggtacagggagttgaagcactttgagaggatagagcggaaaagggagccatgggcactgacccactgtggttgcttagctaagcttgagattgagtggaacgaggagaagggggtgtggtttgttaaggagtttaataaccaacatacgcacgaacttgcaaatcctgaccatgttgcttttttaggagttcatcgtgtggtgagtgattctaagaaagcccaagcggtcgagcttcgcatgagtggccttaggccctttcaaatcatggaggttatggagaataaccacgatgagtcggaagaggttggttttgtgatgaaggacctttataatttctttactcggtacgagatgaagaatatcaagggtcgtgatgctgaagatatgttgaaatatctaacaaggaagcaagaagaagatccagaatttttcttcaaatacaccacggatgaggaagggcgtcttaggaatgtgttttgggcagatgctgaatctggtttaaactatgctgcttttggtggtgttgttattttcgatagcacttaccgggtgaacaagtacaatcttcctttcattcctttcataggagttaaccaccatagaagtacaacaatttttgggtgcggaattctatccaatgagtctgtcaactcttactattggctccttgagacttttttggaggcaatgcgtcaagtgcatccaaaatcattaattaccgatggcgacctagcaatggcgaatgctatcagtaagttgtgcatacaacatctgcgtaagaaggaggctcagttggatgctaagtgtaccaattcgctccctttttgtagaatagacgccgacccattggagaaagacgctgcccgtatattcacagcagtcgtgttcaagaatgtccgtgcacagatacggctaattgctggacttgaagtcataagtgggactaatcaagatggttcgtcactgtatgttgttggtttgaaggacgataatgaggcgttggaaggtgtggaatgtcactgccggaagatggagtgcgaagacatcccttgctcagacatttttgttgtactcaagttccttggttttgacaccatccctcgttgttgtgtcgtggataggtggacaatgggagcaaaggcggcatttaggtcagacaggaataccgatcctaatgtgtggtctaaacacatggttcgttttcgtagcctccgaaatctgggtagtgatgctttctttgaggccgctaggaaccctgagcagacagaaaaggcgatggatttcttaaaggggattttggataaaggatcttcatcccatgagaacatcgtggccggagattttggtcctatgccaactcactttttgtctaataaccagccattagagaagagggcattttttgatatccatgatgcccacatgtgggatttgtcttga

SEQ ID NO: 27463 - DNA, 247 bp, Oryza sativa
  Clone ID: PAT_MRT4530_32154C.1
acaaaccccatgttttaatcccctaaccaagaattatttgattcgcgggaaatgacccacaccagctggggcataatactcaaaggagcctgcagctagtttctagtataggatagcaaaaccacaaaccattgacgtgaaatatggatgaaaaggattggattgtcaaatccccaaatatactcaaactcgaggggcttggagacagacttggagacgtcccaggggcagagcttccccttgggga

SEQ ID NO: 27464 - DNA, 2187 bp, Oryza sativa
  Clone ID: PAT_MRT4530_32155C.1
gccgatatagcaatgctagccgatgccggtgtggactctgtcgcgctattcctcccctggcctcgccgccttgccttcgtcgccgtccttatcgctcgccgtcgccgccttgtccgcctccttagtgaggtctgacataatgacttcgagctatgtgagcctagaggatcaggaagagtataaaatgatgggtactgtggttttttaaagcgaggaggaaagttacaaattctatttagactatgcaaagggtaagggtttcagtgtgaggaaaaacaacttgaagcggaaggacggtgagattatatggaggcaattcgtatgctcatgtaaagagtacagggagttgaagcactttgagaggacagagtggaaaagggagccacgggcactgacccgctgtggttgcttagctaagcttgagattgagcggaacgagcagaaggggatgtggtttgttaaggagtttgataaccaacatacgctcgaacttgcaaatcctgaccatgatgcttttttaggagttcatcgtgtgatgactgattctaagaaagcccaagcgatcgagcttcgcatgagtggccttacgccctttcaatcatggaggttatggagaataaccacgatgagtcggaagaggttagttttgtgatgaaggacctttataatttctttactcggtacgagatgaagaatatcaagggtcgtgatgctgaagatgtgttgaaatatctaacaaggaagcaagaagaagatccagaatttttcttcaaatacaccacagatgaggaagggcgtcttaggaatgtgttttgggcagatgttgaatctcgtttagactatgctgcttttggtggtgttgttattttcgatagcacttaccgggtaaacaagtacaatcttccttccattcctttcataggagttaaccaccatataagtacaacaatttttgggtgcggaattctatccaatgagtctgtcaactcttactgttagctccttgagacttttttggaggcaatacgtcaagtgcatccaaaatcattaattaccgatggcgacctagcaatggcaaaggctatcagtaaggtaatgccgggtgcttaccatagattgtgtacttggcatatagaggagaatatgagtcgtcaccttcgtaagccaaaactcgatgagctaagaaaattaatttatgagagtatggatgaggaggagttcgagagacgttgggctgattttaaggagaatggaggcacgggaaatggacaatggatcgctctgatgtaccgacttagggagaagtgggctgctacctatacagatgtgaaatacttgttgggtatgcgcagcaaccaacatagtgagtcactgaactcacagcttcacacccttctgaagagaaatatgtcactaatgtgcttagtcaaacatgttaagttgtgcatacaacgtctgcgtaagaaggaggctcagttggacgctaagtgtaccaattcgatccctttttgtagaatagacgccgacccattggagaaagacactgcccgtatattcacaacaatcgtgttcaagaaagtccgtgcacagatatggctaattgctggactcgaagtcataagtgggactaatcaagatggttcgtcactgtatgttgttggtttgaaggacgataatgaggtgtgggatgaagtgagggttacttttaaaggccaggcgttggaaggtgtggaatgtcactgccggaagatggagtgcgaagacatcccttgctcacacatatttgttgtactcaagttccttggttttgacaccatccctcgttgttgtgtcgtggataggtggacaatgggagcaatggcggcatttaggtcagacaggaataccgatcctaatgtgtggtctgaacacatggttcgttttcgtagcctccgaaatctgggtagtgatgctaggaaccctgagcagacagaaaaagcgatggatttcttaaatgggattttggataaaggatcgtcatcccatgagaacatcgtggctggagattttgctcctatgccaactcacttttcatctagtaactagccattagagaagagggtctgtgatcctgatgagattagggcaaaaggagctccatcaaagagacgaaggccattccgtgagacattgcacacaaaaaaccaa

SEQ ID NO: 27465 - DNA, 309 bp, Oryza sativa
  unsure (1)..(309): unsure at all n locations
  Clone ID: PAT_MRT4530_32156C.1
ccgacgcgtgaccgtactcttcagcgtccaccgcctccacccccagcagctggacccctctcccttcgaccggcttactaaagtcggagcgcagaacgcacngtctccccacacgcaatccaaggttcgcctgacttcgacagctttctcaccaactactgatttgtacttcttcttccaacacaaggcttccaatccatcatccaccgcagttctaatgtaggacccattccactctacatccctatccttattttggatgatcaacctcattgactatccattgtacttacttcccttgtcctattt

SEQ ID NO: 27466 - DNA, 879 bp, Oryza sativa
  Clone ID: PAT_MRT4530_32157C.1
atggccgtcgcgaggctggtggtcatcacccccgccgtcctcctcggccgcaccgcccgcgtctcgccgtcggcggtgccgcggctgcggcccatcgtcgccggccgccgcgccgtggcggcgcccacacgcgccgtcctgggagacggggcgggtgtcggcggcgaggaggatgcggtggtggcggtggtggaggaggacgcggtcgcccggcgcgcggcgaggaagcggtcggagcggcgcacgtacctggtggcggcggtgatgtccagcctcgggttcacgtccatggccgccgccgccgtctactaccgcttcgcctggcaaatggaggccggcggcggcgacgttccggcgacggagatggtcggcacgttcgcgttgtcggtgggggcggcggtggggatggagttctgggcgcggtgggcgcaccgggcgctgtggcacgcgtcgctgtggcacatgcacgagtcgcaccaccgcccgcgcgacggcccgttcgagctcaacgacgtcttcgccatcgccaacgccgccccggccatctccctcctcgcctacggcctcctcaaccgcggcctcctccccggcctctgcttcggcgcggggcttgggattacgctgttcgggatggcgtacatgttcgtccacgacggcctggtccaccggcgcttccccgtggggcccatcgagaacgtgccctacttccgccgagttgctgccgcccaccagatacatcacacggacaagttcgaaggcgtgccctacggcctgttcctcggacccaaggagttggaggaggtgggtgggactgaggagctggacaaggagatcaagaagaggatcaagaggaaggaggccatggacgccatcagatga

SEQ ID NO: 27467 - DNA, 396 bp, Oryza sativa
  Clone ID: PAT_MRT4530_32158C.1
atggcggcacggagcggggacgaggagcgactgcgtggagtggtctccaccggcgccaaggagcagcagcgcggagtggggatgaggacggcgacacggagcagggacgaggacggcggcgtggagcagcaaagacgagagaagacgagtagtagcggccgtcggctccgcgccaatgctcttggcgctgagcttatacacagcaactccaactggtctggcgctgacatcgtgccaccatggcggccgagccgatcccccagccgacgtggcagggacctcagcgccaaggcaattggcactgaggtggccaacgtcagcaccaagcgcattggcgctgacttttggaacttagcaatgtctctgatgggtgctctacctggcgctgagatttga

SEQ ID NO: 27468 - DNA, 197 bp, Oryza sativa
  Clone ID: PAT_MRT4530_32159C.1
atttttatggaaaattccagctgcaatatagctgattagactgattgcagatccagtcttggtctggcgaaagcgaggtcagtgcggaaataggacacatgtaaaacggggctaagaggaccactttagaaagcattagcaacaggtgtttcaaagctaaacagacctgaactcgaagccgcttgtgaggacttcag

SEQ ID NO: 27469 - DNA, 4035 bp, Oryza sativa
  Clone ID: PAT_MRT4530_3215C.1
atggtctacaccaggaatggtagccgcacaacaggcgagggcagcaatggcgaagaacgcactgacggggtgcatcccaacagcgattccggcaatggtccgccaccactccccgagaatccgactctggcccaagtaatggctcatcagactcagatgatggcagccatgatgcagcagcagcaccagcagatgcaccaaaggatgcagcagcaagccgagcagcatcagcagcagtttggtccccctccccctcagtccaaactgccggagtttctacgcgttaggccacccaccttctccagcaccaccaaccccatggaggcgaatgactggctaaatgccatagagaagaagctaaatctcctgcagtgcaatgatcaggagaaggtcgccttcgccacacaccagctccaaggtcccgcgtcagcttggtgggacaatctcatggccacccgcccgccaggcactgaagtcacttgggcagagttctgtcgcagttttaggaaggcgcaggtgccagacggggtcgtggcacaaaagaagagagaattccgggcactccaccagggcaacaggacagtgactgagtatctccatgagttcaatcgcttagcgcgatatgcaccggaggatgtccacactaacgcggagaagcaggagaagttcctagcaggcctggatgacgagctaaccaaccagttaatctctggggactacgccgactttgagaggctggttgacaaggcaatccgtcaggaggatcagcgcaccaaaatggacaggaagagaaaggcggcgcagttccggtccaaccaaggaagccaccagcgaccgcgcttcactccaggacagcagggtggacctaccaccatgatcgtccgccagcaccgccctttcaactcaagcagcttccaccagggcgccagtggcagccagaaccaccatggaggtcagcccaaccacagtgcagctccgcgcccaccaatggcaccagtacagtcagctccgtccgcgcaagccaagaaggagactggaacaaagccagggtcctgcttcaactgtggcgagcttggccacttcgctgacaaatgtccgaagcctaggcgtgccgggccaaggttcatccaggctcgtgtcaaccacgcgtccgcagaggaggcgcaagcagcaccagaggtcgtactggtcaccttgaccaacaagaagggagaaacggtagtgtacaaatcactagtctcaccaaagcaaggggtctccttgaatcagattgaggtggaaatcccagtggtcaccgaggggaagagttcgaggaaattggaagatatccccatagtctgcgagtacccaaaagtgtttcccgaagacctcactaccatgccacccaagagagagattgaattccggattgatttggcaccgggaaccgctccaatttacaagacaccgtataggatggcagccaacgagctagcagaggtcaagaagcaggttgatgagcagctgcagaaagggtacattcgaccaagtacttcaccttggggtgctccggtcatttttgtggagaagaaggacaagacgaagagaatgtgtgtcgactatcgcgcactcaatgaggtcacaatcaagaacaaatatcctttaccgcggatcgatgatttgtttgatcagctgaaaggagctaaagtgttttctaagatagacctgcgatcaggctaccaccagttgagaattcaggaagaggatattccaaagacagccttcaccactcggtatgggttgtatgagtgcacggttatgtctttcggacttaccaacgcacccgcattcttcatgaatctgatgaacaaagtgttcatggaatttctggacaagtttgttgtggtattcatcgatgacatacctatctattcaaagtccgaagaagaacatgagcaacatctccgtctggtactcaagaagttgaaggagcaccagttatacgccaagttcagcaagtgtgacttctggttgtctgaagtcaaatttctgggtcacgttattacagctcaagacgtggcagttgatccatcgaatgtggaatcagttaccaagtggacaccacctaacaccgtgtcgcaaattcggagttttcttggacttgcaggttattaccgccgattcattgaaaacttctccaggatcgcccgacccatgactcagttgcttaagaaagatgagaagtttaaatggacagctgagtgtgacaagagttttgaggagctcaagaagaaattagtatccgccccagttctgattctgcccgaccagatgaaagacttccaagtctattgcaacgcatcccgccacgggtttggatgtgttctaatgcaagagggcagagtggtcgcgtatgcctcgcggcagttgcgtccacatgaagggaattatccaactcatgacctggaattggcagcagtggttcatgccttgaagatctggaggcactatctgattggcaaccgctgcgaagtgtatacggaccacaagagtctgaaatacatctttacccaaccggatctaaatctccaacagcgaagatggttggagctaatcaaagattatgacatgagcattcattaccatccaggaaaagccaatgtggtggcagatgcattaagcaggaaaagctactgcaatgctttatgcaccgaaggcatgtgtaaggaattgcagcagaagcttgaacacctcaacttggggcttgtggaatatgggtacatggctgccctagaggcacgacctacgctcgtggatcaagtcagagcagctcaagtaaatgatcctgaaataacagagctgaaaaagaacatgagggtcggaaaagcccgggatttccacgaagatgaacatggcacaatctggttggaagaaagattgtgtgtacctgacgacaaggaactgaaggatatgatactcaccgaggctcatcagactcagtactccattcatccaggcagcaccaaaatgtatcaagacctcaaagaaaagttttggtgggtcagcatgagaagggaaatagctgaattcgtcacactctgcgacgtttgccaacgagtgaaggcagagcaccaaaggccagcagatttactccaacctcttcaaatcctggaatggaaatgggaagaaattggaatggatttcataacaggtctgcccaggacatcatctggccacgattcgatatgggctagtcttcaaatggcaccgttcgaagcattatacggctggaagtgccgcacacctctcttctgggatcagacaggcgaacgtcaactgttcggaacagaggtgttaacggaagcagaagagaaagtcagaaccatcagagaaaggttgagaattgcccagtctcgacagaagagctacgcggacaaccgccgaagggagctcacttttgaagcaggggataacgtgtaccttcgtgttactccgctccggggagccgattcggagcacatcgatatccaggaggatctgacctacatggagaagccagttcgcatccttgagaccagcgaaaggaggactagaaacaaggtgtcgccgtcgcgcgtccgcacctcggcatcgccagtcttcgccgcctccctcgttttccgccgccggtcgtcgccgccccctccggtgaggactccctcccccttcctttccttccccatcccgcgtgcaccgtcggttttggccgcgccgctgctccgtctgtgcgcctccgccttcgtgccgtccgccgccgcctctagccatggccggccggccggctttgaagctgagccgagcccggcggctactccctgcgccgtccgatcggcccgaggccgatccggaccgtcggtcctgtggaccggcggtggaccacccgcgtggtcccggtccacggtggaccggccgctttgtgccgctgacccatggggcccacgtgccggcgccccctccctctccccttgcgcaactgacatgcgggccccgcatgtcggcgccgcccgctccctttga

SEQ ID NO: 27470 - DNA, 1626 bp, Oryza sativa
  Clone ID: PAT_MRT4530_32160C.1
ccttgattttgttcctcttattaaattcagaatggtactgattaatatatatcattaccagcagtactagcaaaagcatcagccattcagccccagcacatcatttctaatacctgtgtgctccaccgtccaaatgagcttccaaatatctatctaaattattcttctattaacaggacagaaaagcatattacaaggctacaattgccactgaagcaaaaactaataagagatgacagcaaataaaaagaaaaaaatgtgtgataagtagctctcattggatcgcatctaaggtctctttcctcttaatcctcctcttgatctccttctccagctcctcaatcccacccacctcctccagctccttgggaccaaggaacagcccatatggcacaccttcgaacttgtccatgtgatgtatctggtgggcggcggcgacccgccggaagtagggcacgttggcgatgggccccaccgggaagcggcggtggaccaggccgtcgtggacgaacatgtacgccatcccgaacagcgtgatcccgagtcccgcgccgaagcagaggccggggacgaggccgcgggtgaagaagccgtaggcgaggagggacatggccgggacggcgttggtgatggcgaagacgtcgttgagctcgaacggcccgtctcgcgggcggtggtgcgactcgtgcatgtgccacagcgacgcgtgccacagcgcccggtgcgcccaccgcgcccagaactccatccccaccgcggcgcccaccgatagcgcgaaggtgccgaacatttccgtgaccgggatctcgccgctgccctggtcgagcacgcggagaaattttagtgctgcggcgaaggaattgccgaattgggtaatggtaagatgcgagcgggagtttggcgatggcgtgttacctacctccatttgccaggcgaagcggtagtagacggcggcggcggccatggacgtgatcccgaggctggacatcaccgctgccaccaggtacgtccgccgctccgactgcttccgcgccgcgcgctccgccaccgccctccgcgcatcctcctccggctccggctcacccaccgccacgcgcaaggggacggccagccgcgccgggagcggcgcgaacgccagccgcagcagcgccgggggcgatcggtgtgccgccgccaccgcggcgggggagaggagaggggcccgcgcggccaccagcctcgcgacggccatggatgccgcagccgcagcctacgcgaacgcggacgcggggatggatggacggttttgattgggcgggtgaagcggtccgcgtccgcctcggggagcgagaggcgtcgtccaagacaagtgggtcggatggagtcgccgtcgtcacgagtcaacttgtgattgtgagcatggaaattcgtgaggaacgccggctcggacccggtggcttttatataggagtatcaggggccatgttcagggcacctgattcgccacgtggccgtctcaacgcatccgcgcacgcagcttctggtcagctatacaccgcgccggcgagccgtcctccgctgcgtcgccatcacaacgagttactcctgacccctgatctcaagcgtcggagttcacctttcgattga

SEQ ID NO: 27471 - DNA, 327 bp, Oryza sativa
  Clone ID: PAT_MRT4530_32161C.1
atggcttgcagcccgcacaacgcagctgcattgcgctcctgtggcgccgctgccttggcctctggtagtcaggcctcggcccaccaccaccgccaccgcctttcggaacgcatgccgcctgtgcccgatcaccggtgccgcctccctcaatctcacacgcttgcggcggtagtggtggctagggacgacctcggctccagcggggacagctatggagggcggcggcggctggggacgacctcgactacgacgggggcagcggtggagtgcggtggcggcggtggctacggctgggggcgaccacggcttggtctctggtgggggtag

SEQ ID NO: 27472 - DNA, 804 bp, Oryza sativa
  Clone ID: PAT_MRT4530_32162C.1
gtcaggcgcaggccagcttttctgccgcggtcgctctagaagaccccctggccggccctggggcgccgcgcggccccacaatccgccgccgccacgcggcctcccgcgccgccgcgcaggccgcctccgcgcggccctccggacgggcagccgccgccgccgggccctccgcgcggggcagccgccgctgccagccgccagcgcctccaccacctgcctccgcgccggccggcgcttgccgccgccggccctccacgccggccgccgcccgctggtccaccaaccagcagccgagtcccatcgatggcgacgcctcccaatcccaacgagataaacacgccgcgcgccccgccgccaccatccgcatccaccattccattcaccattccaccccctccgccgtcggcgtcgccagggccttcgccgccaccggggtgctcgtcctgctgctcggcctcgccggctggctcgcgcccacggacgccttcgccgtcgcgctggcccccgagctctacgcggggaacgccggcggcggcggcggtagcgcccgcgcggcgccggcggtgcggctgcaggtgcgccggtgcgcgtcgtgcgggctcgccgcccaggccatcgacgcgctgcccgcgttcgcgtacgagccccccgccgccgacaccggacttgcccgctctgccgccgcgacctctcgccggagaaggtcaccgcgaaatcctccgccgccgccgcgacggtctcctccaccgacgtgctgccgccgaaaccccgtccaacgaatatgggtccctccaatgtgtaaac

SEQ ID NO: 27473 - DNA, 1242 bp, Oryza sativa
  Clone ID: PAT_MRT4530_32163C.1
gcctggaagctaaatcacagcttgtctttgagtgaggcccctcacctaacccacacacgtggcgccaaacccacagggggtcggggcgccccagccctcggggccgaaacgggagcggcccgacccctcggggagacagagggaggggcggccacatcaccctcgggcccgacccccccgagggggtcaggccacgtgggtgactgcagctgccccaaacctctagtcaagatacccccggtcccatgtcacccttcccgtcctccccctcttcgccgcgtccctagtgttgtcggcctcttctctcacgccgccgcctccccatccctcctcccctcccttttctgcagcgccacctcttcctgatcccgtcgtcgccgtctcctagtccctggcaccggcaccgccaccatctactctccctccaccctcgtcctatccctcctacacagcggccgacgccgccgccgcggccgccaccaagtcctccaggcacaccgcgcacagcacgccgccgccgccgccgccgggctcgtacgcgaacgccggcagcacgccgatcccccccgcgccgggcgccatcagcccgcacgcgcacgggcagctcagcagccgccgccgccgccccgacgccgccgccgcggcggagcctcctcccgtcgtctgcgccagcctgccggcgagcgccagcaggaggagcgcgaccgcgacggcgacggcgcccgccacggtggcgctcacggcgtaggcgatggagcagtacagccccatcaggacgttcaccgccatgaagccgtagcaccctagcctcgtcgagcagccatcaccgccttcctcctccgccgccgccgcctcgggcatcccgaccagcgatttctccggcaagtccggtgcgcgtgcagccacatgtcgatgcagtccacgtggaagaggtgcccgcacgacggcagccgccgcaccgtctcgccggccacgacgtcctccaggcacaccgcacacagcgcgccgccgccgcgcggcttgccctcgccgccgtcctcgaccccgcacgacgcgcaccggcgcacctgcagccgcaccgccggcgccgcgcgggcgctaccgccgccgccgccggcgttccccgcgcgcgcgcctcgccgtcgcccggcggtgcggcgggccccgccgccgccgacggcgcaggccgcaccgccctcagcatggccgccaatcttgccgtcctcctcctcctcgcgatcg

SEQ ID NO: 27474 - DNA, 417 bp, Oryza sativa
  Clone ID: PAT_MRT4530_32164C.1
atggtgaatggaatggtggatgcggatggtggcggcggggcgcgcggcgtgtttatctcgttgggattgggaggcgtcgccatcgatgggactcggctgctgttgtatgggcgcacagatggcggtgaggacgacaagagcgcagagcgggcggcggccggcgtggagggccggcggcggcaagcgccggccggcgcggaggcaggtggtggaggcgctggcggctggcagcggcggctgccccgcgcggagggcccggcggcggcggctgcccgtccggagggccgcgcggaggcggcctgcgcggcggcgcgggaggccgcgtggcggcggcggattgtggggccgcgcggcgccccagggccggccagggggtcttctagagcgaccgcggcagaaaagctggcctgcgcctga

SEQ ID NO: 27475 - DNA, 1395 bp, Oryza sativa
  Clone ID: PAT_MRT4530_32165C.1
gcacgaggattccacccctcgcccgcggattcttggaacgctttgctgctgctcgcgcatggtggaggggtggggctagtgctagcgatcgcgaggaggaggaggacggcaagattggcggccatgctgagggcggtgcggcctgcgccgtcggcggcggcggggcccgccgcaccgccgggcgacggcgaggcgcgcgcctgctacggcatcgtggtggcgtgcgtgtcgctgctgctgctgtgcgcgctcgtctccgccgtcggcgtcgccagggccttcgccgccaccggggtgctcgtcctgctgctcggcctcgccggctggctcgcgcccacggacgccttcgccgtcgcgctggcccccgagctctacgcggggaacgccggcggcggcggcggtagcgcccgcgcggcgccggcggtgcggctgcaggtgcgccggtgcgcgtcgtgcgggctcgccgcccaggccatcgacgcgctgcccgcgttcgcgtacgagccccccgccgccgacgtcgaggacggcggcgagggcaagccgcgcggcggcggcgcgctgtgtgcggtgtgcctggaggacgtcgtggccggcgagacggtgcggcggctgccgtcgtgcgggcacctcttccacgtggactgcatcgacatgtggctgcacgcgcaccggacttgcccgctctgccgccgcgacctctcgccggagaaggtcaccgcgaaatcctccgccgccgccgcgacggtctcctccaccgacgtgctgccgccgcatttcgtaggaatttggcacgaaataaatcagttcaaatcatcggagaaatcgctggtcgggatgcccgaggcggcggcggcggaggaggaaggcggtgatggctgctcgacgaggctagggtgctacggcttcatggcggtgaacgtcctgatggggctgtactgctccatcgcctacgccgtgagcgccaccgtggcgggcgccgtcgccgtcgcggtcgcgctcctcctgctggcgctcgccggcaggctggcgcagacgacgggaggaggctccgccgcggcggcggcgtcggggcggcggcggcggctgctgagctgcccgtgcgcgtgcgggctgatggcgcccggcgcgggggggatcggcgtgctgccggcgttcgcgtacgagcccggcggcggcggcggcggcgtgctgtgcgcggtgtgcctggaggacttgcgcggcggcgagatggtgcggcggctgccggcgtgcgggcacctgttccacgaggactgcgtcgacgtgtggctgcgcgtccgccggacttgcccgctctgccgccgcgtgctcccgccgcgcaagtccgtggcggccgcggcggcggcgtcggccgctgtgctgccgcctgtctga

SEQ ID NO: 27476 - DNA, 531 bp, Oryza sativa
  unsure (1)..(531): unsure at all n locations
  Clone ID: PAT_MRT4530_32166C.1
attcggctcgagcagcagcagcagctgagcttgaagcagcagancgaggtngacatggccgccgccaccatggccctctcgtccccggcgctggccggcaaggccgccgcgaaagtgttcggcgangggcgcatcaccatgcgcaagtctgcggcgaaacccaancccgccgcgtcggggagcccgtggtacggcgccgaccgcgtgctctacctcggcccgctctccgcganccgccganctncctgaccggcganttccccggcgactacnggtgggacaccgcggggctctccgccgacccgganacattcgccaagaaccgggagctggangtgatccactccangtgggcgatgctcngcgcgctgggctgcgtgttcccgganctcctcccccncnacggcgtctaattcngccaaggggtgtngttcaangcggggtcncnnatnttcnncnaaggcgggctccactacctccgcnacccnancctgattcacgcccanaacatcctccccntctnggcggtcc

SEQ ID NO: 27477 - DNA, 273 bp, Oryza sativa
  Clone ID: PAT_MRT4530_32167C.1
cgggcgcgtaaacccacacgcgctgtcagtgaagagccactgcgagccgcacaggctccacgactgacatggccagcaccgcctgatgcactgcacctttaatgggaggagctggacaaatccccgccggctccatcgtgacgtcctactaaaccaaaattgtgattaatcgcaacaaactatgtgctatcatgctacagaacgcacacgggctatacttgattctaccaaggacgatgaaacacacgacactcacaacctatctatgcgacc

SEQ ID NO: 27478 - DNA, 270 bp, Oryza sativa
  Clone ID: PAT_MRT4530_32168C.1
atggtgcagaaggactgcatgccgtggcttagcttacctggaagggttctcttcgactcacgaaagcgcgccccgcgctacggccacacggacacggggggacagcacaaggtcgggccaacgtatcaataccttgtcccgtcctgctgctcggtgtggaccaaccgattacgccgggagatccgcctcgggatgcgtgcccacacagcttccacaggggagagaagtacgatggccagactcattaaccgagaattaacccctgattaa

SEQ ID NO: 27479 - DNA, 1395 bp, Oryza sativa
  Clone ID: PAT_MRT4530_32169C.1
atgggcaagcggctcgccggcgccgagaaagaggtgctcgttgagatcgtcaggttcacccagaagaacgggctcaagggcgccgaggggggatggaaggatttcttggctcggaacgacaagaagttcggagcttccgtgagtgaccccaagaagcggtccaaggatgtgctgcttgctttcctgctaaccttctccaaagatttccagaaggtgtacttcggaaaattgataaggcgtctgaacgaacgaagtgcttttgagcagttcctgaaggaatttcctgacaagatttctcctcagctgaagcttgttcaactgacagcagaacacccggagtacaggaaaaattataatttcccatcttacaaagagggatggaaagtgctgcgtgaaggcaaaattaccaattttatgaagtcaactatgttggcaattgactgtgagatggtcctttgccatgatggtacggaagccttggtccgagtatgtgttgtcaacagcaatctagaggtgaagttagatgaacttgtaaaccccttaaaagctgttgcagactataggacaagcattactggtttgtctaagaaggatttaaaaggagtcacatgctcattagttgatgttcagaaatcgttgaagaagctcttgtccaaaggaaagatcttgattggtcatagcctatcaaaagatttacatgctcttaagtttgactactctcgggttattgatacagcatacatctttaagtatgcaaatttgcctactactgcatcagcctctttaaacagcctgtgcaagtctgttttgggctatgctgttcgagaagaaggggagccacataactgcttgaaggatgcagaagctgcgatgaatctagttctcgccaagcttaagcatggatttaatgatcccattgaaattgcaagagatagtgtacctgaatctgatatgatgaagttgcttgctcacaaaattccagtctacctgccttgtcaggagctgctcaaattattttctggaaatcccagtattgatgagaagattgattcaagggttcggggtgattattattctacatgtatttcatttggagacagagatgaggtagagaaggcatttgatgaactggatggccaagaggccaaggactctagcgggcgacttcaaaaaaatgtgctgctgaaacgcgacaatggggatgtggcaagcttctatgtacgaaagatggcgtatggcgctcaactaaacaagtcagaactttcaaacaagagaccgccacctaccgagcatgtagaaccaacaaaagaagataatgatggggataagcaaaaaaagcgaaaaactggtaaaaagcatgagaagaagaaagcaaagatatcagtggctgaatga

SEQ ID NO: 27480 - DNA, 337 bp, Oryza sativa
  unsure (1)..(337): unsure at all n locations
  Clone ID: PAT_MRT4530_3216C.1
tttttttttttgttctagtagcacggcgttctgggcttaattaattaattatgtagaataataaacttcatttttcttcttattatcacacggtgatgttgagcacgagcggcgcgtcatccttgtcgacggtgaactcctgggagatcttggcgccggcgggcgtgacgacgtcgacgtggtacgcgccgtggtggccccggaacctgaactcgccgttgccgtcggcgcggccgtgcgcgcgggtgagccactcccgcttgagctgcagcaggcggcggccggcctcgttcacctccccctcggcgtcgacgaggtgggaanaaaatangnaatt

SEQ ID NO: 27481 - DNA, 1135 bp, Oryza sativa
  Clone ID: PAT_MRT4530_32170C.1
tttttttttttttttttttttttttttttttttaaatgcctttttttttttttttttcatagaaaccaacaggtatactactattccattctggaaaattgacgtcatacaattagcagtcgccaattagaaaccaaatacaatcacatatattacacagggcatcatacaatatttatcacctgtagtccaaaattacaccatttatcaccggtcatgcatcgatgattcggcctgaagctagttggaccaacatatttgcgtgcaagcaataacagtaacattattgatttgcatatattctgcacaaatgcagaaacataatattatcccttgtttcaaatataatgcaaaaatggctgctcaaaaagagcatcacccaagagacttttattgttattttcttcatgagatcagggtctgattgctccatctgacgatgataattaattagcgcctcaggctgtgcaggatatattcagcataaagatccatggagtacttgatggcctcctgagcagttgccggtggcaggaaatcgtttacggcgacctctttgttttcattcttcttgtagtcttcaaagaagcggcggatttcagcaagtcggtgaggagagagctccttgagatcattgaagtggcggaactcgggatcatcaacgcaaaccgcgatgatcttatcatctttctcaccctgatcaatcataggcatgaggccaatggccttggctctaaggtagcagccaggaatcactggttcctgcatcaggaccagcacatccattggatccccatcttcgcacagcgttcgcggtatgaaaccgtagttgtgcgggtacaccaccgatgagtatagcaccctgtcaaccttgatcattccagtcttcttgtcaagctcatacttcactttgctcccctttgtgatctcaacaacaacattgaaaacctgaggagctccaggtccaatctcaagatcatgccaggaatgcgcagccacggatcgcttcgagagcgacgacaggatccgctcattcaggcatggggtcttcttttcttcagccattctccagatgtttaataggacttgatgatgatgatgagcaccagagaaggacccggcgcgccggaccggg

SEQ ID NO: 27482 - DNA, 1773 bp, Oryza sativa
  Clone ID: PAT_MRT4530_32171C.1
atgcaagccttactcatctttgctatacttgcagttctcgcaggagttgtccagggacagcagtggtgccagcctttctcctgcggccatctctcaaacataagtcatcctttctggcggagaggcgaccctcacaggtgcggtgtttcatcatatgagctagagtgtagcagtggcaaggccaccatccagatcaatacaggaacatactatgtcactagcatcaactacaacgattcgtccttctgggtcgtggacgccaacctgcaggatgcaaacagcaactgccctcttcctcgctccaatcatcgtcctttcatttgggggattccagggccaagctacaccagggaattgactcttcagggaatatggtgggcgacctttgtcaattgttcgcaggcagtgaagaacaataacaagtacatacatgtggattgccagaacacgagctcttcatttgtctatgtgctgaatgtcgcaccatattacgctcttatggaaaatcttgagccttcttgcggatacttggccatgattccagttagttggactcctgccagtggtaaaaaataccaatattttgctgagttgatgaggaagggattctctgttcgctttccttttgtcttagatcatccgactgcatttgagctaatcaagcagtgcctaaaccggtcaattcggtttgtgttggcgccactggcactattgacttttcttgcacaaagatactggaaaacaaggatcacaatcgatgcagttgagaagtttctgcgaatgcagttgatgcttggcccgacgaggtacacctacacagatatcattgcaatgacaagccatttcagagacaagctaggtcagggtggttacggttctgtattcaagggtgtcatactcccgggtgatgtttacgttgccatcaagatgctagacaactacaattgcaacggagaagagttcatcagtgaggtctccaccatcggtagtatccatcatgtcaatgttgtgcgtctggtggggttttgtgcagaggaaatgaggagggcactagtgtacgagtacatgccccatggatctctcgacaagttcatcttcgcacctgaaaagagcttctcctgggacaagctcaatgagattgcactgggcattgctagaggaataaactacttgcatcaagggtgtgatatgcagattctacattttgatatcaagccacacaacatccttcttgatagcaatttcgtcccaaaagttgccgattttggcctcgccaaactatgcccacgggacaacaattatgtgccagttagcgctgcacgaggaacagtaggttatattgctcctgagatgatatctcgaagcttcggtgtcatatctagcaaatctgatgtttacagctttggaatgcttttgttagagatggctggagggcgaaggaactctaagcagaacatgtcaagctcaacccaggtgtattatccatcattggtgtataatcaactcattcaacaagagatgggtgagatcaccaataccttgaatatgcatgagctggaaaggaagttgtgtgttgttggtctacattgcattcaggtgaagcctcctgatcgtccaacgatgagtgaggtcatagaaatgcttgaaggtgatgttgatggtctgcagctgccttccaggccattcttctgcgatgatgaacccctgcccctgttggtggattcttaccgtttctcctctgagctaactgaaatctcagaggaggatggctga

SEQ ID NO: 27483 - DNA, 141 bp, Oryza sativa
  Clone ID: PAT_MRT4530_32172C.1
atgatgggtgggatttgcgcgctggtggtcggggatgccgaggaggatgagacggagctctgcgcgatctgcgtccacgtcatggtgcccggacggccggacggccaggacctaaccgtcgccgtcgcccgcccagcctga

SEQ ID NO: 27484 - DNA, 279 bp, Oryza sativa
  unsure (1)..(279): unsure at all n locations
  Clone ID: PAT_MRT4530_32173C.1
ggaggttccgagctacgacccacgcgttcgggaacaacagcggtatctgtgcttgaagcagcagagtgaggtatacatggccgccgccaccatggccctatagtacccggcgctggccggcaaggccatcaaggaaggtttcggggaggggcgcattaccatgcgcaagtcagaggacaagcccaagcccgccgtgttcgagagcccgtggtacggcgccgaccgtgtgctctacctaaggccgctcttcggtggccgncaagctacctgaccggcgag

SEQ ID NO: 27485 - DNA, 1383 bp, Oryza sativa
  Clone ID: PAT_MRT4530_32174C.1
atgagcgccatcaccacggagctcctagtcctcgacgacgcggcagccggggcgagcaaggcggcgcccgggacgggcgaagctcgggccgctccagatccgcgccaccaccgccgtcctcctcgctccacctcctcgtcgccgccgagagaggaggggcccgacgccagcgccggtggaacagctagcttcaccctcaaaacaatacaaatatattttcaaagaccaaaagtgcaggcattcatggtgtggccttatgatccaagggcaatattaatgttagaaaggaaaaggcaattacctgttgatcgtgttgattcacatgctggccgtgaggaagaactcctaccacgaaggattgcggcacgacgagctctagcagatgatacagacagcataaaccaatacgaccaacaaagagggcaatttttcctacacaagggcctcatgaaaagggaaattttttacaagacccaacacatggaaagggaaaaaagtaaacagcaaaaaattgagaaaagggctaaaacctgcataccatactgcttgctaccaccaaatacaagaacaagtcaatttacatgcagacccatagaagaatcgcaagaaaaaaaacaagaaatcggcaaggagcactgtgcagagcctagaaaccgactacgacaatcagcgggaatagaactatacctcaccaagagccaagagctgagccattataaggaaagtaggaacgccgacatgccaagaactcagatcaggctgggcgggcgacggcgacgacgaggcagcgcggcgagatggttcgccaccggtggacgtagtcgtggtggaaggcgcgggtacatccggggaggacgcgcactggccgtccggccgtccgggcaccatgacgtggacgcagatcgcgcagagctccgtctcatcctcctcggcatccccgaccaccagcgcgcaaatcccacccatcatcgtcggctcctcctccggtcagcgaacacactggaaaggaacacattgaagaagaaaccgaaagaagcagtcacaacagaggaaaaagtaactgaaccgggggagaaacagctctccccaaatccaccaaatcgagtcacctccaacagagaatcaggaacaacaaaggggaagaagagactaccgggaggggaacaacacacccccacccccaaagtacaacaacaaagaatgaaaacagcacatccgcaagatggactaacctcgaccgattcaggaacagaagatgacaagcagcaacggccaccggcacgagcaagccaccagcgacggggagacaacaccaatccaaagagaacaagaaagacccaaaaaagtcaacagggcaaaagcacatgtacatacccagcataa

SEQ ID NO: 27486 - DNA, 585 bp, Oryza sativa
  Clone ID: PAT_MRT4530_32175C.1
atggccacgacgcgcgtgacggcgatcacagcggcagggactccattgattgaccacacgctattctggggcgtggttcagttcagtatgaccgtgaaacagtcagtggagcgaatcgtgaatgcatgtctctcctgtgaccatgagcgattggccggcaagcacggctgcacggggcggatcagcatgggagcaaaaaatatggttatggaaatggtggtgtctgttttgccgttgtttcggaccgttttgatccccactcccggatatgctgctgcctacaccatcaattattgggggtggtttggattcggttcgtctggattgtatgagattcagtcaaatgggacagccgagcacaatcatggcggatgcatattcagcttttgcagcctgggggatgcgatgctggaggagagtactctacctctaccagagtcgtcgcacaaggggagcgtccggatcactggatggatgatggattggatctactggtgtagtactactgtaccagtgctttttctctcccaggtgtacaacgtagtacgaacggattatgctgacgtagtacggttccgtgcgtag

SEQ ID NO: 27487 - DNA, 227 bp, Oryza sativa
  Clone ID: PAT_MRT4530_32176C.1
gtttcttaactaccttcggccgacctcgcgggggagaataattggtattccaggcggagcacgctacttctccattttcttgatatcctcgtggttgtatggcctccttctggttcccacccctgcacttgctattgccgcctctgcctgccgtgaacgctgtctctttctctccacggcatgctccgactggccgtctgtttggcctgctgtggctgttacttggc

SEQ ID NO: 27488 - DNA, 204 bp, Oryza sativa
  Clone ID: PAT_MRT4530_32177C.1
atgtggctgatgatttctcctatgggccaaggtggcttcaacctctatcaagaggcctcgttcggtgacgtgccgggccagcccaccgtgccaagggagcggcccaagcatggtctggctgtcgggccgtgccgtacttgggccgggccaaattggcgtgccttggaccgggccatgggcctcatgccatatggccatctataa

SEQ ID NO: 27489 - DNA, 3850 bp, Oryza sativa
  Clone ID: PAT_MRT4530_32178C.1
atgtggaggcggcagcatgctctcctccgccgcatctcgctgcccaagcctcccgcggctactgggatcggatgctactacgccaccgagccggaaggcaggaagccaaagacggcgcctttgcagtcaaggggcatggtggataggttccgtttgcgtgccaagggtggtgatggtggcaatggctgcatcagtcttcggcgctccaggtcagatcgccaaggcaaacctgatggtggtaatggaggaagaggtggtgatgtcattcttgagtgttcaaggtctgtctgggatttcagtggtttgcaacatcacatgaaagcaagccgaggagccaatggagtttcaaagaatcagatcgggacaagaggttctgacaagattgcgcaggtaccagtaggcactgttattcatctagttgaaggggagcaaccttctctttctgtaaataagccaaccagagctctagatccctgggatatcccagatgctgttgaacactcaccattcagctccagtcgtattggcagcaagatgatgaaaggtctggatagcagccgatccagtcaacatatttcttccaagaagaacactgctgaaaatgattgtgaaagaggaaacagaaatcatcggggaaaggaaccatattacatgactgagtttgtgcgcaccgaagattatgatggcactagctatccacaccaggtgggggtagatgaaaatgatcaatttgatgatgaggatgatgaattttgggaggacgatgaagaagagttggacatggaggaggtaacggaggaaaaggaggaggaagaagatgttcggtatagtgttgctgaaatgacaaagcctgggcagcggttgatcatagcaagaggaggggaaggtggactagggaatgcttgtatcctcaaggagatgtggctgtccaaagcacataaggaagaggagatggctagcttgagtactggacatcctggaactgagacctatcttatcttggaactgaagagcattgctgatgttgggcttgttggtatgcctaatgctggaaagagcacattgctgagcgctctctctagggctcgcccagagatagctgactatgcattcaccaccctaaggcccaatattggtagcttaacttatgaggactacttctcagtgaaagtggctgatatacccggtctgatcaaaggtgcccacgagaaccgtggccttggccatgctttcttgaggcacatagagcgcacaaaagttctggcttacgtacttgacctggcagccacgctcaatggtcgaaagggtgtcccgccatgggagcaactgcgggatttggtcgtggagctggagcattaccaagaaggcctgacaaagcgcccatcattgattgttgcaaacaaaatagatgaagagggagccgatgaaatgtatgaagaactgaagaagagagtgcagggcgttccaatgtttccaatatgtgccatcttgcaagagggagtaccagatctgagagttggtctgagagaccttatggatgcctcagatcctcagggtattgagttgagcaaaattgtgctggccagtttctacgtcctcaaagagctcgaagacgacggacctgtaactggccatacctcaggtcagctaaaacagacaagttggcaacgtagcatcaagcctattgttgtctcggtacctctcaaggatagtaaattttctcatgatgaatgttacaaggaagaaacggtgagaagaaagaagtaccctgacctggaagagaagagcagcagcaccaaggccaccgtcgtgctgggtgtggcgccggagaagaaggcgcagcagtttgaggcggccgcagagtccggcgagaccgcccatggctgcagctgcggttccagctgcaggtgcaacccttgcaactgctaagatgcctgcctgcatctaccatctatcatgtgtgcgtgtgaattgtgatgcagaaaaataaagaagcttggccatttgggttggtgcttgaccaatatatatggggtgtgtgtgtgtgtgtgatgggttaatcgatgtgctatgttattggtttcactattcacgtactatgcttgtaatggtgtatccacagatgaagtcaagggatcaatagattaaattggtttggtcagccacaacatacaggcccacctcaccccgtccatactgacgccggagcgtggacctcgtcgacgccgaaggaagcacgcgatcacctcctgagccggctgcaaagccgcaccccctcacgaattaatcagcctcgccggagcgaagccttgcaacggccacggcaacggcagcggcgctgcggcggcggcggggcggtcgacgagtgtgtcgaggaagatcgagtcggagggggcggtgctgatgcccggggtgtacgacgcgctgtcggcggcgatcgtccagaagaccgggttctacgccggcttcatctccggctacgccgtctccggctccttcctcggcacccccgacgtcggcctcctcacgccgccggagatggcggaggtggcgaggcggatctgcgcgtcggcgcccaacacactcttcatcgccgacgccgacactggtggtggcaatgctctgaatgtgaagcgtactgttcaggacctgatggcagcaggtgctgcaggctgcttcctcgaggaccaggcatggccaaagaagtgtggacacatgcatggcaagcaggtgataccagcagaggagcacgctgtgaagatagctgcagcgagagaggtcgttggtgatcgggacttctttatcgtggcccggactgacgctcgatctgtcactggtcttgatgatgccattaggcgtgccaatctctacatagatgcgggagcagacgcgtgcttcgtggaggcgccgcggagcgacgaggagctgatggagatctgcaggaggaccaagggttatcgcgtgtgcaacatgctggagggcgggaagacgccgctgcacacgaggcaggagctcatggagatggggttccacctcatcaagtcccccctcaccaccgtctacgctgccgcccgcgccctcgtcgacgtcctcgccgccctcaagcgcgccgagaccacccgcgacgagctccaccgcctcaccaccttcaccgagttcaacaacctcgtcggcctcgactcctggctcgacatcgaggttcgcttctccgtcaactcctcctcctccgttcccaagccgctcccggcaccaccggcgctggagaccacgacggagatggagaaggccaaggccaaggcggccgccgtcgtcgccggaaacggagctaccaatggggtacactaacattcgaaatgtggctgtcatcaggaagccatgaaatatggtggattacattgattaattctcctgcattattggtgaattttgtgaggtatgtgttattattgcatggtacgtagctatatattgctgtgtgagtgagtgagtgattatgttgggattgggtgcgtgattccgcacataaactgtaaggtaaatatgtgttgagtattcttcgttttccaattttttcgattcagtacagtatatgcagctatgcatctgtctgaattttgagtcagtatgctcgtgtgtgcacggtccagattgatcgtcgatccatgaagcatctgtactgtcagtcagtgtcatgttcagtgtaccttcaaatttatttggaataaatcggcccatggaccgtctaccattgggctgttcgacatcttcttaaaaaaaaaattattctgttgtattcagttatttggaaataaagaaacttgtgaaattttggccaagtttgatggccact

SEQ ID NO: 27490 - DNA, 219 bp, Oryza sativa
  Clone ID: PAT_MRT4530_32179C.1
atgtccctttacgccgtcttgacaaggcctccgaggaacctaagggatcttcggctggggacgcccagagccgataaggccttgtcagatcctgtagagacgaaagaccaggtcaaaggtccaagagccttgtcctctgagaaaaatcctctgacgataaggctgggggctagggagagtggtacaaagactaccaagaaggccaacgccagtccatag

SEQ ID NO: 27491 - DNA, 2230 bp, Oryza sativa
  Clone ID: PAT_MRT4530_3217C.1
gccacggactcctctaattctctctcttgctttctctctcctcgcttcccgggtttgatacgtggggtagggaagcgattaaccggcgatcgatcgatcgatgcaagtgatcgcgctcggttgatccaggaattggagagcatcggctgatcgagagatggcggggaacgagtggatcaatggctacctggaggcgatactggacagcggcggcgcggcggggggagggggagtcgacccgaggtcgccggcggcgggggcggcgagcccgcgtggcccgcacatgaacttcaatccgacgcactacttcgtggaggaggtggtgaagggcgtcgacgagagcgacctccaccggacgtggatcaaggtcgtcgccacccgcaacgcccgcgagcggagcacccgcctcgagaacatgtgctggcgcatctggcacctcgcgagaaagaagaagcagctggagcttgagggaatcctgaggatttctgcacggaggaaggagcaggagcaggtgcgccgcgagacttcggaggaccttgcagaggatctgtttgaaggcgagaaggcggacaccgtcggtgaattggcacagcaagacactcccatgaagaagaagttccagaggaacttctcagagctcaccgtcagctggtccgacgagaacaaggagaaaaagctgtacattgtgctcatcgtgctcatcagtcttcatggtctagttcgtggcgataacatggaacttggtcgggattcagatactggaggacaggtgaaatatgttgttgaactcgcaagagcacttgcaatgatgcctggcgtgtacagagtggatctgtttactcgtcaagtgtcatctcctgaagtggactggagctatggggagcctactgaaatgttaacctccggttccactgacggagagggaagcggtgagagtgctggtgcgtacattgtgcgcattccgtgcggtccaagggacaagtacctccgtaaagaggccctgtggccttacctccaagagtttgtcgacggagctctcgcgcatatcctgaacatgtccaaggctctgggggaacaggttagcaatgggaagctggtcttgccatatgtaatccatggccactatgccgatgctggagatgtcgctgctcttctttctggtgcgctgaatgtgccgatggttctcaccggtcattcacttgggaggaacaagctggagcagatcatgaagcaagggcgcatgtcgaaggaggagattgactcaacttacaagatcatgaggcgcattgagggtgaggagctggccttggatgcagcggagcttgtcataacgagtacaaggcaggagattgatgagcaatggggactgtatgatggctttgatgtcaagctagagaaagttttgagggctcgtgcgaggcgcggagttagctgccacggccgttttatgcctagaatggtggtaattcctcctgggatggatttcagcagtgttgtggttcctgaagataccagcgatggagatgatggcaaagactttgagattgcctcgccgaggtcactgcccccaatctgggctgaggtgatgcggtttttgaccaatccccacaagccaatgattctggctctgtcaagacctgatccaaagaagaacatcaccacccttgtcaaagcatttggagaatgtcgcccactgagggaacttgcaaacctaattctgatcatggggaacagggatgacatcgatgagatgtccgctggcaatgcaagcgtcctcaccactgtcctgaagctgatcgacaagtatgatctgtacggaagtgttgcattccccaagcatcacaagcagtcagacgtaccggagatttatcgcctcacagggaagatgaagggcgtcttcatcaatcctgctcttgttgagcctttcggtctcaccctgatcgaggctgcggctcacggtctcccgatcgtcgccaccaagaacggcggtccggttgacattaaaaatgctctgaacaatggactgctggtagacccgcatgaccagcacgccattgccgacgcgctgctgaagctggtggcggacaagaacctgtggcaggagtgccggaagaacggcctgcgcaacatccagctctactcgtggccggagcattgccggacatacctcaccaggatagccggatgccggatcaggaacccgcgctggctgatggacacgccggcggac

SEQ ID NO: 27492 - DNA, 1126 bp, Oryza sativa
  Clone ID: PAT_MRT4530_32180C.1
gcacgaggcgccattgattcctcctcctcctcgcttcgctgctcgagagctcaatgattcgattcagaggttgaccatggtgtccacgatgtacaaggaggcggccgccacttgcggcgacggggagcactactcgcggctcatccgggagctgtgcgcgctgctcgccgccatcatctccccctcctcctcctcctccaccgcggcggcggcgaggtctccggggatgtcgcccgcggcggcggcgacgatgctgctcggcgcgtcggtggcgctgatgctgtgcgggtcggtgacgttcgcgatcgggctcctcctcatgccgtgggtcgccggcgtcgcgctgctgttcggcctctccgccgccgtctccaccctctcctccggcgtcttcggcaaggccgccgccgccgcctcttctccggtggtgacagatttatcgctcatcatcacaattaagatatttaaaaggagtgtagatttgcgagtttctcctctccaatggcctcaatctcttgactctgaatctccaatttttcttgataagtatggtgatcgcgaggctgcacggattccattgccataccaatacaaggttccagacttctctaaattttcagggcaagatgatatatctacaatggaacacatcagccgattcttagcacaatgtggggaggcatcggctgaagaagctctgaaagttagatttttttttccattatccttgactggatcggctttcacatggttttcatcgctaccatcaaattctatccaaggatgggccgatcttgagaagcaatttcatgactacttctttgctggagtcagtgagttgaagcttgcagacttaatatcagttgagccgcaagaaggagaatcggctatggaatatattcagagattccgtaatgtccgcagccgatgttatagtttgagcctaagcgatgaacagctagcggatcttgcattccaaggattatcagcacctatcagagatagattctttttccatgagtttgacagtctagctcatctaatgcaaacaatatcggctcatgaaagccgattgcacgaagcaaaggaagatcggttttggagttatcaagacaataaattttga

SEQ ID NO: 27493 - DNA, 153 bp, Oryza sativa
  Clone ID: PAT_MRT4530_32181C.1
gttatcacccgcagccctcccctgccaatccatagctattgctttgatgctccaccaccgaccatcctctgccggcacgtgggcaaagctacatcgacgtcctccacgggccagcctcctgcgtactgccacacggccaaggggatcctctag

SEQ ID NO: 27494 - DNA, 421 bp, Oryza sativa
  Clone ID: PAT_MRT4530_32182C.1
tctagttttacggttgggggacgattttccctagcctatagatggccatgtgggccgcccagcatggcacggcctaggcccggccgtgcctggaccgaggcttgtcgggccggcacggcccgactgacgcaccgggccgtgccgtgccagcccacgtgccgcactcacggcccaggcacggcccaacacgcctcgggccgtgccgggccgggccgaaggcacgatgggctatttccctatactttgtgtgccgggcctggcctgccggcccatcgtgccgggccggcacggacccgacccaaattgggctgtgccgtgcttgggccgggcaaagccgtgccgtgggccgggccttcgggcctcgtgccttatggccatctgtaccctagccttggccagtgatagagtgagcttgtaatac

SEQ ID NO: 27495 - DNA, 474 bp, Oryza sativa
  Clone ID: PAT_MRT4530_32183C.1
atggcgcgcaccagcgcacacaccgccgcggcgccacccccggcgtccgcgatcaccgcgtcgtgcccgccctccgtccggcacagccgctccaccgcggccagcgcgctccggctcccctacgccgcctccctccgcgacgcgacgcgcgaacgccgccgcggctccggcggcgacagcgcgggggtggttctccttagcaaggcagagcatgaaaatgccacggatcccgatgcggatggcgcgggcgtgggccttctcctcgagaagcgtaacgaggccctcctgcccctccatgaccccctctgccgcgcccagcaccgccctagcatctgccccggacaccaccgccgcggcttaacgccagccaagccacccctacgtcaaaatgcacgtcctacaactaaacattttgagggcgaaaaagaggaaacaaggaatcgagaaattattgctgctagttccaaggggtag

SEQ ID NO: 27496 - DNA, 159 bp, Oryza sativa
  Clone ID: PAT_MRT4530_32184C.1
cgcgtccgctccactgaactctaagcgatccaactgactaaatgttttggccctcaccttgatggcgctgggcgtcatatgagcgcgcggatcgcaagggcttaagtccaccgtcggtctccccgtcagccttcgtttcaccaacttggacttctagtc

SEQ ID NO: 27497 - DNA, 386 bp, Oryza sativa
  unsure (1)..(386): unsure at all n locations
  Clone ID: PAT_MRT4530_32185C.1
ttagtacactggtgatttgatntgcaggtatgaccacgggggctagcttgtgcactgttgtgctgtgttgcttgcaatttgggttgaaattatgtgactgcccaatgtgatgaaagggtgctgtctgtgccaagggtgtgctgagctgtaattgaaatgtgaattgaatgtgagcaccacggtggttggaagtgtgaagtgcacaaaaatgtgcaatgcacaggtccaggagactgggaatgaaatgncacaatgccacagtgacctgtagattatctttttttttttggtagatctgatgtcttttgttaccacatggaaaataaaatgatggaaccatgcgaggaaaaagcgtggaattaatacaaaaaaaaaaaaaaaaaaaa

SEQ ID NO: 27498 - DNA, 798 bp, Oryza sativa
  Clone ID: PAT_MRT4530_32186C.1
atggcgagatgttcgttcttttcctcggtcggaaccaacgatgtaaaaggcgcgggccgggttgggggcggggggggggggggggggggggcgctgcggcgtacctcttctccggcgcggacgaagaagcgatcgaggagcggcgcggcggagagcggagacgcgcagaaagataagttggacgacagcatagctcggtgccgacagagtgacagggcgggaaaaggagcggggtgcggcgaccgtcgggggtggagcggctggtccgagcgagaggagagggaggacgcggggaggccgacgagcaggcgggcaggccagcaagcgcgcacggagagggaggcggtgatgaggccgacgagtgcgcagagagggaggaggttaggaggccacaacgatggccacacaaagggcattgacgtcaccatgcctagcggcagtgcactctctagcggatccagccctagctacagcggcggcagggaaggttgctacggcggaggggaagaggggtcacgctgctcgacgcctgcaacaccatcaccgctcaccttgaccggctccaccaccgccgctcgttgtgccagttcgtggtccacctcctctcatcattgccttccttggtctgtcgcccgcatgccgtgcttgcggcttgccgaccatgacgagcgggccttagtgtcaccttcctcgccgctcccttcgaccagccccgcgaccgagtctccggcgccgcgagcttacttctcgccgtcaacgttctctcctcgctcgcagtggcagccgcaggcgctgtcc

SEQ ID NO: 27499 - DNA, 381 bp, Oryza sativa
  Clone ID: PAT_MRT4530_32187C.1
cggaattgcagagtcgggctagacgtacgcgtacgcgagcctaggccaaggagggcatgtacgataggaactacgggacctgctcgaaacaaggagggtcaagacagggaacctgatgttgctgatgctacatgatacagctactggtataatggtagtacctttaggtcactggagccagtgggttagcacaactgccggatgagatcgatggacaaacaataaactcttctgaatgaagtaatagagaccatgagaacatacacacgcgaataagggatggaattacatgaatattggataaagcggcctatatacatacaacctggcctatcttatgaataacaccatgtgcacacgaattatgaacatacctatgtg

SEQ ID NO: 27500 - DNA, 494 bp, Oryza sativa
  Clone ID: PAT_MRT4530_32188C.1
ggacccccaaaaaggaccacagggagcagcagaggggagcatcagttaccctaaaaaaagggctaaagaaaaaaacgagtccaaacccatacaaggggggaaaggacattaggaattggtacgagggtacaagcaaccacccagttccatacacaccgggggggggggaaaagctttaatccttttttgggcctggggaaaaatcccctccagcatccatgaaatggagggggaactcgtactccggatcgcagcccaaaaaaaaatcggacatcagggaaaacatggcctcctttttcccagctttggaagcaggggggaactaaagcttaactcgagcccttttttgaagggcaacccttttgattgcaagcaactgatggggagagctttcaccaattaccagccaccagcctttttccttgggctttgggaaccggggggcatgaactggccccacctaaaaaggcaagttcgtaatgtcacgctccagg

SEQ ID NO: 27501 - DNA, 456 bp, Oryza sativa
  Clone ID: PAT_MRT4530_32189C.1
atggagaggttcccggacaagatcgccgtggccgtgtttgccgcctcgtccatgccatgcgtcggcaagcacatgggaatcgtcagggagttgatgagggaaagagctcccaaaggtctgctcatggatagcaaaatgataccaatgaacaacaaacgaggtccaggaacagcagatttgaccctggcaaaattattgatgacacctggcagccagttccaggatgatccgatgatgaaggatgacaagctgcttaccagtgccaactatggttcggtgaagagggtgtgcctgataggcatgggggatgacatcaaggagctgcatcgttatttgatcacgttgagcccgggcacggaagtcgaggagattgctggagccgaccacaacatcatgtgctccaaaccaagggagctctgtgatcttcttgctaaaataagcagcaagtatgactga

SEQ ID NO: 27502 - DNA, 177 bp, Oryza sativa
  Clone ID: PAT_MRT4530_3218C.1
atggcaggtggcggcctctcctccggcggtggccgagcggcggaagcggccgcagcggcgaccgggccgctgaagcggcagtggcagcgggatgggaggcggtgcacggccagatttgtggatgattttgtcaatgacttgtggattgtggatgatattgtggatgggcaattgtag

SEQ ID NO: 27503 - DNA, 3124 bp, Oryza sativa
  Clone ID: PAT_MRT4530_32190C.1
atggcggtggcgctccggttcgcggccgtcgcgcgggactcgccggcggccgccgctccccccagggtggggagggagcagcagtatctcgcgtgcgcggcggcggcgaggccgggagggaggtgttcgaggaggaggggattggtggtgcggtgccagagcggggcggcggcggttgtcctcaacaaggacgacgcggcgtcggtggccgccgccgccgcctcctccgcgacggggttcaccgtcgccatgaagttcggcgggtcgtcggtggcgtcggcggagcggatgcgggaggtggccgatctcatactcagcttccccgaggagactcccgttgttgttctctccgccatggggaagaccaccaataacctcctcctggccggagagaaggctgtcagctgcggcgccccgaaggcgtctgaaattcccgagctcgcagttatcaaggagctccattatgatgcatttgatattggctttataactactgatgatttcacaaatgcggacattcttgaagcgacatatcctgctgttgcaaagaggttacagggtgattggattgacgaccctgctattcctatagttactggtttccttggaaaaggatggaaatcatgtgctgtcaccactttaggcagaggtggcagcgacttgactgctaccaccattggcaaagcgttgggattaagagagatccaggtatggaaggatgttgatggtgtgttgacatgtgatcctaatatttgtgcgaacgcgatacctgtaccctacttgacttttgaggaggcagctgaacttgcctactttggtgcacagagtatattaaccagcattgtattgaagtcaaacattactatgctggatatagtgagcacaaggatgcttggccagtatggttttctggcgaaggttttctcaatatttgaagatttaggtatctctgttgattgtgtggctaccagtgaagtcagtatatcattgacactagatccatcaaaactatggtgtcgtgaattgatccagcaggctttcaatgttctacggagaaatggcgttaacgtccagatgatctcacaaggggcatccaaggcccttcattcagcattctttgagaacggtttcttgtcagaagttgaggaagaggatcttcaacacaatggctctcctgtgagcccaaatgcgcagcgcctccgcctcggcaagtcggcgacggttgcctggctgttccgcctccaccgcgagaggctacgtcggcgtcgctccgcgccaccaccaactcgcgaggccgcgacgccgtcgtcccgctcccgagctcgctccgcaagtacggcgacgacgcccgtggcgcgccgacttccatctccggccgccaactcgcgaggccgcgacgccgtcgtcccgctcccgagctcgctccgcaagtacggcgacgacgcccgtggcgcgccgacttccatctccggccaccgccaactcgcgaggccgcgacgccgtcgtcccgctcccgagctcgctccgcaagtacggcgacgacgcccgtggcgcgccgacttccatctccggccaccgccaactcgcgaggccgcgacgccgtcgtcccgctccggagctcgctccgcaagtacggcgacgacgcccgtggcgcgccgacttccatctccggccaccaccaactcgcgaggccgcgacgccgtcgtcccgctcccgagctcgctccgcaagtacggcgacgacgcccgtggcgcgccgacttccatctccggccaccaccaactcgcgaggccgcgacgccgtcgtcccgctcccgagtgctctaattcgcaagtcggcgacgacgcccctgacatttcttaagatggaaagtttccactgccaagcgctgttgcgggtcttcagctagctgtagaaggtattcagctggctcccgaggtgcttgaacaaatttctaatgttcttaattaaaccatccagactactccgatgtcagagaacattgagcttattactctttcagatatcactactcttttagagagtgccctgcacactactcctttacaaagaacttcatcaacaccaaatgactgcaacactatcatgcctatatctctatctgtgtactcaagtcagcacattcttggcttggtcaaagagattatgtccgatgtaaaattgagaccctatatcgttggagcagtctgcgttgtgggagtcatagtagcctatattctttacaagaaaagaacagctgctctcaacaatagaaatcccaatggaggggacgacattgctgatgatttttggggcaattggcatgatgggaacctggagatgtttgatgatagcaatgaccatggttcttcagacgatgaaggagccattcacgatattgttgccattcctggagaaggttttcaattcaatattattgctattactggaggagggttccaattccttgttgaggtatttggcagtgattcttcaaacgatgaaattcagaatgttgctattcctggaagagggttccaattccttgttcaggttgccataccagtcgcccccacattcaaggtgttcatggcattgacaaagtttgaagggttcactgcacccccttacagccctaacaatagcaagaaccttcccctaacagcagccctcctcaagtttattgatgcggtgaatcaaggctccttagtgccatcagtagtcttcctcaagtttattgatgcggtgaatcaaggctccttaaagccatcagtagtcttccccagttctcaaatttctggattcaatagatcaaggctccttaccaccagtaccagtcatcctgcagtgcatgaatccaatggatcaaggctcctttcactcagtgcttagcatttcctgctattgttgtatctttggaatttggataggtttaaaggtgattcaggcatatagtcatttaggccacctaggtgaaatggtgaattccttggtgttgtaagagccctacaaggagcaccctgtgttaatgataatcacgcatagcaggctcacttataatgttaagtttgctgcaataccagcggtgcgatcgtaaataacatcgttcgctatcttttggaat

SEQ ID NO: 27504 - DNA, 2068 bp, Oryza sativa
  Clone ID: PAT_MRT4530_32191C.1
tcgcctcgccgccacctccgcttttattctagaagcttcggtcggactcggtgctgacatggcggtggcgctccggttcgcggcggccgtcgcgcgggactcgccggcggccgccgctccccccagggtggggaggggggagcagcagtatctcgcgtgcgcggcggcggcgaggccgggagggaggtgttcgaggaggaggggattggtggcgcggtgccagagcgtggcggcggcggttgtcctcaacaaggacgacgcggcgtcggtggccgccgccgccgcctcctccgcgacggggttcaccgtcgccatgaagttcggcgggtcgtcggtggcgtcggcggagcggatgcgggaggtggccgatctcatactcagcttccccgaggagactcccgttgttgttctctccgccatggggaagaccaccaataacctcctcctggccggagagaaggctgtcagctgcggcgccccgaaggcgtctgaaattcccgagctcgcagttatcaaggagctccatgttaggactattgatgagcttggattggatagatcgattgtttcaggtttattggaagaattggaacaacttcttaagggtgttgctatgatgaaagaactaactcctaggacacgggattaccttgtttccttcggtgaatgcatgtctacaagaatatttgctgcatatttgaataaacttgggaaaaaggctcggcagtatgatgcatttgatattggctttataactactgatgatttcacaaatgcggacattcttgaagcgacatatcctgctgttgcaaagaggttacagggtgattggattgacgaccctgctattcctatagttactggtttccttggaaaaggatggaaatcatgtgctgtcaccactttaggcagaggtggcagcgacttgactgctaccaccattggcaaagcgttgggattaagagagatccaggtatggaaggatgttgatggtgtgttgacatgtgatcctaatatttgtgcgaacgcgatacctgtaccctacttgacttttgaggaggcagctgaacttgcctactttggtgcacaggttttgcatccccaatcaatgagaccagccaaagaaggtgatataccagttagagttaagaattcatataaccgtcgagcacctggtactgttattactaaaacaagagatttgagcaagagtatattaaccagcattgtattgaagtcaaacattactatgctggatatagtgagcacaaggatgcttggccagtatggttttctggcgaaggttttctcaatatttgaagatttaggtatctctgttgattgtgtggctaccagtgaagtcagtatatcattgacactagatccatcaaaactatggtgtcgtgaattgatccagcaggaacttgatcatgtagttgaagaacttgaaaaaattgcagttgttcatctactgcagcacaggtctatcatctcactgatagggaatgtacagagatcgtcattgattcttgagaaggctttcaatgttctacggagaaatggcgttaacgtccagatgatctcacaaggggcatccaaggtgaacatttcattggtggtccatgatagcgaggcgaaacagtgtatacaggcccttcattcagcattctttgagaacggtttcttgtcagaagttgaggaagaggatcttcaacacaatggctctcctgtgagcccaaatggtgtcatttacggaaactagtcgacttagcatttcctgctattgttgtatctttggaatttggataggtttaaaggtgattcaggcatatagtcatttaggccacctaggtgaaatggtgaattccctggtgttgtaagagccctacaaggagcaccctgtgttaatgataatcacgcatagcaggctcacttataatgttaagtttgctgcaataccagcggtgcgatcgtaaataacattgtttgttatcttttggaataaagaatgatccggtgttgaaacaaaaaaaaaaaaaaaaaagggcggcgctcgcgatctagaaca

SEQ ID NO: 27505 - DNA, 647 bp, Oryza sativa
  Clone ID: PAT_MRT4530_32192C.1
gtccggcgaaaatattggacctcacagatttgggagagcgggatgggagaggtacatgacaaacaacatcattcagaaaaagaaaaggagcacatgttttgaagcagtcatcgatgtcaagatccacatgtgtacgggcatggaaagaacggattaatggaggaaatatttcccagggctctctcgttgaccctgaggcgtttacttttcttgccgttgtcagcatcaaagctttggttttggttaacatctaagttgcaaatggcaattggtttacgatggttttggcctttggactgcgactcttgaagtctagattagcagcaatgctggaccagactgcagcatcattagaggggctgagaatcgattagtcaggttaatggcagtgttcatgtgatcattagctggtatttcagtaaccagcaaaaagattgcttgcataagtattttcctttggtaaataaggagtacttctgatgttgatagaaccccctgtttctatggatatgataatgtctgtcaaatacaaatgcagaagggcacaagtggctatcattaaaaatcaaagttacaaggagttaaaaataagtttcaggaaaatgaaggcggcagcaagaattgattgtattaaacaccccccccac

SEQ ID NO: 27506 - DNA, 1736 bp, Oryza sativa
  Clone ID: PAT_MRT4530_32193C.1
atgccgtcctacgcgcaccaccacagttctctgggggatgacgaggaggagaacgggcgtttcttgagcctgtgtttgcttggtttctggaattttgggaatttatggtttttgctgtgtgtgtatgtgggtgccttttggacggagaaggatgggaagatggacgcgctgaaaagtagttgccggtcggaggaggcggccgacgagggggcggccgcggcgccgtcggcgtgggggatggttgagagggacgggttctccgtcgaggagttgctcgacctcgaggagatctgcgaggatgggaagatggacgcgctgaaaagtagttgccggtcggaggaggcggccgacgagggggaggaaaagtcgaaggacgactcccagccgtcgtccgtcgtaacgtacgagcttgtggcgcccccgccgccgcctccggagctgcttgacggaaaaggacgccgccgaggagaacgagcaggcgctggccctcgtcgccgcgccagaggaggaaaagtcgaaggacgactcccagccgtcgtccgtcgtaacgtacgagcttgtggcgcccccgccgccgcctccggagattgttgacctcctcaggacggagcttaccgcgcgctgccacccgcgtcctatccggtgcggactccgaccatctgcgcgctgtcaacggaggcgctggtgccggtgaaggcgaaacgcagcaagcgctctcgggccacggcgtggtctctctcgggggcaccgcctttctcggactccacgtcatcctcgtccacaaccaccacctcctcgtgctcctcgtcggcttcgttctcgtcgttctcgccgctcctcaagtttgagtggcacccgctcggcggcacgtcggacctcccggacgatcaccttctgccgccggggaagaagtccaagcacggtaagaacggcaagaacaagcctaagaagcgtggccgcaagccgaagcagctcccaccacatccctcgggcgcggcggcgtcggcccccgcgccgggcgaccggcgctgtagccactgcggcgtgcagaagaccccgcagtggcgcgcggggccggagggcgccaagacgctctgcaacgcgtgcggcgtccgctacaagtccggccggctcctccccgagtaccgcccggcgtgcagccccaccttcgtgagcgccatccactccaactcccaccgcaaggtgcttcgagatgaggcgcaagaaggaggtcggctccggactcctcaccgccgccgccgccgcagcgcccgccgtggcgtcgttctagctaaagcaagctagccaccccgcgcgcccccgcggtggctgtacatttgtccagccgtattagtcctgtaccgtacctggatttttttcccctttcttttccagtattatcttagttccggttggattaattagagttaggtgcctttaggtcatgttaggtctaggaattcagctttccggtgctccagctcaaaagcttttactatagtttgttagggcactgctgctgtagcagcagtgcagccgcggcagcgctagcgcagaacttcatttccattctagcttacccgaaggagttttttttttctctgaggtagtacctgcatatgcttggttcatcaatgccggtgtgattatttctgaggcaaaaggcagaagaaaccaagaaccaaagcgccctttgcatggcgagaaggggaggaagacgaaagccaaccgatcgc

SEQ ID NO: 27507 - DNA, 237 bp, Oryza sativa
  Clone ID: PAT_MRT4530_32194C.1
atggaggccgacaaagagggatctagcgccatctctgatctcgatgagttcatacttgaggagaaagactaccctgtcgtcgactacgtgttggttatctatgccgccaactgggagcagagcagcggcgcagcattgaggtttgcagcgtcgccggtggcgaacggcgtctctgctggggagaagccgggaaagcagccactgaactgcccctgccagttgccaatcatgggttag

SEQ ID NO: 27508 - DNA, 335 bp, Oryza sativa
  unsure (1)..(335): unsure at all n locations
  Clone ID: PAT_MRT4530_32195C.1
gggatttcgggcacgaagctttnatcccncagccgaaatccaaatcaaatccaatccgaagttcgttgcncccnaagannatgccgtgcacgccatgttgtgttgttgcgttgttgttgtttcnttgaattggtgcattgaanaattnngaaacaaagttgnagggagaanaaggtcnaatccntccnaatntccccctggnctggccaggganttgantttcccggtgattccnatgttgtttcaattaanccctaatnaantaaacccagttttcccaanccaanaaacaaacgtgggnggnaggaatccanatcntgnagggngggttantg

SEQ ID NO: 27509 - DNA, 759 bp, Oryza sativa
  Clone ID: PAT_MRT4530_32196C.1
atgaggatccgcaagcgcacgccggtcagggccgcctcgccgtcgccgggaccgtcgccgccgccgccgcctccgccggcgcagctgaaggtgaggaggctctgtgccctctgtccctttgacacgttctgtttccgacctcttcttggcttctgccttccttcccgtcgtcccggtgatcctccgccgctcacctgcgactctctgcagggggggagaccaccggtggtccatgccgacgaggaggaggaggagaagaagaagaagaagaagaagaagaagaagaagaagcaggggagcatggtcgtcggcggggacagggaggaggaggaggaggaagaagacgacgacgacgacctggtcctagtcgcctccacgaccagcgagagggacgtcaccggcgccgccgccgccggcaggtgcagccggaacgacggcaagcggtggcgctgcaagagcgcggccgtgccggggtacgtgttctgcgaccggcacatcgcgtggtccacacgcaagcgcaagcccaggaagaggagccactccagcatcgtggacccgccgcagccaaaggaagatcccgccgccgcggcaaaggcagaggacgacgacggcgtggaggaagaggaggagtccaagaaccacggcgctaacctccggtgcaacgacgacgacgacgacgaggagttccactactacggcgggttacagcacggcggcaggaagcgggcgaagagcggcggcggcggcgggccggcgtga

SEQ ID NO: 27510 - DNA, 462 bp, Oryza sativa
  Clone ID: PAT_MRT4530_32197C.1
ctgggaatttgcgagctgagtgcgcttcggagcggcgtgttcgcacgcggaggcatccacgtcgcccgcgagcgctgggaggcgggtggattccgcgccccctcgagcgtccgcgcgagcggctcccgcgccgtccgatccctcacagcaacggccctttcggcccttcctccccgaaaccctagccgccaccactcccgtgacggtgcgtcgcttccccctcctcgcgccgcctctccccgccacaccgacaccctgcgcagttgcgccgccgctccatcctccagcacctaacctcgccccgacaccgccacatgcttcgccgcatgtcctccacttcctctctcttcttgctgccgatgccgctgggctcgagcttcgccacaatccaagccccacgctgccttcagatctggtggcatctaccttgcagcggccagatctggcgaagagaggaggagc

SEQ ID NO: 27511 - DNA, 1129 bp, Oryza sativa
  Clone ID: PAT_MRT4530_32198C.1
tgttacttgagaagcaccatctggaagcacggctgatgtagaagttcagccagaaaagaccgtgccgtaggagtacggacacacgaagatccacatcaacgtgccattgttggatgccatgcaagtaccaacatacgcacgttatctcaaggatttactcaacaacaaaagaccactcccaacaactaaggtggtcaagctgacggagcagtgcagcaacgtcatagtccacaagctcccagaatagaagaaggatccggggtgtcccatgatcacttgcttgatcgggacacataaattcgaccaagccctctgcgacttaggagcaagcgtaagcgtcatgcccaaagacgtcttcgataagctcaacttcacgatgttagcaccaagaccgatgcgcctacagctggccgactcgtcggtccgctaccatgctaggatagcggaggatgtaccggtcaagattcgggatttcttcatcccggtcgacttcgtggtgcttgacatggacactgaaaaggagatgccgctcattttggggcctccgctccttagcaccgcggatgccaacattggtgtgggaataggaagcatccataaaatacgggccaaacccgtagaacatccaagtggtcgaagtggagcaacccaagacggacaacctagtgaagttcatgcagaatttcctggaaaaggaaataactattcccaggaaccgttattggaagatgccggtgaaacccaatacactggccaaaaagttagagaagccggctcagaggaagccgtctcccacaccaaaaccaaagaaggtgaggaaggaaaagcaaaagacgcccgctccatcacctccggaggtggaatgaggaggcgactgtctggtgatttaagaagggaccgggctctccgttaagtcatcatgacgagtctagcactcattcatctgcagacatctcgatggaggatgctgacgttccgtaacgtctcttgagcgacgccgacctcgaccttgtcggtgatcaggaaaaacaagcctactacatgctgaaggaccgtgagtattctcataccaagtgtatttttgcgtcattgctgggaattatatttctagaaatgtcatttagaaata

SEQ ID NO: 27512 - DNA, 262 bp, Oryza sativa
  Clone ID: PAT_MRT4530_32199C.1
ggcgaattgggatcttcgaggccggccggatcatcaaccacagcaagaagcaattcttgagctcaatcagcaacaacatctatctccttcttgcttagttaagaccttcgccctcccaagaagaagaagatgtcttcgctgcggcgccaactgcggctgcgacagcggctgccagcgcggcggccgctgcgcgcgcatgcaagatgttccctgatgtgcaggtcacaatcaccatcaagaccttcgccctcgctgctccatc

SEQ ID NO: 27513 - DNA, 4000 bp, Oryza sativa
  Clone ID: PAT_MRT4530_3219C.1
atggcggggaacgagtggatcaatggctacctggaggcgatactggacagcggcggcgcggcggggggaggtggaggcggcggaggaggtggtggtggaggtggaggtggcggtggaggtggagggggagggggagtcgacccgaggtcgccggcggcgggggcggcgagcccgcgtggcccgcacatgaacttcaatccgacgcactacttcgtggaggaggtggtgaagggcgtcgacgagagcgacctccaccggacgtggatcaagctggagcttgagggaatcctgaggatttctgcacggaggaaggagcaggagcaggtgcgccgcgagacttcggaggaccttgcagaggatctgtttgaaggcgagaaggcggacaccgtcggtgaattggcacagcaagacactcccatgaagaagaagttccagaggaacttctcagagctcaccgtcagctggtccgacgagaacaaggagaaaaagctgtacattgtgctcatcaggtcttataccgcttactttactcattggtgccattctgtatatgccactaaattgcaaaattttactgagttcctttattctttgttctactttagtcttcatggtctagttcgtggcgataacatggaacttggtcgggattcagatactggaggacaggtgaaatatgttgttgaactcgcaagagcacttgcaatgatgcctggcgtgtacagagtggatctgtttactcgtcaagtgtcatctcctgaagtggactggagctatggggagcctactgaaatgttaacctccggttccactgacggagagggaagcggtgagagtgctggtgcgtacattgtgcgcattccgtgcggtccaagggacaagtacctccgtaaagaggccctgtggccttacctccaagagtttgtcgacggagctctcgcgcatatcctgaacatgtccaaggctctgggggaacaggttagcaatgggaagctggtcttgccatatgtaatccatggccactatgccgatgctggagatgtcgctgctcttctttctggtgcgctgaatgtgccgatggttctcaccggtcattcacttgggaggaacaagctggagcagatcatgaagcaagggcgcatgtcgaaggaggagattgactcaacttacaagatcatgaggcgcattgagggtgaggagctggccttggatgcagcggagcttgtcataacgagtacaaggcaggagattgatgagcaatggggactgtatgatggctttgatgtcaagctagagaaagttttgagggctcgtgcgaggcgcggagttagctgccacggccgttttatgcctagaatggtggtaattcctcctgggatggatttcagcagtgttgtggttcctgaagataccagcgatggagatgatggcaaagactttgagattgcctcgccgaggtcactgcccccaatctgggctgaggtgatgcggtttttgaccaatccccacaagccaatgattctggctctgtcaagacctgatccaaagaagaacatcaccacccttgtcaaagcatttggagaatgtcgcccactgagggaacttgcaaacctaattctgatcatggggaacagggatgacatcgatgagatgtccgctggcaatgcaagcgtcctcaccactgtcctgaagctgatcgacaagtatgatctgtacggaagtgttgcattccccaagcatcacaagcagtcagacgtaccggagatttatcgcctcacagggaagatgaagggcgtcttcatcaatcctgctcttgttgagcctttcggtctcaccctgatcgaggctgcggctcacggtctcccgatcgtcgccaccaagaacggcggtccggttgacattaaaaatgctctgaacaatggactgctggtagacccgcatgaccagcacgccattgccgacgcgctgctgaagctggtggcggacaagaacctgtggcaggagtgccggaagaacggcctgcgcaacatccagctctactcgtggccggagcattgccggacatacctcaccaggatagccggatgccggatcaggaacccgcgctggctgatggacacgccggcggacgcggccgccgaggaggaggaagccctggaggactcgctcatggacgtccaggacctctcgctgcgcctgtccatcgacggcgagcgggggtcatccatgaacgacgcgccatcgtcggacccgcaggactcggtgcagaggatcatgaacaagatcaagcggtcgtctcccgcggacacggacggcgccaagattccggccgaagcggccgccaccgccacctccggtgccatgaacaagtacccgctcctccgccgacgccgcaggctgttcgtcatagccgtggactgctacggcgacgatggcagcgccagcaagaggatgctgcaggtgatccaggaggtgttcagggctgtccggtcggactcccagatgtccaggatctccgggttcgcgctgtcgacggcgatgccgctgccggagacgctcaagcttctgcagctgggcaagatcccaccgaccgacttcgacgcgctcatctgcggcagcggcagcgaggtgtactaccccagcacggcgcagtgtgtggacgccggggggaggctgcgccccgaccaggactacctgctgcacatcaaccaccggtggtctcacgacggcgccaagcagaccattgccaagctcgcgcacgacggatccggcaccaatgtcgaaccggacgtggagtcctgcaacccccactgtgtctccttcttcatcaaagaccccaataaggtgaggacgatcgatgagatgcgggagagggtgaggatgcgtggcctccgatgccatctcatgtactgcaggaatgcaacaaggcttcaagttgttcctcttctagcatcgaggtcacaagcactcaggtatcttttcgtacgctggggcctgtctgtgggaaacatgtatctgatcgtcggggagcacggcgacaccgatcacgaggagatgctgtcagggttacacaagacggtgatcatccgcggcgtcaccgagaagggctcggagcagctggtgaggagctcagggagttaccagagggaagatgttgtcccatccgagagccccttgattgctttcacaaagggtgatctgaaggccgatgagatcatgcgtgctctcaaggaggtcaccaaggctgccagtggcatggattggcagaggccattgtgcaagactgcttattggttccaatcaagagtgtatactaacatggaagaaaaggaggaaatgaccatgctttcccttggagttggagctgctagcaagcactcaatatccaacagaaaattcagactgaaagaagtgacagatcacaaattcaaccttggagatcaagatcataacagtggccatgtgaggaagaagctaaggcttagcgaagaacaattgactgtgctggaaaatatgtatgaagctggcagcaatctcgaccaagcactaaaacaagggcttgcggagaagctgaacataaaaccactccaagttgaagtctggtttcagaacagaagagcccggaccaaacataagcagatcgaagaagaatgcaagaaccgaggtggttggagggcctaaaggttaacttttagttgcactggatttgagtctttctgttttttttttttttttttttttttttttttttttttttttttttttttttttttttttttttttttttttttttttttttttttttttcagaaaaatggacatctgcgctcactaggacacaaaagttcagtcccagttgtgagtagtgacaacaacatgacgatgtcagttacacctaaaagttcactaaacatatatcctcaaagtttgagcaaatgagcagttacctaatccatcactagcaaagtaaaatagaagagtgaaacattgccggaagggt

SEQ ID NO: 27514 - DNA, 2172 bp, Oryza sativa
  Clone ID: PAT_MRT4530_321C.1
atgccgccgcggcgagcggcgctgctcctcctcgctctcgccgtgtatgtgccactgggaacggcaagctcaacaactatcgcgtcgtacttacttgggttatggagtagagcacatcggcattctcttcctgcccctgctccagctccagctccagctccagcccctgaaactcaccgacctggtattagacacccagtgcctaggcatcacaggaaaaggcctcatgttgccccaccactaccaccaccatcatcatcagaaagacaagtagcaccatatcagttgtttccaagaattgatgagttagaaattgagattgcagcaggaacatttctgaaacagagtcaagttcggataatgggtgctgggagtagtcttcaagatcctgaaaaaactactgtcaccgttgatttggtgccactaggtcagaagtttgataggacttcagccttactgactagcaacagatttttgcaaaagaaggtgccaataaactcgtccatatttggtgattataacgtaatatatgttcattatcctggcctgccttctttggtccctagtgttccaggatccttgggcccaataagcagtagccaatacccctttagtgcaaatgtacacaatagaagacatcagaagattaactctaaaagtgttgccataattgcattatcagctgttgtgcttgtattaatgagctttggcatttgcatcatatggaaatataaaggatttgaaaagtctcgtggcactggtcgtgtttcgaattcgtcagccacaagaaaaacaggtatgaggtcatcattctccagtatgaccagctcgacggcatcttttgtttcaacaattgcaacatgcccacctacagttaagacattctctatttctgagcttgaaaaggccacagaaaacttcagcttcaacaaaataataggtgaaggagggtatggccgtgtttatcgaggtacaattgatgatgaagttgatgttgcagtcaaattgcttacaagaaaacatcaaaacagagatcgtgagtttattgccgaggttgagatgctaagtcgtttgcatcatcgtaatcttgtcaagctgatcggtatatgcattgaacggagcacaaggtgcttggtgtttgagcttgttccaaacggaagtgtggagtctcatctgcacggttctgataaaatatacggcccacttgattttgatactagaatgaaaatagcccttggtgcagcaaggggtctggcctacctacatgaggatgccaatccccatgttatacaccgtgatttcaaggccagcaacgttcttttggaaaatgatttcactcccaaggttgcggatttcgggttggcaaaggaagcctcagaaggaatggaccatatttctactcaggtcatggggacttttgggtacgttgccccggagtatgcgatgaccgggcatctcctggtgaaaagcgacgtgtacagctacggtgtcgtgctgctggagctcctctcggggaggaagccggtggacatgacgcagccgccggggtcggagaacctcgtcacctgggcgcgccccctcctcaccgaccgggacggcctccagcagctggtcgacccgtcgatgccggcggcgagctacggcttcgagaagctggccaaggcggcggccatcgcgtccatgtgcgtgcacgtcgaggcgtcgcaccggccgttcatgggcgaggtcgtgcaggccctgaagctcatctacaacggcaacaacgacgacacctgcaccagcggctcgttcggcggcggcggcggcgaggagtacgaggacgaggaggcgtcgtcgccgtggaacaaccgctcgtggagccacgacttcgccgcgacgccgccgccggcgtcgcgcaggctggcgttcccgcgggctccggcccgcccgacgacgatggactacagctcggacccggccgacggggcggcggggacgtcgtcggcgtcggcgcggcggcagcggtcgacgtcgagcctggtgctggacaagatcgagtcgctggcggcgtacgactggtccggcccgctgagggccagcagggggaggaacttctacaggctgaggggaagcatgagcgagcatggcggccatccttccgaagattgctccatggagggctactggatgtag

SEQ ID NO: 27515 - DNA, 2103 bp, Oryza sativa
  Clone ID: PAT_MRT4530_32200C.1
ccacgcgtccgcggcgtacggcggcgacccccgccgcttactcctcttccctcctctcctcccaccggcggcgcacagccggccttccaccgcagcggagaggccggcgcgccaacgctcggatccggcctccgcgccgtggcccaagcggcgacggcgacgagcggacgacttggagcggcgtctcccccttcctcgtccggcctccgcgccgtggcccgagcggcgacggcgtcgggcggtgcttttcagctgtgcgcctgcgcctgagcttcgcttttcagccaagaacgggtgaccaagtttggccactcggtcttcactaggctacacatgtggatgaggacgtggcaccgaatatgccgaacatgtagcattgtaaacgcctcacaaaagaccgtacattagggaggggattaggcaacaaaagctcgtcgtccatccgcagatacggaactactcccctatccaacacctccgagtccgagcaacgcaagatggcgtcgtggtcgtcgcccgtcgccgccgccgccttgcaggtccatttcgggtcctcctgcttcttctccgcccgatcgccacgacagaccctcctcctaccacctctcgcccgcaaccctacactgaccatccagccccggccccatcccttccggaacatcaactcctcctcctcctccagctggatgtgccacgccgtcgccgccgaggtcgagggcctcaacatcgccgacgacgtcacccagctcatcggcaagactccaatggtatatctcaacaacatcgtcaagggatgtgttgccaatgtcgctgctaagctcgagattatggagccctgttgcagtgtcaaggacaggataggatacagtatgatttctgatgcggaagagaaaggcttgataactcctggaaagagtgttttggtggaaccaacaagtggaaatacaggcattggtcttgccttcattgctgcttccagaggatataaattaatattgaccatgcctgcatcaatgagcatggagagaagagttctactcaaagcttttggcgctgaacttgtccttactgatgccgcaaaagggatgaagggggctgtagataaggctacagagattttaaataagacacctgatgcctatatgctgcagcagtttgacaaccctgccaacccaaaggtacattatgagactactgggccagaaatctgggaggattctaaagggaaggtggatgtattcattggtggaattggaacaggtggaacaatatctggtgctggccgtttcctgaaagagaaaaatcctggaattaaggttattggtattgagccttctgagagtaacatactctctggtggaaaacctggcccacataagattcaaggcattggggcaggatttgttccaaggaacttggatagtgaagttctcgatgaagtgattgagatatctagtgatgaggctgttgagacagcaaagcaattggctcttcaggaaggattactggttggaatttcatctggggcagcagcagcagctgccattaaagttgcaaaaagaccagaaaatgctggaaagttggtagtggttgtgtttccaagctttggtgagaggtacctttcatctatcctttttcagtcgataagagaagaatgtgagaagttgcaacctgaaccatgagcctaacttcagtgttcacaacatcataattgtttctgagatttctggccattagttttttttttctgagaagtatcataccactccatagctgtttgttcgataaataaaacagttacctttgcacttataatgaggcttgtgagggtactgtgaaatttctctgaacatcttctactcttctcttttatccttaaatcaatctgggagcagtttgtaatacatacgtaaatttaaagctgggtgtttggtaattgtaaacaaatgtttcgaagagccgtgaaacattatcaattagcatgaagcactttaaaagtgctttccggaaaaaaaaaaaaaaaaaaaaaaaaaaaaaatcactcgaggcgtggtctctctcgccctcgtgccggttgaagaaatttacgtaactacatatttg

SEQ ID NO: 27516 - DNA, 442 bp, Oryza sativa
  Clone ID: PAT_MRT4530_32201C.1
atggccggccggccctcatcctcctctccctcaaacccccatgctctcccatgtgacacctgctccctcaatgtcacacagctgcgacaaactggagccctcattcagcagccacggctggctgccggcggcgaacggctgcacggtgcactgtgctccgtcggccgggccggccatggctgtacccggttcaacgaggctggcctgttctacagtagacgccatgttaggcaaggcccgccattgcagccaagaagagcagcaagaatcatcaatgcgcattgctacgcggctacaccaggttgctgccgcgcgtcgagccgtggcgccctcgccgcacgaacacgtctcgctgtctcgcaccaagcccaccgcccaccgcccaccgccagccatgccgtaccgctcacctcacctcacctacacccacccacccgcctga

SEQ ID NO: 27517 - DNA, 186 bp, Oryza sativa
  Clone ID: PAT_MRT4530_32202C.1
atggagcaatggcgctgtgatgttgccgaagatccgctgcagtccacgtcatgccggcgaggcgcctttcgctccagccactgcgccacctcagggagagatgagggcggcaatggagaccacggcgagccggcgcccttgacgacggaggatctaaggcggcggcatgcggcaggcggcgattag

SEQ ID NO: 27518 - DNA, 405 bp, Oryza sativa
  Clone ID: PAT_MRT4530_32203C.1
ccacatccgacggctgagattcatcgcgatggtgtatggtgagagcttctggcgttctttggacggctgcgatccattacggcttttctacttttcatttacctttttctggtgatgaattatcgtctatctcccgaggacggcctcgctgtgctgtgtcgccttgtacggaatagtgcatcggcacctccgatggggctcacatcaccagcaagccgtcactgcaagctaccttgacctacccagctttggctgagatcagctgcacgcgcacgagtatgccatgactagcgatatcaaaggtgaagaactactatatccagaatcttgcctctaatattgtcgttcttggcgaatactgcctagaaattatcatttgcttgcttcgatacagagagaaaagat

SEQ ID NO: 27519 - DNA, 438 bp, Oryza sativa
  Clone ID: PAT_MRT4530_32204C.1
atggcagagtggaatccagagaaggatctacttgctatggttactgatgactctaaggttgtccttcatcgattcaattggcaaaggctatggactatctccccagggaagtgcatcacatctatttgttggagccccgatggtaaaatagtagcacttggtaccgaagatggtttggttcttttgcatgatgttgagaccgacaaggatggcctgttatcctatgaagaccgcactgcacgcttctttcctcccgctcctgtgattcctaggatcggtgggctgagttctggagacactggtctttcagatgagaatgaagaatccattcaggaattttcaagcgcttcctgccagcgttttaatattctgtgcagtggtgataaaggtggttgcatttgcttcagtatctttggaatattcccagttggaaagata

SEQ ID NO: 27520 - DNA, 831 bp, Oryza sativa
  Clone ID: PAT_MRT4530_32205C.1
atggcgtggcgcaccccatgcttttatttgcgtctctcgagccagctggcccgcctgcgaaaatcaattttacaggcggacgacatcttcgcaggtgctttcctcctccgtccgctgctgtccccacaggggttggcgccgtcgttatgtcgtcgcatcgtggttgtcgtcgaggaggaagccggtggcctggcgccgtcgtcgcgacgtcgttgtcttcgtgttgttggcaccgtcgtcgtcgaggaggaagtcggtggcgaggagggagccggcggtggaggcggagccgacggcgaggaggggaactggcggcggaggcagggaggaggggagccggtggatccgtcgcttcacggtgctgcgaaggtcgtcgtcgtcgtggccaaggggagccgacagctcgcggaggcggcgtcgcggtcgtcgtcgtcgtcgttgaggagggagccggcggcggaggcgaggatgagggcaaccagcggcggaggcgggaaggaggggagccggtggatccgccgcttcacggcgccacaaaggtcgtcgtcgtcgcggccgaggggagccgacggctcgtggaggcggcatcacggtcgttgtcgtcgtcgaggaggggagccggtggatccgaagcttcacggcgccacgaaggtcgtcgtcttgcggccgaggggagccgacggcgagcggaggcagcgtcgcggcggaccacaatacgttccgcctgcaaagatcatatttttccaggcggacaacttaagaggtccgcctgcgaaaataaatgtatttttgcaggcggacctcttaagtgacttccatcaacagcagtag

SEQ ID NO: 27521 - DNA, 810 bp, Oryza sativa
  Clone ID: PAT_MRT4530_32206C.1
atggccggcagcgttacccgtcgtggtttgcacatgactggcttcgtcttggagctgcgaggcatgtgcgtggtcttggggtatccacacggagtggattaccaggccaggccgctcccggatcaggagggtgaggatgcagagcctcacgctggttgggaggtcactgcggtgatcctctccggctctcccgagcggacttcgctggcagtcacagcgggtggggactccttcccagccgcttgccagaacgccgctctcctcgccatcggcaccctgcaccagcgctacccggacgagttgcagcactcgccctaccgctaccaccctcgtcgcggaggagcccgcgactacgccaccttccgagacgctagctcggaggatgacgctaccgtcgtgcatctggcacgcatggtggaggcgtacgacgcggctcgtatcgacttccaccaaatggtgcgtcgtggcatggtggagaacaacatgaagatcctggagctgcgtcaggagaacctgcagctcaagaaggacctcgacgcgctggaggcgcagctgcaccagctcaaggtcgcccagggagagatcagccgtcccaagcgtcgccgcgtctgccgcagccagaagatcaccgcccgcaagagcacctcccggcccgagcttgttcgtcagtccctggcgtggacttgcttcgtcgagacccctcgtgccgagcctgcgcccgtggttccccaggagggggaagcctccggcgttggtagctcggagggtgcgctgttgctcaccttccgccctggcccgtcgcagcggtag

SEQ ID NO: 27522 - DNA, 701 bp, Oryza sativa
  Clone ID: PAT_MRT4530_32207C.1
gaaatggatgccagataagaggtaacaatgctgtgaggcttgcctacgacacgagggagtggacttcatcagggatactagtattttctggtaaagaggtgagggcggcggacgaggcgaggacgttggagccggcaaggtcggctgaggcggcaatggcgggggaagggaggagccacgaggcggggtcgctcggcgtcggcgccggatgcgatttgggacttctcttcgggcagcggcgtgaggaacaaatgacggaggaaagagcccggctaggtgcggaaaagcccaacagcgaaaggctctcgaacacctatgggctggggccgcgcctgtcggtgcgcgcgggacgggacacccataggccacagcccagcgtcgaatggccacagcagtacagcccaccacctatgggccatggccgaattccacggatttccgtggatgtcacaatcgtccgtttcctactcggaaaaagtacaccgaagccggccggcgggtggggagacggtcgccagggcaaggctggagaggatgtccggcggccggcgacgcgggagaagggaagggtggcagcggcgggagcacggggggagatcgaagaggacagggggagcacggcggcggcggcggcctccggtctccccgacctcagcccgtcttcaccaccgaacgccgccgccgttcttctcccctgctga

SEQ ID NO: 27523 - DNA, 161 bp, Oryza sativa
  Clone ID: PAT_MRT4530_32208C.1
cccacgcgtccgcttacgcgtctgaccactctgctgtagtgcaggaggccaatcctccccctggtgaatcctgcagagcgcctcgaggtcatataacgggatggagacgtttccgcatggaactaacggacctgctgaacgagactgcaagatcatgcaat

SEQ ID NO: 27524 - DNA, 434 bp, Oryza sativa
  Clone ID: PAT_MRT4530_32209C.1
gacccacgcgtccgccgagcacggtgacagccgggccacctcggcctaccaccagcggcctcggcggaggagcgcacctcgcctccgcacgccggctgccgggctcttcgcaccggcgcggactccagcgtcatcggagcagctcactgaatggccgcggagctgcgcgaagggggagcaggcaggcggtgaggtcgtggcggtggtggagggccgctccgccccgcttcgtcgcccgctccgccggccgccgcccgccacggaggaagacggagaggagagcaacaatggcgatggggagcagtggggatagagagaaggagagagaggatagagaggggatagagataaggggtagtgaagatgacaggtgggtccacgtgggccccaccaattatccccctattgtgtgtgtgaaactgacatgtgggtcc

SEQ ID NO: 27525 - DNA, 5552 bp, Oryza sativa
  Clone ID: PAT_MRT4530_3220C.1
attgatttattggtaaaatctttatatatttatttgccgccgcgcttcttggcagccgccggcgccggcggcgggcgccgttggcagggaagcctgcggccgtgggtggctgcggggtggccgacggcgaagggtgcggcggggatggccggaccgacgtcatcgtcgtcggagccggggtcgccggatctgcgctggcatacacgctcggaaaggatggccgtcgtgtgcatgttatagagagagacctaacagagcctgatagcgtccgcggtgaactgttacaacctggtggctacctgaaattgatcgagttgggtctcgaggattgtgttcaagaaatagatgctcagcgtgtccttggttacgcgttattcaaagatgggaaagacacaaaactctcctatcccttggagaagttccactcagatgttgctggtaggagctttcacaatggacggtttatacagaggatgcgccagaaagctgcatctttgcctaatgttcaattggagcaaggaactgttacatcattggttgaagaagatggtacagttaagggtgttaaatacaagaccaagtcaggtgaagaattaaaagcatatgcacctctgacaattgtatgcgatggctgtttctcaaaccttcgccgcgccctttgctctccaaaggttgatgtaccatcttgttttgttgggctggtcctggagaattgtcaacttcctcatgcaaaccatggccatgttgtcctggccaatccttcacctatcctattttacccaataagcagcactgaagttcgctgtttggttgatgtccctggtcagaaggtgccttccatagcaaacggtgaaatggcaaaatatctcaaaacagtggttgcacctcagattcctccagaaatctatgattcattcatagcagccattgataagggaagcataagaacaatgccaaacaggagcatgccggctgctccacatccaacccctggtgcacttttgatgggtgatgcattcaacatgcggcatcctttgactggtggcggaatgactgttgcattatctgacattgttgtgctacgtaatcttctcaagcctctccgcaatctgcatgatgcatctgctctttgcaaataccttgaatcattctatacactgcggaagcctgttgcttctacaatcaacacactggctggtgctctgtacaaggttttcagtgcctcacctgatcaggctaggaatgagatgcgccaagcctgctttgattacttgagccttggaggtgtcttttcaaatgggcctattgctcttctgtctggtctgaatcctcgaccattgagtttagtggcacatttctttgctgtcgctatctatggtgtcggtcgcctaatgcttcccctcccttcacctaaacgcatgtggatcggcgtaagactgatttccagtgcatgtggtataattttccccatcatcaaagctgaaggtgtgaggcatatgttcttccctgctacagtccctgcatattaccgtgctcctcctccaatggagtaaggggggaaaatgaaaggagaagcgaagagaaaatccctgccactgtcctgatcggcaccggactcctccggttccctctcgtgctttccccctcctcgctcccgttcctcgaaaccaggggtagggaagcgattaaccggcgatcggccgatcgatgcaagtcctcgcgctcccttgatccaggaattggagagcatcggctgatcgagagatggcgggggacgagtggatgaatggctacctggaggcgatgcgggacagcggcggcgcggcggggcgcggtgcgaggcggtggaggagtggtggccaggctcctgccgcacacctccaacgccccgacgcatcctggaacccgaggaagccggcggcgggggcggcgggcccgttggcctgcgccattaacatgattccgagggactaatgcgtggaggagggggagaaggggctcgacgggtgctaccttcaccggaggcggatccaggtgttcttcacccacaacgcctgtgagtgttgctgtctcttctggatcatgtaccagtgaatttgggacgcagcgtgattgaacaggcagtttgaacttggtggattgctgaatacttcccctccccttcaggctaaaacgcatgtggatcgggacgtaagactggatcttgccaagtgtcattttggatataatgtgtcccacatcatcagtaagctgacagtgtgaaggcaacagtggtacttgccccgccaacgtgtccctgcctattatcgtgctcctcgtccaatggagtaaggggggaaaatgaaaggagaagcgaagagaaaatccctgccactgtcctgatcggcggatgtttttcgtggatggcaattttcctgtgtaattggtagtagtcgtcaggccgtgaggttgtgtgtgctgttctaatggaacgaggggacctgtatacaccgtcacattccctgtacacttgccactttcgttgttccgtcagggatgcatggtcgactgctaatccttaaattgtgtatcccgcatgaatccgtcagcggtccaagggacaagtacctccgtaaagaggccctgtggccttacctccaagagtttgtcgacggagctctcgcgcatatcctgaacatgtccaaggctctgggggaacaggttagcaatgggaagctggtcttgccatatgtaatccatggccactatgccgatgctggagatgtcgctgctcttctttctggtgcgctgaatgtgccgatggttctcaccggtcattcacttgggaggaacaagctggagcagatcatgaagcaagggcgcatgtcgaaggaggagattgactcaacttacaagatcatgaggcgcattgagggtgaggagctggccttggatgcagcggagcttgtcataacgagtacaaggcaggagattgatgagcaatggggactgtatgatggctttgatgtcaagctagagaaagttttgagggctcgtgcgaggcgcggagttagctgccacggccgttttatgcctagaatggtggtaattcctcctgggatggatttcagcagtgttgtggttcctgaagataccagcgatggagatgatggcaaagactttgagattgcctcgccgaggtcactgcccccaatctgggctgaggtgatgcggtttttgaccaatccccacaagccaatgattctggctctgtcaagacctgatccaaagaagaacatcaccacccttgtcaaagcatttggagaatgtcgcccactgagggaacttgcaaacctaattctgatcatggggaacagggatgacatcgatgagatgtccgctggcaatgcaagcgtcctcaccactgtcctgaagctgatcgacaagtatgatctgtacggaagtgttgcattccccaagcatcacaagcagtcagacgtaccggagatttatcgcctcacagggaagatgaagggcgtcttcatcaatcctgctcttgttgagcctttcggtctcaccctgatcgaggctgcggctcacggtctcccgatcgtcgccaccaagaacggcggtccggttgacattaaaaatgctctgaacaatggactgctggtagacccgcatgaccagcacgccattgccgacgcgctgctgaagctggtggcggacaagaacctgtggcaggagtgccggaagaacggcctgcgcaacatccagctctactcgtggccggagcattgccggacatacctcaccaggatagccggatgccggatcaggaacccgcgctggctgatggacacgccggcggaccgttgtacatcaaaacagttgccttcaatcggctttgtgcataatgcattcaccgttcgagtgtttttttttttttttgactcggaattatgcattgttcattagcgtactattcagttatctcaaagatttggcaatgacaagattttattggccacacagagattacgcagtaagatgttctgcatttgcttcctgttcgtccaaattccacttgcgctgtgatcactgtcgctacaggaagatatataaaacgacaataatctacattggatgacatgaggaataatcgggatccctttgcccataatccatccttaatctattgccactgtccatcctttcttgtcctcagccaggcccatctggatggacgtcagagtcgtgtgcagtgtctgcgataacgtgtcatgtccagtcctgaactcgtacctttgcccatggtaagtaacactcgatactggggcaacgaccaccgctgttccggtgcagaacacctcgtctgcgccgaccagatcgtcgatggagacgagccgttcttcaacctgatagccgcggtccctggcgagctcgatgacgctcttgcgcgtgatccccggcaggatggttcccacggtggccggcgtggcgacgacgccgtccttgacgatgaagaggttgcaggaggaggcctcctccaggtacgtcttgtgcaccgcgtcgaggtacagcacgtcagtgaaccctctgctcttggcgtccatctgcgccttgagcaccggtcgcgtagttggtgtatcagtcttgaacccgccggtgccgcccggcatggcccggtgtatcgagtcctctacgacaaggtttatcggcgctagaccctcctgggaagatgttgtcctgaagtacgttccaaccggtgcggcgtagatgaggaacgtgtactccggggcgggagccagcccgagaatcggtccgctcccgatgagcagcggcctgatgtacagcgccccctttccttgcggtggcacccagcggcggttggcgaggacggtctgcttgacggcgtggacgaactgctccaccgacggcgacggcatgcacatgcgctcggcgccgtgctgcatccgccgcgcgttctcctccggccggaacagcatgtacgacccctgttggttcgccgccctgtacgccttcagaccctcgaagagcccctggccgtagttgatgacgccggaggaggggctgagctcgatgttgccgtagcggctgagctcgccgcgggagaagacgccgtcctccagcgagcaccgcatgacgtacatgtagtcggtcggcgtcagcccgaaccccaggttgtcccagtggatttcgccgccggtttcctcatcggacctgtcggcggagtcgagctgcggcagcgacgacctccaccggcactggagcagagaccacctgcctccggccgtcgggagcgccccgcggagaccgaggccgccgccgccgccgcatccctgcagggccctggccagcgcgtggtgggcgtcgcgtgcccacgggaggagcgagagaaactaggcagagcgagtgggatccgaaccaccgaaaaagtgcgggtaatcacacgtaccatcgggaagcgcgcgtctcaggctcagctcgtcctcgttcgtaaccaaccgttggcgcgccaaggtgaggagagcctcgcgcgcgcctcgtgc

SEQ ID NO: 27526 - DNA, 499 bp, Oryza sativa
  Clone ID: PAT_MRT4530_32210C.1
aacgagttatatagccttggtgccggacaggcccgggtgaatcctttggggaaattttgcatgcgtggatggggatgagatgcagtgtgcgcaattgttggtgcttgcatacgaggaatgcactgagtaagcgcggagtgcatcaagctgcgcgtttgacttacgtgccactggcacactgttggtgacacaccgcccgtgcgctcctacacgattgaatggtccggtgaagtgttcggatgcgcggcgacgggggcgttcgccgcgccccgacgtcgcgagatagtccattgaaccttatcatgttgagaggaaggagaagtcgtaacaaggtttgccgtaggtgaacctgcggaaggatcattgccgtgacccctgaccacagccgcgaacgcgtcacccactgcccaccgagcgctcgcgcgcgaggcgacacgaggcaccccgggccgcaacagaacccacggcgccgacggcgtcaaggaaaaaaaaaaaaaaa

SEQ ID NO: 27527 - DNA, 330 bp, Oryza sativa
  Clone ID: PAT_MRT4530_32211C.1
atgacaaagaacgacctgaagatggctagattccacgacgagattgttgcacggtggtggctagattttgcagcggctgtttgtggtgcgttggtgcagtgcggagatgagttcctgcctcgctgcgatccactgctcgctgtggccgctgcactgcagtggcagtcgcagacgcaggctcgcagggagaggggagggctcgtggttgaagcggacgatccagatgagccaaatgtaccacgttttttgttctccaaggcgacgcagtgtcagttctcattcatggtgtatgatggagtcgagacggcatggaacaggagaggaggatag

SEQ ID NO: 27528 - DNA, 1761 bp, Oryza sativa
  Clone ID: PAT_MRT4530_32212C.1
ctaatccaatccacaaatccctccaaaggccagcttaaatatataggctgtcttgaggacaatgttgatttgttttttgcagaagcaaacatgagagtccctctctccccttccacattccacctccccatgtgatgtgaagccctcccctgtcccctccctacctccatctctctctccctctcttgaacactgagcctctttgcttacatacaattcagtagtgtagtaattcactgcagcagctgcatttgttttggtgctgcactcactcactcgtcttttggtttcttgggggtcaactgtgctgtgctcttccatctttcctttctcctcctcctctgcttctttgattgctttgcactgtttcagctgggtgtgtgcttctcctccattccttggctcctgcaacttttcactgttcttggcaggttcctgtgttgctttgtgttgttgctcttgttctttctgactgttctcttgttcttccataggatcggatcggtacaatacagccattccatccataaaggtggccaaacctcatctttcagattcagcttggttgttttgctgcgtgtgagcaagttttctgagcttttcttttgtgcaagaagcaaagaacaagacaagaatctggcttgcttgctctttatcgttagaaggaatctccgattgctgctgcttcgtttctgcatctgtttctgttcttctaatggtgaatgaataatccctagagcgagagagagaaagctgtagatagagttaaagatgagagctctgagcagagtcggcgtcgggttggcggtggtgtccgcgctgctactgctcgcgctcgccgccgagctctactacctcttcgtctacaagcgccgccgctccgccgccatctccgacgccgcctcctcgccctcctcttcttctcgcgagctgctccagcttttctgcttcaagaagccgcccgcgctcgcctcgacctacgcgcaggagccgcacgccggcgaggcggtggtggccgtggccgtcgacgacgacgacgacacggtggaggcgcagctgatgcggctgggcagcctcgtcggccccacgcggctgctcttcaccatcaaggaggagaccaaggaggacctcgagtccgaggacggccggagccggtgcgggaggagccggagcctcgccgagctgctgcattcgtcggagacgccgttcatgacgccggcgtcatcgccgctgccgatggacaagtccttcaaccctctgttcgagcccacggtggcggcggccgtgacggtgtcgccgccgcccaagtttcagttcttgaaggacgccgaggagaagatgtatcggcgggcgctcgccgaggaggccatgagggcgcggaggtcgccgcagacgaggtcaccggcggcggccggagaggaggacggcgggtacatcaccatcatggtggggaagaacaacaaggtcatccccttgccgtcgcctcccagcaatggtgatggtgatctgcagtagtgagttctttgcaaaattttaattaagaaggccttaattaactttgttcatccagtgttctagtgtagctctttgcctgtaattttctctctctctctctctctcttttctttttggtttatggtcttctgatcatgccaaattggatggttggatgtacataacatgaatattatcagcagccaagaacttcagatcaatatatttttcttcttctaatgtgtacttaaaaaaaaaaaaaaaaaa

SEQ ID NO: 27529 - DNA, 168 bp, Oryza sativa
  unsure (1)..(168): unsure at all n locations
  Clone ID: PAT_MRT4530_32213C.1
gggaaccacccttgcttnggagggaactcngctcggttgtaatcaacaggtagtctagtttggcggggttgaaattgttccttgctggtccttgcaagcacccgggaactccccttggaatnggtaagttgtgcttggttagatcggttgttggggcggcggtctgct

SEQ ID NO: 27530 - DNA, 147 bp, Oryza sativa
  Clone ID: PAT_MRT4530_32214C.1
atgaagttcacggagttgttcccggagttcaaatccttgaggggattctactctccattgaggagctcactaagagccgagggtatctctttccttgcggaggcgagatccggccttcataaacttctcccggccaaccacatgtag

SEQ ID NO: 27531 - DNA, 381 bp, Oryza sativa
  Clone ID: PAT_MRT4530_32215C.1
atggctgaactggggagggagggtatgcctacatgtcatcttgctgttgggaagggaacattggagagtggccacttcaatttcgtcaattttaatgatagattcgagaagaactttagcaacaggcagccgtcccaacaaaccaacattttactcaccattccaggatcagcaagaacccagggcttgaaggactgcaaggataaatttagaatctgtgcaactctgaatgatggtgatgatgctctgccgcaagacaatggcgccaagactctgtttgatggtgatgagaacgaaggaggaaggaaggacttatcaccacagaggaagcgggccaggtttcctaacaaacttttgagtgggcctgaatgggctaagtag

SEQ ID NO: 27532 - DNA, 420 bp, Oryza sativa
  Clone ID: PAT_MRT4530_32216C.1
atgtcgaccgagttggcaagcatgacacactggggtggagcctttaggtggagggataacagaagcctgcaccaagcaagagagggcgtcatggccaaggtgcccgagaagcgatgccaaaagtcggtggtggactcagtggtgatgaaggcacgagcggaggccatggaagtaaaagcatcaatcgaaaataggaagaagagagccattaccgacgacgatgtgagaaggtgtggaggatataggtgtatgggaaagggaaagggtaccggtgttagaagtcacgtggaaagaggcacccgaatccatataccattcgtcagacagtggttgcgctcaaggtggtggtgttgtaggtgctggcgagaactcgtgagtcccactggagttattgctgtggcgcggcttggtgcgatgtga

SEQ ID NO: 27533 - DNA, 1370 bp, Oryza sativa
  Clone ID: PAT_MRT4530_32217C.1
atggccaccgtggggcagcctgatgccatgagaaggatcaccgttcactacgtgaatccgccgccgatcgccggcgccggagaagcacacgtcgatggcctcgacgacgaggttcttgattatgtgattggtgatgttcttcaggatcaggagggtctgtatcaatcgatattgtatggcaaatacggggatgacatgagaggggcaagaaacactgctcttgcccaatctgatggtttacattactactatcacggagagaacagcagtggtgaagcaacaacctcgagaaattcagaaatcgaccaacagattgagtatgacttggtgttcgctaggcagctgcaggcaatggataatctgacaattgagacacctgcagatgaagatgatgatataagctgcgtaccctctccatctgactctgaaaccgatgaaccggcagaaggcaacaacgaagaggctgccacacaggatgataacgatgatccagacaacatgacatacgagcaaaggcaggcacttgtggaatctgtaggaaatgagaacagaggtttatctgatctgcttatctcctacttggagacatggaagtacaaatcaggctttttcccaaggaaggcaaaccatgataactgtcctatatgtctatccgctttcagacgccgagaaacactcattacattggcttgcaagcatagttaccatgaaggttgtattgctagatggctcaagattgacaaggcctgcccagtttcaaatatgaagtgtttggaccttcctagcgtgtgaggaggcgatcaacaaggctgaccactatgactcgatgagacggcatatagtggttgcagcatctgctctgcagtattaattaaaaagggaaaccttaactcccaaaaaaaacagagaagggaagaaaaagaaacacaacaacttcggagagcttccggtggacggtgagcccggccaaccgggagggcgcggtcgcggtggccgcggcggccgtggtggccgaggaggcgctagcggcggcggcgggggcgggggcggtggtggtggcggtggcggtggcggcggagccggcgggaaaggagggaaaggcggggccggtgggcacggcggcgccggtggcggtggtggtggtggcggcgggaaaggcaggaaaggcggggccggtgggcacggcggcgccggtggcggtggtggtggtggcggcgggaaaggcaggaaaggcgggcgcggcggggacggtggcagcggcggggccggtgggcgcggaggcgacggtggcagcggcgggcaaggtgggcgcggcggggacggcggcggcgttaggagctgcacaaacagcagagggacccagatgctaa

SEQ ID NO: 27534 - DNA, 553 bp, Oryza sativa
  Clone ID: PAT_MRT4530_32218C.1
acgaggaaccagatctcagtgagtgagtgagagtcaccgcgcattatcgccgatttcgatgggcaactcgctggcgttgcggtgcgtctgtggcggcggcgccgcgaggaggcctctggtgatcgggccggatgggcgtccggtgtgcgtggaggaggcggccaccggagcggccgagctgatgatcgaggcgcccgggcacgtggtcgcgcgcgccgcggacgcggcgaaggagcggcgggtgcgggcgatggcggccgacgagccgctccgcgccggcgaggtgtacctcctcgtccccgcgagccgggccggcgcgaggctcggtgaccgggaggtggaggccatcggccgcctcatcgtctccggcggcggccgcaagaaagggcggagcaagcagcccggcggcaagaggatcttcccggaggtcgtagtggacatgagcgccgcggaggaagacgagatgggtacccaggtccaggcccaggcccaggcccattgtcgtcggtccacacagtggaggcccgcccttgataccatctatgaggcgtga

SEQ ID NO: 27535 - DNA, 179 bp, Oryza sativa
  unsure (1)..(179): unsure at all n locations
  Clone ID: PAT_MRT4530_32219C.1
anatttaatagaccgatcaactgtgcctgaataagtacaccaatctggttgtcacgttgacacgtctttgacacgccgcangacgacacacacctcccactactgccgacacacacgacactaacctacaccatacgcccccacantactgacanggaccaacggccccacctattgca

SEQ ID NO: 27536 - DNA, 502 bp, Oryza sativa
  Clone ID: PAT_MRT4530_3221C.1
gccacagccacagccaccgccagacgccacagacaccgccgccgtcgccacacgggagtcgccctttcctccacgtagccgcaccctgccgcctcaccaccgctgcaacaagcgccgctgtgacgctgagtctgggcaggggaggtggatctagccacctcgtctcccaaacccccacggcaccggcgtcctctacctctgcctccgccggctggggtcgccagcagcctgcatgccgccgccaaaacctcgtccacgccgacgcctcctccggcccgccgccaaccacgccgacgacgccgcccaccgggcgtctcgtgctcggccccgccgccagccacaccgacgacgccgcccggagacccaacttgccgcccagagcagcagatccggccatggggcgcccggatccgtgcctcccggcgccggatctggacgccggcggcggcctcccacgatgctggcgcgatgccctccgctccatcttgctggcgctccaacc

SEQ ID NO: 27537 - DNA, 2835 bp, Oryza sativa
  Clone ID: PAT_MRT4530_32220C.1
cctaaaggaaattaggctagggttttcgccatggctaccacccaccacctcgagctccccctctccattcccaatctctccgactcctcctaattaatcccgtattcccaccccccaagccaaggacagcatctcgcatccgcgtcctttaattgatttgattgggttccccccctccatttcagggtttcgtttcgcatcgcagcaatcttcccgacccagcaagcttcttcttcccttgggtccgttagggtttgagattgagaggggcggcgctggcgatcgagattggtacggcggcggaggcggaggtgggcggataatgtgtatactgtgcgccgtgcaacggtggtcgcggcgcgtcgccaccatgctgccatggctggtgctcccgctcatcctcctctgggcgctctcccagctcctccccgccgcctaccgcttcgaggtcacctcccctcgcctcgcctgcgtctccgtcctcctcctcaccctcttctggtacgagatcctcctcccccgcctctccctctggcgcgcccgccgctccgcccgcctccgcgaggagcgccgcgcccatcccccccagccccccaagctccgcaagaccgccacccgccgcggccgcaaatgcaacaagccctacctcgacaagaaccctggcggcgccacggtcacgggctcctacggcggccatgtctccaagccccccttcctcgacctcggccctgccgggaccctccccaccggctggccctgcacccatgatcgtcaaaatgctgcgggtcagccggccagttggctcgacttcctctgctcctgccataacctgcatgcggcgttctggtaaaggatgtgctaatcattctgagacagcatgaaatggtgctgggggcaaatgctcagatttgactactcgggggacggagatgacttgggcggagatggtgaaagattagcaaaagaaggggagaacggagcaaaggctgaggagagcagagtcgagaaggcgaaaaggaaggcggaggagaagaggttggcgaggctggagaaggaaatgctagaggaggaggaacgcaagcaacgggaggagatggcaaagctcgtggaggagcggaggaggctaagggatgagaaagcagaggctgaagagagatccaaaggcgccacacctgttggggagaaggatcctcggaaggaagtggaacgtagacggcaggagaggaggaggaaggacgagaaggataagggatcaagcaagagcaattcagattgcgaggatatcgagagaagagtaaccagggaaggggagagaaagcgggattctgatagaagaaatgagccagagaagcgggatgcaacaagagttggcgctgagggtcataagccctataattttgatgctaacaaccagggtagtaagacagtacagagcaaggcaaagtactttggccgtatgacaggcggtctattatcttcttcaagaggttttggtggcggctccttttttggtagaagtgctcagacctctgctcctcaagttaacaagagtaatgtagtcaaaagagatacccaacctcctgcaacagccaaatctgctactgctggaggaacgacaaattcatcccgtaatgttcacatagggccacctggtcattctgggtccaaggaggcagtggtactgaatggacctcaggaagctagtaagatcttgctcagcaacaggggcacatgttggtggtggcttttcccgtgaaatgaacgggcaaccagaaccatatggagcacaaattagcaatgctcaaatcttcctatcgcagtatccccctctggacagtaaccctagttcaagccgctgtatgcaatttccaggttttccaccagtgaatggagcacctgccaacatgtcactctctcattttccagctggacatgtgccctactattgtgagccagaaccaacagtgtttgaagaaccagaacaatttgaggacccatgctatgatcctgatgcaattgcgttgcttgggccagtttcagagtccctagataactttcctctcgacttggatagcgggttcatctctagtgacatcaccaaggaaacacatacgaagccttcaccaatcgaatctcctctttcaagatcacgtacattcgaggataatcctattaggcactcaactggaaaagggcctaatggttctattttgcctgaggctagcaatgaacaggggggcacatggcaaatgtggggcacgccattagttcaagaaagtttaggtctacgaggtcctcagactgagtggctcctaccaaacgcaaatcaatttaaccatggtgtcagtcatttgaatggtggaacaagaagctcagtgggttctggtttggatgacaatgatttatggctgcagaaagcgcctttccagcaaatgcctcttgatacaaggagtctgttcctttcacatgatgtctcagagaatgctatacacaacaatttggattttggatcaccaaacaaatcagcccgtttgcaccccattgggccacctggtcattcttggtccaagtaaccattggtggtgcatggacctcgggcagctagtaagtttagctcaccaacaggggcacatgttggtggtggcttttttgctacaaatcctgatgtacagtcagtttggtcgtaaaatcaaaaagagcatatatagaccatataaatcccaatgtcaagccaatgcttccttgcctcatttgagtttaggaagtttaggtgatatgttggactgtattccttggccgtgaatgatagttcccttttatttagtatcccacaaa

SEQ ID NO: 27538 - DNA, 1081 bp, Oryza sativa
  unsure (1)..(1081): unsure at all n locations
  Clone ID: PAT_MRT4530_32221C.1
ccggccggaattttgatgctaacaaccagggtagtaagacagtacagagcaaggcaaagtactttggccgtatgacaggcggtctgttatcttcttcaagaggttttggtggcggttccttttttggtagaagtgctcagacctctgctcctcaagttaacaaggtgactaaaccgcttgttactgtaactgaccagagtaacgtagtcaaaagagatgcccaacctcctgcaacagccaaatctgctactgctggaggaacgacaaattcatggactaatgttcatcgatctgttagtccaaatgtgcagtcacagcctactggacttaaaaagtcatggcaccagctgtttagtcgctcagcatctgtgtcaccttgtcctgatgttcctgctacagcccgtgaaatgaacgggcaaccagaaccatatggagcacaaattagcaatgctcaaatcttcctatcgcagtatccccctctggacagtaaccctagttcaagccgctgtatgcaatttccaggtttcccaccagtgaatggagcacctgccaacatgtcactctctcattttccagctggacatatgccctactattgtgagccagaaccaacagtgtttgaagaaccagaacaatttgaggacccatgctatgatcctgatgcaattgcgttgcttgggccagtttcagagtccctagataactttcctctcgacttggatagcgggttcatctctagtgacatcaccaaggaaacacatgcgaagccttcaccaatcgaatctcctctttcaagatcacgtacattcgaggataatcctattaggcactcaactggaaaagggcctaatggttctattttgcctgaagctagcaatgaacatgggggcacatggcaaatgtggggcacgccattagttcaagaaagtttaggtctacgaggtcctcagactgagtggctcctaccanacacaaatcaatttaaccatggtgccagtcatttgaatgggtggacaagaagctcagtgggtttctgggttggnatgacatgatttatggctgcagaaagcgcctttccagc

SEQ ID NO: 27539 - DNA, 306 bp, Oryza sativa
  Clone ID: PAT_MRT4530_32222C.1
atatattcaaggaaaatctaggatgcaattgctacctgggttgcctgtgaacccatcaagccgataaactgggcgcaatcaaccacggtacactactggtgggaatcgcttgcaacacgtcaaggtgcacccaagcatgggactcgattcctaatccttctaatctcttgggaaatttgaaaggagcgaaaccaacgaattttccgaaacaaggaactaaccatggtggccctaatctcgaagattaaggaagaggcaaaatcttgggctatggcgggagccaaacgcctagcagagatgttaccg

SEQ ID NO: 27540 - DNA, 414 bp, Oryza sativa
  Clone ID: PAT_MRT4530_32223C.1
atgcccttgggcacacatatcagctctatctcctatctcttctcatctctctctatattctctctcagaggcgtgctcacacggggaggcatcggtcgcggcggagatggcgaggacggcggccagcggagtgaagcggggcagcagcggcggtggacgagcgcacggccggcggagcggcatcatcggccgagcagagtggcagcagtggcgagcgagcgcgcggcaggcgaggacgggacgggcgtcggcgacctgcttggcgatctcggtggcggtattgagtgggttggcggtggtgaggacggcgggtggcgcggcgagggcggatgccacggcgagggtggatgccgccgccggttgctccgcgcggagggcagtcggcggtcgacagcgaggtggacacgggtgtag

SEQ ID NO: 27541 - DNA, 115 bp, Oryza sativa
  Clone ID: PAT_MRT4530_32224C.1
gacgggattccagactcaacgcacgcgtccgggtgacgagcatgaattcacagtgctgagaaactggatgcagagcttctatgtatgcgtggcgaaataacatgaaggaccgaat

SEQ ID NO: 27542 - DNA, 3133 bp, Oryza sativa
  Clone ID: PAT_MRT4530_32225C.1
ttagattcttccactgagaagtgggtcccacacacttaaacctcccttctcttgtctccttctccttcccttttcccccaccaccatgttgactcctaccaccgccgccgccgccgccgtcgccgtctccggcgagctatcgatctctgcaacacagtccagactcctcccctcagcctcccgcgtccacctgccccaccttctccccgctccgcctgcgctgtcctcctccaggagccacccctctgtccccaccccgaccggcggcggcggcgcaggagaggctgctgaccttgatccgtccgatgagcacctcgccaccatgtccccgcgcgagcagacggcgctgctgtcgcggcagcggcactggcgccgcgcccgcgacctgctcgaccgcatgcgcgcgctcccggggtacgcgcccagcgccatccactacggcgtcgtcctccgccacctcgccggcgcgcgccggtggggcgagctccgccgcgtgtgggcgcggatggcgcgcgagggcgcgcccccgcccaccaaccaggcctacgccgccctcgccgacgcgctcgccaaggccggccatgcgcgggactccctcctgctgctccgccacatgcgcgcccgaggtgtggctcccgacgaggtttccatgagcaccttcgtccgcatcctcaaggacgtcggccgctactccgacgcggccactcttttcgataactggtgcaacggcaggttcgaggttgggttcattgatcttgactacagcgcgctcgattcaggtggaccgatgcagttcttgcttgaggagatgtgccatggcaatgtcgacgatgctggtgcatctggcattcagggagttgctagaattccgaagcttgctgtcacatataacacgatgattgatctttacgggaaggccgggaagctcaaggatgcgatggacatgtttatgggtatgccagattatggggttgcggcggatacatgtaccttcaatacattgatcaacatattcgggtcgtgtggtaatgtgaaggaggcagaggcactgtttgctagcatgatagttaggggaactaatccagatgttaagacgtttaatgtgatgatgacattgtttgcatccaagggtgatgttgagggagttttgaagcactactatcatattgggaaaatgggtttatctgcggatactgtgagctatgggattgttctccgggtgttatgtgagagaaagatggtacatgaagcagaagatgtgattgtggggattatgaggtctgggacttgtgttcctgaacagtctctgcctgttgtcatgaagatgtatattgatcaggggttgcttgataaagcaaatgcattcttcgatagacattgcagaggtgatgaggtctcttccaagacatttgctgccatcatggatgcttttgcagagaggggtttatgggaggaagccgaacatgttttctactctcatagaggagttaggagaagaggcatagttgaatacaatgtgatggtcaaggcttatggtgcagcaaaacggtatgatagagtctctcctctacttgagcacatgaatgagtctggtatttcaccagatgagtgcacctttaactctttagttcagatgtttgctacgggtggatatccacagagggctaagaagctgttaggtaaaatgaaatatgcagggtttaaaccaaagtgcgagacatatgctgctgctattacaactctctcccgcaactatttggtatctgaagccatatatctgtacaatgaaatgaaggcctcaggtgttgagccaaatgtggttgtttatggtgtgctgattgatacatttgctgagacagggcaactagaggaggcattgcattataacaacttgatggaagaatctggaattgctcctaaccaaattgttttaacttctcttatcaaggcctacagtaaagccaattgctggaaggaagcgcaagatttgtattcaaggatgaagagcatggatggtggccctgatattgttgcctctaattccatgctaaacctttatgcaaatcttgggatggtcactaaggttaaggaaatatttgactgtttgaggagaaataatcaggccgatgatgtttcatatactagcatgatatccctgtacaagaacatgggcttgcttaatgagtcagttagggttgctcatgacttgcagaattcaggcttactatccgactgtgcttcatacaatgctgttatggcatgttttgtggccaagggcaagctaagagaatgtgcagaattggtgcaacaaatgcaggaaggcaacattttgccagatgcctcaacgtttggaatgatattttctataatgaagaaaatccagattgcacctgaggaagtttcacagttacaatcagcatataatgacaacaggagctcttctagtcaagctgtaatcgctttcttgtttttgatagctggcatgcatgctgcagcattaaatatttgcgagaaatatatgaagcctgtgttgacaatagatcagtgtgcatgcaatgttgccttcaaagtttatgcgtcctgtggggaggtggataaagctttcagtttattcatgcagatgcatgagttggggctgaaaccggacacagctacttacatccatttgacaacttgctatggggaatatggaatgccgggagggaaaatgaaagcaatattcttgcttatcagtcagttaagaaatgagatgctgatacagttcactcaatcacctgatatgctcacaaggaattcagaatgcccatggctccatgcgaaatgcaaagtgttgacagctgcctcatggaaactgcaagtgatccaaggtgattttctgccagaagttgttaacatatatgatagcactagttcatcttatcgaaaggcgacaaaacatcctggagagcacgactttggtggcgcagacattctggagtgcaatgctcaactacttgagctttcacaagaagagctgcataataaaatttcagttcccatctggaaactggaatacatgaatttgaacaaggatcaacatcctggacctggagcatacaaagggcgtaacgaggaacataaatgctgccagtaa

SEQ ID NO: 27543 - DNA, 422 bp, Oryza sativa
  Clone ID: PAT_MRT4530_32226C.1
cccacgctttcgaccacttttccgcccacgcgttcgcccacgcgtgcgcccacgcgagggcccaggcgcgcgacacgtaacaaagacctacctacggatatatagatagggaccatagcccggctgacgataaaagaggcggcaaggacgaacgatattaccaagccactggaaaaaaaacctggtgctctcatgtaaacaaggaattacccttctactcgaagtggccaagagtagctagcgacctcacaggatgcacggcttacgacgaaaatgtacatcgagagagacagtcaagtctttgtgcacacacagcggactaagtggtcagaaaatagcaggcccacggaaaagcggataatgaacatgcagaccacagaaacagatggcctagcctagttcgagctactacaacgaaagat

SEQ ID NO: 27544 - DNA, 702 bp, Oryza sativa
  Clone ID: PAT_MRT4530_32227C.1
atggggaatggggaatgcgtgcgcagccgcggtgaggggaggagggggcgcgtgttttgtagccagcgagcgcggcttcggttactggtgctgacgccagtggcgctgtcgctgccccccacacagctgtcgtcgcgctccggggcagcgcgcgctggcggcgagcgcgggcgcgcgtggagcgcgaggaggggggagcaagcggcgcgcgggcaccgcgttgcgccgcgccgcgctgtgtgggctgccttcgacaagcgtgtcgggcctgcatgggccgtgatgatgggctgggtagtttttgcgtggggaaaagtatacctgaggccggtgcagagcgacagatgccggcgtgacgaggcagccggtcgtagcaacggggagcggcggagaggcggcatgggaaagggtcgtcgagacatccttcgtgagcccaccgtcgttggggggatgggctcccgctttcctcgccattaccggtcaagcttagtgacgctgctgactcctagctcctctccaccggccaccgttcttctccttgctcgtcgtcaccaacaagcgtcgtcgctgtcagcgagggccaccgtcgggcaccgcgcgcctccagttctccccgcccgtcgccggtcgcgctcgccgcgctggcccttctcctcgtcgaccgttgcacacctcagatggagaggactggagaagagatga

SEQ ID NO: 27545 - DNA, 461 bp, Oryza sativa
  unsure (1)..(461): unsure at all n locations
  Clone ID: PAT_MRT4530_32228C.1
attctggtttttgtacccttggaatatcttgccaggccacagagaatattcaattaagagagtgctttgggatgaagcctgatttgactggagtgttagtgagtagaataaatcctctatctgatgctcacagagttcttaagaaagatgacattcttcttgagtttgacggtgtgcctatagcaaatnatggcacagtcccatttcgaaatagggagagaatcaccttcgatcatctggtgtccatgaagaagcctggggaaatggcggttctcaaagttctaagagatggcaaagagcatgaattgaatgtcactgttagacctttgcaacctttagtccctgtacatcaatttgataaactacccagctactacatctttgctggttttgtttttcatcccactgacccagccttatctccatgaatttggngagactggtacaacaattcgcangcg

SEQ ID NO: 27546 - DNA, 527 bp, Oryza sativa
  Clone ID: PAT_MRT4530_32229C.1
ttctgatcagctctctaatcacatatatatcgtatcgatcaacgacgacgacaatggcggccgtcgacaatgccccgccgtcgccagtggtcaccgtcacctccacccgcaccgtcgccccagccgccgccaagtgcgtcctcgccacattcgacctcccctacatcaccttctactacaaccagaagctgctcctctaccgcctccccaacggcgcctccgacttccccgacgccgtcgcccgcatccgccaggacgaccacgacggctccctctccatccacggccaacacggcgccgaggtcatcgaggcctccgccgaccatgtctccgtcgaccaactcgccggagaggagtgctcggaggaggcggagaaggtgatgcagctcctcgtcccctacaccggcgtcatgaacctcgagggcctgaaccgcccgctgctcgccgtccagttgacacgtcttgcgggacggggtggcagtggtgtgccccttttcccccgccttgctggccggggccctccccct

SEQ ID NO: 27547 - DNA, 2034 bp, Oryza sativa
  Clone ID: PAT_MRT4530_3222C.1
accgccggcccgcctccgtcgccgccgagtggtgcctccgcctacacggctggcctattatgccgccgctgttgggcgtctacgacttcaccgccggcctgcctctgtcgccgccgactggtgtcctcgcctatacggttggttggtcacaccaccgttcatgggcgtccacgtcttcaccgaccggccgcctcgtccgccgccgactggtgtttccgcctacacggctggcctattatgccgccgttgttgggcgtctacgtcttcaccgaccggctggccttcgccgccgccgactggtgttttcgcctgcacggctagcctattatgccgccgttgttgggcgtctacgacttcaccgctggcctgcctctgtcgccgccaactggtgtcctcgcctatacggttggttggtcacaccaccgttcatgggcgtccacgtcttcaccgaccggcttgccttcgccgccgccgactggtgtctccacctacacggctggcatattatgccgccgttgttgggcgtctacatcttcaccgaccggctggccttcgccgccgccgactgatgtttccgcctgcacggctagcctattatgccgccgctgttgggtgtctacgacttcaccgccggcctacctctgtctccgccgaatggtgttctcgcctatacggttggcggactccgccgctgttaatgggcttcatcatctacaccactggcttggcctcgtccgccgtcgactggtgcttccgcctgcacggctggcctattatgccgccgttgttgggcgtctacgtcttcaccgaccggccgccatgtccgccgccgactggtgcttccgcctgcacggctggcctattatgccgccgttgttgggcgtctacgtcttcaccgaccggccgcctcgtccgccgccgactggtgcttccgcctgcacggctggcctattatgccgccgttgttgggcgtctacgtcttcaccgatcggctgccttcgccgccgccgactggtgcttccgcctgcacggctggcctattatgccgccgttgttgggcgtctacgtcttcaccgaccggccgcctcgtccgccgccgactggtgcttccgcctgcacggctggcctttatgccgctgttgttgggcgtctacgtcttcaccgaccggccgccgcatccgccgctgactggtgtcaccgcctgcacggctggcctgttataacgccaactgatgctatcttcttcactgttgattggcctattatgccgctgttctaccactactgatggacatcatcatcttccgtcgccgactgattttgctgccgccgattggtgcttttatcttcacaactacgcgtcttcactaccggtttgcttctgttgccgccgacttgtgttcacttcattacggcaatacaactttgtcattatggtggagcgacttcatctttattatcttcggcaccggcaaactctattgctgctacttcgcaagttttactacttcaccaaccacgacgtctttgtgaacctcgacatctcggcatgcaatgccatgatattttactacaacaagtgactctccaatattcaggatttctacttggacaccttcaacacatatcttcaatcaagcaatgactactcgacgacaagaagctataattctcgactctatgttcagttgtttctcaactaaccaaagaacattctgcttcaacaacttcaaatatttcggtttagacgagttgggcaacaacatcaactctcctccaattatttgtcttcacggttggcctactacgcaactgccgatagaggatctcatcgttatcatcagctgctacatcgctattgactggatcaccgacatcgtcatcttcatcaacatcttgtcaagcctcatcaacatagccaactctgctgccgttgatgggaaacttcgtcatcatagtcggctatctctgttgccgttaatcatcattaccgttggatgcgtttgtcgccgccgattattttcttcatcttca

SEQ ID NO: 27548 - DNA, 498 bp, Oryza sativa
  Clone ID: PAT_MRT4530_32230C.1
atgcataccggcctgcgagcatcagcattcagcatcccaatgcaagcagtagcaaagccgcgcggcggcttcgacgacgacgacgagtgcgatcttcgcgcaggcaggcaggacgatcgatcgattgtgatccccccgcgcggccggacggcgcggcgcgcgcacggcgattgggacgtacgagtgagagatcgatcagcgcagctgcgcaccgagagcagcggccgccgtaccgtgccgtgtgttgcttccttgataggcctcctctgcccctgccggccgccccccgcgcgcggctcgctgccaacgcactacaacgaatcgtgcgcgcgggggcctggagaacgcacggtctctttgggtgccttcacgtgggctaaagttggtggtgggctcgtcggcggcggcgagagagagggacgcacggcgtccagccgtcgacggagtctcacaccaggagttcgccgtgggaaacgcaactgttcaatggatggtccg

SEQ ID NO: 27549 - DNA, 314 bp, Oryza sativa
  Clone ID: PAT_MRT4530_32231C.1
cccacgcgtccgtaaaaaaaaagcccaaactatgttgaccttcaacttgccatccatgtgtggtatctaccgtaactactatagtgctcccaggagcatcgccactgttggtggtgtctggtactgaattgtaacactttggtggttcgtatgttaaaaataaagtcatacatcatcatgtgtgactgttgaaacttacggtcatataaatctaaataaaatcatctttcctaaaataaagaaaaggccaccgcctttcgtccccaacagtagtgccgcatgcgtcccgaccaatgggccccccctaaaattgc

SEQ ID NO: 27550 - DNA, 1897 bp, Oryza sativa
  Clone ID: PAT_MRT4530_32232C.1
cgtgggcgcgggcgcgccagtccgcgcgccgcatgtccgcggcgagcgactggaaggaggagaagggctggccgccggggggcaggccggcgttggcggcggccttggcgcgggccacggcggagggcgggaaggagaagacgcgggccacgaggggcaccttgggcccattggggtcggtcttctcgtgcgcctcggcggacgccgggagcgggaggttgacgcggacggagcgcgccaagcaacggttgtgcaccggcagcggcaatggcgcgacgcatgcccgttgcaagccccatagtacacaacatagtactccactatatataaatagtagcaagcaacaaggaatccatgcatgcatccaactaaacataaaggagtagtaggagaagttgcaatttaggaggaacaagactactagggagtaacatgcagctgatgaatcatcataatatataggagtataaaagaaaaaaaaagaattaaggggctcgcatttggaggaagtcttggtccttgtccaacctctgcatcggctccggctgcagcgagagctcgacgtcgatgccgccgtcgccgccgcggcccgggtagaggtagaccatcccgtcgaacttgttgttggcgccgcttcgcacccgctccgggcggccgaagccgaagtcgacgtcgtacaccctgaagcgcggcgagctgccgacggcgacgcagttggggccggcgtcgctgtagtggaacagcttgggcgccgcctcgtactcctccagcctccgggtgatggcggcggcgtcgtggtcgtcgatggccttctgcagcagccccgcggcgagctcgggcgggccagcgaggagcatccccgcgggcacgccggtgaagacggcctggatgaggttgccgaagtaggcgggcgggaggggcgggctgaggcgggcgcggcagtcggcgaagacggcgaagacggtgatgtcggaggggccgagggcgcgggcgcgggagacggcgcgccagatgtgggcggcgagcgactggaaggaggagaagggcttggcgccggggggcagggcggcgttggcggcggccttggcgcgggccacggcggagggcgggaaggagaagacgcgggccacgaggggcaccttgggcccattggggtcggtcttctcgtgcgcctcggcggacgccgggagcgggaggttgacgcggacggagcgcgccatgccgcggttgtgcaccggcagcagcgacggcgcgccgccgccccggcagagctccgcccatgacgtcatgaagtgccaggtggaggtgccgtcgaggacggcgtggttgaaggcgcaccccactgccaccccgtcccgcagacgtgtcaactggacggcgagcagcgggcggttcaggccctcgaggttcatgacgccggtgtaggggacgaggagctgcatcaccttctccgcctcctccgagcactcctctccggcgagttggtcgacggagacatggtcggcggaggcctcgatgacctcggcgccgtgttggccgtggatggagagggagccgtcgtggtcgtcctggcggatgcggccggcgagcgggtagaagtaggcgagggcgtcggagagggaggcggacatgcgggcgacggcgtcggggaagtcggaggcgccgttggggaggcggtagaggagcagcttctggttgtagtagaaggtgatgtaggggaggtcgaatgtggcgaggacgcacttggcggcggctggggcgacggtgcgggtggaggtgacggtgaccactggcgacggcggggcattgtcgacggccgccattgtcgtcgtcgttgatcgatacgatatatatgtgattagagagctgccccgtgccctcgcccccagcccggcag

SEQ ID NO: 27551 - DNA, 1727 bp, Oryza sativa
  Clone ID: PAT_MRT4530_32233C.1
caaagcaagcgagcgccgccctcactgctcttacacactgcaccacacgcctaaccaaccacgcgaacgaagcgcgcgcgcgctgacgtcatcctcctccgccgccatggcggcttcttcctcctccaccactcgcctcatccccctcctcctcgtcttgaccttctgcctcgctctcgcctcggcgtcggcgtgggcggcggcggcgggggatgacgacctcctggcggcggcgcgcgagccggggatggccgagtggctgcgcggcgtgcggcggcggatccaccggcaccccgagctggcgttcgaggaggtccgcaccagcgagctcgtccgcgccgagctcgacgccatcggcgtcccctaccagtggcccgtcgcgcgcaccggcgtcgtcgccacgatcgccggcggcggcggcggcgatggccccgtcgtcgcgctccgggcggacatggacgcgctccccgtgcaggaattggtagattgggaacacaagagccaggaaaacgggaaaatgcatgcttgcggccatgatgctcacactgcaatgcttctgggagcagccaagctacttcagaaacgcaagaacgaactcaagggcactatcaagctggtgttccagccagccgaagagggccacgccggggcgtaccacgtcctggaatcgggcctcctggacgacgtctccgtcatcttcggcctccacgtcatcccgaacctccccgtcggcgtcgtggcgtcccggccggggccgttcatgtcggcggcggcgcggtttgccgcgacgttcaccggcaagggcggccacgccggcgtcccccacgacgccgtggaccccgtcgtcgccgtctcctccgccgtcctcagtctccagcagctggtctcccgggagaccgaccctctcgaggctgctgtggtctctatcacaatactgaaaggaggtgatgcttacaatgtcattcctgaatctgcatcgctgggaggcaccttcaggagcatgactgatgaaggcctggcatatctgatgaagaggatcagagagatcatcgaagcccaggccggcgtgaaccgctgcgccgccgccgtcgacttcctggaggaggagctccggccgtacccggccaccgtgaacgacgacgggatgtacggccacgccaaggcggtggcggaggcgatgctcggcgaggccaacgtgagggtcgccgcccggagcatgggcggcgaggacttcgccttctacgcgcggcggtcgccgggggccttcttcttcatcggcgtcggcaacgagaccaccatggggcccgccgccgccgtccggccggtgcactcgccgcacttcgtcctcgacgagcgcgcgctgccggtcggggcggcgctccacgccgccgtcgcgatcgagtacctgaccaagcacgactgctcgtgaatctcgtgtgtgatccaattgagtcgtccatgtgaaagaattaaggatcagtgtgtgcttgtgcatgcatgtgcgtgaggcaaaaaagtatcgtttggtggtcataggtacagtatgtgtagaggatacgtagcatgcgtacacattctcgccatacatagggcatgtgctatattttagtgcaaaaattctattgtttctcaaaatataggttaaatgagatataaaatacctcgttaagtttacgaaggacctcaatatagaggagacgacaaccgcggatttccagaatactttt

SEQ ID NO: 27552 - DNA, 302 bp, Oryza sativa
  Clone ID: PAT_MRT4530_32234C.1
ctgcagcccttgtaccaggctggatctgttatcctcttttgtggacagagtaaattcggacaagaagctactagcactgtcgattttgttgtgaatcaatctgatttcaccattcagacgctaaggaatgttaccgattacttatcgcttgcaaagacaatcagtgtggcagcactctatcttccttcagatgtacaagggcaaattgacaatttgaaagtggacttaaataaagcggctgatactatatcccaaaagacatcagaaaactacagaaggataagaaaagttctccataactt

SEQ ID NO: 27553 - DNA, 924 bp, Oryza sativa
  Clone ID: PAT_MRT4530_32235C.1
gcagccggagcagctagacaagcaatctcttgtaagcagaggagatcgaggaggagaggaaagatcgaacacgaagaacgcgtgcatgtgcgctcgtatatatcatgcgctcatggcgccaaaacatcatcgtcgtccacatgcatatgcagttttagtttagtttaattaatgcagtaagttttaaaaaaaaatgaacttagtagtagagcagagagcttaattaactagctagtgatcgatcgatcatatgccgctggccttgaagagcctcatgaggccgaaggtgatgcccatggcggcccacccaccgagcaccaccctcgcgctcgaccgcgccaccgccgcccgccccagcaccgcgcccacgcacccgaacgccgccagcgccacgctcgccaccgccaccaccaccgcgatccgcagcctgtagttgacgatgaacccggccgccagcagcggcaccacggcgcccaccgagaacgccatggccgacgccgccgccgcctgcgcggggctcggcagggccttctcctcctccccgccgcgcttgccatcgcgctccagctgcgccagctccacatcgcgctgcgagcacacggacacgaactccccgatggccatgctgcaggcgcccgccaggaggcccgcgaagccggagatgaccatggcgcgcgcctccgccttcacggcgcccacccccagcatcagcgacgccgtcgacaccagcccgtcgttcgcgcccagcaccgccgcccgcagccagttggcgcgcgccgccaggtccagctcgtcgcccaccgccgccgggttctcggcgtcaacctgcagcttgttgctgcttgatctctcgttgttcatcatggccgccatggctgattggctggcctgttagcttaattaattagctgagatcgatcgagt

SEQ ID NO: 27554 - DNA, 578 bp, Oryza sativa
  Clone ID: PAT_MRT4530_32236C.1
cacgagggcgcattttaactgcatccgtatatttctgtgtttgcaacagttaaaactccacatgtgttggattggtggagctgaaactgctttctatattattgactttgctgcccatgtttgaactttaagctaagcaatgtccaatgtagtttgtgtgccaatgggacttgggtactttcgaaaatactatacttgaaactttagtttttttctttgtaactgtgcaaacctgtcattgtaatacacataacaagaagattttttttgtgatcatctgctaatcaagaattcaagataactttttgagaaatttctgtagggttaatccaagaatttttcttaaggcctcctagttgcctggttcttatcaaacaaaatgtaaaattcccataaccacttcaccttcgcttacatgtcacttattttcttttgcactgtgatgcgttctgtgtcaatgctatgtattgtttttagtaacatgaagttgttgtttcatttttcatgattaccaagttacattggttattctcttagttgcagttcctgccattctgtttgctgtttgactctaatgt

SEQ ID NO: 27555 - DNA, 384 bp, Oryza sativa
  Clone ID: PAT_MRT4530_32237C.1
atggctcgcggcgacgctgtgcggagtgtgttcggctacgactctcgtcgcacctccggcgcgggcgacgcaaagcctgtggaagcccgcgagggagaagcggtggatgtcgtggaggccggcggcggtcttcggggcggcggtgacggcggtgctctagcgggaaacggcggcaacggaggggtggacgaggtgctgctcctcctcacgatgctgaagaaggagacggcgatcgacggcgacgaccgaagcgacggcggcgcccgactggacacccgccggcggcgacgacgcaaagaaccacgcggaggcggcgctagagaaggcggcaagctagggcgaaggtggcagcggatagaggaggtcccggggatccttttatag

SEQ ID NO: 27556 - DNA, 704 bp, Oryza sativa
  Clone ID: PAT_MRT4530_32238C.1
attttcttcttctcctctgctctgcgtcttatccattcctcaatccacccgcctgcgctgtactcgccggcggatacaacatgcacggggactggccggagtcgccgtgccacgacgtgctgtacccctacgagatcgccgccgcccgcggcgggtcttggcgcgggctctccccaacgcccgcgtggtcaccagattctcccgctgaggaggaaacgcctagcgcgccattagcgcgctcctccatgactccaccgacggcacagaggacataccctagctcaagaacggtaataggcgcccagacggatactcttccgacgaagggcgaatgccacgctgggggcgcctccccaaagccgacggcgcctccgctgaaggatgacgacctcgacgactagcccttgctgagcctataatcgaacggttgcctcgccagggtcaatacggagacgaaggactagtctgttcgtcaaagcgccgtctaagatgccggatctgatcaaggatgaagaccggcatgaactcaagcgaggtgctccgactggtaacgccgacgcgctaagagtggtgcccactccgaacaatacgtctcgactgcacgacgaggcggacaccatcgacctcacggcgacccacacggtgccttacctgaacccgacgtcgatacgggcggtgtcagcaccggcagccatggagatgct

SEQ ID NO: 27557 - DNA, 1890 bp, Oryza sativa
  unsure (1)..(1890): unsure at all n locations
  Clone ID: PAT_MRT4530_32239C.1
acgcgtccggcttgattgcctcttgtactgcagtgttgcttcctacactgccattgcatataaattttgcactgcaagattaattcagtctgagagaacgagagagaacatcatgggtggcaagctgttgcctgctgcggcgttcgcggagtcggcgccgccgctgtcgcaggtggcaacgtcggcggcgcacggcgaggactcgccgtacttcgccgggtggaaggcctacgacgaggacccctaccacgtcgtcgataaccccgacggcgtcatacagatgggcctcgccgagaaccaggtctccttcgacctcctcgaggcctacctcggaccacccggaggccgccggctggagcaccggcggcgccggcgccggtagcttcagggacaacgcgctgttccaggattaccatggcctcaagagcttcaggaaggcgatggcgagcttcatggggaagatacgcggcggcaaggcgaggtttgaccccgaccacatcgtgctcaccggcggcgccaccggcgccaacgagctcctcaccttcatcctcgccaaccccggtgacgccctgctcatccctaccccttactaccccgggtttgacagggacttgaggtggaggacgggggtgaacatcgtgccggtgcggtgcgacagggcgaacgggttccaggtcacggtcgccgcgttcaggcggcgtacgacgaggccgccgcggttggggatgcgcgcccgcgccgtcctgatcaccaacccctccaacccgctcggcaccacggtcaggcgcaagatgctcgacgacatcctcgacttcgtgtcgcgcaacgacatccacctcatctccgacgagatctactccggctccgtcttcgccgcgccggacctcgtcagcgtggcggagctcgtcgaggcgcgcggcggcgacggcatcgccggccgcgtccacatcgtctacagcctctccaaggacctgggcctcccggggttccgcgtcggcgtggtctactcctacaacgacgccgtcgtgacggcggcgcggcggatgtcgagcttcacgctggtgtcgtcgcagacgcagaagacgctggcggcgatgctgtccgacgaagcgttcgccgggggatacatccgcaccaaccgccgccggctcccgggaccggcacgagcacgtgttggccggggctggcgcgcgccggcgtgccgtgcctgcgcggcaatgctgggctgttcgtgtggatggacatgcggcggctgctgctcggcggcggcggcgtcggcggcgagctgaggctgtgggagaagctgctgcgccaggcgaagctgaacatctcgccggggtcgtcgtgccattgctcggaggccggctggttcagggtgtgcttcgccaacatgagcttggacacgctggatcttgcactccacaggataagccgcttcatggacacgtggaatggaacaaagcaacaagctagctgccagcagcaagaacagcaataatttttagttaatttggttaattagttagttaattgattaaaggaagtataagtaatttttttggtaaattattaaaaaaaacatatttatcagttgcaaaggtagttatattatggggattaagtggtgacatacacttgtttcatttatctattgtaccattagttttgtaaccaaatttgtctctctcacatgttggagagacgacaaattaatacagataagactggtctagctcattcaaggttaattctctccttatgctccagttagatgatcatgagatcaaatcgtctntcagctcctagggaattcatgtaaaattcctacaaaaaaattacataactcctttgttaataatggatactttttcttgcaaaaaaaaaaaaaaa

SEQ ID NO: 27558 - DNA, 1914 bp, Oryza sativa
  Clone ID: PAT_MRT4530_3223C.1
atcactgggcctcttcatcttcaccgactagccgcctcgtcagccgccgactagtgtttccgcctgcacagctggcctattatgccgccgtttgttgggcttatatgtctccactgccggcttgccttcgccaccgccaactgatgtctctgcctgcacggctggcctattatgccgccgttgttgggggtctacatcttcaccgccggctcgcctccgtcgccgccgactagtgtttccgcctacacggtcacaccatagttgttgggcgtctacgtcttcacagccggcttgccttcgccgccgctgactggtgcctccgcctacatggctagtctattatgccgccgttgatgggcgtctacgttgtcaccgaccggccgtctcgtccgctgccgactggtgtttccgcctacacggctgacctattataccgctgttgttgggcgtccacatcttcaccaaccggcttgccttcgctgccgccgattggtgtctctgcctacacggctggcctattatgtcaccgttattgggcgtctacgacttcatcgctggcttgcctctgtcgccaccgactgatgtttccgcctatacggatggtggactccgtcaccgttgatgggcctagtcatctacaccaccggcttgcttccgccgccgccgactggtgttttcattgccattgatggacgacttgctccaggaatggatcagtcagaacatcaccaacggcttgccttcgccgcggccgactagtgtcaccgcctgcatggctggcctattgtgccgccgttgttgggcgtttacgtcttcaccgccggcttgccttcgccgcacgcgactggtgtcactgcctgcacggctggcctattctgccgccgttgtcgggcgtctacgtcttcaccgaccggcttgccttcgccgccgccgactggtgtcttcgcctacacggctggcctattatgccgccgttgttgggcgtctacgtcttcaccgccggcttgccttcgccgcacgcgactggtgtcactgcctgcacggctggcctattctgccgccgttgtcgggcgtctacatcttcaccgaccggcttgcctttgccgccgccgactggtgtctttgcctacacggctggcctattatgccgccgttgttgggcatctacgtcttcaccgccgccgactggtgtcgccgactgcacggctagcctattatgccgccgttgttgggcgtctacgtcttcaccgaccggcttgccttcgccgccgccgactggtgtcttcgcctacacggctggcctattatgccgccgttgttgggcgtctacgtcttcaccgccggcttgccttcgccgccgccgaatggtgtcttcgcctacacggctggcctattatgccgccgttgttgggtgtctatgtcttcaccgactggccgcctcgtatgacgccaactggagttatcgtcttcacggttggccacctcgtcgtcatcattctacttcttccatcgccgactggttatgccgccgcaggttggtgtttttatcttcacaactacgcgtcttcgctaccgatttgcttctgttgctgcagactcatcttcacttcatcacggctatgcaactttatcaccattatggggtgacttcatcttcattatcttcggcacaggcaaattctattgcctctactttgcaagatttgctacttcaccaaccaagacgtctacaagagctccgacatctcggcatgcatcaccaaatatgatgccatgttattttactacaacaagtggtgttccaatattcaatatttctactcggacatcttcaacacgtatcttcactcaagcaatgactactcgacgacaagaagctacagttctcgactgtatatttagttgttttccaac

SEQ ID NO: 27559 - DNA, 453 bp, Oryza sativa
  Clone ID: PAT_MRT4530_32240C.1
atggatcaaaaggaaccttctgttaaaaggcgccctctggtatttggtgaagcgagcactaataaggtcaaacatcaaaatcaggggaatatgtctgaaaaccaagccagccagagagtagcagcagaaggtggcatattcatgcctgtgcaggcgaagacggagtaccaggaaaggaaattcagcgacatgtacagggacaggtctctctgcaaagatctgaaccaagggcagcgcattgtgatcaagagaaggcgccggggtttgattgaacatgacttgcatgggagggcaggccgcatgtttggtggtggtggcatcttaggtatcaacaaggaaaggggattgagagtgtttatgtgttgtgtggacccaagggaatcggaaaagtactccggcaagatgccaagggttcctgtgagctctgatggtttcaccatgacctgtccatga

SEQ ID NO: 27560 - DNA, 427 bp, Oryza sativa
  Clone ID: PAT_MRT4530_32241C.1
ggcattagcagagacaatccatgggcttaatttaatcttcttttgtccggaactagggacagcgcattaggggtacattcagggaaagacaaaacacatcctgcagtatcaaacctgggggcatccaactgccaatttctttgagccagctaaagatagggcatggtactaattacaaaacgggcaaacaaatcaatagcccgacttaaaccaaagcagggggacaggttcctaattttaaaactgggaaaacaaaactgtagcctgacattaaccacctaaacattatgtagaggcacttaagggtttgaaagaacccacgggatctgtctcagggctaatggtaaacatcaattgattgccggccaactttggtccaggatcacccccctcccttgggaggagtatgagtttttccccccttggg

SEQ ID NO: 27561 - DNA, 185 bp, Oryza sativa
  Clone ID: PAT_MRT4530_32242C.1
tgcgcccacaacttggggaaaaattggcgaacccatgtttccttggaaattctttttttcccggtgcttcgcaaatcctccttatcttttaaaccccggaccaggaaattaatttggaacctgtaaaggaagttttcatatattagaagacgtttcctcttggcgaacaaaaaaaaaaaaaaaaa

SEQ ID NO: 27562 - DNA, 410 bp, Oryza sativa
  Clone ID: PAT_MRT4530_32243C.1
ttcttgtaacttaaatagatctggtagacatggggaggagctttctgtgacatctcgtatatatgctccttcttggagtggtggaatcggcgattgtagatctttggttatgaagaagaagatagcggttacggactaggggcatggcgcccgcctcctcagtaggcgaggccgtacagcatacgattaagtgaacggagccagagggaaaacctgcgttagagaaggagccgataaaggcttcttactcacgcgtaaagcactgggccaaaagaggatcataagccctgactcagaggtaatgtctgggtagcagcctgaggagaagccggaaacttactcggagtttaagaacggatcaatggcagaggctggattacaaccagagccaaaggcaagatccacaccac

SEQ ID NO: 27563 - DNA, 2513 bp, Oryza sativa
  Clone ID: PAT_MRT4530_32244C.1
tttatattatggaacgacctaaagttctggctacctttgctgttgccgactaatttcttcgcctccacggttggccagcgccgccgccgactgatgcccttgcctacacggttagatggtcacatcactgttgatgggcgtcatcatcttcaccgaccggacacctcgtccgccaccgactagagtccgcgcctatacggtcggttggtcacaccaccgttgatgggcatcttcatcatcaccgccgattggtgtctccgtctacacggatggcctattatgccgctgttgttgggtgtgtacgacttcaccgccggcctgcctccgtcgctgccgactggtgtcctcgcctatacagttggtcggtcacaccaccgtttatgggcgtccacgtcttcaccgaccggcttgcctttgccgccgccgactggtgtctttgcctacacggctggcctattatgccgccgttgttgggcgtctacgacttcaccactggcccgccttcgtcgtcgccgactggtgtcctcgcctatacagttggcggactccaccgccgttgatgggcctcgtcatctacaccaccggctagcttgcttccgctgccgccgactggtgttttcattgccattgatggacgactttgttcccacatcatccacctctgctcatcaccactgtcttgccttcgccgccgtcgactggtgtctccgcctgcacggctggcctattatgccgccgtcgttgggcgtctacgtctttaccgaccggcttgccttcgccgccgctgactggtgtctccgcctacacggctagcctattatgccaccgtcgttgggcgtctacgtcttcaccgaccgacttgccttcgtcgtcgccgactggtgtctccgcctgcatggctggcctattatgccgccgttgttgggcgtctacgtcttcaccgccggcttgccttcgctgccgccgagtggtgtcttcgcctgcacggctggcctattctgccgctgttgttgggcgtctacatcttcaccgactggcttgccttcgccgttgccgactggtgtctgcgcctacatggctggcctattatgccgccgttgttgggcgtctacgtcttcaccgaccggcttatcttcactgccaccgattggtgtctccgcctacacggctggcctattctgccgccgttgttgggtgtcttcgtcttcactgaccggcttgccttcgccgccgccgactggtatcttcgcctacacggctggcctattatgccgccgttgttgggcgtctacgtcttcaccgctggcttgacttcgccgccgccgactggtgtcttcgcttgcacgactgacctattatacctccattgttgggtgtctacgtcttcatcgccggcttgccatcgccgccgctgactggtgtcttcgcctgcacggcttgcctattatgctgccgttgttgggctgttgacgaaaaacacgaggcctgggagatatgcttagctcctgtgcaggtcaatcttgatgagatgcgggcatgccagtcagtttgatcctgcaactgacaagatatgcaaatagtagatcataatagtcgatcggctgacaagccgatggagtaggcttaccaaatttcactgttaacatgggcgtctacgtcttcaccgaccggtcgcctcgtatgacgccaactggtgatatcatcttcacggccggccacgtcgccgccatcgctaataggcatcatcatcttcaacgcaagctgtctacgtctgctgccgactggtttcttcacttccatggctgcatgattctgccactgttgattggccttgtcgtcttcaccgccagtcgtctcgtctgttgctgactaatgccctcgcctctacggttggtttatgctactaccactactgatgtacgtcattgttttcattgctagatgccttgtttgacgccaatgggtttgtatgcctccacggctgcgcgtcttcatcattattgactggcgtcatcgtcatcgctagtttgccttctccgctgcccgtggtgtcttcacttttacggttggcctattatgccgccgctcagggatgtcttcgttttcgtcatcattctacttcttctgtcgccgactggtgtttgtatcttcacaactacgcgtcttcgctactggtttgcttctattgctgccgactcgtgttcacttcatcacggctataaaacttcgtcaccatggtggagcgacctcatctttattatcttcggcaccggcaaactctattgcctctactttgtaagctttgctacttcaccaactacgacgtctccaagagcctcgacatctcggtacgcgtcaccaaatatgatgccgtgttattttactacaacaagtggtgttccattattcaagatttctacctggacatcctcaatacatatcttcactcaagtgatggctactcgacgatgagaagctacagctttcgaccctatgtttagttgctttccaac

SEQ ID NO: 27564 - DNA, 506 bp, Oryza sativa
  Clone ID: PAT_MRT4530_32245C.1
gaatatgcacacccatcaatttttttatttttctcgcaactaccacaaaagcaatggcactgcacaccgttcattatcctggacgcaaatacacaagaactactttcttctaccttacctaacatgggacagcattgcgtataaactacaagacttaaatgggaataaagacattcataaatccatggccttgctcattttggcaaacggtaccagagctatgactaggatgttgattgctttgttgaacaaccgcggcatttgcacatatggcgacatagcattcgctgggactccaactatcaccaacactccaaggtaacccggcggaatattcggacgactctgttattttaaaccagttaatcgattgagataaagctaatgataatgttacagtgctacctgggcctttacaattgggccaccctcaataaccgaatccttaagactccaggcgatttctccaatctgaataaatacaaaattatcaaacatgccttagt

SEQ ID NO: 27565 - DNA, 1174 bp, Oryza sativa
  Clone ID: PAT_MRT4530_32246C.1
aaactgagctgattggttgataactctaaactcccggacatgtagatagaatctcaaacttgatatttgagaaatttggagtagattgtgacggcatggagaagccaaaattgccggtgaaataattggagttgctgaagtaaaatgtcggctttgaagcgaagacgaaaataataactcccagagttgactcgttggttgattaattgattgattcggtttgtcaaattttgagtcttgtatctgtgtagcccccgactctttggttagttgagaaacaactgaacatagagtcaagaactgtagcttcttgtcgtcgagtagccatcacttgagtgaagatcgagatgtcgaggctcttggagacgtcgtagttggtgaagtagcaaagcttacaaagtagaggcaatagagtttgccggtgccgaagacaatgaagatgaagtagctggaagaagtagaatgatgacgaaaatgaagacgtccttgaacgacgtcagaataggccagccgtgaaagtgaagacgccatttgcggcggcaaaggcgaaccggcaatgacgatgacgccagtcaatgatgacgaagacgcgcagcagtcggtagtagacgcagacagcttgcgttgaagatgatgacgcctattagcggtggtggcgacgtggccagccgtgaagacgatagcaccagttggcagcggcgaaggcaagccggtcggtgaagacgaagacgcccaacaatggcggcagaataggccagccgtgcaggcggagacaccagtcggcgacagcaaaggcaagcctgtcggtgaagacatagacgcccaacaacggcggcataacaggccagccgacggtgaagacgtagatgcccaacaacggcggcataataggccagccggcggtgaagacgtagtcgcccaacaacagcggcacaataggccagcgtgcaggcgaagacaccattcggtggcggcgaaggcaagccggtcgatgaaaacgaagacgcataacaacggcggcataataggccagccgtgtaggcggagacaccagtcggcggcggcgaaggcaagccggtcggtgaagacgaagacgcccaacgacggtggcataataggccagccgtgcaggcagagataccagtcggcggcggcgaaggcaagccggtggtga

SEQ ID NO: 27566 - DNA, 469 bp, Oryza sativa
  Clone ID: PAT_MRT4530_32247C.1
tcacggatcggggggggcgggagacaccgaagggcgggcggcggaccgcggtatctcaatgacgggcgaacggagaccactgtggtggcgggtgggggcaccaaacacgggggcgggcggcggacggtggctacgggcgtggcacacgggggcggacggtggcgtcgcggtgacggccaagcggaggtgactgcggcggcggctgccgacgctgctggggagcagcggcgggcgcggctggacgagtggaggcagcggcggcggtgggctcgactgggcgccaacgccgcctcgcgccccgccgtgcccgtggtgcccatggcgcgcgtgcagctggagctgctcccggtggtgcgcgagggcgacggcgcccgccgcccgcagtggatttccggccgccggacgccgcccgcctctccatcatgcccccgctgcgcctagcgctggccaccaactcgccggccacatc

SEQ ID NO: 27567 - DNA, 372 bp, Oryza sativa
  Clone ID: PAT_MRT4530_32248C.1
atgtcgttgctgccgctgccggtgagctccgaggccgaagccttctcttttcgcgctgtcgcttccctctctctcttcctcaactccggccgatgtcacccatcatcgagcgccgccttctcactgtttcagagctcagtgtggtgccacgagtctgcctccatgcgccaccgagcgccatctccgccgaatgccgtagtgccggagcgcgcccacgagcggtggagcgttgccttcactagagagctcatcaccatccatccattcttcgccaaggctgagggcgtgcaagtcactagtgccagcgtggagactgccatgggggcgagggtggccacgacactaatagaagggattgaaagtgtcaagtag

SEQ ID NO: 27568 - DNA, 1277 bp, Oryza sativa
  unsure (1)..(1277): unsure at all n locations
  Clone ID: PAT_MRT4530_32249C.1
ccgttccggactcccttgtcgacccacgcgtccgtcgtcatccacttccactcgcccaccgccgaaaggtcagcgtcactggaatttaggctttcaataaagatctcctaaggcatatcaaggctcacgggcaagggatctccctcacagattcttcaaggaggagggactgcatactcagtattgccgtagcgtggtgccgccgcccatccttgagtgtccaccgtcaccgactacccttctctgagcgggtgcaaatcctgccaattgaccccatctcaggtattcacccccaacccatctaaatttcatcttttctgccgctagggcttgcccgtacagggaattatgggtttccttcaataagtgaacaagaatatggtttcagtaaaaaaatgtcatcttgcaaagttatttctttgcagctagcagagtaaattcatgcagtcatttatgttttctctagcagaagaataaaatcctacaaactgtaaaataatttataggatgtaaggcatttaatacaaaggaaattcaggtacacatatatggaattgtagattaatggatcgatctaccgtgcatatctcttatttattaacttccgcacatttctacccatcatatatatcttgtacattaactaatgttattggcgctcacatttttttccgccaatgtggcttacatgtttaggttcaaagttcatttatattacaagaaagagagctctggtacaaattaaattcttgtagacctctcatgctgggatatgcctaaacagatcaatgatagtaaataccccctcccccacaaaaccctgttaggcttaattatatttcctcaaatgcttatcattcaatttctgacttctgaagggctgatcctgacagatggcttccgcgcggctgtagcagtacttaagtacaaaatgttaagagtataatctatttatatatatctattaatttttacgccgtgagctcttcaatctggatatttctgagtttcatctatttctaatattcaaatgactgttgggggcatcccttagcaaantntgtataactaanntntnnccngacacaacannntntttcggagttgacaagnttaaccctagtnnntnctcacaccatttttttnaganannnttttntctatatataangagtgngtnnngtntgncgcattcnntnnncgtgtntngnatttnattctgnattntgcncnnntnntntgncatannngcngtgtnctgnactcttttcataaat

SEQ ID NO: 27569 - DNA, 365 bp, Oryza sativa
  Clone ID: PAT_MRT4530_3224C.1
atactgataaatctttcatggaaactagtccactgatgtttgatgagaaacctatgggcactctgacatcacgctgcattaatgaatacgtctacgcccacctcttgccgtcggccgagactttgaccaatggcgaaaacgggtgccatgaactgtccctaatgccccgtgtaaataaaaacggcggaaattacccagggttggtgttaccaaaacaatatttcatcaaccccttggggatacggcgagttttcccggtcaaccccctttctgtgatttatgtggataaacccgcggaacactgcggggtatcactctcagacgggaaaaacgctcactctgtccttgacaatcgggtgactccg

SEQ ID NO: 27570 - DNA, 366 bp, Oryza sativa
  Clone ID: PAT_MRT4530_32250C.1
cacggagccgggacggaatggccggacccacgcatgcgtgttcatttgtggccttccctcccgaaacttatggaaccgagagcagcacacgttagctcttctcctccgatggcggacaaggagcccgacgtggaccgccccgaggacgaagaggaggtcttcgttgtcgtcgccgacgcgggcggctaggaggaggacacgggcgcccaggtcgcccccatcgagcggctcgaggaggtcgccgtcaccaccggagaggagggacaggacgtgctccttgacatgaaggcgaaactttaccggtctgacaaggaggggaaccatttgaaggagcgggggatggacacctgtaagctttcttaaagc

SEQ ID NO: 27571 - DNA, 1712 bp, Oryza sativa
  Clone ID: PAT_MRT4530_32251C.1
atggcgaccgtctcgccggcgcggagggagccgacgccgcaggcggtgcgggcgtccccgatgccatcggcggcggcggcgttggtgaggagaggcggtggtggtagcggggggacggtgctggggaagtacgagctggggcgcgtcctgggacagggctcgttcgcgaaggtgtaccaggcgaggcacctggagaccgacgagtgcgtggcaatcaaggtgctcgacaaggagaaggccgtgaagggcgggatggtccacctcgtcaagcgcgagatcaacgtgctccgccgggtgcgccacccgaacatcgtgcagctgttcgaggtaatggccagcaagaccaagatctacttcgtcatggagtatgtccgcggcggcgagctcttctcccgcgtctccaagggacgcctcagggaggacaccgcgcggcgctacttccagcagcttgtctccgccgtcgacttctgccacgcccgcggcgtgttccaccgtgacctcaagcccgagaacctcctcgtggatgagaacggggacttgaaggtctcggacttcggcctcgccgccggccccgaccagttcgaccccgacggtctgctccacacgttctgcggcacgccggcctacgtcgcccccgaggtgctcaggcgccgcggatacgacggcgccaaggcggacatatggtcatgcggtgtcatcctctttgcgctcatggccgggtacctccctttccatgaccacaacatcatggttctgtaccggaagatctacaatggggagttcaggtgtccaaggtggttctccaaggattttactagattgataacgcgccttcttgacgcaaaccccaaaactaggatcaccgtgccagagatcattgagagcgattggttcaagaaaggatacaagccagtcaagttttacattgaggatgacaagctctacaacctgtctgatgacgtgctgaacttggagcctgctgatcctgttcccccaccattgggtttggcacctcctgttcctccacctccacaaggggatgatcctgatggttcagggtctgagtcagattcatcagtcgtatcctgcccggccacattgtcaactggggagagccagagagtccgtgggtcactaccacgcccagcaagccttaatgcatttgatatcatatcattctcaaaaggattcaacttgtctgggctgtttgaggagagggggaacgagatcaggtttgtatctggtgagcccatgtctgacattgtaaaaaagctggaggagattgcaaaggtcaagagcttcacagtgcggaggaaggactggcgggtgagcatagagggtacacgcgaaggagttaaggggcctctaaccataggcgcggagatatttgagcttacaccctcccttgtagtagtggaagtaaaaagaaaggcaggtgataatgaagagtatgaggatttctgcaacatggagttgaagccaggaatgcagcaccttgtgcaccagatgctcccagctccaaatggaactcctgtgagtgagaaggttgaaaggtcttcaagcttacaggctcccctcaccctgaagttgataggaacagaaggcagcatgagctagagacaggagcttccatgccattgacagggagatctcttttaccggaccaaaacctgacggtcttgggtcccgttgatgagccttgttggtttttg

SEQ ID NO: 27572 - DNA, 422 bp, Oryza sativa
  unsure (1)..(422): unsure at all n locations
  Clone ID: PAT_MRT4530_32252C.1
gccacgcgtaccttgatggatactatgacggggacttaagaggaaaacagatgaggctcgagaccgggccagaaaacttcaagtgcaggctgggcgnnaaggggtacaacagactgagggccatgctcgttgtgcctgggatgttggtaacagaggcactgaagctgaacaactgggtgcaggcgacacgagtgggctggcggagacagccggacaggccacgtaacctaggcactcaggagccaagtgggcacgctggcgactaacgtggtcatcgaagacgaacgcatcgactgcgctgagcaccagtggaccatggagaatgacgcagagaagaagaagtactccggcggagcattcgagccctttgggttgtacacggaccccgtgaagtataggagtacaagctcaatgagatcaag

SEQ ID NO: 27573 - DNA, 319 bp, Oryza sativa
  Clone ID: PAT_MRT4530_32253C.1
ctaaacatattccttgtaatcggaatctgacttggtcaaataacgtcattgtcttaactgttggactctaaccgaagatgccatacctgatatatgctttccatgccatgtatggattgttccagaaaaggtctattatagcagtgcctcgctaaccatctaagagcagccaacaatgttgtatgtgaattctgagcctggtagactcctgttatattataatcatacgtcactattggaacaatctgtatatttctacattagaacttactgtggatctgaagccattaatgataacttgttgttttctgaatttttg

SEQ ID NO: 27574 - DNA, 321 bp, Oryza sativa
  Clone ID: PAT_MRT4530_32254C.1
gcaatcaccagggacggatggagtatcagcgtgagcctgtttggcaaatgttttgtggttaggtccgcgtcggcagccgcggcgagggtgagggcgggcggcggcgagggcttgcgcgcgggcggctgctacgagggcgtgaggcggccacgcgcggagcttcgacgcggcggcaagggcgtgcacggcggcggccgcagcgagggcgagggcgagcgcgagcgcgcggcggcggcggcggctgcgagggcgggcaggctcctcactggccctggcagcggctactgttgttgctcccgtggccgctggcttccacgctga

SEQ ID NO: 27575 - DNA, 501 bp, Oryza sativa
  Clone ID: PAT_MRT4530_32255C.1
cccacgcgtacgcccacgcgtgcggcgcattgatttgtcttattgcacttcatatgccctatatatgccatcatccaacttcctagcaagaatcaacaacttgtgtgtttagaaatggaactgccaataatcagtagaaccaccatgttatgtgcccaatgaatctgtacgctacaacttttatctatacaaaaagctggctagatgacttccctgtgaatttcaacaatctggtcgctaactggctgtctgcttcctatgttgcaagattactgtgctaacagacaattcttacctcagtggagcacatgacgtgcgggactgtgtcagacagcaccctgatctcggtcattctgtgcttcaagttgctaaggtgtatactgaagagatggatgtcgagaaaaactgtcgatgtgtgcatgaaattaggcatagctcatgaaccactactgaactattggatatcctacgcattactgcataataactaattgccattat

SEQ ID NO: 27576 - DNA, 353 bp, Oryza sativa
  Clone ID: PAT_MRT4530_32256C.1
ccttgcgccgccgtcgccgccatgattcaattccggcgggatcctcactctgctcctccagccagcatcccctcgccccatcgccggcatttttctgcctccttgctccctccgccggctcctctccaccaccgcgcccgtctcccccaaacccttcgccgtcgaggactacctcgtcgccggctgcggcctcacccgagccgaagcagccaaggcttcggcgaagatctcccacctcagctccccctacaatcccgacgccgtcatcggcttcctctacgacctcggctcccccgcccccaaatcgccgccggcatcgccgccgacccgaggttgctgtgcgcggacgtgga

SEQ ID NO: 27577 - DNA, 771 bp, Oryza sativa
  Clone ID: PAT_MRT4530_32257C.1
gatagtaatgttatttattgtgactgcaacaaagcaatcaatagtacaaatgtgaatgacaaaactcaaatctctcttgccaatgctcaatgatgctaaaccaatgtgagtagtaataaacagtgtgattaatacacatcaagcacgttctgcatcgccagcgcttcagaagttcagagtagcagacagacgctcacatcacacggcgtacaccgcgacagccgcgagcgcgagcaccaagcccgtggcgccgcggagcgacgcgccgccgttgatcaggtacggcgccgtcggcgtcgtcttcgatccaacgccggttcctgcaccggtggcgcccggcgtctgcgttgccggcgaggtcgtcgtggcagcgcccggagtgtttccgccggcagagttgcaccggctcgccggcggggtgaccacgttgcaggccttggggagctcgagggcgcgggtcttgtcgatggtgacgccgccgatcgacgacgacgagtcgccgctgatcgccgcgcacaggcactgcggctgggactgcaccacggtggcgagctgcgagcagcaggtcctcgtcggcgacgtctcgttgccgctgatgtagttgaggcacgggtacaggttgatcagcgccgccgtgcaccccgtctgcgcggacgcgccggcgacgagcagcgccgccgtggcggccacgaggcaccccaccgccaacccgctcactcctgctgccgccatttctgaacctttgcaaccacaagaagcttcttgaaaatt

SEQ ID NO: 27578 - DNA, 1523 bp, Oryza sativa
  Clone ID: PAT_MRT4530_32258C.1
atgtccgcgtctgcatccgctgcctgtctccttcctccccgaggaggaagcctggcccgacccgacaccgcactccccccagccagccagccagccactgtcgcggtgaaccaaaatatcccccgcctcgcctcgcctcgcctcgcggtaacatccatcacactcctcccccgccgcggccgccgctgcgcggtagatctcctcctcctccacctccaccgtctcctgctcttcctctctctcttctcggaggaaacccccaatttattccttccccgcaaacccgcagccttcctaaaacgaattaaatctccctcccttatccgccgctgcaatccctccccacaaaatctcgctgcgccgcgcgctgttttagggtttgagctcatggcggtggaggaggcgagcagcagcagtggcggcggtcgtggtgggggtggcggtgggggtggggaggaggggttgtccggttgcggcggtgggtggacgcgcgagcaggagaaggcgttcgagaacgcgctggcgacggtgggggatgacgaggaggaaggggacgggttgtgggagaagctagcggaggccgtggaggggaagacggccgacgaggtgaggcggcactacgagctgctggtggaggacgtcgacggcatcgaggccgggcgggtgccgctcctggtgtacgccggcgacgggggcgtcgaggagggctctgcgggaggtgggaagaaggggggtggtgggggaggaggtggaggtggaggggggcatggggagaaggggtcggctaagtccgctgagcaggagcgccggaaggggatcgcctggacggaggacgagcacaggctgttccttcttggacttgagaagtacggcaaaggcgactggaggagtatctcaagaaactttgtgatctcaaggacacccacccaagtagctagtcatgcacagaagtattttattcgcctgaactcaatgaacagagagaggcggcgatcaagtatacatgacataaccagcgtgaacaatggagatacatctgctgctcaggggccaatcacaggtcagccaaatggcccatcagcaaatcctggaaaatcctctaagcagtctctacagccagcaaatgcgcctccaggcgtcgatgcttatggtacgacaattggacagccagttggtggtcctcttgtgtccgcagttggcactcctgttacacttcctgttcctgctgcacctcatatagcctatggcatgcatgcccctgtccctggagctgtagtccctggtgccccagtaaacatgcctccaatgccctaccccatgccgccaccaacatctcatggatgagggctttgaatactacagttcttctagacaaactcataatatctgtcttgtttagagtttcaatgcatgctgttatgtctcaataaagcaatatcaataaactcttgtacattacaaatggttattgaatgtagcattttgaggccatcctggactgtaaaaaaaaaaaaaaaaaaaaa

SEQ ID NO: 27579 - DNA, 732 bp, Oryza sativa
  Clone ID: PAT_MRT4530_32259C.1
cccgggctgcaggaatcggcacgaggcttgaattgttaagtatctcataaatgcacagattaaacctttcaacagtccaaccattatctatacaaaactaaggccctcttgtttaggcttataagccaacttataagtcgaaaagtctaagccaaaacaaacaagcagctttttcatttggctttttttgaagccataagccactctaacactattaagccaaaggctaggttggagaagctttttttgctttatatgagatagatgtatgactccaccactaaacttaggacattaaatccactggcttataaatcatataagccaataaactgacttaaaagtctaggccaataagcctaagcctaaacaaagagggcctaaatatcttgtaaataaccggataaactgctgcccatcccaactgcttcctcctctaccggtctactcctcggtggctcgtgtcctctcgaactccctccttcgtcggccccatcttttccctgtcccctatccgcaacaccggataggacgactcctccaactattaaaaccagtgcaatttgactctctcgacggttttgaaagcggttttggctgacgtggcgcctacgtggcagtattgacccggtcttcatcccacatgtcgcttacgtggcattagaataaaaaaaaccaaaaatttgtaggaccaacatgtcattcaaaaaaaaaaaggtgggacctaccgac

SEQ ID NO: 27580 - DNA, 480 bp, Oryza sativa
  Clone ID: PAT_MRT4530_3225C.1
atgactggcggtgaagacgataaggccaatcaacactggcagaatcatgcagccatgaaagtgaagaaaccagtcggcagcagacgtagacagcttgcgttgaaggtgatgatgcctatttgcagtggcagcgacgtggcgagccgtgaagacgatagcaccagttggcgtcatacgaggcggccggtcggcgaagacaccagtcaacggcagcgaaggcgagccagtggtgaagacgtagacgcccaacaacagcggcataataggccagctgtgcaggcggagacactagtcgaatggcagcataataggccagccgtgcaggcggagacaccagtcggcggcggcgaaggcaagccgatcggtgaagacgtagacgcccaacaacagcggcataataggccagtcatgcaggcggagacaccagtcggcggtggcgaaggcaagccgatcggtgaagacgtagacgcccaacaatga

SEQ ID NO: 27581 - DNA, 947 bp, Oryza sativa
  Clone ID: PAT_MRT4530_32260C.1
cccccccccccacagttttagttatatataaacagtttcaacgtagtaccaagaaaagcaatatactactacttctcaataaataacacctcgcaacaatccgtccattcggtgaaccaacacattttcacaagttcatgctgaagaaccaaagaatgcaaatgatctagtcatttgatgggtatgcgtctacgaccttttttaatgacaattgggtttaacaaggacaccccaataaggtcaaatgacagccaggtgagaacaaacccgcaggtttcaccagggtcccagacagggtaacagcaatgaaaaagggcagcttgcttcaggcaaaaaagaactccagcccgcctgtttggtattctgaacactcctttctcatatacaggaaaccagagagtatgaaatccgagatatatatattcacttcaatgtgcagatttgacacaaatatacttcgatgcgtgtggtacacccgactaccccatggtccatttaggttccacgcagttgcaaactgcttcgcttatctgtccaccactatcagcattcattcgaatggatttctgggcggaaatgacccttgtgcggagttcagcatgagggagtcttgtacttgtgttgccatgtatgataaccctccctgtggcccagaggaaatataaggcatgttagaattatgaggtatccatgactcagtcaagttggaataatctgtattgacatggggatttggcaacgtttcttgcagcgaggtcagatccatgaacatgttactggcttcaacatcagactcaaatgccatgtcaaatggatttgttgattttgcaggctgagatggcacgatgtccagttgctgtctgaagtggtccacgaaatgatggcgccagcatgtcaccaggagagaatgaaccagggttatatccccaggggttagtctttcaggg

SEQ ID NO: 27582 - DNA, 1122 bp, Oryza sativa
  Clone ID: PAT_MRT4530_32261C.1
atggtcaatatcgaaggcgatttacacatgaccagtggggaaggagaaggtagctatgccaagtactccaggcgtcagacaattgttatagatgaaactaagccagtcatcgagaaagctataatagaagtgtacaaggctattctccccaaaactatggtcattgcagacttaggttgctctgcaggaccaaatacgatgttcttcatgtccaatgtcatcaacatcatagcagaccactgtactaagttggatgaacatgatcctatcgaacttcagttcttcctaaatgacttaccaggtaatgatttcaaccaactctttcgatcactcgaaaagatcaagacctcaactacgatgtatcacaagggagattcgcttccatcatactacatatccggtttgccaaaatcatattactctagacttttccctcgtcagagtgttcatctcttccactcctcgtattgtcttcattggcgctcccaggtgccagagggactagaggctggtggaaaatctctctcaaataaggacaacatatacatcagctccaccacaacaccattagtagtgaaattattcaaagaacagtttcgaaaggacttttcccttttcctcaagctccgccatgaagaactagtaaacgatggacacatggtgctaatattttttggacggaaggatgaggatgtatacaatggaagtctcagccatattttgggatgtgtcgcaaagtcactagaatcacttgtttgcaagggccttgtgaacaaggaaaagttggaatccttcaacctacctatctatgggccatcagatgacgaagtaatggaaatagttatggaaagccatatgtttgacttggttcacatgaaactctttgaggcaaactgggatccttatgacgattcagtagatgacgttgttcatgacattgccagcagtagccaaaatatcactacgggcattagatctgtgctggagtctttgatagcaagtcattttggagaaagcatacttgacgtgttgtttcaagagtttagaccccttgtggcccaacaccttgagagggagaagacaaagtatgccgtcatcgtcatgtccttgaagaaaatatag

SEQ ID NO: 27583 - DNA, 354 bp, Oryza sativa
  Clone ID: PAT_MRT4530_32263C.1
atgaacgtgacaaggccgttgtcacggtacctggacaacccagacgccgcggcggagcgaccgccggagggcccaggatccgggttcctcgtcgtggaggacgaggcggccgtcgagcaggcggccaccatttgctgcggattgtgccatgacccgcgggtgcgcaccctccccttcactcagagctggaggctctacatgggcgaagacaacgtggtcgtcttcgtccccgtcgtcggcgagccgttgtcggccggctgctactacgtcgaccggtccaccggcagccaccacgccgggaagttgaagagcgtggcgtcgtgcgcggacgctggcggccgcgtcgtgcgctga

SEQ ID NO: 27584 - DNA, 1244 bp, Oryza sativa
  Clone ID: PAT_MRT4530_32264C.1
aatactcaagcttgactatgaaaaggtcaaggaggtcacatactatgtcttgaaggtgttatcttctattgttggatattattcattgagcatgtatcgaagcaacttacaactgaactctattttccagataggactgcttgttggtgcagctttagcccttcttctgtttgcctcttttggtagaattgcagaactgttctccaaagatcctatggttctacaaattgttgggagtggtgttctgtttgttagtgccagccaaccaattaatgccctagcttttatcttcgatggacttcacttcggtgtctcagacttctcatattctgcttcttcaatgattactgttggggcaatatacttctttatttttgctatatgctcccaaagtttttggcctccctggggttagggctgggctggctcttttcatgggtttgcgcatgactgcaggatttttgagattgggttcgagagcaggtccttggtggtttttgcaccataaagaaccaacatacaaattacactcaagtacatgttgatgttgggctgcaggggataaataggaagatagagaatggaagtgatcaaaggatgattccatcattaaagaagctgaacctcttggatttcttgagaataatgctgccttcatcaaccttatcataaaacccctctggtagcattgcaatcaagcaagacgacatggcaaaggagaagctgtagtcaggaaccatcccatgcttttgtaaaggaatgctttgcttgaagtaagtttcaattacttttgagattgcccatctcaagggagagagcgcagtggctaaaacataatatagaaatccttcaccgggtttatgaactagtagctgtgaaatacggttaagatagaagtaactgaggtcaactccgcaaatactagatttgtgtaccaaccagtgccttgttctatatatcatggtacatggctgggtttcaccattcaccttggcgacctctgcagcgatgtcaaatgcagattttccagagcctattatagtcaccttcttccctttgacaaattcagctgcattatccatgtaagagtaatctattgagtgcaagattttccccttgaacaactctaggccactgtttgccggaaattctgggatatttgggcttccgctgtgccttccaatgcacacgattagaaaatccactagaaaaacctcaatgtaccattcctgcagcccggggat

SEQ ID NO: 27585 - DNA, 1211 bp, Oryza sativa
  Clone ID: PAT_MRT4530_32265C.1
ccccccccgccccccccccgtccccccccgccccccccccccccccccccccccgcgccccccccccgcgcccccgcgccgccccccccgcccgcgccccccccccccccccccccccccccccccccccggggcgcccgccccgcgcgcgccccccccccccgccccccgccccccgcgccgccccccccgccccccccgcgccaccccgtcccccccccccccggtcgcccccccgttcgcccggcccgcaccgtgcgcggggggtgccggccccggccggtcccccggcgccccgccccccccccctccccccgggcccgccggggggggggtgtccccccagcgggggggtccccgggggggtcccccggcggccccccgcccggggccggccggcccgggggggcccggcgcccccgcccgccccccccccccccccccccccctcccccccccccccgcccaccccgtcgcccccgcctccgcgccggcctccgcctccagatggccggcgttctcatggtggggggacaacgcagtcgtcgcctccctcaccttctcctgcatcgccggccggccgtcggaggcccgccccccggcgacctcctcccaaccgcctgccgcctgccggccagcctagccccagacctcctcctccgcgcgccccagccagacaggcgtgctacctcacgatgacaggtgggcctcacccatcatccccaacctccagctgccctctctctccggccgaatccctagcgccggcaacctccgatttgcctcctccactcactgttcctccaaattgattgcgggaaattaatccccacctcatcctctccaattcccccataatttaccactccaccccctccaccatggccgtcgtcaatctccctccccggcgaccctctcgctcctctccggcctataaaagggagcctcgcctccttctctatctccacataccgtccgctcgcctctccctctcctccgccgcggcgccgctctcttcctgcgcagcgccgtcgtgcaattctggccgcccctcgccggcagtcaggacctcctcggactctggagacaccacctttggcttcgtctcttcctcctcttccccgtccacacctccgtcgagcacgaggaccacgggaacgacgacgacgacccgaagctccccgccgtcgtgtgaactatgaactatttat

SEQ ID NO: 27586 - DNA, 449 bp, Oryza sativa
  Clone ID: PAT_MRT4530_32266C.1
aatgattacaacaataccttggaaagcaactcaagcacaacccaacgccttccctgaacgtcaagccttaatgcccgtctgggagggagaagctatacctcaagcagaatggcaacaatgttggcaacaagcggcaattaatgtattaaaagaggatggtttagcttattttcatatcccattttgtgccagtcattgtattttctgtggtttttatcgaaatgcttggaaagaagactatagtaaagtttataccgataaattgattgaagaacttgcttacgaagcttcaattcgccaaggaaatggcaagattcaagcggtgtattttggtggcggtacgccaacggcattagcgacagaagatttagtccgtttaattaagcgtgttatcaatatttaccgcttgcaacagattgtgaatttaccttagaaggccgtattagtca

SEQ ID NO: 27587 - DNA, 492 bp, Oryza sativa
  Clone ID: PAT_MRT4530_32267C.1
atggatatctctgaggcaaatgaaagctacatgagctgcggctcgaactatgcgtatagtccagagaaggctaagcctgtgcctaaggaaagaagggaaaggcgaagaagccagtggagatcccgcctcctttttgtgacttttgtggaatggattgacaaggagatgaatgagtttcatacgagtttgattcgacattggcgcgagtggaaggaagaacctaagaagcgccaacgcgagtgtgctgcaatacagaaggctgagagggagagggagttggcaatagagaactgggagaaggaagagggtgatgttgattgggtgaggaaggtggctagggcgcagcgtgtgaaggaggcggggacggaagtgccaaggaagggcgagtaccctcgtgcacccaatagtgcgatggaagggtgggaggacgaccaagggatgccaagggttgttctccacctggttggggcgcaccccacatgggcccactag

SEQ ID NO: 27588 - DNA, 483 bp, Oryza sativa
  Clone ID: PAT_MRT4530_32268C.1
gggctgcaggaattcggcacgaggactccatgtgcgtagctaggccacgcaacaccacaatccaacagtgcgtgatcgaactaggtgcaaacacgtaaaagaggggaaaaaggaaaaaaagatgaagcaaaacttttttgtaaaattatttgtaaattattcggggcaagtatcatgaccacatatcctatatttcgagaaattaaaaagataaatagaaaaataaatgacagaaactttttaatcccgataacctaaccattttctaaatatatatattttctgcttatactataaaataaataatatgcaaatcttttaacttttagaaaaagttataattccaataaaacaaacaatatcggtgttgatccatatctagagtcttaaaagtcatacacataggttaattagcggaagcgccaggcgttgcgttgattttcagttattcaaaaacacgcacattttactggatctcacttc

SEQ ID NO: 27589 - DNA, 1885 bp, Oryza sativa
  Clone ID: PAT_MRT4530_32269C.1
atcaaactatcagagcacatatggcactcactcacctcctctgctccctcctccttgccaccgcattgctgctgctctccatctcccgtacagaggctggcgaggtgggcgtgtgctacgggagggacgcggacgatttgatggatccaccggccgtggtgaatcttctgaaggagaacggcatcacgaaggtgaggatctacgacgccgacccgacggtgctgagatcgctgtccaacacaggcatcaaggtgatggtggcactacccaacaaggaccttgcttctgcaggccacgatcagggaagtgcgctagactgggtgaaaacaaacattgttccgtactataaccagggcacacaaatcaatggtgtggctgtggggaatgaggtgttcaggcaagcacccaacttgacccctcagctgttaccggcgatgaagaatgtgcagacggcgctagcgagactgggccttgccgacatcataaaggtatcaacacccattaattttgatgcggtcaatgtgtcatggccatcatccaagggtgtgtttcaagacagcatcgcccagtcggtaatgagtcccatgatcgatttcttgcaacagaccaactcatatctcatggtcaatttctacccatatattgcctgggctaactctaaaggccagatctcccgcgattacgctacatttggccccaacgccggtgtagtcgatccgtggagccacatcacatactatagtctctttgatgcccagctcgatgctgtttactacgctataaatcaggtttctggtgatagtgtgagggcctcaatggcccaaacaagatgggggcacccgacaccaagggtgcccgtcaaatgttcggaatgtgggcatccctccggtggtcagttccgcaagttgaccacacaagctgatgccgaagtggatgtggctacaaaagctaacgcccaagcattcaacaatggtattatcagacgcgctctgtttggagcctctggtatgcctgatgtctctgtgtacatcttcgctcttttcaacgagaacaagaaggctggagcatctgtagaacgcaacttcggcctgttctaccctaacggtacaaaggtttacgaggttgattttcatggtggtggtatttgtcccaccaaggcgagctggtgcgtggcaaatttagctgtggggaattcccggctgcaggcggcgttggattgggcttgtagtaacggcgcagactgcagcgctatccaacagggcaaaccttgcttcgagccaaacacaatggttgcgcatgcgtctttcgcattcaatgactactaccagcggatgggccaagccaatgggacatgcgactttgctggcgctgcttatattgtcttccaaccatcagaaagcatttgcgacccaaatccaagttggtgtatcgcgaaccctgcagttggggacatgcggctacaggcagccctagattatgcatgcggcagctgtgcagactgcagcgccatccagcccggtgcacggtgtttcgagcctaacactaaggtggcgcacgcatcctacgcattcaacgactattaccagcgtgttggccgagtcagtggctcgtgtgacttcggtggtgctggttccattacctaccaggcaccagagattggaaactgcgtccttccgccaatgcttgaactggacaaagcgtactgaagaccgagggctaagctagctaccatcagttcgcgatagtggggatggatatcgaagaacaagtccacatcgtttggcaaaaataaaatgatatgtttgtagcagtttttccagtcgggtctattgaaataagtaaatataccgttcattcctgttggatgaaattcctcagttaaaaa

SEQ ID NO: 27590 - DNA, 357 bp, Oryza sativa
  Clone ID: PAT_MRT4530_3226C.1
atggaagtgaataaactagtcggcagcagacgtagacagcttgcgttgaagatgatgacgcctattagcggtgacggcgacacgcccaacaaaggcggcataataggccagtcgtgcaggcggaaacaccagtcggcggcggacgagggcaagccggtcggtgaagacgtagacgcccaacaatggcggcatgacaggccagccgtgcaggcggaaacaccagtcggcggcgacgacggcaagccggtggccggcaatgaagttgtagacgcccaacaacagcggcataataggccacccgtgcaggcggtgacaccagtcggcggcgacggaagcgagccggcggtgaagccgtag

SEQ ID NO: 27591 - DNA, 436 bp, Oryza sativa
  Clone ID: PAT_MRT4530_32270C.1
ctacctaaggtagttcttccctacaactactggcacacaaagaacacacatcaacattagcatgtgcataacccattggagcatgtccttctctgattctattttgtccttcatctcaattgccaccgcaactggttgcgtctcccgtaggctattatactcgccggcatggtagtatgccatcatatcctcgacatactcctgaatgcaactcaaaatttctcgtggccaaagattcacctctcccccacattgcagccatcgccgggcaggatttctgatagtggacgacgtgcgtggagctgccggccacccacaagcacacttgagctcggggatgccgcacgcttctacctgggaccgctcctcgctacacctgctcaaccaagaaagggttctcgattcgtccatcgcagccgctcccgcggtcccctag

SEQ ID NO: 27592 - DNA, 166 bp, Oryza sativa
  Clone ID: PAT_MRT4530_32271C.1
gccgtctgctggagctgcgcgtggagcgccgcgacggtggactggtcggttagcgacttagcctgccacatccgtcgcctacgcccgcagacgctcgagcagcttctccagctcggcgccgcgcccttgtcgcattcaaggactaccgctacttctccctcatccg

SEQ ID NO: 27593 - DNA, 367 bp, Oryza sativa
  Clone ID: PAT_MRT4530_32272C.1
agcttaagaaggtctgtgaagaaactcgagatattgagatggtgcacccatacgcatccttctatgtcccaactcgcaactcccgcagaaggcagtgaagaaacagcaaaacagggttgacatgctacaacaaatgtcgctgaagattaatgatgaaggtgcaatggagtttttagggattggatgccttgtgattttttgcttcgttaaatttgaacctgtttgatacaaataatacatgtaatatgtttgttgcaatgactttgtactcgttgtactctcttagatgatttttgttgttcaatgactgcatgcgtaacttctgttgtgagactcatgtatgaaatcaaggtggatttttggacgc

SEQ ID NO: 27594 - DNA, 272 bp, Oryza sativa
  Clone ID: PAT_MRT4530_32273C.1
gtgtagaagaaagacaaatattttaatgatcacatcttcctctacagcgtgatgtccaagccatgcatggagaaattaaaacatttttgaacacaacatcccaaactgtacaaaactgatccatgggaactagatactctgaatatgacaagtaattacatattctagggagaacaaactgcttatagagagtaaattctgtactactatcactgatgaaccaggcatgcttggggggggtctagcttcttgaaatcttgaatcatgcttgg

SEQ ID NO: 27595 - DNA, 958 bp, Oryza sativa
  Clone ID: PAT_MRT4530_32274C.1
ccaccaccaccaccaccaccacgagaggaggaagccgcgggtctcctcgtcttctcctctctctctctcctcaaccagctgtctcgcggtcgccggcggcggtgaggggaggaagcggggctgcctcgcgcggcgggaggtctccggagagggaggggtgtcgtgctgatttggggggctgcggcggtgtcggcggcgatggggtgggcttcctgctgcaagggggtggacggggttctacctggccggaggaagaagaagaaggagacgacatggcggatcttctcgctgaaggagctacagtcagcgacgaacaatttcaactatgacaacaagcttggtgagggtgggtttggcagcgtctactggggccagctctgggatggatcacagattgcggtgaaaaggctcaagagttggagcaacaaagctgaaactgaatttgcaattgaggtggaggttttggcgacagtgagacacaagagcctgttgagcttacgtggctattgtgccgaaggcaagaacgcctgatagtctacgattatatgccaaacctgagcttgcactcccaccttcatggacagcatgcagctgaatgccatcttggttgggaacgaagaatgaagatcgctattgattctgcagaagggattgcatatcttcatcaccaagcgacaccacatatcattcatcgggatatcaagtcaagcaatgttctgttggacaagaatttccaagcacgggttgccgattttggttttgcaaagctcattccagatggtgcaacccatgtcactacaaaggtgaagggtacactcggttatcttgcaccggaatacgccatgcttgggaaggcctctgaaagctgtgatggtcttcagctttggagtactgctgctagagcttgccagtggaaagaggccagttgagaagctaaaccccactacgaagctaacta

SEQ ID NO: 27596 - DNA, 186 bp, Oryza sativa
  Clone ID: PAT_MRT4530_32275C.1
atggcggctgggcgagggcctcggggcaaggcggtgcaagggcccgagggacatgacttggcaccccgaggccccgacccccctggccactcctgcgattgtgcccgtgaccgtcgcacgcccaacgccgagtgtgccgctgacaggcgcgctaaatgcggggcgcggattccgtgggcgacgtga

SEQ ID NO: 27597 - DNA, 2303 bp, Oryza sativa
  Clone ID: PAT_MRT4530_32276C.1
acagattccatcatcatacatgaatcatgccattgcttagcacgcaaagcaaggcaaactctgaaggaatttcacagaaatctcaccgataatacacagctagtatacaatatacaaatgcagagcaattagatactacatctctacagaatcgagcatggttgcatctctgcacatccaacaccatgctgggaacaacacagagctctggagattaagttacctatactggtttattggaatctgacagtgtctagtggagtaaacagctcaaatacattggattattcggctatgtggtcatctggatatgtaactattgcgtgtagagtcctcttatactcttcatctgtgcatgtatacaagcatccaagaacaatcttttctgattctgaagatgatgatcagagaagatgtggaaattatcaacatcatgcagggtgatctgggaatggaagagaattgtccacgatgagaagcttctcaggatccaggcccccattctcaatgtcaacgatttcgctgtgccagtgtagcctgtctgcagcatccttcaccttgtgaaccacatcaggcgcgtcccggattatcgcagcacctcctggccggagaatgcgatccatctcgagcatgatgtaagggatgccacacgtgtccatatacaggctgaatactccattggcatgtagcacatcatatgtacgtggataagtagagaaagactcgcaccagtccatgtatgttcctatcaagccacgctcatagatgataccaagtgtattgtccgtcagatttgcaggaactacattcatgacccaaacaggatattcagacatagccgcagcaaagccaccaaagccggcattcatgtccatgacattcctgtaactcccatcagataaattcaaatatgttctgtagaaatcaactcttttattccaatccaaactgtcaagtttgtatgtctgtatgggcatcccctttgtttctccactggctatccttggtggtatggcagtgagcctttcaggccacttctccacagcaccaccagcaatatctcttggaagacgagttaggcacattgaagtatttacataccaagcactgtctgcatcatctcctgtacagaacggtggtgacctcaagagcttagcatcttgctcgcattgaatatgatttataggctttctccaaaccgcgattgtaccgttctctgaaaccttcgaccagcaaagttttttcactatctcttccaaagctaattgttcacctggcatacccttggctgtacggttcaaatcatcatactgtgttttccagctgattggtggcatagccaatacccaatatccaccaggtcggagaagacggtcaatttccagcatgtagagttcatcatgagaattccccggaacaaggcagcctgcgcagtgcaccatgtcgaacgacctcgtcggataaggcagcctgcgaacaccgagtgctccgatcatcgctggcagaccacgctccaaggcgagctgcacttgtgctttatgcctatttctcctatcaattgacatggtcagtatcccatagttcaacaggtagtctccaaagctcgcaaccccacatcctacgtcgagcgcggtccggacctcgccgccgcggagaggaaccatgccggccagctgctcgacgtaagtccccacccccttggggaacaccagccagtcgccgcgggcgcgcacggggtcaggggggccggccagcttggccggggccagcggcgggagctccacgttcgcgtaccacgcgcggtcacgccgcgcgggccacgccatgggctggcggtacccgggaggcggcgggacgcggcagggtggcggcggcggcgggtggtccggggggtgcggcgggtgaggcggcgggtcctcgggcgggtgcgggggcggcggcggcggcgggcgcggcgggcagtggcgctccccggagagctcgtcgtcctcgtggcaggggacgacgtgggtggcgttgggcgggcacggcgggacggggggcggcggcggcgggtggtggtggaggtgctccgggacgggcgacggggtgggtggcgcgggcagcggcgccgcggtggaggcgctgctggagggcggcggcgaggaggaggaggaggaggcggagtggtgggcgcgggagacgacgacggagatgaggatcagcgacgtggtggccgccgccacggccgcccccgcaagcgagagcgcacgcggcagcggcttgacggcggcggccgccgcatccgttgcggagagcggcat

SEQ ID NO: 27598 - DNA, 533 bp, Oryza sativa
  unsure (1)..(533): unsure at all n locations
  Clone ID: PAT_MRT4530_32277C.1
ggaccaaaggaaaaattttcccccctccccccgggtccaatttttacccggggggaaccttttccccgggggaaacaaaaaaacggtctttttttcctttccaacaaatttccccgaggggggaccaggcccccgtgtggggttttacaagccccggacccaggtttttcctcccgggcccccctttcgggttgtagttggccccgttggccgggtcccccaggggggacccagggtaccccgggtccccccctttgccgtaccttcgggggcacggggggggggcctccaggggggcgttggggtccccctgaaaaaaccctttcccaaacggtttggggacggtccccacaatctttggggggggggatttccccttgccgtcaccccaactttttcctttgggccggggtgaggggccccccttgggggnccgccaccggttggggggtacgccccccccactggccggggcattgggtccccgggtttgcccacccacacgtaggcaaaccccccggggcggaaccggg

SEQ ID NO: 27599 - DNA, 353 bp, Oryza sativa
  Clone ID: PAT_MRT4530_32278C.1
tatctatatatatatatataataatgatatatagaattgcttatatccttgtgttttgcataataaggttttggtactaatatgaggttactatgctcacacgtggttagatatagaattcacttttgttattggtctgtagtttgttttggctcttgttttgtttttccacaggcccagccaatatgatataagataatgttagtcatggtccctcatcttgaaaaggtcgctgcggacattcctcaaacaatatatgagcctgtatataccgtactgtttaatggtcatctcaatgataaatatatgaaagtattatatgtttaccgtgttaaaaaaaaaaaaaaaaaaaa

SEQ ID NO: 27600 - DNA, 429 bp, Oryza sativa
  Clone ID: PAT_MRT4530_32279C.1
atgcctaaaattgtactcaatgttaattccgtgtgcggggaacacatttgtatttttggtaaaggaaccctagctcctcatcatcacggacgacctcgcctagatctacttgtcggcgttgtggacaacctcgacccctggatccgccaattggcgtcatggacaacctcgccttcatctacctctagcctggtggatgagcacacttggatctacccatcggttctatggatgaactcgtatgcatctgctcgccgccgccgtgggggacctcgcctttattcgcccgttgttgccgtcatctttactaccgctgggtcacggtcctcaccacagtcatctccgcaacctaccgtagtcatctccgcagctgtcaccaccaccagatttggcactcccaagcgcttgcacaatcaaatccgccatgga

SEQ ID NO: 27601 - DNA, 1473 bp, Oryza sativa
  Clone ID: PAT_MRT4530_3227C.1
cttgtcgtcgccaccgccattgctgatagcaacaacgacttcaccgccggcttgcctccgtcgccgccgattggtgtctccgcctacacggctagcctgttatgccgccgtcgttgggcgtctacggcttcaccgccggctcgcttccgtcgccgccgactggtgtcaccgcctgcacgggtggcctattatgccgctgttgttgggcgtctacaacttcattgccggcctgcctccgtcgccgccgactagtgtcctcgcctatatggttggttggtcacaccaccgtttatgggcgtccgcgtcttcaccgaccgactggccttcgccgccgccgactggtgtctctgcctacatggttgtttttgggccgattcctagcacccgggggctcgttggatggaccgagtcactcatatgcatgtttgggaagtgcctaggctgactggatccagatcctgataggcacaaaagggattcatggctttaagcttatctcttacgctctaggaatggatcagtcagaacatcaccaccggcttgccgtcgtcgccgccgactggtgtttccgcctgcacggctggcctgtcatgccgccattgttgggcgtctacgtcttcaccgaccggcttgccctcgtccgccgccgactggtgtttccgcctgcacgactggcctattatgccgcctttgttgggcgtctacctcttcaccgactggccgcctcgtccgccgccaactggtgtttccgcctgcacggctggcctattatgacgccaactgatgctaccttcttcacggccggctacgtcgccgtcaccgctaataggcgtcatcatcttcaacgcaagctgtctacgtctgctgccgactagtttattcacttccatggctacatgattctaccagtgttgattggccttatcttgttcaccgccggtcatctcgtctgctgttgactagtgccctcgcctctatgtccggtttataccactaccactactgatggacatcatcgtcttccgtcgccgactggtgcttttatcttcacaactgcgcgtcttcaccaccggtttgcttctgttgccgccgactcgtgttcacttcatcacagctatgcaactttgtcaccatggtgaagcgacttcatctatattatcttcggcaccggcaaacctaattgccgctacttcgcaagttttgctacttcaccaaccacgacgtctacaagagcttcgacatctcggcatgcacttccatattcgatgtcgtgttattctactacaacaagtggtgttccaatcttcaatatttctactcggacatcttcaaacgtatcttcactcaactgatggctactcgatgacatgaagctacagttctcgactctatgttcagttgtttctcaactaaccaaagagtcgggggctacacaaataccagactcaaaatttgacaagctttatgtcaaga

SEQ ID NO: 27602 - DNA, 1212 bp, Oryza sativa
  Clone ID: PAT_MRT4530_32280C.1
atggacgcgcgatggtgcgacctcaacgccgacgtcctccgcctcgtccacaagcgcctcccgtgcctcgtcgaccggcgcaacatgcgccgagcctgcaagtcctggcgcgcggccgtcgcggcgccggcgccgccgcagcagcgcccgctcccgtggatcctcgtgccgagctccggcggccctaccttctcgtgcgccgtcggcggctgccgcagacacgacttcggcgtcccggactacgcgcgcgaagcacgctacttcggcacgtacagcggcggctggctcttcctcgacttcggcaacacccgcggccacggccggcacggcctcctcaacctccgcaccaagtactgcatcagcatccccggaatcgtctgcctcgacctgaatcctagcatcatcagggacatggtcatgatagccgcgaccctctcctcgccgccggaagacgagcactgcatcggcgccgccatcagctcgtactggcccgggatgaatggtgcacgcatgcacgcgttctggtacatgcggcgtcaggtcgcggtgatgccgactgctagcgagggcgtcttcggaccatttctggaggatgtcatacaccacaaggaagccttctatttcctcaccgcgcaagagcgcctccatgctttcgcggtaccggagttccgagtaggccgccgcggctatctggatataccacccaggaagattcccagcttcccgcatgatgggcgtgattacgacggacgcgacgttgctcgctacctggtggagtcccgcgagaatctcctgatggtggtcaggttcgtctctgatcctccccaaatgccaccgaggacgtcggcgttcaaggtgttcgagatggtggagctggccatcaacaacggcgaggcccagtacgcgtggaacgagctgcaatcgctgggtgggaggatgctgttcgtcgcgcgaggctgctcaaaatcatacaatgtggccgattacccggggttgggttcagcgccggcgtctacttcctggacgacgacagaatctacgacgagttcacggtcctcctcgatggcaccggacggcgctacccctgcagagacagcggcaagtggctgctgggggcggcggaggcggacaacttcttgccggagcaagccccgtcgagctactcaccgccggcttggcttctcccctgagagcgtgctcatgttagtttga

SEQ ID NO: 27603 - DNA, 1191 bp, Oryza sativa
  Clone ID: PAT_MRT4530_32281C.1
atggacgcgctatggtgcgacctcaacgccgacgtcctccgcctcgtccacaagcgcctcccgtgcctcgtcgaccggcgcaacatgcgccgagcctgcaagtcctggcgagctgccgtcgcggcgccggcgccgccgcagcagcgcccggtcccgtggatcctcgtgccgagcgccggcggccctaccttctcgtgcgccgtcggcggctgccgcagacacgacttcggcgtcccggactacgcgcgcgaggcgcgctacttcggcacgtacagcggcggctggctcttcctcaacttcggcaacacccgcggccacggccggcacgtcctcctcagcctccgcaccaagtaccgcatcggcctccccggaattgtctacctccacctgaatcctgaattcatcagggacatggtcatgatagccgcgaccctctcctcgccgccggaggacgagcactgcatcggcgccgccatcagctcgtactggccgcccgggatgaatggtgcacgcgtgcacgcgttctggcgcatgcggcgtcaggtcgctgtgatgccgactgctatcgagggcgtcatcggaccaattctggaggatgtcatacaccacaaggaagccttctatttcctcaccgcgcaagagcacctccatgttttcgcgctaccggagttccgagtaaaccgtcgcggccatctgcatatagcacccatggagattcgcagcttcccgcatgatggtcgtgattacgacggacgcgccgttgctcgctacctggtggagtcccgcgagaatctcctgatggtggtcaggttcgtctctgatcctccccaaatgccaccgaggacgtcggcattcaaggtgttcgagatggtggagctgcccatcaacaacggcgaggcccggtacgcgtggaacgagctggaatcgctgggtgggaggatgctgttcgtcgcgcgaggctgctcaaaatcctacgaggtggccgattacccggggttggggttcagcgccggcgtctacttcctggacgacgggagaatctacgacgagttcacggtcctcgatgacaccgcacggcgctacccctgcagagacagcggcaagtggctgctgggggcggcggaggcggacaacttcttgccggagcaagccctgtcgagctactcaccgccggcttggcttctcccctga

SEQ ID NO: 27604 - DNA, 519 bp, Oryza sativa
  Clone ID: PAT_MRT4530_32282C.1
atggtacaaagcggacagggcgccggcagagcggggtcccgaaccggcgcgctgctcgaccagcatgtgccattgtgtgcgcgccggtgcgaccggctctgcctcgcgcacgaacggacatttacgagccggagcggcgtcgccagcggattccggctagcgccggagaggagggaaatttacgcagcacagtcgcaacgcgtgcgtgcgtgcatgcctgatgcctcccccggccggagacagggaaggccccatgcttgctatgcgccattgatggccggctaccaaagcgctttggccgggcgagcggtgcttgtcatcgacagtcgcctagcgcaccactcgtgggagcgggacagcgacgcggcgcggccggggacattcccatctaccggccggtttggcggcttctcccctcccatctggtcgccgtccggctacagccgcgttgctggtgcactgtccgcctgtggccactatgtctcggcccaaattggctgcttcggcatggacgggtcg

SEQ ID NO: 27605 - DNA, 996 bp, Oryza sativa
  Clone ID: PAT_MRT4530_32283C.1
atggcgcggcggcgcgcggcggcggcggtggtgatggtggtggcggtggtggcggtggcggtggcgaaggagtgcacgaacattcccacgcagctgtcgtcgcacacggtgcgggcgcggctgcagtcgtcgtcggcggcggagtggcggtggcgcgaggagtactttcacggcgaccacctcaaccccaccgacgaggcggcgtggatggacctcatgccgctcgcggcggcgtcggcgtcggagttcgactgggcgatgctgtacaggtcgctcaagggcgccgccgtcgccggagacgaagccggcggcggcggcggcggagggtttgggttcttggagaaggtgtcgctgcacgacgtgcggctggacatggacggcggcggcgacggcgtgtacgggcgagcgcagcagacgaacctggagtacctgctgctgctggaggtggacaggctggtgtggagcttcaggacgcaggccgggctgccggcgccggggaagccgtacggcggatgggagggccccgacgtcgagctccgcggccacttcgtcgggcactacctgagcgcggcggcgaagatgtgggcgagcacgcacaacggcacgctcgccggcaagatggcggcggtggtggacgcgctgcacgactgccaggcggcggccggcaccggctacctctccgccttccccgccgagttcttcgaccgcttcgaggccatccgccccgtctgggcgccctactacaccatccacaaggcacgcaacgcaacccaaagcatctgcatctccaccatggccatgaatctcatctatcatgcagggcctgctggatcagcacacggtggccgggaacggcaaggcgctcggcatggtggtcgccatggccgactacttcgccggccgcgtgaggagcgtcatccagagaaagaccagaggcatttggtgctggctcatcttttcgacaagccttgctttctaggattgcttgcagttcag

SEQ ID NO: 27606 - DNA, 106 bp, Oryza sativa
  Clone ID: PAT_MRT4530_32284C.1
aaacgatccaatgagatgtaatccaaaatccaacatttatgttcacatcattttggcaatttaatatatgatggggtaaaatgtcaaaagcttggttactataaaa

SEQ ID NO: 27607 - DNA, 2354 bp, Oryza sativa
  Clone ID: PAT_MRT4530_32285C.1
atggcgcggcggcgcgcggcggcggcggtggtgatggtggtggcggtggtggcggtggcggtggcgaaggagtgcacgaacattcccacgcagctgtcgtcgcacacggtgcgggcgcggctgcagtcgtcgtcggcggcggagtggcggtggcgcgaggagtacttccacggcgaccacctcaaccccaccgacgaggcggcgtggatggacctcatgccgctcgcggcggcgtcggcgtcggagttcgactgggcgatgctgtacaggtcgctcaagggcgccgccgtcgccggagacgaaggcggcggcggcggcggcggagggtttgggttcctggaggaggtgtcgctgcacgacgtgcggctggacatggacggcggcggcgacggcgtgtacgggcgagcgcagcagacgaacctggagtacctgctgctgctggaggtggacaggctggtgtggagcttcaggacgcaggccgggctgccggcgccggggaagccgtacggcggatgggagggccccgacgtcgagctccgcggccacttcgtcgggcactacctgagcgcggcggcgaagatgtgggcgagcacgcacaacggcacgctcgccggcaagatggcggcggtggtggacgcgctgcacgactgccaggcggcggccggcaccggctacctctccgccttccccgccgagttcttcgaccgcttcgaggccatccgccccgtctgggcgccctactacaccatccacaaggcacgcaacgcaacccaaagcatctgcatctccaccatggccatgaatctcatctgttcgtgcaaatgtctgaatgaaatcatgcagggcctgctggatcagcacacggtggccgggaacggcaaggcgctcggcatggtggtcgccatggccgactacttcgccggccgcgtgaggagcgtcatccagaggtacaccatcgagaggcactggacgtcgctcaacgaggagaccggcgggatgaacgacgtcctctaccagctgtacaccattactaaagaccagaggcatttggtgctggctcatcttttcgacaagccttgctttctaggattgcttgcagttcaggctgacagtctttcgggttttcatgcaaatacacacattcctgttgtcatcggtgggcaaatgagatatgaagttactggtgatcctctttacaaggagattgcaacattcttcatggacatagttaattcttctcatagctatgccactggtggcacatctgtcagtgagttctggtcaaatccaaaacatttagctgaggctctaaccactgagactgaggagtcctgtactacctacaacatgcttaaggtttctcgccacctattcagatggacaaaggaaattgcgtatgcagattactacgagcgagcactgataaatggtgtcctaagcattcagagaggaagagatcctggtgtgatgatctacatgctaccccagggccctggaagatctaaagcagtaagctaccatgggtggggaacacagtacaattcattttggtgttgttatggaactgggatagaatcattctccaagctgggggattctatctactttgagcagaaaggagacaagccagggctctacattattcagtacataccgagcacatttaactggagaactgcaggtcttactgttactcaacaagtgaagcccctcagctcatcagatcagtatcttcaagtctcactttccatttctgctgcaaagacaaacgggcaatatgcaacactgaatgtgagaataccatcatggacatcaatgaatggtgcaaaagcaactctgaatgacaaagatctgcaattagcatctccagggactttcctcacaatcagcaagcagtgggatagtggtgatgatcacttgctactccagttcccaattaacctaaggacagaagcaataaaaggttgacggccacaggtagcatctctgaatgcgatcctgttcgggccgttcctcctcgccggcctcaccaccggcgactgggacgcgaagaccggcggcgccgccaccgcggcgtcggactggatcacccccgtccctgcctcgtacaactcccagctggtcacgctcacgcaggagtccggcgggaagaccatgctcctctccaccgtgaacgacacctccctggcgatgctggagcggcccgagggcgccggcggcacggacgccgccgtgcgcgccacgttcagggtggtgccgccgggctcgagggccgagctgcggcagcgcgccggcgcccactctttcaaaaactgcttaggtgtaggtctggctgttgggattagaactatatg

SEQ ID NO: 27608 - DNA, 1959 bp, Oryza sativa
  Clone ID: PAT_MRT4530_32286C.1
atggcggagtacgcgacggcgaagacgtcggtgtggtgggacatcgagaactgccaggtcccccgcgcctgcgaccccaacctcatcgcccagaacatgagctccgccctcgccgccgccggctacaccggccccgtctccatctccgcctacggcgacatcggccgcatcggcaacgccgtcacccacgccctctccagcaccggcatctccctcaaccacgtccccgccggtattaaagatgcaagtgataagaagatcttagttgacatgctgttctgggctattgacaaccctccaccagcaaactatttgttaatttctggtgatcgggatttctctaatgcccttcataagcttacaatgagacggtacaatattctactagcacagcctccaaatgtgtctcaggcccttactgctgcagcgaaaagtgtttggctctggaaaagccttgtagctggagaaccacctctagcagagtcgccatatgttagtagcacagcaagtggcaatatggttgagttagataagtctaagaacattaattcagattcttcagacactactacagacacaaaccctcagaatggtctccagtctgatcatcaaaagggtggtaatggcaaggcagataagcaatctaaagtgaagcaacctcgaagaaaccagtcagacaatgtatctaaaccagcaagcaacgaagaaaattcagttgaagttgctgataattctaaagaatacactactgaccatccaactcagtcttctatgccatcgtcatcttcatcatcaagctctgaatcacaggatggggcaaaggtgaaccagtcaagtaaaccaaaagttcagcccttttccctgcctaaaaagcctgcaaaatctgctcattgccatcaaaagactgctccacatgacttcaatagtaagaagtctggtgcctcagcggaatctgctgcgaagaatggtactcctgactctggcaacggtggtggctataatccaaaacatcataaacctcatacctcccagtctccaagaccacaaaattcaattactcatcctcatagtggatctgagatttttcatcatacattgagttcacaaagaaccaactcatgctcaccatcagctgggcataatggcgctcctactgcaccactgcaatcctggccaagtgcccctccctatcacagcccaccagttaattatcctgatttgaatcggataaatatttctggataccccagaggaattcatgacaaccaaggtgtgaacatgaactaccaccctaaccattctggctctcctcataatgttcagcctgcttataatagttacagacctccaacaccacctagtatgcccagcaacatgcaaaatgctggacaatggggagtgaacccaggatatccacagccatcttctgaccctcaaggtcttataagaaatatattaggtgctttggaagtattgaagacagagaagattccaccaatagaacagcatatttcagattgtatacgttatggagaagctaacttaccaaattttgatgttaagaaggctcttgaacttgccattcagcatcaagccatcgtcttgaaaatgttaggtcctatgtcattctatttggggaagaaccaaaatctttggaaatgtgtgaatataatggatataaatgcaaaatatccaaaagatacgtttgatgctgttcataggttcatatcttccacctctggcagctctgctataaagaattctagatccaagtatcaagctgcaattgtcttaaagaatcaatgcttgaaacatcttgcccttggtgaagttcttcagattttgtatatcataatcaatacaaagaagtggtttgtgccgcattcttcagggtggcagccgttgtcgtttaacattatagtggttgatgccacgacaggtgctggtgggaaagcttag

SEQ ID NO: 27609 - DNA, 214 bp, Oryza sativa
  Clone ID: PAT_MRT4530_32287C.1
tacatacctaaattctgttcatggattaacgaaaatgtgcaagaactctatttgcctctgccattctatgaaacgctaactcattgcaaatggcacccccaccccctaagacagaatctactaaaacggaactaaattcgaaagccaaatttcaacccggacgctcaagcaatgctttaaataaccaaagaacggcaagtgctctaccttgatt

SEQ ID NO: 27610 - DNA, 718 bp, Oryza sativa
  Clone ID: PAT_MRT4530_32288C.1
cctcctcctcctcctcctcaccgccggcggcgagcggccggccggcgagcagagcagagcagaggagagagccgacctccatctgggctccaatcgaagctgaaggtatccgctttcccctcctccgcgcctcgtcgtagtttgggcaaaagaagttttgattttttttatttattttgggtgctgaggaagagtgtaattaagctgtgaggattgagaagatggatggaggtgggacgccggatggggatccggtgccggacatggacatgctcatgctgtcatcagcgctcgatggcctcgacagctacaccgacctcgtcgcgggttcatcggtagccgacagcatcttctcagctcttacctgtttcccaccatcacaagaacgattgctgcacgtctcgactcctgtgggttctaattctaggcaagatgattctgatgtttccatcactaaggagggtacaacaacaagaagaggtgattgcgccgccggattagcttcaggtgagccggtggccgcgggaattggctctgtcccgaagccgttcgacggcgtcacactgacggagaggatgctcagggcgcttgcgatgctcaagaggcgtcgggtggcgaagcgatccttgtgcaggtctggatgcctgtgaggaatggggagcagcatgtgctgactacctctgaccagccgttcttgcctcgatcagaagcttacggg

SEQ ID NO: 27611 - DNA, 714 bp, Oryza sativa
  unsure (1)..(714): unsure at all n locations
  Clone ID: PAT_MRT4530_32289C.1
tatggaccaaacggggaaagggtttatgaccangaatgcaatatacattaatanccaggtaacatgaagnttcaccacatttctanatttctgggattttggagcaccagaactttcggaaccaaagagggttagagtgagataaaatctgaatgcagcattataatgaattgagtatagtaagggtggcatggtggcactacattaattccaaaatggagatagtatgaaatgtttttgtgccagattttaagcaatacttcatagtagctaaagatggtagcaggccaccagcatgatacctttgaagtagatccctggttaacaatggtgtatgttgattccttcaccttttacacgatttggatggatcttcttcacatttaccactttaggattgcaaaagtgcagttccctggtggtcatttttttcgtataaattctttcatgtgtatctttgctcgttgtataagagctatactgtataacttgggtgttgactggcatggcatgtacagatgtagaatgccttaacccgaaagcattgggtgattctttctttcttcttcaaggctgagatgtaccatgtcacaccaatgtcaagtttcgagatctttgcattttgtacatcggaaggattcttgtatcatcagtttgataaaagatacatagagctaaagcagacgacgaaacattgcaaaaaaaaaaaaaaaa

SEQ ID NO: 27612 - DNA, 954 bp, Oryza sativa
  Clone ID: PAT_MRT4530_3228C.1
atggaagtgaagaaaccagtcggcagcagacgtagacagcttgcgttgaaggtgatgacgcctatttgcggtggcggcgatgtggccagccgtgaagacaatagcaccagttggcgtcatacgaggccgccggtcggtgaagatgtagacgcccaacaacggcggcataataaaccagccgtgcaggcggagacaccagtcggcggtgaggtggccaatgtgggaacaaagtcgtccatcaataacaatgaagacaccagtcggcggcgacgaaggcggtcgacggtgaaagagaagatgcccaccaacgtcggcataataggccagccgtgtaggcagagacaccagtcggcagcggcaaaggcaagccgttgtggaccctcagatattcgacgtttcgccgaaacaaccgctgcttcgtggcctataatattcgacgtttcgccgaaacaaccgctgcttcgtggcctacgtggtggaccctcagatattcgacgtttcgccgaaacaaccgctgcttcgtggaatatgatattcgacgtttcgccgaaacaaccgcggcttcgtggcctatgttgtggaccctcagatattcgacatttcgtcgaaacaaccgctgcttcgatgcctatgttgtggaccctcagatattcgacgtttcgccgaaacaaccgctgcttcgtggcctatgttgtggaccctcagatattcgacgtttcgccgaaacaaccgctgcttcgtggcctatgttgtggactctcagatattcgacgtttcgccgaatcaaccactgcttcgtggcctatgttgtggaccctcagatattcgacgttttgccggaacaaccgctgcttcgtggcctctgaattctccatctgcattccacggtgtcgcgcccgccagcctaccttaatggtgcggtttgtcaacgcgcttgacaccgacatcgtctaa

SEQ ID NO: 27613 - DNA, 465 bp, Oryza sativa
  Clone ID: PAT_MRT4530_32290C.1
atgcaggggacggggcggggccccccggctccacggcggcggagagaggggaggcggtgcccggtgcgcgggctggcgagcggcgagcgcctcgacgacctggacctgggcgcgggattcggggaggcggaggatcccggggaggagaggaagctgaggcccgccgccgtgggggtggacggcgacgacgacgacggggaggaggggccggcgcgcgcgcgggcacgggcggatggcggcggcggcgcgacgggggagaggaaggagtgcgccttgggcttggtgctggcccgcctaggcctggaggcggcggcggtcgtcgccctgggtctcgccatggatggggggttgggcttcttctccgcctcgctactcgctagtcgctacggctcgggagatttgaaattggaatttggaaatgctgccgtttgggccagccggcgtgcaaggacgcggtaccagtag

SEQ ID NO: 27614 - DNA, 396 bp, Oryza sativa
  Clone ID: PAT_MRT4530_32291C.1
atggaagcagaacaggcggggggcgcagacgcgaacaccaaagaaccaaaaaccgcattgcccgatcaaaaaccaagaaccccccgcaatccccaccccaagaaacccacctcgattccctcacaatatccagctcccgcggaggaattaatccggaggtgcctctccttcccaccctctcttgctcctctcctctccgccgacgcctaccggtggccgtttatcctgcttgcaaccgcaatcctcggagagagagagagcgtgccccgcgagtgtacttataggtcggcgcggcctatgaatctggacgcgacactgcgccaggttcatcctgcctcgccggctgctgctcgccgcgccgcttgggtggaagaggaaggaaggcgaaggctttga

SEQ ID NO: 27615 - DNA, 172 bp, Oryza sativa
  unsure (1)..(172): unsure at all n locations
  Clone ID: PAT_MRT4530_32292C.1
tctttcttggccgnctctcttatgtccctccatttaaccatcgagggcggccacnaaaaagagagaaagggagagccgaataacacattacaccatggggcgattcgtcatcatctccctagtcgtttgcgccgccttttccgatggggggggagagaaaaaattttttttt

SEQ ID NO: 27616 - DNA, 831 bp, Oryza sativa
  Clone ID: PAT_MRT4530_32293C.1
atgggcggtgtcacctcgtcgtcggcggggggaggcggaggaggggagaccgcgctgggggacctgccggagagctgcgtggcggaggtgctgcgcaggctggacccgccggagatctgccggatggcgcggctcagccgcacgttccgcggcgccgcgtccggcgacggcgtctgggaggccaagctgccgcgcaactacgcgcgcctcctcgccgtcgccgccgacggggaagccgccgcgctggaggcgatccccaagaaggaggtctacgcgcgcctctgccgccggaaccgattggacggcggcaccaaggagttttggctggacaagggtggtggaggtgtctgcatgacaatctcttcaagggcactttcaataactggcattgatgataggagatattggaatttcattccaaatgatgagtcaaggtttcatgcggttgcttatctctcacaaatttggtggtttgaggtcagaggggaggttgaattctgcttcccagaaggcaggccactcaagcgactaggacgacgggtttatagctccgagcacatccatggctgggatataaaaccagtgcgcttccagctatcaacttctgatggacagcaagctcagtccaagtgctacttaactgatcctggtgtctggatcaatcaccacgtcggcgatttcgtcgtgaagagctctaatgaactagtgaagatccaatttgcaatggttcaaatagattgcacacacacaaaaggtggactctgtgtcgattccgtggctgtaaaaccacaatacctcgcgaagaagaaagcatctcggatatatgtgtag

SEQ ID NO: 27617 - DNA, 565 bp, Oryza sativa
  Clone ID: PAT_MRT4530_32294C.1
ctaggcaaaggcaaccatcattccatcaccctcaacaatattgtctacaccatctaggatcttgtttaacactagtactgtagaatcagcaatggcagcatacaccaccaagatatttgccctgtttgccttaattgctctttctgcaagtgccactactgcaatcaccactatgcagtatttcccagcaacattagccatgggcaccacggatccgtataggcagtacatgatgcaaacgttgggcatgggtagctccacagccatgttcatatcacagccaatggctccccagatgatgcagagcatgcaacaagttatttgtgctggactcgggcagcagcagatgatgatgaacatggcgatgcagatgccatacatgtgcaacatggcccctgtcaacttccaactctcttcttgtggttgttgttgatcaaacgttggttacacgtactctagtaataaggtgttgcatactatcgtgtgcaaacactagaaataagaaccattgaataaagtatcaatcaatttcagacttgcgaaaaaaaaaaaaaaaaaagcggcc

SEQ ID NO: 27618 - DNA, 725 bp, Oryza sativa
  unsure (1)..(725): unsure at all n locations
  Clone ID: PAT_MRT4530_32295C.1
cttcnaggggccggccgggcaaaaaaaaaaaaaaaaaaaaaagaaaaaaaaaaaaaaaaaaaaaaaaaaaaaaaaaaaaaaaaatcctcaacaatattgcctacaccatctggaatcttgtttaacactagtattgtagaatcagcaatggcagcatacaccagcaagatctttgccctgtttgccttaattgctctttctgcaagtgccactactgcaatcaccactatgcagtatttcccaccaacattagccatggccaccatggatccgtgtaggcagtacatgatgcaaacgttgggcatgggtagctccacagccatgttcatgtcgcacccaatggcgctcctgcagcagcaatgttgcatgcagctacaaggcatgatgcctcagtgccactgtggcaccagttgccagatgatgcaaagcatgcaacaagttatttgggctggactcgggcagcagcagatgatgaaaatggcgatgcaaatgccatacatgtgcaacattggcccctgtaaacttccaactttcttcctggggttgttgatgacaaaacgttggttaacatgtactcttaaataaaggtgttgtaatactaattttgtgccaaaccctaaaaataaaaaccctttaaaaaaaatatcaattatttttccaaaccttccacaaaaaaaaaaaaaaaaagccgccccccctctcttctttaattttttttttctttt

SEQ ID NO: 27619 - DNA, 1516 bp, Oryza sativa
  Clone ID: PAT_MRT4530_32296C.1
cacacttcgtccgcaaaagcgtccacgaacacgttaaaaaaaggtcgaagagaagtgggagacccaaaccgcgaacaatgtgtggaggcgccatcctcgccgagttcatcccggcgccgtcgcgcgccgcggcggcgaccaagcgggtgaccgccagccacctgtggccggccggctccaagaacgccgcccgcggcaagagcaagagcaagaggcagcagaggagcttcgccgacgtcgacgacttcgaggccgccttcgagcagttcgacgatgactccgacttcgacgacgcggaggaagaagacgaaggacacttcgtgttcgcgtccaaatctcgtgtcgtcgccgggcacgacgggcgcgcggcggcgagggcggcgagcaagaagaagcgggggcggcacttccgaggcatccggcagcggccatgggggaagtgggcggcggagatccgcgacccgcacaagggcacgcgcgtctggctcggcacgttcaacaccccggaggaggccgcacgcgcctacgacgtcgaggcgcgccgcctccgcggcagcaaggccaaggtcaacttccccgccacgcccgccgccgcgcgcccacgccgcggcaacacgagagccaccgccgtgccaccgccggcgacagcacccgccgccgccccgccgcgcggactgaagcgagaattctcgccgcctgctgagaccgcgctacctttcttcaccaacggcttcgtcgacctgacgaccgccgcggcgccgccaccggccatgatgatgacgagctccttcaccgacagcgtcgccacgtcggagtccggcgggagccccgccaagaaggcgaggtccgacgacgtcgactcgtccgagggcagcgtcggcggcggcagcgacacgctgggtttcaccgacgagctggagttcgacccgttcatgctgttccagctcccctactccgacggctacgagtccatcgacagcctcttcgccgccggcgacgccaacagcgcgaacaccgacatgaacgccggcgtcaacctgtggagcttcgacgacttcccaatcgacggcgcccttttctgactatcactagaccacggagccggatagggagcacatgaagaagacggtggggatgtttagatccacggccatgttcatatcacagacgatggctcccctgaagcaccaatgttgcatgcagctgcgagggatgatgcctcagtgcaactgtgacaccagttaccagatgatgcagagcatgcaacaagttatttgtgctggactcgggcagcagcagatgatgatgaacatggcgatgcagatgccatacatgtgcaacatggcccctgtcaacttccaactctcttcttgtggttgttgttgatcaaacgttggttacatgtactctagtaataaggtgttgcatactatcgtgtgcaaacactagaaataagaaccattgaataaaatatcaatcaatttcagacttgcaactattgggtatttggatttcc

SEQ ID NO: 27620 - DNA, 2183 bp, Oryza sativa
  Clone ID: PAT_MRT4530_32297C.1
tcaggcggttggcgggaagtagaaggggtgatccgccgggaacggcggctgccggcgggtggcggcggcgacgccggcgccggcgccggcagagaatcctgatgatgctgcagcgtggagcaatggcaagtgagaaggggcctgcatttgccaagcctgtgttgggaacggcatggggccctgctcagcccggcgggccgttggcctctcctgtaggttcgggaggaagccaagacaatgagatgggtacaaacgttgatgctgagggggcagtggtgtgctttggtgatgcacagtccattggggagacgagcccattggctggtggactgtaatatttgaagattcaggggaatcacaagttaactggaggccagttgtggcgacatcgcttttggagtcacgcgcattaggttgcgaaatccgcaaatccaaatcaagatcgccatcaacaattgcctcatttccggcgtctggtaaagcatccacattgtaggatgcaggtcggctccggcggcggcgtcgataggagcctttggaacattttttgggcgttttatgtgtggatgcaaatacagtcatgaatcccaattaactaatcactacaagaaacacccggccgcccgccggcgcagacgaaaacgttgaaacgccgggacggccagaaaaaaattgccggttcccgcaaatttcagtgggtgatggcttcttctttttatcaaggtggtggtgatggcggcttgacgacgaagacgacggcgccgtcgggtcgaaccggagggtggcagtgtgttgggcagcagctgctgtcgtggcggctttggagaatcctgatgatgctgcagcggaggacgacgacggcgacgacgacgaggaggagaagaagggcaatggcagcgtgtgaggaggagcagggtgatgatggctcacctgcttccatgcccagcttggaacagctaccccctctgatggcttcctcttctgatccgatgatctggatgcatcctcattatttgggaataggggatgaggttgggcagtccagattggcggatgctcggtcagaagagggaaccgatgaggacggctagcaagttcagagggagctgcatcattctttgctctcttgaattcagaaccttcaaatgatccatggtggatttgcaggccaagggagccgctatccctcttggggctctgctgtgaggctgcaggctgagatatgctcaggttcagatccacatcggctccttgagcagcagcatcagtaggcagctcaccatcatatgtgctgggctcgaagttggtgacggcttctctgccattgcatttgatcgcagccttatcataagctcttgcagcttcaacttcggtgtcaaatagcccaaggtatatgtacttcttgccaaggagttggcccatgcgtgcctcccagcggccgcacttgtggagggtgacacccctgtactttgagctgccgcgggagaagccggtgctctgtcgccggagaacgtgcacgaactcctccttggacaagctcttcatctgcctcatgtcctcctcgtagtcgctcaggttgaagttgatgtcagcctctactcccctgaacttgatcgccgccctgtcgtacgcccttgcagctgcgtgagcagtgtcgaatccacctaggtagacttgcttgccgcaatcccagatgtgggattcccagcggccggtgcggcggtagaaggtgacgccgcggtattgcgagctgcgagagcgcggcccgcggcggcttttcttggccgcctgaggctgcggctgcggcggcggcggcggtggcgccgggggaggcgcgtgggcgaggattcgtgtctggtgtggcacggccgctgcgcgagggcggcatcctccgccgcgcggcgcggcggctgccacgccggcgccggcgacggcgccgcgggaggcggaggcgggaggagctgacgcgtcacgatccccgaggcggccggcaactgatgctgctccccggagcactcgtcgtcgtcggggctgctcgcgaggaggtcgaaccggaataatcctccgccaccgccaccgccaccgccgcctccggcgtccccggagtttagcaccgaggagcggcttcgagcggtggcgaggcaggagcagcagcaaccacagcaccaggtggtggtcgccat

SEQ ID NO: 27621 - DNA, 584 bp, Oryza sativa
  Clone ID: PAT_MRT4530_32298C.1
gcccgggatcatcctctcaccacaattcaaatattatagttgaagcatagaagaagaatccaacaacaatgaagatcattttcgcatttgctctccttgctattgttgcatgcaatgcctctgcgcggattgatactattagaaacaccaatatgcaatatctactacaaacataactcctactacccaagcaaccgctcaggccatgcatgaagcaaacaatggaacatggataagatacacagcacatgctcatgtggcaaccaatgacgctcctgcagaaacaatgttgcatgcagctacaaagcatgatgcctcagtgccactgtggaaccagttgccagatgatgcagagcatgcaacaagttatttgtgctggactcgggcagcagcagatgatgaagatggcgatgcagatgccatacatgtgcaacatggcccctgtcaacttccaactctcttcctgtggctgcttgtgatcaaacgctggttacatggactctactaataaagggttgcatactatccggggcaaacactagaaataaaaacattgaaaaaaaaatcaatattttcacacttgc

SEQ ID NO: 27622 - DNA, 2052 bp, Oryza sativa
  Clone ID: PAT_MRT4530_32299C.1
ttacccatacccatgcccatttacccatcgggcatagcttttgaaccaataagatacccatgggtataaaatggagaacaaacccaaccctaatagggtttttacccgcgggtaaacgggcaaacgggcacaattgccatccctagtgtttgctctggaagcaacttggtagctggcaccaaactgcttccatgcccagcttggaacagctaccccctctgatggcttcctcttctgatccgatgatctggatgcatcctcattatttgggaataggggatgaggttgggcagtccagattggcggatgctcggtcagaagagggaaccgatgagggcggctagcaagttcagagggagcttcaaatgatccatggtggatttgcaggccaagggagccgctatccctcttggggctctgctgtgaggctgcaggctgagatattctcaggttcagatccacatcggctccttgagcagcagcatcagtaggcagctcaccatcatatgtgctgggctcgaagttggtgacggcttctctgccattgcatttgatcgcagccttatcataagccttcttgccaaggaattggcccatgcgagcctcccagcggccgcacttgtggagggtgacacccctgtactttgagctgccgcgggagaagccggtgctctgtcgccggagaacgtgcacgaactcctccttggacaagctcttcatctgcctcatgtcctcctcgtagtcgctcaggttgaagttgatgtcagcctctactcccctgaacttgatcgccgccctgtcgtacgcccttgcagctgcgtgagcagtgtcgaatccacctgtgattgtttgggagaagatgaaggtgtttgttagattgttcatggcgatgtcgcgttggattgagaggaggaagatgatgtgttcgatgaaattacctaggtagacttgcttgccgcaatcccagatgtgggattcccagcggccggtgcggcggtagaaggtgacgccgcggtattgcgagctgcgagagcgcggcccgcggcggcttttcttggccgcctgaggctgcggctgcggcggcggcggcggtggcgccgggggaggcgcgtgggcgaggattctgatgtctgggtgtgggcgcggtgggtcggggcggaggaagccgagctccgcccaatgctgcggcgagggagcggcggaagggaatagctcccgggtgacgagcagctgctggtgttggtggtgcggcggcggcgagggggtggcctcctcctcctcgtcgtcgtcggcgtcgttctcgcccgacgccgacgccgagctcctcaggatgctgaactcgagcaccgccgcgggaggcggcggcggcgacggcggcgtcgagctcgacccctcttccgccggcgcgatggccgcgccagacgcctccccgttgagcaccgacgactccgacgtgccggagtcgctcctcgccgccgtctcatgcttctccaccaccccttccgccacgttgttcagatccaactccattcacagaagcagggcaagccaatcgagtcgtaacaccctttccgatcgattcgaacccctttgcctggccactcaaccaaacccaaaaccaaaacaaaaaaccaaaaatctccgccgagttcacaagctagagcaaaccgcaaccaatctcaacgacggattgagcagctggctcccgctcgggctggaaattggcgcggcgtggagtctatttcaagaagaagaaccagaggaggaagaggtagaagcaggagagggccgactcgttctggcggtacatttagccgggcacctcagccacagtccttagagaacatccctaccctacccactcccccccgtcgccggagacgaatccacgacgatgcttaccaccgtacgtacgtcgccgcgctcacgaatcaacgaaaaatgaagggaacagaacaacaattcaccaccacaccacaccacggggaagaagaagaagaagaagcagaggtgggtgaggtgaggtggtggtggtggtctccggcgccggcg

SEQ ID NO: 27623 - DNA, 2527 bp, Oryza sativa
  Clone ID: PAT_MRT4530_3229C.1
ctgaggaattcggacgagtctctctctcctcactaaagcacagctcctgcccctttcctcccggcctcctgcccgcccttctgcccgagcggccgcccgggcaggtcacaaacccaacaagagagtgagagaggagcaaaagctttggctggccgtcccccctgttaaaatgtgatgtccaatccatgggattgcgtctagtttagtcccccactcctctcctggttatgggatccggcgaggtggatggacgcgcattggagcagcaacagtagcggcggggaagaaggcggcgggggatctggatccgaggcaccaccaccaccgggtcacccacggcggcgacggcggcggcgtaggaggaggaggaagcgggggacaggaggaggcagatgagcagcagcagcagcagcacgaccaccaccggcttctccagctccaccaccaccagggtgtgcagcaggaccaagaaccgccgcctgttcccgtcttccacctccagccggcgtccgtgaggcagctgtcgggctcctccgccgagtatgcccttctctcgcccatgggcgacgccggcggccactcccaccaccaccaacacggcttccagcctcagctcctctccttcggtggcgtcggccaccaccaccacctgcatcagttcacggcgcagccacagccccccgccgcgtcccacactcggggtcgtggaggtggaggtgagattgtccccgcgacgacaactccacggtcgaggggcggaggcggcggcggcggcggggagatcgtggcggtgcagggcgggcacattgtgcggtcgacagggcggaaggaccggcacagcaaggtctgcacggcgcgcgggccgcgcgaccgccgcgtgcggctgtcggcgcacaccgccatccagttctacgacgtgcaggaccggctgggctacgaccgcccgagcaaggcggtggactggctcatcaagaacgccaaggacgccatcgacaagctcgacgtgctgccggcgtggcagcccactgccggcggcgcaggcgcgggcaatgccgccgcgccgccgtcctcctcgacccaccccgactccgccgagaactccgacgaccaggcgcaggccatcaccgtcgcgcacaccgccttcgacttcgccggcgggggcagcggcgggaccagcttcctcccgccgtcgctcgactcggacgccatagccgacacgatcaagtccttcttccccatgggtggcaccgcaggcggggaggcatcgtcgtccaccacggcggcgcagtcgtcggccatgggtttccagagctacacgcctgacctcctgtcccgcaccggcagccagagccaggagctccggctgtcgctgcagtccttaccagaccccatgttccaccaccagcaacatcgccatggcggcggcggcggcggcggcaatggcaccacgcagcaggcgctcttctccggcgccgccaattactcgttcggcggcggagccatgtgggccaccgagcagcaggcgcagaaccagcgcatgctgccgtggaacgtgcccgaccccggcggcggcggcggcgccgcctacctgttcaacgtgtcgcagcaagcggcgcatatgcaggcggcggctgcggcgctgggtggccaccagagccagttcttcttccagaggggaccccttcagtccagtaaccagccctccgagcgaggatggccggagaccgtcgaagccgacaaccagatgagccaccaccaaggagggctgagcccctccgtgtcggcggccatcggttttgccgctcccggcatcggcttctccggcttccgcctccccgcgaggatacagggcgacgaggagcacaacggcggcggcggcggcaatggcgacaagccgccgccgccgtcgtctgtctcctcggcttctcaccactgaccgcagcagtggcgagcagatgacttcaccaccaccaatccaccatgagcaaacaccacaccatgtaccagactatcagctagctcctccacttccatcacggaattgtcgattgcattcgggaggagcaaagtttggaggtagcacaagtgcactactactgatgctactacatatcggttggttggttggttggttttccatcgatctcttctgctgctgcgcatgtcattggtttttgtttcaagaattcactcggagcttcttagaattaggcttgtgagaatgcagcaacacgatggcaagctttagcttagcttagcaagcctctgtgtctgttggctgttgcgttgcgctaggtgtagttgatcgatgtaggttcgagcttgctttgctttgttttgatttttactcttttgttgctgatgcatggacatgcttttgcttcctcctgtgggttcaggagcagttgctactagaccgatgttgttctcaaaactgataagtgggatggtgatggattgggagaggagcctatctttcatcttttccaaaaaaaaaaaaaaaaaaaaaaaaaaaaaaaaaaaaaaa

SEQ ID NO: 27624 - DNA, 794 bp, Oryza sativa
  unsure (1)..(794): unsure at all n locations
  Clone ID: PAT_MRT4530_322C.1
tggtccggattcccgggtcgacccacgcgtccgcccgcctaggaggttaaggctgcggaggaggccccgaaggtggaggagcagaagcgccagccgtcaccgccactgcagcagccggccgcggaggagaaggcctcgtccgacgctgcagcgaacggcgcgagccacggtgaagatgagggaactacaaaagaaacatatgaagaggataaaggtgaacgattggaatttgaagatgaaccagaatatgaagaggaggctgctgtggactacgatgagaaggacttggagcaatatgaagagcaatacgaggatggtgatgaagtggtggaatatactgaagatgtgattgaagaggagacggatatggtagacgaggaattggatggtggggacgatggggagggtgaaggatatgaaaatgccgaagaagagcataatgtggatgtggaggatgaagagcatcatgaaatggtgaaagagcatcgcaagcggaaggagtttgaagtttttgttggtgggcttgataaagatgcaacagaaagcgatcttaggaaggtttttggtgaagttggcgagatcactgaagttcgtttgatgatgaaccctgttacaaagaaaaataaaggctttgcctttctgcgatatgcgactgtagaacaagcaaggcggggcggtgtcagagctaaagaatccttcggtgagaggcaaacaatggtggtgttgctcctagtcatgacaacgatactctttntgtgggcaatatctgcaagacatggactaaagaacatctg

SEQ ID NO: 27625 - DNA, 426 bp, Oryza sativa
  Clone ID: PAT_MRT4530_32300C.1
cccccacatgtagccatgggccccactggatccgtgtagccagtacatgatgcaaacgttggcatgggtagctccacaccatgttcatgtcgcaccaatggcgctcctgcagcagcaatgttggcaggcagttacaaggcatgatgcctcagtgccacctgtggccccagttgccagatgatccagagcatgcaacaagttatttgtgctggactcgggcagcaccagatgatgaagatggcgatcagatgcccatacatgtgcaacatggccccggtgcaactgtccaactctcttcctgtgggttgttgttgatccaacgttggttacatgtactctagtaataaggtgttgcatactatcgtgtcaacacctagaaataagaacccttgaataaaatatcatcatttgtcagactgcaaaaaa

SEQ ID NO: 27626 - DNA, 678 bp, Oryza sativa
  unsure (1)..(678): unsure at all n locations
  Clone ID: PAT_MRT4530_32301C.1
agtaatctcagtaactgatataacaaattctctacaacaaggtgtgtggatcaatacatctcaggttagtatgatctgttctctgagatcagggggcaaagagactaggagcatttggaacattttttgggcgttttatgtgtggatgcaaatacagtcatgaatcccaattaactaatcactacaagaaaccacccggccggcccgccggcgcaaagacgaaaacgttgaaacgccggcgacggccaagaaaaaaaaaatttgccggcttcccggcaaaatttacagtggtggtgatggcttctttcctttttatcaatggtggtggtgatggcggcttgacgacgaagacgacggcgccgtcgggtcgaaccggagggtggcagtgtgttgggcagcagctgctgtcgtggcggctttggagaatcctgatgatgctgcagcggaggacgacgacggcgacgacgaggattctgatgtctgggtgtgggcncggtgggtcggggcggagnaagccgagctccgcccaatgctgcggcgagggagcggcggaagggaatagctcccgggtgacgagcagctgctggtgttggtggtgcggcgncggcgagggggtggcctcctcctcctcgtcgtcgtcggcgtcgttctcgccgnacgcgtggncgnacgcgtggn

SEQ ID NO: 27627 - DNA, 524 bp, Oryza sativa
  Clone ID: PAT_MRT4530_32302C.1
taatcccgccaccatacaccaccaatatcttcccccctgttcccccttaatttgctcttttcccaagcccactctccaatcaccactatccagtatttcccaccaacattacccatggccaccatggatccgtgtagccagtacatgatccaaacgttggcatgggtagctccacacccatgttcatgtccaccaatggcgctcctgcagcacaatgttgcatgcagctacaaggcatgatgcctcagtgccactgtggcaccagttgccagatgatgcagagcatgcaacaagttatttgtgctggactcggcacacagatgatgaagatgcgatccagatcccatacatgtgcaacatggcccctgtcaacttccaactctcttcctgtggttgttgttgatcaacgttggttacatgtactctagtaaataaaggtgttgcatactatcgtgtccaacactagaaataagaaccttgccatccaatatcaatcattttcagactgccaaaaaaaaaaaaaa

SEQ ID NO: 27628 - DNA, 476 bp, Oryza sativa
  Clone ID: PAT_MRT4530_32303C.1
atcatcccctatgcagtatttcccagcgacacttagccactgggcaccccggatccgtataggcagtacatgatgcaaacgttgggccatgggtagctccacagccatgttcatatcccagcccatggctcccctgcagcagcaatgttgcatgcagctgcaaggcatgatgcctcagtgcaactgtgacacccagttaccagatgatgcagagcatgcaacaagttatttgtgctggactcgggcagcagccagatgatgatgaaccactggcgatgcagatgcccataccatgtgcaacactggcccctgtcaacttcccactctcttcttgtggttgttgttgactccaaccgttggttacatgtactctagtaataaggtgttgcatactatcgtgtgccaaccctagaaataagaacccttgaataaagtatcaatccatttcagacttgcaaaaaaaaaaaaaaaaaaaa

SEQ ID NO: 27629 - DNA, 1725 bp, Oryza sativa
  Clone ID: PAT_MRT4530_32304C.1
ccatcgagcgatccaaccgaatgcatgggccagcgcgcagcacaagaaggcactcattttagctgagctaaagcttctgtgatcactaagagctcagggaactcaggatcaagttgggtacgtttgtcgtgtgctgctctctctgctacctggtcgtcgagatggccggagtggtgatcaccggccgggccttggtgcccgccgacgctgtcgcggtccgcctgttcggctcggcctaccgcgggagccgccgcggctggcccgcaatcttccctcgcgaccgggcgccaaccagcccaccagcgtgcggtccgggatggtgtcccacttgcccaggcaaccccgcggatgtgggccgccgtcgtcgccctggcgttccttaagatggggcgcctctggctgtgccggctcgagcgaggtcggcggcgcctcgacgttcatcggcgagaagctggccggcccggccgccaactttggcccatgtgttcgatgttgatcgatggccacctagccgcgttgtaaaggccgccatccaagcaacggtctgcgtcgccgaaatcgttgctcttttctctcaagacgctctcggcctgtacgtcgggagaacgtggagccgtggacaggcgcagaaggaccagcggacggcgagcgagcgagcggagaacgctcaccggccggggcccgggtcgagcctcgccacgctcatcagcatgttcggcaaccagggcctctcggcgcgcgacatgacggcgctgtcgggcgcccacaccatcggccgcgcccagtgccagttcttccgcagccgcatctacaccgagcgcaacatcaacgcctccttcgcgtcgctccggcagcagacgtgcccgcgctccggcggcgacgccaacctcgcgccgttcgacgtgcagacgcccgacgccttcgacaacgcctactaccagaacctcgtgtcgcagcgcggcctgctccactccgaccaggagctcttcaatggcggctcgcaggacggcctcgtcaggcagtacagcaccaacccctcccagttctcctccgacttcgtctccgccatggtcaagatgggcaacctgctgccgtcctccggcaccgccacggaggtcaggctcaactgcaggaaggtgaactaattaaggatgataaaccccaattcccatcgcattgcatttgcaggtgatcatttccgatgatcaccgtcttcgccgacgccctgggaaccaatgcgccggtgagatatcaaaacacaagaagagacgaaacgtgaaatacttgtttgataatgtattaacacaaagtgtaataatgtgcgacgcttatatatgatgatatataccatggtaaattatcgcaaaaaagaaaaagaattttttttatgatgcatgataatacaatccttgctgttaaaagaaaaaaaaacacaaaaaacaagatcgacgatgcgctcgggactgcctcgcgcctgggcccgtggaccagtggaacactgcagatgtgccagcccaggatggcaatgtttgattggctgactgccagattatcgctgtcttttccaacgagctaagcagtttgtcagttgtcacatgagttaactctgaattttcaatcattttcaagtcttgaaccatgctttagatatactattaattaacagcaatttgttggctttctcaaaaaaaaaaaaaaaaaactcgagactagttctctctctcc

SEQ ID NO: 27630 - DNA, 440 bp, Oryza sativa
  Clone ID: PAT_MRT4530_32305C.1
ccactgggcacccactggatccgtgtagccagtacactgatgccaacgttgggacactgggtagctccacagcccatgttcatgtcgcagcccatggcgctcctgcagcagcaatgttgcatgcagctaccaaggcatgatgcctcagtgcccctgtggcaccagttgccagatgatgcagagcatgcaacaagttatttgtgctggactcgggcagcagcagatgatgaagatggcgatgcagatgccataccactgtgcaacactggcccctgtcaacttccacactctcttcctgtggttgttgttgatccaaccgttggttacatgtactctagtaataaggtgttgcatactatcgtgtcccaaccctagaaataagaacccttgaataaaatatccatccttttcagacttcccaaaaaaaaaaaaaaaaaaaa

SEQ ID NO: 27631 - DNA, 281 bp, Oryza sativa
  Clone ID: PAT_MRT4530_32306C.1
atggagacttgggagagctctccctcacagccgctcggcctcgtcagcttcctctaccatttccgccattcaacttcctcaagggagacgacgactaataggcttgcaccggtgggtcgggttccctgctatcccttctccttcccttttcgccgccgccaccacctcttgcgacctccactagaacaaaagcttcgtcgcccgtgccatcgaggtgttctccctatgctcctcgctcctcactgtgacactaagatggggaaggaagaagataagggagg

SEQ ID NO: 27632 - DNA, 138 bp, Oryza sativa
  unsure (1)..(138): unsure at all n locations
  Clone ID: PAT_MRT4530_32307C.1
ctctacgttcacattaagaggaccacaactaccgaaactctcaaaataagggtttgggaagaacaatcttcggttaacggttaacctttatagcaagtcgatgagtcgttagttcaaaannggttaaagatccacagt

SEQ ID NO: 27633 - DNA, 420 bp, Oryza sativa
  Clone ID: PAT_MRT4530_32308C.1
tgagatcagaattcagaaagaaagcaaacggaatccagatctcacccaccccaccccacccacacgacgagagaccaaaacacgcgggaaaacgctcccgcgccgcgccaaacctggcctcgcgtgaaccggcggcgggcccaccgccggcgtgcgcacacgtgccaccgccaccggcgtccagccggaccgacgacgacgagggcgacgacgacgtcacggtgttggtacagtgccagccgacgctgaccggccgggcccacccaccacctgcccccaccaccgtgctgcttgcctgcctctttcttgtctcgctttcttgagctcgtctcctcgtgctctctctctctccttgctgcgacctttgccctcgatccgacgacgacgacggccgccattgccgattgcttccggcgcgct

SEQ ID NO: 27634 - DNA, 954 bp, Oryza sativa
  Clone ID: PAT_MRT4530_32309C.1
atggcggggccagcaagatgggctctcctcctcctcctcgccgtcgccctcctggtgcccgctgcgctcgccgccggcggcggcggcaatggtggcgcgtcggcatcaactccaaccaatggtaacggtgggaacaacggtaacaatggcgactgcgccacctgcggcaccgttggcgactgcaacctgccgggcgcggtgtgccaggacccgcggttcatcggcggcgacggcaacacgttctacttccacggccgccgtgaccgcgacttctgcctgctctccgacgcgaacctgcacatcaacggccacttcgtcggcaaccacgtcccgggcctcaagagggacccgacctgggtgcaggcgatcgccgtgcagttctccggcggccaccgcctctacgtcggcgcgcgcaggacggccgtgtgggacgacgactccgaccgcctcgccgtcgtcttcgacggcgagaccgtgcagctgcagcgcgtcgcgcacgccaggtgggagtcgggttccggcctgtccgtgacgcggaccaaggcggccaacggcgtcctcgtcgagctcgacggcgtgttcaagatcaccgcgaacgtggtgcccatcaccaaggaggactcgaggatccacaggtacggggtcaccgacgatgactgcctcgcccacctcgacctggcgttcaagttctacgccctcaccgacgacgtccatggcgtgctgggccagacgtacaggagcagctacgtgaaccggctcgacgtgtccgcgaagatgcccgtcatgggaggcgagaagcagttcacctcgtcgggtcttttcgccgctgactgcgccgtcgctcggttcgggcgcgccggcgatgccggcgccgttgccgttgcctccgaggagctggtcgacgtcaagtgctccaccggcctcgacggcgtcggggtggtgtgcaagaagtag

SEQ ID NO: 27635 - DNA, 1602 bp, Oryza sativa
  Clone ID: PAT_MRT4530_3230C.1
atgccttggaaaccgacaaatagtgttttcccctgcacgggtggcctattatgccgccgttgttgggcgtttaagttttcaccgaccggcttgccttcgccgccgccgactggtgtttccgcctgcacggctggcctttatgccgccgttgttgggcatctacgtcttcaccgaccggcttgccttcgccgccgccgactggtgtttccgcctgcacggctggcctattatgccgccgttgttgggcgtctacgtcttcaccgaccggcttgccttcgccaccgccgactggtgtttccgcctgcacggctgacttattatgccgccattgttgggcgtctacatcttcaccgaccggccgcctcgaccgccgccgactggtatttccgcctgtacggctggcctattatgccaccgttgttgggcgtctacgtcttcaccgaccggccgcctcgtccgccgccgactggtgtttcctcctgcacggctggcctttatgccgccgttgttgggcgtctacgtcttcaccgaccggcttgccttcgccgccgccgactggtgtttccgcctgcacggctggcctttatgccgccgttgttgggcgtctacgtcttcaccgaccggcttgccttcgccgccgccgactggtgtcctcgcctgcacggctggcctattatgaccgccgttgttgggcatctacgtcttcaccgactggcttgccttcgccgccgccgactggtgtttccgcctgcacggctggcctattatgccaccgttgttgggcgtctacgtcttcaccgaccggcttgccttcgccgccgccgactggtgtttccgcctgcacggctggcctttatgccgccgttgttgggcatctacgtcttcaccgaccggcttgccttcgccgccgccgactggtgtttccgcctgcacggctggcctttatgccgccgttgttgggcgtctacgtcttcaccgaccggcttgccttcgccgccgccgactggtgtttccgcctgcacggctggcctttatgccgccattgttgggcatctacgtcttcaccgaccggcttgcctcgaccgccgccgaatggtatttccgcctgtacggctggcctattatgccaccgttgttgggcgtatacgtattcaccgaccggccgcatcgtccgccgccgaatggtgtttcctcctgcacggatggcctttatgccgccgttgttgggcgtttacgtcttcaccgaccggccgcctttaccgccgccgactgggatttccgcctgtacggctggcctattatgccaccgttgtggggcgtttactttttcaccgaccggccgccttttccgccgccgactggggtttcctcctgcacggctggcctttattccgccggtgttgggcgtgtaccttttcaccgaccggcttgcctttccccccgccaactggtggttccccctgcacggctggcctttatgccgcccctgttgggcgtgtacgtctttatccaccgggttgcctttccccccaccaattgggggtctctctgcacaactggcgcttatttacccccggtggggggaatttacttttatcctaa

SEQ ID NO: 27636 - DNA, 1116 bp, Oryza sativa
  Clone ID: PAT_MRT4530_32310C.1
ttcgagcgcccgcccgggcagaccggccgggccgcccctcttctagacgacatatttgcatttgaccccccgtcctcttcgatcgccaagggaagtaaccgaggaagggatcccgcgaagcagtagcatagcagcggaagaactcaagcggagtgggcgaagaagcaaagcccgatggatcaacaccaggtggtcggcgagaattatgcaaatccaaagacatgtttcttccatgtcctcttcaaggcaggggcattggcgttctacatactgtctgcgctgttcgtgaccaactttgttattatctttgtcatcaccgtgctcctggcagcacttgacttctgggtggtcaagaacgtcagtgggaggatattggttgggctgcgctggtggaatgagatcgatgatgagggcaatagcgtgtggaagtttgagtgccttgatggagagtctcttgctaggatgaacaagaaggactcatggctgttctggtggactctgtacttgactgctgctgcatggattgttcttgggatattctcactcatcagacttcatgctgattaccttcttgttgttggagtttgcttgagtctcagcatagcaaacattgttggcttcaccaagtgcaacaaagatgccaagaaaaaacgttgcagattggactagaactacgctcctatcatctggtgtcaggtcaacaattcagtcagcattcggtgtctaaatagaggcgccctaatgtcacatacagtggtgtgcaatttatgaatcagatgatgcattctgcttttgtttactttgcctagttgcttattgaccctatacatctttgtgtcccctgatatccttggtattgtttgattcactgtgacaaaagattgagggtcaagataggcacactactcaacctacaagttcttgatgttctttgtattttttagccttgtcactggtgacactgtatagcagctgaactggaaaacgttctacttgggatagattgtagtgtacagctaacatcttgaaacattatcttttttttttttggagtttgtcttgtcgaacttttaaccatgaggccaaagccatggatgttgatgttctgaaggagcc

SEQ ID NO: 27637 - DNA, 368 bp, Oryza sativa
  unsure (1)..(368): unsure at all n locations
  Clone ID: PAT_MRT4530_32311C.1
cccacgcgtccgctcacgcatgcgtacacgattgcggctattattacccagcctaaggaccggtcgtaggctgctgtcctcagaggatgtggttgttnntcaccttcctcccaccggcattaccactcatgtcacttcggctgagatgcaccaccaggctatctaggaggctcttacttgtgacaacgttacgttcaaccttaataaccttgacctgaacgatctgaaacctgggtacatggcctctatctccaatgattaccctgccaaagatgctgccaacttcacctcccaggtgatcattatgaaccaccctgtgcagatcggcgatggctactccccaatactttactgccacaccttacaca

SEQ ID NO: 27638 - DNA, 1122 bp, Oryza sativa
  Clone ID: PAT_MRT4530_32312C.1
ccgacgagctagctctctctctcgatcgatggccatggcggcggagagcatcgacgcggagctgcgcctcgggctgcccggcagcggcggcggtgacggcgtggcggcgaagaagcggcggtcggcgtcgtcgacggtgaagagcgaggcctccggcacggcctgctgcggcggcgccggcgcccgggacgtcgaagacggcgcctcgccggcgtccaaagtgcaggtggtggggtggccgccggtggggtcgtacaggaggagcacgttccagtcttcgtcgtcgtcgacggcggcggcggcgaaggggaagggcggcggcgagacggatcaagggaggaagaataagggaggagggctgtacgtgaaggtgagcatggacggggcgccatacctccgcaaggtcgacctccggatgtacggcggctacagggagctcagggacgctctcgacgcgctcttcggctgcttctccgccgacgcctccgcctccgccgcccacttcgccgtcgcctatgaggacaaggacggcgacctcatgctcgccggcgacgtgccctgggacatgttcatctcttcttgcaagaagctgcggataatgcgaggatctgaggcgagatgatatatatcgaaatcgaaaggcgtcgagctgaagaaaaaattttcgccgatgcatgcatggagtagacatctcacagaaaaaaggcttcatgcatgagagagatgagatctatccgtggacatcgtcatgcatggcgatcggacggctggccaagaaggacacttacacgtggatgcatcttgtttttgttctacgtagatgtgtagatgagatatccaaggatctgaattctaaaaaagttcaggattcagttggatcggagttggtgaggaggaggatatgatcgatcgagcagagctgcagtactcctatgtacagaataatctagctgagattttggttgttggaaatggcaactgctagttctgcagatttgtgtacacatgccttttttttaaagcttttttttttctagcttctgttgtgtcactgaagaaatctgagagctgaagaaagagaaacttggaagtttggtcattttaatttaaaaaaaaaaaaaa

SEQ ID NO: 27639 - DNA, 1961 bp, Oryza sativa
  Clone ID: PAT_MRT4530_32313C.1
gctcgctcatcccgtcccctcctcctcgctctcctcgccgcggccgtcaacaacttcgcgcccgccggcggagtggaagtcctcgccaagtcccgcctggagagctgcgcccgcggcggctcggacgacggccgcgaccgcctcacctgcgacagcaagatcgtcgtcgacctggccgtgcccagtggctcggtaatcgcgctcgactctccgcctctctctctctctctctctctctctctcctgttcgtttcgctaacgtttgcggtgtgggggatcaaagcggcggggaggcgtcgctggtggcgcgggtggcggaggtggaggagaacggcacggaggcgggggagatgcccatccgggatcccctcatcatcaccatcaacaaatccgaggtgtatgcgctctacgatctcacttacctcagggatgttgcttacaaacctgaagaaaaatttgtgaagacacgtaaatgtgagcctgaagctggtgcgaacgttgtcaaatcttgtgaaaggttacgggatgagaaaggtagcataattgagcatacagaacctgtttgctgcccttgtgggcctcaccgccgtgtcccttcatcttgtggaaacattctcacatcattcatatccatctattttacagttgataaagtggcgaaaggaaaagctaacacagctcactgtctacgttttccagatgattggacagttgtttctgaagacagctccctgagagtaaatttagttggcgactttgctggttatacaagtcttccatctttggagaacttctaccttgtgactccacgaaagagagtcctgtttacattagatggtcttgaatgtaataagattggagttggctatgaagctttcaggagccagcctaacttttgttcatcgccacttgacagctgcttgggcgatcagctttccaaattttgggagaatgcaggagttcataccttttctgtgggaatcccagaagttctcaataccaatttgatgatagagctgagtgctgatgacatagaatatgtctatcagagaagctcagggaagataattagcattaacatctcttcgtttgaagccttaagtcaagttggcagtgctagagtcaaaaccaagaatattggaagacttgaagcttcatatagcttgacggtatgcatcttgtcaagaaattgctgtttgtttgactgcttaagcggcatcaatcccgttgaggagcagtactttatcatgaagcctgatgaaaagcttattcggacatttgatttgcgttcgtcaacagaccaagcatcgaactatacatgtcaagctattttgaaggcgtcagatttcagtgaacttgacagaaaagaatcccaattctcaaccacagctacagttcttaacaatggaacacagattggttcgtccgaaaaccacacaaagggtggcatctggggtttctttgaagccatcaaagcctggtgcgccaaaatgtggcacatgctgattaatttcttcactggtacaacatgcaggtgcgtcaataaactccttccagcccgcactttctcttttctccctccgattgatgctcctgtggcttctgcaccggaaagggctcttcgatccactgtactattggtgggacggcgtggtcgggtcggaggcgcaggagcgcgcgcgccggaggcacaagagagctcacagccacaggcactcccaccaccacgacgcgcacaagaggcacaagaccgagcttgccggccaccgccgccaccacgtcctccacatacatgacgacgacgacccggtggcggcggcggcggcggcggagcaccaggacagacacggcacgcacggcgtgcatatgcgacacacagatgctaacgagaggaggaggaggcggactcgccggagccggaggttgccggaggcggcggcggcggcggcatcgcgctcttc

SEQ ID NO: 27640 - DNA, 290 bp, Oryza sativa
  Clone ID: PAT_MRT4530_32314C.1
ggccgggctcgcttacatctggtagctttcataggtcatagactgccctcacagaccaacacaagtcttttctgcacactttgtcctcactcgtgcgcatcgaggccgggctttccggtcagtcacccatcccaaattgcttcaggccaagcacgcttaaccctggagttctttagagattggtttccggaaaagaagttgtaacttgtctttttaatttttttcataatttttttaaataaaacggacggtcaaacattggacacggaaaccagggtttgtttttttga

SEQ ID NO: 27641 - DNA, 490 bp, Oryza sativa
  Clone ID: PAT_MRT4530_32315C.1
cgaccacttgctcgatgatactccattgcctgttaatgaggtctcatcctcggagttgctggtggcattattccaaccaacacctccacaccgatcatgcttcttctactgcctgtctcggctcttcagtgcctcaagttgacaggggcttccttgtgctcattgcttctgatcatccaggaattgaggtttgtgacccaaatggccaatggtacctagcagatggcatttcagggcctggtgacctgttgcttctgactggaagggcacttagccatgttactgctggcttgcgcccaacttctcgctacaggatcacaaatgagactagagcatcactcacctttaggctaatgccacatgccattgctatactggattgctctcctattgcagcagctgtgcactgcgtaccccagatgtcccaacccatatctgcacgccaatttatggatgacttgtgtgctgaagaacgtgctgtttcgaatca

SEQ ID NO: 27642 - DNA, 537 bp, Oryza sativa
  Clone ID: PAT_MRT4530_32316C.1
atggcgcctcgccgccgccgccgtgccgctcgctcatcccgtcccctcctcctcgctctcctcgccgcggccgtcaacaacttcgcgcccgccggcggagtggaagtcctcgccaagtcccgcctggagagctgcgcccgcggcggctcggacgacggccgcgaccgcctcacctgcgacagcaagatcgtcgtcgacctggccgtgcccagtggctcggtaatcgcgctcgactctccgcctctctctctctctctctctctctctctctctctctctctcatttccccccaaatttctctccacgccactgttcgtttcgctaacgtttgcggtgtgggggatcaaagcggcggggaggcgtcgctggtggcgcgggtggcggaggtggaggagaacggcacggaggcgggggagatgcccatccgggatcccctcatcatcaccatcaacaaatccgaggtgtatgcgctctacgatctcacttacctcagggtaaaccctctgcttcctaacctgttggattctggtttctaa

SEQ ID NO: 27643 - DNA, 2049 bp, Oryza sativa
  unsure (1)..(2049): unsure at all n locations
  Clone ID: PAT_MRT4530_32317C.1
gaggttattgttggtccagaaaatagaacagttgtttctgaagacagctccctgagagtaaatttagttggcgactttgctggttatacaagtcttccatctttggagaacttctaccttgtgactccacgaaagggtgttggcggtggtcaactagaagtgcttggtgatgacttttccaggtggatgctgttggagagagtcctgtttacattagatggtcttgaatgtaataagattggagttggctatgaagctttcaggagccagcctaacttttgttcatcgccacttgacagctgcttgggcgatcagctttccaaattttgggagattgacaaaaacagggtaaacaatagccaaccaccccaatacgttgttctgggaaagtttgaaaggatcaaccaatatccgttttttgatagatacatttacagaatgcaggagttcatanccttttctgtgggaatcccacaagttctcaataccaatttgatgatagagctgagtgctgatgacatagaatatgtctatcagagaagctcagggaagataattagcattaacatctcttcgtttgaagccttaagtcaagttggcagtgctagagtcaaaaccaagaatattggaagacttgaagcttcatatagcttgacgtttgactgcttaagcggcatcaatcccgttgaggagcagtactttatcatgaagcctgatgaaaagcttattcggacatttgatttgcgttcgtcaacagaccaagcatcgaactatacatgtcaagctattttgaaggcgtcagatttcagtgaacttgacagaaaagaatcccaattctcaaccacagctacagttcttaacaatggaacacaggttgagaaatattcatgccttataatagccgatctagaatttattgtccttttgcttttgttgaagtgcaacgagattggttcgtccgaaaaccacacaaagggtggcatctggggtttctttgaagccatcaaagcctggtgcgccaaaatgtggcacatgctgattaatttcttcactgtcctgtggcttctgcaccggaaagggctcttcgatccactgtactattggtgggacggcgtggtcgggtcggaggcgcaggagcgcgcgcgccggaggcacaagagagctcacagccacaggcactcccaccaccacgacgcgcacaagaggcacaagaccgagcttgccggccaccgccgccaccacgtcctccacatacatgacgacgacgacccggtggcggtggcggcgccggcggagcacgtcatcctccgccggcacggcaggcacgagtcggcgctcggcgtgcagcacagggacgggctcaagctcaaccagcaccggcgccccggtggcaaggcggttgagctactgccgccgggggagatcatcgtccgggacggtggcggctgcggcggcgtggagcccggtgatcggaggcaccacgcgtggcactgacgccgacgccggtcgccggcgcggtttaaaatggcgttctgacatactgacaagtgcacattatgatcgatgttgtaaatgttgctgctgacgcacggacccnttgtattgtgtgaatgctgatgtttcatctgatgcttcctcccggtgtggcggtgtagtcttggaagttaacccgagtgtggtttctggaatctggtgggtacgttagaattggagtgtgagagtcaagcttttgttggttgttcgcccccagtgcgacactgacgtttcctcctctcgccgtagattgctgtctgtttgcggggggggccccgggccggtccggcagcccgggggcccagcacccgtgaggtgttcatttctgacgaagtactaggaggagagtaggtacaggggcacagtcaaggaaagcagaacataggccttgcttttcaatagtaaagggttatgactaaatggcttcttcatttttaaatagtgttgttaaccttcaaattgtttgatcattcatcttgctaaaataacatgtaattattatttaaaaaaaaaaaa

SEQ ID NO: 27644 - DNA, 277 bp, Oryza sativa
  Clone ID: PAT_MRT4530_32318C.1
gcatacatgcatgtacacgtactgtacatgtgcaaggaggagcttgcactgtaccggttgctacgagcatggctcggtggaaaagtcaagctagctagccatgcatgggctcagttggcagggaggccaacccgagctggccatttggcttgtgggctggcacgtggctggcccaaggtgatgtacgggaggaggccaagccgagcagccctagacaagacgacggcccaactcggctcggcaggtgcatgcgcgcgccgaggcgggagatcgtatg

SEQ ID NO: 27645 - DNA, 159 bp, Oryza sativa
  Clone ID: PAT_MRT4530_32319C.1
ctaggatttcttcacatagcctgtgcctacctaacgctgacatttaccggcatcccattcgccacgctgcttgtaaggtcgcggaccactacgacagcgagagggcgacagacgtgagcgccagacagctgcggcccgccgtgccggactggaaggtcc

SEQ ID NO: 27646 - DNA, 514 bp, Oryza sativa
  Clone ID: PAT_MRT4530_3231C.1
aatatatctctatctctctctctcctcactaaagcacaaatcctactcttatcatcctgtcttcttgcctcccttctgcctcctgctcaccaagcttcccacacaaacccaacaagagagtgagagaggagcaaaagctttggctggccgtcccccctgttaaaatgtgatgtccaatccatgggattgcgtctagtttagtcccccactcctctcctgggtcagtccctccctggccaccacctcttcttcttgcagcctcctcctcctccggggccttcttcttgttgattcttttgatggcttttgtgcttcttgtcgacctagttatgggatccggcgaggtggatggacgcgcattggagcagcaacagtagcggcggtgaagaaggcggcggtggatctggatccgaggcaccaccaccaccgggtcacccacggcggcgacggcggcggcccaagaagaggaaggcgcggtggacaagatgaggcatatgagcagcagcagcagcag

SEQ ID NO: 27647 - DNA, 105 bp, Oryza sativa
  Clone ID: PAT_MRT4530_32320C.1
aggtcaacctcgtcaccggcaatgtccaccttgctcagcggcacctcccggactccggagccagctctcccatttcactgacccacgtgcattctatatatggag

SEQ ID NO: 27648 - DNA, 435 bp, Oryza sativa
  Clone ID: PAT_MRT4530_32321C.1
gtaacagtgttcttggttcaaggacgacaaccccggaaccttggacccaggccaacgagccgaccatatttgccgaaaacgaatagcaggagggggtggtgcacatagggggacaggacttagccccgggaagaacaaaggccgccccaatacaagccaaaaaaaaacccggaaaaagaaagcgcaaaagacgggcgcgccaaaaaactgaacaaaccaacggggggcaacagagacatagctgccaaggcactaatagggggaaacgccggtagcacaattggggagcatgaaagaacccaaacagacgtggacacgacttgaggcattaacagcgctaaagaggtgaatcctttccacaaaaaaaatgggaagggccatacgcgaataaacggaagacactaataaaatacgggccagcgggccatgccccat

SEQ ID NO: 27649 - DNA, 456 bp, Oryza sativa
  Clone ID: PAT_MRT4530_32322C.1
atggacaacgccgcggaggtggccaagagggagaagcgggggcattctgtcgatgcggcggtggaggaggaggaggacgccagccaccacaacgcggcgggatccggcggggatgagggggacgaggaggagaggatctcgtcgggaggaatgggcgcgaggcacgccgacgaccaccgggagaagcggggaacaccgacgccgacgaccaccatgcccgtcgctagggggctgccacctccacaacctccgcctccgccatcgccgcctactggctgccgctccctatccgtcgcccgccgcgcgctcgcccgcctgccgccaccgccactccgcgcctccactccactccgcttcgtcggctcctgcactcgcacactgcctccgtcggccgccctcgtggcgccgcccttcttctctcccgcctcggccccgccagcttgcagagaagtgtga

SEQ ID NO: 27650 - DNA, 529 bp, Oryza sativa
  Clone ID: PAT_MRT4530_32323C.1
ttcttccaatggtgatgtcaggcagagagtgtgagagagaaagacgaagcagtcaataaggaggcggagaaagaggagtgggggaagaagagacgcgctcgggatagattccggccatgtcgtctgcgttcggcgacttcggcccgctcaccgagcggcgccgcgcctagaaggctcgtcagcagctcatgctcatcatgatcgccctcggcacggtgtccatcatcattatcctcatcgtcatgggcgccgccgccatcacgtacagcttgaagaaatccgatgcggactaaggccgcttcatggtctcgatctacggccccttctcaggctgctgatgtggagacttccaccactgctgccttctcttttgtaatgcttccttttactccttgtcttacatattttttttctttgcgctctcacttttttccctgtctcctttctcctcctgctttcctatgtctcttatccccttctctcttttccccatggcttttttcctctccttcttgtcctttcctctttt

SEQ ID NO: 27651 - DNA, 1563 bp, Oryza sativa
  Clone ID: PAT_MRT4530_32324C.1
atgatagatcccacggtagaggggacaataataccgcctatccaagagagggtgacatttgagaggcttgaggctgatttctgcaagaatgagagaaagatccataggtttccacaaggcctaagaagatggatcgggggtgaaggcgaccgctacatcgtcccaaccttcgttgccctgggtccgtaccaccatggcgagcctcacctgcaaaagacggaggagctgaagtacgcaacggcacactacttgtgcatgaagtggggccgctcggttgaggaagtctacggcaaggtcctcgccgtcgccggcgaggcccacggctgctacgacaacgacgacgacgccgtcgctcagttcagcgacgacgagttcgcggagatgatgttcctggatggctgcttccttctgaagtatatggtcctcgataatgattgttctctgttggaaaaccggatggttttgtcgacggggccatgcatccagagagacattgtgctgttggagaaccagattccatggctagtgctggatgccctcatgagtatcatcagtcctatagatgtacacatgtttcttacagccgtgatatctgatccgatctatgttgccagagagcgtcgtcttcttattactgacagagatgttatcgtgaagagctccgtcccgcatttgctaggcctcgccagatcacacctaatcgatggcatgccaactgatcatctagagcttgggtttagtgacgatgacgacgacgaccacgacacaagactgtccattagcgcagctgaccccaagcaggaacgcatggcttgttgcagtaaggagtatcctcgcgatggcttcgtcgtcagctcctacctctcgctcctggcgatgctgatggacaaggaagaggacgtgcacgagctgcgagccaggcacatcgtcgacagcttttttagtgatcaggaaatgctcgccttcttcaagggcctcgcaaggcacctccgcctcggctcccgctacttcgcggcgatacaaaagatagaagcctacaagcacgataaaagggtgttcatcgccgtgcacaagttcttctaccacaatctcaagatcatcgtcaggctcatctggagtttttttaccgtccagcagagggcctcggtaccaactcgtgaccgttcagtatgtgtaatccgacggtccaaaacaataggtacatggtggtaccaccactccgtccgtgaggtaccgagcatccaaagcgccctgaaagggtacaatggtcttatcgcgtcaaaaagcttcggcttttcctcttccttcccccagcgccgtcacacctcactcgaagcgccgccgccgacggcgagcacacgtctccgacctccaacctaccccctgcgacggaaggagctttacctgcaggctgtcgatgaaatcctcgccgaccactgccttccctgcaggtgctccgcgccatctccaccgggccaagttcctctttcccagcgtggttgcgtcgtcccgaagtctctcttcctctggccagagggtggtgccactcgtttggagacttag

SEQ ID NO: 27652 - DNA, 948 bp, Oryza sativa
  Clone ID: PAT_MRT4530_32325C.1
atggccgccgccgccgcagaccgccgcttcaagatcttcgcgcccgccgacgccttcggccagccgctcaaggacgccgtcgtcgcgcacctccgcgcccacccttccgtcgccgacgtcgtcgacctcggcgtcgacaagtactacgccgccgccgccgccgtcgcccgcagcgtcatcgccacccccacctcctcctccgaccccgccctcgaggcccgcggcgtcgtggtctgcggcacgggcgccggcgtcgccatcttcgccaacaagtaccccggcgtctacgccactcactgcgccaccgccgccgacgccgccaacacccgctccatcaacgcctgcaacgtcctcgcgctctccggcctggccaccccgcccgacgccgccgccgccatcgccgacgcctggctcgccaccccgttccgcgccccgtgcccggcctccggcgacgccccctggcccgacgacatccagcgcttcttcgactccgcgcccgccgagatggccgccatccccgacatctcctccgcctccgtccctgactccgcctgcgccatctgctgcctgaggaaggggatggagttcgagccggtggggatcatgcccggcggcgagatgcggatcgtgcgggagagccccacgtcggcgtacgtccggttcaaggccgggagcgtggagccggcgcaccaccacacgttcggccacgacctggtggtgatcagcggcaagaagaaggtctggaacctcaccaagaaggagagctacgacctggtcgacggcgacttcctcttcacgccggccggcgacgtgcaccgcgtcaagtacttcgaggacaccgagttcttcatccgctgggacggccattgggacatcttcctcgacgaggacctcgacgccgcgcgcagagccatcgatgcggagcttggagcagcaaccgccaagtga

SEQ ID NO: 27653 - DNA, 357 bp, Oryza sativa
  Clone ID: PAT_MRT4530_32326C.1
atggcggcggcggcgagggcagtgagacatggagcgaggcggcgaggacgcgcggcggtggagcgtggtcgcggacgtaatggcggcgaggcggctggtgttgtcgagcgcaacctcattgtgcatgcggacctagagtccgagctaaacccccacatcgcgctgcccctcatcttcctccacaaggcctcccacaccacgcgcgcgctctcgctcgccgccgtcgtcgacgccttccgcatgagggcatggagtggctacccgtcgggcaactacgtcggcgcggccacgtcagggagggacaggcgcggacgccggggcccagccgtggactttgactcctccctccgcggctag

SEQ ID NO: 27654 - DNA, 488 bp, Oryza sativa
  Clone ID: PAT_MRT4530_32327C.1
gcacgaggctcatcgccccgcgtgccggtgcctcccaccgcatctgcccacgccgtcggcttctcctctcgccgcggacaccaccgcctcttctcgccgcagacgccgccgactcctctccccgtagacgccgccgccgccgccgcctcctctccccgtagacgacgccgccgcctcctccgacaacgcctacaccagctaccagagcctcctcacgctcattcgcgccaccggctccacctccgacgagacccgcggcggctgccggaagtgcggccgcgtcggccacctcaccttccagtgccgcaacttcctctccggatctgcctccctttcttccccggtgccggcgcctcctcccttcctccaagtgcgtagccttctcttccccgcagcactagattcgttggcacttctgtccaggcaccgtgtcttccccaacaagaacctcggcatcttcctaagttcctgtacctcatttaggtcat

SEQ ID NO: 27655 - DNA, 834 bp, Oryza sativa
  unsure (1)..(834): unsure at all n locations
  Clone ID: PAT_MRT4530_32328C.1
cggacgcgtgggcggcgacagcccaagccgccgctgcaacctaccaccctcgcctcttgcctcgccgccgctcgagcgaggtgccggcaaagccagcgtctcgccaggacggcggcggggttcgcagctctcgctcctccggttttcgacgcgggcagacctaagggcggaggttggcggcaccgtttcctgcagcgggcggaggccatggcagctcgtggcgttgggcggaggaggcgtcgccggcggggcagagggagtggcgcacgggagagggagcagcggcggttggtagagatggtggcggtggaagtgccgccagatccacgcctggatctggcggggaggcgaccggcggtggggcctgctggtggcggcggcgacggcgacgcccggtggagcagaggtgggcgaggtccgactccgtgacggccggatccggctggacgacgacagacggcggtgggtgcatccttagatgcgcggccggcgtcggggcgagcgggcaacggaggcagcggctggcggcgatggtgcgacggcgtggaggccggcggcggcgtcgtcggggcggttgctggctgcttagtggcggatggcgacggcacagcggtggtctgtggaggcggtggctgccgtcggtggcagcggcgacgacgaccgtgactatggaggcagtggtgacgtcngcggtggggaaggagtcgggtgcgaggtgaggatggcgacggctaagtggctgggcgttcggcagcagcggctgcggtggtggtgatcgtgactgcggtcaccggaggcatgacgggctcagacggctagtcgagggcgtgggag

SEQ ID NO: 27656 - DNA, 1956 bp, Oryza sativa
  Clone ID: PAT_MRT4530_32329C.1
atgccgcctccgcctccgtcttcccgtctcctcgccctcctctccgcgcgccgcccgccgcccccgctccgccgcctcctccagatccacgcccacctcctcgccgccggcctccttcaagacttctcctccctcctcgccgccgcctacgcgctctccaccaccgccaccgccacggacgcccgcacctcgccgccctccccgctccgccacgcgctcgcgctcctctcctcgctcccggcctccgcctacaacgccgccatccgagcactctccctctccgacgacggcgaccgccatggccacggcgtcgtccgccgctgcctcccgctctaccgcgccctcctccgctccgggaccgcgcgccccgaccacctcacgttcccgttcctgctcaaggcctgcgcgcgcctgcgggagtggggatacggcgacgcggccctcgcgcacgtcctccgcctcggcctcgactccgacgtcttcgtggtgaacgcggccacgcacttcctatcgatccgcgggcccatggaggacgcacgcaggctgttcgaccgaagtcctgtgagggacttggtgtcgtggaacacgctgatcggagggtacgtgcggcgggggaacccagcggaggcgctggagctgttctggaggatggtggcagaggatgcagtggtgaggcctgatgaggtcacgatgatcgcggctgtgtcggggtgtgggcagatgcgtgacctggagcttgggaggcggcttcatgggttcgtggatagtgacggagtgagttgcactgtgaggctgatgaatgcgctgatggatatgtacatcaagtgtggcagtttagagatggcaaagtctgtgttcgagaggatcgagcacaggacagttgtctcttggacgacgatgatcgtggggtttgccaagttcggattgatggacgatgcacgtaaagtgtttgatgagatgcctgaaagggatgtgttcccatggaatgcactcatgaccggttatgtgcagtgtaagcagtgcaaggaggccctttccttgtttcatgagatgcaggaagcaagtgtggtgcctgatgagatcacaatggtcaatcttctaactgcttgttcgcagctcggagcattagaaatggggatgtgggttcaccggtacattgagaaacatcgccttgtatttagtgttgcgcttggcacatctctcattgacatgtacgctaagtgtggaaacattgagaaagctatccacattttcaaagaaattcccgagaaaaatgcactcacatggacagcaatgatatgtggtctagcaaatcatggacatgccaatgaggccatagagcacttccggacaatgatagagcttggacagaagccagatgagattacgtttataggtgttctttcagcatgctgtcatgctggtttggtgaaagaaggtcgggaatttttctctctgatggagacaaaatatcatcttgagaggaaaatgaaacattattcatgtatgatagacttactaggcagggcaggccatttagacgaagcagagcagctagtaaacactatgcctatggaacctgatgcagtagtttggggtgctatcttctttgcttgtaggatgcaaggtaatatctctcttggagaaaaggcagcaatgaaattggtagaaattgatcctagtgatagtggaatctatgtgctactggctaatatgtatgcagaagcgaacatgaggaagaaggctgacaaagtcagggctatgatgagacatttgggagtggagaaagttcctgggtgtagctgcattgagttgaatggtgtggttcatgaatttatcgtgaaggacaagtcacatatggatagtcatgctatttatgactgcttgcatgagatcaccctacaaataaagcatactgcagatttgcttagcatttctgcggctggtgcggtgtag

SEQ ID NO: 27657 - DNA, 285 bp, Oryza sativa
  Clone ID: PAT_MRT4530_3232C.1
atggaattagaaaggtcaggtggcggcgagctcgtggcactcgaggatgcactcgagccgcgggcgccacccgtcgccggcgcggtggggagggggtggcgcccccgccgagagggcggacgagagggcccgggcggcggccatctggttgaggacgtcctcgaggcggcggtcgccggtcttgagctggggcatgaatccactcccagctcggccggctttggggccaaccttgaacctttcccccccggccgcgggtgggcagcgaggcgggaggcattgaag

SEQ ID NO: 27658 - DNA, 207 bp, Oryza sativa
  Clone ID: PAT_MRT4530_32330C.1
aggcaagacaaaccattcacgaaccatggggcttgtagtaccagtagtagcgacctacacatacatccaaaattcatcacgcgtactctatacagtgatgtactatacagcatcacaacctacatacctatactatcacgtaccctaccaaaccgcacacaaatacatatgctctatgtatatataattatatatacggtgcttaat

SEQ ID NO: 27659 - DNA, 1051 bp, Oryza sativa
  Clone ID: PAT_MRT4530_32331C.1
atgaacgacctcttctcgtcggggtcgttcaagaagtacgccgacctgaagaaccaggcggcgctcgacgacatggagtccggcggcggcggcggcggcggcggcgagggcgcgaacctggagcagttcttcgaggaggtggagggcgtgaagggggagatgcgggggctggaggcgctgcacgggcggctgcaggcgtcgcacgaggggagcaagacggcgcacgacgcccgcgccgtgaggtcgctccgcgcccgcatggacgccgacgtcgagcaggtgctccgccgcgccagggccgtgaaggggaggctccaggcgctcgaccgcgccaacgccgccagccgcaagctccccggccgcggccctggctcctccaccgaccgcacccgctcctccatcgtctccggcctcggcaccaagctcaaggacctcatggacgacttccaggggctgaggagtcggatggcggaggagtacaaggagacggtggcgcggcgatactacacggtgacgggggagaaagccgaggagagcacggtggaagccctcatctcgtcgggggagagcgagacgttcctgcagaaggcgatccaggaacaagggcgcggccaggtgctcgacaccatctccgagatccaggagcggcacgacgccgtgaaggagatcgagcgcggcctgctcgacctccaccaggtgttcctcgacatggcggcgctcgtcgaggcccagggccaccagctcaacgacatcgagagccacgtcgcgcgcgccaactccttcgtccgccgcggcgccgtcgagctcgagacggcgcgggagtaccagcggagcagccgcaagtgggcatgcatcgccatcctcgccggtgttgtgctcgtcgtcatcatcgtccttcccatcatcgtcaacctccacctcttgaccattagatagactccctttctttcaggaaactattctaatccctctcgagtgatgtcctctcattacatcaaatagttgtaaaagatttgatgaaatagattagtatgtgatatattatccacaa

SEQ ID NO: 27660 - DNA, 668 bp, Oryza sativa
  unsure (1)..(668): unsure at all n locations
  Clone ID: PAT_MRT4530_32332C.1
ggtaaaggaaaccaagggcaagcatgtcatcatacaccataactatatcacaggatttgagaagaagataaaacggtttcgtgatcatgggctatggcttgtcgatgaacatagtgatgagtcaccacttggtagaatatgagcaagctggcaaagctacaccacatctgtccttgcaacagcatcaaacttttgcagctggtgtttaactggttgggattgcggaaccgtgggattgatttgccatccgccacacaaaaatacagcaactggatatgtgcagtagtttttaattgtacatcaagcccctttcagagcgacctgttgtcatgatgattatttttatttcattatcttttacgaatacggcagcagtaagatcttagggtgagaatgtagctatttaagggaatgtggccacaaatattagcgagtcaagtagtaactcattggtctatatgtatagcatggtaattttgttaacctgtaggcattttttttgacactggattgtgtttaatattattctttttacctcctttcataaagacctctaactgtcatgtgtgatggcctgctgggtggcctcgtgcctgtgctaatgatgaccttgtaagttgtaattccgnatataaattatttaaccatgctcaggtaaaaaaaaagga

SEQ ID NO: 27661 - DNA, 279 bp, Oryza sativa
  Clone ID: PAT_MRT4530_32333C.1
atggcagagcagctcaggcagagggtgatcgtctttacactcgttgttgtcgcgtgtctcgtcctcgcgacgacgacgaaggtggccgacgcgaggatgcttaagcggatggagagagacggggacgcggtggtggagtcgccggcggtcgatttggaggcgatggacgggagcacggagggcgccggcgacggtggcctgcagtggctcaagtccgtcagcctcgacatgctcggcgggatcaaggactccggcccgagccccggcgccgggcactag

SEQ ID NO: 27662 - DNA, 1947 bp, Oryza sativa
  Clone ID: PAT_MRT4530_32334C.1
ccacgcgtccgccccatcaaaatttgctagggtttggcggtaaatcctatcgcgcgggaaaaaaaatcccatggcggcaaatcagatcctcaaagcgtaaaatcctcttgttactcctccaaataccttctctcagtactaatcacccaacacaatcttgccataccatgggtcgatcgaaacgggaagttgccccgccacctcaagctttgccggcatccttcccatctggcatgtggctggctactccgccgatgcaggcctcctttgctcccggtggctggcaaggtacagcggctgcacctggtggctggcaaggtatggcgccaccgcagccgccgcaggctccattatttgcatacggcgccaatacttctgctccccatctggcccagatgaagcaagggtcagatcgtagttccatggacgattccttgtcagatctgcaagaaagtggtatggactcacgtccacctggtggattcttaagttactttcaggatccatcaagtttacagaatcatcaaccttctataccactaaattattatgctactcagcaagcagcaccatgggcaccttcacctgcagaataccgaagtccagttacaaaatcaggtccaggagaacaacaccctatcaacattgatagtggtggtgaagaaacccccactgttaggactgagaagcggttgacatggacacatgaagaggacataaggctagtgagtgcttggttgaacaacttgaatgattcgatcaatggtaatttcaagaaaaatgattgttattggggagatgttacaactgcctacaatagcaccactccgagaaataggatgaggcaagaaaaacaaatcaaggaccgctttcataaaattaagaaaaatgttggccgtttttgctgtgcttataaggaggtgaaatctatctatgttagtggacaaaatgaactacaattgatggagaaggtccatgcaacatatgaagcagattacaaggaaggccaatttacatttctgcattgttggaaagctctccgtgaccaaccaaagtggcatgcttacttggaggaacttgagaagccaaacaaaacaaagtcagataatgaagtggaagtaagggaacttacatccactcctaatagccctgaagatattatacgtcctgaaggaaccaaagctgctaaggcgcggcgtaatggtaaagacaaacgcaaaaggaaggcaaaggtttatctatcggatatggatgatgagattgacaagcctaaagaagttcagaacatggcagataaaggtcgcgatgagctactggagactcagaggcgtgtttctagtgagaatcttgaatcaaaaaggttagctcacctggcagccatggagcacaaggaggcggttatgttggaaacatatcgggctctcatgttgcaagatacaaaagatatgcctgatgatgtcagatttgagcatgtgatggcattgaagagtatgagggaaaagttgtttcctaaaactaagcacaatagaatgctcattttggctgcttgttttggcagtgcttcagcaagagaagctacttattacataattttcagtaatccaccgattttatcaaaacagaacttgtgttctaactatctactcagtatgtcgttgtatgggtcactgttatggcctatgaatgatgtatggatcattgtaatagactaagttcttttgtcagtctatgaactaattagtagttttgtcaatttatgaaccttcttatgttgatcccgtatcaagctaaattattctaaagcttgattgctcgttcattactaaattgtttatttggaatgaatagtatacactgtcgatgctaatttttctgtcatgtgatggatcgtcgcatgatttgtttgttttattgattgaataaagtgttgggttcacccaagtagct

SEQ ID NO: 27663 - DNA, 741 bp, Oryza sativa
  Clone ID: PAT_MRT4530_32335C.1
ctcctttatgagagccacagccgcagccgccttctcactcctcacctgctcctgtctccggagcaccagcccgaccaggctcccctcctcctcgctccgcctcccgctccgccgcggcccgctcgccgcgatggccacggccgcctccttccgcccggaggccgcgcggtcgcctcccgccgtccagcccccggcgccttttttctccaagttcaaggtggcgctgtgccagctgtcggtcacggcggacaaggctcgcaacatcgcgcgggcgcgcgaggccatcgaggctgccgcggcgggcggcgccaagctcgtgcttctcccggtgagcgctcggttgatcataacgacctctcgttttgtctgctcgtccgatttaaatgggaggcggagaggtgaggattgagtgtgatggagtcatagctcggcaagggttcgcggataggatcataggaccacacgatcttagcgtggttacgtacattgaactgtgaatagcactagcactgttatgcacagtgacagaagacacctctcactgcacatcttagaacatgaatgtgcctcttggattgtgtttccgcatgatttggtgaccagatggaatagtttgtactgttgcttgatcgggttatctcctagctgtgacaaattggtcttgctcttatgggtggactctgtatatttccaagaaagtgcaccatagctgatgcagagaaatcagctctcgagctgatc

SEQ ID NO: 27664 - DNA, 240 bp, Oryza sativa
  Clone ID: PAT_MRT4530_32336C.1
aaaatgggatttcccccttataacacataaatcattgggaaagaaaactctgtccagccaaatgcacgcgtggacaaggacaatgatgcagctacaaaggtagtgaaccggccaccacgagaggtccaggaagtattgcttgacgcatatgcgaggtcatgcccacgcacattggtacgcaccatccaatgatttcctctgggctatcctaatattcctcgcggtccatgaacgatccaa

SEQ ID NO: 27665 - DNA, 270 bp, Oryza sativa
  Clone ID: PAT_MRT4530_32337C.1
accggaggtccctcaacttaacagcgggattttttgagatccgttaaccacaaaaccagaaatcttcacccctaaactatacaaaaccgttcactcaaggtccctagacagtatatatgggtggtttcgctgacgtggcatcctaatcagccaaaaaaaaatttaaaaatacttggggcccacatgttagctgcacattttttttcttctccttccttctccttctctcctcttttctctcttctatatttctctttagtgagggaggcc

SEQ ID NO: 27666 - DNA, 752 bp, Oryza sativa
  unsure (1)..(752): unsure at all n locations
  Clone ID: PAT_MRT4530_32338C.1
ttnnantaattttttttttttttttttttttttttctttttttttttttgttttnaaaaaaaacaaacagctttctgttaataacaataaccatggggctttttaactccccctaaaaatgttgcctgtcaagccttaaacatgttccgcccccaacatttttgttttgggagtaattttttttattccgcaacccccgatttttccccccaggccccaccttttttggcccaacaaacccccttcccccttgggggggggaaagaagccaacccccccctggtgaaccctttcccgtttgcttgttgggaatcgaaaatttttttaggccccaaaacaccccattatttttttgggaacatggccgggggccccgtacttgggtgccatttccttggcctttaggactttcttgcccccctttgcctcaaccattggttttttttcctcaactttcttggggaccaacgcgccttttgtctttattttttttggcaattccaccttttttttttttcaagggctcctcaattttctttagatgagcctctatgtttgctttttttgggctccccccacgaaaaaatagcaaatatcttttttcaacccccgggcccaccttttggcttttcattttccccccagccttttatcaaagaggtccttttttttaatttccccccctttgcaagaaaccaccatttttttttttttttaaaaaccccccttttagcgcaggtttttttttgggg

SEQ ID NO: 27667 - DNA, 435 bp, Oryza sativa
  Clone ID: PAT_MRT4530_32339C.1
atggaagttgcatatttaattgttgatgaagttcaggacaacttacttcagattggatcttgcttggttacatgtaatcagcaccagccatggcatctcgagaggctgaccttcactcagatgaatttagaaggtgacaaaatgacttactcaggcatttttcatgttactgttcggttctatggtgttcctgaaagtctcaggctctgttctctggtggacaagcttattcaatacacagctactttctctgattctcttagatacaagcaagacaagaacattattggtctggttgtttttggtgttactaagaagcctccagatactattctcattgccaactcaacatacaagatcaacaagatttgcgcattccgtaggctgcttttccacaattgtgttctcttgtcaagaacaagcttcttgagttag

SEQ ID NO: 27668 - DNA, 3157 bp, Oryza sativa
  Clone ID: PAT_MRT4530_3233C.1
atgacacaacctgatcgtcagatcaatacacactcggcggattcaaatccccaaacaggagtctcgtgcgctacccccttttattattgccgaattcatgtttcgacagttggcgcgccaggtaggggctgcgtcgaattacccatcgaaaagtgtgatggaatcgactacagaagaaacggcgagattaatctcgatggctcaaatcttcagtcgggagcagcgccgacggatgcgttgcggccaccacgccaccacgggcacatgggagcagccgcctatagcttgctcggagaaatttcatgcatgcatgagttgattcagcagatcaacatacagctggcatatcaagccgccgttgttgggcgtctacgtcttcaccgaccggcttgcctccgccgccgccgactggtgtctctgcctacacggctggcctattatgccgccgctgttgggcgtctacgacttcaccgccggcctgcctccgtcgccgccgagtggtgcctccgcctacacggctggcctattatgccgccgctgttaggcgtctacgacttcaccaccggcctgcctccgtcgccgccgagtggtgcctccgcctacacagctggcctattattatgccgccgctgttgggcgtctacgacttcaccgccggcctgcctccgtcgccgccgagtggtgcctccgcctacacggctggcctattatgccgccgctgttgggcgtctacgacttcaccgccggcttgcctccgtcgccgccgagtggtgcctccgcctacacggctggcctattatgccgccgctgttgggcgtctatgacttcaccaccggcctgcctccgtcgccgccgattggtgcctccgcctacacggctggcctattatgccgccgctgttgggtgtctacgacttcaccgccggcctgcctccgttgccgccgagtggtgcctccgcctgcacggctggcctattatgccaccgttgttgggcgtctacatcttcaccgccggcctgcctccgtcgccgccgattggtgcctccgtctacacggctggcctattatgccgccgttgttgggcgtctacatcttcaccgccggcctgcctccgtcgccgccgactggtgtcttcgcctatatggttggttggtcacaccaccgttgttgggcgtctacatcttcaccgccggcctgcctccgtcgccgccgattggtgcctccgcctacacggctggcctattatgcctccgttgttgggcgtctacatcttcaccgccggcctgcctccgtcgccgccgattggtgcctccgtctacacggctggcctattatgccgccgttgttgggcgtctacatcttcaccgccggcctgcctccgtcgccgccgattggtgcctccgtctacacggctggcctattatgccgccgctgttgggcgtctacgacttcaccgccggcctgcctccgtcgccgccgagtggtgcctccgcctacacggctggcctattatgccgccgttgttggatgtctacatcctcaccgttggctcaccttcgttgccgtcgactggatccagatccagatatgcataaaagggattcatggctttaagcttatctcttacgctctaggaatggatcagtcaaaacatcaccaccggccgcctcgtccgccgccgactggtgttttcgcctgcacggctggtcttttatgccgccgttgttgggcgtctacgtcttcaccgaccggcttgccttcgccgccgccgactggtgtttccgcctgcacggctggcctttatgccgccattgttgggcgtctacgtcttcaccgaccggcttgccttcgccgccgccgactggtgtttccgcctgcatggctggcctttatgccgccgttgttgggcgtctacgtcttcaccgaccggcttgccttcgccgccgccgactggtgcttccgcctgcacggcagacttattatgctgccgttgttgggcgtctacgtcttcaccgaccggctcgccttcgtcgccgccgactggtgtccacgcctgcacggctggcctattatgccgccgctgttgggcgcctacgtcttcaccgaccggctcgccttcgccgccgccgactggtgtcctcgcctgcacggctggcctattatgccgccgttgttgggcgcctacgtcttcaccgaccggcttgccttcgccgccgccaactggtgtttccgcctgcacggctagcctttatgccgccgttgttgggcgtctacgtcttcaccgaccggcttgccttcgccgctaccgattggtgcttccgcttgcacggctggccttttatgccgccgttgttgggcgtctacgtcttcaccgaccggccgcttcgtccgccgccgactggtgtttccgcctgcacggctggcctattatgccgccgttgttgggcgtctacgtcttcaccgaccggcttgccttcgccgccgccgactggtgtttccgcctgtacggctggcctattatgccgccgttgttgggcgtctacgtcttcaccgaccggcttgccttcgccgccgccgattggtgcctccgtctacacggctggcctgttataacgccaactgatgctatcttcttcacggctggctacatcgctgtcactactaataggcatcagtatcttcaacacaagctgcctacgtttgccatggctgccgactggtttcttcacttccatggctgcatgattctgccagtgttgactggccttaccatcttcatcgccgctaccactactgatggacatcatcgtcttccgtcgccgactgattatgccgccgccgactggtgcttttatcttcacaactgcgcgtcttcactaccggtttgcttctgttgccgccgacttgtgttcacttcattacggcaatacaactttgtcatcatggtggagcgacttcatctttattatcttcggcactggcaaactctattgctgctacttcgcaagttttgctacttcaccaaccacgacgtctttgtgaacctcgacatctcggcatgcgatgccgtgttattttactacaacaagtggctctccaatattcaggatttctacttggacatcttcaacacatatcttcaatcaagcaatgactat

SEQ ID NO: 27669 - DNA, 537 bp, Oryza sativa
  unsure (1)..(537): unsure at all n locations
  Clone ID: PAT_MRT4530_32340C.1
cctngncnttttcggcggnacatgnnggntgaacacgtgcntggtgcgccccggtgtgttccagggcgggcgccaacnacgaggagaaccccgccaactttggcgtcttcaagaacgtgctcgaagccgtctccaccgccctccgcaagnagctgggcgacgactttaagctcaactttgacgagcacagcatcaaccccatcaaggcctgccctgacagtgctgctgccattgagtaaaaggctttttttcggggggtatttttcgcgactggtttatacttttttttatactttttacttttgtggaaaaaggcgttcttgggacatttgttttagggagctagctgttttgggatttcgagcattgcaaagattgattgcatcataagagatncagtaaatctgcttggatgagcagtcgtatcaagaaagcgagttttgcatactttgttcaagawacaggcctacagagatattagtatcacgaattgacgatcgaaancccannaaananaaaaaaaaaaaaaaaaaaaaa

SEQ ID NO: 27670 - DNA, 297 bp, Oryza sativa
  Clone ID: PAT_MRT4530_32341C.1
atggaactcgcaacaggaattgtgccgcccatgcttggatctggcagggcgccagcttctgatgccactagcaccatagcgctcaggttgagcggatctggtggtcccgggctcggcgctgccggtggtgctggagagggccaggggctggcgccgatggcgcttgagaatggaggagataggagtggcaacgttggagaagggaggaagcatggcgtggtccagctcatagagggaggagaggacgcaacgaatggtgcaagctgcaggccgctggcaggtgtaaatgggagttaa

SEQ ID NO: 27671 - DNA, 711 bp, Oryza sativa
  Clone ID: PAT_MRT4530_32342C.1
atggcgttcgcggatccccacctgcagatcccggacagctacgtccgcgccggcgaggtcccggccggcgaagtcgttggcggcgccgacgacgagagcctcgagctgccggtggtagacatggcgaggctgctcgatcctgagcacagggaggaggagatcgcttggcttggctctgcgtgtcggagctggggtttcttccagctcgtaaaccatggagttgatgaagcagtgatacagaaaatgaaagataacacgatccgcccctggcggcagaggatggccctgcagcgctaccctccttgccgccatccggagaaggtgatgggcattgcgccgcactccgacggcttcgggctgacgctgttgctgcaagtcaatgacacgccgggcctgcaggttagcaaggacggccggtggcgacctgtgcggccgctgccgggtgccttcgtcattaacgtcggcgagatcctcgaggttctcaccaatggctactacaagagcgtgttccacagggtggtcgttgacaccgacaaggaccgggttaccgtcgtggtgttccaggacgcgtgcatcgctggagtggtgaagccactaccggagctcggcgagcaaagatatcatgcgaccaataggtcggagtattacaagggccagttaaaagcattgcgtcgccaaggggaaaagttcgtcgacacccttaaaaagtga

SEQ ID NO: 27672 - DNA, 325 bp, Oryza sativa
  Clone ID: PAT_MRT4530_32343C.1
agccaaaaccctggggatgagaaaacaaattacatggcactttggaattaccgcgctaaggccccgggggaacggaacaaccaccccctattaaacaggccatgattattttggtggctagcaaaccacttatgttttttacacacattcatgccggccgtcagacgaaatattccagaaacaaggatcgtttgcgctggctatatccgggaaggggggccccgacaaaatagggctagcttgactaggacccctgcggaagggggaacggacgggttggcctagaagccggcggacccccccccggtcggtttggaaggggaaa

SEQ ID NO: 27673 - DNA, 561 bp, Oryza sativa
  Clone ID: PAT_MRT4530_32344C.1
tgcaggaattcggcacaggctcattatgtccccctaagttaggaaggtcatgcaccaaaccaaacttgagagctgcaaatgaacatcaccacacaagggtaataaatgattctgttatatgctgtctctcctcattctttttgttcagttacatctatatgtagtgatgtcggataaacaaacacctgttactttctatgtactttaagagcgaggtggaggtgaagttatcagtgtgtttttttatgaattactccccaaatttctttagtagtatgcaataaggcttccatgtgtttgtttgttcttattatttgacaaccttctgagatcacattttaacatggaaaagcccgatacaacctaattgttatgtgtgggtaaaatttgcaattagggcgcataaacactgtcaaatgctccttagaacaaaagaatgaaagacatgttcgatgcaaagatcacattgtttttaataactctttaataacaatattaataattttgtaaacatgttaactaatcagtatggtcaatttccttttacaactatttatttct

SEQ ID NO: 27674 - DNA, 1703 bp, Oryza sativa
  Clone ID: PAT_MRT4530_32345C.1
tgacatatgtgctttagccgctgattaggttaggtctctgcttctctcatccatccatccatccatccatccatcccctgctgtgcaccgtgactccaccaccaccatcaacaagatgaaaaacaaactcttcttccttttcttgccttgccttgcttgctttgcagtaatcaggggaactgctctctcgtgcgtgtgatttctagtcagtcagtgtggacatctctaaattcatttgtgatttccttcctcatttcgttgcatcggtgtgctatgctgctccaagaaacaagacaaagaaaagaaggcgggcttgcttgcttgcttgtctgctgcacgagtcatagttggcgtcaatcacatgtacagctgcaaatgctgtgccaagaaatgaacaaaagaaatttacagcaggcccatgtgccgtccagcccgtgtgtctggcgtggccgtgcaccggctcgatccgcccctccgtctcgtcgttgcacgtgcaggtgcagcccagccgagtcgtctctctcgcctcctcctcctccccccctcaatgattgcattgggcattggcgtctcctcctcttctctccagtggcagtgcaaccaatcccccacacaccacaccactaccccacttgcccttgcccaaccccccctctccgctcctctcctctcctcatgacgaccaggccagacggcggcggtggcggtggcggcgctccggacaagcagctcgtcccggcctccaacgccaatggcaccgccctcgccgttcgcaagcctccctccaaggaccgccacagcaaggtcgacggccgcggccgccgcatccgcatgcccatcatctgcgccgcccgcgtcttccagctcacccgcgagctcggccacaagtccgacggccagaccatcgagtggctcctccgccaggccgagccctccatcatcgccgccaccggcaccggcaccaccccggcctccttctccacctcctccccttcctccctccgctccaactccacctccaactccaacgacctcctcctcccccgcgccgcccccttcatcctcggcaagcgcctccgtgccgccgacgaccacaccacttcgcccgcgcccgctcccgacgccaccgcccccacccaggccttctgggcgctcccggccagggctgacttcggccagctctggagcttcgccgccgcgccggagatgatggtcgccgccgccgccgcacccgccatgcctggggaggcgtccgccgccagggtcggcaactacctccccatggcgcagggcaacctcaaccttctcgcctccttctccggcggcccaggaggcgccggggccacggcggcgaccggccgacccgaggaggagagcgcccgctgagttactgacccaaaagaaggccatgtaagtcgtctcacttgttcctctgtttctgtctgcttgctgctctagctctttaggccttttgtccagaattcttcttcttcttcttcttcttgttgctcttgtgttcatctctggattggattagtgcttggggagaataatagtaataataagtaattgttggtaggctggtagctcagctcctctgtacgtatgccatgtatgtatgtatgtatgtatggattgtttcatgtgttaaattatccccatgaatgattgagaatgaatgaatggccaaaataagcaaggag

SEQ ID NO: 27675 - DNA, 400 bp, Oryza sativa
  unsure (1)..(400): unsure at all n locations
  Clone ID: PAT_MRT4530_32346C.1
gacccagcggccgagcacaaacagcaaaacgcgacaagagggggggagcagccancacacagccaagaagagcggggccaaccccnccccccgcacccgcgcagcgagcagcgccacggcacaggccgaggcccgcaccgaagggcaaagccagcagcagccggccaggcaaccaagcacgaacccgngcaacgagcggggggggcaacaacgcagcccgaagagccaacccggggagcagacacgcaggccacaacggaccacccgccacgcgaggcaccagcaacgccgacaggagaagaggccgccgacgcaacaagagcacagccagcgcaacagcaccacggagcaaccgaacaagcaccacgggccccccgaagccgaccagggcccccacccc

SEQ ID NO: 27676 - DNA, 516 bp, Oryza sativa
  Clone ID: PAT_MRT4530_32347C.1
aatctaacgcgcgcatgccaagtcagatcgaacgaataataattggccgcacaaaacaacattgatatgtctgaagcatcagccctgaactgacatcgcttagagcaaactgtctcataccgtactgtcttaacatgcaggaagtacacggcaacactaactaactcaagtcttcttaacgcaaatagccttgccacaagaaacgactactacttcagattaatatatctcaaaaaccaagaggcacaaacaacaggcagggccaggacacaaaccctaggcggccagcacgacggcgccggcggcggccttgatcttcttcttgttgacctatgcagatgagcttgggcttgacgatcgatggggcttatccggcagcagacccttcccgagcaccattgaagtatcccaactgcgttacgtccaaacagggtcgccttgccggtgccgccgaccatccgccggctgctcgggaagcaccatcgaccaaagccgctccacgttccccggggggaa

SEQ ID NO: 27677 - DNA, 300 bp, Oryza sativa
  Clone ID: PAT_MRT4530_32348C.1
atgacagttgtgacggttggaatggtcgggaataccctccaaccatcattggggcttcatttctaccgttcagccaaaacctagatccaacggaggcgagggaggtctggccgaaccaccaggttcggccgaacctggggctggcccaatccagcccaatttcggctggcagcctgctctgctgcttcactttgtagacttgtgaattttggcctgattcattatgtcaagtctgcgttcttggcccattcatacacaagtctggttcccgacatcgtccgattgatttatcgtatgagt

SEQ ID NO: 27678 - DNA, 900 bp, Oryza sativa
  Clone ID: PAT_MRT4530_32349C.1
atgggggactactttgtagcgctcatccattatccgctagcgcaactttcatttgcaagagcagggagtgataaatggacttggctgcctcctcacactgatttcatggattgtttgtttgaggatggcttgctttatgcactcaattcagcaggagaagtccatgcgtttgatctcagtgcccctacggtaactcaaaaggtggttctggaggatgtaaaggcatacatcgaggagaacatgtactttgctcgagctccctctggtgatttgttgcaaatttggaggtcattggccacaaatcgcgacgattattacgtggatcagacagatggagatgattcagaacatggatcagaccataagaattggattgacgattatgtggatcagacggatggagatgttctacaatttgagttagacaagtacgaggatgatttggaacatgcatcagaacatgagaattggagggctggagatggtttgaagcctgagtcagatgaggatgaggatgaggatgatttggagcccgagccaaacactgattcacttgtggtaaataccaacatgattaaagtatttaaagtggatttttctgcaaaaatgcttgtggacataaacagcttaggtaacagtgtgttgtttcttgggtataatcaaactctttgtctaaatgctgatgtatatccacagttgaagccaaatcatatctactttacagaagatgatagcttatatctatttaggtgtaagaagaaccgccgcgatactggagtcctcgacttggaaaatgataccatcgagccgatagtatctccggagctttggtccaactggccagtccctatatggcttataccgaaccccaggaagatgatttcagcatcacacaattag

SEQ ID NO: 27679 - DNA, 4600 bp, Oryza sativa
  Clone ID: PAT_MRT4530_3234C.1
atgccgccgctgttgggcgtctacgacttcaccaccggcctgcctccgtcgccgccgattggtgtttccgcctacacggctggcctattatgccgccgctgttgggcgtccacgtcttcaccgaccggcttgcctttaccgctgccgattggtgtttccgcctgcacggctggcctttatgccgccgttgttgggcgtctacgtcttcaccgaccggcttgccttcgccgctgccgactggtgtttccgcctgcacggctggcctttatgccgccgttattgggcgtctacgtcttcaccgaccggccgcctcgtccgccgccgactggtgcttccgtctgcacggctggcctttatgccgccgttgttgggcgtctacgtcttcaccgaccggcttgcctccgtcgccgccgactggtgcctccgcctgcacggctggccattatgccgccgctgttgggcgtctacgacttcaccgccggcctgcctccgtcgccgccgattggtgcctccgcctacacggctggcctattatgccgccgctgttgggcgtctacgacttcaccatcggcttgccttcgccgctgccgactggtgtttccgcctgcacggctggcctttatgccgccgttgttgggcgtctacgtcttcaccgactggcttgccttcgccgctgccgactggtgtttccgcctacacggctggcctattatgccgccgctgttgggcgtctacgacttcaccaccggcctgcctccgtcgccgccgattggtgcctccgcctacacggctggcctattatgccgccgctgttgggcgtctacgacttcaccaccggcctgcctccgtcgccgccgattggtgcctccgcctacacggctggcctattatgccgccgctgttgggcgtctacgacttcaccgccggcctgcctccgtcgccgccgattggtgcctccgcctacacggctggcctattatgccaccgctgttgggcgtctacgacttcaccgccggcctgcctccgtcgccgccgattggtgcctccgcctacacggctggcctattatgccgccgctgttgggcgtctacgacttcaccatcggcttgccttcgccgctgccgactggtgtttccgcctgcacggctggcctttatgccgccgttgttgggcgtctacgtcttcaccgactggcttgccttcgccgctgccgactggtgtttccgcctacacggctggcctattatgccgccgctgttgggcgtctacgacttcaccaccggcctgcctccgtcgccgccgattggtgcctccgcctacacggctggcctattatgccgccgctgttgggcgtctacgacttcaccaccggcctgcctccgtcgccgccgattggtgcctccgcctacacggctggcctattatgccgccgctgttgggcgtctacgacttcaccgccggcctgcctccgtcgccgccgattggtgcctccgcctacacggctggcctattatgccgccgctgttgggcgtctacgacttcaccgccggcctgcctccgtcgccgccgattggtgcctccgcctacacggctggcctattatgccgccgctgttgggcgtctacgacttcaccatcagcttgccttcgccgctgccgactggtgtttccgcctgcacggctggcctttatgccgccgttgttgggcgtctacgtcttcaccgacgggcttgcctccgtcgccgccgattggtgcctccgcctacacggctggcctattatgccgccgctgttgggcgtctacgacttcaccaccggcctgcctccgtcgccgccgattggtgcctccgcctacacggctggcctattatgccgccgctgttgggcgtctacgacttcgccgccggcctgcctccgtcgccgccgattggtgcctccgcctacacggctggcctattatgccgccgctgttgggcgtctacgacttcaccgccggcctgcctccgtcgccgccgattggtgcctccgcctacacggctggcctattgtgccgccgctgttgggcgtctacgacttcaccgccggcctgcctccgtcgccgccgattggtgcctccgcctacacggctggcctattatgccgccgctgttgggcgtctacgacttcaccatcggcctgcctccgtcgccgccgattggtgcctccgcctacacggctggcctattatgtcgccgctgttgggcgtctacgacttcaccgccggcctgcctccgtcgccgccgagtggtgcctccgcctacacggctggcctattatgccgccgctgttgggcgtctacgacttcaccaccggcctgcctccgtcgccgccgattggtgcctccgcctacacggctggcccattatgccgccgttgttgggcgtctacgacttcaccgccggcttgcctccgtcgccgccgagtggtgcctccgcctacacggctggcctattatgccgccgctgttgggcgtctacgacttcaccaccggcctgcctccgtcgccgccgactggtgtccccgcctatacggtcggttggtcacaccaccgttgatgggcatcgtcatcttcaccgccggcctgcctccgtcgccgccgactggtgcctccgcctacacggctggcctattatgccgccgctgttgggcgtcttcgctttcaccgtcgaccgccttcgtcgccgccgactggatccagatccagatatgcataaaagggattcatggctttaagcttatctcttacgctccaggaatggatcagtcagaacaccaccaccggctcgcctcgaccgccgccgactggtgttcccgcctgcacggctggcctattatgccgccgttgttgggcgtctacgtcttcaccgaccggcttgccttcgccgctgccgactggtgtttccgcctgcacggctggcctattatgccgccgttgttgggcgtctacgtcttcaccgaccggcttgcattcgccgccgccgactggtgtttccgcctgcacggctggcctattatgccgccgttgttgggcgtctacgtcttcaccgaccggcttgccttcgccgccgccgactggtgtttccgcctgcacggctggcctattatgccgccgttgttgggcgtctacgtcttcactgaccggcttgccttcgccgccgccgactggtgtttccgcctgcacggctggcctattatgccgccgttgttgggcgtctacgtcttcaccgaccggcttgcctttgccgccgccgactggtgtttccgcctgcacggctggcctttatgccgccgttgttgggcgtctacgtcttcaccgaccggcttgccttcgccgctgccgactggtgtttccgcctgcacggctggcctttatgccgccgttgttgggcgtctacgtcttcaccgaccggcttgcctcgtccgccgccgactggtgtttccgcctgcacggctggcctttatgccgccgttgttgggcgtctacgtcttcaccgaccggcttgcctttgccgccgccgactggtgtttccgcctgcacggctggcctttatgccgccgtagttgggcgtctacgtcttcaccgaccggcttgccttcgtcgccgccgactggtgtcctcgcctgcacggctggcctgttatgccgccgttgttgggcgcctacgtcttcaccgaccggcttgcctttgtcgtccccgaccgatgtcctcgcctgcacggctggcctttatgccgccgttgttgggcgtctacgtcttcaccgaccggcttgccttcgccgccgccgactggtgtttccgcctgcacggctggcctttatgccgccgttgttgggcgtctacgtcttcaccgaccggtcaccgcatccgccgctgactggtgtcaccgcctgcacggctggcctgttataacgccaactgatgctatcttcttcacggctggctacatcgctgtcactactaataggcatcagtatcttcaacacaagctgcctacgtttgccatggctgccgactggtttcttcacttccatggctacatgattctaccagtgttgattagccttatcttcttcaccgccggtcatctcgtctgctgttgactagtgccctcgcctctacgtctggtttatacagctaccactactgatggacatcatcgttttctgccgccgactcgtgttatgccgccgtcgactggtgcttttatcttcacaactgcgcgtcttcactaccagtttgcttctgttgccgccgactcgtgttcacttcatcacggcgatgcaactttgtcatcatggtagagcgacttcatatttattatcttcggcaccggcaaactctattgctgctacttcgcaagttttgctacttcaccaaccacgacgtctttgtgaacctcaacatctcggcatgcaatgtcgtgttattttactacaacaagtggctctccaacattcatgatttctacttggacatcttcaacacatatcttcaatcaagcaatgactattcgacgacaagaagctacagttctcgactctatgttcagttgtttcccaac

SEQ ID NO: 27680 - DNA, 184 bp, Oryza sativa
  Clone ID: PAT_MRT4530_32350C.1
ggttggatgaccacatgatggacacccacagtcatgccctgcctggtgtgcatgagagtgcaaagccaaggatctatgtggcctgcgcccttggtgagggaaacgagggtggaaactggccttgccatgtgcaagcccacgtgttggtcgtgcagtgtttgatctaccctgagctaaacccagg

SEQ ID NO: 27681 - DNA, 282 bp, Oryza sativa
  Clone ID: PAT_MRT4530_32351C.1
atgacggttgtcatggttggaatggtcggtaataccctccaatcgtcattggggcttcatctccaccgtccagccaaaacctggatccaacggaggcgagggaggttcggccgaacctggggctggcccaatccagcccaatttcggttggcggcctcctctgctgcttcacttcgtagacttgtgaattttggcctgattcattgtgtcaagtctgcgttcttggcccatccatacacaagtctggttctcgacatcgtccgattgatttatcgtctgagt

SEQ ID NO: 27682 - DNA, 300 bp, Oryza sativa
  Clone ID: PAT_MRT4530_32352C.1
atgacggttgtgacggttggaatggtcggtaataccctccaaccgtcattggggcttcatctcaaccgtccagccaaaacctggatccaacagaggcgagggaggttcgacagaatcaccaggttcgaccgaacctggtgctggcccaatccagcccaatttcggctggcggcctcctctgctgcttcacttcgtagacttgtgaattttggcctgattcttcgtgtcaagtctgtgttcttggcccattcatacacaagtctggttctcgacatcgtccgattgatttattgtctgagt

SEQ ID NO: 27683 - DNA, 291 bp, Oryza sativa
  Clone ID: PAT_MRT4530_32353C.1
atgtgggaagtcaccgtcgccaccggatctggctgtgggatgccgccaacaccattggatctgcccgcgggaagccgcacgacaccaccagatccgcctgtggaagccacgggaggacgccatcactcgcgatgggggaagggggctgtcaccgcttctgctcgtgctgagggagggcgccgccaccgtcgttcgcggtcgggccgcataactgctgggccgcgcaagcttaatgggccgagggcaggccagtgggtccaacataacacagtgagaggagttgagggacgc

SEQ ID NO: 27684 - DNA, 1101 bp, Oryza sativa
  Clone ID: PAT_MRT4530_32354C.1
atggcttcttctaagcctagttactacctaagccttctcttctccatcgcttgcctcctctcgctgctcccactctcggcggcgaacccgtcgccgtcgccgccgccgccatgcgagaagtccgacaaggagatgaggttcttgttctcgcggtggatggcccagtacgggaaggcgtactcgtggccgatcgagcacgagaagcggtaccagatatggaaggacaactccaacttcatcggctcgttccggagcgagacggagatctcctccggcgtcggcgcgttcgcgccgcagaccgtcacggactccttcgtcggcatgaacaggttcggcgacctcaccccgggcgagttcgccgagcagttcaccgggttcaacgccaccggcgggctgctccacgccgccccgccgccgtgcccgatcccgcccgactcgtggctgccgtgctgcgtcgactggcgctccagcggcgccgtcaccggcgtcaagttccagcgctcctgcgcgtcgtgctgggcgttcgcggcggcggcggccatcgaggggctgaacaagatcaggaccggcgagctggtgtcgctgtcggagcaggtgatggtggactgcgacaccgggagcagcggctgcagcggcggccgggccgacacggcgctcggcctggtggccgcccgcggcggcgtcgcgtcggaggaggagtacccgtacaccggcgtcaggggcggctgcgacgtggggaagctgctgtccggccactcggcgtcgctgtcggggttccgcgccgtgccgcccaacgacgagcggcagctggcgctggcggtggcgcggcagccggtgacggcgtacatcgacgccggggcgcgcgagttcatgttctacaagggcggcgtgtaccgggggccctgctccgccgagagggtgaaccacgccgtcgccatcgtcggctactgcgagggcttcggcggcgacaagtactggatcgccaagaactcgtggggcagcgactggggcgagcagggctacgtctacctcgccaaggacgtgtggtggccgcagggcacctgcggcctcgccacctcgcccttctacccgacggcctga

SEQ ID NO: 27685 - DNA, 1613 bp, Oryza sativa
  Clone ID: PAT_MRT4530_32355C.1
ccgctttcagaactacgccctccccggactccgcctaccaccattttccttcaactttgcgggtaaccagaggcgaagagttttcgtgcaccgacttaccggaacgtaatcgcctattcttcccctactttgtggactttttggttgtacgtgtttacctagatgtcacggcctggcgcggcggaggagtatgctcatatttgctcgctgacatatatttctaatctattgagatgctctggtcgctcagtattccacatagagggtattatacgtacctgcatcctcagtacaaccactatatcaagtcataagattttcatgctttgtaaacgggcatcttgaggtcaaatcattttaattctagtaagtatccagattcattaacatatatatgaatgtgggcaatgctagaaagtcttataatatgagaaggaggaagtatctagatgtaatcaaacggtcacaaaaacaacaagaaaaaatctgtctcctcatagcgtccatgtctgcttgaagatagctatattccactggtagctttctgatatttctgacttcacctcagccacgcgcgttggttttggagcagtctcagatcttctccggttactacttattatcacaggcagtagcttcaggcaatgacaaggctgatgctgcctcaaaatgtgtcacatctccagcatggattctcttctgcaggttctccaagcttgcgacacgccgcacggacggtgacctcaaggccattgctgcacttggcacaggaattgcttcatctgggaggctacagtttgtccagtcgtcttcgacgagagcagcagcagcagcagcagaagctgcgtctgatacacctgaagaaacgggcatgctgcttgcaggcatttcagatgtagtgaacaattgaagtcctattccagttactctcctcaccgcttcttcagctatattcacctttctcctcatagcgttcatgtcatcttgaagattgccatattctgtggtagattgcttatatttctgagtcatgtcagacaagcgcttttgcagagatgcattctcagatcttaactgggaaacctgtgattctagatcgtttaggtgagcttgcttcctttttcttgacctcctggctgattcccgatttgacagcattctccttgtccgctttgcattaacggggtccgtatcttcctcaagatcgccatcatcatctgactgttcctttgatgtaccactattagctggtttaccttgatcgtcatcttcatgtatggcatttgagtttgttactctggttgatccatagccattaaaagaatcttgagaaaccaattgtgaagtgtctgaggcttgtaaattgaggtagcccaaagaagattcttgcagtttagcttccatcgatttagccacggccgcgcagtacaggtcgagcttcgtcttcagcaccgccgcgtaggcgcccggatcgccgccgccgccgccgccgccgacaccggcgccgccgcgcttcattctcgcaaagaaaaaaagttgcctcctttttcagagaggagtagatttttttcagagaaaactgagcaaccttgcagcccgggggatccactagt

SEQ ID NO: 27686 - DNA, 267 bp, Oryza sativa
  Clone ID: PAT_MRT4530_32356C.1
gttgtggattgatcgaacatattgcaagaggtaaaagggctatgataactcatgaacgaactattttaaaacatttcaagctctaaaccaacttaggcggtgagagcagctaacttggcagcagaagaaaacttggacctcctgtttgccaagctctcgctccggcaaaacatatgctccttgagcctttgggcaagaagcttctggtactcaacaacctacaacttattcttggcgaaacaatttttttggacagagattctggca

SEQ ID NO: 27687 - DNA, 752 bp, Oryza sativa
  Clone ID: PAT_MRT4530_32357C.1
aaaaaaggggggggggggggcaaaaaaaaaacaaaacccttttccaagaaaaaggggtaaaagggaacccccccaaccggaaaaaaccggggggggggggccaaaaacccccaaaatttttttttttaaacccgcccgggggaccccagggggaagggggttgaaaaaccccccccctccctgggggggggggggggaaacaaaacccggaaagggggaaatgggcccttggtggcccttgggaccccaaaaaagaaaaattgggcctttaaacccccacacccccggtttaaaaaaaaacgggtcaaccggggggccctattccgggccacgggggacccccaaaaaaacctgggcccccccctgaaccccaagggggaaaacccggggggccctaagttccccccaaaaaaaaacccaaaaggcctttaaccccccctttaaaaaaaaaggggggccccacatagccccccttttgggggggggggccccccggggatccttgagggggaacaccccccgccggggcaagggccaaagggccccgggttccaccccctttcggggggagaagggggccccccttcttgggggaaaaagaaacccccctttttggccacacgggggcctaaagtcggggggaaccccccccccccctcttctacggaaagagaaaatttttgggggcccccggggccccccaaataaaatcaccccgtcccccccggggggggggaaccccggaccccccc

SEQ ID NO: 27688 - DNA, 200 bp, Oryza sativa
  unsure (1)..(200): unsure at all n locations
  Clone ID: PAT_MRT4530_32358C.1
agacatcacacacgccggactctccccttcnntctgtctcgctacttcgatcgctcgctttatcccccccgantaaaggcgagangncgcagcgacgtncgaagaagagggcagatagaaatngcngcggngagntcctnttcacctccgagtncntgaacgagggncacccgnacangntgtncggccaggtgtcggtc

SEQ ID NO: 27689 - DNA, 506 bp, Oryza sativa
  Clone ID: PAT_MRT4530_32359C.1
gggaaagagcaaatttaccatttcacccctcccccgagcaaaccaaaccaaatcgcaaccgaaacgaacagagggagacatccatggcggacgaggaggaggaggggggtggcacctggtggccgaagcaaaccccaaggatgcccttgccggcggctttttggcggcggatgaggtcaacaagggcaacaatccacgggtcgtcggggtgggcgtcgttgcagctcccggaaataacaaacccgtcgatccccggggcctcctcctccccggggagctccccgcgcacggggcggtacacccgccaccgttcgccgtcctccgccagaagggccctgaacacctaaaagtagcccccgtacgccttcctaacgtactccgagtcctccccgcactgaagcaccgggtacaaacccccaacgcccacgccggagaccggggtcttcgccgccacggcctccgccgccgggtccaccacggggttttctagtggccccatccccatg

SEQ ID NO: 27690 - DNA, 153 bp, Oryza sativa
  Clone ID: PAT_MRT4530_3235C.1
atggcgaaaggaaggaagcaaatctcttcctcggagcaatcacccacgaggcctgaccccctcgggggagtcgggcccgagggtgacgtggccgccccccctcttcgtctccccgaggggtcggaccactcccgcttcggccccgagggctga

SEQ ID NO: 27691 - DNA, 180 bp, Oryza sativa
  Clone ID: PAT_MRT4530_32360C.1
atgaccacacggaggttggccggcgagctccgggaggcttgtccggtgtgccagggccatcaactgggtggcaggcggtcggcgtggaggggcaatgaggagcactggcaaggggacaagcaacatccgcaactctgtagatggcttaagatcgctgaaggcatcgacagtgagctttga

SEQ ID NO: 27692 - DNA, 552 bp, Oryza sativa
  Clone ID: PAT_MRT4530_32361C.1
ccgggctgcaggctcgagtttttttttttttttttttttttaagaacaaattaatggcttgctcattccgtcatgtagtacgattgtacgaacgtacaaaccggcagctaattgacaagggaaaaacatcacctacattatatacacatacataatcacgcggggacagccgtcgctaacatgaacagctggtgaacagacatagcatgatgttcaggaaagagtggttcttcagtcttcaccgatgtgtaaagaactatagctagagactaaagacaaagagagacatacatacctatacatatatactctcttcttgtccattgcaatgctagacacatgtacggacacaacatagtttacgtcgaaatcatccatctcggagacgaagctccgggcatttctgcttggtccaagaggtgatcatcgacagcgttctcgttcatccattggctgcttcctgacttgtgatcaggacccgtccaagacgatgcagcagatgcaatgatccaggcaacggtgaaatgccaatgccatgagcgttgccgcagg

SEQ ID NO: 27693 - DNA, 145 bp, Oryza sativa
  Clone ID: PAT_MRT4530_32362C.1
gcaaattgaaagccttattaattaaagactctactgtgtgatattacaccatggagcaggggtacaaatacgccagatcgttaaaagagggacagatctagcaggctccatacaggggaccgattaatttatcgaattacagaat

SEQ ID NO: 27694 - DNA, 1330 bp, Oryza sativa
  Clone ID: PAT_MRT4530_32363C.1
tgtccatgtgtagattgcaaaaatgaggagatgcttgccagaagagtagatatacttttcatctaatatgtcgaggatttataaagggctgcacatgttggaccaagcatggagagcaagaatcaatcaatattgcagatgaaacgagcggtggacaaaatcaggaagatgaagctgaactccattgggcgacagaatggttgatgtcaataacttctctggaagcaatgttgcgtgatggtgaggagccagattacgacaagaaagatttcatgaagttcgccaggttggtcagtgattgacaaacacctctatacgctagatgcaaggcaaaacacatgagtagtggatggaagtttgttgaaggacctacttccagaggagaacacattacctaagacgaaaaatgaagcaaaatagcttttgtgtctcttagggatagaggttcatagaatttatgcttgcccaaacaactgcatattgtactataaggaatacgccgacttagagtcttgtcttgtgtgcaagacttcttgatacaagtgatagacaagttctgacgaagggggaaaaagttaaagtgggtggtccggcgaaggttgtgaggtatctacctatcatcgatcgttccaagatatctttgccaattccaagaaagtagagttagtatatttgcatgccacggattgaaggaccaatggtaagcttatgccacagattgaaagctatgtttatatacggatttgcatgaatcctttcggagatttatgcagttgtcaaagcacttagctagttcttatagcaaattataacctaccaccatagttgtgtttcaaaaggaagcgcattatattttgcttgctaatccaagtactgaaacaatctagtaatgatattgatgtattactggagcttgtaatcgatgacctagaaacgctatggtgagactgtgtacatacttgggatgtatttaattagtagggagaacttcaatctacgtaccctattattttgctccattaacgactacctgacacttggtaacctttcgggacaaactatcagacaaaataaagcttgctcggactatttggaaaatacacacagtaagtggctaaataagtcgcgaaagatagtttaaataggccatagaagtcggctcccgctacgtcactcgtatagaagaatgaacaaaaattttaacaataagagagaacttctcccaattccatcggatgtaactagagaaaaggtggtcgacatggtgaaggacatacatagaggctttgacaagaaaaggaaatgtattataagacaaaggagaaaagta

SEQ ID NO: 27695 - DNA, 1827 bp, Oryza sativa
  Clone ID: PAT_MRT4530_32364C.1
atggccgccgcgttcgacctgcctccggtgaccacgccggcgcccgccgctccaagtgacgtcctgctgccgacgcagccgcaggtgtcgggtcccgaagaattccccgctgccgccgtcaactccaacgacgacgacatgatgatggtcgacgacgtcgtcgtcgccggcggcgtcggcgggagcgggagcaccggcaaccggtggccgcgggaggagacgctggcgctcatcaggatccggtcggagatggacgccgccttccgcaacgccaccctcaaggcgcccgtctgggaggagctctccaggaggcttgcggaattggggtaccagaggagcggcaagaagtgcaaggagaagttcgagaacgtggacaagtactacaagcgcaccaaggaagggcgcaccgggcggcaagacgggaagagctaccgcttcttctcgcagctcgaggcgctccacgccgcggcgccgccgccgccgccgcagcaacggcagggcatgccggtggaggacccgcagccgctggcgatggcgtggatgatgttgcccggggcggcggacctcgggttcttgtcgatgtcgtcggagtctgagtcggacgatgagtccgacgaggaggaggaggaggaggaggcggtggcgccgggcggcggcggtcgggaggggcttggcgatgatggtgacggtgatggcgaagggggcagcagcaccaggaagctgatggccatgttcgaagggatgatgaggcaggtgacggagaagcaggacgcgatgcagcgggtgttcctggagacgctggagaagtgggaggcggagcgcaccgagcgggaggaggcgtggcggcggaaggaggtcgcccggatcaaccgcgagcgggagcagctctccaaggagcgcgccgcggcggcgtcccgcgacgccgcgctgatcgcgttcctccagcgcgtcggtggcgccggcggggagcccgtgaggctctccccttcgtccgccggcgccacccgccacgacgcggccgcggcggggctgcagctggtgcccgtgccggcgccgagagcgaaggcggaggacgcctgggcggcagcaggaggagacggcagcgggacgacggcgccgtcgcggtggcccaaggaggaggtgcaggcgctcatcgacctgcgcatggagaaggaggagcagtacaacgacatgggacccaagggcccgctgtgggaggagatcgccgccggcatgcagaggatcggctacaaccggagcgccaagcggtgtaaggagaagtgggagaacatcaacaagtacttcaagaaggtgaaggagagcaacaagcggcgccccgaggactccaagacctgcccttacttccaccagctcgacgccatctaccgcaagaagcacttcgctggcagaggcggcggcggcggcggcgtcacgatcgccgcctcccactccagcctcgccatcgtcaccgtctccgagcaggacaacccgagccagcgtgagctcgaggggaagagcagcaacgacgtcggcaacgtgcagctggcggtgcccctccttgtccacaacgccccagacaagaaggtggaaggctccgaaggcgaaccaaatgtcacagcagcagcggaggagacggacagcgacgagatgtgtggagaatacaccgacgatggcgacgacgacgacaaaatgcagtacaaaatagagttccagaagccaactgcgggcggcggcggcgacggcaacgacgcacccgtgccggcgacaactgcggcagcgacgagttcagccccaaccagcaacaccagcttccttgcggttcagtag

SEQ ID NO: 27696 - DNA, 673 bp, Oryza sativa
  unsure (1)..(673): unsure at all n locations
  Clone ID: PAT_MRT4530_32365C.1
gggctgcaggaatcggcacgaggggatttctcctactcgaataatccatgggggtttgatcatttgatgttctgatgtcatatgaattccaggttaattaatctgtgacgcgtgaagacttggatcaacgaaaacttaccagcagatcatctgctggctgagggtaagagcaagcaacgcttttctcgccatgcacccaccctaatttatttctctctaaatgaggtcctcttcattgggaaaaaaaaagtctgtcatcgaaaaaaaagagagaagaaattggtcttgtaacttagggtgtgtttagttcgtgaaaagaaaatttttgggtgttacgtcagacgtttgaccggatgtcggaaggggttttcggacattaatgaaaaaactaatttcataactcacctgaaaaccgtgagacgaatttattaagcctaattaatccgttattagcacatgtgggttactgcagcacttatggataatcatagactaattaggctcaaaggctcaaaagatccgtctcgtgatttctatgcaaactgtgcaattagtttttttatctatatttaatgctctatacatgtgtccaaagattcgatgggatgttttngggtaaaaaattttgggaactaaacaaggccttatttgggctcgatttcgaatttgactt

SEQ ID NO: 27697 - DNA, 164 bp, Oryza sativa
  Clone ID: PAT_MRT4530_32366C.1
tccccggcggccgcccccgccccgccccgtcgttgttgacccggccgctgttaacagccccgatgtgcccagctaccagccacacgtatacggccgcctcgacccgccctagctcatcccactccacaggcgtgaggatgccgcgcatgcactaccaaatgttt

SEQ ID NO: 27698 - DNA, 4908 bp, Oryza sativa
  Clone ID: PAT_MRT4530_32367C.1
atgtcatggcacagggccggtgtcctgctgctaggggctcagtcctgcctacctgtcccgggggttccggccgtaggtgggattgggtcggtactcttgtctatggctaggatgggttggaaactatgtcacgtcttccgtctgtataccgtggtgatggccggcagcatcaaccgtcgtggtctggacctgactggctttgttttggagctgcggggcatgtgcgttgtcctggggtatgcgcatggagtggactaccagggcaggcagctcccggagcaggagggtgacgatgcagagccccacgctgcttgggaggttactgcagtgatcctcactggctcacccgagaggacttcgttggcagtcaccacgggtggagattctttctccgccgcttgccagaacgccgctctcctcgccatcggcactcttcaccagcgctacccggacgagttgcagcactcgccctaccgctaccaccctcgccgcggaggagcccgcgactacgccaccttccgggatgctagctcggaggatgacgctaccatcatgcacctggcgcgcatggtggaggcgtacgacgcggctcgtatcgacttccatcagatgctgaagaaggacctagacgcagcagaggcgcagctgcatcagctcaagatcgcccagggagaggtctgtcgccccaagcgccgccgcgtctgccgcagccagaagatcaccgcccgcaagagcacctccaggcccgagcttgttcgccagtccttggcatggacctgcttcgtggagacccctcgtgccgagcccgcgcccatggctcctcaggagggggaagcctccggcgttgatggtgacgaccaggagaagtgctgctacggtgaaggcagtcaccccgaaggcagcaaccacaacaaccagggcagcccacctccacctcctcctccgcctctaccaccaccaccagacaccaacgccattctcacccaaatcctcgcccagcaggccaacatgatggctgctctcctccaccacatccaaaatccgccacaacataatgctccaccaccaccgccacaacactctaaactcgctgagttcctccgcatccgtccacctaccttctctagctccaataaccccgtggatgcgttggattggttgcatgccgtggggaaaaagttagacaccgtgcagtgcagcgatgaggagaaagctacgcagccagaggggcagcctattacttgggcccgcttcaccgccgctttccggaggacccatgtgcccgccggagtcatggcccttaagaaaagggaattccgagagttgaagcaaggcaaccgctccgtgatggagtatttgcatgagttcaacaacctggcccggtacgccccggaggatgtacgggaagatgaggaaaagcagaagaagttcttggcaggaatggatcctgagctgtccgtctgtctagtctccggggactatccggatttccaacgtctggtggacaagagcatccgcttggaagccaagcacaaggaactggagtcgcacaagcgccgcttggcgaatttccgcaatcaacagggagctaaccaaaggatccgctacaccaatccctatccagggggatcgtcctcgcagcagcaaaagcagcagcaacctcgctccgcgccccgacctcaattcgtggtgtgcgtcccacagccgcagcaacagcagagccagcaagggacccgtgcgccccgtcctcctacgccagccgcgcagtctggtcaaggccgcagggacgttcaaggtccgcagcgtctgtgcttcaactgctttgagcctgggcactttgcggataaatgcccaaagccgaggcgccagcaaggccaagcgcctccccgctccaacaacggtggtaaggatgtcattcggggtcgtgtgaaccacgtgacggccgaggacgtgctgacaactccagacgtcatcgttggtacgttcctcattcattccatccctgctaccattttgttcgactctggagcttcccactcgtttatatctgtgccattcgtggggagaaatcagttgggggtagaaaggcttaggaaccctctcctcatcaccacccctggaggggttatgacagcaaagtattatagtcctgccgtccctatagaaattcaggggattccttttccctcggatctgattcttctagacaccaagaacttggatgtgatccttgggatgaattggttggctcaattccaaggagtagtggattgtgcaagacgcactgtcactctgtaccgagggccggaacaaccggttgttttctttgcacccccaacctctgtcagtagttcagaacttcatcagataggactgtcagaaatccccatcgtcagagagttcggagacgtgtttccggaagaactacccggtatgccgcccaagcgagagattgagttctggatagatcttgctccaggaaccactcctctgtacaagcgaccctaccgtatggcagcaaatgaactggccgaagttaagaaacagttggaagagttgaaagaaagggggtacatacgtccgagtacttccccctggggtgctcctgtgatttttgtggagaagaaagacaagacgaagaggatgtgcgttgactacagagctctcaatgaagtcaccatcaaaaacaagtaccctcttccccggatcgatgatctgttcgatcagcttaaaggtgccacggtattctccaagattgatcttcgttccggatatcaccagttgcgcatccgtgaagaagatattccgaagaccgcattcaccacgcgatacggactgcatgaattcacggtgatgtcgttcggtttaaccaatgctcctgccttcttcatgaacttaatgaacaaagtgttcatggaatacttggataagtttgttgtggttttcattgatgacattctggtatactcacaatcagaggaagaccatcagcaccatctccgtctggtgttgggaaagttgcgggaacatcaattgtatgccaaacttagcaagtttgttgaagaaagaagagaaatttgtgtggagcccgcaatgcgagaaggcgttcaagaaaagctggtttcctcgccagtgttaatcttgccggatactcgcaaggacttcatggtgtattgtgacgcttcgcgccaaggattggggtgcgtgctcatgcaggaaggtcatgtggtggcctatgccttacgccagctacggcctcatgaaggcaactaccctacccatgatttggagttagccgcggtggttcatgctctaaaaatctggcggcattatctcattgggaatcgctatgaaatatatactgatcataagagtttgaaatacatcttcaaccagtcggatctgaatcttcggcagagaagatggttagagctcatcaaggattatgatgtgggaatccactatcatcccggtaaggccaacgtggtcgccgacgcgctaagtcgaaaaagccattgcaacactcttaacgtccgtggcattccacccgaacttaatcaacagatggaagccctgaacctaagcatagttggtcgcggattcttggctgcgttggaagctaagcctaccttgctcgatcaaatccgcgaggctcagaagaatgatccggacatgcgtggactcctcaagaatatgaaacagggtaaagccgctggtttcacagaggatgaacacggaaccctatggaacggaaatcgggtatgcgttccagataacagagaacttaaacagctgatacttcaggaagctcacgaaagtccttattccatccaccctggcagtacgaagatgtacttagacttgaaggagaaatactggtgggttagtatgaagcgggaaattgcagagttcgtggccctttgtgatgtgtgccaacgtgtcaaggcagagcaccaacgaccagccggacttctccaacctctccaagtaccagaatggaaatgggatgaaattgggatggatttcatcaccggacttccaaaaacccaaggtggatatgattctatatgggtagttgtggaccgattaaccaaggtagctcggtttattcctgtgaagaccacctatggagggaacaaactagccgagctctacttcgctaggatcgtgagtctccatggcgttcctaagaaaattgtatccgataggggaagccaattcacctctcacttttggaagaagctccaagaagagatggatacccgattaaatttcagcaccgcgtatcacccgcagacagatggacagaccgagcgtctaaatcagatcctagaagatatgcttcgcgcatgtgtcctagatttcgggaagacctgggataagagtctcccctatgccgagttctcctacaataacagctaccaagccagcatacaaatggcaccttatgaagcgttgtatgggcgcaaatgccggacaccgctcctgtgggacctagttggggaaaaccaagtgttcgggactgatatactgagagaagctgaagcgaaggttatcattgctcggcgcggagaagtcgcttaccagttggatctgcccgcctccttgggcaacgtgcatgatgtgttcgatgtgtcgcaactcaagaaatgtcttcgagtgccatccgagcaggccgactcagagcaaattgaagttcgcgaagacttgacctacgtggaaaggccagtgaaaatcctggacaccatggagcgcgggaccaggaaccgagtaattcgtttttgcaaggtccaatggagcaaccacgccgaggaagaagctacctgggagcgtgaagacgagctgaaggcagcccatcccgatctcttcgccagttcttccgaatctcggggtcgaaattccgtttaa

SEQ ID NO: 27699 - DNA, 3205 bp, Oryza sativa
  Clone ID: PAT_MRT4530_32368C.1
atggcggccggatcttccgcggccgagtccccctcatccggccgctctctccccctcccaacactatacaaaaactccccgtgcctccctccaccgtttccgccactcgccgctctctctccccgtcggattcgagctcgcgccgtcgccttctctctccgccgtcgccgccgagctccggtccgccgccgtcgtcgccccggacctcctcccgcttcggcatcgcctccttcggcttcgccacgtcctcgccgacctcgtccactcctccgtttcgcccgccgaccgccggaacaccgccgtcctcgtcaacccgagccgcgccgccgccttcctccgctccggtcgtcgtttccgccgtcctcgtcgacccggggtgagccgtggaccgaccctttcgcttcccccttccctcccctctctcgggcgccgctccgccgcgtcggtggtcgccggcggcgaccatcggggcgcgggcgcgccgcctcccgtcggccgtgccggcgaggtcaccttcgggcgcgccccgtggctgccatgtggggcccggccgtcagccgcccgcgcccgcgggtgcggctgacgcgtgggacccacggcgccggccggcgcaagccgcgtgctcccggtccaccgtggacccacctcggccatataaggaccggtcttcgggcctctgttgcaaagcactaccgtacttccacatgtctagtggggcaaatgaaggctacacgagctgcggcccggtagtcgagatgtcatggcacagggccggtgtcctgctgctaggggctcagtcctgcctgcctgtcccggaggttccggccgtaggtgggattgggtcgatgtacacctctgatcagagtataatctattcgaatagccgcgccctcggttatgggcaagccgagcaatgtacccaaatggccggcagcgtcacccgtcgtggtttggacatgactggcttcgtcttggagctgcggggtatgtgcgttgtcctggggtatccacatggagtggactaccaggccaggccgcttccggagcaggagggtgacgacgcagagccccacgctggttgggaggtcactgcagtgatcctcgctggctctcccgagcggacttcgctggcagtcaccgcgggtggagattccttccccgccgcttgcaaaacgccgcttttctcgccatcggcactcttcaccagcgctacccggacgagttgcagcactcgccctaccgctaccaccctcgtcgcggaggagcccgcgactacgccaccttccgggatgctagctcggaggatgacgctaccatcatgcacctggcgcgcatggtggaggcgtacgacgcggctcgtatcgacttccatcagatggtgcgccgtgggatggtcgagaacaacatgaagatcctggagctgcgtcaggagaacctgcagctcaagaaggacctagacgcggtggaggcgcagctgcatcagctcaagatcgcccagggagaggtctgccgccccaagcgtcgccgcgtctgccgcagccagaagatcaccgcccgcaagagcacctccaggcccgagcttgttcgtcagtccctggcgtggacttgcttcgtcgagacccctcgtgccgagcccgcgcccgtggttcctcaggagggggaagcctccggcgttggtagcacggaggatgcgctgttgctcaccttccgtcctggcccgtcgcagcggagaagtgctgccaccggtgatggcaaccaacctgaaggcagcaaccaccaccagggcagcccacctccacctcctcctccgcctccaccaccaccgccagataccaacgccattctcacccaaatcctcgcccagcaggccaacatgatgactgctttcctccaccacctccaaaatccgccacaacataatgctccaccaccacctccccaacactctaaactcgccgagttcctccgcatccgcccacctaccttctctagctccaacaaccccgtggatgcgttggattggttgcatgccgtgggaaaaaagctagacactgtgcagtgcagcgatgaggagaaagtcatcttcgccgcccaccagctgcaggggcccgcatctctatggtgggaccatttccaggctacgcagccagaggggcagcctattacttgggcccgtttcaccgccgctttccggaggacccatgtgcccgccggagtcgtggcccttaagaaaagagaattccgagagttgaagcaaggcaaccgctccgtgatggagtatttgcatgagttcaacaacctggcccgttacgccccggaggatgtgcgggaagatgaggagaagcaagagaagttcttggcaggaatggaccctgagctgtccgtccgtctagtctccggggactatctggatttccaacgtctggtggacaaaagcatccgcttggaagccaagcacaaggaactggagtcgcacaagcgccgcttggcgaatttccgcaatcaacagggtgctaaccaaagggtccgctacaccaatccctatccagggggatcctcctcgcagcagcaacaacagcagcagcaacctcgctccgcgcctcgacctcaattcgtggtgcgcgtcccacagccgcagcagcagcagaatcaacaagggactcgtgcgccccgtcctcctacgccaactgtgcagcctggtcaaggccgcagggacgctcaaggtccgcagcgtctgtgcttcaactgcttcgagcccgggcactttgcggataaatgcccaaagccgaggcgtcagcaaggccaagcgcctccccgctccaacaacggtgggaaggatgtcattcggggtcgggtgaaccacgtgacggccgaggacgtgctgacaactccagacgtcatcgttggtacgttcctcattcattccatccctgctaccattctgttcgactctggagcttcccactcgtttatgtctgtgccattcgtggggagaaatcagttgggggtagaaaggcttaggaaccctctgctcatcaccacccctggaggggttatgacagcaaacgtgtcaaggcagagcaccaacgaccggccggacttctccaacctctccaagtaccagaatggaaatgggatgaaattgggatggatttcatcaccggacttccaaaaacccaaggttgatatgattctatatgggtag

SEQ ID NO: 27700 - DNA, 453 bp, Oryza sativa
  Clone ID: PAT_MRT4530_32369C.1
atgaacaaggacacagccctcatataaggtatataaaaaaccgtgggcgtgggtggaaattacatcacagaatatatctggacatggttcacgaaattaatatcatttcattgtaacatataatagctaattatgcaggatgatctgtaactgctcataactttttgtttaacgcacaaccatagacgatcactaacggtggatctcccataactggtcttgtagccaaactatagcacccttttcgacctgcaatgcctctgccaaaacatcatcctagataggaggatgcgacccacacaccttattcgcaatggtcatggcaccaaggatctggcttctaatggccgcaattgctaacgagagctagtctgggttatggttaaatcggaacaggatgagccccacagggaataccaacacctcaccctcattgagcgctttggagaaaaa

SEQ ID NO: 27701 - DNA, 2778 bp, Oryza sativa
  Clone ID: PAT_MRT4530_3236C.1
atggtgagaggttctcatcctcttatcccagctggagtcggtcctcccgctctggtcaaagcaaggctcacgtttcccggtgtaataggagcccagaagtcttcacccattaaatgccctcgaatttcacccgctgccctcgaccgaactcataaagggaggcctcacggttccctggtggaggagttcattgtccgatatctggcgcgccaggtagggggcacgttcgtgctttttgaggttctttcgagcgctagcgtgattagcgtcgcgtcgccgatgcgggggaaggcgcagccttctcaggagtgccgcgccaccctaggcagggggctaggcccccaacatccccatcgggtgaggctggcggcctggtctttgtggcgagtcttcggaatatccgatgacccccaaagttttggccagcctcacggccagatctttgtggcgagtctgcggaatgttcgatggcccccaaagttccagcccaacttcaccgagatgtgcaacggcagcgttaacccctccgagtccctccagatctacacgacaatcatagaggcggtggggggtgacgaccgggtcaaggcgaacctcttccccatggccctccagggccaagtgcagggtacacttatggacatgccgcctgcctcatggccagctttggtcccgtcagctagctacggcgcccggcccggctcaactgatcgtcctttcaagtttcaacggctagctttggtcccgctggctggctacggtgcccggccggctcaactatggaaagggatcgctggctctagagtttttcagctctcacactcgtgcaaaggtagtcatccgtgtagaagggagagatattggaaggaggccaccgaaaggaaagagcaaacagaatgtgtagcgtggggccacaggctcaaaataagttcatggcctaaggtgccggctagcgagtcgccctcaggctggggcgaaaaaggcgcatgggttctagtgccagcaaaaaaagaagaagagatcgggcccacatatcatcagacttggaaagtggcgtcaaccctgaccacctggggaaggttttggtcagggctaacgccgggggctactgtcggtgatatgggccccgggggtatcagtgcactcaaccggtctgtgaccggtcgaatgactgatgggacccaggatgtcaggcgcaccatcgcgtgtgtcaagcgacgtgcagcccgacatatcccatcaaataatgatggtgagagtaggttggtcttaccaccgttcataggcgtccatgttttcaccgtccggcttgccttcgccgccgccgactggtgtttccgcctacacggctggcctattatgccgcccttgttgggcgtctacgacttcatcgccggcctacctctagcgccgccatcgactggtgtttccgccggttggttacacaacattgttgggcgtctacgttttcaccgttcggcttgccttcgccgccatcgactggtgtttccgcctacatggctagcctattatgctgccattgattgggcgtctacgacttcaccgccggcctgcctctatcgccgactactggtgtcctcgcctatacggttggttggtcacaccaccgttcataggtgtccacatcttcatcgaccggcttgccttcgtcaccgccgactcgtgtttccgcctgcacggctggcctattatgccgccgttgttgggcatctacgtcttcaccgctggcctgtctctgtctctgtcgtcgctgactggtgtctccgcctacgcgactggcctattatgccaccgttgttgagcatgaaccagatccagatatgcataatagggattcatggctttaagcttatctcctacgcttcagaaatggatcagtcagaacatcaccattggcttgttgtcgtcgccaccgactggtgtcctcgcctacatggttggttgttgttgggcgtctacgtcttcaccgaccggcttgccttcgccggcaccgactggtgtctccgcctgcacggctggcctattatgccaccgttgttgggcatctatgtcttcaccactggcttgcccttgccgccgctgactggtgtctccgcctacacggctggcctattatgtcgccgttgtcaggcgtctacgtcttcaccgaccggcttgccttcgccgttgccgactagtatctcgcctacacagctggcctattatgccgccgttgttgagcgtcgttgtcttcaccgaccggccgcctcaccagctgctgaccattgtcctcgcctatacggttggatggttacaccaccattgttgggcgtctacgtcttcaccgccggctcgtctccatcgccgctgactgctggccacgtcaacgccaccgctaataggcatcatcatcctcaacacaagctgtctatgtctgctgccgactggtttcttcacttccatggctgcatgattctgctagtgttgattggccttatcgtcttcactgccggtcgtctcgtctgctccaactggttatgccgccgaccggcgtttttatcttcacaactacgcgtcttcgctaccggttcgcttctgttgctgccgactcatgttcacttcatcacaactatgaaactttatcaccatggtggagcgactttatcttcattgtcttctgcaccggcaaactctattgctgctacttcgcaagttttgctacttcaccagccaggacgtctacaagagcttcgacatctcggcatgcgtcaccacata

SEQ ID NO: 27702 - DNA, 2164 bp, Oryza sativa
  unsure (1)..(2164): unsure at all n locations
  Clone ID: PAT_MRT4530_32370C.1
ttccgccgtgttgccgccgccgccatgggctcctgcctctcctccgacctgcctccccgcgccggcgccggcgcgggagcgtcacccgggtggccgcagcggtggcggaggaggaggcagcggggggtggagcggggcggggctgtttccggcggcggcggcggcgtcttctccatcggcgtcggcggcaagaagctgcaccacggcggcggaggaggaggggagatgacggaggaggagctcgcgaaggtcgaggggagggtgtgcgtcaacggcgcgagcgcggcggcgtgcctgcacacgcagcaggggcggaagggcaccaaccaggacgccatggtcgtgtgggagaactttaatacaagtgatagtgtcttctgtggtgtgtttgatggtcatggtccatatggtcattttgttgccaagaaggtcagagattctcttcctgtcaaaatacgcacactatggaaaaccagtgccaacgaggacactagttcccaccaaaatggaagcatttctggaagtgttaattcagaagagtcacctgttgttgatgatgaatggggtgaatatgctgatgacagcgagaagcttcctgagatgtttcttccacttaagcagtcttattttaaggctttcaaattgatggacaaggaactcaaaatgcaccctacagttgattgcttttgcagtggatcaacagcagtcacgttagtaaaacagggattggatcttgtggttgggaaccttggggactcgagagcaataatggggacacgagatgctgccaataatctaactgctgtacaactcacagttgatttgaagcctaaccttccaagggaagctgcgaggatccagcagtgtaggggaagagtttttgctcttcaggatgaaccagaagttgccagagtatggttgccaaataatgactctcctggattggcaatggcaagagcttttggagacttctgccttaaagattatggtttaatatctgttccacagatatcctatcgtcgtcttactgaaaaggatgagttcataatactggccactgatggggtttgggacgtcctctcaaacaaggaggctgttgacatagtagccgcagctccatctcgtgcaacggctgccagggctcttgtcgactgtgctgtcagatcatggagattgaagttcccaacatccaagagcgatgactgcgctgttgtgtgcctattcttagaccatgcaaagtcacctgacttgattcaagagaacgagagcgaggaagaaactacagaggatgttgcaatcccagacaccgttgctaaggttgaccaagacattgcacaaggagatgcacatatctccagtgaagagcaaatcaccgagccagcattgcagcactcctacacattaagggatgttgatgagattgtaccggtagaggagcctccagtctcaaaggaacctgaaagatgtggatctgcccgcagccttgctgattgtatatccacaaacgaggaggaggaatggtcagcactcgaaggtgtgacgcgggtcaattccctcttgaaccttcccagaatactttcaggcgagaagagatcaaccagctggaggaagcggcgatgaacgattcccccgcttaagtcaggctgagagcgcatttcagtcgaaaccggcaatttcagccaggagtgtgcaaatctcttcggtccctgggattttattcgagccgatggttagccttcgtcacccatatggttgcataccctgttgactccgttgcggtgcaccccacgttgtggtgtcttaatgaccctggtgacaactggccgggatgctactgcgtgttttgctgtgccctgttgtggtgtgctgctgtgtcagggaggtgtttgcatggcttggggcttgctgtgtgactgtgttgttgtttgtggtaatgaaggaaagttntgttgttgctgtggaggaacgcccttgctggtgaaaaatgcatggtgaatgacctgcctgccctgtgctgcctgctgcttgggtgggatgggatggttgcaagttgcacctgctgtttctatgctggaacaagaactcaattctatgangtattagctcatgaattttcagctgcaagtataaaagcttcctaatttnccaaaaaaaaaaaaaaaaa

SEQ ID NO: 27703 - DNA, 1341 bp, Oryza sativa
  Clone ID: PAT_MRT4530_32371C.1
atgatgaccgctttcctccaccacctccaaaatccgccacaacagaatgctccaccaccacctccccaacactctaaactcgccgagttcctccgcatccgcccacccaccttctctagctccaacaatcccgtggatgcgttggattggttgcatgccgtggggaagaagctggacactgtgcagtgcagtgatgaagagaaagtcatcttcgccgcccatcagctgcagggacccgcatctctatggtgggaccacttccaggctacgcagccagagggacagccgattacttgggctcgcttcaccgccgctttccggagaacccatgtgcccgccggagtcgtggctctcaagaagagggaattccgagagttgaagcaaggcaaccgctccgtgatggagtatttgcatgagttcaacaatctggcccgttacgctccggaggatgtgcgggaagatgaggagaagcaagagaagttcctggcaggaatggaccccgagctgtccgtccgtctagtctctggggactatccggatttccaacgtctggtggacaagagcatccgcttggaggccaagcacaaggagctggagtcgcacaagcgccgcttggcgaacttccgcaatcagcagggtgctaaccagagggtccgctacaccaatccctatccagggggatcctcctcgcagcagcaacaacagcagcagcaacctcgttccgcgcctcgacctcaattcgtggtgcgcgtcccacagccgcagcagcaacagaatcaacaagggactcgtgcgccccgtcctcctacgccagctgtgcagcccgttcaaggccgcagggacgctcaaggtcagcagcgtctatgcttcaactgcttcgagcccgggcactttgcggataaatgcccgaagccaaggcgtcagcaaggccaagcgcctccccgctccaacaacggagggaaggatgtcattcggggccgtgtgaatcacgtgacggccgaggacgtgctgacaactccagacgtcatcgttgagaagaaagacaagacgaagaggatgtgcgttgactacagagctctcaatgaagtcaccatcaaaaacaagtaccctcttcctcggatcgatgatctgttcgatcagcttaaaggtgccactgtattctccaagattgatcttcgttccgggtaccaccaattacgtatccgcgaggaagatattccgaagaccgcattcaccacgcgatacgggctgtatgaattcacgaggaagaccatcaacaccatctccgtctggtgttgggaaagttgcgggaacatcaattgtatgccaagcttagcaagt

SEQ ID NO: 27704 - DNA, 366 bp, Oryza sativa
  Clone ID: PAT_MRT4530_32372C.1
tacactcttcattttcttggtgtgctgccaaattccgatctatggagtgcagagtgccaagtcatcggaccctccctactggatgcgtgccattttggcctccaaccagggtactaccatggagctagcgatcagtcccactgttacgcctggtctgatcatgcagagtattgcccgttctagaatcatctagggggactacaatgccaaggaaagacgcgcacttttctctggcgcccaaaagctgatcggccttccgatcaccacctgtgaagctataacttatagctgtagtgtaatgctcggtgacctaggatctatcggcgctgctaatgctgttatgatcattgaccaagtcttctgcgc

SEQ ID NO: 27705 - DNA, 3735 bp, Oryza sativa
  Clone ID: PAT_MRT4530_32373C.1
atggttatgccgatggtgacgaccaggagaagtgctgccaccggtgatggcaaccaacccgaaggcagcaaccaccaccaccagggcagcccacctccacctccaccaccaccaccagacaccaacgccattctcacccaaatcctcgcccagcaggccaacatgatgactgctttcctccaccacctccaaaatccgccacaacataatgctccaccaccacctccccaacactctaaactcgccgagttcctccgcatccgcccacctaccttctctagctccaacaaccccgtggatgcgttggattggttgcatgtcgtggggaaaaagctagacactgtgcagtgcagcgatgaggagaaagtcatcttcgccgcccaccagctgcaggggcccgcatctttatggtgggaccatttccaggctacgcagccagaggggcaacctattacttgggctcgcttcaccgccgctttccggagaacccatgtgcccgccggagtcatggcccttaagaaaagggaattccgagagttgaagcaaggcaaccgctccgtgatggagtatttgcatgagttcaacaacctggcccgttacgccccggaggatgtgcgggaagatgaggagaagcaagagaagttcttggcaggaatggaccctgagctgtccgtccgtctagtctccggggactatccggatttccaacgtctggtggacaagagcatccgcttggaagccaagcacaaggaactggagtcgcacaagcgccgcttggcaaatttccgcaatcaacagggtgctaaccaaagggtccgctacaccaatccctatccagggggatcctcctcgcagcagcaacaacagcagcagcaacctcgctccgcgcctcgacctcaattcgtggtgcgcgtcccacagccgcagcagcagcagaatcaacaagggactcgtgcgccccgtcctcctacgccaactgtgcagcctggtcaaggccgcagggacgctcaaggtccgcagcgtctgtgcttcaactgcttcgagcccgggcactttgcggataaatgcccaaagccgaggcgtcagcaaggccaagcgcctccccgctccaacaacggtgggaaggatgtcattcggggtcgggtgaaccacgtgacggccgaggacgtgctgacaactccagacgtcatcgttggtacgttcctcattcattccatccctgctaccattctgttcgactctggagcttcccactcgtttatatctgtgccattcgtggggagaaatcagttgggggtagaaaggcttaggaaccctctgctcatcaccacccctggaggggttatgacagcaaagtattatagccctgccgtccccatagaaattcaggggattccttttccctcggatctgattctgctagacaccaagaacttggatataggactgttagaaatccccatcgtcagagagttcggagacgtgtttccggaagaactacccgaggaagaccatcagcaccatctccgtctggtattgggaaagttgcgggaacatcaattgtatgccaaacttagcaagtgtgagttctggttgtccgaagtcaaattcttagggcacgtgatatctgctaaaggagttgctgtggaccccgaaacagtgaccgccgtcactgattggaagcaacccaagacagtcactcaagtccgcagtttcttaggtttggcaggatactaccggaggttcatcgagaacttctccaaaatcgctcgacccatgacacagttgttgaagaaagaagagaaatttgtgtggaggccgcaatgcgagaaggcgttcaaaactctcaaagaaaggctggatggtcatgtggtggcctatgcctcacgccagctacggcctcatgaaggcaactaccctacccatgatttggagttagctgcggtggttcatgctctaaaaatctggcggcactatctcattgggaatcgctgtgaaatatatactgatcataagagtttgaaatacatcttcactcagtcggacctgaatcttcggcaaaggagatggttagaactcatcaaggattacgatgtgggaattcactatcatcctggtaaggccaacgtggtcgctgacgccctaagtcgaaagagccattgcaacactcttaacgtccgcggcattccacccgaacttaatcaacagatggaagccctgaacctaagcatagttggtcgcggattcttggctgcgttggaagccaagcctaccttgctcgatcgaatccgcgaggctcagaagaacgatccggacatgcatggactcctcaagaatatgaaacagggtaaagccgctggtttcacagaggatgaacacggaaccctatggaacggaaatcgagtatgcgttccagataacagagaacttaaacagctgatacttcaggaagcccacgaaagtccttattccatccaccctggcagtacgaagatgtacttagacttgaaggagaaatactggtgggttagtatgaagcgggaaattgcagagttcgtggccctttgtgatgtgtgccagcgtgtcaaggcagagcaccaacgaccggccggacttctccaacctctccaagtacctgaatggaaatgggatgaaattgggatggattttatcaccggacttccaaagacccaaggtggatatgattctatatgggtagtggtggatcgattaaccaaggtagctcgattcattcctgtgaagaccacctatggagggaacaaactagccgagctctacttcgctaggatcgtgagtctccatggcgttcccaagaaaatcgtatctgataggggaagccaattcacctctcacttttggaagaagctccaagaagagctgggtacccgattaaacttcagcaccgcataccacccgcagacagatgggcagaccgagcgtctaaatcagatcctagaagatatgcttcgcgcatgtgtcctggatttcgggaagacctgggataagagtctcccctatgccgagttctcctacaataacagctatcaagccagcatacaaatggcaccttatgaagcgttgtatgggcgcaaatgccggacaccgctcttgtgggatcaagttggggaaagccaagtgttcgggactgatatcttgagagaagctgaagctaaagtcagaaccattcgggataatctaaaggtggcacagtcccggcagaaaagttatgcagataaccgtcgccgtaacctggaattcgcagtggacgattttgtgtaccttcgggtcacgccattgcggggtgtacacaggtttcagacaaaagggaagctcgcacctcggtatgtgggtcctttccgtatcgttgcccgacgcggagaagtcgcttaccaattggagctgcccgcctccttgggcaacgtgcatgatgtgttccatgtgtcgcaactcaagaaatgccttcgagtgccatccgagcaggccgactcagagcaaattgaagttcgcgaagacttgacctacgtggagaggccagtgaaaatcctggacaccatggagcgcaggaccaggaaccgggtaatccgtttttgcaaggtccagtggagcaaccacgccgaagaagaagctacctgggagcgtgaaaacgagctgaaggcagcccatcctgatctcttcgccagttcttccgaatctcggggtcgagattccgtttaa

SEQ ID NO: 27706 - DNA, 7548 bp, Oryza sativa
  Clone ID: PAT_MRT4530_32374C.1
atggcaggtccagaggataaagatgaggagggtgcatctcattccccacgcaccaaaggcatcatccaatactttacaaggcaagtgaagcagcacacagaaggacttgatacagatttgcaggtgacaaatgagaagattggacaattggagtccacgcagatctccaccaacactaagcttacagggttggagacagcggtcgcccgcattgacactagccttgctgctcttgtgaggcattttgatgctctcaatgctggaggcaatggtgggggtaatgacgatgacattgacggagagtacgtcgaggataatttagaggatgaatatattgctgacactgaacaagatgatcgagatgctcaagatcgtcgacggctacacaacaatcgacgaggtatgggtggtcgccgccgacgcgaggtacgcaacaatgatgatgctttttctaaaattaaatttaagattcctccttttgatggaaaatatgatcatgatgcgtacctctcttgggagattgctgttgaccaaaaatttgcatgccatgagtttcctgagaacactagagttagagctgctacgagtgagttcaccgattttgcttcggtttggtggatagaacatggcaagaaaaatcctaataacatgccacaaacttgggatgctttgaaacgggtcatgcgggctagatttgttccttcttactatgcacgtgacttgctgaatagattgcaacaattgagacagggtgcgaaaagtgtagaggaatattatcaggagttacaaatttgcttgcttcgttgtaaattagaggaaactgaggacgctgccatggctagatttttgggtgggttaaaccgcgagatttatgacatcgtagactataaagattacactaatatgacccgattgtttcatcttgcttgtaaggctgaaagggaagtgcaaggacgacgtgctagtgccaaggctaatttttctgcaggtaaaacttcatcatggcagacacgcaccactcctccggccggccgtactgcttctccatcttccacacccacaaccagtcgagcagcacctcctacatctagtgacaagtcagcgacaaaggccgctcagccagcaccgagtgcttcttcaatggcatccacaggccgaatgagagatgttcagtgccaccgttgcaagggcttttggcatgtgcagcgtgactgccctagcaatgatttcgatgatgatacacttgctttgcttgcggctgaccttgcagataatgagccaccggaagagcacattagggctgcatttgcggatcactatgagagcctcattgtgcagcgtgtccttagcgcacaaatggagaaggcggagcaaaatcagcgacacacgttgttccaaacaaagtgtgtcgtcaaagagcgttgttgtcgcatgatcattgatggaggtagctgcaacaacttggctagcagcgagatggtggagaagcttgcacttagcaccaaaccgcacccacatccatactacatccaatggctgaacaacagtggtaaggcgaaggtaacaaaactggtgcacattaattttgcaattggaaattaccatgatgttgttgaatgtgatgttgtgcccatgcaagtatgtaatattctgctaggtagaccatggcaatttgatagggattctatgcatcatggtaggtccaaccagtactcttttctgtaccatgataagaaaattgtgttgcatcccatgtctcctgaagatattttgcgtgatgatgttgctaaggctgccaaatccaaatgtgagagtgataaaaaagcccaatctgatggcaagaaacctgagacaatcaatttgaaacccaaatgcttacttgctactaaatctgatattaatgagttgattgcatcaccttcagttgcctatgctttggagtactctgatgtgtttcccaaggaagtgccaccggggctgccaccggtgcgcggcattgagcatcaaatcgacttgatcccaggtgcttccctaccgaaccgtgcgccataccgaaccaaccctgaggaaaccaaggagattcagcgtcaagttcatgagttgcttgataaaggagctattaataacattaccattcgatatcgtcatcctattcctaggttagatgatatgcttgatgaattgagtggctctattgtgttctccaaagctgatttgcgtagtggttaccaccagattcgtatgaagttgggtgatgaatggaaaacagcatttaaaacgaagtttgggttgtatgagtggttagtgatgccttttggtttaactaatgcacccagcactttcatgaggttgatgaatgaggttttgcgtcctttcattggaaaatttgtggtggtctactttgatgatatcttgatttacagcaagtctatgggtgaacattttaatcatttacgtgctgtttttaatgctcttcgtgatgcacgtttatttggtaaccttgagaagtgcaccttttgcacagatcgagtttcttttcttggctatgttgtaactccgcaggggattgaggttgatcaagccaaggttgaggcaattcagagttggccgactcctaaaacggtctcacaagtgcggagctttctaggactcgcggggttctatcgccgctttgtgcaggatttcagcaccattgctgcaccattgaatgcgcttacaaagaagggagtgcctttcacttggggcacatcacaagagaacgccttccacatgttgaaagataagttgacccatgcacctctcctccaacttcccgattttaataagacttttgaacttgaatgtgatgctagtgggattggattgggtggtgttttgctacaagaaggaaaacctgttgcatattttagtgaaaagttgagtgggcttgttctgaattattctacttatgataaggaattgtatgctcttgtgcgaactttagaaacatggcagcattatttgtggcccaaggaatttgtcatacattctgatcatgagtctttgaagcatattcgtagtcaagggaaattgaaccgtagacatgctaaatgggttgaatttattgaatcttttccttatgttatcaaacacaagaaagggaaggagaacatcattgctgatgctttgtctaggagatacactttgttgacacaacttgactacaagatttttggcctggaaacaatcaaagaccatatgcgcatgatgctgattttaatgatgtgttgctgcattgaagcgcatggaggcggtttgatgggacattttggtgccaagaagacacatgacatccttgctagtcatttcttttggccacagatgcgaagagatgttggcagggctgttttgaagaaaaatatcaagatgtgggaagaatgcttgcctcatattgaatttgcttataatcgttccttgcattctactacaaaaatgtgcccatttcagattgtgtatggtttgttgcctcgtgctccaattgatttgatgcctttaccatcttctgaaaaactgaattttgatgctaagcaacgtgctgagttgatgttaaaactgcatgagacaactaaagaaaacatagagcgcatgaatgctaagtataagtttgctggtgacaaaggtagaagggaattgaattttgaacctggagatttggtttggttgcatttgcgaaaagaacgatttgctgatttgagaaagtctaaattgatgcctagagctgatggaccatttaaagtgttagcaaagattaatgagaatgcatataagattgatttgcctgcagatttcggggttagtcccacatttaacgttgcagatttgaagccgtatttgggagaagaagatgagcttgagtcgaggacgactcaaatgcaagaaggggaggatgatgaggacatcaacaccatcgatacatccacgtccccccatatacagcatgatggtcctattacccgcgctcgtgcacgtcaactaaattatcaggacgagtgccctcgtggccgggttgacgcgcaccacaagttcgcggcgaccattggagacgggggatcgtcatcgcagcagcaacagcagcaacaacctcgctccgcgccccgacctcaattcgtggtgcgcgtcccacagccgcagcaacagcagagtcaacaagggactcgtgcgccccgtcctcctatgccagccatgcagcctggtcaaggccgcagggacgttcaaggtccgcagtgtctgtgcttcaactgcttcgagcccgggcactttgcggataaatgcccgaagccgaggcgccagcaaggccaagcgcctccccgctccaacaacggtggtaaggatgtcattcggggtcgtgtgaaccacgtgacggccgaggacgtgctgacaactccagacgtcatcattggtacgttcctcattcattccatccctgctaccattttgttcgactctggagcttcccactcgtttatatcggtgccattcgtggggagaaatcagttgggggtagaaaggcttaggaaccctctgctcatcaccacccctggaggggttatgacagcaaagaattatagccctgctgtccctatagaaattcaggggattccttttccctcggatctgattcttctagacaccaagaacttggatgtgatccttgggatgaattggttggctcaattccaaggagtagtggattgtgcaagacgcactgtcactctgtaccgagggccggaacaaccggttgttttctttgcacccccaacctctgtcagtagttcagaacttcatcagataggacagtcagaaatccccatcgtcagagagttcggagacgtgtttccggaagaactacccggtatgccgcccaagcgagagattgagttccggatagatcttgctccaggaaccactcctctgtacaagcgaccctaccatatggcagcaaatgaactggccgaagttaagaaacagttggaagagttgaaagaaaaggggtatatacgtccgagtacttccccctggggtgctcctgtgatttttgtggagaagaaagacaagacgaagaggatgtgcgttgactacagagctctcaatgaagtcaccatcaaaaacaagtaccctcttccccggatcgatgatctgttcgatcagcttaaaggtgccacggtattctccaagattgatcttcgttccggatatcaccagttgcgcatccgtgaaaaagatattccgaagactgcattcaccacgcgatacggactgtatgaattcaccatgatgtcattcgaggaagaccatcagcaccatctccgtctggtgttggggaagttgcgggaacatcaattgtatgccaaacttagcaagtgtgagttctggttgtccgaagtcaaattcttagggcacgtgatatctgctaaaggagttgctgtggaccccgaaacagtgaccgccgtcactgattggaagcaacccaagacagtcactcaaattcgcagtttcttaggtttggcaggatactaccggaggtttatcgagaacttctccaaaatcgctcgacccatgacacagttgttgaagaaagaagagaaatttgtgtggagcccgcaatgcgagaaggcgttccaaactctcaaagaaaagctggtttcctcgccagtgttaatcttgccggatactcgcaaggacttcatggtgtattgtgacgcttcgcgccaaggattggggtgcgtgctcatgcaggacggtcatgtggtggcctatgcctcacgccagctatggcctcatgaaggcaactaccctacccatgatttggagttagccgcggtggttcatgctctaaaaatctggcggcactatctcattgggaatcgctgtgaaatatatactgatcataagagtttgaaatacatcttcacccagtcggatctgaatcttcggcagaggagatggctagaactcatcaaggattatgatgtgggaattcactatcatcctggtaaggccaacgtggtcgccgacgctctaagtcaaaaaagccattgcaacactcttaacgtccgtggcattccacccgaacttaaccaacagatggaagccctgaatctaagcatagtgggtcgtggattcttggctgcgttggaagccaagcccaccttgctcgatcaaatccgcgaggctcagaagaacgacccggacatgcatggactcctcaagaatatgaaacagggtaaagccgctggtttcacagaggatgaacacggaaccctatggaacggaaatcgggtatgcgttccagataacagagaacttaaacaactgattcttcaggaaactcacgaaagtccttattccatccaccctggcagtacgaagatgtacttagacttgaaggagaaatactggtgggttagtatgaagcgggaaattgcagagttcgtggccctttgtgatgtgtgccagcgtgtcaaggcagagcaccaacgactggccggacttctccaacctctccaagtaccagaatggaaatgggatgaaattgggatggatttcatcaccggacttccaaaaacccaaggtggatatgattctatatgggtagttgtggatcgattaaccaaggtagctcgatttattcctgtgaagaccacctatggagggaacaaactagccgagctctacttcgctaggatcgtgagtctccatggcgttcccaagaaaatcgtatctgataggggaagccaattcacctctcacttttggaagaagctccaagaagagctggatttcgggaagacctgggataagagtctcccctatgccgagttctcctacaataacagctaccaagccagtatacaaatggcaccttatgaagcgttgtatgggcgcaaatgccggacaccgctcttgtgggaccaagttggggaaagtcaagtgttcgggactgatatcctgagagaagctgaagcgaaggtcagaaccattcgggataatctaaaggtggcacagtcccggcagaaaagttatgcagataaccgtcgccgtaacctggaattcgcagtggacgattttgtgtaccttcgagtcacgccattgcgaggtgtacacaggtttcagacaaaagggaagctcgcacctcggtttgtgggtcctttcagtatcattacccgacgcggagaagtcgcttaccagttggagctgtccgcctccttgggcaacgtgcatgatgtgttccatgtgtcacaactcaagaaatgtcttcgggtgccgtccgagcagaccgactcagagcaaattgaagttcgcgaagacttgacctacgtggagaggccagtgaaaatcctggacaccatggagcgcaggaccaggaaccgggtaatccgtttttgcaaggtccaatggagcaaccacgccgaggaagaagctacctgggagcgtgaagacgagctgaaggcagcccatcccgatctcttcgccagtttttccgaatctcggggtcgagattccgtttaa

SEQ ID NO: 27707 - DNA, 476 bp, Oryza sativa
  Clone ID: PAT_MRT4530_32375C.1
gcacgagggccgcctcgagcgccggcgcttgcggcgcaccgtcgccggcgttgctccccagctccgctcgcgttgaagccacctcgccaccgcacgcgtcgccccggcgccgcttcccctgcccggcgtgcgccgtcgacaccgctgccccccctcccctcgcgcgctcggggaccgcccggagacacgggcggggattgtgtcgtcgatctcgatgtaccgcgggaacctccaccgggccggggccgacaccgaccaccgctggccggcgccgcgccccaccatcaccccgtcgcggttccgcagcctgctccgcagccgcacgctctccctcgcccgcctcgacggcgcggcgcgggccgactccgcggcctcctcctccacctcccgtctcgcggatggagacgcgggggtggacgaggaggagcaggacgaggaggggatggagatggaggaggaggaggaggaggagcagg

SEQ ID NO: 27708 - DNA, 2513 bp, Oryza sativa
  Clone ID: PAT_MRT4530_32376C.1
atgtcatggcacagggccggtgtcctgctgctaggggctcagtcctgcctgcctgtcccgggggttccggccatggccggcagcgtcacccgtcgcggtttggacatgactggtttcgtcttggagctgcggggcatgtgcgttgtcctggggtatccacatggagtggactaccagggcaggccgcttccggagcaggagggtgacgatggagagccccacgctgcttgggaggtcactgcagtgatcctcgctggctctcccgagcggacttcgctggcagtcaccgcgggtggagattctttccccgccgctagccagagcgccgctctcctcgccatcggcactcttcaccagcgctacccggacgagttgcagcactcgccctaccgctaccaccctcgccgcggaggagcccgcgactacgccaccttccgggatgctagctcggaggatgacgctaccatcgtgcacctggcgcgcatggtggaggcgtacgacgcggctcgtatcgacttccatcagatggtgcgccgtgggatggtcgagaacaacttgaagatcctggagctgcgtcaggagaacctgcagctcaagaaggacctagacgcggtggaggcgcagctgcatcagctcaagatcgcccagggagaggtctgccgccccaagcgtcgccgcgtctgccgcagccagaagatcaccgcccgcaagagcacctccaggcccgagcttgttcgtcagtccctggcgtggacttgcttcgtcgagacccctcgtgccgagcctgcgcccgtggttccccaggagggggaagcctccggcgttggtagcacggaggatgcgctgttgctcaccttccgtcctggcccgtcgcagcggaggagtgctaacaccggtgatggcaaccagcctgaaggaagcaaccaccaccaccagggcagcccacctccacctcctcctccgcctccaccaccaccaccagataccaacgccattctcacccaaatcctcgcccagcaggccaacatgatgactgctttcctccaccacctccaaaatccgccacaacataatgctccaccaccacccccacaacactctaaactcgccgagttcctccgcatccgcccacctaccttctctagctccaataaccccgtggatgcgttggattggttgcatgccgtggggaaaaagctagacactgtgcagtgcagcgatgaggagaaagtcatcttcgccgcccaccagctgcaggggcccgcatctctatggtgggaccatttccaggctacgcagccagaggggcaacctattacatgggcccgtttcaccgccgctttccggagaacccatgtgcccgccggagtcgtggcccttaagaaaagggaattccgagagttgaagcaaggcaaccgctccgtgatggagtatttgcatgagttcaacaacctggcccgttacgccccggaggatgtgcgggaagatgaggagaagcaagagaagttcttggcaggaatggaccctgagctgtccgtccgtctagtctccggggactatccggatttccaacgtctggtggacaaaagcatccgcttggaagccaagcacaaggaactggagtcgcacaagcgccgcttggcgaatttccgcaatcaacagggtgctaaccaaaggatccgctacaccaatccctatccagggggatcttcctcgcagcagcaacaacagcagcagcaacctcgcttcgcgcctcgacctcaattcgtggtgcgcgtcccacagccgcagcagcagcagaatcaacaagggactcgtgcgccccgtcctcctacgccaactgtgcaacctggtcaaggccgcagggacgctcaaggtccgcaacgtctgtgcttcaactgcttcgagcccgggcactttgcggataaatgcccaaagctgaggcgtcagcaaggccaagcgccttcccgctccaacaacggtgagaaggatgtcatttggggtcgggtgaaccacgtgacagccgaggacgtgctgacaactccagacgtcatcgtcgggagttcggagacgtgtttccggaagaactacccggtatgccgcccaaacgagagattgagttccgaatagatcttgctcaagaaaccactcctctgtacaagcgaccctaccgtatggcagcaaatgaactggctgaagttaagaaacagttggaagagttgaaagaaaaggggtatatacgtccgagtacttccccctggggtgctcctgtgatttttgtggagaagaaagacaagacgaagaggatgtgcattgactacagagctctcaatgaagtcaccatcaaaaccaagtaccctcttccccggatcgatgatctgttcgatcagcttaaaggtgccactgtattctccaagatcgatcttcgttccggatatcaccaattacgtattcgtgaagaagatattccgaagaccgcattcaccacgcgatacggattgtatgaattcacg

SEQ ID NO: 27709 - DNA, 1264 bp, Oryza sativa
  Clone ID: PAT_MRT4530_32377C.1
gcacgaggggggaagtgatgggcggcgggaaccgcatctccggtggcggcggcggcggattcttggaggcgcttgccggcgtgtcgttcgcgtttatgcccggggtgggcgcgttctacttcctggttgggtcggtgcttgggttcttggcgatggtgtactcgtccgagtccgacgaggccggcggcgactgggcctccgcggagcgctgggttgcgctggcgaggtcggtgagcgccccccagatgtttgttggaattcccctcctgctcctggcgacgggggtctggcgcctcggcaagcggtgcgaggccgtggaggggctcgtcgggaacgcggacgccacggtgcaggcattgcgcgtcggcggcgtcgtctgcgccgtgtgcgggacgaagatactggccctgaagaagaaaggcggcctgcccccgtccccgaccccgtccccggcccgctccaaggggagctgctccgacaagccggtcgcgaggtcgctggccgccgagctggagcaggaggccaacgcggaggaagacgagtgcgcggcggccggcgacgcgaacggcggctgcggcagcggtgcggaggagggcggcagcgtggagcggctgaggcgccggctcgcggccgagaggaggcggagggaggccgcgctggaggagctggagaaggagaggcgcgcggcggcgtccgcggccgacgaggccatggccaagatcgcgtgcctccgcaacgagaaggcgctggtggagcgcgaggcgcggcagttccgggagatggcgcagcagaagcagatgtacgaccggcagcagatcgagtcgctccagtgggtgatccagaggttcggcatgccgtgcggcgaggccgaggtgtcctccgagcgggccgtgtcggagaccagcgaggacgacagagacaggaagtagcccactccctccttccttcttggtagtatactctagtatagctcgatgaaacagtaatggcggccgaagctgctgtagatgctgcttgtctaaaagcttttgatggtttcatcagcattcagcagcaatgtaggggcctccggggtgcccaagttttgaaatttcgatagctggtgctactgggagaatcctctggtggttgtcaaagctctgctgaagattagcagagctaatgcacctgtaaatatgtcatctttcacaagaccttaatatatgattaacattgcacacatatgcttcatatgtttttgttgttcaaaaaaaaaaaaaaaaaa

SEQ ID NO: 27710 - DNA, 1624 bp, Oryza sativa
  Clone ID: PAT_MRT4530_32378C.1
atgaagatcctggagctgcggcaggagaacctgcagctcaagaaggacctcgacgcggtggaggcgcagctgcatcagctcaagatcgcccagggagaggtctgccgccccaagcgtcgccgcgtctgccgcagccagaagatcaccgcccgcaagagcacctccaggcctgagcttgttcgtcagtccctggcgtggacctgcttcgtcgagacccctcgtgccgagcccgcgcccgtggttccccaggagggggaagcctccggcgttggcagcaaccacaaccaccagggcaacccacctccaccttcttcttccgcctccgccaccaccaccagacaccaacgccattctcacccaaatcctcgcccagcaagccaacatgatgactactttcctccaccacctccaaaatccgccacaacagaatgctccaccaccacctccccaacactctaaactcgccgagttcctccgcatccgcccacctaccttctctagctccaacaaccccgtggatgcgttggattggttgcatgccgtggggaaaaagctggacactgtgcagtgcagtgatgaagagaaagtcatcttcgccgcccaccagctgcagggacccgcatctctatggtgggaccacttccaagctacgcagccagagggacagcctattacatgggctcgcttcaccgccgctttccggagaacccatgtgctcgccggagtcgtggccctcaagaaaagggaattccgagagttgaagcaaggcaaccgctccgtgatggagtatttgcatgagttcaacaacctggcccgttacgccccggaggatgtgcgggaagatgaggagaagcaagagaagttcctggcaggaatggaccccgagctgtccgtccgtctagtctctggggactatccggatttccaacgtctggtggacaagagcatccgcttggaagccaagcacaaggagctggagtcgcacaagcgccgcttggcgaatttccgcaatcaacagggtgctaaccaaagggtccgctacaccaatccctatccagggggatcctcctcgcagcagcaacaacagcagcagcaacctcgctccgcgcctcgacctcaattcgtggtgcgcgtcccacagccgcagcagcagcagaatcaacaagggactcgtgcgccccgtcctcctacgccagccgtgcagcctggtcaaggccacagggacgctcaaggtcagcagcgtctgtgcttcaactgctttgagcccgggcactttgcggataaatgcccgaagccaaggcgtcagcaaggccaagcgcctccccgctccaacaacggtggcaaggacgtcattcggggtcgtgtgaatcacgtgacggccgaggacgtgctgacaactccagacgtcatcgttgagaagaaagacaagacgaagaggatgtgcgtcgactacagagctctcaatgaagtcaccatcaaaaacaacgtgtcaaggcagagcaccaacgaccggccggactcctccaaccactccaagtacccgaatggaaatgggatgaaattgggatggatttcatcaccggacttccaaagacccaaggtggatatgattctatatgggtag

SEQ ID NO: 27711 - DNA, 2359 bp, Oryza sativa
  Clone ID: PAT_MRT4530_32379C.1
atgtcgtggcagagggttggtgccctgctgcttggggctcagtcctgcctgcctgtcccggagatggccggcagcgtcacccgtcgtggtttggacatgactggcttcgtcttggagctgcggggcatgtgcgtggccctggggtatccacatggagtggactaccaggccaggccgcttccggatcaggagggtgacgacgcggagccccacgctggttgggaggtcaccgcagtgatcctctctggctctcccgagcggacttcgctggcagttaccgcgggtggagattccttccccgccgcttgccagaacgccgctctcctcgccatcggcactcttcaccagcgctacccggacgagttgcagcactcgccctaccgctaccaccctcgtcgcggaggagcccacgactacgccaccttccgggatgctagctcggaggatgacgctaccatcgtgcacctggcgcgcatggtggaggtgtacgacgcggctcgtatcgacttccatcagatggtgcgtcgcgggatggtcgagaacaatctgaagatcctggagctgcgtcaggagaacctgcagctcaagaaggacctagacgcggtggaggcgcagctgcatcagctcaagatcgcccagggagaggtctgccgccccaagcgtcgccgcgtctgccgcagccagaagatcaccgcccgcaagagcacctccaggcccgagcttgttcgtcagtccctggcgtggacttgcttcgtcgagacccctcgtgccgagcccgcgcccgtggttccccaggagggggaagcctccggcattggtagcacggaggctctttctctgtttgctggttctgtgtggggttttcagatggtgacgaccaggagaaatgctgccaccggtgatggcaaccaacccgaaggcagcaaccacaaccatcagggcaacccacctccacctcctcctccgcctccaccaccaccaccagacaccaacgccattctcacccaaatcctcgcccagcaagccaacatgatgactgctttcctccaccacctccaaaatccaccacaacataatgctccaccaccacccccacaacactctaaactcgccgagttcctccgtatccgcccacctaccttctctagctccaacaaccccgtggatgcgttggattggtttcatgccgtggggaaaaagctagacacggtgcagtgcagcgatgaggagaaagttatcttcgccgcccaccaactgcaggggcccgcatctctatggtgggaccatttccaggctacgcagccagaggggcagcctattacttgggcccgcttcaccgccgctttccggagaacccatgtgcccgccggagtcgtggcccttaagaaaagggaattccgagagttgaagcaaggcaaccgctccgtgatggagtatttgcatgagttcaacaacctagcccgttacgccccggaggatgtgcgggaagatgaggagaagcaagaaaagttcttggcaggaatggaccctgaactgtccgtccgtctagtctctggggactatccggattttcaacgattggtggacaagagcatccgcttggaagccaagcacaaggagctggagtcgcacaagcgccgcttggcgaatttccgcaatcaacagggtgctaatcaaaggggccgctacaccaatccctatccagggggatcctcctcgcagcagcaacaacagcagcagcaacctcgccccgcgccccgacctcaattcgtggtgcgcttcccacagccgcagcaacagcagaatcaacaagggactcgtgcgccccgtcctcctacgccaacggtgcagcctggtcaaggccgcagggacgctcaaggtcagcagcgtctgtgcttcaactgcttcgagcccgggcactttgcggataaatgcccaaagccaaggcgtcagcaaggccaagcgcctccccgctccaacaacggcgggaaggatgtcattcggggtcgtgtgaatcacgtgacggccgaggacgtgctgacaactccagacgtcatcgttgggagttcggagatgtgtttccggaagaactacccggtatgccgcccaagcgagagattgagttccggatagatcttgctccaggaaccactcctttgtacaagcgaccctaccgtatggcagcaaatgaactggccgaagtcaagaaacatcgggatacctggcgggcagctggattaaatgaatcgcgcaacccccggggagaggcggtttggtattggggccttttccgcttcctcgaaaactacaatttgtccacaaggccccctcaagggtcgcgcaacctcaacaaggccgc

SEQ ID NO: 27712 - DNA, 456 bp, Oryza sativa
  Clone ID: PAT_MRT4530_3237C.1
acagctgcgacgaatggggacggagcccaagcgacagaggatggcggcgacaagcccggatggcggcggatggggacggagcccgagctgcggtggatggcggtgacgagcccaagtccctccgcctatcaccgctgcgccctttctccctccgctcgtgcctgccgctgccatgggaaggaggagtgttgtcgctcgctcgcatcctccgcccgagctcgccgtcgatggctcgcccgcgctcaagatcaatgacaatgggacgccggcatcgcacctcctcgaggagaggattccggcgtggctcctccccgcctcctaacgccggcgccgcccctccccgcgccgccacacagccaccgtcggccatccgctgccgccatccgcccccacccctagcaatccgacgccgctgcccatctattgctgccatgccacggggaggtggggaaagaa

SEQ ID NO: 27713 - DNA, 938 bp, Oryza sativa
  Clone ID: PAT_MRT4530_32380C.1
ccgctccgtgatggagtatttgcacgagttcaacaacctggcccgttacgctctggagaatgtgcgggaagatgagaagaagcaagagaagttcctggcaggaatggaccctgagctgtccgtccgtctagtctccggggactatccggattttcaacgtctggtggacaagagcatccgcttggagccaaacacaaggaactggagtcgcacaagcgtcgcttggcgaatttccgcaatcagcagggtgctaaccaaagggtccgctacaccaatccctatccagggggatcctcctcgcagcagcaacaacagcagcagcaacctcgctccgcgccccgacctcaattcgtggtgcgcgtcccacagccgcagcaacagcagagtcagcaagggactcgtgcgccccgtcctcctacgccaactgtacaacctggtcaaggccgcagggacgcttcaggtccgcagcgtctgtgcttcaattgcttcgagcccgggcactttgcggataaatgcccgaagccgaggcgacagcaaggccaagcgcctccccgctccaacaacggtggtaaggacgtcattcggtgtcgtgtgaaccacgtgacggccgaggacatgctgacaactccagacgtcatcgttggtacgttcctcattcattccatccctgctaccattttgttcgactctggagcttcccactcgtttatatctgtgccattcgtggggagaaatcagttgggggtagaaaggcttaggaaccctctgcttatcaccacccctggaggggttatgacagcaaagtattatagctctgccgttcctatagaaatccaggggattccttttccctcggatctaattcttctagacaccaagaacttggatgtgatccccgggatgaattggttggctcaattccaaggagtagtggattg

SEQ ID NO: 27714 - DNA, 3547 bp, Oryza sativa
  Clone ID: PAT_MRT4530_32381C.1
aaagggttttataaaaagaaaaatccctaaaagtcttttccccctccccttttcccttcttgggccggctcggcccagtccctccctctctctctctcttcccccgcggcccattggcctcccccgcgcgcgcgcgccgctgacaggcgggcccgcccgccgccctcgctgacgggtgggtcccacctgtcatccctgtcctcgcgccgcgcccgccgccgcccgtgccctagcgccgccgccgccgcggattccgccgcatcccgccgtccccgcgcgcattaaagagggggaaatcactccccgtgattccctctcccgtttccccctcttttccctctctctctccctcggattcgtccgatttgaatcccgcaatcgtcgccggcgtcttcaatggagccgagatctccgcggccgattcctccctctccggccgcgctctccccctcccggcgctatatatttgctccccgtgccttcctcctccgtttccgccgttcgccgcttgctctcgccgtcggattcgtgctcgcgacgtccacctctctctccgccgtcgccgccgacctccggtacgccgccgacgtcgctccgggctccctcccgactcggcgtcacctccatccgcttcgccgcgtcgtcgtccaccccgtccgccccttcgcttcgcccgccgaccgccggagctccgtcgccctcgtcatcccgaaccgcgccgccgtcttcctccgcttcggtcgccgttgccgtcgccgccgtcgacccggggtgagccgaaggccgtcgcttcgcttccctcttctctcctctctctcgggcgccgctccgccgcgccggtggtcgccggcggtgaccatcggggcgcgggtgcgccgcctcccgtcggccgtgccggcgaggccgccttcgggcgcgccccgcggctgccaggtggggcccggccgtcagccgcccgcgcccgcgggtgcggctgacgcgtgggacccacggcgccgaccgccgccagccgcgtgctcccggtccaccgtggacccacctcggccgtttaaggaccggtcttcgggcctctgttgcaaagcactaccgtacttccacatgtctagtggggcaaatgaaggctacacgagctgcggcccggtagtcgagatgtcatggcagagggttggtgccctgctgctaggggctcagtcctgcctgcctgtcccgggggttccggccgtaggcgggattgggtcgatgtacacctctaatcagagtataatctattcgaatagccgcgccctcggttatgggcaagccgagcaatgtacccaaatggccggcagcgtcacccgtcgtggtttggacatgactggcttcgttttggagctgcggggcatgtgcgtggtcttggggtatccacatggagtggattaccaggccaggccgctcccggagcaggagggtgaggatgcagagccccacgctggttgggaggtcactgcagtgatcctctctggctctcccgggcggacttcgctggcagtcaccgcgggtggagattccttccccgccgcttgccagaacgccgctctcctcgccatcggcacccttcaccagcgctacccggacgagttgcagcactcgccctaccgctaccaccctcgtcgcggaggagcccgcgacttcgccaccttccgagatgctagctcggaggatgacgctaccatcgtgcacctggcacgcatggtggaggcatacgacgcagctcgtatcgacttccatcagatggtgcgccgtgggatggtcgagaataacatgaagatcctggagctgcggcaggagaacctgcagctcaagaaggacctcgacgcagtggaggcgcagctgcaccagctcaagatcgcccagggagaggactgccgccccaagcgtcgccgcgtctgccgcagccagaagatcaccgcccgcaagagcacctccaggcctgagcttgttcgtcagtccctggcgtggacttgcttcgtcgagacccctcgtgtcgagcctgtgcccgtggttccccaggagggggaagcctccggcgttggtagcacggaggatgcgccgttgctcaccttccatggtgacgaccagaagaaatgttaacaccggtgatggcaaccaacccgaaggcagcaaccacaaccaccaaggcaatccacctccacctcctcctccgcctccaccaccaccaccagacaccaacgccattctcacccagatcctcgcccagcaagccaacatgatgactgctttcctccaccacctccaaaatccgtcacaacagaacgctccaccaccacctccacaacactctaaactcgccgagttcctccgcatccgcccacccaccttctctagctccaacaaccccgtggatgcgttggattggttgcatgccgtggggaaaaagttagacacggtgcagtgcagtgatgaagagaaagtcatcttcgccgcccaccaactgcaggggcccgcatctttatggtgggaccacttccaagctacgcagccagaggggcaacctatcacttgggctcgcttcaccgccgctttccggagaacccatgtgcccgccggagtcgtggctcttaagaagagggagttccgagagttgaagcaaggcaaccgctccgtgatggagtatttgcatgagttcaacaatctggcccggtacgctccggaggatgtgcgggaagatgaggagaagcaagagaagttcttggcgggaatggaccctgaactgtccgttcgtctagtttctggggactacccggacttccaacgtctggtggacaagagcatccgcttggaggccaagcacaaggaactggagtcgcacaagcgccgcttggcgagtttccgcaatcaacagggtgctaaccaaagggtccgctacaccaatccctatccagggggatcctcctcacagcagcaacaacagcagcagcaacctcgctccgcgcctcgacctcaattcgtggtgcgcgtcccacagccgcagcagcagcagaatcaacaagggactcgtgcgccccgtcctcctacgccggctgtgcagcccgttcaaggccgcagggacgctcaaggtccgcagcgtctgtgcttcaactgctttgagcccgggcactttgcggataaatgcccaaagccaaggcgtcagcaaggccaagcgcctccccgccccaacaacggtggcaaggacgtcattcggggtcgtgtgaaccacgtgacggccgaggacgtgctgacaactccaaacgtcattgttggtacgttcctcattcattccatccctgctactattctgttcgactctggagcttcccactcatttatatctgtgccattcgtggggaaaaatcagttgggggtagaaaggcttagaaaaccctctgctcatcaccacccctggaggggttatgacagcaaagtattatagccctgccgttcctatagaaattcaggggattccttttccctcggatctgattctgctaaataccaacaacttggatgt

SEQ ID NO: 27715 - DNA, 436 bp, Oryza sativa
  Clone ID: PAT_MRT4530_32382C.1
ttgctgttggtgcctctttgtgactgtactgtacctgctacttttttttcgttaatcttgtctttgatctcggaaaggttacctgatttcgcatagatttttatatatgtaattttgtcatgaacctgttcccgctgcttcccgaggcgttcaagggcaataagcaaatcggagtgatcggatggggctctcaggggcctgcacaagcccagaacctgagggattcaatagctcaagtgaagtccgacgttgttgttaagattggtctccggaaaggctctaagtcatttgatgaagcatgtgctgctggttttactgaagagagtggaaccttgggagatatttgggagactgtttctggcagtgacctcatgttgctgttgatatcagacactgcataggttaacttaggctctaggttggttagccatatttc

SEQ ID NO: 27716 - DNA, 450 bp, Oryza sativa
  Clone ID: PAT_MRT4530_32383C.1
atggcgcactccctcgccgccgccgcctcgtccttctcgccgcccgccgcacgccggcgactgcccggacagcttcttgtcagtgaggtgactaatgtaatttcgagacggagctcagtttccttcaacagccagagaataagttttatgtccattcgttcaaggccaagtcagcttcgttttaagatttgctgctcggctaagaaagagacagtcgacaaggtttgcaacatagttaagacacagctggcactccctgagggaactgctgtcactggtgaatcaaaattctctgaactcggtgctgattcactggatacggttgagattgtgatgggcctcgaggaggaattcaacatcactgtcgacgaaacaagtgcgcaggacatcgcaactgttcaagatgcagcaaacctgatcgagaagctcgtgctggagaaggctgcataa

SEQ ID NO: 27717 - DNA, 640 bp, Oryza sativa
  Clone ID: PAT_MRT4530_32384C.1
attgattaatattttttttgttttttttgtgataaaaattcttttttttggtttggtttgtttattttttttaaaagggattttttttttttgaaaaaaacaaacccgggggaatttgggaaaaaaaacaaataatgggggggggggggtaaataaaacccccaggggggaaaccccccccaaggggggggaaaaaacatcccccttggaccccccgtttttttgtacatgaccggggaaaaaaaaacccccccatttttaacccacaaataaaatttggcacctgacagtggacctaaaaaaacaaagtaggggcccccacccaaaaagggggcgcgccaataaaaaggggggccaatttaattaatttacccccccccccccccccggggggaacaaaaaaaaaacccccccccttttgggaaaggggcccccacaaaaaaaaaaaaaaaaaagggcttaaaaaccccccacgcacatttggggggctagaaaaaggaccacccaaaaagggtcacacagggggggcccccggaaaaacccccgggggggggttctcccacccggaagaaaggggggattttaagaaaccggcgggcgggcaacaacaaaaaaaattaaaaacggggggggggaaaaa

SEQ ID NO: 27718 - DNA, 1779 bp, Oryza sativa
  Clone ID: PAT_MRT4530_32385C.1
atggcggccgccggcgccggctccagcgaggtcgccgcgcgggtgctgctccagcgctaccagccgttcgcgccgccgccgggcgagtaccaccagttcggctccggtggcgccgccgccgccggggacatgacggaggccgtgctcatccggacgccattaaagcggaaacatgacagagaagagaatgaagctgctgaatcaaatgactggatgatgagccctggatacactaatccagcaggcagcccagttccaacaccgctttcaggaaaaggttcaaaagcttttgccaaatcaaaagctgcaaaaggccagaaatcttgtccccagacccctttgtgcgctagttctccaggcaatccggttacacctgttggtggctgccgatatgatagctccctagggctattgacaaaaaagttcctaaacttgctaaagggtgcacctggcggcatagttgatttgaataatgccgcagaaacactggaggtacaaaaaaggcgtatatatgacatcactaatgtccttgaagggatagggctgatagaaaagaagctcaagaacaatatccgttggaaaggaattgatgactcccgaccaggagaagttagtgatgatatgtccatcttacaggctgatattgaagccctctcactgcaggagcacagcgtagatcaacaaataagtgaaatgcgagataagttaagaggactcacagaagatgaaaataaccaaaagtggctatatgttactgaagatgacatcaagtctttgccctgcttccagaatcagacactgatcgcaatcaaagcgcctcatggtacaactttggaggtcccagatcctgatgaagtgaatgattatccacagaggagatataggattgttctaaggagtactatgggtccaatagatgtctacctagttagtcaatttgaggagatgagtggcatggagactcctccaaggactgtgcagccagtaagcatggattctctagagaatcccaggacgccattggctgcagaacccaacaaagctgcagagtcacagccaaatattcaagatgggctgctaatgccttctgatgctccttctagttcacaggatattggcgggatgatgaagattgtcccttcagaacttgataccgatgcagactactggctcttatcagatgccggggttagcattaccgacatgtggaagacagcaccagaggtggagtgggaaggaatcgagaaattcaatgcagaggacttcctggaggttagcacgcctcggcagcaggataaaccatcctctgacattatggatggagactcctgcataagctgaaaacctggaaacagtggaagtaccatccaaatacctgggaaatgtctgtttcttggcatgggctactggtgaccacgtgaaaaccgtagaagagaggttcagggaatggctgtaagcctgtgatgatgtacagatggcaaactgacagcttcctggatcaagaaggcatcacaacgtcctgatcattcaggtcttgactggcaagatgaacgaatcctaaagctgaatttgtggttcctgtgagttgtatgttgtatctcacaacaaaaaggagcgtacagctaggtttaagctagacagtgctgcaagctccgggactaaaattattcaggattcaggaagcgctgtaaaacttgaagctgactctgttgtactataaatttttcgtattcttgatggtatctattaaaaatcactgcaaaaaaaaaaaaaaaaaaa

SEQ ID NO: 27719 - DNA, 459 bp, Oryza sativa
  Clone ID: PAT_MRT4530_32386C.1
ggctaggggcccatgattccttcaaatgtcaaatgggttaaatgttttcagcaaatgtcctgcaattcaccaggcaaaaaaaggggacctggtccaaaccctaattccacactgggattaaaaccagcaccggcttttgccctccacttttcgggatgggcacgggcttgaaataaacagtttctatgtgatggaacttaaaagtctttttttttcaaaaacacgggagcgggcaatcgttcactatttgcccctctgggtatggctaaattttagtggaggcatgagtaaccgagcgttttttcctccgacagctcctgggaattcgcgtccatttttttccttgaaaactcgtcgatcgggaaaccctgaacaatcgtccattgcccaccactgaatgttactggaaacgagtagatcaaaccagcgggccccccttacgaaccatcttagtccaca

SEQ ID NO: 27720 - DNA, 486 bp, Oryza sativa
  Clone ID: PAT_MRT4530_32387C.1
atggctggagctgcggcggcgacggcggcgacggcggcgcacggctgcacggtgctagggcgctacagacggcggcaggcaatggcgagggtggcgacggatagcggagacaccgggggtccttttataggggctaggaggcggcggcgaaggcccacggcgaccggcgacgcgatggaagagggagtatatgcggcctgcgggacagcgggagttgaagcagcgcgcgcggacgtgaaggagagaggtcgatcatcaaaccgctccagcgggtcgtcgaagccgtactgcatggaaagcatctccgtcgtgttcgccggcccccgccaccgtatagtggccgtcgtacgatgtggcctgggtgacatcgatcgaggacggacggcgatgatgacgtatgaggcgtgtcgatcggtcgcgtcgcgtcgcgccggcactggctgtgatgacgcgctcgactatcttaattttgatcgatgccgctag

SEQ ID NO: 27721 - DNA, 297 bp, Oryza sativa
  Clone ID: PAT_MRT4530_32388C.1
gcatgccaccgacgtaccgtaagtctataggcatcctctatagcggcacgccctttgtttttttttttttactatggtactatttgttgtttctttttacatatgctttttagcttttcttagttaagagaacgtgtgcatcgcatctttccatcgacctgtctacaggcggcgcgccattggcgcgccccagcctctagttcacatagttgtacgcgcgcagcatgcattttatttaggcgcggtccacagttcatacatgtgtagtggatacgtctcgtcggcggacactcacgg

SEQ ID NO: 27722 - DNA, 438 bp, Oryza sativa
  Clone ID: PAT_MRT4530_32389C.1
atggtcctccaccgctccaactgcctcgtcggtgtgccgctcgccagcctcctccacatgtatttgtcgtggacacttgacttgccaatgtggagaaggatcggcgcggcgaatgcggccgacggtttgaatgaaaacctttcttcaattagcatatgcagtagcagcaggtgtccttcggattgggatgttttcttcgggcaggaattggctctaactctatataagtacgtcaaaagaaaagaaaggtcagtgcaggaaagactaactaatgaccaatggatagaagacatcaagcacaacctcatagttcagctagtcaaggagtaccttgaggaatctagaaatagctcaacatttcttcaaggattgctcaacatttcttcaaggattgtccttctgtacgacatatttgggagagggccctatgtagactga

SEQ ID NO: 27723 - DNA, 1142 bp, Oryza sativa
  Clone ID: PAT_MRT4530_3238C.1
gcacgaggctcccttgcagctccacaccgccgcaaaactccgcctccgccactctcgcctcgccgcgccgagctacacgaagaagcgaagagaaaaagttagaagaaaaggaggagccagagccgcctaccagtgggcccgccccggtcccaccatccctaatcggcacgcacacagtctgtgcttcggttggagtcttggtccgcaggtggaggttcgtgagggggatattctgaaccagccgctatggcatattgccagccgatacaacttaaaagcgagaccaaacactctatactattactctaaacatcgaatgcaatgagaaattcttcgacagacggacttagctgattgatgtcataagcaatcttcctcgtatagcgaaatcgagagttcacgctcagcgtgaaggaaagcacttctactttctcagagctccccgtacagtggcacatcaccagccttgccttagttctcttctcgttcaatgctgtcttttcagcgctttgttctattggtttggtggttgctaccaagacaatttctttatgcccatcaaagaacctcgagatgttagtttccccctcatcttttagcaaaaagccgctccacagtagtaaagtctcatcttttgtattggccgaagtgacaatagtcacattgaaccctcgaatatgctcgaagatctcgaaatgatcttccagttccggggagaattcgcaaaactccgtttccataaagaatttgatggagttttcccatatttcgaccggagaatctaacatagacattactgtcaagattctgaccaaaaaatggtacattccatgccctcggagaacgctttgtcgtgcaaagtcactgacatatccagtgtctttttcggaccccaagaatggattggatcgaaacgactttcctgctttaaaataagggcccctttgtgtctgtatgaatctctgaccgcacaaaatctccatagccaattttccaaattggattttaaaatcagaggcagcttttggtactaatctgatttcaaacaatccaggaacttccataacattggcgtgattcagtttgagcaacagatcctgacgtaatacatcttcgtaatgaaaatggagtggaaacatcat

SEQ ID NO: 27724 - DNA, 212 bp, Oryza sativa
  Clone ID: PAT_MRT4530_32390C.1
atggatctcgacaagtccacttccaccagcgcgtccctgaagaagctgcaggaggatggtgctctccctggccgcgggactatggagagagaaccaggaggtgttggacccgaacctgtgtccggatgcatcggcttccggcttcgggatggcctgaagtcgcgatacatccccttccagtgcccctcttctcgtagcaaatggcgggcgag

SEQ ID NO: 27725 - DNA, 572 bp, Oryza sativa
  Clone ID: PAT_MRT4530_32391C.1
aaaggcctttttatttctcctttctctgtgtctcgctcgtttccattgagcctttgctctcgcgtctctcgtgtctcgtggtgtttttggtcttggccttcctctcgccatggacccggcgggtgcgccgtggtgcgaccctcgccgagggtacggcggctacggtgttggatcggcggcgttgcaggcggcggcgcggcaacaatcgcagcagccgcgatctgatggtgcgggaggcgcgggcgtcaccggaggcgtgctcaagaggagcctgggggagatggagaggtggcagcagcagcggcaggtggcggcgcagcaggccatgtacctgcgctcggtgaggcagcgcatggatatcggcgctgtgctcggtggggccgcctcctcgccggcctatggcatttccggcttgtcgtctggttttggcggtatctcgcagcagcagccgtcgtcgacgatggtcgcgttgaccaccgcgtcgcgcccggtgatgccagggatgcagcagcggcggccgatgatggcccgttccgaccgcgcaaaaatcaagccggtggcgaggggccccc

SEQ ID NO: 27726 - DNA, 3771 bp, Oryza sativa
  Clone ID: PAT_MRT4530_32392C.1
atggcggtgaagaaacacaacgtcgccatgcaattacaagtggtagtactgtggcttgtaggagtagcattattttctgtgatggcgtcgtccgctccggcggccgtagcggcagcaccgccgcccgcggagtgcccgagcaagtgcggcgacgtcgacatccccttccccttcggcgtcggcgacgactgcgcatggccgggtccagatgacttcaacgtcacatgcaaccatagctttacccctcccagaccctactacagcaacatggagatgaaggacatctcgctgccgaagggggagatgcgcgtctacacttccgtgctgcaaaactgcttcgacttgtccaacaccagcagcagctccgagtccgacgtaggctcgccatggctcgacctcgccgggacgccgttccttgtgtcgccggagaggaatgagttcacggccaccgggtgcgacacgctggggatgatgtacggcagggaggacgggagctacttgaccggctgcgtcacgacgtgcgcgagcttggatgccgccgccaacgacggtgaccactgcgcggggctgggttgctgccagatccagtccatccctacaaaccttaccttgctaaggattgtgctgtcggccaacatcaccgacaggaagattgctgcgtggaacccatgccgctacgcctttataaccgaccgagacgggcaattcaggtacaattttagccggaaggatttgggtcgctcaggcaacaagatatttgcaaaccgggacggcgagatggtcgtccctacggagcttgactgggccatcaggggaacaaataggtcatgctctgtctgcgtcagcgaccaaagcgactgcgccaatgccactaacggagacgggtatctctgcaagtgctccgagggatacgacggcaatccctatctcaaaggcaatggcggatgcacagcgacggtgtgctctgtgatttctcttacggtccttgtgtgcttgtataagagacggaagagaagaatgtttgccaacaacaatggtggccggctgctcaaggatatgaacatcgtcctcattacggagaaagacctaaacaagatgacaaagaataggagcaccaagatcctcggagagggttccttcggcaaggtctacatggaaacccacaagaaccagccggttgccgtgaagtactccaagggaaagcgcaagctggcacagacgacgcatggcaaagacatcaagtgcatgaacaagaacatgttccaaaacgccttttgttggtccaaagttccatcctcgccggaagaagattcgtcgtcacgagtgtccggcccggagttagtggacgagctaagggtccagtcactaatccagcacgaaaacgtgcgccttgacatcgccatcggctctgcgaaggctctttcctacatgcactcctctagccttatgcatggagatgtcaagccagccaacatcctccttgatgacaacctgaaccctaaggtctctgactttgggtcatctgagctcatattgaaattcaagcacgtgtgtgttgacaagaactatgtcgatcctgtgtgcatactgacgaacaagtatactatggagagcgatgtctacagctatggggtcgtgctcctggagctcatcacccggaaaagggccaagtacgacgatgaaagaagcatccgagtagaatttgtgaaccagtacaaagacaacaacgaaaggaggaagatgtatgaccaagacatgttgtcgtctacggattccctatatccttactgcatggagtgccttgacaggatggcggccgtcgcggtccggtgtctgaaaaacaaggtggacaagagaccgaccatggcggaggtcgtcgaggagcttaagcagctgagagagcaaataagcacgcggaggagcaagagcaatggcagcgacaccgatctcgctgcgctgctggctttcaaaggcgagctctccgatccctacagccttcttgccaccaactggactgctggcactccgttctgccggtggatggggatcacttgcagccggcggcagcagcagcgtgtcaccggagtggagctgcccggagttcccctccaaggaaagctgagccctcacatcggtaacctatctttcctctccgtccttaacctcaccatcacaaacctcacgggctcaatcccagacgatatcggaaggctgcatcgcctcgagctccttgatcttggcaataatgctttctcaggtgtcatcccagcctccataggcaacctcacgaggcttggcgttcttcgtctcgcggtcaatcgtctcaccggaccggtaccaccaggcgtcttcaacatgtctatgctaggagttattgctcttgccttgaacggcttaactggccctatcccaggcaacgaaagcttcagactcccgagtctctggtttttctccgttgatgccaacaatttcaccggtccgataccacaggggtttgcggcgtgccagcaactccaggttttttccctcattcagaacttattcgagggtgctttgccatcatggctgggcaagttgacgaatctcgtcaagctcaacttgggtgagaatcacttcgatggtggttcaatccctgatgcgttaagcaacattaccatgctggcttccctagagctcagcacgtgcaacctaacaggaaccattccagcagatattggaaagcttggaaaactttcagatttgcttattgcaaggaatcaactaagaggacccattcctgcttctctcggcaacttatctgcattatcacgcctggatttgagcacaaacctgttggatggatctgtcccagcaacagttggcagcatgaactctttgacatactttgttattttcgaaaatagcttacaaggggatctcaaattcttgtctgctctttccaactgtaggaagctttctgtccttgaaatcgactcaaattatttcaccggaaacctcccagactattggcttgatctcagtgaaaatagcttgtttggccccatcccgtcaaatatcggcgtgctgaagaatattcaaagattatttcttggaacaaaccaattctccagctccatatcgatgggcattagtaacatgaccaacttgaacctatctttcaacaacctacatggtcaaataccagaaacaggtgtcttctcaaacatcacgctggaatccttggttgggaactcagggctatgtggtgctcctagcaacgtgctatttaatgatgacatgacggcgcatgtgtcagactttggtattgcaaggctgctgttaggtgatgatagctccatgatttctgctagcatgccaggaacagtcgggtacatggcaccagagtatggcgcccttggtaaagcgtcacggaagagcgatgtattcagctatgggatcatgttgcttgaagtgttcactgcgaagagaccaacagatgctatgtttgtgggagaactaaacatcaggcagtgggttcttcaggcatttcctgcaaaccttgtccatgtcatagatggccaacttgtacaggacagctcttcttctaccagtagcattgatggctttcttatgccagtgtttgaattgggcttgctctgctcgtctgactcgccagagcaaagaatggtgatgagtgatgttgtcgtgacattgaaaaatattaggaaggagtacgtcaagttgatagcaactatgggaagagatgacaaccgaacagcagtgttccattga

SEQ ID NO: 27727 - DNA, 194 bp, Oryza sativa
  Clone ID: PAT_MRT4530_32393C.1
tatggcgcacacccccctcaggggccgtgtgttttgcacacacatgtgtatatgatgctgtgtcccgcgcgctgtccgcatatagtgtgtgtgttttgtgtggaaaatgtgtgtgtagcccgcgaattatacccacacgtgtgtgcacacaccacggagaaccacgcgcttatgtgtaccccacgtgatgtgta

SEQ ID NO: 27728 - DNA, 3093 bp, Oryza sativa
  Clone ID: PAT_MRT4530_32394C.1
atggcgctcggatctccagtatgcatcatcatgtccgctctgctgttgatcactttgtcccctgtggttgctgctgctgctgcttctcctccagggacgagcaagagcaatggcagcgacagcgatctcgctgcgctgctggctttcaaaggtgagctctccgatccctacaacattcttgccaccaactggactgccggcacgccgttctgccggtggatggggatcacttgcagccggcggcagtggcagcgtgtcaccggagtggagctgcccggagttcccctccaaggaaagctgagccctcacatcggtaacctatctttcctctccgtccttaacctcaccatcacaaacctcacgggttcaatcccagacgatatcggaaggctgcatcgcctcgagctccttgatcttggcaataatgccctctcaggggtcatcccagcctccatagggaacctcacgaggcttggcgttcttcgtctcgcggttaaccagctctctggacaaatcccagccgatctgcagggcctgcacagccttcgcagcatcaacattcagaacaatggcctcactgggtcgatcccaaacagtctgttcaacaacacacctttgttatcttacctcaacattgccaacaacagcctttctggatcaataccagcctgcatcggctcattgcccatgcttcaattccttgacttgcaggttaatcaacttgccggaccagtaccaccaggcgtcttcaacatgtctatgctaggagttattgctcttgccttgaacggcttaactggccctatcccaggcaacgaaagcttcagactcccgagtctctggtttttctccattgatgccaacaatttcaccggtccaattccacaggggtttgcggcgtgccagcaactccaagttttttccctcattcagaacttattcgagggtgctttgccatcatggctgggcaagttgacgaatctcgtcaagctcaacttgggtgagaatcacttcgatggtggttcaatccctgatgcgttaagcaacattaccatgctggcttccctagagctcagcacgtgcaacctaacaggaaccattccagcagatattggaaagcttggaaaactttcagatttgcttattgcaaggaatcaactaaggggacccatccctgcttctctcggcaacttatctgcattatcacgcctggatttgagcacaaacctgttggatggatctgtcccatcaacagttggcagcatgaactctttgacatactttgttattttcgaaaatagcttacagggggatcttaaattcttgtctgctctttctaactgtaggaagctttctgtccttgaaatcgactcaaattatttcaccggaaacctcccagactatgtgggcaatctatcaagcacgctgcaagcattcatcgcacgtcgaaacaatatatccggtgtccttccatctacagtttggaacttaactagtctcaagtatctagatcttagtgataaccaactgcacagtacaatatcagaatcaatcatggatttggagattctacagtggcttgatctcagtgaaaatagcttgtttggccccataccgtcaaatatcggcgtgctgaagaatgttcaaagattatttcttggaacaaaccaattctccagctccatatcgatgggcattagtaacatgaccaaacttgttaaactagatctgtcccacaatttcttgagtggtgcattaccggctgatataggctatttgaagcaaatgaatatcatggatctctctagcaaccacttcactggcatcctcccagattcaattgcacaacttcaaatgatagcctacttgaacctatcagtcaattcattccaaaattcaattccagattcttttcgtgtgcttaccagcttagaaactttggatctatcccacaacaatatttccggtaccatcccggaatacctggccaattttactgtcctttccagcttgaacctatctttcaacaacctacatggtcaaataccagaaacagttggagctgtagcttgctgcttacatgtaattcttaaaaagaaagttaagcaccaaaagatgtctgttggtatggttgacatggccagtcatcaactactctcctaccatgagcttgctcgtgctactaatgatttcagtgatgataatatgttgggttctggaagctttggagaagtttttaagggtcagctgagcagcggtttggtggttgccataaaagttatacaccaacatatggaacatgccattagaagctttgatactgagtgtcaggtgcttcgaacggctaggcatcgcaacttgataaagatacttaacacttgttccaacctggacttcagagcactggttcttgagtacatgcccaatggaagcttagaggcacttctacactctgatcaaagaattcaattaagtttccttgagcgattggatattatgctagacgtttcaatggcaatggaatacctgcaccatgagcactgcgaagtggttctgcactgtgatttgaagcctagcaacgtgctatttgatgatgacatgacggcgcatgtgtcagactttggtattgcaaggctgctgttaggtgatgatagctccatgatttctgctagcatgccaggaacagtcaggtacatggcaccagagtatggcgcccttggtaaagcatcacggaagagcgatgtattcagctatgggatcatgttgcttgaagtgttcactgcgaagagaccaacagatgctatgtttgtgggagaactaaacatcaggcagtgggttcttcaggcatttcctgcaaaccttgtccatgtcatagatggccaacttgtacaggacagctcttcttctaccagtagcattgacggctttcttatgccagtgtttgaattgggcttgctctgctcgtctgactcgccagagcaaagaatggtgatgagtgatgttgttgtgacgttgaagaagattaggaaggagtacgtcaagtcgatagcaactatgggaagagatgagaaccgaacagcagtgttccattga

SEQ ID NO: 27729 - DNA, 270 bp, Oryza sativa
  Clone ID: PAT_MRT4530_32395C.1
cgcgcgtctccgataaagacgacgtggttatcgcgttggagagctagctacttactgtgcttatttcgaacttaggcaagcttgtgtttttgctgcctacttcactcatatatgtcgacgcaagccataaatggcggctcaggggatcgcggaggcggcgcaggcctacacgggcctctccccggcgtgagccgtcaccatactgggcctgatgctcgccacctacctgctcgtgtcctccctgttcgtcgccccggacgccgtggcccc

SEQ ID NO: 27730 - DNA, 3987 bp, Oryza sativa
  Clone ID: PAT_MRT4530_32396C.1
atggcaaccaacccgaagggtagcaaccacaacaaccatggcagcccacctccgcctcctcccccgcctccaccaccaccaccagacaccaactccatcctcacccaaatcctcgcccagcaggccaacatgatggctgctttcctccaccacatccaaaatccgccacagcataatgctccacctccaccaccacccccgcaacactctaaactcgccgagttcctccgcatccgtccgcctaccttctctagctccaataaccccgtggatgctttggattggttgcataccgtggggaaaaagttatacaccgtgcagtgcaacgatgaggagaaagctacgcagccagaaggacaacctattacttgggcccgcttcaccgccgctttccggaggacccatgtacccaccggagtcatggcccttaagaaaagggaattccgagagttgaagcaaggcaaccgctctatgatggagtatttgcatgagtttaacaacctggcccggtatgccccggaggatgttcgtgaagatgaggagaagcaagagaagttcttggcagggatggaccctgagctgtccgtgcgtctggtctccggggattatccggatttccagcgtttggtggacaagagcatccgcttggaagccaagcacaaggaactggagtcgcacaagcgtcgcttggcaaatttccgcaaccaacagggggctaaccaaagggtccactacaccaatccctatccagggggatcctcctcacagcagcaacaacagcagcaacctcgctccgcgccccgacctcaattcgtggtgcgcgtcccacagccgcagcagcagcagagtcagcaagggacccgtgcgtcccgtcctcctacgccagccgtgcagcctggacaaggccgcagagacgttcaaggtcagcagcgtctgtgtttcgactgcttcgagcccgggcactttgcggataaatgcccaaagccgaggcgccagcaaggccaagcgcctccccgccccaacaacggtggtaaggatgtcattcggggtcgtgtgaaccacgtgactgccgaggatgtgctgacaactccagacgtcatcgttggtacgttcctcattcattccatccctgctaccattttgttcgactctggagcttcccactcgtttatatctgtgccattcgtggggagaaatcagttgggggtagaaaggcttaggaaccctctgctcatcaccacccctggaggggttatgacagcaaagtattatagccctgccgttcctatagaaatccatggaattccttttccctcggatctaattcttctagacaccaagaacttggatatgatccttgggatgaattggttggctcaattccaaggagtagtggattgcgcaagacgcactgtcactctgtaccgagggccggaacaaccggtagttttctttgcacccccaacctctgtcggcagttcagaacttcatcagataggactgtcggaaacccccatcgtcagtgagttcagagatgtgtttccggaagaactacccggtatgccgcccaagcgagagattgagttccggatagatcttgctccaggaaccactcctctgtacaagcgaccctaccgtatggcagcaaatgaactggccgaagtcaagaaacagttggaagagttgaaagaaaaggggtatatacggccgagcacttccccctggggtgctcccgtgatttttgtggaaaagaaggacaagacaaagaggatgtgtgttgactacagagctctcaatgaagttactatcaaaaacaagtaccctcttccccggatcgatgatctgttcgatcagcttaaaggtgccactgtcttttcaaaaatcgatcttcgctccggatatcaccaattgcgtattcgtgaaaaagatatcccgaagatcgtgttcaccacgcgatatgggctgtatgaattcacggtgatgtcgttcggtctgactaatgctcctgccttcttcatgaacttaatgaacaaagtgttcatggaatacttggataagtttgttgtggtcttcatcgacgacatcctggtgtactcgcaatcagaggaagaccatcagcagcatctccgtcgggtgttgggaaagttgcgggaacatcaattgtatgccaagcttagcaagtgtgagttctggttgtccgaagtcaaattcttagggcatgtgatatctgctaaaggagttgctgtggaccccgaaacagtgatcgccgtcactgattggaagcaacccaagacagtcactcaaattcgcagctttttgggtttggccgggtactaccgaagattcatcgagaatttctccaaaattgccagacccatgacgcagttgctgaagaaggaagaaaaatttgtgtggagcccgcaatgcgagaaagcattccaaactctcaaagaaaagctggtttcctcgccagtgttaatcttaccggatactcgcaaggacttcctggtgtactgtgacgcttcgcgccaaggattggggtgcgtgctcatgcaggatggtcatgtggtagcctatgcctcccggcagcttcggcctcatgaaggcaactaccctacccatgatttggagttagccgctgtggttcatgctctaaagatctggcggcactatctcattgggaatcgctgtgaaatatatactgatcataagagtttgaaatacatcttcactcagtcggatctgaatcttcggcagaggagatggttagaactcatcaaggattatgatgtgggaattcactatcatcctggtaaggccaacgtggtcgccgacgctctaagtcgaaaaagccgttgcaacactcttggcgtctgtgacattccaccggaacttaatcaacagatggaagccctgaatctaagcatagttagtcgtggattcttggctacgctggaagccaagcctaccttgctcgatcaaatcagcgaggctcagaagaatgatccagatatgcatgggatcctcaagaatatgaaacaaggtaaagccgctggtttcacagaagatgaacatggaaccctatggaacggaaatcgtgtatgcgttccggacgacaaggaacttagacagctgatacttcaggaagctcacgaaagtccttattccatccaccctggcagtacgaagatgtacttagacttgaaagagaaatactggtgggttagtatgaagcgggaaattgcaaagtttgtggccctttgtgatgtgtgccagcgtgtcaaggcagagcaccaacgaccggccggacttctccaacctctccaagtaccaaaatggaaatgggatgaaattgggatggatttcatcaccggacttccaaaaacccagggcgaatatgattctatatgggtagtcgtggatcgactaaccaaggtagcccggtttattcctgtgaagaccacctatggagggaacaaactagctgaactctacttcgctaggatcgataagagtctcccctatgccgagttctcctacaataacagctaccaagccagcatacaaatggcaccctacgaagcgttgtatggacgcaaatgccggacaccgctattgtgggaccaagttggggaaagccaagtgttcgggactgatatcctgagagaagttaaagcgaaaatcagaaccattcgggagaatctaaaggtggcccagtctcggcagaagagttatgcagacaaccgacgccgtgacctggaattcgcagtggatgactttgtgtaccttcgggtcacgccattgcggggcgtacacaggtttcagacgaaagggaagctcgcacctcggttcgtgggtcctttccgtatcattgctcgacgcggagaagtcgcttaccagttggagctgcccgcatcattgggcaacgtgcatgatgtgttccatgtgtcgcaactcaagaaatgccttcgagtgccgtccgagtag

SEQ ID NO: 27731 - DNA, 478 bp, Oryza sativa
  Clone ID: PAT_MRT4530_32397C.1
cttatgtatattatttttaatgtcttttttattcttttttttttgctgtctgtcttatcttttcttgtattatgctcatgatcttttggaacgtgacggcgcgatactgccgctggccgccgtctacgacgagctccttcggcgaaccgacgaggcacgtccatcgtgctggcataaaagaactgtcgccagccgacgtcctcgccaccgacgagggcgccatcgccctgtgctcgatgctcttcaacactcagaacgccccactggggaggaggtggacaaagttgacgacgaacgcgtcggggacggggtccacaaaagagaaagccccattgtaagacaccgggaagccgaagacggcgccctgcacgaaaaccccgtttttgtggcggtcccggggcaccaacgggcccattggcatacttggaaacgggaatgggggacagagacccaattttccccccttttaagggacccc

SEQ ID NO: 27732 - DNA, 2543 bp, Oryza sativa
  Clone ID: PAT_MRT4530_32398C.1
tttttttttttttttgacaacaaatctagtttagtttcttcaacagttgagtgggtgctatccaagaatagcaatgacagagaaaatacatcatcgatggaactcatgagtggagaaaaaaagaggctatcttttacaagaaagagaagaacagagatgatttttagcatcatcaggattctgtccaagtttctaggattctaggctacaagaacaggcatatatatctaataatatgctgatctgatcatctactacatcaaaattgggatcaattacaggaataaggacatagacgccacgagatggcgaatggaaatcaggcaaatgcatggaaccatggaccggagctgcctaatcttcaagccccaacatcacagccatgtgaagcgatgagctcgatcgagtcaacattgcagcagctaagctattgtcaggtgattcttcgtgtcaaaaaagagaacaccagccagccaccccaccaaccaaaataaccggcaggtggaggaggaatgctaaagtcgagtgactgatttaatccatttgtcgtctcgctatctgtagttgcagcaggatgctcggccctggaccagcttgtcccagaggcacagcatttgcctcggtgactggtaatgcgccgtgtaatagttctccaggcagccgtactggcagaacttccagctgtgggaatacttgacaggagacgtggagttgaacttctcaacccacagccccatgcttacgtcctccatcttgaatagccttaagctctggttggcatgctgagacacgacgaatttcgctatgtcaccagaaatcacataaccgggtccatttgcataaggtggatagatgtcttcaggccacacctctgttgtaactgtccatttacccattctcaagggcctatgcaagaggttgaggttccccatatataatggcctgccaccattgttcaacttgatgtgtctgacaaccacatctaccctcacaaatgtatcatcgtcacatttcatgatatgtacagcagccaaattttggaccccgtactcgcaaatagcgattgtcttgagaaccaccaactcataacgatctataaatggcaaaattacaatgtctccaaagtattcagcttctctcttaagcattacattgacctctttccttgaattatttttacggttcatgcttccatcatcccattctacacataaagaaaatccatataaccatgcagaatgaaacttagaagaccagtagagaatcagtgcaacaaagaatcgggcaaccactttagatgaccggacttctgaactttgcatccatgtttttctaacagccattcgctcagcgaaatgattagaagcagagagtattccaataaaaagaaaaactggatcttttggtagtggtcgggtcctccatttttctgacatctcaagaacttgttgaagtgaaaaactgggatgagacataggaagtgcagtggcataaactgaatgaacatccacatcgcccttaacaaataaccctgttgcatcttcaagagtgaagcctggtctgtaagggaaggaggtcacatgtcttccaccaacatatatatggaaaccttcaactccagcttgcatagtaagaacaaatagcctgtcttctacaaaagggaatggccatgtcattgcaggtttctttgcacgcccaatgaacctcttcaaccatgaagttgtcttggactcctttgtgtcaacaacatcatcacgtatccatttttcacatttggtgaacccatcaaccttatcgtcgttgtcctcgggcggcgacccatcgcagcgctgcgcggagccccactgcatcctatagcaggtattgtgctcgatgattggtcgctggctccaatcccctctcaacctggggttgaggtgcagtatcctgggcgggtcctcaccgtcgacggcgcgaagcccctgaagctcgaccatgaactgggagacgagcacggtgccatccccctggcgcatcctggccagctgcggcacgtactccttgtgggcggccctgggcgtgccgacgacggtgacggaggagccggcggcgaggccgcagggcaggaagacgaccctcccgcgcgcgcgcacggagacggcggaggggcatttgtcggtggtggcggtgtcgacggcggcgagctcccacgggtcgcccgcgaaggccgcggcgtcctcccacgcggtgaggccgagcgcccacgcgtcgtcggccatgcggtcgagcgccgagcggttgcgcgccacgatgtccgggagggagacgcggtcgtagcggtgccagaagggctggacctggaacagcgtcgcgttgccgttcccgttcccgggggaggtggaggtggtggtggtggtggagaccgggagcggggggaggtggtcggaggaggaaggggaggagaaggcggcgtcggtggcggcgaggtcggcggtggcgaggtcgagcacgcggcggaacttgagggagatgaggaggaggtagggcggcccccgccacgagca

SEQ ID NO: 27733 - DNA, 1957 bp, Oryza sativa
  Clone ID: PAT_MRT4530_32399C.1
atgtcatggcacagggccggtgtcctgctgctgggggctcagtcctgcctgcctgtcccgggggttccggccatggccggcagcatcaaccgtcgtggtctggacctgactggctttgttttggagctgcggggcatgtgcgttgtcctggggtatgcgcatggagtggactaccagggcaggcagctcccggagcaggagggtgacgatgcagagccccacgctgcttgggaggttactgcagtgatcctcactggctcacccgagaggacttcgttggcagtcaccacgggtggagattctttctccgccgcttgccagaacgccgctctcctcgccatcggcactcttcaccagcgctacccggacgagttgcagcactcgccctaccgctaccaccctcgccgcggaggagcccgcgactacgccaccttccgggatgctagctcggaggatgacgctaccatcatgcacctggcgcgcatggtggaggcgtacgacgcggctcgtatcgacttccatcagatgctgaagaaggacctagacgcagcagaggcgcagctgcatcagctcaagatcgcccagggagaggtctgtcgccccaagcgccgccgcgtctgccgcagccagaagatcaccgcccgcaagagcacctccaggcccgagcttgttcgccagtccttggcatggacctgcttcgtggagacccctcgtgccgagcccgcgcccatggctcctcaggagggggaagcctccggcgttgatggtgacgaccaggagaagtgctgctacggtgaaggcagtcaccccgaaggcagcaaccacaacaaccagggcagtccacctccacctcctcctccgcctctaccaccaccaccagacaccaacgccattctcacccaaatcctcgcccagcaggccaacatgatgactgctctcctccaccacatccaaaatccgccacaacataatgctccaccaccacccccacaacactctaaactcgccgagtttctccgcatccgcccacctaccttctctagctccaacaaccccgtggatgcgttggattggttgcatgccgtggggaaaaagttagacactgtgcagtgcagcgatgaggagaaagtcatcttcgccgcccaccaactgcagggacccgcatctctatggtgggaccatttccaggctacgcagccagaggggcagcctattacttgggcccgttttaccgccgctttccggagaacccatgtgcccgccggagtcgtggcccttaagaaaagggaattccgagagttgaagcaaggcaaccgctccgtgatggagtatttgcatgagttcaacaacctggcccgttacgccccggaggatgtgcgggaagatgaggagaagcaagagaagttcttggcaggaatggaccctgagctgtccgtgcgtctagtctccggggactatccggacttccaacgtctggtggacaagagcatccgcttggaagccaagcacaaggaactggagtcgcacaagtgccacttggagaatttccgcaaccaacagggtgctaaccaaagggtccgctacaccaatccctatccagggggatcctcctcgcagcagcaaccacagcagcagcaacctcgctccgcgccccgacctcaattcgtggtgcgcgtcccacagccgcagcagcaacagaatcaacaagggactcgagcgccccgtcctcctacgccaactgtgcagcctggtcaaggccgcagggacgcttcaggtccgcagcgtctgtgcttcaactgcttcgagcccgggcactttgcggataaatgcccgaagccaaggcgtcagcaaggccaagcgcctccccgccccaacaacggtggtaaggatgtcattcagggtcgtgtgaaccatgtgacggccgaggacgtgctgacaactccagacgtcatcgttg

SEQ ID NO: 27734 - DNA, 944 bp, Oryza sativa
  Clone ID: PAT_MRT4530_3239C.1
atgatgccagaagtatcaaacaaagatgtgataattagtatttgtgttagtgatggttatatcttatcttttgtgatagagggtagaacggacacagatttggatcacgcttcccctgcaaatcttcaatccgatctctgcaagactgctactgcaatacggagtagacctcctgacagttacaggcatatgcaggaccagctgatctgcagcggctgcaggcgcgtcgtccagtacaggagaggggtcgccggcgtctgctgcccgggctgcaacacgctcaccgccgtcaacccgtcagcggtggccgacatgtcggagctcatctgcagcggctgccccacgctgctgttctacaaccgcggcgcctccaacatccgctgccccagctgcaacaggctcaactccaccagatcagccaaccagattgcacacctgacatgcgggcagtgccggacgactctgatgcacccacctggagcctcaactgtgcagtgtgcaacctgcagatatgttaaccatgtcagggatgctcggcctcaaactgtccttgtagagaatcctaagacactggatgataagggcaagctggtgagcaatgtggttgttggtgtcacctcatggaaaagatgatgaacaggggctcatctagggtttaatcccaagggtctatggatgattgatacccttggtggatttgtatcattactaccaagctattgttaaatcaagtgtgttttgaagcttgatatccacacagagaaaaacgatagggccaaaaatgaagaaaaaaatatatccgaaatgtgccatgtttgtgcttcttttgtgagaaaaaaaaatgtaaatatgctggctatggtgctagcctatgtgctttttagcaaaaaggaatggaaatgagatgagcagccttgtgtcctggaaaaaaaaaaaaaaaaaaa

SEQ ID NO: 27735 - DNA, 798 bp, Oryza sativa
  Clone ID: PAT_MRT4530_323C.1
atggggagggggaagattgagataaagagaatcgagaacaagacgagccgtcaggtgaccttctgcaagcgcaggaatgggctgctgaagaaggcctacgagctcgccatactctgcgacgctgagatcgcactcatcgtcttctccagccgaggacgcctctatgagttctccaatgtaaacagcacaaggtcaacaatcgagaggtacaagaaagcctctgccagcacttcaggatccgctccagtgatagacgtcaattctcatcaatactttcagcaagaagcagcaaaaatgcgccaccagatacagaccttgcagaatgcaaacaggcacctcatcggtgagtccattggcaatatgaccgcaaaggagctcaagagccttgaaaatcggcttgaaaagggcatcagccgaattcgatcaaagaagcatgagctgctgttctcggagatcgaatacatgcagaaaagggaagcagatcttcagaacgagaacatgttcctgagagccaaggtggcagaggccgagcgagctgaacatgatgatcagcaggcggcggaggacgacgagatggcgccggcgccggcggtcggcggcgggtcatcgtcggggacagagctggaggcgctgccggcgacgttcgacacaagggaatactaccagccggcgccgccggtgagcatgctggccgccgcggcggcggcggcggcggcgcagtactcgtcggaccaccaccagactgctctccacctcggctacttcaaggtcgactccggcaaaggcggcctcctctag

SEQ ID NO: 27736 - DNA, 423 bp, Oryza sativa
  Clone ID: PAT_MRT4530_32400C.1
atgaagatagagaaaacaaatgcaggatttctaacaaactttgaagtgcttgacttcttacgatctagaggtgctaaaaccgatcccatgggatgtttgggtgctgttgctgcatcagagtgtaaggtatatgagtaccttctaaaaactcctgcttgcaaccagacaagggaatcaattaacgaatttgtgacaagatgtgagagcttcaagcttacaaatgctgacaagctaaatgtaatcaattggagaccatcctcggctgctgatgcctatgcgatgatagaagagtgcggtaaacgattttcgaaggatgagcggggagaagcatgcaatgaagatgaacgagttgaggaattcttggagctagtgaaggaggcttttccaccaccacctccaaagccagaggcaatgatagagtga

SEQ ID NO: 27737 - DNA, 2731 bp, Oryza sativa
  unsure (1)..(2731): unsure at all n locations
  Clone ID: PAT_MRT4530_32401C.1
cccactcccgcgatctcccgtggtccctagccctcaccgccgtcacgcgcgccgcctcttcctcggtctcgtcggcacccactccggcagcccctttcgccgtgccagtgcgccggccgacgtcgccgtctccacctccggcatcgcagcgtcaaggacgccctcggcctcgcctccccttcgaccgaaccccgccggtgttcgtcgtcgtcgtcaccgttcatcctcgccggctcgtcatctcgcggcgccgcctccgtcgtcgacatcgcagcggcgtgttccacgccatcctcgcctccgtgcagccgctgccggctgccctcgtcgtctcctcgccggccccggtcgtcgtcgtcgtcgtcctcccgtcgttcccggtcgtcgtggcgttcgtccctctgtcgagccgttctcgtccgtcctcggtgtttcgtcaaggtcgctgtagccgtcgtcgtctttgtcctcggctccgcgtcgtcaagcctcatgccggccgcgtctcgccttcgtccaaggatcgccgccgaagtcgttccctcgccgtccgccgcgcccgttcgtcgttgttgttcccacgcctcgtcgcgtggtggccgattccttcccctccggccgctctctccccctcccgacgctatataatcgctccccgagcctctctcctccgtttccgccgctcgccgctttctctccccatcggaatcgagcccgcgccgtcgtcctttctcttcgccgtcgccgccgagctccggttcgccgccgtagtcgccccggacctcctcccgtctcggcgtcacctccttcggcttcgccgcgtcctcgtcgacctcgtccactcctccgtttcgcccgccgaccgtcggagcaccgccgtcctcgtcaacccgagccgcgccgccgcctctcgccgcttcggtcgccgtttccgtcaccgccgtcgacccggggtgagccaaggaccgccgtttcacttcccccttccctcccctctctcggccgccgctccgtcgcgccggaggtcgccgccggcgaccatcggggcgcgggcgcgccgcctcccgtcggccgtgccggcaaggccgccttcgggcgcgtcccgcggctgccaggtggggcccggccgtcagccgcccgcgcccgcggacgctgcagcttcggaagatccgctcttcgtggaagttgaagccgacgtttgggaaagcgagcaaggcaagtcacatcatctttgaacatattgaatcccagctgggctcggggtgcatggttttgatagtagcacctcggccatataaggaccggtcttcgggcctctgttgcaaagcactaccgtacttccacatgtctagtggggcaaatgaaggctacacgagctgcggcccggtagtcgagatgtcatggcacagggccggtgtcctgctgctaggggctcagtcctgcctgcctgtcccgggggttccgggcgtaggtgggattgggtcgatgtacacctctgatcagagtataatctattcgaatagccgcgccctcggttatgggcaagccgagcaatgtacccaaatggccggcagcgtcagccgtcgtggtctggacctgactggtttcgtcttggagctgcggggcatgtgcgttgtcctggggtatccgcatggagtggactaccagggcaggccgctcccggagcaggagggtgacgatgcagagccccacgctgcttgggaggttactgcagtgatcctcactggctcacccgagaggacttcgttggcagtcaccgcaggtggagattctttctccgccgcttgccagagcgccgctctcctcgccatcagcactcttcaccagcgctacccggacgagctgcagcactcgccctaccgctaccaccctcgtcgcggaggagcccgcgactacgccaccttccgggatgctagctcggaggatgacgctaccatcatgcacctggcgcgcatggtgtaggcgtacgacgcggctcgtatcgacttccatcagatggtgcgccctgggatggtcgagaacaacatgaagatcttggagctgcgtcaggagaatctgcagctgaagaaggacctagacgtagtggaggcgcagctgcatcagctcaagatcgcccagggagaggtctgtcgccccaagcgctgccgtgtctgccgcagccagaagatcaccgcccgcaagagcacctccaggcccgagcttgttcgtcagtccctggcgtggacttgcttcgtggagacccctcgtgccgagcccgcgcccgtggttcctcaggagggggaagcctccggcgtcggtagcacggaggatgcgctgttgctcaccttccatggtgacgaccaggagaaatgctgccaccagtgatggcaaccaacctgaaggcagcaaccacaacaaccatggnagnccaccttcacctcctccacctcctccaccaccaccaccagacaccaacgccattctcacccaaatcctcgcccagcaggccaacatgatggctgttttcctccaccacatccaaaatccgccacatcataatgctccaccaccacccccacaacactctaaactcgccgagttcctccgcatccgtccaccaaccttctctagctccaataaccctgtggatgcgttggattggttgcatgccgtggggaaaaaagtcgacctgcaggcatgcgagnatgaggatntacaaattcaaacacgc

SEQ ID NO: 27738 - DNA, 1218 bp, Oryza sativa
  Clone ID: PAT_MRT4530_32402C.1
atgatgaccgctttcctccaccacctccaaaatccgccacaacagaatgctccaccaccacctccccaacactctaaactcgccgagttcctccgcatccgcccacctaccttctccagctccaacaaccccgtggatgctttggattggttgcatgccgtggggaagaagttagacacggtgcagtgcagcgatgaggagaaagtcgtcttcgccgcccaccagctgcggggacccgcatctctatggtgggaccatttccaggctacgcagccaggggagcaacctattacttgggctcgcttcaccgccgctttccggagaacccatgtgcccgctggagtcgtggctcttaagaaaagggaattccgagagttgaagcaaggcaaccgctccgtgatggagtatttgcacgagttcaacaacttggcccgttacgccccagaggatgtgcgggaagatgaggagaagcaagagaagttcctggcaggaatggaccccgagctgtccgtccgcctagtctctggggactatccggattttcaacgattggtggacaagagcatccgcttggaagccaagcacaaggagctggaatcgcacaagcgccgcttggcgaatttccgcaatcaacagggtgctaaccagagggttcgctacaccaatccctatccagggggatcctcctcgcagcagcaacaacagcagcagcaacctcgctccgcgcctcgacctcaattcgtggtgcgcgtcccacagccgcagcagcagcagaatcagcaagggactcgtgcgccccgtcctcttacgccaacggtgcagcctggtcaaggccgcagggacgcttcaggtccgcagcgtctgtgcttcaactgcttcgagcccgggcactttgcggataaatgcccaaagccaaggcgtcagcaaggccaagcgcctccccgctccaacaacggcgggaaggatgtcattcggggtcgtgtgaatcacgtgacggccgaggacgtgctgacaactccggacgtcatcgttgagaagaaagacaagacgaagaggatgtgcgtcgactacagagctctcaatgaagtcaccatcaagaacaagtaccctcttccccggatcgatgatctgttcgaccaactcaaaggaagaccatcaacaccatctccgtctggtgttgggaaagttgcgggaacatcaattgtatgccaagcttag

SEQ ID NO: 27739 - DNA, 404 bp, Oryza sativa
  unsure (1)..(404): unsure at all n locations
  Clone ID: PAT_MRT4530_32403C.1
aagggaacacagcggagcncgagggccgcntttttgggnnnnnnnnngcaaaacagcagaccagcaaannnancccaggggccncagggangaanangacgagcaancacaggcgannncccaaacgggagcanngagnaccagagcnnanaccagaggcaanaaggaacacnacangaacaaaaagggaaanccanggaanananacgaagagagacagcnngcgangngcnanagnccaaaacnncngannngccaaaanaaagnnngangnngcaanncaaaccaaacncanncnaaagangcagagaagggaaagcnnaanccgnnncgncaacaaccngggnncccagccccnncaaacccncaggagggaccncggccacagggaccagagagnagag

SEQ ID NO: 27740 - DNA, 1310 bp, Oryza sativa
  Clone ID: PAT_MRT4530_32404C.1
aactagtggatccccgggctgcaggcaatgaacctctccaccccaccccgcgacgcgacgcgacgagccgtacaccgaccgccccgcgccgctgctgccggagccggagagagaagctgaagccgaagcagaggcagccgcagcggcaaaactcaaaagacgtcgtcaaaagctctgccgcgcttgcagctttctcgggctcaaggaaaagccatcacaaaaccagagacacacagagagagagagagagagagagagagagagagactgaagaaaggtggcaactcctgcagcagctgcagcagcaagcgctagtgtttgtggtttgctggtgctgtggcgaggcgatgatggatgggcgaatggggctggatcgctgcgagagcgaggttggcgtgcggtgtccgcgtttgattcgatcggatgctggtggtgatttggcggcgctggggtcgtcggagtcggagcagcccaccaggccggcgcggccgcgcggcaagaggagccgcgccgccgaggtgcacaacctctccgagaagaggaggaggagcagaatcaatgagaagatgaaggccctgcagagcctcattcccaactccagcaagacggacaaagcctccatgcttgacgatgccatcgagtacctgaagcagcttcagctccaggtccagatgttgtccatgaggaatggtctatatctgcccccagtgaacttatctggggcacctgagcatctgccgatcccgcaaatgagtgctgcacttgaccagaatagtgccaaagcatcagatccttcagttgttttgcagccggtgaaccagacttcaggagcacttcttccatttgagctggcaagccaacataaacctctattcttaccaggtgttcctaatgcaaccgctctggagcctcggttccttgtagagtcttcgcgttccaatcttcaatccttacggttcactgaacccgctgagatgatctatcctgatgagatgatgttaaagcaccgcctgacttcagctagtgagagcacaattgtgccaggaaccgatgagaagtcggttaggcagaacacatacatgatgaatgctgatcgttttgatagatatgcactcagcaaagaccagttgcagcacattatgccgaaaaacacagaaagtgtacttgatatgccacacttgcaaagaatttaagctgaggattcagtttcttcagttggacagctgacgatccagcttccactcttggacaggttgcaaaccagtgacaccaaagttagggtcgagggtagaatcaaagtaaacccatga

SEQ ID NO: 27741 - DNA, 274 bp, Oryza sativa
  Clone ID: PAT_MRT4530_32405C.1
gtctccggccaccgttaaatacctcgccgccgaccaccaccaccgcggcggccctgaccccaccctgcgagccctagccatggacggcgacgacgaggatatgcgcgacgtctcgtccacgtcgtcctcctcctgcggcggaggggagggcgcggggttcgaggaggggatggtgggaagacacctgaatggctatctcaaatggctgtcatcgattctacgctgggggcagtttgcacatgcatgactggtctcagagaggatccagactgag

SEQ ID NO: 27742 - DNA, 2301 bp, Oryza sativa
  Clone ID: PAT_MRT4530_32406C.1
atgtcatggcacagggccggtgtcctgctgctaggggctcagtcctgcctgcctgtcccgggggttccggccatggccggcagcgtcagccatcgtggtctggacatgactggtttcgtcttggagctgcggggcatgtgcgttgtcctggggtatccgcatggagtggactaccagggcaggccgcttccggagcaggagggtgacgatgcagagccccacgctgcttgggaggttactgcagtgatcctcactggctctcccgagcggacttcgttggcagtcaccgcgggtggagattctttccccgccgcttgccagaacgccgctctcctcgccatcggcactcttcaccagcgctacccagacaagttgcagcactcgccctaccgctaccaccctcgccgcggaggagcccgcgactacgccacctttcgggatgctagctcggaggatgacgctaccatcatgcacctggcgcgcatggtggaggcgtacgacgcggcccgtatcgacttccatcagatggtgtgccgtgggatggtcgagaacaacctgaagatcctggagctgcgtcaggagaatctgcagctgaagaaggacctagacgcagtggaggcgcagctgcatcagctcaagatcgcccagggagaggtctgtcgccccaagcgtcgccgcgtctgccgcagccagaagatcaccgcccgcaagagcacctccaggcgcgagcttattcgtcagtccctggcgtggacctgcttcgtggagacccctcgtgccgagcccgcgcccgtggttccccaggagggggaagcctccggcgttggtagcacggaggatgcgctgttgctcaccttccgccctggcccgtcgcagcggagaagtgctaataccggtgatggcaaccaacctgagggcagcaaccacaacaaccatggcagcccacctccacctcctcccccgcctccaccaccaccaccagacaccaacgccattctcacccaaatcctcgcccagcaggccaacatgatgactgctttcctccaccacctccaaaatccgccacaacagaatgctccaccaccacccccacaacactctaaactcgccgagttcctccgcatccgtccaccaaccttctctagctccaacaaccccgtggatgcgttggactggttgcatgccgtggggaaaaagctagacactgtgcagtgcagcgatgaggagaaagtcatcttcgccgcccaccagctgcaggggcccgcatctctatggtgggaccatttccaggctacgcagccagaggggcagcctattacttgggcccgcttcaccgccgcttttcggaggacccatgtgcccgccggagtcatggcccttaagaaaagggaattccgagagttgaagcaaggcaaccgctccgtgatggagtatttgcatgagtttaacaacttggcccggtacgccccggaggatgtgcgggaagatgaggaaaagcaggagaagttcttggcgggaatggatcctgagctgtccgtccgtctagtctccggtgactatccggatttccaacgtctggtggacaagagcatccgcttggaagccaagcacaaggaactggagtcgcacaagcgccgcttggcgaatttccgcaatcaacagggagctaaccaaaggatccgctacaccaatccctatccagggggatcgtcctcgcagcagcaacagcagcagcaacctcgctccgtgccccgacctcaattcgtggtgcgcgtcccacagccgcagcaacaacagagccagcaagggacccgtgcgccccgtcctcctatgccaaccgtgcagcctggtcaaggccgcagggacgttcaaggtccgcagcgtttgtgcttcaactgcttcgagcctgagcactttgcggataaatgcccaaagccgaggcgccagcaaggccaagcgcctccccgctccaacaaaggtggtaaggatgtcattcggggtcgtgtgaaccacgtgacagccgaggacgtgctgacaactccagacgtcatcgttggagttgctgtggaccccgaaacagtgaccgccgtcaccgattggaagcaacccaagacagtcactcaaattcgcagtttcttaggtttggcaggatactactggagcgtgtcaaggcagagcaccaacgaccggccggacttctccaacctctccaagtaccggaatggaaatgggatgaaattgggatggatttcatcaccggacttccaaaaacccaaggtggatatgattctatatgggtag

SEQ ID NO: 27743 - DNA, 1984 bp, Oryza sativa
  Clone ID: PAT_MRT4530_32407C.1
atggccggcagcgttacccgtcgtggtttgcacatgactggcttcgtcttggagctgcgaggcatgtgcgtggtcttggggtatccacatggagtggattaccaggccaggccgctcccggatcaggagggtgaggatgcagagcctcacgctggttgggaggtcactgcagtgatcctctccggctctcccgagcggacttcgctggcagtcaccgcgggtggagattccttccccgccgcttgccagaacgccgctctcctcgccatcggcacccttcaccagcgctacccggacgagttgcagcactcgccctaccgctaccacccccgtcgcggaggagccagcgaccacgccaccttccgagacgccagctcggaggatgacgctaccgtcgtgcatctggcacgcatggtggaggcgtacgacgcggctcgtatcgacttccaccagatggtgcgtcgtggcatggtggagaacaacctgaagatcctggagctgcgtcaggagaacctgcagctcaagaaggacctcgacgcgttggaggcgcagctgcatcagctcaagatcgcccagggagagatcagccgtcccaagcgtcgccgcgtctgccgcagccagaagatcaccgcccgcaagagcacctccaggcccgagcttgttcgtcagtccctggcgtggacctgcttcgtcgagacccctcgtgccgagcctgcgcccgtggttccccaggagggggaagcctccggcgttggtagctcggaggttgtgtggggcatggttacaccgatggtgacgaccaggagaaatgctgctaccggtgatggcaaccaacccgaaggcagcaaccacaaccaccagggcaacccacctccacctccacctccgcctccaccaccaccgccagacaccaacgccattctcacccaaatcctcgcccagcaagccaacatgatgaccgctttcctccaccacctccaaaacccgccacaacagaatgctccaccaccacctccccaacactctaaactcgccgagttcctccgcatccgtccacccaccttctctagctccaacaaccccgtggatgctttggattggttgcatgccgtgggaaagaagctagacacggtgcagtgcagcgacgaagagaaagtcatcttcgccgcccaccagctgcagggacccgcatctctctggtgggaccacttccaggctacgcagccagaggggcagccgattacttgggctcgcttcaccgccgctttccggagaacccatgtgcccgccggagtcgtggctcttaagaagagggagttccgggagttgaagcaaggcaaccgctccgtgatggagtatttgcatgagttcaacaatctggcccggtacgctccggaggatgtgcgggcagacgaggagaagcaggagaagttcttggcaggaatggaccctgagctgtccgttcgtctagtctctggggactatcctgatttccaacgtctggtggataagagcatccgcttggaagccaagcacaaggagctggaatcgcacaagcgccgcttggcgaacttccgcaatcaacagggtgctaaccagagggtccgctacaccaatccctacccagggggatcctcctcgcagcagcagcagcagcagcagcaacctcgctccgcgcctcgaccacaattcgtggtgcgcgtcccacagccgcagcagcagcagaatcaacaagggactcgtgcgccccgtcctcctacgccagctgtgcagcccgctcaaggccgcagggacgctcaaggtcagcagcgtctgtgcttcaactgcttcgagcccgggcactttgcggataaatgcccaaagccaaggcgtcagcaaggccaagcgcctccccgctccaacaacggcgggaaggatgtcattcggggccgtgtgaatcacgtgacggccgaggacgtgctgacaactcccgacgtcatcgttg

SEQ ID NO: 27744 - DNA, 2274 bp, Oryza sativa
  Clone ID: PAT_MRT4530_32408C.1
atgtcatggcacagggccggtgtcctgctgctaggggctcagtcctgcctgcctgtcccgggggttccggccatggccggcagcgtcagccgtcgtggtctggacatgactggtttcgtcttggagctgcggggcatgtgcgttgtcctggggtatccgcatggagtggactaccagggcaggccgctcccggagcaggagggtgacgatgcagagccccatgctgcttgggaggttactgcagtgatcctcactggctctcccgagcggacttcgttggcagtcaccgcgggtggagattctttccccgccgcttgccagagcgccgctctcctcgccatcggcactcttcaccagggctacccggacgagttgcagcactcgccctaccgctaccaccctcgtcgcggaggagcccgcgacttcgccaccttccgggatgctagctcggaggatgacgctaccatcatgcacctggcgcgcatggtggaggcgtacgatgcggctcgtatcgacttccatcagatggtgcgtcgtgggatggtcgagaacaacatgaagatcctggagctgcgtcaggagaatctgcagctgaagaaggacctagacgcagtggaggcgcagctgcatcagctcaagatcacccagggagaggtctgtcgccccaagtgtcgccgcgtctgccgcagccagaagatcaccgcccgcaagagcacctccaggcccgagcttgttcgtcagtccctggcgtggacttgcttcgtggagacccctcgtgccgagcctgcgcccgtggttccccaggagggggaagcctccggcgttggtagcatggaggatgcgctgttgctcaccttccgtcctggcccgtcgcagcggagaagtgctgccaccggtgagggcaaccaatctgaaggcagcaaccacaaccaccagggcagcccacctccacctcctcctccgcctccaccaccaccaccagacaccaacgccattctcactcaaatcctcgcccagcaggccaacatgatgactgctttcctccaccacctccaaaatccgccacaacagaatgctccaccaccacccccacaacactctaaactcgccgagttcctccgcatccgtccacctaccttctctagctccaacaaccccgtggatgcgttggattggttgcatgccgtggggaaaaagctagacactgtgcagtgcagcgatgaggagaaagtcatcttcgccgcccaccagctgcaggggcccgcatctctatggtgggaccatttccaggctacgcagccagaggggcagcctattacttgggcccgcttcaccgctgctttccggagaacccatgtgcccgccggagtcgtggcccttaagaaaagggaattccgagagttgaagcaaggcaaccgctctgtgatggagtatttgcatgagttcaacaacctggcccggtacgccccggaggatgtacgggaagatgaggaaaagcaggagaagttcttggcgggaatggatcctgagctgtccgtccgtctagtctccggggactatccggatttccaacgtctggtggacaagagcatccgcttggaagacaagcacaaggaactggagtcacacaagcgccgcttggcgaatttccgcaaccaacagggtgctaaccaaagggtccgctacaccaatccctatccagggggatcctcctcgcagcaggaacaacagcagcagcaaccacgctccgcgcctcgacctcaattcgtggtgcgcgtcccacagccgcagcagcagcagagtcaacaagggactcgtgcgccccgtcctcctatgccaactgtgcagcctggtcaaagccgcagggacgctcaaggtccgcagcgtctgtgcttcaactgcttcgagccggggcactttgcggataaatgcccaaagctgaggcgtcagcaaggccaagcgcctccccgctccaacaacggtggtaaggatgtcattcggggtcgtgtgaaccacgtgacagccgaggacgtgctgacaactccagacgtcatcgttgtcggacctgaatcttcggcaaaggagatggttagaactcatcaaggattacgatgtgggaattcactatcatcctgcgtgtcaaggcagagcaccaacgaccggccggacttctccaacctctccaagtaccagaatggaaatgggatgaaattgggatggatttcatcaccggacttccaaaaacccaaggtggatatgattctatatgggtag

SEQ ID NO: 27745 - DNA, 129 bp, Oryza sativa
  Clone ID: PAT_MRT4530_32409C.1
aggcacaagttatatcatcagaatacatagcaactgccagtgctcaaaaattgggccataccatcattttgtccacagaaacctgtaccaattaccagttcaaaaactagcagaaccatgtctatccat

SEQ ID NO: 27746 - DNA, 261 bp, Oryza sativa
  Clone ID: PAT_MRT4530_3240C.1
gcggcgccgtgcaccgcttctcacagtgtctgctgtcgcagtggcagccggtgctcagagctggtgcttgtctactgtctcccctcgctatcacgccacatttgctgctagtcttgcatcagcatcaccgtcctggtcctcttcctcctccaactgatgcaaaataccggcgtctttgcggccccggctgatccggaagagatggatgcttgccgccaccgtctcaagggtcgggatggacgcctccggacaccgtcttat

SEQ ID NO: 27747 - DNA, 5604 bp, Oryza sativa
  Clone ID: PAT_MRT4530_32411C.1
atggcgacgacgggaacggcgaccggagcggagagaggcggcggcacggctcgggtcgacggggacggcggcgttccggcggtcggcgaccgaaacggagaggtggacgaggtcggcgaggatgcggcgaagctgaaggaggcggtgccgaagcgggagatggtccggggcaacgacggcggcgaaccggagctcggcggcgacggcggagagagaggacgacgacgcgagctcgattccgacggggaaagagagcggcgagtggcggaaacggtggagagaggcacggggagtgtttatatagagccgggggcgagagagggtggccggggaagggaggaaaccggcgcgggagagaatgatttttatttcgggatgaatttatcaggacgtgacacacatggagtggactaccagggcaagccggtcccagagcaggagggtgacgatgcagagcccgtcgctgcttgggaggtcactgcagtgatcctctctggctcacctgagaggacttcgctggcagtcaccgcgggtggagattccttctccgccgcttgccagaacgccgctctcctcgccatcggcactctgcaccagcgctacccggacgagttgcagcactcgccctaccgctaccaccctcgccgcggaggagcccgcgactacgccaccttccgggatgctagctcggaggatgacgctaccatcatgcacctggcgcgcatggtggaggcgtacgacgcggcccgtatcgacttccaccagatggtgcgccgcgggatggtcgataacaacatgaagatcctggagctgcgtcaggagaatctgcagctgaagaaggatctggacgtgctggaggcgcagctctgtcagctcaaggtcgcccagggagaggtctgtcgtcccaagcgccgccgcgtctgccgcagccagaagatcaccgctcgcaagagtacctccaggcccgagcttgtttgtcagtccctggcgtggacctgcttcgtggagacccctcgtgccgagcccgcgcccgtggttcctcaggagggggaagcctccggcgtagggagcacggaggatgcgctgctgctcaccttccgtcctggcccgtcgcagcgagtcgtatggggcatggttatgccgatggtgacgaccaggagaagtgctaataccggtgatggccaccaacccgaaggcagcaacctcaacaaccatggcagcccacctccacctcctcctccgcctccaccaccaccaccagacaccaacgccatcctcacccaaatcctcgcccagcaagccaacatgatggctgctttcctccaccacatccaaaatccaccacagcataatgctccacctccaccaccacccccgcaacactctaagctcgccgagttccttcgcattcgcccgcctaccttctccagctccaataaccccgtggatgccttggattggttgcatgcagtggggaagaagttagacactgtgcagtgcaacgatgaggagaaagctacgcagcccgaggggcagcctatcacctgggcccgtttcaccgccgctttccggagaacccatgtgcctgccggagtcatggcccttaagaaaagggcattccgggagttgaagcaaggcaaccgctctgtgatggagtatttgcatgagtttaacaacctggcccggtacgccccggaggacgttcgggaagatgaggaaaagcaagagaagttcttggcgggaatggaccctgagctgtccgtacgtctgatctccggggattatccggatttccaacgtctggtggacaagagcatccgcttggaagccaagcacaaagaattggagtcgcacaagcgtcgcttggcgaatttccgcaaccaacagggggctaaccaaagggtccgctacaccaatccctatccagggggatcctcctcgcagcagcaacagcagcaacctccctccgcgccccgacctcaatttgtggtgcgcgtcccacagccgcagcaaccgcagggtcagcaagggacccgtgcaccccgtccccctgcgccagctgtgcagcctggtcaaggccacagagacgttcaaggtcagcagagtctgtgcttcaactgcttcgagcctgggcactttgcggataaatgcccaaagccgaggcgccagcaaggccaagcgccgccccgctccaacaacggtggtaaggacgtcattcggggtcgtgtgaaccacgtgactgccgaggatgtgctgacaactccagacgtcatcgttggtacgttcctcatccattccacccctgctaccattttgttcgactctggagcttcccactcgtttatatctgtgccattcgtggggagaaatcagttgggggtagaaaggcttaggaaccctatgctcatcaccacccctggaggggttatgacagcgaagtactatagccctgccgttcccatagaaattcagggaattccgtttccctcggatctgattcttctagacaccaagaacttggatgtgatccttgggatgaattggttggctcaattccaaggagtagtggattgtgcaagacgcactgtcactctgcaccgagggccggaacaaccggttgttttatttgcacccccaacctctgtcagtagttcagaacttcatcagataggactgttagaaatccccatcgtcagagagttcggagacgtgtttccggaagaactacccggtatgccgcccaagcgagagattgagttccggatagatcttgctccaggaacaactcctttgtacaaacggccctaccgtatggcagcaaatgaactggccgaaattaagaaacagttggaagagttgaaagaaaaggggtatatacgtccgagcacttccccctggggtgctcccgtaatttttgtggagaagaaagacaagacaaagaggatgtgtgtcgactacagagctctcaatgaagttactatcaaaaataagtaccctcttccccgaatcgatgatctgttcgatcagcttaaaggtgccacggtattctccaagattgatcttcgttccggatatcaccagttgcgcatccgtgaagaagatatcccgaagactgcattcaccacgcgatatggactgtatgaattcacggtgatgtcgttcggtctgactaatgctcctgctttcttcatgaacttgatgaacaaagtgttcatggaatacttggataagtttgttgtggtcttcatcgacgacattctggtgtactcgcaatcagaggaagaccatcagcaacatctccgtctggtgttgggaaagttgcgggaacatcaattgtatgccaagcttagcaagtgtgagttctggttgtccgaagtcaaattcttagggcacgtgatatctgctaaaggagttgctgtggaccccgaaacagtgaccgccgtcaccgattggaagcaacccaagacagtcactcaaattcgcagtttcttaggtttggcaggatactaccggaggttcatcgagaacttctccaaaatcgctcgacccatgacacagttgttgaagaaagaagagaaatttgtgtggagcccgcaatgcgagaaggcgttcaaaacactcaaagaaaagctggtttcctcgccagtgttaatcttgccggatactcgcaaagacttcctggtgtattgtgacgcttcgcgccaaggattggggtgcgtgctcatgcaggaaggtcatgtggtggcctatgcctcacgccagctacggcctcatgaaggcaactaccctacccatgatttggagttagccgcggtggttcatgctctaaaaatctggcggcactatctcattgggaatcgctgcgaaatatataccgatcataagagtttgaaatacatcttcacccagtcggatctgaatcttcggcagaggagatggttagaactcatcaaggattatgatgtgggaatccactatcaccctggtaaggccaacgtggtcgcagacgcgctgagtcgaaaaagccgttgcaacactcttggcgtccgtggcattccactggagcttaatcaacagttggaagccctgaacctaagcatcgttagccatggattcttagctacactggaagccaagcctaccttactcgatcaaatccgcgaggctcagaagaatgatctagatatgcatgggatcctcaagaatatgaaacagggtaaagccgctggtttcacagaggatgaacacggaactctatggaatggaaaccgggtatgcgttccagacgtcagggaacttaaacagttgatacttcaggaagctcacgaaagtccttattccatccaccctggcagtacgaagatgtacctggacttgaaagagaaatactggtgggttagtatgaagcgggagattgcggagttcgtagccctttgtgatgtgtgccagcgtgtcaaggcagagcaccaacgaccggccggacttctccaacctctccaagtaccagaatggaaatgggatgaaattgggatggattttatcactggacttccaaaaacccaaggtggatatgattctatatgggtagttgtggaccgactaaccaaagtagctcggtttattcctgtgaagaccacctatggagggaacaaactagctgaactctatttcgctaggatcgtaagtctgcatggcgtccccaagaaaatcgtatctgatcggggaagtcagttcatctctcacttttggaagaagctccaagaagagttgggtacccgattaaatttcagcaccgcgtatcacccgcagacagatggtcaaaccgagcgtctaaaccagatcctcgaggatatgcttcgcgcatgtgtcctagatttcgggaaaacatgggataatagtctcccctatgccgagttctcctacaataacagctaccaagccagcatacaaatggcaccctatgaagcgttgtatggacgcaaatgtcggacaccgctattgtgggaccaagttggggaaagccaagtgttcgggaccgatatcctgagagaagccgaagctaaggtcagaaccatttgggaaaacctaaaggtggcacagtctcggcagaagagttatgcagacaaccgacgccgtgacctggaattcgcagtggatgactttgtgtatctccgggtaacgccattgcgaggggtacacaggtttcagacgaaagggaagctcgcacctcggttcgtgggtcctttccgcatcactgctcgacgcggagaagtagcgtaccaattggagttgcctgcttccttgggcaacgtgcatgatgtgttccatgtgtcgcaactcaagaaatgtcttcgagtgccgtccgagcaggctgactcagagcagattgaagttcgcgaagacttgacctacgtggagagaccagtgaaaatcctagacaccatggagcgcaggaccaggaatcgggtaatccgtttttgcaaggtccaatggagcaaccatgccgaggaagaagctacttgggagcgtgaagacgagctgaaggcagcccatcccgatctcttcgccagttcttccgaatctcggggtcgagattccgtttaa

SEQ ID NO: 27748 - DNA, 726 bp, Oryza sativa
  Clone ID: PAT_MRT4530_32412C.1
tcagcggctcaagggggaggcccacggtggacgcggaccaccgcggcctcgggcgcaccgtggaccaggaccacgccggtccacgggcggccacagggcagggcgggcgtggcctagaccggccggccgagcagcgacgaacagtggcggcggcggcctagccggatggccaccggcggtggcggcgcaacgcggcggccggcgaagctcgaggcggagggaggcggcggaactccggtgacaagcgacggcggtgcacgggaagcgaacgttcagcgagtttccatcgacggggaggtggtggccgagcttgcccttgcggtggttagggtggcggtggtggccggttttacgcgacgggaggcggcagtggctcagatgcatggtggaatggtgttttggtggtggttttgtgggtttggagtggaggccggggtggagcttgatgcggagaagccgtcaatggaaacggcgcagcacaacggcggtgggagcgttggtggcgcgcggctggagtcggtggcggcggcggagagaggtggtgcgcgaagcggcggtgttccggaggcggagaggggaaatggagtaggggccgggctgcggcacggcgccgcgaagccgacggtggtggcggattggcgcggcggtgggtggagcagcggtggcgggtggccggagctcatcggaaagcggcggtgcgcgggagcagcgtggggagggcggtag

SEQ ID NO: 27749 - DNA, 429 bp, Oryza sativa
  Clone ID: PAT_MRT4530_32413C.1
atggccgtggcagtggccgccggaacagccgccgtctcatgcccgcgcctcgtccccgagcgtatccccctctccgcctccgtcgccgtcacatgtggccgtggctgcggggtggcggtgagggcgcatggccaaagcgcaacgcgtcgcggagagaagctatgcgacgaccacgacggccatggtggatgccagtgcggcggctggtcgcagcagcgccgaggagcggcaacacgggaaggggtcgtggagtggagtagccagaaggaggtggtgagggcgaggagctcgcccgccgccgctcctcctctgctccgccccgccggcccgcgcccgcccgctcgtccacgcctcgccgccgaggtgctgtcccgctcgtcggcctccccgcgcgctcgccggcctcccccgagggagcacccaagatag

SEQ ID NO: 27750 - DNA, 11169 bp, Oryza sativa
  Clone ID: PAT_MRT4530_32414C.1
atggatgaagtcgggggtcgatggacattctccagggcaaatgaaggctacacgagctgcggcccgatggccggcagcgtcacccgtcgtggtttggacatgactggcttcgttttggagctgcgaggcatgtgcgtggtcctggggtatccacacggagaggactaccaggccaggccgcttccggatcaggagggagatgacgcggagccccacgctgggtgggaggtcaccgcagtgatcctctctggctcccccgagcggacttcgctggcagtcaccgcgggtggagactccttccccgccgcttgccagaacgccgctctcctcgccatcggcacccttcaccagcgctacccggacgagttgcagcactcgccctaccgctaccaccctcgtcgcggaggagcccgcgactacgccaccttctgggatgctagctcggaggatgacgctaccatcgtgcacctggcacgcatggtggaggcgtacgacgcggctcgtatcgacttccatcagatggtacgccgcgggatggtcgagaacaacatgaagatcctggagctgcgtcaggagaacctgcagctcaagaaggacctcgacgcagtggaggcgcagctgcaccagctcaaggtcgcccagggagagatctgccgccccaagcgtcgccgtgtttgccgcagccagaagatcaccgcccgcaagagcacctccaggcccgagcttgtccgtcagtccctggcgtggacttgcttcgtcgagacccctcgtgccgagcctgcgcccgtggttccccaggagggggaagcctccggcgttggtagctcggaggcagtagacgagcagttagtaggcttgcgcgtgtgttctttctcgtttgtcttttttggagtcgtgtggggcatggttatgccgatggtgacgaccaggagaaatgctgttaccggtgatggcaaccaacccgaaggcagcaaccccaaccaccagggcaacccacctccacctcctcctccgcctccaccaccaccaccagacaccaacgccattctcacccaaatcctcgcccagcaagccaacatgatgaatgctttcctccaccacctccaaaatccgccacaacagaatgctccaccaccacccccacaacactctaaactcgccgagttcctccgcatccgcccacctaccttctccagctccaacaaccccgtggatgctttggattggttgcatgccgtggggaaaaagctagacacggtgcagtgcagcgatgaggagaaagtcgtcttcgccgcccatcagctgcagggacctgcatctctatggtgggaccacttccaggctacgcagccagagggacagccgattacttgggctcgcttcaccgccgctttccggagaacccatgtgcccgctggagtcgtggctcttaagaaaagggaattccgagagttgaagcaaggcaaccgctccgtgatggagtatttgcatgagttcaacaacctggcccgttacgctccggaggatgtgcgggaagatgaggagaagcaagagaagttcttggcaggaatggaccctgagctgtccgtccgtctagtctctggggactatccggattttcaacgactggtggacaagagcatccgcttggaagccaagcacaaggagctggaatcgcacaagcgccgcttggcgaatttccgcaatcaacagggtgctaaccaaagggttcgctacaccaatccctatccagggggatcctcctcgcagcagcagcaacagcagcagcaacctcgcccagcgccccgacctcaattcgtggtgcgcgtcccacagccgcagcagcagcagaatcagcaagggactcgtgcgccccgtcctcctacgccaactgtgcagcccgttcaaggccgcagggacgctcaaggtcagcagcgtctgtgcttcaactgcttcgagcccgggcactttgcggataaatgcccaaagccaaggcgtcagcaaggccaagcgcctccccgctccaacaacggcgggaaggatgtcattcggggtcgtgtgaatcacgtgacggccgaggacgtgctgacaactccagacgtcatcgttggtacgttcctcgttcattccatccctgctacaattttgttcgactctggagcttcccactcgtttatatctgtgccattcgtggggaaaaatcagttgggggtagaaaggcttagaaaccctctgctcatcaccacccctggaggggttatgacagcaaagttttatagccctgccgtccctatagaaattcaggggattccttttccctcggatctgattctgctagacaccaagaacttggatgtgattcttgggatgaattggttggcacaattccaaggagtagtggattgcgcgagacgcactgttactctgtaccgagggccggaacaaccggttgttttctttgcacccccaacctctgttagaagttcagaacttcatcagatagaactgtcagaaattcccatcgtcagagagttcggagacgtgtttccggaagaactacctggtatgccgcccaagcgagagattgagttccgaatagatcttgctccaggaactactcctctgcacaagcgaccctaccgtatggcagcaaatgaactagccgaagtaaagaaacagttggaagagttgaaagaaaaggggtacatacgtccgagtacttccccatggggtgctcctgtgatttttgtagagaagaaagacaagacgaagaggatgtgcgttgactacagagctctcaatgaagtcaccatcaaaaacaagtaccctcttccccggatcgatgatttgttcgatcagcttaaaggtgccactgtattctccaagattgatctccgttccggatatcaccaattacgtattcgtgaagaagatattccgaagaccgcattcaccacgcgatacgggctgtatgaattcacggtgatgtcgttcggtttgaccaatgcacctgccttcttcatgaacttaatgaataaagtgttcatggaatacttggataagtttgttgtggttttcattgatgacattctgatatactcacaatcagaggaagaccatcagcaccatctccgtctggtgttgggaaagttgcgggaacatcaattgtatgccaagcttagcaagtgtgagttctggttgtccgaagtcaaattcttagggcacgtgatatctgctaaaggagttgctgtggatcccgaaacagtgaccgccgtcaccgattggaagcaacccaagacagttacccaagtccgcagtttcttaggtttggcaggatactatcggagattcatcgagaacttctccaaaatcgctcgacccatgacacagttgttgaagaaagaagagaaatttgtgtccagcccgcaatgcgagaaggcgttccaaactctcaaggaaaagctggtttcctcgccggtgttaatcttgccggatactcgcaaggacttcatggtgtattgtgatgcttcgcgccaaggattggggtgcgtgctcatgcaggacggtcatgtggtagcctatgcctcacgccagctacgtcctcatgaaggcaactaccctacacatgatttggagttagccgcagtagttcatgctctaaaaatctggcggcactatctcattgggaatcgctgtgaaatctataccgaccataagagtctgaaatacatcttcactcagtcggacctgaatcttcggcaaaggagatggttagaactcatcaaggactatgatgtgggaattcactatcatcctggtaaggccaacgtggttgccgacgctctaagtcgaaagggccattgcaacactcttaacgtccgtggcattccacccgaacttagtcaacagatggaagccctgaacctaaacatagttggtcgtggatttttggccgcgttggaagccaagcccaccttgctcgatcaaatccgcgaggctcagaagaatgatccggacatgcatggactcctcaagaatatgaaacagggtaaagccgctggtttcacagaggatgaacacggaaccctatggaacggaaatcgggtatgcgttccagataaccgagaacttaaacagctgatacttcaggaagctcacgaaagtccttattccatccaccctggcagtacaaagatgtacttagatttgaaggagaaatactggtgggttagcatgaagcgggaaattgcagagtttgtggccctgtgtgatgtgtgccagcgtgtcaaggcagagcaccaacgaccggccggacttctccaaccactccaagtacctgaatggaaatgggatgaaattgggatggatttcatcaccggacttccaaaaacccaaggcggatatgattctatatgggtagttgtggatcgattaaccaaggtggctcgatttattcttgtgaagaccacctatggagggaacaaactagcggagctctacttcgctaggatcgtgagtctccacggcgttcccaagaaaatcgtatctgataggggaagccaattcacctctcacttttggaagaagctccaagaagagctgggtactcgattgaatttcagcaccgcctatcacccgcagacagatggacagaccgagcgtctaaatcaaattctagaagatatgctccgcgcatgtgtactagatttcgggaagacctgggataagagtctcccctatgccgagttctcctacaataacagctatcaatccagcatacaaatggcaccatatgaagcgttgtacgggcgcaaatgccggacaccgctcctgtgggaccaagttggggaaagccaagtgttcgggactgatatcctgagagaagctgaagctaaagtcagaatcattcgggataatctaaaggtggcacagtcacggcagaaaagttatgcagataaccgtcgccgtgacctggaattcgcagtggatgattttgtgtatcttcgagtcacgccattgcgaggtgtccacaggtttcagacgaaagggaagcttgcacctcggtatgtgggtcctttccgtatcgttgctcgacgcggagaagtcgcttaccagttggagctgcccgcctccttgggcaacgtgcatgatgtgttccatgtgtcgcaactcaagaaatgccttcgagtgccatccagcagaccgactcagagcaaattgaagttcgcgaagatttgacctacgtggagaggccagtgaaaatcctggacaccatggagcgcaggaccaggaaccgggtaatccgtttttgcaaggtccagtggagcaatcacgccgaagaaaaagctacttgggagcgtgaagacgagtttctctccgccgtcgccgccgtgctccggttcgccgccgccgtcgctccggacttcctccccactcggcgtcacctccatcggcttcgccgcgttcccgtcgacctcgtccgcgcctccgtttcgctcgccgaccgccggagcaccgtcgtcctcgtcgtcccgaaccgcgccgccgccttcttccgcttcggccgccgttcccgtcgtcgccgtcgaccggggtgagccgaagaccgctccattcgcttcccccttccctcctctctctcgggtgccgctccgccgcgccggtggtcgccggcggtgaccatcggggcgcgggcgcgtccccctaccttcggccgtgccggcgaggccgccttcgggcgcgccctcgcggctgccaggtgggacccggccgtcagccgcccgagcccgcgggtgcggctgacgcgtgggacccacggcgccgaccgccgccagccgcgtgctcccggtccaccgtggaccgagaggctgacgcgtgggacccactcccgtggacccggtccgcgcgccctctccctcggctcggccatataaggaccggtcttcgggcctctgttgcaaagcactaccgtacttccaaatgtctagtggggcaaatgaaggctacacgagctgcggcccgatggccggcagcgttacccgtcgtggtttggacatgactggcttcgtcttggagctgcgaggcatgtgcgtggtcttggggtatccacatggagtggattaccaggccaggccgcttccggatcaggagggagacgacgcagagccccacgctgcgtgggaggtcacagcagtgatcctctccggctctcccgagcggacttcgctggcagtcaccgcgggcggagactccttccccgccgcttgccagaacgccgctctcctcgccatcggcacccttcaccagcgctacccggacgagttgcagcactcgccctaccgctaccaccctcgtcgcggaggagcccgcgaccacgccaccttccgagacgccagctcggaggatgacgctaccgtcgtgcatctggcacgcatggtggaggcgtacgacgcggctcgtatcgacttccaccagatggtgcgtcgtggcatggtggagaacaacctgaagatcctggagctgcgtcaggagaacctgcagctcaagaaggacctcgacgcgttggaggcgcagctgcaccagctcaagatcgcccagggagaggacagccgtcccaagcgtcgccgcgtctgccgcagccagaagatcaccgcccgcaagagcacctccaggcccgagcttgttcgtcagtccctggcgtggacctgcttcgtcgagacccctcgtgccgcacctgcgcccgtggttccccaggagggggaagcctccggcatggtgacgaccaggagaaatgttaacaccggtgaaggcaaccaacccgagggcagcaaccccaacccccaaggcaacccacctccaccaccaccaccagacaccaacgccattctcacccaaatcctcgctcagcaagccaacctgatgactgctttcctccaccacctccaaaatccgccacaacagaatgctccaccaccccctccccaacactccaaactcgccgaattcctccgcatccgcccacccaccttctctagctccaacaatcccgtagatgcgttggattggttgcatgccgtggggaagaagctagacacggtgcagtgcagcgacgaagagaaagtcatcttcgccgcccaccagctgcaggggcccgcatctctctggtgggaccacttccaggctacgcagccagaggggcagccgatcacttgggctcgcttcaccgccgctttccggagaacccatgtgcccgccggagtcgtggctctcaagaagagggaattccgagagttgaagcaaggcaaccgctccgtgatggagtatttgcacgagttcaacaacttggcccgttacgcccctgaggatgtgcgggaagatgaggagaagcaagagaagttcttggcaggaatggaccccgagctgtctgttcgtctagtctctggggactatccggattttcaacgactggtggacaagagcatccgcttggaggccaagcacaaggagctggaatcgcacaagcgccgcttggcgaacttccgcaatcagcagggtgctaaccagagggtccgctacaccaatccctatccagggggatcctcctcgcaacagcaacaacagcagcagcaacctcgcccagcgccccgacctcaattcgtggtgcgcgtcccacagccgcagcagcagaatcagcaagggactcgtgcatcccgtcctcctacgccagctgtgcagcccgttcaaggccgcagggacgcttcaggtccgcagcggctgtgcttcaactgcttcgagcccggacactttgcggataaatgcccaaagccaaggcgtcagcaaggccaagcgcctccccgctccaacaacggcgggaaggatgtcattcggggccgtgtgaatcatgtgacggccgaggacgtgctgacaactcccgacgtcaccgttggtacgttcctcgtccattccatccctgctacaattttgttcgactctggagcttcccactcgtttatatctgtgccattcgtggggaaaaatcagttgggggtagaaaggcttagaaaccctctgctcatcaccacccctggaggggttatgacagcaaagtattatagccctgccgtccctatagaaattcaggggattccttttccctcggatctgattctgctagacaccaagaacttggatgtgatccttgggatgaattggttggcccaattccaaggagtagtggattgcgcgaggcgcactgtcactctgtaccgaggaccagaacaaccggttgttttctttgcacccccaacctctgtcagaagttcagaacttcatcagatagaactgtcagaaattcccatcgtcagagagttcggagacgtgtttccggaagaactacctggtatgccgcccaagcgagagattgagttccggatagatcttgctccaggaaccactcctctgtacaagcgaccctaccgtatggcagcaaatgaactggccgaagtaaagaaacagttggaagagttgaaagaaaaggggtacatacgtccgagtacttccccatggggtgctcctgtgatttttgtagagaagaaagacaagacgaagaggatgtgcgtcgactacagagctctcaatgaagtcaccatcaaaaacaagtaccctcttccccggatcgatgatctgttcgatcaactcaaaggtgccactgtattctccaagattgatctccgttccggatatcaccaattacgtattcgtgaagaagatattccgaagaccgcattcactacgcgatatggactgtatgaattcacggtgatgtcgttcggcttgaccaatgctcctgccttcttcatgaacttaatgaacaaagcgttcatggaatacttggataagttcgttgtggttttcatcgatgacattctgatatactcacaatcagaggaagaccatcagcaccatctccgtctggtgttgggaaagttgcgggaacatcaattgtatgccaagcttagcaagtgtgagttctggttgtccgaagtcaaattcttggggcacgtgatatctgctaaaggagttgctgtggaccccgaaacagtgaccgccgtcaccgattggaagcaacccaagacagtcactcagattcgcagtttcttgggtttggcaggatactaccggaggttcatcgagaacttctccaaaatcgctcgacccatgacacagttgttgaagaaagaagagaagtttgtgtggagcccgcaatgcgagaaggcgttccaaactctcaaagaaaagctggtttcctcgccagtgttaatcttgccggatactcgcaaggatttcatggtgtattgtgatgcttcgcgccaaggattggggtgcgtgctcatgcaggacggtcatgtggtagcctatgcttcacgtcagctacgacctcatgagggcaactaccctacgcatgacttggagttagcagcggtggttcatgctctaaaaatctggcggcactatctcattgggaaccgctgtgaaatatatactgatcacaagagcttgaaatacatattcacccagtcggatctgaatcttcggcaaaggagatggttagaactcatcaaggattatgacgtgggaatacactatcaccctggtaaggctaacgtggttgccgacgctctaagtcggaagagccattgcaatactctcaacgttcgaggcattccacccgagcttaatcaacagatggaagccctgaacctaaacatagttggtcgtggattcttggctgcgttagaagccaagcccaccttgctcgatcaaatccgcgaggctcagaagaatgatccggacatgcatggactcctcaagaatatgaaacagggtaaagccgctggtttcacagaggatgaacacggaaccttatggaacggaaagcgggtatgcgttccagatagcagagaacttaaacagctgatacttcaggaagctcacgaaagtccttattccattcacccgggcagtaccaagatgtacttagacttgaaggagaaatactgcgtgtcaaggcagagcactagcgaccggctggacttctccaacctctccaagtaccagaatggaaatgggatgaaattgggatggatttcatcaccggacttccaaaaacccaaggtagctcgattcattcctgtgaagaccacctatggaggacacaagctagccgagctctacttcgctaggatcgtgagtctccatggcgttcccaagaaaatcgtatctgataggggaagccaattcacctctcacttttggaagaagctccaagaagagcttggtacccgactaaatttcagcaccgcgtatcacccgcagacagatggacagaccgagcgtctaaatcagatcttagaagatatgcttcgcgcatgtgtcctggacttcgggaagacttgggataagagtctcccctatgccgagttctcctacaataacagctatcaagccagcatacaaatggcaccttatgaagcgttgtatgggcgcaaatgccgaacaccgctattgtgggaccaagttggagaaagccaagtgttcgggactgatatcctgagagaagctgaagctaaagtcagaatcattcgggataatctaaaggtggcacagtctcggcagaaaagttatgcagataaccgtcgccgtgatctggaattcgcagtggatgattttgtgtaccttcgggtcacgccattgcgaggtgtgcacaggtttcagacaaaagggaagctcgcacctcggtatgtgggtccctttcgtatcactgctcgacgcggagaagtcgcttaccagctggagctgcccgcctccttgggcaacgtgcatgatgtgttccatgtgtcgcaactcaagaaatgtcttcgagtgccatccgagcaggccgactcagagcaaatcgaagttcgcgaagatttgacgtatgtggagaagccagtgaaaatcctggacaccatggagcgcaggaccaggaaccgggtaatccgtttttgcaaggtccagtggagcaaccacgccgaagaagaagctacttgggagcgtgaagacgagctgaaggcagcccatcccgatctcttcgccagttcttccgaatctcggggtcgagattccgtttaa

SEQ ID NO: 27751 - DNA, 7939 bp, Oryza sativa
  Clone ID: PAT_MRT4530_32415C.1
atgggcaaagaagtagttgagagcatcctagaggtgctcaagaagaacattgatatcttcgcttggagccctgacgaggtgggaggtgtttcgacagatctcatcatgcatcacctagcaatcaagccggataccaagccaagaaaacagaagttgcgcaagatgtccgccgatcaccaagaagcggcgaaagccgaagtccaaaaactgctcagcgctggggttattcaagagattgaccatccggagtggctggcgaatccagtgctgatccacatgaagccgctcgacatccccaaaacatccttcatcagtccattcggcacattttgtcaccttaggatgcctttcggcctgaggaatgcaggagcaaccttcgccaggctggtgtacaaagtcctttgcaagcagttggggcggaatgtggaagcttatgtcgacaacatcatcgtaaaaagccgcaacgctttcgaccatgcgtccgacctacaggagaccttcgacaacttgcgggcagcgggcataaaactgaatcctgagaagtgcgttttcggcgttcgcgcaggcaagttgttgggcttccttgtttccgaaagaggcatcgaggcaaatcccgagaaaatcgatgccattcagcaaatgaagcctccgtcgagcatacatgaagtacaaaagctcgcgggccgaattacggcactcagtcgattcctctcaaaggcagccgaaaggggtttgcccttcttcaagaccctccggggcacgggaaagtttaattggacaccagagtaccaagcagcgttcgacgagctaaagcaatacctgcaaagcccgccagctctgataagcccagcaccaggaagcgaactgctattatacttagcagcttcgccggtggcagtcagtgctgccctcgtccaagaaacagagttcggccagaaaccggtctatttcgtctccgaagcgttgcaaggagcgaagacaagatacattgaaatggaaaagctcgcttacgccctggtgatggctttgcgcaagcttaagcattacttccaggcccacaaagtcatagtgccatcacggtaccccttgggcgaaatactccgaggcaaggaagtcactggccggctcagcaagtgggcggcagagctatccccccgcccctaccgccgcgttagcacgccggccggccgtgccgtcgcctcctccagcatcgcagccgcctcctcttcgccggcctgccctctgttttccgcggagacctccggaggtgcctccccgccggcgacagtggcgttgccgccactgttccgcctccggccgcctctgccgcgtcccctgtgcgccggccgacgtcgccatcacctctcccggcaccggagcgccgtcctctttcccagccaggccacggcgtcgcccgattttcgccggaacgccgtcgcccgcgccggcttctccttcctcctcgtcggcatctcctccggcagcccctttcgccatgcccgtccgtcagccggcgctgccgtcccctccctcggcacgccgcgacgtcatccttggcatcgcttccccttcggccgaacaccgccggtgtccgtcgtcgtcttcaccgttcatcctcgccggctcgtcgtctcgcggcgccgcctccgtaatcggcatcgcagcggcgtgttccacgccatcctcgcctccgtgcagccgctgccggctgccctcgtcgcctcctcgccggccccggtcgctgtagccgtcgtcgtcttcgtcctcggctccgcgtcgtcaagcctcgtgccggccgcgtctcgcccgtgtatcggtatcggtagtcgttcgcttgtccgtgtagtgtccgtgttagtgtgcccgcttggtagccgcgttgtttccacgtgtgaaacccgtgtggtgtctagtagagtccgtttgtcggccactcgcctcggttgacacacggggtccgcttccgtcgacccgtggaccgtctctgtgtacccggttttctttttatgtattgttattgcttctttataggcttgtagctttgcttgtgtgcttcgcgtagcttctgtcgttccagaggttcccgaagcgtggttcgcggtcgtcgccgaaggttcggaaggccgttctctctctccccctctattcaaaacccccaaaatggttttaggctgggctcgaggtgcgtggttgggttttgttagtcgtacctcgggtactataaggattaagctcgagcctctgttgcgaagcactaccgtacttccacatgtctagtgggtaaggcttagtttgtggctcagtctggttataaacaaaagtacacggatggagatggacgaagtcgggggtcgatggacatctctaggacaaatgaaggctacacgagctgcggcccggtagtcgagatgtcatggcacagggccggtgtcctgctgctaggggctcagtcctgcctacctgtcctgggggttccggccgtaggtggggttgggtcgatgtacacctctgatcagagtataatctattcgaatagccgcgccctcggttatgggcaagccgagcaatgtacccaaatggccggcagcatcaaccgtcgtggcctggacctgactggattcgttttggagctgcggggcatgtgcgttgtcctggggtatctgcatggtgtggactaccagggcaagcagctcccggagcaggagggtgacgatgcagatccccacgctgcttgggaggttactgcagtgatcctcactggctcacccgagaggacttcgttggcagtcaccgcgggtggagattccttctccgccgcttgccagaacgccgcactcctcgccatcggcactcttcaccagcgctacccggacgagttgcagcacccgcctatcgctaccacccacgccgcggaggagcccgcgactacgccaccttccgggatgctagcttggaggatgacgctaccatcatgcacctggcgcgcatggtggaggcgtacgacgcggcccgtatcgacttccatcagatggtgcgccgcgggttggtcgagaacaacatgaagatcctggagctgcgtcaggagaatctgcagctgaagaaggacctagacgcagtggaggcgcagctgcgtcagctcaagatcgcccagggagaggtctgtcgccccaagcgtcgccgcgtctgtcgcagcctgaagatcaccgcccgcaagagtacctccaggcccgagcttgttcgtcagtccctggcgtggacctgcttcgtcgagacccctcgtgccgagcccgcgcccgtggttcctcaggaggagggagcctccggcgttggtagcacggaggatgcgctgctgctcaccttccaccctggcccgtcgcagaagtagacgagtagttagtaggcttgcgcatggtgacaaccaggagaagtgctgctaccggtgaaggcagtcaccccgaaggcagcaaccacaacaaccatggcagcccacctccacctcctcccccgcctccaccaccaccaccagacaccaacgccatcctcacccaaatcctcgcccagcaggccaacatgatggctgctttcctccaccacatccaaaatccgccacaacataatgcttcaccaccacccccacaacattctaaactcgccgagttcctccgcatccgtccgcctaccttctctagctccaataaccccgtggatgctttggattggttgcatgccgtggggaaaaagttagacatcgtgcagtgcaacgatgaggagaaagtcatctttgccgctcaccaactgcaagggcccgcatcgctatggtgggaccacttccaggctatgcagccagaggggcagcctattacttgggcccgcttcaccgccgctttccggaggacccatgtgcccgccggagtcatgacccttaagaaaagggaattccaagagttgaagcaaggcaaccgctccgtgatggagtatttgcatgagtttaacaacctggcccggtacgccccggaggatgttcgtgaagatgaggagaagcaagagaagttcttggcaggaatggaccctgagctgtccgtgcgtctggtctccggggactatccggatttccaacgtctggtggacaagagcatccacttggaagccaagcacaaggaactggagtcgcacaagcgtcgcttggcgaatttccgcaaccaacaaggggctaaccaaagggtccgctacaccaatccctatccaggggaatcctcctcgcagcagcaacagcagcagcaacctcgctccgcgccccgacctcaattcgtggtgcgcgtcccacagccgcagcagcagcagagttagcaagggacccgtgcgccccgtcctcctacgccagctgtgcagcctggtcaaggccgcagggacgctcaaggtcagcagcgtctgtgcttcaactgcttcgagcccgggcactttgcggataaatgccaaagccgaggcgccagcaaggccaagcgcctccccgccccaacaacggtggtaaggatatcattcggggtcgtgtgaaccacgtgactgccgaggatgtgctgacaactccagacgtcatcgtgggtacgttcctcattcattctgtccctgctaccattttgttcgactctggagcttcccactcgtttatatctgtgccattcatggggagaaatcagttgggggtagaaaggcttaggaaccctctgctcatcaccacccctggaggggttatgacagcaaagtattatagccctgccgttcctatagaaattcagggaattccttttctctcggatctgattcttctagacaccaagaacttggatgtgatccttgggatgaattggttggctcaatttcaaggagtagtggattgtgcaagacgcactgtcactctgtaccgagggccggaataaccggtcgttttctttgcacccccaacctctgtcggtagttcagaacttcatcagataagactgtcggaaatccccatcgtcagagagttcggagacgtgtttccggaagaactacccggtatgccgcccaagcgagagattgagttccggatagatcttgctctaggaaccactcctttgtacaagcgaccctatcgtatggcagcaaatgaactggccgaagtcaagaaacagttggaagagttgaaagaaaaggggtatatacggccgagcacttcctcctggggtgctcccgtgatttttgtggaaaagaaggacaagacaaagaggatgtgtgttgactacagagctctcaatgaagttactatcaaaaacaagtaccctcttccccagatcgatgatctgttcgaccagcttaaaggtgccacggtattctccaagattgatcttcattccggatatcaccagttgcgcatccgtgaagaagatatcccgaagaccgcattcaccacgcgatacggactgtatgaattcacggtgatgtcgttcggtttaaccaatgctcctgccttcttcatgaacttgatgaataaagtgttcatggaatacttggataagtttgttgtggttttcattgacgacattctagtgtactcacaatcagaggaagaccatcagcactatctccgtctggtgttgggaaagttgcgggaacatcaattgtatgccaaacttagcaagtgtgagttctggttgtccgaagtcaaattcttagggcacgtgatatctgctaaaggagttgctgtagaccccgaaacagtgaccgccgtcactgattggaagcaacccaagacagtcactcaaattcgcagtttttgggtttggcaggatactaccggaggttcatcgagaacttctccaaaatcgctcgacccatgacacagttgttgaagaaagaagagaaatttgtgtggagcccgcaatgcgagaaggcattccaaactctcaaggaaagactggtttcctcgccggttttaatcttaccggatactcgcaaggacttcctggtgtactatgacgcttcgcgccaaggattggggtgcgtgctcatgcaggaaggtcatgtggtagcctatgcctcacgccagctacggcctcatgaaggcaactaccctacccatgatttggagttagccgcggtggttcatgctctaaaaatctggcggcactatctcattgggaatcgctgtgaaatatatactgatcataagagtttgaaatacatcttcacccagtcggatctgaatcttcggcagagaagatggttagaactcatcaaggattatgatgtgggaatccactatcaccctggtaaggccaacgtggtcgccgacgctctaagtcgaaaaagccattgcaacactcttaacgtccgtggcattccacccgaacttaatcaacagatggaagccctgaacctaagcatagttcgtcgtggattcttggctacgctggaagccaagcctaccttgctcgatcaaatccgcgaggctcagaagaatgatccggatatgcgtggactcctcaagaatatgaaacagggtaaagccgctggtttcacagaggatgaacacggaaccctatggaacggaaatcgggtatgcgttccagacgacaaggaacttaaacagctaatacttcaggaagctcacgaaagtccttattccatccaccctggcagtacgaagatgtacttagacttgaaagagaaatactggtgggttagtatgaagcgggaaattgcagagttcgtggccctttgtgatgtgtgtcagcgtgtcaaggcagagcaccaacgaccggccggacttctccaacctctccaagtaccagaatggaaatgggatgaaattgggatggatttcatcaccggacttccaaaaacccagggcggttatgattctatatgggtagtcgtggatcgactaaccaaggtggctcggtttattcctgtgaagaccacctatggagggaacaaactagccgagctctacttcgctaggatcgtgagtctccatggcgttcctaagaaaattgtatctgataggggaagccaattcacctctcacttttggaagaagctccaagaagagctgggtacccgattaaaattcagcaccgcgtatcacccgcagacagatggacagaccgagcgtctaaatcagatcctagaagatatgctagaacatgcccccgacacactgctgtcctaccattctcgggaacgacatgggataagaatctccccctatgccgagttctcctacaataacagctaccaaaccagcatacaaatggcaccctatgaagcgttgtatggacgcaaatgccggacaccgctattgtgggaccaagttggggaaagccaagtgttcgggacggatatcctgagagaagctgaagctaaagtcagaaccattcgggataatctaaaggtggcacagtcccggcagaagagttatgcagataaccgacgctgtaatctggaattcgcagtggacgactttgtgtaccttcgggtcacgccattgcgaggtgtacacaggtttcagacgaaagggaagctcgcacctcggtttgtgggtcctttccgtatcattgctcgacgcggagaagtcgcttaccagttggagctgcccgcctccttgggcaacgtgcatgatgtgttccatgtgtcgcaactcaagaaatgccttcgagtgccgtccgagcaggccgactcagagcagattgaaattcgtgaagacttgacctacgtggagagaccagtgaaaatcctggacaccatggagcgcaggaccaggaaccgggtaatccgtttttgcaaggtccaatggagcaaccacgccgaggaagaagctacttgggagcgtgaagacgagctgaaggcagcccatcccaatctcttcggcagttcttccgaatctcggggtcgagattccgtt

SEQ ID NO: 27752 - DNA, 225 bp, Oryza sativa
  Clone ID: PAT_MRT4530_32416C.1
gcacgaggtgggatgtgattcacgagaccacgggacctatgatcaaaattgcagtcatctccgactagagaatcctgtagtttttaccgacaaactaatatgcatcagttgtcattacagcagctcttcatcatatacagtttaacttttgagtgtacttttgtcgctgtgatcatgcccttgtaacagttatcccatatgtctggatgtcttcctcttccagtc

SEQ ID NO: 27753 - DNA, 282 bp, Oryza sativa
  Clone ID: PAT_MRT4530_32417C.1
atgcgtatcaaccccatcaccctcttagctttgctcgcagccagtcaaatcggaacccagcggcgcgccactacggtgggaggcatcgaggcgggccaccccggcggcgtcagcggcgacggcgacggcgatggcgccgctgcggtggcgcacgcgccggcagcagcagcagagggcaccggaggcgacggcaggaaggcgagcgaagtcggcgagccggagagagacgacgaggcttgcgaggcacacacttccctttcctatgggccacggcccacgtag

SEQ ID NO: 27754 - DNA, 709 bp, Oryza sativa
  Clone ID: PAT_MRT4530_32418C.1
cgcaattaatagtttagtattatactctaatatgcttaacacattcaatttatgatcaattttatccatccatctatgactttataaaatcatgtttataccgttatatattatacaattattagactctgggttgaacaattttttctatctcttctaatttcgaatacccaagttgattttcctgggcccgccgctcatcaccaacaccaaccttctccactggctgatgcgcctgcatgaggcggctcaggaagcgcaaggttgacggctcaaacatcacccgcaagcgcaaggccagcgacctcatactgtcatgatgtcatcccttagatctctcaagaatttggtcattcctgatgaaagcctgacaaggttggaacatgtcgtcaagacccttacacagctctgcgcaacctcagccactttcattgagctcatcaagatggatgattccaaaacaaaccagctgcacaaggcagcagaggccagctctcatctcccggtagatgtccctgtgtttggccgggatgaggtcaaggagttcatcctgaatgtgattattggatcaccgtagcatgatcatccagaatccagcattggaactggtaaagtaagagcagccaggcacaacattcttgttctcccaatagtcggtatgagtggcgtggggaagacaacacttgccccagtcatctacaatcatgcc

SEQ ID NO: 27755 - DNA, 251 bp, Oryza sativa
  Clone ID: PAT_MRT4530_32419C.1
ataataccatagatgaaaaatgggaacctggaggagaaacatttatgaaaggacaacagaaacgaacattcaccttacaaatgccatcgcatggtaaaaatgttttggaacgcacagtaaaccaaattaccgtgacaaaacccacaatatatgccacccaagaaaaaaccaagaaccaaaacaaaagaaacagagcaaattcttggttaataaatatagaccagccttcaaaaccaagtgataaagaaaca

SEQ ID NO: 27756 - DNA, 1446 bp, Oryza sativa
  Clone ID: PAT_MRT4530_3241C.1
ggcaaagaccgacgacatccactcccacactccgtcggccacctgccctactcctccctcctcttcctctccttctccctaccctatgattgctctcctcctccccgagctctccccctagccgcccaggcagccgcactccgggagccagcaagcccagccccgtggtccggcgcgggggggagatggcggcggccgagttcttgtcgccggaggcggcggcggcggcgggggtggggccggtgcggcagcagcagcatccgggggaggcggcgtggcgggcggtggtggggtggctcgggttcctcctccagatcctgctccagatcgtccgcggcacgccttcctcctgggcgcacctcctctccttcctcgggctccgccaccctctcctctccgccgcgccgccccagccgtcgccgtcgccgtcgccgtcggtcgccttcgtgcggctcccctccgaggctcccgccgacgcgtcgtcgacggggccgccgccgccgctcaggcggctcacggtagtgcttgatttggatgaaactctagtttgtgcatatgagtcatcaagtcttcctgctgctcttcgtgccgaggctgttgaagcaggactgcattgctttgacatggagtgcatatccgctgaaaaggcaagatatgcaaaaccattagttgacaggatagatgctcacaacagattctgtcaccgtctctacaggccatcaactgttaccacggaatatagagagcatgtaaaagatctttcttgtttgtcgaaagatttccacagaattgtccttgttgataacaatccatatagtttcctgctgcaaccattgaatggaataccttgtcttacattctcggctggacaacctgttgatgatcagcttatgggagttatatttccacttctcaagcacctttctctgcaaaatgatgttagaccggcattgtatgaaacatttcacatgccagagtggttccaaagacatgggatcccacaaattgatcaagcagcataagttttgccaccagggcattggattattaggcaaaggctcaaaggccacctatactgcttggagataacacttgtatataatgttattcatccaggcccttccgtatggcgaagccattgttcgaccacggagatcgcagatcactatttgtatcctgagcgtaaatttattgttgtatagtgaccttttgttgctgacacgttctgataatctaactgacagttataatggtctgtgagttcctgaaggcttgtaaattttgatcaaggttctacagcgatgattcagtggcacctgtgaccttaagatggtcttttggagctacatcgtgcatttttttggtttcatatgtcaggccttgtatttgatcccctctttatttaggcttccagcagatttcagttaaaaaaaaaaaaaaaaaaaa

SEQ ID NO: 27757 - DNA, 579 bp, Oryza sativa
  Clone ID: PAT_MRT4530_32420C.1
atggccacggtttctcctggactcttcagttactacgaccccatacccataggccgttcacgctgcgcagatcagaaaggcccaacacattttgccgggccaccccccggtcccgcacgacgcgccgccgtcaaatcctcgtgcgcggccggcctagctgccccccttccccggcgagcaccggtgcacgtcgcggcagtcttcgtcacacacatgcacaaagataaatcattgattataaacaaacaaagggacttaagcctattctcatgtttacaattgaacgaccaaacgacctggcacgctaagaagagagcgttggcgtcaagggatgggcaagacgccaaagggcggtctcttgctccatgcctacaaccacatcggaccaaggccgggaacacttgttggacacgcagtggttcctcacgtgccaagggtcatgaccatgtcaaacctacggcgacgctccctctgaactttgagtcggcaggagcagtgccactcatggaaggaaacaacgttagaggagaagcaatgagggaggccgagacttgggaggacggtctaccacaaatgtag

SEQ ID NO: 27758 - DNA, 910 bp, Oryza sativa
  unsure (1)..(910): unsure at all n locations
  Clone ID: PAT_MRT4530_32421C.1
ctctcgccgcataccgatcagttcagcnattcacaccnacacacattagacccgactaccatctatctccgtgctcaataggctcctcccttggctgctctagttcgccctnaccccagngcctcctcgccgccgggttctcggctacctcctttgcgatanccnaagattcctcacgaggccgnatacntacacccacatnccccaaagattaccggcccctttacattccccctctcccaataaccccaaagaccccccncaccccagatagggcctcnccccgacaccccctngggcccgataggccgattcccgttccagagcgccacaagattctataacactataattggggccccacaccccccctctccctcggggcccccacacaccgacatctccagatttttctccccaaattaggcttatacacacacacacaccaccaaatntccctatgcnccgacacnacccgatatgtntttgcnccccacacngacctcnncgagcgtcggggtntcacacccacacacaacaatatttntcccatacnncacacccaggcgccccctaataccactatctaatatgtgttcccccaaagacangccctacaaaggtgggcgcccnaccaaccagccatccctcacanancactagggcgcccagccgccacnactatcccagcttagggctngttgctctcccantatttggcgnacncagcccatactccaagcntcctcaaagcgcccccacnacaatacctgggtgtcggngcacaatcctcccccaccaatattggtcgccccccctaactaccccctatannttagatttggtggggtgtctctatcatttcctcaccccacccttcctaaacaaatcgtcaactactttcatagat

SEQ ID NO: 27759 - DNA, 470 bp, Oryza sativa
  Clone ID: PAT_MRT4530_32422C.1
tatgaaatgacacttatttttgcagaatcacattacaagggcgcttcatattattaagaacactagaacaaatatgacatggaacacggatcatcatgttagcacgctcatttcttgtcaggtagcttctttaacagttcgtcaagaacttcgaatagatcagcaacaatgccatagtccgcaacctgaaatatgggagcatctgcatctttgttgacagccacgataaccttggaatctctcattcctgccaagggttccccccccccggatactccaaatgccatatagagctcaggcgcaactattttcccagtctgaccaacctgaagttcattgggaacaaatcctgcatctacggcagctctggtcgcacccactgctgctccaagtttctaaagcaactgctcccccactttgccaattccagccacttttaaaaaccttcggaacgcgtgggttcgacccgg

SEQ ID NO: 27760 - DNA, 189 bp, Oryza sativa
  Clone ID: PAT_MRT4530_32423C.1
atggccgccggcccgccgccgcctgccacggccgccggcccgccaccgggcatggccccgccggccgccgaatgcctctggggttttcaaccgggactaaagatcattcttaattctggttctttttggaaccgggattattgtggttttgggtcgacccagcaaagtcatttctccaccagtgcatag

SEQ ID NO: 27761 - DNA, 433 bp, Oryza sativa
  Clone ID: PAT_MRT4530_32424C.1
catcaaggtataaaaccacatctacagtgggagtccctatctactttcgattcccttcttactggctttgccaatacatcatactgatttgacgcttccttacgctttctttcaagcattgcttccaggacaacggagagtattccaagataaagaaccagaactgaggttgacactactgaaagataaaagaatggtggatagatggattcgcaccatcccaaaaccgaaatacagacagaccaaaaaagacgcaaataaatactccaccaccagcctacctactagcatgtattaagcgaatagcttgtatggtagttgttaaagaaaagatgtatgtagtcccggaagagaagcaattgtcgtacgacctgtaagcgtaacttttgacttccttgccgtttgtgaattgagtcaatcgagttacgtttgc

SEQ ID NO: 27762 - DNA, 435 bp, Oryza sativa
  Clone ID: PAT_MRT4530_32425C.1
atgccggcggcgtcgtcggggccgcaccgccagctgctcggcggcatcctcctcctcctactcctgctgctggggcggacggcggcggtgggggcgcgggtgacggcggtgatcgtgttcggcgactcgacggtggacgccgggaacaacaacgcggtgcagacggtggtgcggagcaacttcccgccctatggccgcgacttcccgggccgccgcgccactgggcgcttctgcaatggccgcctcgccaccgacttctactccgaggcctacggcctccgccccttcgtcccggcctacctcgacccggactacggcatccgggacttcgccaccggcgtctgcttcgcttccgcgggctccggcctcgacgtcaccaccgccggcgtcttcataattcactgcaataatctggtcactaagggtgagttataa

SEQ ID NO: 27763 - DNA, 444 bp, Oryza sativa
  Clone ID: PAT_MRT4530_32426C.1
atggagattgattcgcgcagagacaccgtgaggccaagcagacaggagatcgagaggagcagagaaggagagtcgcgaaggctaaccggaggcggagaaggcgagacggatcaacgcggcaacgagtttggaggcgagctataccagtggcagtggtcgctctgcaatttcgagaaggtgcagagtcccatcggtggctccttcaatcccagagctgaaatgtgcttgtgggcatgccgctgcggtgcagacatcgaacacaccaaggaatccaaggcggcggtggctgcagtgtcctggggagatctcaacgaatacgttgaggagatggtcgcttactgtcatgctgacgagtacgactatcttagagagacatgcgacagtttgcgccagtttatagcagatcaaagacatgcatatctctcagttgtcagcctaggctga

SEQ ID NO: 27764 - DNA, 1137 bp, Oryza sativa
  Clone ID: PAT_MRT4530_32427C.1
atggcgccaccacaccaccgaaacctacatagcatgggcgcagttaaccggagcgcaggaggggcccacccggccgtctccatcggggcaacggcccgtctgcgaaaatgcaaaaaaacgaacaaaaaaaattgccgcaccgccgccgccacgcgcctcgccaccgcccccctcccccggccggatctgagaggggaggggaggggagccgccgccgccgtcgtcgtcgccgccgtcgccgccgccgtcgtcgtcgccgccgtcgccgccgctgccgccgtcgtcgtcgtcgccgccgctgctccacgccgtcctcgccgccgttggcctcccccctccctcctccggccagatctgcgagggagggagggaggggagacgccgccggccggcccacgccgcaccacgtgcgccgtcgccgccgtcgtcgtcgccgtcgccctcgccgcccccccctccctcctccggccagatctaggagggagggggcgaggggagacgccgccagccgccccgcgccgtcgttgccgccgtcgccctcgctggcctcccccctccctccggccagatctaggagggagggggcgaggggagacgccgccggccacgcgccccgcgccgccgccgccgccgccccgcgccgtcgtcggccccgccgcgccgccggagatgagaggagaggagagtgaagtggaggccagtagatgccagaggctgggccagagcgaagcagaggcgcgagacgtcgtcgccccccacgcgaccgcccccgcgcgcatgcatggcgagaaccacctcgctctcgctctggctttcgctacgacgcgcgctctggctacagggcctttgaactttgcatttggatggttccgggaggcaggcggggtccccccttctccactcccctcccctgccacgacgatgccgcaggctttgcatgccgcgccgaagcggggtcgcacacacgccgcgcgctgtggcgctgcctgccttctgctgtacagcccagtagcaactagcaaccctctccattgctcgcccggcgtccggtacagggcccggcggaaaataattataatccagaatcgtctggttgatgtgtttgatgaatctggatttgtagtcaggttcccgtga

SEQ ID NO: 27765 - DNA, 216 bp, Oryza sativa
  Clone ID: PAT_MRT4530_32428C.1
gacttggactaaagtcaaaacgttttataacctgaaacagagggagtactattttttctgcaaggaatactgaattactacttggatgttggtgcattgcaacggagaaaaatatgcatcaattgggcgccggtatatttatggattatggctcagttggtatattgacaagttcgggtaataaacgggagtaagtataattgtgcatcgatgaga

SEQ ID NO: 27766 - DNA, 3152 bp, Oryza sativa
  Clone ID: PAT_MRT4530_32429C.1
atggggtcggtggagcggatcacgtccatgcctcggcggcaggtccaagcccgtgatgggtcggttgcttcattggctaaacgaacgggctcaccctgccaacaggaagatgattatgaaggtgccaaaactatgacaaatccatggaccttccttccagaggacatctggtatcatatacactccttattgccactaaaagatgccgctcgtactgcatgcgtgtctcacacatttctacgttcatggagataccgccccaaccttgtctttagtgatgcaaaactggggctgagtggcttgtcggaaagtgatgaagtaaccaaggaactcaacgaaaaagttgacctcattatgaaaaaccactcaggcattggcttgaggacattcgggctcgaatattataatttggtcgatgcctcttatcttgaccgttggctccagattgctgttacaccagcaatagaagaactcatccttatgttttttccagagatcaaggcaaagtactacgacttcccattctcacttttatttgataggggtggaaactcgattaagcatcttcgcctcagctactgtgccttccgtcctaccactagtcttaatttcttgcaaagactgcatctgtttgaagtgcgtattactggggatgaattggggtgccttctttccaactcttttgctttagagcagttgaaactcacacattgtaaagagctcaattacctcaagataccttgcgtgctacagaggctcagcaagctgacagtgtttggatgcacaacattgcaagtgattgaaattaaagctccaaacctttcaacctttgattatgatggtaatttagcaggactatcagatggaggtttgctgccagtgaagaacctacacttatcttccttttatcagcatcatactattcaatacacatgtgccaagcttccatctgttgcgccgactatcgaaactctcaccatattttcagaaagcgagaggttcaatacacaaatttcaccattcagattccttcatctcaagtgcttgacgatttctcttagcatataccgtgggggcttttccccatcaaatgattatctttctctagcttattttcttgatgcgtctcctgtcttggagattttcactttgaccgtatcacagactcgtatgaagcatcacgtgatttctgaagattcctcatatctgaggcagatgccaggacaccgccatgtcaacctcaagaatgtgaagatcattgggttttgctctgcaaagagcatggtagagctgacttgccatattattgagaatgcaacatcactagaatcccttactctagacacaatatgtgatgattatgaaaatcctgataggctatctgttcacgaaattggtgagtgcagccccatatgtaggcaaatgatcatggaggccaaaaacgcgctcttggctatcgaaagatacattgtggggaaagtcccctctacagtcagttttaatgaaacggagtattatactgctgcaccgagacaaaaagaggagggtgtattatactgctgctttgggactgaactggaggttctttactactatgagtcggttgcttcactggctaaacgaaatggctcaccctgtcaacaaggcgatgattaccaaggtgtcaaaacaatgagaaatccatgggccttccttcctgagatagctgttacaccggcaattgaagaactcatccttttgctgtttccagaggacaaggcaaactactacgacttcccattctcacttttattcaatagaggtggaagctcgattaagcatctttatctcagctattgtgtcttccgtcctactggtggacttaattgcttgcgaagtctgtttctgtatgaggtgcgcattactgggcacgaattagggtgccttttttccaattcctttgtgttagagcagttggaactcacagattgcaaagagcttagttacctcaagataccttgcctgcttcaacggctcagcaagctggcaatgtatggatgggaagcatcacaagtgatggaaattaaagctccaaatcttttaaacttccattatgagggtaatctagcacgactatcagatggaggtctaccgtatgtgaagaacctaaccatagcttccattcgttggcataatgctatttattatgcctgtgcaaatcttccatccattgtgcccactattgaaactctcactgtattttcagttagcgagattatcaatacgccgatcgcacctttaagatttctccacctcaagcaccttactgtttttcttcacacagtccctagggtcgtttccccaacatatgattatctttctttagcttattttcttgatgcatctcctgccttggagactttcactttgaaggtatcacagactcgcatggagcatgacgtgatttctgaagattcatcacatctaaggcagatgccaggacaccatcatgacaccatcaagaatgtgaagatcatggtcgagctaacttgtcatattcttgagaatgcaacatcacttgaaggtcttacactagacacaatatttgatggaaataataatcctgcagataggctatctgttcacgaagttggtcgttgtggccgcatacatagccctatggtcatggaagccaaaaacgcgctcttggctatcgagagatacatcgtcgggaaagtcccctctacagtgaagctggatgttctaaaaccctgcagctggtgccatacaaattcaagtgttgagtgatacggattgtccaatatttaatcgtgagctgttgcttaggtgtggctttttcttgagctactgaatctacccgttgttttgagttttgtattatttttcatgggtattgtgctttgtttcttaagttgtcacaagtgtcattgttctgtgatggtcggggcgcccgctccctcttcgctacgggtgtcgattccgcccttccgccgtgtttcacagtgtgttggaaacctggcttccacttaatggtggaacatcccttgctcattgcgtaaccaaagcctccgtccctttcaattgcccctatgcaatggccccttgtcgttctaccggggggggggagatctttcctgctttccgccatacaa

SEQ ID NO: 27767 - DNA, 522 bp, Oryza sativa
  Clone ID: PAT_MRT4530_3242C.1
gagggccgcgggagaggggaagatgggccgagagaaagggtagccccctcatgagcaatggattgtctaagttggaattgtcgtggtatggggaatgccgcgacaattcatgacctgctcgctttagttaaatagcataattcccatattgcttttctccgtgaaactaggcaaaagttggatcgtgtttgccgtctctgtagtagattcttaatggtagccttgccttgttttggcatgaacaaggaaatcaaagctattaatgaaagatatattaatgcgtatgtgcgagtgtcccctgttgcgcatttatggagattaacttgtgtctatggagaactaagggcagagaatctctatcgtatgtggacgcaattaagcttcatgatacttacttctgatgatctgatctaccgtggattgctaattggcgattttaatgaggctctttggcaggaagaacatttgtctgctacctccagacccgctgcacagatgcaagcctttcgtgatactctacag

SEQ ID NO: 27768 - DNA, 246 bp, Oryza sativa
  Clone ID: PAT_MRT4530_32430C.1
atgagcggtttgaacgccgggaacgcggcggtgacgctgggtggcgcacgcgccatgaggaggtgcctctcccacatggggagcacgagcgggcgcggctcgccgcgagcgaggtcggcgatggagcagtggctcgccgaggtcagcgaggcgcaggtctgcctcggcggcgacggacaccactccttcctcagtgcagtccacgaccagcttgccgcagggaaaatatctctacgagtcgagtga

SEQ ID NO: 27769 - DNA, 639 bp, Oryza sativa
  Clone ID: PAT_MRT4530_32431C.1
atggccaccacctccacccacgcgccgccgccgcactcgccgctgccgctgccggcggcggccgccggcgacccttccaacccgttcccgaccacgttcgtgcaggcggacaccacgtcgttcaagcaggtggtccagatcctcaccggcaccccggagaccgcggccgccgccgcggcgggcggcgcagccgccgccgcgccgcccccggcggcggcgaagcccgcgcccgcgccgccggggccgaagaagccggcgttcaagctgtacgagcggcggagcagcatgaagagcctcaagatgctctgcccgctgctccccgccgccgccgccttcgccgcgggcggaggaggggggttctcgccctcgccgcgggggttctcgccgcgcggcggcgggatggaggtgctgtccccgagcatgctggacttcccgtcgctggcgctgggcagccccgtgacgccgctcccgccgctgcccgggtccgacgaggccgccgcggccgaggaccgcgccatcgccgagaaggggttctacctccacccttcccctcgcggcaatgccggcgccgccggcgagctccagccgcctcccaggctcctccccctcttccccctccagtctcctggtcggcagtga

SEQ ID NO: 27770 - DNA, 1927 bp, Oryza sativa
  Clone ID: PAT_MRT4530_32432C.1
atgtcatggcagagggttggtgccctgctgctaggggctcagtcctgcctgcctgtcccgggggttccggccatggccggcagcgtcacccgtcgtggtttggacatgactggtttcgtcttggagctgcggggcatgtgcgtggtcctggggtatccacatggagtggattaccaggccaggccgctcccggagcaggagggtgaggatgcagagccccacgctggttgggaggtcactacagtgatcctctccggctctcccgagcggacttcgctggcagtcaccgcgggtggagattccttccccgccgcttgccagaacgccgctctcctcgccatcggcactcttcgccagcgctacccggacgagttgcagcactcgccctaccgctaccaccctcgtcgcggaggagcccgcgactacgccaccttccgggatgctagctcggagaatgacgctaccatcgtgcacctggcaggcatggtggaggcgtacgacgcggctcgtatcgacttccaccagatggtgcaccgtgggatggtcgagaacaacatgaagatcctggagctgcgtcaagagaacctgcagctcaagaaggacctcgacgcggtggaggcgcagctgcagcagctcaagatcgcccagggagaggactgccgccccaagcgtcgccgcgtctgccgcagccagaagatcactgcccgcaagagcacctccaggcccgagctgatggtgacgaccaggagaaccgctgttaccggtgatggcaaccaacccgaaggcagcaaccacaaccaccagggcaacccacctccacctccccctccgccaccaccaccaccaccagacaccaacgccattctcacccaaatcctcgcccagcaagccaacatgatgactgctttcctccaccacctccaaaatccgccacaacagaatgctccaccaccacctccacaacactctaaactcgccgagttcctccgcatccgcccacctaccttctcgagctccaacaaccccatggatgcgttggattggttgcatgccgtggggaagaagctggacactgtgcagtgcagtgatgaagagaaagtcatctttgccgcccaccagctgcaggggcccgcatctttatggtgggaccacttccaggctacgcagccagaagggcaaccgattacttgggctcgcttcaccgccgctttccggagaacccatgtgcccgccggagtcgtggctcttaagaagagggagttccgagagttgaagcaaggcaaccgctccgtgatggagtatttgcatgagttcaacaatctggcccggtacgctccggaggatgtgcgggaagatgaggagaagcaagagaagtttctggcgggaatggaccctgagctgtccgttcgtctagtctctggggactacccggacttccaacgtctggtggacaagagcatccgcttggaggccaagcacaaggagctggagtcgcacaagcgccgcttggcgaacttccgcaatcaacagggtgctaatcaaagggtccgctacaccaatccctacccagggggatcctcctcacagcagcaacaacagcagcagcaatctcgctccgcgccccgacctcaattcgtggtgcgcgtcccacagccgcagcagcagcagaatcaaccagggactcgtgcaccccgtcctcctacgccaactgtgcagcctgttcaagtccgcagggacgctcaaggtcagcagcgtctgtgcttcaactgcttcgagcccgggcactttgcggataaatgcccgaagccaaggcgtcagcaaggccaagcgcctccccgccccaacaacggtggcaaggatgtcattcggggtcgtgtgaaccacgtgacggccgaggacgtgctgacaactccagacgtcatcgttg

SEQ ID NO: 27771 - DNA, 198 bp, Oryza sativa
  Clone ID: PAT_MRT4530_32433C.1
atgggtacagtgggtgctgcaggatgccaagccacgaacccggccaacaagcaagccaagcaaaagaaagcgtcgaagcttaaccctacaactgtttggcagataattcgcggttgcccggatgaggaagacatattcttcaatctatacaagaaagggggaggaaacaacaacgggatgaacccgactatgggatag

SEQ ID NO: 27772 - DNA, 331 bp, Oryza sativa
  unsure (1)..(331): unsure at all n locations
  Clone ID: PAT_MRT4530_32434C.1
tcctgtcaatatttagccatacttattctttaccagacttagggtattcgtagtgtttactttttctaatttagatatgcatatccgatcacaccaccacatagtttacacttatagccaacaaatgtacacgaaaattgccagcaacttccgtgttaacagaatcatgtgataggcnccctcaaacatacaggatagccacgggttcaaatatgtttcttacgaacgagcagtttcatagtttcatgtgaaaatgctgagatgtaataatggctgtaataaagactgatgctttgattcctcaaaaaggattggcgncnttgtaaaaaaa

SEQ ID NO: 27773 - DNA, 3514 bp, Oryza sativa
  Clone ID: PAT_MRT4530_32435C.1
atggcccttaagaaaagggcattccgggagttgaagcaaggcaaccgctctgtgatggagtatttgcatgagtttaacaacctggcccggtacgccccggaggacgttcgggaagatgaggaaaagcaagagaagttcttggcgggaatggaccctgagctgtccgtacgtctgatctccggggattatccggatttccaacgtctggtggacaagagcatccgcttggaagccaagcacaaagaattggagtcgcacaagcgtcgcttggcgaatttccgcaaccaacagggggctaaccaaagggtccgctacaccaatccctatccagggggatcctcctcgcagcagcaacagcagcaacctccctccgcgccccgacctcaatttgtggtgcgcgtcccacagccgcagcaaccgcagggtcagcaagggacccgtgcaccccgtccccctgcgccagctgtgcatcctggtcaaggccacagagacgttcaaggtcagcagagtctgtgcttcaactgcttcgagcctgggcactttgcggataaatgcccaaagccgaggcgccagcaaggccaagcgccgccccgctccaacaacggtggtaaggacgtcattcggggtcgtgtgaaccacgtgactgccgaggatgtgctgacaactccagacgtcatcgttggtacgttcctcatccattccacccctgctaccattttgttcgactctggagcttcccactcgtttatatctgtgccattcgtggggagaaatcagttgggggtagaaaggcttaggaaccctatgctcatcaccacccctggaggggttatgacagcgaagtactatagccctgccgttcccatagaaattcagggaattccgtttccctcggatctgattcttctagacaccaagaacttggatgtgatccttgggatgaattggttggctcaattccaaggagtagtggattgtgcaagacgcactgtcactctgcaccgagggccggaacaaccggttgttttatttgcacccccaacctctgtcagtagttcagaacttcatcagataggactgttagaaatccccatcgtcagagagttcggagacgtgtttccggaagaactacccggtatgccgcccaagcgagagattgagttccggatagatcttgctccaggaacaactcctttgtacaaacggccctaccgtatggcagcaaatgaactggccgaaattaagaaacagttggaagagttgaaagaaaaggggtatatacgtccgagcacttccccctggggtgctcccgtaatttttgtggagaagaaagacaagacaaagaggatgtgtgtcgactacagagctctcaatgaagttactatcaaaaataagtaccctcttccccgaatcgatgatctgttcgatcagcttaaaggtgccacggtattctccaagattgatcttcgttccggatatcaccagttgcgcatccgtgaagaagatatcccgaagactgcattcaccacgcgatatggactgtatgaattcacggtgatgtcgttcggtctgactaatgctcctgctttcttcatgaacttgatgaacaaagtgttcatggaatacttggataagtttgttgtggtcttcatcgacgacattctggtgtactcgcaatcagaggaagaccatcagcaacatctccgtctggtgttgggaaagttgcgggaacatcaattgtatgccaagcttagcaagtgtgagttctggttgtccgaagtcaaattcttagggcacgtgatatctgctaaaggagttgctgtggaccccgaaacagtgaccgccgtccccgattggaagcaacccaagacagtcactcaaattcgcagtttcttaggtttggcaggatactaccggaggttcatcgagaacttctccaaaatcgctcgacccatgacacagttgttgaagaaagaagagaaatttgtgtggagcccgcaatgcgagaaggcgttcaaaacactcaaagaaaagctggaaggtcatgtggtggcctatgcctcacgccagctacggcctcatgaaggcaactaccctacccatgatttggagttagccgcggtggttcatgctctaaaaatctggcggcactatctcattgggaatcgctgcgaaatatataccgatcataagagtttgaaatacatcttcacccagtcggatctgaatcttcggcagaggagatggttagaactcatcaaggattatgatgtgggaatccactatcaccctggtaaggccaacgtggtcgcagacgcgctgagtcgaaaaagccgttgcaacactcttggcgtccgtggcattccactggagcttaatcaacagttggaagccctgaacctaagcatcgttagccatggattcttagctacactggaagccaagcctaccttactcgatcaaatccgcgaggctcagaagaatgatctagatatgcatgggatcctcaagaatatgaaacagggtaaagccgctggtttcacagaggatgaacacggaactctatggaatggaaaccggccctttgtgatgtgtgccagcgtgtcaaggcagagcaccaacgaccggccggacttctccaacctctccaagtaccagaatggaaatgggatgaaattgggatggatttcatcaccggactcccaaagacccaaggtgggtatgattccatatggcaccgcataccacccgcagacagatgggcagaccgagcgtctaaatcagatcctagaagatatgcttcgcgcatgtgtcctggatttcgggaagacctgggataagagtctcccctatgccgagttctcctacaataacagctaccaagccagcatacaaatggcaccttatgaagcgttgtatgggcggaaatgccggacaccgcttttgtgggatcaagttggggaaagccaagtgttcgggactgatatcctgagagaagctgaagctaaagtcagaaccattcgggataatctaaaggtggcccagtcccggcagaaaagttatgcagataaccgtcgccgtaacctggaattcgcagtggatgattttgtgtatcttcgggtcacgccattgcggggtgtacacaggtttcagacaaaagggaagctcgcacctcggtatgtgggtcctttccgtatcattgcccgacgcggagaagtcgcttaccaattggagctgcccgcctccttgggcaacgtgcatgatgtgttccatgtgtcgcaactcaagaaatgcctccgagtgccatccgagcaggccgactcagagcaaattgaagttcgcgaagacttgacctacgtggagaggccagtgaaaatcctggacaccatggagcgcaggaccaggaaccgggtaatccggttttgcaaggtccagtggagcaaccacgccgaagaagaagccacctgggagcgtgaagacaagctgaaggcagcccatcccgatctcttcgcca

SEQ ID NO: 27774 - DNA, 293 bp, Oryza sativa
  unsure (1)..(293): unsure at all n locations
  Clone ID: PAT_MRT4530_32436C.1
ctacactctttcattagacatcaacgacaacccccaccatataaataaaaagaaccccggaaatattattccgcacatttatatcaacccccatacataggaaaaggaaataccggataaaaaccccgccgagcacaaagagcgaggccacccccaaaggggcgccccccctgaaagatgcccgcggggatgaaatttcaacgaaagaaaacccccccggtgtcgaaatacacgcgggcgcaaccgatcgccggcgtgcggttncaaaaaaactgcgagtaggggaggcacga

SEQ ID NO: 27775 - DNA, 2142 bp, Oryza sativa
  Clone ID: PAT_MRT4530_32437C.1
atgtcatggcagagggttggtgccctgctgctaggggctcagtcttgcctgcctgtcccgggggttccggccatggccggcagcgtcacccgtcgtggtttggacatgactggcttcgtcttggagctgcgaggcatgtgcgtggtcttggggtatccacatggagtggactaccaggccaggccgcttccggatcaggagggtgacgacgcggagccccacgctggttgggaggtcactgcagtgatcctctctggctcccccgagcggacttcgctggcagtcaccgcgggtggagattccttccccgccgcttgccagaacgccgctctcctcgccatcggcactcttcaccagcgctacccggacgagttgcagcactcgccctaccgctaccaccctcgtcgcggaggagcccgcgactacgccaccttccgggatgctagctcggaggatgatgctaccgtcgtgcacctggcgcgcatggtggaggcgtacgacgcggctcgtatcgacttccatcagatggtacgccgcgggatggttgagaacaacatgaagatcctggagctgcgtcaggagaacctgcagctcaagaaggacctcgacgcggtggaggcgcagctgcatcagctcaagatcgcccagggagaggactgccgccccaagcgtcgccgcgtttgccgcagccagaagatcaccgcccgcaagagcacctccaggcccgagctggttcgtcagtccctggcgtggacctgctttgtcgagacccctcgtgccgagcccgcgcccgtggttccccaggagggggaagcctccggcgttggtagcacggagggcagcaaccacaaccaccagggcaacccacctccacctcctcctccgcctccgccaccaccaccagacaccaacgccattctcacccaaatcctcgctcagcaagccaacatgatgactgctttcctccaccacctccaaaatccgccacaacagaatgctccaccaccacctccccaacactctaaactcgccgagttcctccgcatccgcccacccaccttctctagctccaacaaccccgtggatgcgttggattggttgcatgccgtggggaaaaagctagacacggtgcagtgtagcgatgaggagaaagtcatcttcgccgcccaccaactgcaggggcccgcatctctatggtgggaccacttccaggctacgcagccagagggacagcctattacttgggcccgcttcaccgccgctttccggagaacccatgtgcccgctggagtcgtggctcttaagaaaagggaattccgagagttgaagcaaggcaaccgctccgtgatggagtatttgcatgagttcaacagtctggcccgttatgccccggaggatgtgcgggaagatgaggagaagcaagagaagttcttggcaggaatggaccctgagctgtccgttcgtctagtctctggggactatccggattttcaacgactggtggacaagagcatccgcttggaagccaagcacaaggagctggagtcgcacaagcgccgcttggcgaatttccgcaatcaacagggtgctaaccaaagggtccgctacaccaatccctatccagggggatcctcctcgcagcagcagcagcagcaacaacctcgctccgcgcctcgacctcaattcgtggtgcgcgtcccacagccgcagcagcagcagaatcagcaagggactcgtgcgccccgtcctcctacgccaactgtgcagcctggtcaaggccgcagggacgctcaaggtcagcagcgtctgtgcttcaactgcttcgagcccgggcactttgcggataaatgcccaaagccaaggcgtcagcaaggccaagcgcctccccgctccaacaacggtggaaaggatgtcattcggggtcgtgtgaatcacgtgacggccgaggacgtgctgacaaccccagacgtcatcgttggtacgttcctcattcattccatccctgctaccattttgttcgactctggagcttcccactcgtttatatctgtgacattcgtggggagaaatcagttgggggtagaaaggcttaggaaccctctgctcatcaccacccctggaggggttatgacagcaaagtaa

SEQ ID NO: 27776 - DNA, 5127 bp, Oryza sativa
  Clone ID: PAT_MRT4530_32438C.1
ttaaacggaatctcgaccccgagattcggaagaactggcgaagagatcgggatgggctgccttcagttcgtcttcgcgctcccaagtagcttcttcttcggcgtggttgctccactggaccttgcaaaaacggattactcggttcctggtcctgcgctccatggtgtccaggattttcactggcctctccacataggtcaagtcttcgcgaacttcaatttgctctgagtcggcctgctcggatggcactcgaagacatttcttgagttgcgacacatggaacacatcatgcacgttgcccaaggaggcgggcaactccagctggtaagcaacttctccgcgtcgagcgatgatacggaagggacccacataccgaggtgcgagcttcccttttgtctgaaacctgtgcacacctcgcaatggcgtgacccgaagatacacaaagtcatccactgcgaattccagatcacggcgacggttatctgcataacttttctgccgagactgtgccacctttaggttatcccgaatgattctgactttagcttcagcttctctcaggatatcagtcccgaacacttggctttctccaacttggtcccacaatagcggtgtccggcatttgcgcccgtacaacgcttcatagggtgccatttgtatgctggcttggtagctgttattgtaggagaactcggcataggggagactcttatcccaagtcttcccgaagtccaggacacatgcgcgaagcatatcttctaagatctgatttagacgctcggtctgtccatctgtctgcgggtgatacgcggtgctgaaattcaatcgagtacccagctcttcctggagcttcttccaaaagtgagaggtgaattggcttcccctatcagatacgattttcttgggaataccatggagactcacgatcctagcgaagtagagctccgctagtttattccctccataggtggtcttcacaggaatgaatcgagctaccttgggtttttggaagtccggtgatgaaatccatcccaatttcatcccacttccattctggcacttagagaggctggagaagtccggccggtcgttggtgttctgccttgacacgcagtatttctccttcaagtctaagtacatctttgtactgccagggtgaatggaataaggactttcgtgagcttcctgaagtatcagctgtttaagttctctgttatcgggaacgcatacccgctttccgttccataaggttccgtgttcatcctctgtgaaaccagcggctttaccctgtttcatattcttgaggagtccatgcatgtccggatcattcttctgagcctcgcggatttgatcgagcaaggtgggcttggcttctaacgcagccaagaatccgcgaccaactatgcttaggttcagggcttccatctgttgattaagctcgggtggaatgcctcggacgttgagagtgttgcagtggctctttcgacttagagcgtcggcaaccacgttggccttaccaggatgatagtgtattcccacatcataatccttgatgagttctaaccatctcctttgccgaagattcagatccgactgggtgaagatgtatttcaagctcttgtgatcagtatatatttcacagcggttcccaatgagatagtgccgccagatttttagagcatgaaccaccgctgctaactccaagtcatgtgtagggtagttgccttcatgaggtcgtagctggcgtgaggcataggctaccacatgaccgtcctgcatgagcacgcaccccaatccttggcgcgaagcatcacagtacaccatgaaatccttgcgagtatccggcaagattaacactggtgaggaaaccagcttttctttgagagtttggaacgccttctcgcattgcgggctccacacaaatttctcttctttcttcaacaactgtgtcatgggtcgagcgattttggagaagttctcgatgaatctccggtaatatcctgccaaacccaagaaactgcgaatctgagtgactgtcttgggttgcttccaatcggtgacggcggtcactgtttcggggtccacagcaactcctttagcagatattacgtgccccaagaatttgacttcggacaaccagaactcacacttgctgagcttggcatacaattgatgttcccgcaactttcccaacaccagacggagatggtgctgatggtcttcctctgattgtgagtatatcagaatgtcatcgatgaaaaccacaacaaacttgtccaagtattccatgaacactttgttcattaagttcatgaagaaggcaggagcattggtcaagccgaacgacatcaccgtgaattcatacagcccgtatcgcgtggtgaatgcggtcttcggaatatcttcttcccgaatacgtaattggtgatatccggaacgaagatcaatcttggagaatacagtggcacctttaagctggtcgaacagatcatcgatccggggaagagggtacttgtttttgatggtgacttcattgagagctctgtagtcgacgcacatcctcttcgtcttgtctttcttctctacaaaaatcacaggagcaccccaaggggaagtactcggacgtatataccccttttctttcaactcttccaactgtttcttaacttcggccagttcatttgctgccatacggtagggtcgcttgtgcagaggagtggttcctggagcaagatctattcggaactcaatctctcgcttgggcggcataccaggtagttcttccggaaacacgtctccgaactctctgactatggggatttctgacagacctatctgatgcagttctgaacttctgacagaggttgggggtgcaaagaaaacaaccggttgttctggccctcggtacagagtgacagtgcgcctcgcgcaatccactactccttggaattgagccaaccaattcatcccaaggataacatccaaattcttggtgtctagcagaatcagatccgagggaaaaggaatcccctgaatttctataggaacggcagggctataatactttgctgtcataacccctccaggggtggtgatgagcagagggtttctaagcctttctacccccaactgatttttccccacgaatggcacagatataaacgagtgggaagctccagagtcgaacaaaattgtagcagggatggaatggacgaggaacgtaccgacgatgacgtctggagttgtcagcacgtcctcggccgtcacgtgattcacgtgaccccgaatgacatccttcccgccgttgttggagcggggaggcgcttggccttgctgacgccttggctttggacatttatccgcaaagtgtccgggctcgaagcagttgaagcacagacgctgctgaccttgagcgtccctgcggccttgaacgggctgcacagttggcgtaggaggacggggcgcacgagtcccttgctgattctgctgctgctgcggcggtgggacgcgcaccacgaattgaggtcgaggcgcggagcgaggttgctgctgctgctgctgctgctgcgaggaggatccccctgggtagggattggtgtagcggaccctctggttagcaccctgctgattgcggaagttcgccaagcggcgcttgtgcgattccagctccttgtgcttggcctccaagcggatgctcttgtccaccagacgttggaagtccgggtagtccccagagactagacgaacggacagctcagggtccattcctgccaagaacttctcttgcttctcctcatcttcccgcacatcctccggggcataacgggctagattgttgaactcatgcaaatactccatcacggagcggttgccttgcttcaactcccggaattcccttttcttaagagccacgactccagcgggcacatgggttctccggaaagcggcggtgaagcgggcccaagtaatcggctgcccctctggctgcgcagcctggaagtggtcccaccagagagatgcgggtccctgcagctgatgggcggcgaagacgactttctcctcatcactgcactgcaccgtgtctagcttcttccccacggcatgcaaccaatccaacgcatctacgggattgttggagctggagaaggtaggtgggcggatgcggaggaactcggcgagtttagagtgttggggaggtggtggtggagcattcatctgaaaaccccacacagaaccagcaaacagagaaggagagcgctgcgacgggccagggcggaaggtgagcaacagcgcaccctccgagctaccaacgccggaggcttccccctcctggggaaccacgggcgcaggctcggcacgaggggtctcgacgaagcaagtccacgccagggactgacgaacaagctcgggcctggaggtgctcttgcgggcggtgatcttctggctgcggcagacgcggcgacgcttgaggcggctgtcctctccctgggcgatcttgagctgatgcagctgcgcctccactgcgtcgaggtccttcttgagctgcaggttctcctgacgcagctccaggatcttcaggttgttctccaccatgccacggcgcaccatctgatggaagtcgatacgagccgcgtcgtacgcctccaccatgcgtgccagatgcacgacggtggcgtcatcctccgagctggcgtctcggaaggtggcgtagtcgcgggctcctccgcgacgagggtgatagcggtagggcgagtgctgcaactcgtccgggtagcgctggtgaagggtgccgatggcgaggagagcggcgttctggcaagcggcggggaaggaatccccacccgcggtgactgccagcgaagtccgctcgggagagccggagaggatcactgcagtgacctcccaaccagcgtgaggctctgcatcctcaccctcctgctccgggagcggcctggcctggtaatccactccatgcggataccccaagaccacgcacatgccccgcagctccaagacgaagccagtcatgtccaaaccacgacgggtaacgctgccggccatcgggccgcagctcgtgtagccttcatttgccctggagaatgtccatcgacccctgacttcatccat

SEQ ID NO: 27777 - DNA, 788 bp, Oryza sativa
  Clone ID: PAT_MRT4530_32439C.1
atgaggccgggagccgagtacgccatggttcacggcggcggccctgcgccggcggcggtggcggcggcggggccgagctcgagcgcggtggtggcgtcgacggcgtcggtggcggcgcggtcgccgtggcagtcgccggtgccgtacctgttcggcgggctggcggcgatgctggggctcatagcgctgtcgctgctcgcgctggcgtgctcgtactggaagctcgccgccgccggcggcggcggcgacggcgagcaagacggcggcaaggagatcccgcctggtggtggtggtggtggtggggaaaagggctcgggcggcgccgccggcgggctggcgcgggagaggcgggaccacgtggtggtgatcatggccggcgacgagcggccgacgttcctcgccaccccggcgtcgagccgcgccgagccggcggcgcccgacgtggcggcggccgtgtgctgcagctgcggcgccgcctccggctcgtcgtcgtcgtcgtcgacggaggtgaagacgccggcggcggcggcggcgccggagtttctagccggcgacggtgagccgcaggcgcagagcccaagtgagcaaaccagcagtagtcacagctctgtaattacgagctaactcaacacaaaattaaattaagatcacaattaagtagatatatgcttgaatatttcttaattccatcttgtaacatttttagttttttttttacactgctcgtgtaaaagggactgtaaatacacttagatgagtgaactaattaatacaacttggttactact

SEQ ID NO: 27778 - DNA, 225 bp, Oryza sativa
  Clone ID: PAT_MRT4530_3243C.1
atgaaggctcgaagagagaagggaaaggctcggagagaggacggaattgatcagatcgaattagaagaagtgaatggcaaccgctatggatcgatgtttggcaagaaacctattgaattgttgatggcacatggtctgctcctaacaaagaagaaattctgggctatagcggctgaaaaacgtgaagctgctgtccaagaacgtgatgctgctcaagtctccaaa

SEQ ID NO: 27779 - DNA, 5525 bp, Oryza sativa
  unsure (1)..(5525): unsure at all n locations
  Clone ID: PAT_MRT4530_32440C.1
gtggatgaagtcgggggtcgatggacattctccagggcaaatgaaggctacacgagctgcggcccggtagtcgagatgtcatggcacagggccggtgtcctgctgctaggggctcagtcctgcctgcctgtcccgggggttccggccgtagatgggattgggtcgatgtacacctctgatcagagtaaaatctattcgaatagccgcgccctcggttatgggcaagccgagcaatgtacccaaatggccggcagcgtcagccgtcgtggtttggacatgactggcttcgtcttggagctgcggggcatgtgcgtggtcctggggtatccacatggagtggactaccaggccaggccatttccggagcaggagggtgacgatgcagagccccacgctgcttgggaggtcactgcagtgatcctcgctggctctcccgagcggacttcgctgacagtcaccgcgggtggggactccttccccgccgcttgccagagcgccgctctcctcgccatcggcactcttcaccagcgctacccggacgagttgcagcactcgccctaccgctaccaccctcgtcgcggaggagcccgcgactacgccaccttccgggacgctagctcggaggatgacgctaccatcgtgcacctggcgcgcatggtggaggcgtacgacgcggctcgtatcgacttccatcagatggtgcgtcgtgggatggtcgagaacaacatgaagatcctggagctgcgtcaggagaacctgcagctcaagaaggacctagacgcggtggaggcgcagctgcatcagctcaagatcgcccagggagaggtctgccgccccaagcgccgccgtgtctgccgcagccagaagatcaccgcccgcaagagcacctccaggcccgagcttgttcgtcagtccctggcgtggacttgcttcgtggagacccctcgtgccgagcccgcgcccgtggttccccaggagggggaagcctccggcgttggtagcacggaggatgcgctgttgctcaccttccgtcctggcccgtcgcagcagtagacgagcagttagtaggcttgcgcgtgtgttctaccaggagaaatgctggcaccagtgatggcaaccaacccgaaggcagcaaccacaacaaccatggcagcccaccttcacctnctnctncgccttcaccaccaccaccagataccaatgccattctcacccaaatcctcgcccagcaggccaacatgatgactgcttttctccaccacctccaaaatccgccacaacataatgctccaccaccacctccccaacactctaaactcgccgagttcctccgcatctgtccacctaccttctctagctccaacaaccccgtggatgcgttggattggttgcatgccgtggggaaaaagctagacactgtgcagtgcagcgatgaggagaaagtcatcttcgccgcccaccagctgcagggacccgcatctctatggtgggaccatttccaggctacgcagccagagggacagcctattacatgggctcgcttcacccccgctttccgaagaacccatgtgcccgccggagtcgtggcccttaagaaaagggaattccgagagttgaagcaaggcaaccgctccgtgatggagtatttgcacgagttcaacaacctggcccgttacgctccggaggatgtgcgggaagatgaggagaagcaagagaagttcctggcaggaatggaccctgagctgtccgtctgtctagtctccggggattatccggatttccaacgtctggtggacaagagcatccgcttggaagccaagcacaaggaactggagtcgcacaagcgccgcttggcgaatttccacaaccaacagggtgctaaccaaagggtccgctacaccaatccctatccagggggatcctcctcgcagcagcaacagcagcagcagcaacctcgctccgcgcctcgacctcaattcgtggtgcgcgtcccacagccgcagcaggagcagaatcaacaagggactcgtgcgccccgtcctcctccaccgactgtgcagcctggtcaaggccgcagggacgctcaaggtccgcagcgtctgtgcttcaactgcttcgagcccgggcactttgcggataaatgcccgaagccaaggcgtcagcaaggccaagcgcctccccgccccaacaacggtggtaaggacgtcattcggggtcgtgtgaaccatgtgacggccgaggacgtgctgacaactccagacgtcatcgttggtacgttcctcattcattccatccctgctaccattttgttcgactctggagcttcccactcatttatatctgtgccattcgtggggagaaatcagttgggggtagaaaggcttagaaaccctctgctcatcaccacccctggaggggttatgacagcaaagtattatagccctgccgtccctatagaaattcaggggattccttttccctcggatctgattctgctaggcaccaagaacttggatgtgatccttgggatgaattggttggctcaattccaaggagtagtggattgcgcgagacgcactgtcactctgtaccgagggccgggacaaccggttgttttctttgcacccccaacctctgtcagtagttcagaactgcatcagataggtctgtcagaaatccccatagtcagagagttcggagacgtgtttccggaagaactacctggtatgccgcccaagcgagagattgagttccagatagatcttgctccaggaaccactcctctgtgcaagcgaccctaccgtatggcagcaaatgaactggccgaagtcaagaaacagctggaagagttgaaagaaaaggggtacatacgtccgagcacttccccctggggtgctcctgtgatttttgtggagaagaaagacaagacgaagaggatgtgcgttgactatagagctctcaatgaagtcaccataaaaaacaagtaccctcttccccggatcgatgatctgttcgatcagcttaaaggtgccactgtattttccaagattgatcttcgttccggatatcaccaactgcgtattcgtgatgaagatattccgaagaccgcattcaccacgcgatacggactgtatgaattcacggtgatgtcattcggtttaaccaatgcacccgccttcttcatgaacttaatgaacaaagtgttcatggaatacttggataaatttgttgtggttttcattgatgacattctgatatactcacaatcagaggaagaccatcagcaccatctccgtctggtattgggaaagctgcgggaacatcaattgtatgccaaacttagcaagtgtgagttctggttgtccgaagtcaaattcttagggcacgtgatatctgctaaaggagttgctgtggaccccgaaacagtgatcgccgtcaccgattggaagcaacccaagacagtcactcaagttcgcagtttcttaggtttggcaggatactaccgaaggttcatcgagaacttctccaaaatcgctcgacccatgacacagttgttgaagaaagaagagaaatttgtgtggagcccgcaatgtgagaaggcgttcagaactctcaaagaaaagctggttgcctcgccagtgttaatcttgccggatactcgcaaggacttcatagtgtattgtgacgcttcgcgccaaggattggggtgcgtgctcatgcaggacggtcatgtggtggcctatgcctcacgccagcttcgacctcatgaaggcaactaccctacccatgacttggaattagccgcggtggttcatgctctaaaaatctggcggcactatctcattgggaatcgctgtgaaatatatactgatcataagagtttgaaatacatcttcacccagtcggatctgaatcttcggcaaaggagatggttagaactcatcaaggattatgatgtgggaattcactatcatcctggtaaggccaacgtggtcgccgacgctctaagtcgaaagagccattgcaacactcttaacgtccgtggcattccaccggaacttaatcaacagatggaagccctgaacctaagcatagttagtcgtggattcttggctgcgctggaagccaagcctaccttgctcgatcaaatccgcgaggctcagaagaatgatccggacatgcatgggctcctcaagaatatgaaacagggtaaagccgctggtttcacagaggatgaacacggaaccctatggaacggaaatcgggtatgcgttccagatatcagggaacttaaacagttgatacttcaggaagctcacgaaagtccttattccatccaccctggcagtacgaagatgtacttagacttgaaggagaaatactggtgggttagtatgaagcgggaaattgcagagttcgtggccctttgtgatgtgtgccagcgtgtcaaggcagagcaccaacgaccggccggacttctccaacctctccaagtaccagaatggaaatgggatgaaattgggatggatttcatcaccggacttccaaaaacccaaggtggatatgattctatatgggtagttgtggatcgattaaccaaggtagcacggttcattcccgtaaagaccacctatggagggaacaaactagctgaactctacttcgctaggatcgtaagtctgcatggcgtccccaagaaaatcgtatctgataggggaagccagttcacctctcacttttggaagaagctccaagaagagctgggtacccgattaaacttcagcaccgcgtatcacccgcagacagatgggcagaccgagcgtctaaatcagatcctagaagatatgcttcgcgcatgtgtcctggatttcgggaagacctgggataagagtctcccctatgccgagttctcctacaataacagctaccaagccagcatacaaatggcaccttatgaagcgttgtatggacgcaaatgccggacaccgctattgtgggaccaagttggggaaagccaagtgttcgggactgatatcctgagacaagctgaagcgaaggtcagaaccattcgggataatctaaagatggcacagtcccggcagaaaagttatgcagataaccgtcgccgtgacctggaattcgcagcggatgactttgtgtatgttcgggtcacgccattgcgaggtgtacacaggtttcggacaaaggggaagctcgcacctcggtatgtgggtcctttccgtatcactgctcggcgcggagaagttgtcacgaccggaaataacccaacgggcattccttacgtgcgtgcattaatccttgtcccaggaggcaaggcccagcacacacaaagactaacgagagacagcggaagactagggtgacaaccacaggcgcttgacggcaggcacgagctagacaccaaagccttcatcttcaaggagctcctcttctgggcttgggaaaaattgagcaagactgagtacaaccaccgtactcaacaagacacaccccaaatgcagaat

SEQ ID NO: 27780 - DNA, 504 bp, Oryza sativa
  unsure (1)..(504): unsure at all n locations
  Clone ID: PAT_MRT4530_32441C.1
gtagtggagataatgnctgcccttgccattgtttctcacctgaaggatggaaatggaatacattnaactgggacacaatangtgcttcatgccatgtatttgacctgttgttttgaaatanaacaatgtcatgtacagcagaaaactaggtcttcatacaaatttacatgctggcctgaactgattgaagaaacctcatgatgagcttttgggatgctacaagcctaagacanaatangacagatcttatgttcaaatgtgctgcagagacaacatgcactgcatccttgtgatgctgaacgtttttgtgtgggcgtgatatattttcttcagaaacatagccaccaggtgtatgtgtggatgaatttctcctgagttataggagttcatccgatttaagtaggccacaattatgcacttgtaaatattttggnaactatcccagcttttggttattcaatagtaaaatctctttcatggtagaaaaaaaaaaaaaaaaaaaaa

SEQ ID NO: 27781 - DNA, 5361 bp, Oryza sativa
  Clone ID: PAT_MRT4530_32442C.1
atgtcatggcacagggccggtgtcctgctgctaggggctcagtcctgcctgcctgtcccgggagttccggccgtaggtgggattgggtcggtactcttgtctatggctaggatgggttggaaactatgtcacgtctttcgtctgtataccgtggtgatggccggcagcgtcacccgtcgtggtttggacatgactggtttcgtcttggagctgcggggcatgtgcgttgtcctggggtatccacatggagtggactaccagggcaggccgcttccggagcaggagggtgacgatgcagagccccacgctgcttgggaggtcactgcagtaatcctcgctggctctcccgagcggacttcgctgacagtcaccgcgggtggagattctttccccgccgcttgccagagcgccgctctcctcgccatcggcactcttcaccagcgctacccggacgagttgcagcactcgccctaccgctaccaccctcgccgcggaggagcccgcgactacgccaccttccgggatgctagctcggaggatgacgctaccatcatgcacctggcgcgcatggtggaggcgtacgacgcggctcgtatcgacttccatcagatggtgcgccgtgggatggtcgagaacaacatgaagatcctggagctgcgtcaagagaacctgcagctcaagaaggacctagacgcggtggaggcgcagctgcatcagctcaagatcgcccagggagaggtctgccgccccaagcgtcgccgtgtctgccgcagccagaagatcaccgcccgcaagagcacctccaggcccgagcttgttcgtcagtccctggcgtggacttgcttcgtcgagacccctcgtgccgagcccgcgcccgtggttccccaggagggagaagcctccggcgttggtagcacagaggatgcgctgttgctcaccttccgtcctggcccgtcgcagcggagaagtgctgccaccggtgatagcaaccaacctgaaggcagcaaccaccaccaccagggcagcccacctccacctcctcctccgcctccaccaccgccagataccaacgccattctcacccaaatcctagcccagcaggccgacatgatggctgctttcctccaccacatccaaaatccgccacaacataatgctccaccaccaccttcccaacactctaaactcgccgagttcctccgcatccgcccacttaccttctctagctccaacaaccccgtggatgcgttggattggctgcatgccgtggggaaaaagctagacactgtgcagtgcagcgatgaggagaaagtcatcttcgccgcccaccagctgcaggggcccgcatctctatggtgggaccatttccaggctacgcagccagaggggcaacctattacttgggcccgtttcaccgccgctttccggagaacccatgtgcccgccggagtcgtggcccttaagaaaagagaattccgagagttgaagcaaggcaaccgctccgtgacggagtatttgcatgagttcaacaacctggcccgttacgccccggaggatgtgcgggaagatgaggagaagcaagagaagttcttggcaggaatggaccctgagctgtccgtccgtctagtctccgggaactatccggatttccaacgtctggtggacaagagcatccgcttggaagccaagcacaaggaactggagtcgcacaagcgccgcttggcgaatttccgcaatcaacagggtgctaaccaaagggtccgctacaccaatccctatccagggggatcctcctcgcagcagcaacaacagcagcagcaacctcgctccgcgcctcgacctcaattcgtggtgcgcgtcccacagccgcagcagcagcagaatcaacaagggactcgtgcgccccgtcctcctacgccaactgtgcagcctggtcaaggccgcagggacgctcaaggtccgcagcgtctgtgcttcaactgcttcgagcccgggcactttgcggataaatgcccaaagccgaggcgtcagcaaggccaagcgcctccccgctccaacaacggtgggaaggatgtcattcggggtcgggtgaaccacgtgacggccgaggacgtgctaacaactccagacgtcatcgttggtacgttcctcattcattccatccctgctactattctgttcgactctggagcttcccactcgtttatatctgtgccattcgtggggagaaatcagttgggggtagaaaggcttaggaaccctctgctcatcaccacccctggaggggttatgacagcaaagtattatagccctgccgtccccatagaaattcaggggattccttttccctcggatctgattctgctagacaccaagaacatggatgtgatccttgggatgaattgtagttccgaacttcatcagataggactatcagaaatccccatcgtcagagagttcggagacgtgtttccggacgaactacccggtatgccgcccaagcgagagattgagttccggatagatcttgctccaggaaccactcctctgtacaagcgaccctatcgtatggcagcaaatgaactggccgaagttaagaaacagttggaagagttgaaagaaaaggggtatatacgtccgagtacttccccctggggtgctcctgtgatttttgtggagaagaaagacaagacgaagaggatgtgcgttgactacagagctctcaatgaagtcaccatcaaaaacaagtaccctcttccccggatcgatgatctgttcgatcagcttaaaggtgccactgtattctccaagatcgatcttcgttccggatatcaccaattacgtattcgtgatgaagatattccgaagaccgcattcaccacgcgatatggactgtatgaattcacggtgatgtcgttcggtttaaccaatgcacctgcctttttcatgaacttaatgaacaaagtgttcatggaatacttggataagtttgttgtggttttcattgatgacattctggtatactcacaatcagaggaagaccatcagcaccatctctgtctggtgttgggaaagttgcgggaacatcaattgtatgccaaacttagcaagtgtgagttctggttgtccgaagtcaaattcttagggcacgtgatatctgctaaaggagttgctgtggaccccgaaacagtgaccgccgtcactgattggaagcaacccaagacagtcactcaagtccgcagtttcttaggtttggcaggatactaccggaggttcatcgagaacttctccaaaatcgctcaacccatgacacagttgttgaagaaagaagagaaatttgtgtggagcccgcaatgcgagaaggcgttcaaaactctcaaagaaaagctggttgcctcgccagtgttaatcttgccggatactcgcaaggatttcatggtgtattgtgacgcttcgcgccaaggattggggtgcgtgctcatgcaggatggtcatgtggtggcctatgcctcacgccagctacggcctcatgaaggcaactaccctacccatgatttggagttagctgcggtggttcatgctctaaaaatctggcggcactatctcattgggaatcgctgtgaaatatatactgatcataagagtttgaaatacatcttcactcagtcggacctgaatcttcggcaaaggagatggttagaactcatcaaggattatgatgtgggaattcactatcatcctggtaaggccaacgtggtcgccgacgccctaagtcgaaaaagccattgcaacacccttaacgtccgtggcattccacccaaacttagtcaacagatggaagccctgaacctaagcatagttggtcgcggattcttggctgcgttggaagccaagcctaccttgctcgatcaaatccgcgaggctcagaagaacgatccggacatgcatggactcctcaagaatatgaaacagggtaaagccgctggtttcacagaggatgaacacggaaccctatggaacggaaatcgagtatgcgttccagataacagagaacttaaacagctgatacttcaggaagcccacgaaagtccttattccatccaccctggcagtacaaagatgtacttagacttgaaggagaaatactggtgggttagtatgaagcgggaaattgcagagttcgtggccctttgtgatgtgtgccagcgtgtcaaggcagagcaccaacgaccggccggacttctccaacctctccaagtacctgaatggaaatgggatgaaattgggatggatttcatcaccggacttccaaagacccaaggtggatatgattctatatgggtagtggtggatcgattaaccaaggtagctcgattcattcctgtgaagaccacctatggagggaacaaactagccgagctctacttcgctaggatcgtgagtctccatggcgttcccaagaaaatcgtatctgataggggaagccaattcacctctcacttttggaagaagctccaagaagagctgggtacccgattaaacttcagcaccgcataccacccgcagacagatgggcagaccgagcgtctaaatcagatcctagaagatatgcttcgcgcatgtgtcctggatttcgggaagacctgggataagagtctcccctatgccgagttctcctacaataacagctatcaagccagcatacaaatggcaccttatgaagcgttgtatgggcgcaaatgccggacaccgctcctgtgggatcaagttggggaaagccaagtgttcgggactgatatcctgagagaagctgaagctaaagtcagaaccattcgggataatctaaaggtggcacagtcccggcagaaaagttatgcagataaccgtcgccgtaacctagaattcgcagtggacgattttgtgtatcttcgggtcacgccattgcggggtgtacacaggtttcagacaaaagggaagcttgcacctcggtatgtgggtcctttccgtatcgttgcccgacacggagaagtcgcttaccaattggagctgcccgcctccttgggcaacgtgcatgatgtgttccatgtgtcgcaactcaagaaatgccttcgagtgccatccgagcaggccgactcagagcaaattgaagttcgcgaagacttgacctacgtggagaggccagtgaaaatcctggacaccatggagcgcaggaccaggaaccgggtaatccgtttttgcaaggtccagtggagcaaccacgccgaagaagaagctacctgggagcatgaagacgagctgaaggcagcccatcctgatctcttcgccagttcttccgaatctcggggtcgagattccgtttaa

SEQ ID NO: 27782 - DNA, 442 bp, Oryza sativa
  Clone ID: PAT_MRT4530_32443C.1
gccacgcgtccgcaacgacacctggtgcctgtatctatctgccggtgcccacttgtgcgcgcgctcccacatctgcggatacgacacgagactcatgctgatgacaccgcttgggggtggttgattttcactcacctccttgcgacgctcatgccgccccatcgaggcacacgtgtcgcgagctctccggcatcgaggggactacccgatcacggcgcgcatgtgaaggctcgcggtccacgccggccacaggtagagggcactatggtgcctgtggatgccgcgcccggtaccggcccagtgcgctcgatgacgatacaatgataatggataagatctactgcgcggaagaacccacgcctgcttcgagcgcgaactcgtaccaacgtatgagaccagaacggaacaactatgcgctatcatactggatgcgcaaccagat

SEQ ID NO: 27783 - DNA, 10869 bp, Oryza sativa
  Clone ID: PAT_MRT4530_32444C.1
atggactccccagcgacccccgtgggcttatctccgccacttctcagtctggtgctccgcaatgaatcatgttatacaaaaggaaaagaaggattattgcgtcagcggctagggtttcggtggaccgggcgcacgggcgacggttcacgggaacggacggccgagatcaaccctatccaaaacggacggctgagatcgatcggtccacgaccggctcacgggaaaagggacgatgacgccagcgatgacgtcaccgacagcggcggcggctcggcggagcggacagctcgggcggcgcacgctcgccggcgaacggcggcacttcggcacaaacggagggcaccagcacgtagaggacgacgcggcgaactcaccggtgaccaaaacggcggcggaagaccaacggacggcggcggcgacgaggaggaagcggcgaagctcttcgggtcgacgacggcgacggcgctccgacggtcttcggcggcggcgaagcggtggacggggacggcgacgacttggcgaacccgatggtggcgacggcgaccgacgtcggcgaggtggttgtactcagtcttgctcaattttccccaaccccagaagaggagttcctggaggatgaaggcttcggtgtctagctcatgcctgccgtcaagtgcctgtggtcgtcgccctagtcttccgctgtttctcgtttgtctctgtgtgtgctgggccttcgctttaaaatgttgcttttctttttgtttttgtttgtagaaggccggcagcgtcacccgtcgtggtttggacatgattggtttcgtcttggagctgcggggcatgtgcgttgtcctggggtatccacatggagtggactaccagggcaggccgcttccggagcaggagggtgacgatgcagagccccacgctgcttgggaggtcactgcagtgatcctcgctggctctcccgagcggacttcgctggcagtcaccgcgggtggagattctttccccgccgcttgccagagcgccgctctcctcgccatcggcactcttcaccagcgctacccggacgagttgcagcactcgccctaccgctaccaccctcgccgtggaggagcccgcgactacgccaccttccgggatgctagctcggaggatgacgctaccatcatgcacctggcgcgcatggtggaggcgtacgacgcggctcgtatcgacttccatcagatggtgcaccctgggatggtcgagaacaacatgaagatcctggagctgtgtcaagagaacctgcagctcaagaaggacctagacgcggtggaggcgcagctgcatcagctcaagatcgcccagggagaggtctgccgccccaagcgtcgccgcgtctgccgcagccagaagatcaccgcccgcaagagcacctctaggcccgagctttttcgtcagtccctggcgtggacttgcttcgtcgagacccctcgtgccgagcccgcgcccatggttccccaggaggaggaagcctccggcgttggtagcacggaggatgcgctattgctcaccttccgtcctggcccgtcgcagcggagaagtgctgccaccggtgatggcaaccaacctgaaggcagcaaccaccacaaccagggcagcccacctccacctcctcctccgcctccaccaccaccaccagacaccaacgccattctcacccaaatcctcgcccagcaggccaacatgatgactgctttcctccaccacctccaaaatccgccacaacataatgctccaccaccacctccccaacactctaaactcgccgagttcctccgcatccgcccacctaccttctctagctccaacaaccccgtggatgcattggattggttgcatgccgtggggaaaaagctagacactgtgcagtgcagcgatgaggagaaagtcatcttcgccgcccaccagctgcaggggcccgcatctctatggtgggaccatttccaggctacgcagcccgaggggcaacctattacttgggcccgtttcaccgccgctttccggagaacccatgtgcccgccggagtcatggcccttaagaaaagggaattccgggagttgaagcaaggcaaccgctccgtgacggagtatttgcatgagttcaacaacctggcccgttacgccccggaggatgtgcgggaagatgaggagaagcaagagaagttcttggcaggaatggaccctgagctgtccgtccgtctagtctccggggactatccggatttccaacgtctggtagacaagagcatccgcttggaagccaagcacaaggaactggagtcgcacaagcgccgcttggcgaatttccgcaatcaacagggtgctaaccaaagggtccgctacaccaatccctatccagggggatcctcctcgcagcagcaacaacagcagcagcaacctcgctccgcgcctcgacctcaattcgtggtgcgcgtcccacagccgcagcagcagcagaatcaacaagggactcgtgcgccccgtcctcctacgccaactgtgcagcctggtcaaggccgcagggacgctcaaggtcagcagcgtctgtgcttcaactgcttcgagcccgggcactttgcggataaatgcccgaagccgaggcgtcagcaaggccaagcgcctcctcgctccaacaacggtgggaaggatgtcattcggggtcgtgtgaaccatgtgacggccgaggacgtgctgacaactccagacgtcatcgttgggctgtcagaaatccccatagtcagagagttcggagacgtatttccggaagaactacctggtatgccgcccaagcgagagattgagttccggatagatcttgctccaggaaccactcctctgtacaagcgaccctaccgtatggcagcaaatgaactggccgaagtaaagaaacaattggaagagttgaaagaaaaggggtacatacgtccgagtacttccccctggggtgctcctgtgatttttgtggagaagaaagacaagacgaagaggatgtgcgttgactacagagctctcaatgaagtcaccatcaaaaacaagtaccctcttccccggatcgatgatctgttcgatcagcttaaaggtgccactgtattctccaagatcgatcttcgttccggatatcaccaattacgtattcgtgaagaagatattccgaagaccgcattcaccacgcgatacggactgtatgaattcacggtgaagtcgttcggtttaaccaatgcacctgccttcttcatgaacttaatgaacaaagtgttcatggaatacttggataagtttgttgtggttttcattgatgacattttgatatactcacaatccgaggaagaccatcggcaccatctccgtctggtgttgggaaagttgcgggaccatcaattgtatgccaaacttagcaagtgtgagttctggttgtccgaagtcaaattcttagggcacgtgatatctgctaaaggagttgctgtggaccccgaaacagtgaccgccgtcaccgattggaagcaacccaagacagtcactcaagtccgcagtttcttaggtttggcaggatactaccggaggtttatcgagaacttatccaaaatcgctctccccatgacacagttgttgaagaaagaagagaaatttgtgtggaacccgcaatgcgagaaggcgttcaaaactctcaaagaaaagctgggttcctcgccagtgttaatcttgccagatactcgcaaggattttatggtgtattgtgacgcttcgcgccaaggattggggtgcgtgctcatgcaggacggtcatgtggtggcctatgcctcacgccagctacggcctcatgaaggcaactaccctacccatgacttggaattagccgcggtggtgcatgctctaaaaatctggcggcactatctcattgggaatcgctgtgaaatatatactgatcataagagtttgaaatacatcttcacccagtcggatctgaatcttcggcaaaggagatggctagaactcatcaaggattatgatgtgggaattcactatcatcctggtaaggccaacgtggtcgccgacgctctaagtcgaaaaagccattgcaacactcttaacgtccgtggcatcccacccgaacttaatcaacagatggaagccctgaacctaagcatagttggtcgcagattcttggctacgctggaagccaagcccaccttgctcgatcaaatccgcgaggctcagaagaacgacccggacatgcatggactcctcaagaatatgaaacagggtaaagccgctggtttcacagaggatgaacacggaaccctatggaacggaaatcgggtatgcgttccagataacagagaacttaaacagctgatacttcaggaagctcacgagagcccttattccattcacccgggcagtacaaagatcgtgtcaaggcagagcaccaacgaccggccggacttctccaacctctccaagtaccagaatggaaatgggatgaaattgggatggatttcatcaccggacttccaaaaacccaaggcggatatgattctatatggcaccgcgtatcacccgcagacagatggacagaccgagcgtctaaatcagatcctaaaagatatgcttcgcgcatgtgtcttagatttcgggaagacctgggataagagtctcccctatgccgagttctcctacaataacagttatcaagccagcatacaaatggcaccttatgaagcgttgtacgggcgcaaatgccggacaccactattgtgggaccaagttggagaaagccaagtgttcgggactgatatcctgagagaagctgaagctaaagtcagaaccattcgggataatctaaaggtggcccagtctcggcagaaaagttatgcggataaccgacgccgtgatctggaattcgcagtggatgactttgtgtatcttcgggtcacgccattgcgaggtgtacacaggtttcagacaaaggggaagctcgcacctcggtatgtgggtcctttccgtatcattgctcggcgcggaggagtcgcttaccagctggagctgcccgcctccttgggcaacgtgcatgatgtgttccatgtgtcgcaactcaagaaatgtcttcgagtgccatccgagcaggccgactcagagcaaattgaagttcgcgaagatttgacctatgtggagaggccagtgaaaatcctggacaccatggagcgcaggaccaggaaccgggtaatccgtttttgcaaggtccagtggaacaaccacgccgaagaagaagctacctggaagcgtgaagacgagctgaaggcagcccaccccgatctcttcgccacacctcggccatataaggaccggtcttcgggcctctgttgcaaagcactaccgtacttccacatgtctagtggggcaaatgaaggctacacgagctgcggcccggtagtcgagatgtcatggcacagggccggtgtcctgctgctaggggctcagtcctgcctgcctgtcccgggggttccggccgtaggtgggattgggtcggtactcttgtctatggctaggatgggttggaaactatgtcacgtcttccgtccgtataccgtggtgatggccggcagcatcagccgtcgtggtctggacctgactggtttcgtcttggagctgcggggcatgtgcgttgtcctggggtatccgcatggagtggactaccagggcaggccgctcccggagcaggagggtgacgacgcagagccccacgctgcttgggaggtcactacagtgatcctcactggctcacccgagaggacttcgttggcagtcaccgcgggtggagattctttctccgccgcttgccagaacgccgctctcctcgccatcggcactcttcaccagcgctacccggacgagttgcagcactcgccctaccgctaccaccctcgtcgcggaggagcccgcgactacgccaccttccgggatgctagctcggaggatgacgctaccatcatgcacctggcgcgcatggtggaggcgtacgacgcggctcgtatcgacttccatcagatggtgcgccgtgggatggtcgagaacaacatgaagatcctggaactgcgtcaggagaatctgcagctgaagaaggacctagacacagtggaggcgcagctgcatcagctcaagatcgcccagggagaggtctgtcgccccaagcgccgccgcgtctgccgcagccagaagatcaccgcccgcaagagcacctccaggcccgagcttgttcgtcagtccctggcgtggacctgcttcgtggagacccctcgtgccgagcccgcgcctgtggttccccaggagggggaagccttcggcgttggtagcacggaggatgcgctgttgctcaccttccgtcctggcccgtcgcagcggagaagtgctaataccggtgatggcaaccaacctgagggcagcaaccacaacaaccatggcagcccacctccacctcctcctccgcctccaccaccaccaccagacaccaacgccattctcacccaaatcctcgcccagcaggccaacatgatggctgctttcctccaccacatccaaaatccgccacaacataatgctccaccaccacccccacaacactctaaactcgccgagttcctccgcatccgtccaccaaccttctctagctccaataaccccgtggatgcgttggattggttgcatgccgtggggaaaaagctagacactgtgcagtgcagcgatgaggagaaagctacgcagccagaggggcagcctattacttgggcccgcttcaccgccgctttccggaggacccatgtgcccgccggagtcatggcccttaagaaaagggaattccgagagttgaagcaaggcaaccgctccgtgatggagtatttgcatgagttcaacaacctggcccggtacgccccggaggatgtacgggaagatgaggaaaagcaggagaagttcttggcaggaatggaccctgagttgtccgtgcgtctagtctccggtgactatccggatttccaacgtctggtggacaagagcatccgcttggaagccaagcacaaggaactggagtcgcacaagcgccgcttggcaaatttccgcaatcaacagggtgctaaccaaagggtccgctacaccaatccctatccagggggatcgtcctcgcagcagcaacagcagcaacaacctcgctccgcaccccgacctcaattcatggtgcgcgtcccacagccgcagcaacagcagagtcaacaagggactcgtgcgccccgtcctcctatgccagccgtgcagcctggtcaaggccgcagggacgttcaaggtccgcagcgtctatgcttcaactgcttcgagcccgggcactttgcggataaatgcccgaagccgaggcgccagcaaggccaagcgcctccccgctccaacaacggtggtaaggatgtcattcggggtcgtgtgaaccacgtgacggccgaggacgtgctgacaactccagacgtcatcgttggtacgttcctcattcattccatccctgctaccattttgttcgactctggagcttcccactcgtttatatctgtgccattcgtggggagaaatcagttgggggtagaaaggcttaggaaccctctgctcatcaccacccctggaggggttatgacagcaaagtattatagtcctgccgtccctatagaaattcaggggattccttttccctcggatctgattcttctagacaccaagaacttggatgtgatccttgggatgaattggttggctcaattccaaggagtagtggattgtgcaagacgcactgtcactctgtaccgagagccggaacaaccggttgttttctttgcacccccaacctctgtcagtagtttagaactttatcagataggactgtcagaaatccccatcgtcagggagttcggagatgtgtttccggaagaactacccggtatgccgcccaagcgagagattgagttccggatagatcttgctccaggaaccactcctctgtacaagcgaccctaccgtatggcagcaaatgaactggccgaagttaagaaacagttggaagagttgaaagaaaaggggtatatacgtccgagtacttccccctggggtgctcctgtgatttttgtggagaagaaagacaagacgaagaggatgtgcgttgactacagagctctcaatgaagtcaccatcaaaaacaagtaccctcttccccggatcgatgatctgttcgatcagcttaaaggtgccactgtattctccaagattgatcttcgttccggatatcaccaattacgtattcgtgaagaagatattcctaagaccgcattcaccacgcgatacggactgtatgaattcacggtaatgtcgttcggtttaaccaatgcacctgccttcttcatgaacttaatgaacaaagtgttcatggaatacttggataggtttgttgtggtgttcattgatgacattctggtgtactcacaatcagaggaagaccatcagcaccatctccgtctggtgttgggaaagttgcgggaacatcaattgtatgccaaacttagcaagtgtgagttctggttgtctgaagtcaaattcttagggcacgtgatatctgctaaaggagttgctgtggaccccgaaacagtgaccgctgtcactgattggaagcaacccaagacagtcactcaaattcgcagtttcttaggtttggcgggatactaccggaggttcatcgagaacttctccaaaatcgctcgacccatgacacagttgttgaagaaagaagagaaatttgtgtggagcccgcaatgcgagaaggcgttccaaactctcaaagaaaagctggtttcctcgccggtgttaatcttgccggatactcgcaaggacttcatggtgtattgtgacgcttcgcgccaaggattggggtgcgtgctcatgcaggacggtcatgtggtggcctatgcctcacgccagctacggcctcatgaaggcaactaccctacccatgatttggagttagccgcggtggttcatgctctaaaaatctggcggcactatctcattgggaatcgctgtgaaatatatactgatcataagagtttgaaatacatcttcacccagtcggatctgaatcttcggcagaggagatggttagaactcatcaaggattatgatgtgggaattcactatcatcctggtaaggccaacgtggtcgccgacgctctaagtcgaaaaagccattacaacactcttgacgtccgtggcattccacccgaacttagtcaacagatggaagccctgaacctaagcatagttggtcgtggattcttggctacgctggaagccaagcccaccttgctcgatcaaatccgcgaggctcagaagaacgacccagacatgcatggactcctcaagaatatgaaacagggtaaagccgctggtttcacagaggatgaacatggaaccctatggaacggaaatcggatatgcgttccagataacagagaacttaaacagctgatacttcaggaagctcatgaaagtccttattccatccaccctggcagtatgaagatgtacttagacttgaaggagaaatactggtgggttagtatgaagcgggaaattgcagagttcgtggccctttgtgatgtgtgccagcgtgtcaaggcagagcaccaacgaccggccggacttctccaacctctccaagtaccagaatggaaatgggatgaaattgggatggatttcatcaccggacttccaaaaacccaaggtggatatgattctatatgggtagttgtggatcgattaaccaaggtagctcgatttattcctgtgaagaccacctatggaggaaacaaactagccgagctctacttcgctaggattgtgagtctccatggcgttcctaagaaaatcgtatctgataggggaagccaattcacctctcacttttggaagaagctccaagaagagctgggtacccgattaaatttcagcaccgcgtatcacccgcagacggatggacagaccgagcgtctaaatcagatcctagaagatatgcttcgcgcatgtgtcctagatttcgggaagacctgggataagagtctcccctatgccgagttctcctacaataacagctaccaagccagtatacaaatggcaccttatgaagcgttgtatgggcgcaaatgccggacaccgctcttgtgggaccaagttggggaaagtcaagtgttcaggactgatatcctgagagaagctgaagcgaaggtcagaaccattcgggataatctaaaggtggcacagtcccggcagaaaagttatgcagataaccgtcgccgtaacctggaattcgcagtggacgattttgtgtaccttcgggtcacgccattgcgaggtgtacacaggtttcagacaaaagggaagctcgcacctcggttcatgggtcctttccgtatcattgctcggcgcggagaagtcgcttaccagttggagctgcccgcctccttgggcaacgtgcatgatgtgttccatgtgtcgcaactcaagaaatgtcttcgagtgccatccgagcaggccgactcagagcaaattgaagttcgcgaagacttgacctacgtggagaggccagtgaaaatcctggacaccatggagcgcaggaccaggaaccgggtaatccgtttttgcaaggtccaatggagcaaccacgccgaggaagaagctacctgggagcgtgaagacgagctgaaagcagcccatcccgatctcttcgcaagttcttccgaatctcggggtcgagattccgtttaa

SEQ ID NO: 27784 - DNA, 1124 bp, Oryza sativa
  Clone ID: PAT_MRT4530_32445C.1
ctagtagcggctttctccggcgaactgcgaagccgacgagaagagcccgtggccggcggcggctccggcgctctcgccgtctgctgcgtcaaagtcgtcgtcgaacgggacagctccggcgagcatgtttccatagccaccgtacagatcggaaccagagcttggcggtgcagcggcggcggcggcggcggcggtggcgatggctctggacttggcgagcatggcgagcgcgtcgagcacaagggaggtggtggtgttggtggccggggacgacgacgcgcgcatcatcgcctggaacgccggcgcggcggcggagccggagccggagccggaggggaagagcacgccctcgccggagaggagatgggacgacggcggcatggcgccgccgcacggtaagggcggcgtggcggggaagccggtgaactcctgcaccatggcgcggaagttggaggcgtcggtggtgagcaccgtggtcggcggccgccgcgacgccgccctcggccgcttccgcgttggcttgcgctgatcggcggcctggtgcagcgctacggccggcgccaggtggtactgttcttgcgcgccggcggcggcggcggggatgacgccggggaggtcgaggaggaaggttggggaggaggaaggtgaacggaggaagctcgggtggtcgtcgaggaaggccgtgggtgacgtcgcaggtgacgacgggaggctgtggctgtcgccggcggggctgggggcggtcgcggtggtggccctcctgcagcactcttgaccgatgcagtaatgcacttgagtctgaagtccgggcgtgtgcagaaggcattgctctagccctccaatggtctctgctcaccattgtgctggaatctgactgtgaaacagcttttagactgctgcaattaaaggaaaaggatcagtctgaactggcctacatcatcagagaagcgaaggatctcatttcaggtgatagagaactagttgtcaggaaaattcacaggacacaaaatggtgttagtcatctgttagctaatagagctaggtctgattctatttcagacttttggttggaggaaaattgtaatttaatctcacaattagtctatgaggacatttcttcggag

SEQ ID NO: 27785 - DNA, 876 bp, Oryza sativa
  Clone ID: PAT_MRT4530_32446C.1
atgaagcatgagaaaaagaagatgaagcaaaagagaagaaagcggaagaagcatcgtcattacgaatcagacgaaccggggacttgctcccaaagttctccaggaagcattggagacagacatttgcttgatcttgaggctgtctttacacatgacttctcttcgggacacccaagaagatcgaaaagaaggatgcgacagcacaaggtcgtggtcgtcgaggcggcgctgctaccgcatatccacggggaagtcgccattgctgtgcttggtccgcagcggcttcttgatcccctccttcccggagggctacttgatggcctcctcgtcatgggccttggtggaggtgcagacgcagctgctcatggcgaacggcgcggcggcgccgggttcgcggccgacgccttttcgtccggggacgagatcgacgaggatgccgtggtggagctcggcgaggcggatcccgtcagcaggaagcggcgcaaggagaaggagaagaagaagcggcgcaaggagaagaggaagcagcggaagtgggcgccgcccgacaaggacgagacaagtttgaaattagttttttcattcgtatctgaaaaccccttccgacatctggtcactactggagaaaccatctttgcttggttgaccaaaaactacactagtctcggtagagaaggcggagacgttggcgagcggcgggagctcaacggcggcggcgacatcctgtcggcgacggagcacttcaacgatgcgtactccatcggcaaggggagcttcgggaccgtgtacagcgccgacctcggcggcgggcgcaccgacctcggcatgaagcggctagacgcatcagagaccggcgacgcgtgctgcggtagctga

SEQ ID NO: 27786 - DNA, 1761 bp, Oryza sativa
  Clone ID: PAT_MRT4530_32447C.1
atggcgggctccgaccaccaccccggcggccgggacggcgcgccgctggtgttcgacgagctccggtgggtgatccagatccggcgctccctccaggaggacggcggcgacgacgacgacgacaacggcatcccggtgtccgtgttcaacgtgcccaagcagctgcaggcgcacaagccggaggcgtacgtgccgcagttcatcgcgctggggccgtaccaccattggcggccggagctgtacgagatggagcgatacaagctcgccgccgcgcggcgcgcccagaggcacctccgcgagggcgtcaagctcgagcacctcgtcgaacagttcgcgcgcgcggagcgcaaggtcagggcgcactaccaccgctacctcgacttcagcggcgagacgctggcgtggatgatggtcgtcgacggcgcgttcctgctcgagttcttgcagatcttcgccgccgcggaggccgccgccagcggcggcggagggaagccggagctgaggagggtgtcgtcgaggatggcgcacctggtggacttcgccgggaggaagtcggcgcacaacctcatcctccgcgacatgctcatgctcgagaaccagatcccgctcttcctcctccgcaagctcctcgagccgcagtgctcgtcggcggaggaggccagcgagctgctcgggcggatggtcaccggcctcatgaaggagctctgccccttcaagatgatggacaacttcccggccatcgacgtcgccaagcacgcccacctcctcgagctcctctaccacctgctcgtcccgaagccatccgacgacgccgccgccgccgccgacggccacgacgagggctacgacatcgaggagcagccggtggacggcggcggcggcggcggcgaggagaagcagcaatccgccgggtgcgagtacgtgaagcagctgctcgccgcggtgtggggcatcgtgtcgagcctcaagagcgggccgatgcagtacgtggcgaagccgatctcgttcgccgtcaaggcgccatggaagatgctcaccgtggtcccgggcttctcggcgatgaagcacccagtggagtccttcttcatgtccggcggcggcggcgacccgtcgtcgtcgtcgacggcggcggggcaggaccaccaccacgcgatcagccggccaccgctgatcgaggagatcatgatcccgtcagtcaccgagctcgccgccgccggcgtccagttcgcgccgacgaacggcgacgccaccacggtctcgttcgacgccaagacggcgacgctgcacctccccgtggtgacgcttgacggcagcacgacggaggtggtgctccgcaacctggtcgcctacgaggcgtcggcggcgacggggccgctggtgctcgcccggtacacggagctgatgaacggcatcatcgacaccggcgaggacgtggcggcgctgcggcggcgaggggtggtgctgaaccggatgaagagcgacggcgaggcggcgaggctgtggaacgggatgagcaggtcggtgaggctgacgaaggtggcggccatggacgcggcggtggagggggtgaaccggtaccacggcgcgcggtggcgggtgaaggcgaggcggttcatgcggcgctacgtgttcggctcgtggcagctgctcaccttcctcgccgccgtcctcatgctgctgctcaccacgctgcaggccttctgctcggtctacacctgctcgcggtggttcggcgccgtcgccgtcgcgccgccgccgtag

SEQ ID NO: 27787 - DNA, 121 bp, Oryza sativa
  Clone ID: PAT_MRT4530_32448C.1
ccaaatcaagatttgctactagtataacaagagcggtgcattttgagatgcaatttgttcacaaaatgagatgtggagaatctgtggttgtgaattctgttgttgcattcagttgtgggtg

SEQ ID NO: 27788 - DNA, 465 bp, Oryza sativa
  Clone ID: PAT_MRT4530_32449C.1
atggggtgtggaccgccggcagccaccgccctggttattgccctcggcattgctcgtcggcactgcactccgtatatgcatgctttctccgcacgcactggatctgagctcatccacgacgatggatggagccggtgtgaaggggtcgccgtccacgacgatcgagctggtcgatcagctgccgcctatcccctccgtcgccggcaccagcagcttccaccagcgaccgctggacacgccttgctcgactttgtgctcgctacatcagcagaccacccaagccggccgaaaccttgccatcatcgatctactcgcgctgagctcgtcaccaccatgaggccgcacgtcgctgccaccacattcttcgccgacagtgctgccgctgcggctcgttctcagcgtcgttggctcgtcgccgctgctgggctatcgatcgatttgggactagtgttggatttgggctaa

SEQ ID NO: 27789 - DNA, 382 bp, Oryza sativa
  Clone ID: PAT_MRT4530_3244C.1
aatacaaatgatcaccttacttacctgggtattatgacattccacactttaacaacatattacttcctttatacaaattattattggggcatcaaggaccgtgagaaatacatacaaatacaaatggcgactacatcaccacaaagtgtgaatttaaggtgcaactaaaaaaaaaattggtgacccccaccaattgtgtgcaattataaaaccatgttaatgtgaggattgaaagtattcccactcagaaaaaatctatggttatttctatttaaaaccccacacgtggggaaaaatatttaattccatataacaacattttaccccgggcccaggtggccacccgagaaatcttgaccattacctgaagtgtaacccaatt

SEQ ID NO: 27790 - DNA, 1302 bp, Oryza sativa
  unsure (1)..(1302): unsure at all n locations
  Clone ID: PAT_MRT4530_32450C.1
cgccgttctcctccgcgccgccgcccgccgccgtctactcctctcccgcgccgccggccgccgtgttccatcctttccccggcgccacaagcttccggcccctagatagcccgcgaagccaagctgccggcccctcgctcgcccgcgcagacggccgagatggtggcagcggtggcgccggagtgggccaccaaggagccctgcctcatgggaatcgacgaggctgggcgcggccccgttctcggtccaatggtgtatggctgcatgtactgcgctcgttcctaccaagacactcttgcaacccttaaatttgcagattcgaagaccttgaaggaagaacaaagggaggagctgtttgaaagtctaaaagacaatagttcaattgggtgggaagtggatgtcatatgcccaaaggagctatctgctaaaatgttaaaaagatcgaaagttaacctgaatgaaatatctcataactctgcaatgggtctggtcaaaagagctcttgacatgggagttctactagcagaggtctacattgatacggttggagatgcggagaagtacaggatcaaattgactgaaaagttcccaggcatcaaatttgtggttgccaagaaggctgatagccttttcccagttgttagtggagcaagtatagtttcgaaggttaccagagacagagccttgagaaactgggtatttgatgaaacggctcagaatatgcacatgaacactgggtctggttatccaggagatccttccactaaacaatggttagaagatcacaaacatccgatatttggattcccgtctttggttcgttttagctggggaacttgcacgcccttcttcaatgacgcaattgaagttacctgggagtccaatgaacttgaagaagatgcaggtagcaacggtagtgttaagagacaggtcaagctatcaagcttaggctttactggattcaaaaggaagtctgaggagatcgactcaagtgggaaaggccgttgcaagttcttccaggctcgcaaacttgaacttgtcaggaagtttcagtgatgcgtatcagcttcgttgtctgtactactaactttaagtcagagtagaaggctcttatggggttatggcttgtatttcagctgtgacacttgtgagttcagtataatgaaggctcttatggtgatattgtatttcagctatgaacttgtgggttcagtaaaattctgaatcgagcatttgaagtgtttttcagacatttatttgaactgctccaaagttaatagaatnntatgttagattgattct

SEQ ID NO: 27791 - DNA, 200 bp, Oryza sativa
  Clone ID: PAT_MRT4530_32451C.1
tggtcattgttgcttgataaggtgtatcaacactgttgttattatacaatttcaaatctgtgcattttctatattgctatagatattgctactgttgtattcctagaatctgttctttggaggactgtaaccctcgtttattaccagctttcttttgtatgttgtaatgtgtgactcgcagtacttagtactcctaaatg

SEQ ID NO: 27792 - DNA, 878 bp, Oryza sativa
  unsure (1)..(878): unsure at all n locations
  Clone ID: PAT_MRT4530_32452C.1
ggggttggcaggggaatttcccggggnaccgaangggcttggtttacttggttccattgggnttccctaaaaatttttcccgtttggtttactccccccctttggaaaaccttaaaacctttggaanttggttcccctttttcctttggcggtttttcccgggaaanaaaaattttattccacaagggggcaggtggggaanaactttcccccctttttggaactttccnagaaattgccatttccccaagaaaaagggtttattccaccttgggggccaanggccctccccaaaagggaatgttntaatggcctcccaaccaatttggtttgccattggccnaanagcctcccngggttggggnttgnattcgcctggcaaccccgtttnccgccactttggcttggcggcctggttacattggggttttttccacccccccttggttttccaaaacctttattnggtcccnaaaaanggttttnggggggggggttttcccntccccaaattccccaagggaacgcccccaattccaaaattttanttgntttnccccnnnnaatttttggaaaaaattngaatttttnttcccnantnannaaacnnctttcccttaaaaannttgtttttnttnttccnanttnantnaantttnggttccnngtttccccccccnaaattnaaaaaatttggggncccccngccccnancnnttttttggcttgggggcccatcccctnggaaanncccctgtttttttaaaanaaaaaaatccttnttcntttcccnaaaagggnnttntttntttnaatnaaattnccnnnccgtttntttngnnattttccnngggngnttcttgncccttgggggtttt

SEQ ID NO: 27793 - DNA, 389 bp, Oryza sativa
  Clone ID: PAT_MRT4530_32453C.1
cctggcacaatgccaatgtcaaattctctgcaaaaggacatgtaatttaataagttcgatagcatggaatacatggtgtaataattttaaaatggcatggtgaataatagaaatcattagaacaaagaagataataggaattgtgaaataataatagaaactcagtgctagtaatacacgtgctataataatacagagtatatgtattgatactatatccatgataggaatcaaacaatttaacagtgtgaaagggtgttgataatcaaataaagtgaatttccagaaacatgcttttttttccgttgaacctgaaaaaacatgattttagtttggaaataaactgccgttcacgacgtacctgaccatctgttcgggagggaaaaaaa

SEQ ID NO: 27794 - DNA, 2668 bp, Oryza sativa
  Clone ID: PAT_MRT4530_32454C.1
atggaggacagggtgaaggccatgctcaacctcatcggagcggacggcgactcgttcggcaagaaggcggagctctacttcaagagccggcccgagctcatcaaccacgtcgaggagatgttcaggtcctaccaggcgctggctgaccgctatgaccggatatccagcgagctgcacaaggccaaccacaccattgccacagcgttcccggaccagatccaattctccatgcaagatgccgatggggaaggattccagaaggcgatatccgggatcgatctcagcaacgtcaaatttcctgcgctggaaggtttgccaatggggtcacgcggcgctagccggggaaccagcccggtcccgaagaggacccagatgcaccggaggatcacctcccacatgaacaaggaaaatgcacaggaggagatcgacaagctgcaaaagcaaatcctggtgctgcagactgagaaggagttcttgaagacctcttatgacagcgcgctgggcaggtatctggacattgagaagcaggtggtggagttgcaggatgaagtttgcagcttgcaggatgcttttagcactggcgcggccattgaagacaatgaagcccgggcattgatggctgcacgagccattgtgtcttgcgaggatacattggttaatttacaggaccagcaacgtagatcatctgaagaggcaagaactgagtttaaacgattcattgaagcaaagaagaagcttgataccttcaaagctgagtgtgggcagcctcatacgcaaaatgatgaacctgataacagtgacaaagaatacatccatgcaatgccatctggggatgttgatgattctgttcagaatgagatcaggtttgacctgcaggaagtatgccaaaaggtcaaagaactaattgaattgcacccaggggtatcggtcactgatttagcagataaggttgaccgacttgtggagaaggtaatcgacctagagcttgctaccacttcacagaatgctcagatcaatagaatgaagactgagatagacgaccttcacaagtgcctgcaagccttggaggaagagaagtcggctttggttgctgattccagtaagctggtagacagattgaagcaagttgaagaggttttgcaagcagtccaacatcttggaaactccatacaaaatgggacacagaatattcataaagaaatgaatgcagcctgcagtgaacttgctgaatttgtagaaaaattacatgaacctgagccccaaaacagtggtttcatgaattcatcccaagagtcaagttgtcaagaagaagattcagaggtaacaagtcagtatgccaagaaacaaacatccgactcaatagatggttcaaagaatgaagtggagaaacaagataaaggctccgagggtcctttggtgcagcaacatcctgacacaaatggatctgatggtgaggacaagattttattagaggggtatgcatctgtccttcagagctacaagggtacagagcaaaagctgtcagaaattgagaagacaaatcaagagtaccattcaaggtcaatgtcagagctgaaggatctgaagagtgccaatgcaatgaaagatgaggagattcactctcttcggcgcatgctaagttctttgcagagaaagatgaatgcccctgctcctgagaatgtggacaagtctgaagaaacttccaaaataagcaccactcctgtcaccgaagacaaagagattgcagaaatagaggagtacatgaagcaatgccaagttgaagagcaacttgcttcgtcaatttccgaggaaaaatttagagcagagattgacagggtgttggagaataacttggggttttggttgaggtttagcacatcatatcatcaaatacggaatttccaaacatcatttgacaagctaaaaactgagatggataaattgattgatgcacaggcacagtgtggtgcagatggagttcctatcagttatcaggtagcaaagctggagtcagctgttctagaaaaaaaattccgggatttgaacacagatcttcaagtttggatagaaaaaaatgtgctattaaaaggagaactagagaacaggttctcatcactctgtggcatacaagaggagatatcaaagatcgcaactctggataaaagcgatgaagttcacttcacccctttccaagctgcaaaactccaaggagaggtgcttaatatgaaacaagagaataacaaagtcgctaaagagctagaagctgggctggaccatgtaagaggtctccaagtggaggttggcagggtgctcttgaagctccgagaaaatcttgaattatctatagcaagaagcaaccgagctcagcaaaacttccgtaacctgtcaacgaaagctggagttccccttagaactttcctgttcggcacgaagccaaagaaaccatcactcttttcatgcatgggtcctggggtgcataagcatcacagtggctcaagggctggtcgtagatgagaatggttggatcatcaactttcttttgtcaattaatacagaacagagctcagtgtacctgtcaattgatttgtggtatatgcagtttctcatagaccttaaatgtaaagaaccctgcatctcttaatataaatttggttcaccctgtccgctc

SEQ ID NO: 27795 - DNA, 1776 bp, Oryza sativa
  Clone ID: PAT_MRT4530_32455C.1
tggtcgttccgagggcaccatgagcaggcggttccactccattctctcatctcatccgtgaccacactccactctcatccagagcaatggcgttgcaaacgcagccggtaccaaatgcgtcacctcttcatgttcttcggtccgtatgcgtcctcctcctggccgcgtcggcgacggtggcggcgcggcgccacggcccggcggcgcccatcgccgggcagagcatgtacctggcgccgagctgccgcgcgcacacggcgtcgctgacggacttcggcggcgtgggcgacggcacgacgtcgaacacggcggctttcaagtcggcggtggaccacctgtcgcagtactccggcgagggcggcggcggggcgatgctgtacgtgccggcggggaagtggctcactgggccgttcaacctgacgagccacttcaccctgttcctccacagcgacgccgtcatcctggggtcccaggacatgggcgagtggcccatcatcgatcccctcccgtcgtacggccgcggccgcgacaaggccggcggccggtacgcgagcctgatcggcgggtccaacctgacggacgtggtgatcaccggcgcgaacgggacgatcgacgggcagggggcgatgtggtggtccaagttccattcgaacaagctcaagtacacgcgtgggtacctgatcgaggtgatgcactcggacacggtggtgatatcgaacgtgacgctggtgaactcgccggcgtggaacatccacccggtgtacagcagcaacatcgtggtgcagggggtgacgatcctggcaccgacgcactcgcccaacaccgacggcatcaacccggactcgtgctcccacgtccgcatcgaggactgctacatcgtgtccggcgacgactgcgtggcgatcaagtccgggtgggacgagtacgggatcgcgtacgggatgcccagccagcacatcgtggtgcggaggctgacgtgcgtgtcgccgacgagcgcggtgatcgcgctgggcagcgagatgtcgggcgggatcagcgacgtgcgggcggaggacataacggcggtgaactcggagtcggcggtgcggatcaagacggcggtggggcgtggggcgtacgtgcgcgacgtgttcgtccgggggatgtcgctggacaccatgaagtgggtgttctggatgacggggaactacaagtcccacccggacgacggctacgaccccaacgccatccccgtcgtggacaacatcagctaccaggacgtggtggccacgggggtgtacaaggaggccgccaggctggagggcatccagggcgcccccttccgcggcatctgcatcgccaacgtcaccgccacgctctccaagtcgcgcaagtacccgtggacctgcaccgacatcgagggggtgtccaccggcgtcacgccggcgccgtgccagccgctgcagggggcgcacgatggcgcctgcccgttccccacggacacgctgcccatcgaccagctcgtcatgcagcagtgcgcctactccgtcccggcctccatctagctgatctggctgcagcctgcagcgctgtagctgtagctgtgaccgtcgttactactacaacactagcctctgcgtgcggtcttctgaaacaaaaacaataacccagagtgacctttctgactgtgctgcttcacagcgctcgctctgcgtcatgtcagtgctgcctctccttgctctgcaattatgtaacttaaacttcagttcgtgaaatacaaatgagaaattagtcgtc

SEQ ID NO: 27796 - DNA, 192 bp, Oryza sativa
  unsure (1)..(192): unsure at all n locations
  Clone ID: PAT_MRT4530_32456C.1
cactatacactatcnaagagctatcacgcacgctgcacgcggacgggagcctgtataccgtacagccgccgcccttttttttttttttttgaaacaaaaacaaaaacagagcacggcacgttaattggggagacgataaacaaactgggaacactcgnctctgaggggagacatcatcgaatcacagatgga

SEQ ID NO: 27797 - DNA, 383 bp, Oryza sativa
  Clone ID: PAT_MRT4530_32457C.1
gggggaagcaaacaaatcaggcgtagttctagtccaacattagcccactttccctccagctggggcggggaaaaaaaaaccccaggggggccataaacatatactataaggtaataatgggccgcgttggggccctcccctacaggggggggacggacaaggacccccttttttgttaaaactttttggggggatggatttactccggacccggccgttttttatacggggggggcacaagccggcctacctttatacatcctggggtacaaaaacgggggcctgtttaagggcaaaaagctgaaccctgaacatttcttgctttgggtcgacgggctgaaacttaactgaaaaagagcaaaatttaggggtttttttttttt

SEQ ID NO: 27798 - DNA, 213 bp, Oryza sativa
  Clone ID: PAT_MRT4530_32458C.1
aaaaagagtgcatggttgaagtgggtgctggctgatggttataatctggtaccaattcaaatttaccatttttaccatcagatgtaatcttaattgacattcgtgcaggacaccctatttttgtttctggccgaggtcttttaacttccttagctcctttcttgaccttacaaaaaccttttttcgagcatacaaaggttcttgaccttgtga

SEQ ID NO: 27799 - DNA, 255 bp, Oryza sativa
  Clone ID: PAT_MRT4530_32459C.1
atggaaagagggaaagccgctttcgagaaggaatacaagagttcgccccgccgccgcgctcaaggagagcttatccggcgcgcgaagaggaggctcgccgcctcgccgctgcagctccgtgcggtcgtcgtcggcggcggcgctctttcggtcctcgccggcgggtctcgtttgagttcaaaagaattggatggatccgtggtgcgaatctccgatttgctcgagatgcttatctggttctgggatttggtctaa

SEQ ID NO: 27800 - DNA, 842 bp, Oryza sativa
  Clone ID: PAT_MRT4530_3245C.1
ccggcctttaggtcattgtctccggaagtcagaaagggggggaaaaggaactcgaagtcgccgccggatttgggatttggagagcgcgcgaggtaaaccaaagttctttttccgatggctcgtactaagcaaactgctcgcaagtcaactggaggaaaggctcccaggaagcaacttgccaccaaggctgctcgtaagtctgctcccacaactggaggagtgaagaagcctcaccgttaccgccctggaactgttgctcttcgtgaaatccgcaagtaccagaagagcactgagctgctcataaggaagcttccattccagaggcttgttagggagattgcccaggattttaagactgatcttcgtttccagagccatgcggtgcttgcccttcaggaagctgccgaggcgtacctggtgggtctcttcgaggacaccaacctgtgcgccatccatgccaagcgtgtgaccatcatgcccaaggacattcagctggctaggaggatccgtggtgagagggcttaggctttctcatctctgggaggggctctggtgtttcatctgtgactacttcctgcttttgctgctgaactcttatttggtgtcgtgaatggtgctaatactactcacatgtagtagtagattgttagtgaagtactctgtttctgtgttctagaactggatattttgctagtaagttgtctcgactgttgatttcatccatccatctgatggatgtgtatctagtagtttctcatctgaagtcctgaaatctgaaccttgaatttacctgtggaatggaacttagaaaaactgtgttaaataatcaaaaaaaaaaaaag

SEQ ID NO: 27801 - DNA, 572 bp, Oryza sativa
  Clone ID: PAT_MRT4530_32460C.1
cgcgtcacgccacgcgtacgatttatgtaaaaacagtcagccaaaatgattaattggaagttcaattaatcattgaagaaatgaaaaagggattaaataaaataaaaatccaagtcttaaatgaaaggatccggcggacgcgtggggtgaaatagacatgtctgtgaagatgcggactacctgcacctggacagaaagaccctatgaagctttactgttccctgggattggctttgggcctttcctgcgcagcttaggtggaaggcgaagaaggcccccttccgggggggcccgagccatcagtgagataccactctggaagagctcggattctaaccttgtgtcagacccgcgggccaagggacagtctcaggtagacagtttctatggggcgtaggcctcccaaaaggtaacggaggcgtgcaaaggtttcctcgggccagacggacattggtcctcgagtgcaaagtgtacgaaaactaagaccactgtccaagtacgggctcgcgtaggtgcagaaatatatactcctataatgtaacgaaacacacacattgactgtccccgggcag

SEQ ID NO: 27802 - DNA, 160 bp, Oryza sativa
  Clone ID: PAT_MRT4530_32461C.1
cagtgcctgaactaagacaattttcaccaacgtgtgtgtcattgaaaatgtcaatgaccacatacccttattgaaccccccatctcccgtgcctgcgtacacctgcaagtgtagaagctcacacaatttctgagctcttcgcggatatttcacatggata

SEQ ID NO: 27803 - DNA, 823 bp, Oryza sativa
  Clone ID: PAT_MRT4530_32462C.1
atgaattggaaaggaaagtataagagagaaaaaggagaaattagtgagggagttagaagagttaaataaatggtgtaagaatcatggtgtatgtgagcatagaagagagagggagataggatcaaccgaggtttactacgaggaaggagatgctaaaatggttacaaagatgcaaggagagagatgtgttagaggtgataataacactaaataatatcatgccaaagctaatgggagaaggaggaaagatatgtttttttgtttgaaacaggagaatgtgttgatagctgggcaagagcagttgctgagttttatagcttatttttataaagatctatttgggccacctgaaagatctaatataagattacaaaatttggagatgggacaattgtctgatgatcaaaagaaggaattgttgaaaccctttactttggaagaggtgaagaaggttgtgtttgaaatggaatgtaaaaggcacctaggcctgttggtttccctgcttatttttataaacacttttgagtggtgataaaaaatgatctgaaagctatgattgatgattttcatcagatgattttggatatcaaaagactgaattatggggttatatccttaattcctaaatgcaaagatgcaggagttctgtttaaggtggactttgagaagtcctatgataaaataaaatggccatttctatggcagatgctggaagcaaaaggcttccctagtgtttagtgattggatcatgagatgtgttggagggggtaaagtgttagttaaggtaaatgatgagatagggtattttttccaacacaagcga

SEQ ID NO: 27804 - DNA, 1281 bp, Oryza sativa
  Clone ID: PAT_MRT4530_32463C.1
atgagcaacgatagagcgagcgacggcgcgtcgggcccggggatggcggcgcgctgcggctgcaagaggaagttgatccccatcatcctgtacctccataacggtaggctcgtcattggctcggttgaggatgcgctcgagcacgagctcgccaaccgcctctacaccctggcacgcgtcctcgtgttgtccttcaattactgcctcgcgctagagcaccccatccctgcctgctacgatgacgcgtggtctacaccgcagtcgccgtttgccatcagagccacgagcgccgacccgaggtggtgggccttcgtcctcggtacaatgctgttgagaaagatggaaaagaggagtgaggagggggaagagaaagagtctctgattatgtgggtcccaccagtcatgtcagcaaataatgcttcccacaccatcaaaaaagttgattttttgcacccattttcgaagatgggagagacattatacccggttttgcggttgagggatgcgattcaatcaggaggaagaacgagggaggtaggggaaagactcgatgagatcggcaagaagatcaagcgagagccggacaccgccggcgtcgtagtcgccgccgtcgcaggcaccggcaccggtacagccacgccgatcgagcaccgcgtcccccatcgcctcggcctcggcggcgccgtgaacaccgtgaccccgtgcgccgcgtgcaagctcctccgccggcgctgcgcgcaggagtgccccttcgccccctacttctcgccgcacgagccccacaagttcgccgccgtccacaaggtcttcggcgccagcaacgtctccaagatgctcctggaggtcggcgaggcggagagagccgacgcggcgagcagcctggtgtacgaggcgaatctgcggctgcgcgaccccgtgtacggctgcatgggcgccatctcgatgctgcagcagcaggtgaacgcgctggaggccgagctggaagcggtcagggccgagatcttcaagcgcaggtaccggcaggccggcgccgccaccggcctcatggacgacgtccaagtccatatcaccgccggcttcgccgctcctcctcctcctccatcgatgcacgcgagggacgtggtgtcagtggcggacgccggcgggcaagggcaagagttggccggagcgccggtgatctcgtcggcgtctccgccggtgtatcctgccgggcagccatcaacaagtactactgactacagctccctcaacacaagtgagcatgctgcatactttggttga

SEQ ID NO: 27805 - DNA, 396 bp, Oryza sativa
  Clone ID: PAT_MRT4530_32464C.1
gaaaaaggtgcgtttcctatcgctcgccgttttgcccgccaatagcaagcggaagctgggggaatctgcggtggctttttcgcctcgttgtgccgtgtcatctcctcctcctcctcctgccgatgatgatgctgctgctgccgagttcctcctcctcctgctgctgtcgctgccccggcgggcagttccacggagctccaccccgcgtgatggcgccttgttgtggggtcaccagagtatatattgagaagagattgggagtaggagggggaaatgcatcaagcctgcaagacatgcacaggaaggagctccaggcaaggacaagggaccagctccagacattggagttatctacgcccttgtacgacacggcgtgggtggccatggtgccactgc

SEQ ID NO: 27806 - DNA, 552 bp, Oryza sativa
  Clone ID: PAT_MRT4530_32465C.1
atggtgatcccctacctcgcccgcgcggtattagcaacaccggcgcgcgcgtttgtcccgtgttgtcccggggtctggcaaaccctgtgtgacgtctcgtccttcacggttcgactacatcggctcttcggcgtcatctaccccaacgactgccgcgatcgcgtcaccgtcatcgtcatgcgtgttctcgcgcaccttggtccacgacgccctcccatgcgtccacgaccactctatggcaccccatgcgcgtgctgcggcccggctaccttcccaacttcgacgccccgccgcagaagatcccgccgcataaatccagcgcgggaatgcctccaggagaaacgacgtctcaccggccgccctcgatctcgggccgtcgagcgccgatcgcgcggtgcggattcgctcggcacgctctcctctctctcgcatcacacgggcacggccgcacggctcggcgtatgggaagtgcacggggaccaccgtgacgcggccccacgcagacttgcttccgtagatggtagagaagactagaggcacaacataacccat

SEQ ID NO: 27807 - DNA, 375 bp, Oryza sativa
  Clone ID: PAT_MRT4530_32466C.1
atgacccggtgcgcgatcgatctcccaccgcgtgaccctgcgtgcgcctcggcgtcgacaaagattggagcggctgggtggagcagcttgctccccgggcctggcgccgatgcggcggcgggcacccaggcgtggctccgatgctgcgcagttgagggaggcagtacaggagcggtggaaggagacaacgaggaaggagatgaaaaactcggtgccgtaactgggagtgtggagaggagcgagaggagccgatgcgagtgggagcggttgtgggaaggaggcgaggaaggcggagaaaatcgcgtgggttggggaaacgtgctgcacggggaggtggaagcaatatccttcgttcaatctgattgtcgaaactag

SEQ ID NO: 27808 - DNA, 1333 bp, Oryza sativa
  Clone ID: PAT_MRT4530_32467C.1
cccgggctgctggtttcggcacgtcggtgtcagactcagtggtctagtctcgaggggtttttgtttttttttttcttaagtgtccgtctttttttacttttttttcttttttataaaaaaagatttattgattttttgaactttaacacagatatgtccgaaacacacacaaactgctactaccacgaaagaatatctctagatctctcttcacctacgcatttgcaccggtacaaacaacacaccacatggtatgatgggtagtcaccggcacacgagggagaagagttcgtcagttgaataacagagagagtaggctactactgaaggagtactcccagtaccactactgaatacactgatgatcgatcaaaaccagcaggggtggcggcacaggccggaaagcgcgggcgagacaaagcaccaacgccggcaacgccgctgcattgcaatgcccaccaaactccggccggcgccgtgcgcccccaccaccgacgagacggaatccactgcccccttgtgtggctctagatgagatggaacaggaatggtgcggcggcgaggaggacggaggtggcggcggccagctgggagcgcgccggcgcggcctcgttgtagtcggggttcatggcgccggccgacgggccatatgcgccgccaaacggtgggctcagggcgcctccctgagtgccggtggtcgatcccggggtcgtgatcccggtgccggcaccagcaccggtgcccatgcctgcgccggtgccggttcctgtgccaacgcctgtgccggtgcctgcgccgacgcctgcgccaccagtgccggtgccgccggtgccaactccagtgccagtgccggtgctggttccggttcccattccggtgcctacgccgctagcggtggccgggtacttgcaggtgccggagctggggtcggtgttggtgagggtggcgacgccgccgaagtcgcaggtggcgccgatggggctgttcttctggaagtaggagttggtggcgtaggagcagtgcgcgacgatggtgctcggctggtagcacgcgccggactgcatgatctgggtgcagtcggcgccgcgccagcacgcgtagtcgatggccttctgcatcgccgccgggctctggtcgggcttgcacacgcagaacgccccatctgagcctgtggacatggccagcaagagcagcagcagcaacggaatcgccatggcagcagcagcagcagagaagagctcgagctctctctccctgcagcgagaaggagaccggccggtgtggggagtcgggaaggaaggaaggtggtgtgaactgtggccgaattcctgca

SEQ ID NO: 27809 - DNA, 425 bp, Oryza sativa
  Clone ID: PAT_MRT4530_32468C.1
gcacgagggcgcttcaagcggcggcgatcgccgccgtcctcttcctcctcccttccctcttcgcggccgtcacggcacagtccaaggccaaggccttctgcatcagccagttcgccatcgccagccaggcgtgctccatcctcccgcctagtccccccgacgagcacgacgacgacgacgacgacgacgacgacgacgacgatgatgacgacgacgacgacgacgacgatgatgaccacgacgacgacgacgaccacggtggtggtggtgacgacgacgaccacggcgacgaccacggcggcggggatcaccaccgtgtgcgccgccgccaccgccaccaccgcgaccgcgggcgccgtggccacgccgccgtggtcgacctctcggcgctcgtggcgggcaacggcagcggcagcacgcagatc

SEQ ID NO: 27810 - DNA, 194 bp, Oryza sativa
  Clone ID: PAT_MRT4530_32469C.1
accgcgtcggctgctggtgtagcttactgctgctacagtgacgtcgaagagtactgtcgtgtcatatatgcgactgacatcaacaccgtcgcttatcaccttgactacatacagcggtattgctcgttagctggaaatcagatagactctgacacgtacacgcctcagaatgtcctgtagccacactgcatata

SEQ ID NO: 27811 - DNA, 420 bp, Oryza sativa
  Clone ID: PAT_MRT4530_3246C.1
ctcgctcgtgcgttcgatgaggaggaggaggaggagaagctagctagcatgcagcggcaactgcgacgagctgcctgaggagctgcagctcggtggacctgccaaacctgctatccccgtcgacaaaacatatccgattaccaaactacgactacctcaccacgtcaaggcgcaaaagcttgtgcctcgcgtggatgccttacaatccaactagttgtacatataacctgctcttgtacgaacacaataaccgcacctgtctggaaatcgtaagaactccctactacttctatacctctattgaggaaatatgtatccacttgctggcctcacaacattttgtcgctgctgtaagatgcatttatgatacatggcaatgcaacaagcaacaacctcaggcccgaacgaaatattcatttc

SEQ ID NO: 27812 - DNA, 554 bp, Oryza sativa
  unsure (1)..(554): unsure at all n locations
  Clone ID: PAT_MRT4530_32470C.1
tattcctgctacctttgttttttgattagtcctggactcctgatgctggtgtagaatgaaataaatttacgactgaagttttagttcattaatttgctgacgctgatagcctagtcctgataaatcttcagagcttcaagtactaagttatccacatagtccgatacaccgtcttaagtaccagagcctccagttccaggaataaatttctctctctatctctctcccctttttttttatttgcgatgagaaatagtaaaattttcttgaaaacattacaggaaaaacgctacattaggcagatgtggtccatactctgagtagtgttggtctgcggctgcttccatgacaagcctggtgatgccatgaagggtaataagttcctcgagtccttttgcgacatcgtccatgtcaattagtactttctgacaatcagtctgaaatagtaggattaatgttcatgctcatatngaatatattttgactgataaacaacatttcgtcccacgtttctgatgcaagtatttttttcacaagcctaacaaaaaaagtat

SEQ ID NO: 27813 - DNA, 285 bp, Oryza sativa
  Clone ID: PAT_MRT4530_32471C.1
atggggacccgtgggtggaacccttcacccggccccggccccgcatatatgtggggccccgtccccgcccaacccacgggtcgaaaagcagccccgtccccgtccccaaaggggcgggtccctgcccccaacggggaaattaccatccctaagcttccatcagtcgctagggatggtgtgtgccccacgtattccatgtcatcatctgagctggacccggccacatcgatcgactttcaagcgggtcccagcctgtccgccgacagctccggcagctcgtctaag

SEQ ID NO: 27814 - DNA, 313 bp, Oryza sativa
  unsure (1)..(313): unsure at all n locations
  Clone ID: PAT_MRT4530_32472C.1
ttgggggcctacctagagcagtgagcacacacgctcacctcctcactctccgatccatggcgccctcccccttgtcgctctaaaccctaatccgaaccgagcaatcaaaccaaaatcgaacgaattcgaggacgagggtggggagccctcgaatccggcaatggatcgcccgcgctcctccaagcgcgcctaccactacgaccaggactcgccgccgccccgctccaagccacgcttcgaccgccgcggcgtccccaaccntaacaacagntaccaccgccgcggccnccctggtggnggcggcggcgaccgc

SEQ ID NO: 27815 - DNA, 1405 bp, Oryza sativa
  Clone ID: PAT_MRT4530_32473C.1
gcagcttcgccacgcactcccacccccaatgccggccgccgcccctcgcgtggcctctgccgcctccgccacgcgtccggcgacgaggggcgtgcgggtggcgagggacaaaagcggcggagggaagctggaggagcggacggccgttgcagttgcagtgaaggtggtggtggtggatccgcagcgcctgcgcatggcggccttcgagccccatcggcttcagctcttgtacttcattgccattacagtgctcgcttcggtgttccaaccttgcacgtccattgagctccaccgtgagctctctggctggtcgaatggcattgctacatggtatggcgatcctaatggtgcaggaagtgaaggcggtgcatgtgggtaccagtatgctgttgaccagccaccgttctcatccaggattgctgctggtagcccctacatctatgactctggcaagggatgtggttcgtgctaccgggtggtgtgtgctggtaatgaagcttgctctggtatccctgtaaccgttgtcatcactgaccaggggcctggtggcccatgcttggaagagctagtcgatggtcaatgcatgaatgaagcagctcactttgacatgagcgggacagcattcggtgccatggcgaggcctggccaggctgatcaactccgtggtgctggcctcctccaaattcagtacacccgtgtggagtgtgaatggactggagtagggctaacctttgtcgtggactctggctccaacccgaactacctggccctgctggtggagtacgatgacaacgacagtgaccttgcggctgtcgacatcatgccgattggtgctggtgcttcggggtcatggattccgatgcagcagtcatggggcgcagtgtggaggctcaactccggctccgccctgcagggcccgttctccgtccgcctgacgttcagctccggccagatgtttgttgccagcaacgccataccggcagggtggaaccccggcatggcgtaccagcccggcggagtggcgatgagggttaggggaagaaatggtggtcgccggggctacgaggccgtcgggatgctgggtggcttgtgtcaccttctactgctgctgttgttaatgttgttcgagttgtgacttgtgatgcactaaaaacatgtgctgaaactttggtgctttctgtaggactagccatggttggattagcctggccgtgctctcttgtagctcagatgatgtattgcccgcagccttggagacattatcaatttgtcatgtgctggattaatggaataagtagtattccactgttaaaaaaaaaaaaaaaaatagttcaggtttgatagtctctgtaaatatgttccttggcactgttgggttattttccacctctttccttaagtttgg

SEQ ID NO: 27816 - DNA, 630 bp, Oryza sativa
  unsure (1)..(630): unsure at all n locations
  Clone ID: PAT_MRT4530_32474C.1
gccgcggttgctcgcgctcggcgacacgtacccgacgggggatttaggataactggttttcggaggtggacgtggtggtcaaacgcgcggtgagttttttaattgggggaaacttttggatgatttggatctccaagctgccgtaacagtgccacctattccattttcgcggtagcctgatagcgtgaagtgtgaaccctgaaatggacggataatggaatatggcaatatcgcatacggagtatgcaaatgaccgaatgtgtgtgtgcgggtcgtcgtccacgtttctcacagtctcacctgtctacgacagcaatcgactactactcctccgtctttgattttaatattttgtttgtactatttaatcatttattttattaaaaaaattatacaaatataaaaaataaaaaattgtgtttaaagtactttagataataaagtaagtcacaaataaaataaataataattctaaatttttttaaatgagacgaatgatcaaaacagtacaagcaagttaaaatacgttatattagaggacggaaggagtactacggattgattgatggatcgggatggctttgaggacanatatctttgctatctgcttagctgcagtcgatcgagcag

SEQ ID NO: 27817 - DNA, 265 bp, Oryza sativa
  Clone ID: PAT_MRT4530_32475C.1
tgtcgcgacgtccctctccgtcacagatcggagagatgagctcggcggtgcgaggagaacgacgagcaggggcggcaacgaggttccctctctggcgtctcacgcgcggggccaccaagcgcgaggtcacgacccccacagcgcagtcgcatcgttcttccccgcgtcactcgacagcttttctaacgaagaacgcgtgcccaattttggctacatgaaccttgttcggtcacactccaagccgagctggtgcagaatctcgggt

SEQ ID NO: 27818 - DNA, 242 bp, Oryza sativa
  Clone ID: PAT_MRT4530_32476C.1
gcttctcattttctttgggaacaaaacagctggagcgttgtattaggggtctataactgtaaaacggaaccgccccaaaggtgcacattcttggggcgttattttttggatacaccgaccctttttgattgagacatcactttagggcccgggtcatcgcctaatttgaaaagcccgggcgggactgtggctgctactacggagggagggcgccggacccttgctcccctattattcttaag

SEQ ID NO: 27819 - DNA, 299 bp, Oryza sativa
  Clone ID: PAT_MRT4530_32477C.1
cttaccgagtctgagcccatctcttctcgggcgcttgtccttagcctatccttgcgcctcttggctgatgggacggatcatgcgtcaacggtgcgactggctatacctttgttgcatgtacatgtagggcttaattgatatatctgggttgtggttagaaggtgaaccttcaatgatctatgcgaattatgcgtagaagtcaaccgcggacatttagtctactaaccgtacaagaattcgcgggcaacagtgatacttatggcccagtggatcttctggaacaatatgagagatgcact

SEQ ID NO: 27820 - DNA, 1122 bp, Oryza sativa
  Clone ID: PAT_MRT4530_32478C.1
atggctgctgcttctactggtaacttactgcaagaagtacatgcaaagctgaagattaatgcagcagatgaaaccattaggaataatgggagcccgccggtggcgcttctggtgctgatggcggcggcgatggtggccgggtggttcgtgaacgccgtccggccgccgccgccgacgccgtgcggggcggagggcgggccgccggtgacggcggcgagggtgcgggtgcgggacgggaggttcttggcgtacgcggagtccggcgtgaggcgggaggcggcgcggttcaaggtcgtctactcgcatggcttctccggcggccgcatggactcgccccgcgcttcccaggcgttgctgaaggagttgggggtgtacatggtggcgttcgaccgggcggggtacggcgagagcgaccctgacccgaggaggtcgctgaggagcgcggcgatggacatccaggacctcgccgacgcgctccagctcggccccaagttccacctcatctgctcctccctcggctgccacgccgcctgggcctccttcaagtacatcccccacaggttggccggggcggcgatgatggcgccggtgatcaactaccggtggccggggttgccgaggggtttggcacggcagctgtacaggaggcagccggtgggtgaccagtggtcactgagagtcgcctactacgcgccatggctgctgcactggtggatgaaccagacctggctgcccacctccaccgtcatctccggctccggctccttccccaacgccctcgacgagaagaaccgcctcatggccctctccaccggactgttccagaagaaggcgaggatggcgacgcagcagggggtgcaggattcgttctaccgggacatggcggtgatgttcggccggtggccggagttcgagccggcggagctggagaagccgccgttcccggtgcacctgttccagggcgacgaggacggcgtcgtgccggtgcagctgcagcgccacatctgccgccgcctcggctggatcagctaccacgagctcgccggcgtcggccacttcctctcggcggtgccgggcctcggcgacaggatcgtcaccacgctcctgccggcggcggcgtaa

SEQ ID NO: 27821 - DNA, 1365 bp, Oryza sativa
  Clone ID: PAT_MRT4530_32479C.1
atgtccactaaaattaagtgtctatatataatcccgtacaaaatactaatgtttcaagtacgcaaccagaagaagaatctccttcttacatcaggtagtggagccaagggggctgatgagaagagctcaatactcaaattgaatcccaagctagacaaccaagctaagaagaaattttcaccatacaactataataacccagcagacgggtatgatcgtgtttactatgatggcgatagtgataagcacatgttattcgagtatgaagctctgaagataaagatgaaaaacttggatatgtactggtacagtggaacaaatcagattaacaagaaacctgagctagacctagccaacaagaaactttcgcgtcacaacaataacaacccatcacatggtcatgatcatattctactagataagatgaaattgttgcgttacatctatagcaacccagcagacaggcatgttcgtgttgactatgatggccacaatgataatcacatggtattcaatactgaatccatgaagctaaagaaagaattctcatatttgtaccagttcagtgcagtgaaggggattgaccaaaagcctgagcttaatctagtgaagaagaaatcttcacgttacgtctatggcaacccagcaaatgaccaccttgttcactatgatggtcgcaatgacaaatacatggtactcaaccacaaagccaagaagctaaaaaagaaaaactcagatttgtaccaacacagtgaagcaaatgggattgacaaagaatctaagctgaacatggctaagaagaaactttcacgctacatctatggcaacctagcagatggacatcatcatgtttgcctagttacgaagaaatttccacgttacatttatgacaacccagcagttagccgtcatgtttactatgatggtcacaatgacaaatacatggtactcaactatgaagccatgaagctaaagaagaaaacttcagatttataccaacacagcgaagtgaatgggattgacaaaaagcctaagctgaagctagctaagaacaaattttcacgttcaatctatggcaacctcgcacatggacatgatcatgttcacctagctaagaagaaattttcatattattacacctttggcaatccagaagatgggcatgagcatgccaatcatcatggtggttatgacaatcacatagtattcaacaaacaagccgtgaagctaaggaaagggaactcaaattggtactattacagtggactaaaggagattaacaaaaggcataagccagatctagttaacaagaaatttgctcgttacatctttagtaacccagaaaatgaacgaccttttttgtga

SEQ ID NO: 27822 - DNA, 1309 bp, Oryza sativa
  Clone ID: PAT_MRT4530_3247C.1
atgtccgtgcagggccttgatctgaaaaccgacttgagcttgtgggtttttggccatacctctgtattcagatgttgcaagcctgaacagtcggcggcggccattgttagcttttctctcttcaggaattgcggcggcgacatcgagcctggaccttggagggcttatgaagttaaaaaacgtatgggttcttggattgtgaatgatagtcagcagataagattctgggaggataaatggctaggtgttacatgttatatgactgcaaatcttttagctactgctcatgttttgggggaactgaagattaggttcgtaattttagaaactggtgtgggagtgccggtaatgcttttcttcactgctagagatggcaatggggaatcactgcagttggtatattttagtatttggaaaagctatcgtagtcctatgattgttactggtaaaccaaagttctttttccgatggctcgtactaagcaaactgctcgcaagtcaactggaggaaaggctcccaggaagcaacttgccaccaaggtatgtttttcgacatgataccctgcacatatcaattgccaaggtgttaatactgttgaactgtgctaaacttactgctagcgttttgattatgtcagctgctcgtaagtctgctcccacaactggaggagtgaagaagcctcaccgttacccgccctggaactgttgctcttcgtaccagaagagcactgagctgctcataaggaagcttccattccagaggcttgttagggagattgcccaggattttaagactgatcttcgtttccagagccatgcggtgcttgcccttcaggaagctgccgaggcgtacctggtgggtctcttcgaggacaccaacctgtgcgccatccatgccaagcgtgtgaccatcatgcccaaggacattcagctggctaggaggatccgtggtgagagggcttaggctttctcatctctgggaggggctctggtgtttcatctgtgactacttcctgcttttgctgctgaactcttatttggtgtcgtgaatggtgctaatactactcacatgtagtagtagattgttagtgaagtactctgtttctgtgttctagaactggatattttgctagtaagttgtctcgactgttgatttcatccatccatctgatggatgtgtatctagtagtttctcatctgaagtcctaaaatctgaaccatgaatttacctgtggaatggaacttagaaaaactgtgtcaaatgttcaaagatcttggcatgaatgccttgtttcttttttaaacaaaaa

SEQ ID NO: 27823 - DNA, 788 bp, Oryza sativa
  Clone ID: PAT_MRT4530_32480C.1
ctattcaccatcgtccataatgtgatcatcatcatcatcatcatctacctggcatgaaaccttccattcaacaccaaatcttgttttcttcagagatctgcatcctcttttacaaaacctattgtgaatcgggtcgggcccattcggcaccttcctcttgctatccttgtacggatcagccgcaaacgttgccgtggtcgccgccgccgtcattgtcgtcgtcgtcgccgtcatcgtcgtagctccggcggcatcacctcgcggcgtggcgacggccgggccaggagcactactgctactagccgtgccaccggcaagatgaaccggcccagtcctagcgccacccgccatcgccgccgacgacaccagcacgacgcagacgagcaagacgacgaccaccatctgcccgccgccgccgccgccgcacattagctagctagcttgctgctgctcaggcgtgaccacgacgatcaccactggcctcctcgtcagcaacctctctcctgtaataataagctgtcgccgccggttgccgccgctacgatgctatctcctcctagtgatctcctcgcgacacacaagagacgatgaggtgtaccgtgtggacgaacagatcatggctttagccaacaacttcgcgagttcttgggagcaagacgaagaggctgaaaaacacaagtggtaattaaactggtaatggactaatgtctagaggaagaaattatgtgtgtatgatttggctatggactattcgactatatctgatcacgcacatatatatactcaaa

SEQ ID NO: 27824 - DNA, 279 bp, Oryza sativa
  Clone ID: PAT_MRT4530_32482C.1
ggggtgggggactagacaaaccaaaccaaaccaccattgattaatttcactgaaaatagcacgggtacattacataacacaaattcatacgttgttacacccatagacgccgaagcgaccagctgcttaataaataaaaaacacacgggtttaattcagcaataattagcacacacacaaaccacactcatatgggtggtttttattgaggactaataaaagaaagtgactcccccgcggcgagtgttcggtagctttttgacttcacttgccgcactt

SEQ ID NO: 27825 - DNA, 188 bp, Oryza sativa
  unsure (1)..(188): unsure at all n locations
  Clone ID: PAT_MRT4530_32483C.1
gtgagaccatcagcgacaaggatagatgcccaggctgcaagggtgagaaggtggcgcaggagaagnaggttcttnagatggtagtcgagangggcatncagaatggacagaagatcacctttccctggnnnaggctgntgaagngnccgatactttcactggngacattatcttccgtnctccagcag

SEQ ID NO: 27826 - DNA, 321 bp, Oryza sativa
  Clone ID: PAT_MRT4530_32484C.1
atgagcgggcagcacggctccctgctgggcggcggcgccgcccccaccaccgcgtggatcagcgcgttcagcacgctcccgcacacccctagcttccccacctccaccggtcacttgccattgccatccgccttctccaccgccggcggcgcggcccgcggaacgatcggtggcaggcagttggatttcccgagtttgcacgccgccgacggcttagcgccgcccaaggacggagtcctcaccggagtcgtcgatgttgcatcccacgggctactgccctcgtccatggacaccgacgccaacgcctacgtcctcgtctga

SEQ ID NO: 27827 - DNA, 432 bp, Oryza sativa
  Clone ID: PAT_MRT4530_32485C.1
ccaccagggccaaaaaaattttttcccctttccctttttttttaaaaaaaaggccccaaaaagggaaggttttgatccccaaaaaaaattgcccccccgacatggcccttttccatgaatgtttgagggggatgcctttccttttgaatgggctccagttccagggccgaaaacaagttttttccataattccgggggggaggaatccctacatgctggccactttaaaaggggcttttgtttaaagggcaggttttccatccaccttttccgaccgggggagggtggattttttattatgtccacccaagaaaaggcccaatgctccttttccacaaaaaattttggctccaaaaccatgctgatttgtaaatccaacaaagtttttgtaaacaacacccgggtttttttggtttttcccagttcgttttt

SEQ ID NO: 27828 - DNA, 623 bp, Oryza sativa
  Clone ID: PAT_MRT4530_32486C.1
aacgtgtggttagacgtctgtctgcacctagcccatgccaagcaccggcaccaaccccgactggaactccagccccagcaccagccccggtggtgacaccgacgcccgcaccaactccagtcccgacgccatcgccggcaccaacaccttcacccaccgttgcccctgtcaatccgccatctccgacgccgcctcccaatgccaagcccacacggccccatcgcctatgttcacttaggatcaagatttacttcctactttgtcttatgacccaaggcccagaccatttgcagtagttttgcactccctctcgtgcaatgtttttgctacatggccatagcccatgcctagccacggcgccaaccccgaccgaaactccagccccagcaccagccctggtggtgccaccgacgcccgcaccaactccggtcccgacaccatcaccagcgccgcctcccaatcccgtgtgctctaatcctctgagctacaggcccaccccgtctccactggatctcttcccgggggtaccccaaaaggaacctccctctcctcagccaaccaccaatgccccacccccaccagctccagctacgcagtgtgccgcaggaaccgtgtcaagtctc

SEQ ID NO: 27829 - DNA, 560 bp, Oryza sativa
  Clone ID: PAT_MRT4530_32487C.1
agtggatccccgggctgcaggggaaatttttgcaggactatggggaaccagaagaaagtcccatccggcgaaagtacttaccctccaaaaaagcggttctgcaccatttgttgaatccaatattgttgaaaaagtagtcgattttactaaaaaagagattgttacaaaccctacttatgatgtgatgtggaataatcctttgcaaactgtgaacgctccttggacaggatcaaatcttgtccctggtcaaagaaataccctcactgggttcgttcaggatgcttatttaaatgattattcttttgatagccaacatcatttatttcaatcaaaaggtgttgctcttgatccaggttccaattccatacaaatagtcaaattcgaaaataaaaaaaaacgaaaaaaagaaaaagttgaagaacctgaagaaaaagtggaaggaattgaaaacaaaaaagaggagatcccgacaaccgaagtgactgaagagggtactgaaagcaaaactaaaaagccaaaaatagaatatcagacaacatgtactacgcatctacctgata

SEQ ID NO: 27830 - DNA, 442 bp, Oryza sativa
  unsure (1)..(442): unsure at all n locations
  Clone ID: PAT_MRT4530_32488C.1
ggaagtatattaccgtctggcgtctgcgttccangggtttgcctcacccggacagatgtgtgctctgtgaccaacatgatgagactattgatcacatcttggtcgcctatccggagtctcgtcgatcagctttggtgggtcgtcctttccagtattggtttgccacagtgtctccccttgaatgaaaattccttctatctctggctctgtaattcccgccttaaagtggagagggctagcaggcggggatttgacacaatcgtaacccttactgcgtggacaatctggaaggagataaataataggatcttcaactctcagcaaaggccctggtcagagataacccgagctatggcggcggaagcgactctctggcggttggcatacgcggcgctgccggtgtaaaccattttggtcttgttctaggtcgtttccttctgat

SEQ ID NO: 27831 - DNA, 751 bp, Oryza sativa
  Clone ID: PAT_MRT4530_32489C.1
ggccgctttttttttttttttttttcatatcagtaagttaacaaggcagtccttcctagtttgcagttacctcaaccttgatatacaggggcatggaacaattcttggatgaggcattctagggcagctattttcatgttgctgatttttttttcctctgaatagattagtcagcaaggtcctacaaagtgcatgaatttcacgacatagattgtcaactttacagggaatgaattcattgccaatcaatacctattcagctatcaacattactgcttttcctgaacatattcagctaccaaatgtgaccctaaattaattatattatgcggttgtgccagaattctcttacatgaaccatcatgaaatctcactccaaaacggaaaagcctaggcacacgacaatttcacagcaatcatctaagagtgtcctccaaggaggctgtgggtctgtaacgtaaatatcataatatgctacttgatattttaagcaaccacttgcacatttttggcacaaaaaaacattagtaagttctgaatgaaaattacagcataagcataccttttcttgcagtcactgatctcattaccatttctaaatccatccaagcagtgacagccacctcttaatgcttcaacaacagcatcagaacccaatagcttggtcacatccttctaacttgttttctaatccagcatcattagtggcaaccagagtctccacacttgttgataatgttggctttcttgg

SEQ ID NO: 27832 - DNA, 429 bp, Oryza sativa
  Clone ID: PAT_MRT4530_3248C.1
atgtcggccagcctcgtccaacagcccgggctgacatgctcaactcctatcgacctaaaggtggacaaacaaatctacaattggcaaacgcggtgccacccaaatgcgccgattatacttatcccttggcaccgcaacacctacatggaggagaaaaccaaccaagcggccagaggaggattacctcaccggtggagcagatcggggtgcaaccgtagcaaccactcgggcaggggtcccacacgcacgctttcccagcacgggcagatcttcggaggaaccgacgaagaggtcaccccgccttgcaaggaaaagcctcttccccggcccccatcccaacctgctgtgtacgggagcccctatttactgcagtgccatttgtcacatgatcctcgctaccccgggccccaagctgagttgtggccttag

SEQ ID NO: 27833 - DNA, 417 bp, Oryza sativa
  Clone ID: PAT_MRT4530_32490C.1
atgggtttattatttggccggtgtcgtgtgcttcaaacagggttaagtgcatcgacccaatccaattccagacctatcgcagcatgtgtgcatcggttgatgaaagccaaaagcaaccatactaatcaagcactgacagtgcaatgcctgctcaataattttaggataatactacatactgttaccactttactaccaattgctcgagaagttgaaatgcttttactgcgtggcacgatcgagaaaacgagaggttcgaatcttttatccgtggaagaaatatcaaccgttattcgcttgaaagctgaaacacctggaatctcctcctttgttttttgttacgaaaggaaccaagctagaagccttttcacttttcagtatatagataactacgcccggatagttattcgcgatgaa

SEQ ID NO: 27834 - DNA, 123 bp, Oryza sativa
  Clone ID: PAT_MRT4530_32491C.1
atggcggacgacggcgtgggagtgacggcggcggattttggtgctggagctcggctgcgaaaagggaagcggccgaacgagaggagaggcgtgggttttataggcgtttttttacaagattga

SEQ ID NO: 27835 - DNA, 453 bp, Oryza sativa
  unsure (1)..(453): unsure at all n locations
  Clone ID: PAT_MRT4530_32492C.1
cgagacagaatttttttttctgatgattttcatccagaacttggcatcataaagtagccgcatcattggcagtaatctgttcacttagaagaggctcagcaaaaggggttccctaatcatacatgtgatgacaaatgagcatacattaagctgtcattcagcctgtcacagtttctccgtttttgcaaactaccaactggctctactggcattgcagtcttcagtaaaaaaggcaacgaggagtgataaataggcgctcaagctgactgaggcaatgatgaagttctcaaccacagggatcgcccaagcatggctctaccatgaacagngatgtacgacgcattcaacttgccaacatcaggnaaggtgattggatcatacacctnctccttttccattcctggggcatggcttccatctgctgatgccatatcggncgctccctcaacctgc

SEQ ID NO: 27836 - DNA, 1903 bp, Oryza sativa
  Clone ID: PAT_MRT4530_32493C.1
cggcccgcgggcaagggggaggccgcgaaggtcactgcgggcgggcgtctgcggacagcgctagccgaggccgccgctcctggctgcgtcgtcgcgcttctatcgttgcggtcttcgtccgtggcgccggccttcggctcgctccccgctgcgcattcgtctccgctgctcgggcgtggggcagtgtctgtctggggcggccactgtggagtgcaggcaaccgaggaaagcatcatacttgaggagaacgggcaaatcattcagttgctgtatggcactgccggcggtggggcctcgcggcgcgaccgatccagatccagcgccctcgccgctgcgcgtgcacggcatcggcatcggcagccacgcctcgcgtggcacggcaccgcgaggtgaggaggaagaggaggaggaggagtggagaggcgacggcgacgcgggctcggaggaggaggagggggaagcggtcagtgactccttctcccactcgctgagagagtgccagaagcagcggaagctcagagcggagggggctgcgttgctgctttcaccggccaagcatgagctcaccggcggaggtggtgggagcatagaactgctggtgctctcgccgaggtgcttggttgggggtaatgttggaggaatgagcaagagctccacagcgtcatcacggagcagatcaggcacattcccgagccccggtaccccaaactaccaccggcattgcgctagcaccatgcagtaccctaagggatggagctcagagcgggtgccacttggaggtggtaccaataggaggtatgggggcagtggggttgttcttcctttcaacaatgggaggaagctgccatcaaaatgggaggatgcagagaagtggatcctaagtccagtttcctgtgatgggattggaaggatgtcagccccggcgcctcaccatagacggcccaagtcaaagagtggcccacttggccacccaggcggaataccgggtgcttatgcggctgcttcgccgtttgtgccctgctttgatggtgttctggcagcggctaattttgcagcacattctcctttttctgctggggttctcatgccagagcacgtgcgcaatggtgacttcagcagtggaagaggtagaagtggggatgatggcagtagccgatcttactctgcagagaaggacccatatatcttgagatcagcaagtatacatgcgtggacagagacacttatggaagcatccgcctttgctaatatctcagaagaaactgcacaagatgataaattgcaaggcctgcgaggagaaactcctgccatttccagtccaataataaagaaagatgttgccacacaaatgagtcctgatgacagtatatcgtcttctccaaaagcaagacattcatgttccagtttaccatcaggacatcctattaaagaaccaaatagtaatgcacttaaacctgaagtccgagatgtccaggtagatgatcaagtaactgtgacccggtggtccaagcgacatgtaacacgagggtctgataggcggtcaacaaatattgtcgagtggaggaagaaaacaattgagactcgagctccatcttttgatgaaaaagaaagagaaagctgcgtatcaaagtgcaagagggaggaagcgaagatcactgcttgggaaaatctgcagaaagcaaaagcagaggcagcaattcgaaagttagagatgaagcttgaaaagaagaggtcatcatcgatggatagaatcttgggcaaactacgcactgctcaaaagaaagcgcaagacatgcgtagtgcagtttctgacgttgcagctcatgtcagccaacaaatcagaattaatcaggaagtcagatttttccttgctgtggcagctggaggtgacggggttatttaa

SEQ ID NO: 27837 - DNA, 615 bp, Oryza sativa
  Clone ID: PAT_MRT4530_32494C.1
tcgatggatagaatcttgggcaaactacgcactgctcaaaagaaagcgcaagacatgcgtagtgcagtttctgtgagtgaagatcaatgtggagtgagagcaaccaagaaagcatcatacttgaggagaacgggcaaatcattcagttgctgtttcacctatcgtgcttgctagttgtgacatagttggtaccgtgggcgtagcaatggatgtacctttgtagaaactttttggacgttgcagctcatgtcagccaacaaatcagaattaatcaggaagtcagatttttccttgctgtggcagctggaggtgacggggttatttaaagagaatttgcatggtctgatcgatgaaatacctgtagtgccagtggagtggtataaatcagtcatcgagcaaaatctatattgtagttaatttcgtggattattgctcccgttattctgtgcctacaatcaatctctgtacacccaatagaagctccttcgagttcgagagctttatgctagtcaccaccagattggccaggttcaagtgggtctcattctgattgatatgtatctttccatgggaattctgtaagcaaagcaagccttgggggcttgtactgatata

SEQ ID NO: 27838 - DNA, 741 bp, Oryza sativa
  Clone ID: PAT_MRT4530_32495C.1
ttactcagaatcctcaaacattgtccaggttgtagaaaacgggccatcgatatcacaatttctcactataaacaaaatcaattgtggcacaaattttgaaaggtattccccaatcatcaaagcagtagtaactatgtccaggacagtcccttggtcctttgtgtacctatgggcatgctcaataaagtttctcagatatttcagcagaaaccagtagcctaactcataaacatccacaaagaaatgccaatagacatttgaaaatggtatgccaaagtgtctcacacctctccattctatcagaagagtttccgagacttgtaatggctcatacacagtgtcttgcggtttgcgcagtgaatcacaatctctgtacagatggcatatcaaagtagaaagagctgctggagacatgaaagctggatgacagcccaaaaacctttgaaacttctccagcttctcacgctcatgaacttcagggacttccatacaattatgctgaaattgtagaaagtaacaggggagaactttcttcttttcaccagaagctgaatcgatctcttcatgctcgtaatatgggaaaataatctcaaagaagtttctgaagtcagcttgcatcccttccttggaggttgtatcatttggcacttctgtgataacaaaatctttgatatcattcctcactttcatatgctctgccttccatttcccattccagcacaggcccttcttatgcagcat

SEQ ID NO: 27839 - DNA, 1014 bp, Oryza sativa
  Clone ID: PAT_MRT4530_32496C.1
gtcaccactgtatgatccaatgaaaggggaggcgatgcagaagcatgtacaggaagtggagctgcaatacttgtatgagatgcttgggcagggcctgaggccagtttctagtgtgtgtgctgggaatgtggttgcaatccagggacttggtcatcatatattgaagagcgccacattgtcatccaccaaaaattgctggcctttctcaagtatgatgttccaggtgtctccgatgcttaaggttgcaattgagccctccaacccagcagatttaggagcccttgttaaagggcttaaacttcttaaccgggcagatccatttgttgagtacattgtctcacagagaggtgagcatgttcttgctgcagctggggagatacatttggagaggtgtaaaaaggatttggaggaaagatttgcaaaggtcaaattggtggtctcagaccccctggtgtcctttaaagagacaattgaaggcgaaggccttgccttgatagagagcctgaaggctccacgggaattcgttgagagaactactccaaatgggagatgcactgtgagagttcaggttttgagacttcccaatgcgctcattaaggttcttgaagaaagtgaacaattgcttggtcaaataattgaggggaaaacagcaaagaggaacggcgtgttggatccacatctttctcaggatgatggtgattctgctgcaacacttaggcaacgcctgatcaatgctatagacagtgagttggaagcattttctgagcaagtggataaagaaaaacttgagaggtatagaaatacatggcttggatacctccaaagaatctggtcactcggtccttggcaggttggtccaaacctccttctcttgcctgatgtgaaatcaagtgacagtgtgataaccagtcaagatggaaggcaaggcattcttgtgcgtggtagatctcatgtctctgagagattaggatttgtgtgtggatctgatgctgaagctaacaatgatcttgatga

SEQ ID NO: 27840 - DNA, 1670 bp, Oryza sativa
  unsure (1)..(1670): unsure at all n locations
  Clone ID: PAT_MRT4530_32497C.1
agattcacgacccaaanccactatactacaaaattaacccttcttactagtaggatgatgaaatgatgacatgaaacccttactatttttccaacaaaaccaaacctaccattccgcttcgtggacaagaactcacatgatctacagttgtacagctcaacgcgacatgaattcttccaaattcaccgcaccgaaatggcgcagacgattcggagaaaaggatatcagaattagaacaaaatgtacacagtttgctcgcattatacagaggaataattggcaatgcagctcgtgcaatcacaatcaccggcactggacatggaagaaagggaaaaaaaaacttgtgcttaaagcagcacgaaggaacacacggccgcggctaatgcgccgagcactactgaccgcaacgcgacggcggacgacgccttcatttccttgtgatccgccggcttcgacggcgcgtcggccggcggcggcgccggcggagacgcgtccgcgaccgacggcgacggggcgggcgccgcgtcgtccgggctcggggccgccgccggcgcgtcgccgaagagctcgaccggcatgaggaggttgtccaccgtgagcacgcacaccggcgtgtcgtcgatgacggtggccgccacgcgggacttgtcgacgcccgtgttgagcgtcacggcgtcgccccgcgtgtccaccgtgatgttgtacttccccgacgcggtggacgccagcgtgcgcatggcgcgcgacaccgtcttgagcgtcggcttggggttgtacgacggcagcgcgtggtacttgaggagcgtgacgaggtcggcgctgggcatcttcttgacgtcgggggcgcccttggcgtcgaacgcgtcgtcgttgggcgcgaacagggtgagccccttgtccatggcatcctcgaacgtcttgagcacgccggtgctggtgatgagcgacgcgaaccgcttgcacccggccttctccagcagcctcgtcaggttggtcgccgacggcgtgtcgaacaggccgtcgaactcgatgggcgccgagatctccatgatggagagcttgtacggcatctgcttgatggccttgaccatggtggcctcgtactttccccccgggttggcggacgcgaaggcgatcttgccggtgtccagggtggagatcttgacgttgcccatcttgccggcggcgtccccaccggcctggtagagcgtgtcggtcatcgtgtcggcgtcggggaggccacggatcttcttcgggtcgaagtagtcgaggatggcgtggaggcggagcgcgttcttgatgcccgccagcgactggtcggcgtcgaggacgagcgtcgacattggcccgtcgccgaggacgagcagcgtgatcgactccctcgcgttgatctcgtcgcacaccttcgtctccgacaggtacttgttgaacatcttgtagtccgggtacccgttcagcatcgccgtgatgttcagcccccgcgccgccggcaacgccaggcaggccaccaagacgacgacagcggcgacaagccgctgcgccgccgctgccatctccggccggcaactcctcctcccgccgcagctgctagactacaccgacacacaccgacgaggtggactggctagctaagccctcagcagcaagaagaggagtgagccccctgctgc

SEQ ID NO: 27841 - DNA, 1260 bp, Oryza sativa
  Clone ID: PAT_MRT4530_32498C.1
aggaacaaacatttcaacttcaaagccgctcctccctctcctctcccaacccaaatcattccacgcgtccggcggcctcgttggattgacgcggcaactaactccaccaccaccaccaccacctcccccaccaccggcggcggcggcggcggcggcgacgaggaggccccattgcgctcgcggaggcgtggtgttgacgggggaggcgctggatctcggatggcatcggccaagtcgtcgcggtcgaggccggccgggcattccggggtgttcccggtgagcggcgccgtggggggaggaggagggggcgggggcggtggcggaggaggaggaggaggaggaggcgatggcggggtgcagctcgccgacaagctcaagatcttcaagaccgacaacttcgatcccgacgcgtacgtgcagtccaagtgccagacgatgaacgagaaggagataaggcatttatgttcttacctgcaagatctaaagaaggcttcagctgaagagatgcgcagaagtgtatatgcaaattatgctgcatttatcagaacatcaaaggagatatcagatcttgaaggggaactgctatcaataagaaatctactgaatacacaagcagctttaatccatggtctttctgaaggagttcaaatagattccttgacttcaaacactggacgctctgcagaagacgatatatccaatgttgaagaccaggaaccttcagaaatacaaaaatggtctgcagatttccctgacatgcttgatgttttgctagctgagagaagagtggatgaagcacttgatgcactagatgaagcggaacgacttgcttctgatgcaaaacttaaacagactctaaccgcaactgaaattgcagctttgagaagggcagtttctgataatcgtcagaagttggcagatcagcttgctgaagctgcttgtcagtcttctactcgtggcattgagcttcgtgctgcagcttctgctctcaaaaggcttggtgatggccctcgagctcacagcctgctactcaatgcacataatcaaaggcttcaatgtaatatgcaaactatacatccatctagcacttcgtatggtggggcgtacactgcagcacttgctcagcaagtcttttcagtggtagctcaggcactcagtgactctgtagaagtttttggtgatgagtcatgttatgcatctgaactggttacatgggctacgaagcaggttatgtcctttgcactcttggtaaagaggcat

SEQ ID NO: 27842 - DNA, 266 bp, Oryza sativa
  Clone ID: PAT_MRT4530_32499C.1
atggagatccaatatgagcttgattcggataaggatccgaataggagtcctacgggccttggaggcccaagtgatggatcctatatattcgtgagaggtgtgaccggcggaggtattgcatcatcatgtgaatacggcgaggagaacgcacgaggagaagaagatcgagctggtgcgatcgactacttcctctacatcgacccgctacttcgcgagaattccttcgacttcttagcgccttctttcgctgcgcagcgcgtcgagtg

SEQ ID NO: 27843 - DNA, 636 bp, Oryza sativa
  Clone ID: PAT_MRT4530_3249C.1
ctagtattcgagcgtgaagagaacggaccggaggcccccttgactcgcgatggcccttcgtcccccgaagacccgatgcccgaagcccccagcccctgggaggaccccgaggcccccgtgggaggaggggaggctttggcaagtggtcctgaggcatatgatcctgacatgattcgagaccccccggggcccctgagcaagggcgccccagatcatctgccccctctcggccaaatcttgcacaaccgagagggtaatggtcgggttgtaaattgggccatcgagcttgctgagttcaacctgcactacgaaccacggcacgcgatcaaaagccaggtcttggctgacttcatcgcagagtggaccccagtagacgaccctgttccgtccaacgttccctccctccccggagatggagaggacccaaacgccaacattcgtggcgggcactgggttatgcatttcgatggctccctcaaccttcaaggtgcaagtgccggagtcacgctgacttcgccaagcggggacgtcctcaaatacgtcgttcggctcgacttccgagccacgaacaacatggcggaatacgaatgactcctcgcggggttgagggcggcggccggaatgggcatccgccat

SEQ ID NO: 27844 - DNA, 2740 bp, Oryza sativa
  unsure (1)..(2740): unsure at all n locations
  Clone ID: PAT_MRT4530_324C.1
ggaaggaaacatgccaagataccctagctggggattatgttcacaattcttgaccaaataaagcaaagccttacattaaagaaactagccagaacatccacaagacttttgctttaaccaacttggggtttctgacttctttgatcatgtctaattcaggagcaccacacacaattgccactttttgtccaggtccgtaggccttaaattaaggagctccatacaatccggggcctacaccaacctcctacggggccatgtgtgttccatagacgatatgatgcaaaatctgtaccatcaaaacaattcatggttgatcacggagggtgttccttgtttgatagaaggggaagcatttgccttctctcagtaatatgaactagaaccactaccgccatagtagccactgctgctacctacattacgccctgagtaaagtgatgaatttagaatcactggaagtaagccatgccaagataccatagctggcgattatgttcacaattcttgaccaaataaagcaaagccttacattaaagaaactagccagaacgatcccacaagactattgctttaaccaacttggtgtttctgcaccttctttgatcatgtcttaattcaggaagcaccacacacaatgcccacttctctgattcaggtccgtcggcattaaattaagcagcaccatacaaaccgggacctacaccaacatccctacggaataacagtaagtgcttactatagatcgcatacgatgcacaatttctcacaaatatgatatcaagaacaactaccgcgatattcgtctatggttgttacctacattacgtccctgagctaaaatcatgaactataaattttcgcccatcagaaaggccaggagcacttcgaggacctaggtccgaataggctgacccccggggtgaataatcatccctataggggcgtctatccactggaactcttgaactatagtcaccaaaggtagctctgcttcttggcggaggaagttcatcacgccttccatattctctccttgggcttctctttgggtacacaggagctgggggccttctgtcatatgatctctcgggtggaggcaaacgcctaactctatctggtattgacataacagggcgcctatctctaatatctactggcctcttcagtgggcggctcctgaccggtggtggtaagcgactaacatcgggtcttaaaagacgaggtggaggccggcgaagtggaggaggacgatcatatgcaaaacgtccacctcgaggagcaccctgcccaaccctaaaatttcctcttaatccatgcttcattctaggaggtctctgcaatggtctcgacaatctggctctcacttttgccttgctgtcaccttcaccaatctcagaattagttatcccatcagcacatgcaacagcattatcatgtgtatcaaaagtaacaaacccaaaatcctttctcttggctgctggcatatttcgggctagttcaactttctcaatagctccatattttttaaggtacttcttgacacgatcttcatcccatgagggaggaaggccatcaataaatacagttctaacctgtgccattatttcatcgtcaacttcggggtaggaatcagcaaaggaaacctttgcactacgatcaactccaaaaactacatccctcttctgcaatcgcctaaaagcatccattgcttcagggcgagtagaaaactcaagtaaagcatacccacgattcattcctggattattgctgtcctcaactaatagtagatcatcaaaattctcaacaccgtaactcttgagtttctccttcagatgttctttagtccatgtcttgcagatattgcccacaaaaagagtatcgttgtcatgactaggagcaacaccacattgtttgcctctcaccataatataaaatatccatatctttagaccaaccgaaggattctttagctctgacaccgcccgccttgcttgttctacagtcgcatatcgcagaaaggcaaagcctttatttttctttgtaacagggttcatcatcaaacgaacttcagtgatctcgccaacttcaccaaaaaccttcctaagatcgctttctgttgcatctttatcaagcccaccaacaaaaacttcaaactccttccgcttgcgatgctctttcaccatttcatgatgctcttcatcctccacatccacattatgctcttcttcggcattttcatatccttcaccctccccatcgtccccaccatccaattcctcgtctaccatatccgtctcctcttcaatcacatcttcagtatattccccattcatcaccatcctcgtattgctcttcatattgctccaagtccttctcatcgtagtccacagcagcctcctcttcatattctggttcatcttcaaattccaatcgttcacctttatcctcttcatatgtttcttttgtagttccctcatcttcggggcctcctccgcagccttaacctcctcggcgggcacctcctccacggccgcctgcgccttcaccagcctgcccctcgtccctggccccttcctccccgccgccgcggcgcccctcctagccttcggcggcatctccccccactctnacaaacaaaaccaaaaaaaaaaggaaaaccacctcgcgtcgtcgaggatcgagggggcgaggaatcgaaaccctaggagagggccggagagccgaaacgagattgcgg

SEQ ID NO: 27845 - DNA, 1344 bp, Oryza sativa
  Clone ID: PAT_MRT4530_32500C.1
atgtctgagcaaaatactgatggaagtcaagttccagtgaacttgttggatgagttcctggctgaggatgagatcatagatgatcttctcactgaagccacggtggtagtacagtccactatagaaggtcttcaaaacgaggcttctgaccatcgacatcatccgaggaagcacatcaagaggccacgagaggaagcacatcagcaactagtgaatgattacttttcagaaaatcctctttacccttccaaaatttttcgtcgaagatttcgtatgtctaggccactttttcttcgcatcgttgaggcattaggccagtggtcagtgtatttcacacaaagggtggatgctgttaatcggaaaggactcagtccactgcaaaagtgtactgcagctattcgccagttggctactggtagtggcgcagatgaactagatgaatatctgaagataggagagactacagcaatggaggcaatgaagaattttgtcaaaggtcttcaagatgtgtttggtgagaggtatcttaggcgccccaccatggaagataccgaacggcttctccaacttggtgagaaacgtggttttcctggaatgttcggcagcattgactgcatgcactggcattgggaaagatgcccagtagcatggaagggtcagttcactcgtggagatcagaaagtgccaaccctgattcttgaggctgtggcatcgcatgatctttggatttggcatgcattttttggagcagcgggttccaacaatgatatcaatgtattgaaccaatctactgtatttatcaaggagctcaaaggacaagctcctagagtccagtacatggtaaatgggaatcaatacaatactgggtattttcttgctgatggaatctaccctgaatgggcagtgtttgttaagtcaatacgactcccaaacactgaaaaggagaaattgtatgcagatatgcaagaaggggcaagaaaagatatcgagagagcctttggtgtattgcagcgaagattttgcatcttaaaacgaccagctcgtctatatgatcgaggtgtactgcgagatgttgttctagcttgcatcatacttcacaatatgatagttgaagatgagaaggaaaccagaattattgaagaagatttagatctaaatgtgcctcctagttcatcaaccgttcaggaacctgagttctctcctgaacagaacacaccatttgatagagttttagaaaaagatatttctatccgagatcgagcggctcataaccgacttaagaaagatttggtggaacacatttggaataagtttggtggtgctgcacatagaactggaaattga

SEQ ID NO: 27846 - DNA, 564 bp, Oryza sativa
  Clone ID: PAT_MRT4530_32501C.1
atgaaaaggggaaagaatcaagaactcacctgtgtagaggttgatgggattgaagcagaagctggtctagcaccacccacagaaattgacagaacaggtggagttggtgcgacgagcaacgatgagtgcgctgctatgaccgacgatgaccacgaagatcccttggagggcgcattggaagcggcagtgatggcggaggtctgcgagatcactaggaacggcggcggaggcggaggcggcggtgaaggcggcggcggaggcggcggaggaggaggcggtggaggaggcggcatcgaatccatggcggcagcggctagggttcaagccgcaacagcgacgaacttcttcgttcccctcctctttgactcctcgttcctcctctttctgatgctcgatgtgggctgtggtggcgccgccattgaaaaacgtgcgcgtaaaaaacgagagagcgtcgacgcgggcggtggcgtgcgcgggagggccgtgcgaatgccaaaccaagttgcggttgatctgggagtaccacacacgaacaaggaaagtgacttgcaaggcggcagatag

SEQ ID NO: 27847 - DNA, 369 bp, Oryza sativa
  Clone ID: PAT_MRT4530_32502C.1
atggccatgctagagcttgttcaaatcttgcgtgctcaaccaggtccatttcctccgcggccgtgccgcttccgagttcgtccgcgtgcactgccctcggtctcccctagatgcgtcatcctcaagctcatccaatccatgaacgcccgaagtgtcattgtccagctcgtcgccggcattgtcggctacgtgctttacgcccgtgtatggatcatcataattcataactatgcttccgcgggagcaccgcagaagcagagtaatctgaggatgctcttcagggctccgccgcgctttggcgccggcttgcttcgccgattcgtcgtgtcgtcgccgccgccgccgcgtccgttctccatcagcagctaa

SEQ ID NO: 27848 - DNA, 113 bp, Oryza sativa
  Clone ID: PAT_MRT4530_32503C.1
atgcaactggaacttgggcgggaggcggatgcagctccgtcctccgtggaggggtcgcatggtggggggagcggagaatgctccccccacaagtgtgggcttgcttcgcatga

SEQ ID NO: 27849 - DNA, 235 bp, Oryza sativa
  unsure (1)..(235): unsure at all n locations
  Clone ID: PAT_MRT4530_32504C.1
gnacgtcggatcgcncgaagacgatggagggcggcgacgggaggaaggagacgacggcggcggcgagggcgcagaaggaggcggcggcggcgggaatctccgtgcgcaattcgctgcagcacgcctgggcctcgttccttggcctggtgaggaaggtnacggcnaggagcgaggaggaggcggcggaggcggacatnagggcaacccaanatgcaggttaaggccaccgacgaaa

SEQ ID NO: 27850 - DNA, 149 bp, Oryza sativa
  Clone ID: PAT_MRT4530_32505C.1
atgaagctgatgagggtttcgatgacctgtaccgccgcgctgatcgatcccaaggaagatcgaagatggcaatgcagaacggaggtgaagacgtggagtccaccacctgctgcttgcatgcacgggtggagaaaccatttatactctcg

SEQ ID NO: 27851 - DNA, 400 bp, Oryza sativa
  unsure (1)..(400): unsure at all n locations
  Clone ID: PAT_MRT4530_32506C.1
ccaacccctcccgncncacagcgctcacgcgcacatcgcaacnccacgcgagacacaggagttggggnccccgaagtactacgcacaagcgatgcccgcccccgccacatccgcaacgagagcggacggcatcccggtcgccnnncaaccaccgcgnaaccgtacggaggcaaaacataacacggtcctgccaacttncgtgcngggaagaagcgaacgcctccctcncgacgtctcgcccccagccccgcacgcgncaatcatgcgccccacccggccgctgcggccggtccactgnnagcgatgcaacagaccgggaccggaacaccccggcatgaaaggtcaaagggccttcacacagcctgacatggaatcacccgggactaaaattcatctttag

SEQ ID NO: 27852 - DNA, 300 bp, Oryza sativa
  Clone ID: PAT_MRT4530_32507C.1
atgggtcggacggcgaccggctaccgtggaccatgggcgactgacagccacgccaggaggatgcgtgctgcagtggcaggcgtgggagctatgcctgtggaggacgtcgtgtcccgcgagaggccagcacgcccggcggcggggagagggaggccggtgcgtcccgacagactgatggcagcgggtgctgctgatggcggcatgcggcgactggccggtggggggcgccggtgcagtgatgcccgcacaccagcagaggctttgaagacggtggagcctcggggcgtcaacggtggatag

SEQ ID NO: 27853 - DNA, 770 bp, Oryza sativa
  Clone ID: PAT_MRT4530_32508C.1
aggctccaccgtcttcaaagcctctgctggtgtgcgggcatcactgcaccggcgccccccaccggccagtcgccgcatgccgccatcagcagcacccgctgccatcagtctgtcgggacgcaccggcctccctctccccgccgccgggcgtgctggcctctcgcgggacacgacgtcctcctggccatctcccacgacgtcctcctcctccgccggccgctcccgcgcctactcccgcgcggctgccacgccaggcaccacaggcatagctcccacgcctgccactgcagcacgcatcctcctggcgtggctgtcagtcgcccatggtccacggtagccggtcgccgtccgacccatcgcccgtgcatgccgaagccatggacgccacctccacctgctgtcggcgccggcctccctcagccgcgccgaacgacgatgcatctggcccgtcacccaccgctgctcgcgccgtctctcgctgccgcctcccgtcgcccccgtcacgccggctgtgtgcccccggctgaatccatcgaggcagcgccagatccggtcgcggcggcaccggatttgcagccccaagccggggactcgctggcgccgccgtcgtcttcgcggagctcctcctcgcctctctcgcgcaagaggcggagcgtcgatggggcttagccccgtcgccaccatcctggctcgccgcccggctttccgggcgacgtgctccggcggtggagaggcaaaggagagggagaagaggggcggcggtgggcggc

SEQ ID NO: 27854 - DNA, 323 bp, Oryza sativa
  Clone ID: PAT_MRT4530_32509C.1
atggaggaggacgacaacaccgtggcggttgatggcggtgaccggcaagcggtggccggcggcgcttgaggcgaaggcattgcttcaggactcgccgccgcagcatctgcttcagatcaatgttgaagagacgtctggcccatggcgaacgaggtggacgtcatggggacgtttatgacagtgaggcggtgaaaacagcgatggcgacctctatctttggctccgtcgccggatccggctcctactgaggtcgcagcggccagacttgacggaagtggaggcatcccgactggcggattcgtaagtttatttctactaagtcg

SEQ ID NO: 27855 - DNA, 1482 bp, Oryza sativa
  Clone ID: PAT_MRT4530_3250C.1
atgaacccgaaacgtgcgccgccgccggcaccggcgcacggcgcgccgccgccgaagcgcctgcagatcgacgcgttccggagcggcgccgaggcgttcgcgcaacaggcgccgacgtcgtctccggtgaagcggcagctccggcggggcatgctcgtgctcttcttcgtgtccgccgcgcaagtgaaggaagagcggaggaacaagaacaagaacaacgcgcgccctgctcgagtggcgatacatgaagagagttctacttcacagagaaaggcacccgaggatgatgcctttcagagaggcattatgaaagcatttgataatgcccttcagaaacatcttaatcctatctattgctctcttcaacaccttaccaagcagactgggactctttctgagcgaattgatactgtcagccatgaagtgggacaaataaaaaagttaatttctaaccgtgatgctaatgagcgctacagatcagaggtaaatcaagagaatgctgctgtcactgaggaagtgaatcaagaacaaacagctctcagatttgccgcaaatgaagttcacgaggatcaaggagttgagttgaggttcctcaataagctgaaagaccatcttgtttatacaaatgacaaaattacagcagaggatggtacagctatcaaaattgccatatttagggataataagatagttactgccggccaactttcttcagcaagaattgaaattttttttttgaacgactcgcacgagacgttttatgatgctgcccctgataactggactgcatgtgagtttgacgcccacatagtaagtagttcaaaaggggcggtgttaggaggtgttcttcgagtgaagcttaagaatggggaggcctccctatctgacgtctctttcaatatgccatcttcgaagactggaagtaaaaagctcattctggcagcaagggttcttagcagtgacaaagctgggcttcagattaaggaagccgtgatgaatcagcctgttgaggtgcaggttaatcgaaacaaatcaaacaaaaagagtaactgtccaaagctgaaagatgaagtgcatcgtttaaagggaatttcagggaagggagagcgtgctaaatggcttaaaaataatggagtaaagtccatcaccggtccctgaaaggctttaaacaaggatgaagaaaagatctgcactgagtgtttcaacatgaagaaggacaacatgctttggaaagctactgttgaacatgctgaacagtgtgatctcgaaggcaattacaaactgaaatcatatagagttgaagagaaacatgttacacttttctttaactgtgtacacgacctcgttggagcaaaatttcgtggtcgctatgttgcaaaggacaatttcagttcagatgagaaggatgaagtgaattgtttgaaaatacaagcatacgatgaactggataacattgtctttgatcacgaaatgaaagacaat

SEQ ID NO: 27856 - DNA, 969 bp, Oryza sativa
  Clone ID: PAT_MRT4530_32510C.1
atggagaacgcagctggtggaagaagggcacaacaaacgcaagtgactgaggagaggcagaagaagatgaagcacaaggcggctcaggagattgctgatggcagcagcactagtgacacagtacatggtgctgctgatggtgtctgcttcccgtgtggtacaagtacagctacagcccacctcttgcaacccaagcactcacagccacagcacgaggtgctgcgtgagggccatgtgggtctgggcatctggccatgctctgccacagggcatagctcccgtggagcgccagtcaaggtcaagctcagtggccatggctatggcttaggagaagtacccgtcatccttgtgcaaccgacaacaggagtctgggccgaactcatggaggagcgagaactcggcgtcgagcaagaacccatcccgccgcgcaacgccatacagctgcacacttcgttggtgttctccacctccttgggtcgcacgtacgtcaaagcagttgcactagtgccactcatgtcgactacgttggggacaccgacgaaaagcgtggccatattgctcatcccctgcacccatgcgacggggttgaagtaccagtcgccaaagaagttgtttttgtcgttcatcatcgcaacactaactagactcgctaacgtggttgtcttggatcaccatggcatgacacagttcttgcctaacctgtccaccatggccccaaatgactcgatcatcgagaggtcgaggaaccccgagttgttcgccttgacgccagtgatagtttcagcatggttgtggaccaggagcgacatccaaacgttgagtgacaacagtgtcgggttggtcgccagcacgatcaagggtaggtatgtccacatgaggaaccccaaggcaagcaccttcttggtgatggtgtccaccggttgcatcccaagcccctctgtcaccaccagcttcaagtgtgatgactag

SEQ ID NO: 27857 - DNA, 765 bp, Oryza sativa
  Clone ID: PAT_MRT4530_32511C.1
gtgggtgtgttttttttttttttttttttttttgttgataattctttacattcatttagatcctcatgattacttgaactatacatagtacctatgagatccttcgctaaaaaaccagcacagcgctcaaccgaacagtacatcgccaagacgaatagacacggtcttggtctggatgtagttgtccagcgccgactcacccaactcgcggccaataccagattccttgtacccgccaaagggaagctgccaatgtagagtgttgtaggagttgacccagacagttcccgcacggagcgcgttggcaacctcgatggcagtagtgaggttggatgtgtgtacagcggcagcaagaccgtatgtggtgttgttaccaatcttgatgacatcggcctttgtcttgaacttggagattgtgcagacggggccgaagatctcttcttgctgaatcttcatatcctcggttacgttggagaagattgtgggctcgatgaagtaacccttgtcgcccttacggttgccaccagtctcgacggtcgcgccagacttcttgccctcctcgatgtagcccatgatacggtcgaactggagctgcgagacttgaggaccctggaaggtgtccgcggcgaatgggtcaccgacagcgttctgagcagcccgctccttgaagcgctggatgaacttgtcgtagatctcttcttggacgtagatacgtgaaccagcacagcaagcctgtccgtggttgaagtaaataccaaagttgac

SEQ ID NO: 27858 - DNA, 599 bp, Oryza sativa
  Clone ID: PAT_MRT4530_32512C.1
catcatgatctggaagctgaacaaatccggcatttacactccaaggtccctctgtagggctattttgtttggggggggtaatagacacaaacatgcaggatctttggaagatagcgcacccctaaaagcaaaaatttttctttggctaatgcttaaaggtagaattcaagccgctgcccagttaaagaagatgaactggaacggggatcctaactgcaaactctgtggggaaaaagaagatgtggaccatctgatcttcagatgtgcgccagctagatttctatggtgttgtattagagatgtgtttaactaggatgtggtcccttcgtctagggacgatattgttgccctgatgcatggcccaaagaagaaatctttgctcgttttcgttgctgctgcatcatgggcaatttggctaaccagaaacgacttggtgtttaataacaaactgatgaaagatgttctgcagctacctcataaaattatgaatatgtgattggagtccgtttcaatttgtgaaattcgtggcaagcgcataattagcattctccagcgcatgctcctccgatccgctgcggcgtccttacgggcggcaagcc

SEQ ID NO: 27859 - DNA, 256 bp, Oryza sativa
  Clone ID: PAT_MRT4530_32513C.1
gtggacgggactggaggacgacaccggcaactacttggtttcgtggcggggccgcgtaggggtgggtgaaaagggagcggcggcgcggtggagccaaagggaggggcaccgcggccgcgcgagggtggaggggcggcactgcggcgtgagaggggagggacgccgcggccacgcgaaggtggcggggcagcgcgccggcgcactgggacggaggagatggaggcgcaacaacgagacgagtgaaggggcaccttaa

SEQ ID NO: 27860 - DNA, 209 bp, Oryza sativa
  Clone ID: PAT_MRT4530_32514C.1
tcggtcatattatgagagtcattttgtgtacggggggtatgttgtacatggaagagcggtgatatcctcgatagagtactagttctgtctttgactggggtttagtaaggtgcggaggatctaggctatgtgctgaggaacaaagggcatattctattgctgtggattatggtagagtatggtcactatgagttagtgatgctagagga

SEQ ID NO: 27861 - DNA, 135 bp, Oryza sativa
  Clone ID: PAT_MRT4530_32515C.1
atggacagcgacacagggcatgaataattccaagatttcttcattcgaagaggtgaggaactagagcttgagtttttttttgaaccaaagacagtgagggagacccccacggttcatcaaccagttttgcactga

SEQ ID NO: 27862 - DNA, 282 bp, Oryza sativa
  Clone ID: PAT_MRT4530_32516C.1
gccaaagcccttacataattctcatattacaacagccaaagtcaaagatcacatcaagctgaatatccactagagcggtcagcacacaaagacattgaacttgtatgtaactggatcctctacatgatgagaaatatacacaggggcatcttttcaagccaaagaaaacggcccagagacatggtatgaatgattatgacattgcccacgattaggactgcttgtggattgcctgataggattgcgacaaggtcacagttacggtggaaggctagcttgttc

SEQ ID NO: 27863 - DNA, 585 bp, Oryza sativa
  Clone ID: PAT_MRT4530_32517C.1
cggtcgaccacgcgtccgcggacgcgtgggtgggagcatgggaaagggtcaggcctgggtgaatgggcatctaattggtcgctactggtcactagtagcgccagaatctgggtgctcatcttcgtgctactacccaggagcctacaatgagaggaagtgtcaatcaaactgtggaatgcctacacaaaactggtaccacataccaagagaatggttaaaagagtcagataatttattggttctgtttgaggaaacaggaggtgatccctcgctgatatcactggaggctcattatgccaaaacagtctgttcaagaatttcagaaaattattatcctcccctttctgcctggtcgcatctttccagtggccgtgcctcagtgaatgcagcaactccagaactgcgcttgcagtgtgacgatgggcatgtgatctctgagattacatttgcaagctatggaactccttcaggtggctgcctgaacttctccaaagggaattgccatgcatcgagcactctggatttggtgacagaggcatgtgttggcaacaccaaatgtgctatcagtgttttcaacgatgtctt

SEQ ID NO: 27864 - DNA, 3402 bp, Oryza sativa
  Clone ID: PAT_MRT4530_32518C.1
atgccgctgccgccggcggagcgccgcctcaccgtcgccgacctcctccgcatacgccgccccaccaccggcgccgcctccctcgtctcctcctccccctccacctcgaccgccccgcctccccgcaagaagcccaggctccccgccgccgcactgaccccgacccctcgtagcacggcgcccttcgcgcccatcccccaccgcgtcctcctcgccggcgtgctctcgctccccgcgtccggctcccccgtcgcgtgccgcagccactgcctctcgctctccgactcccctcctcccgcctcctccgcctccgtctgctgctacctcctcgacttcgaccccgacgccgtcgaccgcgagatccacgtcctcgcctggaactacctcccgtccctccaccacggcggcgccggcgtgctcgaggtggtccgctggcgcctggcggaggagggcacgcccgcacctggctctggcttcctgaagacgattccgctcgattgcgtcgatgcggagcctgattcgggcacccatggccatgtgtttggggtggtgaggtcggtgagcgtggtgttcagcgtgccgcgtgctgggcagaagagtaatgcaggtggaggtgacaattcggtcgggtttatcgcggagatgatgtgctgcgcgtgccgtcgatgcagggtgttacctccagaatctgaccaggatcacaagtttgagctcgagaagtttgtgtactttgtggattccgcaagctggtggcggccggtgctggcgcggatggtcgggaggcctgtgtctgtctcggggttgaagaaaaggttggtttccattgacaggaagggctcgtacaccatgttggtgtcgacgaggaaaacaatgctcagatggtgcccgtcctatccagctgttctgaaattggatgggtcaccaggtgattgcggcggtgtgtataccggcgtcgtcaccggaatttacatgcaacgcatgttgattgagctggataagatcgtatggttgctgattgatgatcagcatcttgctccatcacattctctccgagttggtgctgttatttctgtgaagaatggtcgagcaatttgtctaaaacttgcttggacaaggactcttctacttggaacatgcattaaaactagcatcactataaattctttctccctggtggactccaaatcttatataaaggcagaggacaagggtctgttagggaagtttgttgactcttttgagctgcctgctagattttggatgttaattctgataccatgctttaaacagaaattcaccaagttattttctgagaaagagattttgggctctaaaaatcatgatttctttatgaaattctccaatcataactgcggcagtcctcgagctgaattaaacttggaaacttttaaattgagatcttcggtgtcaggaacactgcagttggttgatgcaacaggatgtatagatgttgttataccagatctgccaccaaatgtttgtatggacagcatctacgagataaatgattacaaagtagttcttgaaggtcccatggcttaccttgatccttatgatgttactgatccattgtcctgcaaggctatttgtgaacatctatctttccgaaaaagactaaatcacctcaagatctatgttataatcaactggagtgaattgaatcgaattggtccttcatcaattcctttgcaaatcaatgcttgtgccaaaatgtttcacctgctcaaattaacacatatatttccagcaaataagacttttcagcatcaaaacttgtcagggcccagcttgtatgctgaggctgtgatactgccatatgatttgaagtttactgagctagatgaatgctctgagcatgctgagagctttagaatctcatgcattccttcacttggtaactccaaagtgtatacggcaaaaccgtgtaatattctatgcacactaagctttggaactaccaatctttgtggttctctagtgtctatctactcttgtggatcagtcagtactattgtaaacgatactgtttgtggcgaaagagatcacacttttaggattttattggaatttaaggatggaaggtttaaatatcagtcactgcggatcggcggctactatcttcttgaatgttccactgaaagtatgaattattccatgaaaggctgtggatgtttacaaattagtaaagtttcactaggttatcagagtagattttggagtcttgctattacatttaatggtactataaatataaagcagaccattggggatcaatctattggagtttcttcagtgaagatggatgagccattttccagaaaagctgtcaataatgagataaagctagtgcatacttggaatgatttccatcaatattgtgacttccatttgaaatttcactgtgatgaaaagatggacgaatacaactctttttgcaatgtattcaatgaattgtgctcttactcaaatgaagttctaagtatctcatcgttcattaagactagggtgccaaaaatgccttctggatcttctaacttgcaaagggataaactggttcaaggggatttgatatcattacaaggaaaagtagaaaatatccatccatatggctgtaagaaggaaaaattcatggttggtaatgagaagtccagtatatgtatccatgttactgacgataaccatagggtgcggctctttggttacctaagtaaatatggttatcctgttggattaggaccaggggcatctgcgacgttccaccgtgtccttttgacacacaagcatgagctattcgtcaccccactaacatatattgaagttgtaacaatccatgtgttggttttggacggcctccaaccctcaaaatcaagatgtgaaacaataaatgtaaaagtcagactagccggatttattgttgatgatggatcctctttgtgctgttgctgggctgatgatgcaagggctgagttgttgctcgggctgcaagaggttgcagttatgaattcttctgtcacttcgaggttttcaaaagatggagtaaacatccaacagactgttggttcttttctagaaagtttgttaaagaagcacaaaagtatcattgcaagaaactgtgggattcctcccgacatctcttgtcgtgacttggagttgtcttctgttctcaataaagtcttaagttgctcagaagagaaacttttgaaatctatcatactgaatgcttgttggaagggaactttgaatgttattgcatcagctttaaatgcgaacacgctaaatggatttaatttagagcttcctaatttacatccaatgcttcgatgcactgctgaacgtgtgagcggcgtgttcgctgcgttgtgggtggcaagatggaattag

SEQ ID NO: 27865 - DNA, 2070 bp, Oryza sativa
  Clone ID: PAT_MRT4530_32519C.1
tccactttcaagtgagttcatccagtgttcacaagccaattgattaggggtttcctgacaattggtatcagagcaaggtttagggcttggacacgtgatcgtgcgctagaagaagcacttatgccaaggcgtcacaagctccccgtgccgttggtcggtgtcgccgagcgcacgcactcctggaggttccagcggccgtgcctcaggcagcggcgggaatgaccgcgggctggttatacaccgcgtggtcaaggagtcaggatcgtctacgaactatccggttctcacgaagacgaattacaatgactgggcattgctcatgaagatcaagttgcgagcacgttgcctgtgggacgctgtcgaatgtggccgcgctgctgtcgagctgcacgaggatcggatggcacttgatgggatctgcagcacggttccacccgagatgatctcgaccttggcgacgaaggcgtcggtgaaggaggcgtgggactgcatcaagacaatgcgcgtcggcgacgaccgcatccgcaaggccagcgcacagcgggtgcgtacggagtacgagaggatcgtgttccgggacggctagtcggtggaggacttcgccatgcggcttaccagtgtcgtcaaccaactcgccaccctcggtgatcccgagcccgatgacaaggttgtcgagaagtatctgcgcgtcgcccgaccgatgtttagccaactcgttctttcaattgaaactcttctcgatatatctaccttatctttggaggaaatcaccgggagactcaaggcggccgaggattaccagcccccaccatcctcccagaacaccgacggcaagctctacctaaccgaagaagaatggctggagtgccacaagaaggagcaggaggcgaaacgctctggtgccggttccagcggacgcaacaagcgccgcggcagaaaggggtgcaccggcggcagctcggatgggtccacctatcacaccacctcctcactggcacacagggatgacaaatgtcgtaactgtggcaagctcggccattgggccaaggagtgccggagcaagcccaagcatgaagaccaggcccatgtggcccaagacgagcccacgctcatgctcctgactggaggctgcgtcgaaaccgcaggctccatgttgccgccaccgccgccaccagcgacgccggcgcctcagtgcgtctgcatcgagctcgtcgagaagaaggtgttcactgcgttagatgatgaagcagaccgcgacccgcgcagctggatcatggactccggcgcgtcaaaccatatgacaggttgccgagcggccttctccgacctcgacactagtgtcaccggcaacgttcggctcggggatggctcgatcgtccctatcgaggggcgcagcacggtgttgttcacctgcaagaatggagaacaccgcaccctcgccaacacgtactttctgccgtggctcgctgccaacattgtcagcatcggccaactccacaaaactggcttccaagtattggttgaggacggcatcatgcgcgtccgcgacgagcagtggcgcctgctcacccaaatccctcggagcccagggcgcttgtatgtgcttgacatcaagctcgcgcggccagtttgcttgacggcgcgccccggcgaaaacgcgtggcgttggcacgctcggttcgggcacatcaactttactgcgctgagaaaaatgagcagggagaccctggtacgtggattgccattattgatgcatgtcgatcaggtttgcgaggcgtgtctcgccgggaagcatcgacgggcgccgtttccacaacgcgtgctgtctcgctctaacgagcccctgcaactcctccatggcgatctctgcagcccgatctcgccagcgacgccgagtgggaaccgctacttccttctcctcgtcgacgactacagccgcttcatgtggatcaagctccttttgtcgaaggacgtcgcaccagccgccatcaagcagatacaagcggccgccgagagcaagtcgggaagctgctttgtgcactacgcacggaccgagggggcgagttcacc

SEQ ID NO: 27866 - DNA, 5031 bp, Oryza sativa
  Clone ID: PAT_MRT4530_3251C.1
atgggttgcaagatggccggtcacccacccaaccaccacggagaaggcatgatcgactttgtggcagagttggcacgcatgacactggtggtgggctaccccaacgcgccagagtacacgacgattccaccgctcagtggcgagcttcctcaccgtgttcgcctggaggtccatgactacgtggccggcgagaacgacaccacctttggtcacatgtgtgctgtgatgagggggttggataggatgcactcggacctgcacaaggcgaccaaggccttgaacgatgggaagctcatgaggatcgtcgctctgaaggacgagatagcgcgcctgaagagggagaatgctcagttaaagggtcttcccgcgccaggaggagtccggatccgcactacgccccgcaagacgacgacggcacccgtgcgcatccagcttgcgcccaggaacccacctccatcagcagctcccgcagcacctccggttccgcccgtagttcctgcagctccagctccagctcccgcgtccgctctctccttcgctccagcatcagccgccaggggtccagccagtggcaccggaggttgcttttttgggatggtctacaccaggaatggtagccgcgcgacaggcgagggcagcaacggcgaagagcgcactgatggggcgcatccccacagcgattctggcaatggtccgccaccacttcccgagaatccgacgctagcccaagtaatggcacatcagacccagatgatggcagccatgatgcagcagatgcagcagcagcaccagcagatgcaccagcggatgctgcagcacgccgaacagcagcatcagcagtttggtccccctccccctcagtccaagttgccagagttcctacgtgtcaggccacccaccttctccagtaccaccaaccctatggaggcgaatgattggctccatgccatagagaagaagctgaatctcctgcagtgcaatgatcaggagaaggttgctttcgccacacaccagcttcaaggtcctgcgtcagcttggtgggataaccacatgaccacccgcccaccaggtattgaagtcacttgggcagaattctgccgtagcttcaggaaggcacaggtgccagacggggtcgtggcacaaaagaagagggaatttcgtgcactccatcagggcaacaggactgtgacggaatacctccatgagttcaatcgcctcgcgcgatatgcaccagaggatgtccgtaccgacgccgagaagcaggaaaagttcatggcaggtctggacgacgagctgaccaaccaactgatatctggggactacgctgactttgagaggctggttgataaggcaatccgtcaggaggatcaacgcaacaagatggacaggaagaggaaggccgcacagttcagggcacctcagggaagtcaccagaggtcgcgcttcgctcccgggcagcagggtggacctaccaccatgatcgtccgtcagcaccgcccgttcaaccctagcaactttccccagggcaccagtggcagtcagaaccaccatggaggtcagtccaatcgcggtgcagctccacgcccaccaatggcaccggcacaatcaggcccgcccgcgcaagccaagaaggagacaggagcaaaaccagggtcctgcttcaactgtggcgagcttggccacttcgctgacaaatgcccgaagcctaggcgtgccgggccaaggtttatccaggctcgtgtcaaccacgcatctgcggaggaggcacaagcagcaccagaggtcatactgggtacgttccctattaactcaatccctgcaatagtactttttgattctggtgcgacgcattatttcatttcaaagaagtttgtcgggatgcaagggttaataagagaggaacttagcacaccaatgcgggttcataccccagggaatagctccacttcggttcaattcagcccttctataacaatagaaatccaaagatcaccatttctagccaacctcattcttctcgaatccaaagacctagatgtcattcttgggatggattggctgaccaagtttaagggagtcatcgattgtgcgaatcgcacagtcaccttgaccaacgagaagggagaaacggtagtgtacaaatcaccagactcaccaaagcaaggggtctctttgaatcagattgagacggaaatcccagtagacaccgtggagaaaaacttgaggaaattggaagatatacccatagtctgcgagtatccagaagtttttcccgaagacctcactaccatgccacccaagagagagattgaattccggattgacttggcaccgggaaccgctccaatttacaagagaccgtatagaatggcggccaacgaattagccgaggtcaagaagcaggttgatgagcagctgcagaaagggtacattcgaccaagtacttcaccttggggtgctccggtcatttttgtggagaaaaaggataaaacgaagaggatgtgcgttgattatcgcgcactcaacgaggtcacaatcaagaacaaatatcccttgccgcaaatcgacgatttatttgatcaactgaaaggagctaaagtgttttctaagatagacctgcgatcaggctaccaccagttgagaattcgggaagaggatattccgaagacggccttcaccactcggtacgggctatatgagtgcacggttatatccttcagacttactaacgcacctgcattcttcatgaatctgatgaacaaagtgttcatggaatttctggacaagtttgttgtggtattcatcgacgacatacttatctattcaaagtccgaagaagaacatgagcaacatctccgtctggtactcgagaagttgaaggagcaccagctatacgccaagttcagcaagtgtgacttctggttgacggaagtcaaatttctgggccatgtcattacagctcagggtgtggtagttgatccgtcgaacgtagagtcagttaccaaatggaccccaccgaagaccgtgtcgcagattcgaagttttctaggactggcaggttattaccgccgattcatcgaaaacttctccagaatcgcccgacccatgactcagttacttaagaaagatgagaagtttaaatggacagctgaatgcgataagagttttgaggagctcaagaagaaattagtatccgcaccagttttgattctgcccgaccagatgaaagacttcaaagtctattgcgatgcatcccgtcacggacttggatgtgtcctaatgcaagagggcagagtggttgcgtatgcctcgcggcagttgcgtccacacgaagggaattatccaactcatgacctggaattggcagcagtggttcatgctttgaagatctggaggcactatctgattggtaaccgctgcgaagtatatacggaccataagagtctgaaatacatcttcacccaaccggacctaaatctccgacaacgaagatggttggaactaatcaaagactatgacatgagtattcactaccacccgggtaaagccaatgtggtggcagacgctttaagccggaaaagttactgcactgccctgtgcatcgagggcatgtgtgaggaattgcggcaggagtttgagcatctcaacatgggaattgttgaacacgggtttgtggccgctctggaggcacggcctacgctcgtggatcaagtcagagcagctcaagtaaatgattctgaaatagcagagctgaaaaagaacatgagagtcggaaaagcccgggatttccacgaagatgagcatggcacaatctggttgggagaaagattgtgtgtacctgacgacaaggaactgaaggatctgatactcaccgaggctcatcagacccagtactccattcatccaggcagcactaaaatgtatcaagacctcaaagaaaagttttggtgggtcagcatgaggagagaaatagctgaattcgtcgcactctgcgatgtttgccaacgagtgaaggcagagcaccaaagaccagcaggtttactccaacctcttcaaatcccggaatggaaatgggaggagattggaatggactttataacgggactgccccggacatcgtcgggtcacgattcgatctgggtagtagtggatcgactcactaaggttgctcacttcataccagtacataccacatatacgggcaaaaggttggcggagctttacctttcgagaatcatgtgcctacatggagtacccaaaaagattgtatctgaccgagggagtcagttcacctcaaaattctggcagaagctgcaggaagaattggggacccgtttaaatttcagcacggcctatcacccgcaaactgatggtcagaccgagcgggtcaatcaaatcatggaagatatgttgagagcttgcgctgttgattttggtggagcttgggacaaaagcttgccatatgcggaattctcgtacaacaacagctaccaggccagtctacagatggcaccgtttgaagctttatacggccagaagtgccgcacacctctcttctgggatcagacaggtgagcgtcaactgttcggaacagaggtattagcggaagcagaagagaaagtcagaatcatcagggaaaggttgaggattgcccagtctcgacagaagagctacgcggataaccgtcgaagggagctcacttttgaggcaggagattacgtgtatcttcgtgtcactccgctccggggagtacaccgttttcagacgaaaggcaagttggcaccatgcttcgtgggaccatacaaaatcctggaacgaaggggggaagttgcttatcagttagaacttccatccaacatgatcggcatccatgacgtgttccacgtgtcccaattaaagaagtgcttaagggtacctgaagaacaggctgattcggaacacattgatatccaggaggacctaacatacgtggaaaagccggttcgtatacttgataccagtgaaaggagaaccagaaacaaggtcacctga

SEQ ID NO: 27867 - DNA, 1062 bp, Oryza sativa
  Clone ID: PAT_MRT4530_32520C.1
tttttttttttttttttttagttctaaactttttttttaaacttccaacttttctatcacatcaaaactttcctacccacaaaaaaaattccaactttttcgtcacattgttccaatttcaaccaaacttccaattttgacgatgattatacgcttcttatgttgcctcttttttttttttttttttttttattattttttttttgaaacaagctaaccgtgccaaagcaaaggtctataatttaaatgcccaaaactttaacattgttcaagtcgatttgtcgtctcaaagtaacaaatacccaagtaccaactttggcatcaaaactatgatttctggaatacattgggaacaatccaaggaatgcatcttcaagcagtttcagtcatagggtactcaaaggcaacatctttcccacaaagcctgcggtagaccgcggagaaggtctcgagcttgtattcggtattgttgcgctcctttgggtccaagaaaatcttgatgaccttggcaccatccagacggtatctgatgcgcttgccaacaatctcagctgggtagactacatcctccaagataccatcatgaacagcagtaagagttcttgtgcgagggcgctgaacagccgagcccttcttgggaggcctcacaatcctccttgttgcaacaattaccacatccttgccgctgaacttcttctcgagctccctgacaagcctgacatggattttcttgaatgccttgcgcagacggtacggcacgtggatcaccacagcctttcctgttcccggcaatatccatctggactgcattgttgatgtacaggtccttgagctcgctcttgagctcctggttgccattctcgaggtcaaagaaagcctgcgcgacggagtcctcgaactcggagggctcgaggcccttctccttctggatcttcttcctcgcggtgtacatcttcgcttacctggcccctgagcgcgagaagatgcgagagggaagtggcggcgccggcgctagggttcggagcccggccggcccggggccgccctctcgccgataggagt

SEQ ID NO: 27868 - DNA, 232 bp, Oryza sativa
  Clone ID: PAT_MRT4530_32521C.1
gcacgagggctgccttcattgtgggttactggatttccaagttgcctatgttgaggtagttctatagatactgaaatcttatttttacttgttatcaatgtctgtcttgtatcactaacttaaaacaaaatggtggaatttgttatgcatacacaacttcatatcccctatctttttgggcctcatgccttatgaagttctggtccttccttgatggtacagtattgtttac

SEQ ID NO: 27869 - DNA, 387 bp, Oryza sativa
  Clone ID: PAT_MRT4530_32522C.1
atggcgacggcctgtctcgccatgttcgtggcggcgctcgtcgagacgagacggctccacatggcccgcaacgacggccaggtcaaccggccggatgcggcgacggtctgcctcaccatggtcgtggtagcgctcgtcgaggcgaggcggctccgcgtggcccgcgatgccgccgcgctcgcctcctccgccgcacacccccccccccccgccgccgccgccgctcgtcttctccgtcacaccccgccgccgctcgcctcctccgccgcaccccgccgccgctcgtctcctccgccgcacaccgccgccgctcgcctcctccgccgcacccccgccgccgctccctgtcgcccgcctgcctccatgcgcgtgagtgagagagaatga

SEQ ID NO: 27870 - DNA, 697 bp, Oryza sativa
  Clone ID: PAT_MRT4530_32523C.1
gcaccccacctcaccccggcggggaatggaatggagctgagccttctccccgcctcacgcgtgtagccgccgccgccggcgagcaggtttggagtgggggcgacgcggccgtggagagcaggtctcgtgtccggatcgaatcgaagggcgtttctagtgtcaaaaagagaggagggatggcgatgacggggtacaagtaccaagctcaggagttgatgagagactacttgctggctgatccactggttccgtacacctcggtgctcgtaggcattgccctgtgcaagatggcatatgatctcacaagggtactgagctcattttacttcaagggatattcttcactgacaaagatacaacgtgttgaatggaacaacaaggggtatgtccagtgcacatgcgatctttatcacagctatatcattatatctggtaaggtctacagatcttttctctgatcgccttaaggggcatatcacattccgcaattcaatcatctccacttgatcaggccaaattgcctctattctaagccatcgctgatttcctagcctgtttgctacggtactgaagttcccagcacgctgtttctcccctcgcgcatcgtgtgtattcctgaagaaatttctgtggatcagttgcccaacagtacaacctcaaatgctatagtatttgtgacaaaaaaaaaaaaaaaaaa

SEQ ID NO: 27871 - DNA, 384 bp, Oryza sativa
  Clone ID: PAT_MRT4530_32524C.1
atgccgctccacacaccagatcattcgcgcactaagtctaaagctcaacatgcatttggtgatttggcgtgctgctactatgtccctcttgtctatgctggcaagtggcgtggcggctcacatccacgtgcaagctatccgccgaagcatactaagagcgcaaggactataaacctctacacacttgcccctaggtaccgtgtaaactcacatgacagaggtgagcctcgacagacccaatatggtgcctgtggaggcccttgttggcactggcaacctgctgttcccagatgtccctttactacgtacccggacagggaggacttaagtgatcttgagggctgtcaccacctctacacccacctcaaacatattgtgggataa

SEQ ID NO: 27872 - DNA, 226 bp, Oryza sativa
  Clone ID: PAT_MRT4530_32525C.1
ccaggttgaatgttggtttgtgtacaccggttgcgccagacaccctgtagcgtgtggagaatccccagattagatggaaggaaaggacccatgtagcgtgtggcttttccccattgtgtaaacgtgcgccagttcgtgcccccagtgagaaggccctgggtgattgtaacccagtggttgcgcccttagggcgccacacaagtgtatcccaaaagaatgaacttta

SEQ ID NO: 27873 - DNA, 183 bp, Oryza sativa
  Clone ID: PAT_MRT4530_32526C.1
atggcgggtctaaggtatttctcacctgtcgccgcttcggatttgtatgtcgtcaccgtctctgctgttccacgccactcggaaaagggtgccaccgtcatcgccgagggagtgggccgctcggagccgctggacgcaccaccaccgccgctctgggtcaccgccttctccgccgctctccgg

SEQ ID NO: 27874 - DNA, 461 bp, Oryza sativa
  Clone ID: PAT_MRT4530_32527C.1
gtcgccctttttttttgattataattttacagcgagctaaatattttaagaaggttaccgccaaaatgccaatttcgatatagccacttatagggcctaggctactaggagaacagataaattttacgctatgcccgagcgaagaaactaggctgcatttctttggaacaaaaatcgctgaataagttacatggaaacacgaaagatcactttaatgcttcataaagttagaggatgatgcaagtattttcctaaaccaaaaaaagaccttgattcgccctccagaaccaactaaagttaatttagtgaaagaacaaactggtgtccacctgggttgaaagaaaccgaacaccaactaaacaacagtcttttgtactttgcaccagatacccaatctgtgtgagccaggatcagatctggtggtgcttctatgtctggctatcttggtcgagcggatcgaa

SEQ ID NO: 27875 - DNA, 337 bp, Oryza sativa
  Clone ID: PAT_MRT4530_32528C.1
tcgctcaaccccttgtcacctacatacagcggtatattccacgtcatgggcggtggcagtggtagcattagaagaaggaggtgcatccatcaatgacacaagtggctcactacgccagctgttgtctccatactgcggtatatttacagcgggtggcatgctcaaaaccggcataggtgcatccagtggtcgtcgccactgcctaggacagatgcgctgacagcgcccgcgactacctctgtttcatctgacttacgtaactcagatgaaacaacggtagccgccggcgttgtcagcgcatctgggctaggcagtggcgacgaccactggatgcacc

SEQ ID NO: 27876 - DNA, 1791 bp, Oryza sativa
  Clone ID: PAT_MRT4530_32529C.1
ggaactaatgagcttcagccattgcctgaaaattcttatttgctgtataaatacagctcagagtcattcagcaaaacaaagttaaactgtacagtgatatttctactccaaaaaggactacttgagctttgatttttctagctctggtaaaaaacatggagcctccaaccgtatagagaagatcacctgtgtgtgatccacaacattcagacctacccattatttagtaaatccttgctgttttctctactagctaagaaaggttgagccatgcaggaatatctttatgccatgtcattgtgttctgacaagtttgggtctccatctctgccatgtaaaccatctctgatcccctccagctttaatatcagcaaatcttctcttcaggtcaagcccttttcgtttcttctcatcacgcgtcagctctcttgacttgctgatgaggggatgctccggcgttccgaggtcagtgctatcgacgatcttctgcaccatctccagcacctcgctcatctttggccggtgcctggcgtggcgcacgaggcacttgtttgccaccgaggcgagcttggccgccgacttcaagctgtaactcccttcaagccttggatccattatgatttcaagcttctttgagtcagtggagtagggcttcacccactctatgaggttctgttcgcctctcggcctgttcctgtccagaggtcgccgaccggtaaggagttcgtagagcaccacgccgtagctccatatgtcgttcttgctgctgaggcgccctgtgtggatgtactctggagctgcatacccaatagttcccaccaccgcagtggagacatggctgccatcctgagataccagtctagccaatccgaagtctgacagcttcgcgttccagttctcgtcgatcagaatgttggaaggcttcagatcacgaaatattatcttgatttcagattcttcatggagatacttcaagccgcgcgcggtgtcgagcgccaccctgagccgcatcgcccacgacgccggcctcggcgacctcgacgacaggtgatctgccaggctcccgttgggcatgaactcgtagacgagcagcagctgcatccccctctcgtcgtcctcggcgcagtacccgatgagcttcaccaggttcggatgatccaccaccccaagaacgttcacctccgtcacccactccttatgcccctgtaggcctttgcggccgagctgcttgatggcgacctcgacgctccggcgaggctcgaggacgctgcggatggtgccgcggtagacgcagccgaagccgccctcgccgagcaccagcgagcggctgaacccgcgggtggcgctcttgagctcctggaaggtgaagatgcggaggttgttgctcgcgcgctgcggcagcgacagctgccggtaccggccgaacgactcggcgctgatctccgacgacacgttcagggagcactccgaccccgaccgccgcgcgtcgcggtccgtcgacgtgctgctgttggaccgcgccgacagcgaacgcgtcgtcgccgccgccgccgaggccaccgccgacgaccggccacgccgctcatccctctcccagccggcgaacccgaagcactgcatcgccttcgacatgctccccggagaagacgacgacgacacctctcctgctctgtgtggcatgtgttacgagctcagccgcctccgcatggagaagaagacgacgacctcggatctcgcctcaccgggaagacgagtaaagagagaaagagagagagaggaagaagatgatgc

SEQ ID NO: 27877 - DNA, 1999 bp, Oryza sativa
  Clone ID: PAT_MRT4530_3252C.1
tgtgcatcagcatttacaaaatccatctcaatcggcttctaggaacccacctcccgccgatcccggcgcgccgccgcgccgaaaccgccgccgcgcccacgcctccgtccctcccgggccacgtcgaccacgcccgcgcgtgcgccgcattccccgcgcccgttcccctctctctcccgctcgcgcccgcgcccgagatggccgggattcgaaaaccgaatcccgcctctctctcctccccacttcccccacgtcggccgtcgaatcccgccgctcccggccaagtccggttcccccatcccctatttaagcatcgccggcaccccctctcgctttttccccattgcgccgacctctcccgaactccccaacgcctccgcgccgtgcaaccacccgccgccgccgcttttgctactccggccgccgctagccgccgctaggctcgccgccgtctcacgccgtcgccgccgttagcttcgcgcggccgaggtccacctcgtccacccctcctccgtcgagggcacgccgaagctcgtccgctagccgacgccgtcctcccgtggcttgccgtcgccgtccgccatcgccttcctccgcgccggccaccctcgagtcgtcggccgtcgccttcgactgccgccgccgtttcccgtgccgccggtagccgccgtcgtcgcatgcgtgccgtcgccgtttaacccagccggccggtcggctttgatgccgagccgcgccggcggccgcatttatcgccgccttgcgccgctgccgcatgcgcgccgccgccgtgtgagcgccgcgccgccggcgccatggtcgccgctgtctcgcgccgcgcccgcgcgcccccggccgcgaggtccccgtcgccgtccgatctacccttgggtagatcattccgatccctccgacgctccggtgtacttcgagatagtcgccgaggtccctccagcagcagagcaaggcaaatggccggtcacccacccaaccaccgcggagaaggcatgattgatttcgtggcagagttggcacgcatgaccctggtggtgggctaccccgacgcgccggagtacacgaccatcccaccgctcagtggcgagcttcctcaccgtgtccgcttggaggtccatggctacgtggggacttgcctcgctaacatggcggttgaggcgtcaggaggcaccgcagatcatgcctgtcaggaggcagcctacttgatgatggccaggttacgggagcgccacgactacatcttccacgacacggcgtaccgctaccacccccgtcgagcccatggtgatggcgtcagctccttccgtccgacagctggcgagaacgacaccaccttcggtcacatgtgtgctgtgatgaggggattggataggatgcactcggacctgcacaaggcgaccaaggccttgaacgatgggaagctcatgaggatcgtcgctctgaaggacgaggtagcgcgcctgaagaaggagaatgctcagttgaagggtcttccagcgccaggaggagtccggatccgcaccacgccccgtaagaggacgactgcacctcatcagccgccagaggttcagccagtggtaccggagatggtctacaccaggactggcaaccgcacggcaggcgagggcagcaacggcgaagaacgcgctgatggtgtgcaccccaacggtgattctggcaatggtccgccaccacttcccgagaatccgacgcttgcccaagttatggcacatcagactcagatgatggccgccatgatgcagcagatgcagcagcagcaccagcagatgcatcagaggatgatgcagcacgccgaacagcagcaccagcagtttggtccccctccccctcagtccaagttgccggagtttctacgtgtcaggccacccaccttctccagcactaccaaccccatggaggcaaatgactggctccatgcgataagagaagaagctgaatctcctgcagtgcaatgatcaggagaagg

SEQ ID NO: 27878 - DNA, 260 bp, Oryza sativa
  Clone ID: PAT_MRT4530_32530C.1
acatcaaagaacaaccacttttataactaggtcatataaccaaaacaaatgtgacctactgaaaatgttatgaaacttgagatggaaagaagtcgaataagatgccctaaggcaaaacatccgaagatcatattggacatgggtccacagggcgaaccaatgcttcaaaatggggggcttgaccctacgctgacgtgccctcttgtgagcgatgtactatactgacccagcacgtaaacgatggaccagcttggggaggc

SEQ ID NO: 27879 - DNA, 1017 bp, Oryza sativa
  Clone ID: PAT_MRT4530_32531C.1
atggcagcccccagcaagccacaacatggcgccattggccccgtgccgttcaaggacgtcatcggagacgcaatggcacagcgatcctcaccggaggaggagtatgccggcgtcgtgtccagcctcccgagctatcccaagctgcgcctgcggcactaccagggcatgtggctgatggagtacacccttccagggatcatggccatccagcggagcttcgtgccgcgccgccatggcgacgtcgtcctcgcgagccccggtaagtgcggcaccacctggctcaaggcgctcgccttcgccgtcttggcgcgcggcgcctactcccctgccagtgaccggcatccgctcctccgtcttaacccgcacgactgcgtcccgttcatggagggggcgatctctgaaggatggggtggtaagattgatgagctgccgtcgccgaggctcatgtccacccacatgcagcacgctgctctacccaagtccattgcagatgaacctggctgcaaggttgtttatatttgcagggagccgaaggatatcctggtctcagcctggcacttcttcagaattatagagcctgatctttcatttcaagaagtgttcgaggctgcctgcgatggcaagttcttgaccggcgctatctgggatcacattattggctactggaatgcttgcaaggcgaacccagagaaggtcctgtttctggtctatgaggaccttctgcgagatccggcaaacatcgtcaggaagctcgccgactttcttggccagccgttctcatcgaccgaggaagaagctggactggtgacagatattgtgaggctgtgcagcttcgagaacctgaagagcttggaggtgaataagatgggagaggcatcgttcgccttcccgaatgcgtcatacttccggaaagggaaggccggagactggaaaatccacatgacgccggaaatggtggagtgttttgacaccatcgtcaaggagaagatgcatggatctgggcttgtttttgcttga

SEQ ID NO: 27880 - DNA, 468 bp, Oryza sativa
  Clone ID: PAT_MRT4530_32532C.1
atggcgcgccacggcgcggctcgcacgcagcggcgatgcgaggcggcgaccggcggcaaccggccggcggcggagggcggcggcgtcacggcgacgcgggcggcgacaggggcggctaagcggctaggcagcggcatggcggcaactagcggcgcgggagagagagagagattgaagggagggggacctcaccgacaacgattgacgacggcgagcgacgaagggcgatggcgacggcgggacgagctccggaaccacctagcgaacaagatgagaggggttagagggagagaggaaaatgggagagggcgaggacgccggccgaaggcggcggccatggcggtgctcaccggcgaacgacatggagtgggttccggcggcggaatccaacggaggaggggtggacggggtggcccgcacgacggcgatcgcggcggcgtcgtcggcgcggcgactagaggtggctag

SEQ ID NO: 27881 - DNA, 435 bp, Oryza sativa
  Clone ID: PAT_MRT4530_32533C.1
atggcgtttcgtagatacttttctgaaaagaccgtaattagtatggaacttctcttctgcagaatatgtgtatgccctaatctagcattcagcctgaatgctagcgggagtcatcttgaagtagtggtcccaagcgtattgaaacgtgaccgatttggcgctcgggatgcgccggccatcgccgacgaggtagccggcagaccccgcctgtcggaacagcttggggtcaacggccaccgcgctcgtgaaaccgtcggccctgaggaagacggtcctcaccgtgcacgtgcacctgttagtcaccgacacttggaacatcgtgtcgagcgcgccgaccttcttcccggtgttagtctgctggatgtcgatgctcgatggggtgcaccgctgggactcggcccctatacgacgtacggcgattgacatcatgaccgg

SEQ ID NO: 27882 - DNA, 103 bp, Oryza sativa
  unsure (1)..(103): unsure at all n locations
  Clone ID: PAT_MRT4530_32534C.1
ancgaacccttgggttgggccgagaatttgggaccggcacctatatgcgaaccaactttccctatagagaggcgtattatagcttggggtaatcatgggcata

SEQ ID NO: 27883 - DNA, 285 bp, Oryza sativa
  unsure (1)..(285): unsure at all n locations
  Clone ID: PAT_MRT4530_32535C.1
gattccaatccaatccaatccgattcagaagtagagcgagcagcggctgcggcgatggcggtggcggcggtgcgggcggcggcggcggacgcggcggtgacgttcctgtgggtgctgtncgtatcgacgctgggggcgtnacggcggcggtgacgtcgtaccttcgcatccacgaggggatcactacgcgctcctcgtcaccgtctccctcctctccgtgctcctcttcgccttcaacctcctcttcgaagcctcggggcgcaantttcaaccccaacggcctcg

SEQ ID NO: 27884 - DNA, 339 bp, Oryza sativa
  Clone ID: PAT_MRT4530_32536C.1
atgccaacagttgaggaagaggccacgggcgtcttcagatactcgtcccctgaccttgtggagcctggatcaggtggccaacggtcaggtggcggaggaggaggcggccaacagccaggggaggggagcggaggcattggcggttggatctgtctcctggaggccaaatccggcggccagcagtctggaggcagcggcagtgtcggcaatcgacggtcggaaggtggcggcggcgaccggatctgcatctcggtggccagattcatcggtcatcggtcggaaggcggtagccgacaattagtagcagacgataatattttagcacccctctgtaaataa

SEQ ID NO: 27885 - DNA, 1611 bp, Oryza sativa
  Clone ID: PAT_MRT4530_32537C.1
tcaccgagcctcgccgccctcggcggattcggccagccgcacgacctccgccgcctccgctccacgccccgggtcgtcgtcgtgagccacaaccactgtcgctagcctctgcgcagtcaccgtcgccatccctaccccgagttccccgccacccctcaagccattgtcgccgtcgcttgccgccttccgccttcctgcctcggcggggagagggagagcacctcggtgaacgtcggcgttgggggagcacagacgctgccatgccacctttcgccttcctgcctccccacgtcgtctgtgcccagcgccgagccaccgcgcgccatgcgtcgaccgccgttcaaccctagccggccaccgctgaggcgcgccctgttctccactgaaccgccgccacccccctttcatattgtgtagcggcaacgcctccgccatctctcctgcgccatcgccccccatcctcgagctcgacgcggtggagaggcgcgcctccaccttccttggctggcgtcttctcttcatcctctccctctccaaagctccatcgctgtcccctctcccacccctttctctgcattcggccagatccagccaatagaagctatggccatggcatctggctcccctgagcttggtggagtggagaggccaaggaggggaggcctcccccagtatcttcctctcccaaatcaccattgctgccagctcttcctcccccttccggatccggccagatctaggcttcatcgagttggggacttccagatctggagctccagttcatggctacgtgctgcatccaccacaacagcaacgaagaggatgtgacggggctcgggagttcccgttgatggcggcaacatgctggagaatttcctggcataaaatgcactttttcttgtttctgaatttcctggcctccatgtgcaccttcaaccgaattttatttagttgctatatgcaggtcacgcagcaatcctgcaaatacttaatggttggttggcgaaatgtgcagcccacattaggagtgcaacaatgaagtgcttccataagctgctcaggatggagctgaagaaatacatgacaagaactaagagataaaacagaaaatgcagatgcaggaagagcaacagaacatccatgaataggagtgaagcatctgtgctggtttaattatacattcaagcatcaacttcaggatctgtaccatctattaatatcatctttctgttattgattgatcaaccaaataatatgttcctagctattgtaactttggttattgctttaactgtcatgaaccatgaattgcttgtatgctaattattaattgtaacctctttactgaaatatatatttatgttggaatgtgttgtgctcttttctttagattcaaactgcagcaaagaacggattacagttatagaaatgtgggcttcccagttcctaattaagatgttcaaacattgtgtttttcagaacatccatgaataggagtgaagcatctgtgctggtttaattatacattcaagcatcaacttcaggatctgtaccatctattaatatcatctttctgttattgatggatcaaccaaataatatgttcctagc

SEQ ID NO: 27886 - DNA, 4267 bp, Oryza sativa
  unsure (1)..(4267): unsure at all n locations
  Clone ID: PAT_MRT4530_32538C.1
gcctcctccgccccagcgtcgagttctcctacgcagccatgttccccgaccgcgccagccgcaccgcccaccccgccggggagggcgggtgcgtcgcgctcctcgcccccctcccccctcgcgcatccccgcgcccgccatcccgggggcggctcccgcccccgattcgccccctccaaacccctgggccagcgccggcccggggcgctgctgccggagcgcgtggtgggggtggcggcgcggcggtctggacgcccccgcgcccgcccccgatggccgccgaggacgcgggcggcggcgcgggggagaggatgaagctgctgtgcagcctcggcggccgcatcctcccgcgcccgggcgacgggacgctgcggtacgccggcggcgacacccggatcgtgtcggtgccgcgcggggtggcgctcggggagctgttcgggaggctcgccgaggcgtacgggggcgccacgggggcgagcttcgcggtgaagtaccagctccccgacgagggcctcgacgcgctcatctccgtgtcctcgccggaggatctcgacaacatgatcgaggagtatgacaagctggccggcgcgagccccaagctgagggtgttcatcttccccatctccgacgcggcgggcggtggcggcggggaggaggcggagggcgggggattcgatgccgggctccggtatctggaggcggtgaacggtattgtgcgcaaggacagcgtcgcgagcctctcgtcgacgcagaactccgatggcgggccgcctccgccggcgccgacttcgggtggtggcggcggcggcggttctccgaccgcgctctcccccacctctacttgctcgaatgatgccgcgagatcggcgtttggtgtggcggcgccgccaccgcttgtcgatgtgttcagcaatgccgctgctccggctcctgtccctgtgaagccacaggagattgctgctgaagtgagggctccaccgcaggcgaatccacagccggaagcagcgaggtaccggcagccgctgtcgcagctaccaccgttgccgcctgtgttcatgaacgatcatagggaggccatgcagggtctgaatcaggcgatgccaggaaatgggggaaggctggaagactgcaatatgtgcttgaaggcacttcctcatgctcactcagatccagtggtgaatgactacggtagcgatatgcatggagggcctggccccgagacggtgccggtatacatgagcctgcggccagaagacgtggcaaggattatgatgccggagagggcggtgccagttccgatgggggcttatgggtacacccatatgcatcccgtgccgcatgagagggagatgatgtatgcgcagcaggttgaagggattccgaacacagtgctcattgacccatctggcttgcatcagcatgtgtatgttcatcagcagcagcaagttccaccacagcagttgccttcaacctatggatttaaccagatccctgtgattccaaatgagaaggacagagtagtttctccaggttcggctcattctgatatctcaagctctcatcaacacattatgcagcagccgctgccaccgcagcagcagcaattgccttcaggccaaggaatggcacaatatcccgtcaagcaaaatagtccaaacaatcagcttacaggtgagggtagcctaagtggcaatgcaaggcatcgtgaggatggactgacgcgccgtgataatgtgtccccagtggcacctgctgctgtgccgacttatatggctaatgtggacaggatgatggattcgctccgcttgagccctagtgaggccagttctgcctctactgaacaaagaaagccagtgatgcctcctgagaatggtgtaccccagaatgccataccagaaaactctcaggggttcccagatactcgagcaagagaagttagtcagagcaacaccaacaccttttttgatgtcagtgaacctaaggtagtccttccaactgaaccagcaccatcaccttccattgccagctcttatttgcacaatgttcagcacaccaatgtgagccatatgccacatatgatgagcatcgggggtccctactcgagttatgttgtagctacggttgggcctggtggagtgcctccatcggcttatggtgttgatcttgtctatgcaaattctgctgtaaatccattaagtgagcgcaaggatgttccacatgaagtagctccaaatgctaatgctcaggtacctgcagcagcattggtaaatcatgctcccaatgtggaccaaatccaagagtctggcttacaaggccagcaatttggcaatgacgacccctggaaagtagtgacaaatacacatgctttgccaccgagacctaagagggtagcaagcagggaaaacatcagcccgaaggatccacattctcacaactctttattaaattgcaaagggccagatctgaatattccggctgaagatgttgctctccaccaacaatcagatcacaaggacgcccatacagagcatggtcgattcatcaaaggtgatgatatgaccagcccagatttggtaagtgtcgaggacagtttacctacatctaatacaaagtcatcagagcctcagcctcctgtggtgaatgatggagttggtgctgtcactggtaaagtagatgctgaagcacacgccaatgaggttaacaagagcagaccagcagattggatttcaggttttccagctactgatgatcttggacgtctgcagattataaagaataatgaccttgaagagctccaagaacttggttctggaacttttggaaccgtatatcatggtaaatggaggggatctgatgttgctattaaaagaatcaatgacagatgttttgctgggaagccatcagagcaagacaagatgcggaatgacttttggaatgaagcatctaaacttgctgatctacaccacccaaatgtcgtggccttttatggtgttgttcttgatggacctgggggatcaattgccactgttactgaatacatggttaatggttcactcagaacagctttgctgaagaatgccaagaccctggataagcgtaagagattgataattgccatggatactgctttcggaatggaatatttgcataacaaaaacatagtgcactttgacctgaaaagtgacaatttgcttgttaatttaagggatcctcagcgtccaatatgcaaggttggtgatcttggactttcaaaagtaaaatgtcagaccctcatctctggtggtgtgagggggactcttccatggatggctccagaacttctgaatggaagtagcagcttggtctccgaaaaggttgatgtgttctcctttgggattgttctctgggaactcttaacaggagaagaaccatacgcagatctgcattatggtgttattataggtggcattgtgagcaacactctacgaccagcagtacctgactcttgtgatccagagtggagatcactaatggagcaatgttggtcgacagaaccatccgaacggccaacctttacggagattgctggtaggttacgctccatggctgcatcccataaggtgcaaccctgaaggtgaacaacctgggatgggatattgtaacagaatggccggcaacaaacttctggggcatcggtggacaagttctctactgccagatcgcgtatttaggaattcagcactgatataaatatgccttcatttatgtccctaggatctatctgttcatacctcttcattgtttcatatcttgtaatcaaaaaaagttaccagccgtgtgtccagaagcatcgcaatggacggtctcagatccatattctttcatttataccttttgcttagaggtgcgtttaataagttattagtctagagtcagttatagggagcccaatatgttttccttttttctttttctcccccttttcctgggtaataattgagttatttgggagtcaatcggtcggtcggtcggaatgtaaactgatgttgaagggtaattaagcttggttggtctttgcaagtcttggaacacagagtgaggtccttgcttgtaataagatgtctgtttttcttttttgtggtttgtgagatataccgatttgttaagtactctcgtaancagtcacaagtcatcatgtatgatgtgttgcagttttgctgaagatagttataagactattgttgcagagatttaaaaaaaaacctcgtgccgattcctgcagcccggg

SEQ ID NO: 27887 - DNA, 475 bp, Oryza sativa
  Clone ID: PAT_MRT4530_32539C.1
agtaaccacccctgccgcctcgcttccacttcctctcctctcccctcgacacagccagcacgcggcgcacgccagcgcgagccacatggcgcccaccacctagcttaattactccatgcttaatttgctccatacatgttattgtttttacatgtatatatatagttacagcttagaacattatgcatttttttacgttaaaaaaaaaaaaaaaaaaaaaaaaaaaaaaaaaaaaaaaaaaaaaaaaaaaaaaaaaaaaaaaaaaaaaaaaaaaaaaaaaaaattttaaaaaaaaaaaaaaaataaataataaaaagaagagggggggcggcccttttaggggacccaagtttacttccgggggcatgcaagggaatagcttttttttggggcccccaaaattaaatccacgggccgtgttttaaaaacgcggggacgggaaaaccccgggggtacccaaactaaatcgcttgga

SEQ ID NO: 27888 - DNA, 1210 bp, Oryza sativa
  Clone ID: PAT_MRT4530_3253C.1
atgtgccgaggaagctgctggtgatgaaggtggcacgcaagtcagcaccgatgatggcagggctaaagaagccgcaccgcttcaatccatggatcgtcgcactacgagagatccgcacataccctcagcccagttcctccctcctccttcccagccaggccaacctccccttcccctccctcgactcagctcgtttttcccttcgccaagtccatgccacctccctcctctccgtcatccccttcctccaaccacccaaccgccatggccaccggcccctccaaatgtcgccgtgtcacgcacgccaccctacccacctcctccactccacgcgcccttacccggccgtgggaccccatcgcccacgtccctgcactcctccccaactccttcccgcaaaatcggcgccgaataaccaccacccacccccccaacgatgatgccgcccatgtcgccaccggttgccgcccctctcggccccgatcctgcggctccgagcccatttaaaacgatccccacagctccctctccctttttcccatttccccgagctccccgcgccctctcccgctctctccacgccgctccccatcatcgccgctctccggcgaccatctgccgcccaccaccgccgctcccgccatccccgtgccgcgccatttgcaccaccagcatcgccacacctcgccgcacgccggtctttcctccatttccccaatccaccaccagatcaccacctccaccgcgaacccgatgtcgccgccgcattctccgccgccatcggtcgcccctcctctttcgccgatcatcgctgggatgtggtccgccgcttcctgtgccgccgtcggccgcttccctgttgccgtctcaccgttgccgctctcggtgagcactcccctccctctccatctttctcccctttgccggccgcctcccaggccttctcgcgacgtgccgccgccggcggtggccgtctagccgggtcgtcgtcgctgtgctccgcgtccgtgccgccgccggctatgctgggcagccggctaccacctcccatgccgcgtggccgatctgggccgtcagatcgaccccggcctccatccgggccgcccccgccctcccattcgaatcgtccgtctacacgaagccgtctcggagctaggtcaccgccgtcgccgcaaccaagctcgtcggcgactgtccccaagcttcgcca

SEQ ID NO: 27889 - DNA, 898 bp, Oryza sativa
  Clone ID: PAT_MRT4530_32540C.1
aacgaagaggatgtgacggggctcgggagttcccgttgatggcggcaacatgctggagaatttcctggcataaaatgcactttttcttgtttctgaatttcctggcctccatgtgcaccttcaaccgaattttatttagttgctatatgcaggtcacgcagcaatcctgcaaatacttaatggttggttggcgaaatgtgcagcccacattaggagtgcaacaatgaagtgcttccataagctgctcaggatggagctgaagaaatacatgacaagaactaagagataaaacagaaaatgcagatgcaggaagagcaacaggtagatgatgcgttaattattgcctttatattcattttagacgatataggcaattgtcaaagttgcatctgcctgcagttactaaagtaatccctatcactatattttgtggttctcccttttatttgtattaaaaacttcagagtcattggcaagtgccatcaggcttagttctactcgatgtcaataaatttcagagtctaaaatgcaccttttcttgtttctgaatttcctgggctccatgtgcaccttcaaccggattttatttagttgctatatgcaggtcactcggcaatcctgcaaatacttaatggttggttggcgaaatgtgcagcccacattaggagtgcaacaatgaagtgcttccataagtttaattatacattcaagcatcaacttcaggatctgtaccatctatttatatcatctttctgttattgattgatcaaccaaataatatgttcctagctattgtaactttggttattgctttaactgacatgaaccatgaattgcttgtatgctaattattaattgtaacctctttactgaaatatatatctatgttggaatgtgt

SEQ ID NO: 27890 - DNA, 453 bp, Oryza sativa
  Clone ID: PAT_MRT4530_32541C.1
atggagggttgtgcgtcttcgccggagagctacgtgaggatagggaggaggtggcggaggcggcggccgccggcgagggggttccggctgtgcccgaggaaccggttctcggtgcggcggctgcgggccaagctgctcacgttcctcggcctcgtcggccggtacgtgcgccagctgctggcggtgaggcggccgcggtcgtcgtcgtcgtcttcgtcgtcggctggaggcggctgctcacggagcagcagcacgaggttcctcgtcggcggcgggaagcatcacgtcgacggcgggcggcggacagtgccgccgtcgttcatgcggtccaactcgttctacgcgcaggcgatcgccgactgcctcgagttcatcaagcggaactcagtcccggtcgaggactacgccagctccagcggcaggagatcatcggtagacctgacaacaatctga

SEQ ID NO: 27891 - DNA, 544 bp, Oryza sativa
  Clone ID: PAT_MRT4530_32542C.1
tgtgcaccttcaaccgaattttatttagttgctatatgcaggtcacgcagcaatcctgcaaatacttaatggttggttggcgaaatgtgcagcccacattaggagtgcaacaatgaagtgcttccataagctgctcaggatggagctgaagaaatacatgacaagaactaagagataaaacagaaaatgcagatgcaggaagagcaacagattctttagattcaaactgcagcaaagaacggattacagttatagaaatgttggcttcccagttcctaattaagatgttcaaacattgtgtttttcagaacatccatgaataggagtgaagcatctgtgctggtttaattatacattcaagcatcaacttcaggatctgtaccatctattaatatcatctttctgttattgattgatcaaccaaataatatgttcctagctattgtaactttggttattgctttaactgtcatgaaccatgaattgcttgtatgctaattattaattgtaacctctttactgaaatatatatttatgttggaat

SEQ ID NO: 27892 - DNA, 721 bp, Oryza sativa
  Clone ID: PAT_MRT4530_32543C.1
gcgaagctgggtctgtactcgtactggcggagctcgtgctcgcaccgcgtccgcatcgccctcaacctcaaaggattggagtacgagtacaaggcggtgaacctgctcaagggggagcactctgatccagtatttggagacaagtaccctgagcaccctcttttacctcaagaccttaaaatgaaggccttgaatctccagatagcaagcattgtatgctctggaattcaacctcttcacaatcttaccgtactgaggttcattgagaagaaggttggtacaggggagagcatcccatggactcaacaacagatcgacagaggtttcgcagctgctgagaacctagtaaaaggctgtgctgggaagtatgcaacaggagatgaagtccgattggcagacgtattcctcgcacctcagatttatgcagcagtgactcgttttcaaattaacatgttaaattatcccactctcgcgaggctccatgaggagtatatgaaacatccagcatttcaagcagcactcccagacagacaaccagatgccccttcctctacctagaaaatacagtgtatgttcatctgaaaaatagattaaaagttgtacccaacttatcattggaagctgtaacaataagcacagaacttgttgcgaaaattgaaaataggtgtatatgtttttcaaaaaaaaaaaacaaataaatgacccttaaaattgctagcct

SEQ ID NO: 27893 - DNA, 483 bp, Oryza sativa
  Clone ID: PAT_MRT4530_32544C.1
ccaacataaatatatatttcagtaaagaggttacaattaataattagcatacaagcaattcatggttcatgacagttaaagcaataaccaaagttacaatagctaggaacatattatttggttgatcaatcaataacagaaagatgatattaatagatggtacagatcctgaagttgatgcttgaatgtataattaaaccagcacagatgcttcactcctattcatggatgttctgaaaaacacaatgtttgaacatcttaattaggaactgggaagccaacatttatataactgcaatccgttctttgctgcagtttgaatctaaagaatctacagagacacaggaattagaccaatttgtttcatgcacaacagaatgaatgagccttttgttttgatgcctcaaaccatgaggtctctttagagccaaatcacagtttaaactcttttgaacacaatatccttatactctacaaaaagag

SEQ ID NO: 27894 - DNA, 596 bp, Oryza sativa
  Clone ID: PAT_MRT4530_32545C.1
cgcaacaagttctgtgcttattgttacagcttccaatgataagttgggtacaacttttaatctatttttcagatgaacatacactgtattttctaggtagaggaaggggcatctggttgtctgtctgggagtgctgcttgaaatgctggatgtttcatatactcctcatggagcctcgcgagagtgggataatttaacatgttaatttgaaaacgagtcactgctgcataaatctgaggtgcgaggaatacgtctgcctgcgaaacctctgtcgatctgttgttgagtccatgggatgctctcccctgtaccaaccttcttctcaatgaacctcagtacggtaagattgtgaagaggttgaattccagagcatacaatgcttgctatctggagattcaaggccttcattttaaggtcttgaggtaaaagagggtgctcagggtacttgtcctccaaatataatgctatcgcgtaagaatcaccaattacagcatctccatcgaccaatgccgggacgaacttcataggattaaccttcatgaattcttccacccacaaacaaaaaagaaaatagttgaggctaccacacatgtgtt

SEQ ID NO: 27895 - DNA, 384 bp, Oryza sativa
  Clone ID: PAT_MRT4530_32546C.1
atggcgatggaggtcacaggggcttgcacgcagttgcaaagactagatcgggtgccggccatccgccgcctcgccggcctccagctcggccgcctcgggctccgtcgccgcctggggagcgtcgccgcccgccgcctcggcggccggtgcccgcccgctgccgcctcgggctccgccgcccgcccggggagcgccgccgcctcgggctccaccgcccgcccggggagcaccgccgcctcgctggccgcctgctcggccgcccgccgctccacgccctccctaccgccgcgcgccgcccggcctcacgtggggcatgagagggtaaagaagagattgggtaaatttcagggatacgagagggatttagtaagctttcaaggataa

SEQ ID NO: 27896 - DNA, 847 bp, Oryza sativa
  unsure (1)..(847): unsure at all n locations
  Clone ID: PAT_MRT4530_32547C.1
ccggccggggtancattagtgaggctcaaaaaaaaagagaccactcgtcttcttccttccgctcgctcgctcgctcgctgacgtgtacgcttcgcggcggaggcggcggcggcggcttccgatggcggaggcggcgggggcggcggtggcgccggcgaagctgggtctgtactcgtactggcggagctcgtgctcgcaccgcgtccgcatcgccctcaacctcaaaggattggagtacgagtacaaggcggtgaacctgctcaagggggagcactctgatccagaattcatgaaggttaatcctatgaagttcgtcccggcattggtcgatggagatgctgtaattggtgattcttacgcgatagcattatatttggaggacaagtaccctgagcaccctcttttacctcaagaccttaaaatgaaggccttgaatctccagatagcaagcattgtatgctctggaattcaacctcttcacaatcttaccgtactgaggttcattgagaagaaggttggtacaggggagagcatcccatggactcaacaacagatcgacagaggtttcgcagatttgcttttatgtcacaccatgctcacttcgttccccaatggtgtagctgctgagaacctagtaaaaggctgtgctgggaagtatgcaacaggagatgaagtccgattggcagacgtattcctcgcacctcagatttatgcagcagtgactcgttttcaaattaacatgttaaattatcccactctcgcgaggctccatgaggagtatatgaaacatccagcatttcaagcagcactcccagacagacaaccagatgccccttcctctacctag

SEQ ID NO: 27897 - DNA, 1590 bp, Oryza sativa
  Clone ID: PAT_MRT4530_32548C.1
atgacgtgtgccacctggatgcggatgaggtcgacttctaaggaatcccccgcggcgaggaggctgctgctgctgttcccgcggccgagggccttctcctccgccgccgctgccgcgccctcgcgcgagccgctccacgtctgcgtcgtcggcagcgggcccgccgggttctacacggccgacaagatgcttaagggccatgaaggagcacaggtcgatattattgataggctgccgacaccttttgggttagttcgatctggagtggctccagatcatccagaaacaaagtcaaaagctattgagtttgatttcctaaaaaagagagcgtcctataatttgggacggagggagtactttgattgctttatactagggcaaattgtggtaaatcaattttctcgtgtagctgcaaatgaccgctgtcaattctatgggaatgtaacactaggaagggatgtatctctatcagagcttcggaagacatatgatgttgttgttcttgcttatggtgcagaaagtgataggtcacttggtattcctggggaggatctgaggggaatacattcggctcgagagtttgtgtggtggtataatggacatccagacatgtgcaacttggcacctgacttgcaaagcacagattctgctgttgttctaggccagggaaatgttgctcttgatgttgcccgtattcttcttcgttgtacatctgagttggctgctacagatattgctgattatgctttggatgctctccgtggcagcacaataaagaaggtatacttggttgggagaaggggcccagtacaggcagcatgcacagctaaagaactacgtgaaattttaggtttgaaaaacgtccatgtcttcatcaaggaggctgatcttgtgaccttgcctgcagatgaggaggagattaggaatagtagaattaaaagaagggtgtacgagctactatctaaagctgcaattgcgcataaaggaaagaataataatggccaaaaggagcttcactttgtgttttttaggagacctaccagatttctcccatcagaagatggtgtgacagttggtgccgtgcaacttgaaaagacttgtttaaaagatgatggtgtggctggaaagcaggtcgcagttggaactggtgagtttgaagatctaaaatgtgggctgctcttggggggttccgggtacaaatccttgccagtggaaggaattgtcccaaatttgaagggcagggttttgagtagtgaatctgagatccccccagtggacccaggcctgtttgtggtgggatggttaaagagagggccaactggcatagttgccacaaatctccattgtgccgaagaaacagtggcgagcatccttgaagatgacaagaaggggttgttcatgggaccttctgattcaaaaaagcaaggcaggaggggactccttgagattctagaacaaaagaacatccgctttgttccttttgatggctgggaaaagattgattctaaggaaaagatggcaggtgagctgaagaacaaacctagagagaagataacaacctggaatgaaatcctgatggcttcaaactag

SEQ ID NO: 27898 - DNA, 2092 bp, Oryza sativa
  Clone ID: PAT_MRT4530_32549C.1
aggatgtattttagagtcgttttgggacgtgacaagtcaatcggctcagttttgatccaggagcttgagggaaaggagagggatgtgttttatttgagccgtaggcttttggatgcagagacaaggtattctcctatggaaaagttgtgtttgtgtttatatttctcttgcacaaagttaaggcgttacctattgtccaatgaatgcactgtgatatgcaaagccgatgtagtcaagtttatgttatcggctctgattctaaaaggaagggttggaaagtagatatttgctttgacgaaatttgatcttcggtatgagtcactgaaggcgattaaaggacaagctatagccgattttattgtggatcatcgtgatgtctcaatcggctcggttgaaattgtgccttggactttattttttgatgaatcagtgtgcactcatggttgtggtatcggtttggttataatttctcctcggggggcaggtttcgagtttgcctacactattaagccttatgcaactaataatcaggctgagtatgaagcggtcctcaaagggttgcagttgcttaaggaagttgaagccgatgctatcgaaattgtgggtgattccttgttggtgatcagtcaattggcaggagaatatgaatgtaagaatgatacactgatggtctacaatgagaagtgccaagagttgatggatgggtttccgctagtgactttaaaacatgtgtctcgagagcaaaatgttgaagctaatgatttggctcagggagcatcaggatacaagccgataacaaaagatattgatgtagaagttgccacaataatagccggtgattggagacatgatgtttttcaatatatgcagaatccatctcaatcggcttctcaaaaattgcgctataaggctttgaagtacaccttgttggatgatgagttatattatcggacgattgatgggttgttgcttaaatgtctgagtgccgatcaagccaaggttgcgataggcgaggtacatgaaggaatttgtagaactcatcaatcggctcataagatgaagtggttgctttgacgtgcagggtatttttagccgacaatgttggaagattgcttcaagtattacaaaggatgtcaagattgtcaaaaatttagagcaattcaacgagcaccggcattggctatgaatcctatcatcaagccatggccattcagaggttggggaattgatatgatcggtatgattaatccaccttcgagcaagggacgcaaatttatattggtggaaccgattactttaccaagtgggtagaggcgattcctttgaagaaagtgatttgggggatgctgtccaatttgttcaagagcatattatttatcgatttggcattcctcagaccattacaaccgatcaaggctcaatcttcgtgtccgatgagtttgtgcagtttgccgatagcatgggtatctagttgttgaattcttcaccgtattatgcacaagctaaagggcaagccgaggcatctaacaaaagtttgatcaagttgattaagagaaagatttccgattatcctcggcaatggcatactaggttagccaaagcattgtggtcttatcggatggcttgtcacggttcgatccaagttcctccttataaaattgtttatggacatgaggcggttttaccatgggaagctcgaatcggctcaaggagaacagaattacaaaatgagttaacagccgatgaatattatgatctcatggctgatgaaagggaagacttagttcagtctaggttgagagctcttgcaaaagttaccaaggataaggaacgcgttgctcaacattacaacaaaaaagtggtgcccaaatctttttctcagggagaacttgtttggaagttgattttgccgataggaactcgtgataataaattcagcaagtggtcatcgaattgggaaggaccgtttcaaatccataaggttgtgtctaaaggagtgtacatgctacaaggacttgatggagaagtttatggacgagcgctcaatggcaagtacttgaagaaatactacccaagtatttgggttaatgca

SEQ ID NO: 27899 - DNA, 867 bp, Oryza sativa
  Clone ID: PAT_MRT4530_3254C.1
gatgagtccatcatcagagaaatctattattttcattgtaccatcaccacattgaacaaattgacatcggtgagaacgatttgtgggaactacatgtttcagatcagaattgcagagagaaaaaaggctgtgctgaaggcaatttcagaggcatggaactctcaagatctctgctcaataaaccaggacacaatttacttccccaactaaaaattagtaatacacaaaatcattaagcaactcaccaactcccctcatgacaaagatggggccaagcagctcatagatctttaacaatctcaatgcccatggagttggctgtgccaatgattgacttgcacagcgcctcgagtgacatgtgcttgcagtagggatcagattgcttcaatttcgcgatctcgtagacatggcgaagtgaaagggatgacactacagtgtgccctggacggccgctggctgtctcaatcccggcggccttcttgaggaaccatgagacagatggtgacttgactacaaactcgaatgtgctgtccttgtaggcagttaaggtaacctgcataggagtttctgccttatacttctgagtcctggcattgaaatccttgcagaacgccatcaggttcagcctgtagaaacctagcgctggaccaactggtggcgcagggcgggcggcaccagctggaacgataaggcggattgttgccaacacaggcttccgtgcaactgcatctttcagagtggttgccatgccgtaggcttatgaagatctccggtacgacggcggcggcggcggcgctccgggacggcggcggcggaggatcctccgggatggatcgaatcgacttgttgtgtgtctgtcccggccgg

SEQ ID NO: 27900 - DNA, 519 bp, Oryza sativa
  Clone ID: PAT_MRT4530_32550C.1
atggcgggatctgccgaggtagcccgtgttgagagaggtggaaggtgcttgaatcccctctgtccgatgagtggtaacagcggtggcttgtccatgggcaactgtggcggcgaggtggtggcggccgtggcgagctggcgatgttgtggcagcggcgggggctttggcggctgcagtgacgaggtggtcgtggagcgaggtggtggtggccgcggtatcgtggtagtcatggagtcgttggagccggaggatgacactctgattggagtagatctggcatccaagagtacaaaagacattcaagcagctttggcacttgctggaacatgtcaatctgggtacactggtggagaaaccatctttgcggagaggcgcacgtggctgcgactgccatcgacggccggctgcgtagcctccgaggatgtgggcgaccatccgcagccgccgcactactccacatctgccctccgcctgccgtcgtcggccggctgcatagcgccggggatgcggacggactaa

SEQ ID NO: 27901 - DNA, 177 bp, Oryza sativa
  Clone ID: PAT_MRT4530_32551C.1
ctaacaccctggggtaagctgcctaggatagccacacgcaagattagctccatataccactacgccctttgggcagtgtttttcataggatagtggtatgttctaaacaagatactatgttgctctggaaagtagtgcatgatagctccgaatatcatcatatggtggactagtggt

SEQ ID NO: 27902 - DNA, 500 bp, Oryza sativa
  Clone ID: PAT_MRT4530_32552C.1
gatttggggtggtcgcaggttccattcgggggtggagttacttacgcaggcatatgatgctggggaagcactattgaaaatgctatgggactacaaagacgctattctgcgctgttctttcaaggaaaaacctgcgtttacttttgccaactagatgggactaaacatgctagagacatctctcgtggctctccaagatctctcactggacaagatatttgatgaagccggtaggaaggccctatacaacgagatcccgaaattgatggaacagggagagagccacttgcaaaatccccattttattttccccatgtcataacagcagtgcactaaccgctaaacacaaaccaagtacagaggcaagaactcaccgtagacacagagtaatctttcgatttcgattcagtctgttgttgctcagggttacgtgtacctgtctggtggagcgtgcttgtccgggatggcgcgccatgtttctttcgagcaagctgtagcat

SEQ ID NO: 27903 - DNA, 600 bp, Oryza sativa
  Clone ID: PAT_MRT4530_32553C.1
gacgaggtgtgacagccatgacgagatcatgcttcctgatagtgctcctgctcgccgttgccatgggtggtagcaagctctcgctcgccgccggcgagagcggcggtggcggcatcccgaccaccctcggccgcgagctcagggagctcatctccaaggccagcgacttcctcggcgcggcgccgcgccgggccggagcggacgggtggcacgccgccgcggccaccggcgacggcgccgacgcgatcagggcgtccctgaggagcacggcgagggggaggccggcgaggaagtccgccgcgaactgcatccccgccgacatgtgccggaagaagaaggtgctgtgcggcaagaggtgctacaggtcgagctccagtagcagcctcagccacatcccgtccaccaagtgcgttgtcaagtgcaagaaatgcgtgcccacctgctagattttcctcccttgtaccgagattccattccgcgggttgccccggggcctcacctcacgatcgatacccattcctgttcctcgtcgtgatgttaactctccacaatttactttcctatatatatagattcagttgaataaaaaaaaaaaaaaaa

SEQ ID NO: 27904 - DNA, 1818 bp, Oryza sativa
  Clone ID: PAT_MRT4530_32554C.1
atggttcgccaaaagcgctcaaaattggaggattgtagccagtctttaaatgaatctgatgatattcattctgaatcgttgccaaataatgatgataactaccaatgtgattctagtgataatagtgacagtaatcatatggatgtaccttcacaagaccatcttaatgtaatttctacaaatgatcttaatgatatggatgtttcacaaccacatgtaaatgaaatttctacaaatgaacttctgaaaactttgaaaagaaaactcagtaagtctaaaagaagtgaagatgataacattaagatgaaaaggtctgaatctattgaattggacaatgatgtaatgataaatcaggttctacgtgatatcatacaaatggatcagattatcaacaatttgaaaaaaaagcttaatattcatcacaacataggtgatcaaaatttgaaggacaaaaatgttgacactgatttgaagtctgatgcattctctagattctctgtcaaatatttctcaaaagttcttgattctttaagtccacatcacaaaacagtcattgaaaattcttgttttcgaagcatgctgctatttgacaagtgttttgttcccaattcttttgctctttggattgcaaaacaagtagatgtgaactgttctgatatagttttgggccaaaaacttattccattgaacaagcaatctgtccatgttgtgctaggcctccatgttggtggtagtacaatccattcaaaatttgattctggcaaacaaaagattcttcatatttttgggaaaacttctattccttctgtcaagttctttggagaaaagttaattaaaaatgaagaacttcctgatgatcaaattctcatctgctttatgattgtttccttgaattgcttcctttgtccgaactcttctttgattccgagtacaaaatacctaagtgcctttgaagacatggacttaattgaaagtttggactggtgcaagttagtttttgactggttgatggatcacattagcaagcttgagaaattgaaaacttttggtggttgtttattacatttaacggttaattacctggattttctcaactttggttcacaaaaagtattacttgatacaccaagaattaaagtttggaaaagatatatgattaaggactattccaaatttgataaaatatctgaaagagtgtatggaaaaacaccagtcaatgatattgcttcaacttgttaccaaatggtggataatagctcatcttcatttgctgatatgctcaaaagttctgttggtgatctgttgccaaatcatgaacaagatgaagaaattaatgatgatgttaatcaagctgtgcaaaaaaataacaatatcacctcatctacaaagggaaacagtaaaacagtactagatgatgacaagttgccaattccaaatgaagaatttaatcctgtgaataagtctaccaatttgaattcttcagaacagattaaatatatcaacattgatgaaataatgaagaagttgaacaaaacaggtcatgttcctattaatccaccagatgaaacagagaaaaattctgccttgacagatagtccggataagatgtatatggtgacacttgaaaattcaacttctcctactgcttctctcaatgaaaacaaagaaaatgaaaaaggttgtcacatgatcaaggattcccctgatgttgtttttgttggtgaaaagaaattctctaagaaatgtgctgatattggaaacaaaaccaacatgatgtacaataaaatgaatagaattctgttagattctcagaaataa

SEQ ID NO: 27905 - DNA, 798 bp, Oryza sativa
  Clone ID: PAT_MRT4530_32555C.1
ccggccgggatgaccacatccactttttcgaatcacggaatggaaggaccacaaccctgctgacgccagtcttgctttcacaacgccaaaattccctgagacgctttctcatcaatccaatgttgcaaacattgtcaaaaagctcagcacaaagaacatggagaagcaactcaagaagttctcttcgttccacaaccgttactttaactctgcatatggtgtcgaagctgctgaatggctacacaaggaagttcaaaaggtcatcaagaagagcaagcatcctctggcctctgtccgtctgattcagcatcaggcgtggtcacagccctcaattgctgtctccattcccggaaaggtccgccttaaaaccgttattaccggatcccaccttgactcggtcatttctaacgaccgcggtgctgggcgtgctcctggagccgatgacaacggctctgcatccatcatgcttctcaacctgttgagtgcattccttgaggacccccgtattgcaaagggagatcacctcaacactgtcgagttccactggtactctgctgaggagacaggtcttcttggatcccaggatattttcaacagctactcacgcttgggcattcaagtcgaagctatgctcaatcaggacatggtcggctacaagggtcgtgacgggatcgagcgctttggccttgtgaccgatttcacaagccctagccaaaacgagtttctcaagctgctaatcgacgagtacgctgatatccccttatgagagtccactttgcggtatgcctgctctgacat

SEQ ID NO: 27906 - DNA, 2736 bp, Oryza sativa
  Clone ID: PAT_MRT4530_32556C.1
atggtcatgttccctagtgtgaatcagatggttcaccaaaagcgttcaaaattggataattgtagccagcccataagtgaatctgatgatattaattctgagtctttgcctgctaaagatgatgattacaattgtgattctgatgataactcagccagtcatgatatggatgtttcacaaccacatgtaaatgaaatttctacaaatgaacttctgaaaactttgaaaaggaaactcagtaagtctaaaagaagtgaagatgataacattaagatgaaatggtctgaatctattgaattggacaatgatgtaatgataaatcaggttctacgtgatatcatacaaagggatcaaattatcaacagtttgaaaaaaaagcttaatattcatcacaacataggtgatcaaaattttaaggacaaaaatgttgacactgatttgaagtctgatgcattctctagattctcagtcaaatatttctcaaaagttcttgattctttaagtccacatcacaaaacagtcattgaaaattcttgttttcaaagcatgctgctatttgacaagtgttttgttcccaattcttttgctctctggattgcaaaacaagtagatgtgaactgttctgatatagttttgggccaaaaacttattccattgaacaagcaatctgtccatgttgtgctaggcctccctgttggtggtagtacaatccattcaaaatttgattctggcaaacaaaagattcttcagatttttgggaaaacttctattccttctgtcaagttcattggagaaaagttaattaaaaatgaagaatttcctgatgatcaaattctcatctgctttatgattgtttccttgaattgcttcctttgtccaaactcttctttgattccaggtacaaaatacctaagtgcctttgaagacatggacttaattgaaagtttggactggtgcaagttaggttttgactggttgatggaacacattagcaagattgagaaatcgaaaacttttggtggttgtttattccatttagcggttaattacctggattttctcaactttggttcacaaaaagtattacttgatacaccaagaattaaagtttggaaaagatctatgattaaggactattccaaatttgataaaatatctgaaggagtgtatggaaaaagaccagtcaatgatattgcttcaacttgttaccaaatggtgaataatagctcatcttcatttgctgatatgctcaaaagttctgttggtgatctgttgccaagtgatgttcaagacaaaatttgtcatttgctctgtaatcattttggaaaagaagatgaaatctttgaagacaaggctaagaaacttcttatagatgttctgttgttgttagctgattgcagttccaattatcctactcaacctactacacatgaaaattcaggaattgaaccagatcatgaaccagttgaagaaaataatgatgatgttaatcaagctgtgcaaaaaaataacaatttcacctcatctccaaagggaaacagtaaaacagtactagatgatgataagttgccaattccaaatgaagaatttaatcctgtgaataagtctaccattttgaattcttcagaagagattaaacatatcaacattgatgaaataatgacaaagttgaacaaaacaggtcatgttcctattaatccaccagatgaaacagagaaaaattctgccttgactgctcgaaacaatcaagtttttcatgatcaaccgtcttttaaaatctggggttctgatgatgacctccatcatgaaaatgatgatttcaaaaaagaaattacaactgctcatcttgcagattcatatcaagttattcctgattcatactccccaaatcatgttttaagaaataagatcactccaagaaagttgtctcaaacttttgctgctgctgttgaaagcctaataatctgttcagacagtccggataagatgtacatggtgacacttgaaaattcaacttctcctaatgcttctctcaatgaaaacaaagaaaatgaaaaaggttgtcacatcataaaggattcacctgatgttgtttttattggtgaaaagaaattctctaagaaatgtgctgatattggaaacaaaaccaacatgatgtacaataaaatgaatagaattatgttggattctcagaaacaaaacttcaaaacctttgctagtccagaaagagttttgttatgcaacatgaagaatttcaatccaagtacttctggaacaaaaccaattcatcacgatcttagaaggctcttctttccaattctctacaagcgccactggtttgttttcattgttcatctgaaagatgaaatgtttgtctttcttgactcattacatgaagaaggttctgaatatcaagatgaagttaagaatagattgacatccaattttgcacttgcttggaattccatcatggaagaatatcaaatcaattttgatgctttcaaaattgtatatccaccagtacctcgccaaaataatctttttgattgcggagtttttactctaaaatacatggaactatggggtccaagagttcagctgacaaaccatttctctcaaaaagacattcaaaacattaggattcaatatgtcaaccgtcttttcttctatccagacaattctgttctcggtacaggaacaaagaaactagtgattgactttgctcagggaaattga

SEQ ID NO: 27907 - DNA, 2589 bp, Oryza sativa
  Clone ID: PAT_MRT4530_32557C.1
atgcagatggttcaccaaaagcgttcaaaattggataattgtagccagcccataagtgaatctgatgatattaattctgagtctttgcctgctaaagatgatgattacaattgtgattctgatgataactcagccagtcatgatatggatgtttcacaaccacatgtaaatgaaatttctacaaatgaacttctgaaaactttgaaaaggaaactcagtaagtctaaaagaagtgaagatgataacattaaggttctacgtgatatcatacaaagggatcaaattatcaacagtttgaaaaaaaagcttaatattcatcacaacataggtgatcaaaatttgaaggacaaaaatgttgacactgatttgaagtctgatgcattctctagattctcagtcaaatatttctcaaaagttgattctttaagtccacatcacaaaacagtcattgaaaattcttgttttcaaagcatgctgctatttgacaagtgttttgttcccaattcttttgctctctggattgcaaaacaagtagatgtgaactgttctgatatagttttgggccaaaaacttattccattgaacaagcaatttgtccatgttgtgctaggcctccctgttggtggtagtacaatccattcaaaatttgattctggcaaacaaaagattcttcagatttttgggaaaacttctattccttctgtcaagttctttggagaaaagttaattaaaaatgaagaacttcctgatgatcaaattctcatctgctttatgattgtttccttgaattgctttctttgtccaaactcttctttgattccaagtacaaaatacctaagtgcctttgaagacatggacttaattgaaagtttggactggtgcaagttagtttttgactggttgatggaacacattagcaagattgagaaatcaaaaacttttggtggttgtttattccatttagcggttaattacctggattttctcaactttggttcacaaaaagtattacttgatacaccaagaataaaagtttggaaaagatctatgattaaggactattccaaatttgataaaatatctgaaggagtgtatggaaaaagaccagtcaatgatattgcttcaacttgttacccaatggtgaataatagctcatcttcatttgctgatatgctcaaaagttctgttggtgatctgttgccaagtgatgttcaagacaaaatttgtcatttgctctgctatcattttggaaaagaagatgaaatctttgaagacaaggctaagaaacttcttatagatgttctgttgttgttagctgattgtagttccaattatcctactcaacctgctgcacatgaaaattcaggaattgaaccagatcatgaaccagttgaagaaaataatgatgatgttaatcaagctgtgaaaaaaaataacaatttcacctcatctccaaagggaaacagtaaaacaatactagatgatgataagttgccaattccaaatgaagaatttaatcctgtgaataagtctaccattttgaattcttcagaagagattaaacatatcaacattgatgaaataatgacaaagttgaacaaaacaggtcatgttcctattaatccaccagatgaaacagagaaaaattctgccttgactgctcgaaacaatcaagtttttcatgatcaaccgtcttttaaaatctgggattctgatgatgacctccatcatgaaaatgatgatttcaaaaaagaaattacacctgctcatcttgtagattcatatcaagttattcctgattcatactccccaaatcctgttttaagaaataagatcactccaagaaagttgtctcaaacttttgctgctgctgttgaaagcccaataatctgttcagacagtccggataagatgtacatggtgacacttgaaaattcaacttctcctaatgcttctctcaatgaaaacaaagaaaatgaaaaaggttgtcacatcataaagtttataatctcaagtttacgacatgcaattgaaattgatggtgttcactgcaaattcagttcttttggaggatcatttaattttggacatgaagtttctaattttgttgtctctgtgttctgccgatatttgtttcatttatctcacccctcaaaatccaaaaaacattatttcttctcttctattggagatgatcttctaaagcatccatcaagaactgatttctcatcagttaggaaatgctttgatggtgcatcaaaagctagacctattcaatcatgtgaaatgacatccaattttgcacttgcttggaattccattatggaagaatatcaaatcaattttgatgctttcaaaattgtatatccaccagtacctcgccaaaataatctttttgattgcggagtttttactctaaaatacatggaactatggggtccaagagttcagctgacaaaccatttctctcaaaaagacattcaaaacattaggattcaatatgtcaaccgtcttttcttccatccagacaattctgttctcggtacaggaacaaagaaactagtgattgactttgctcagggaaattga

SEQ ID NO: 27908 - DNA, 361 bp, Oryza sativa
  Clone ID: PAT_MRT4530_32558C.1
ctcaagctctgttggctgtcaacgtgccatatatatatggagtgtaccctaggtactatggtgcacccagtaccattaccacccttggcggtgttttgtgatgagttgataacagaataggggttcggaagttaaaaagagctcatatatgcatcatatgtgacatgagaaacttagcgtagatataagatagaaaacatgctgtatttgatagtttgcgttccacccgcccacacatgaagtatcatcagtatgatctttctggcacagatacagaattgggaaagccaggtaaaataaaggtaccagatccagatgctggggctgatgctctaaatgacatggagctctcgacaactag

SEQ ID NO: 27909 - DNA, 1880 bp, Oryza sativa
  Clone ID: PAT_MRT4530_32559C.1
gcacgagggtccccgacgaggccgtcgcctccgactccggcgctcccttcccttcccttccgacgcgcgcgacgccttctccggggagaaaatatggattacctcaagacggtggttccatcacagctgatggccgagcgcggcgccaacctcgtcgtcatcaacccaggctcctcgaatgcgccccgagggttcgcaagtcaggatgttccattcaatataccgcactgcattgctcgacatatcactcagcagaaggatgatacaccaaggctttctgtgcgagacaagatgctcaactgccatgcaactccatcgcagaatgcagagcgggagagggcatatgatattattgcatcgctgctcaaaataccctttttggatgaagacatgccttcagcgaaccaggcgttacctcctaagatgggacgtgttgatgccctttcttcacagcaaaacaaagatgatagtaaattcacatggacagatgtaatggacagaagtattaaatcatctacaccaattgaaaggccagttgacaaggatgctgacgtggatcccctgcaaagatcaactcctgacgatactgagcctaattctgaagaaaacatgtataaagaaataatatttggagaggatgctttgaaaatcccaccttctgagtcatactgtctgagtcacccgatcaggagaggccatttcaatatttctcaggattattcattacatcaggttttagaagatttgcgcactatttggaactggatattgacagaaaaattgcatataaatccaagagatcggcatctgtattctgcaattcttgttctaggagagacatttgataaccgaggtttggaaatgttgtcaatcgtactttgcgatttgggttttagcacagcagtgatacatcaggaagctctagctgcagcatttggaaatggcttgtcgacatcttgtgtggtcaacattggcgcgcaagttacacaagtagtttgtgttgaggatggtgttgctttaccccacacagccctggcgcttccatacggtggagatgacatatctagatgccttctttgggttcaacgtcgtcattgcacatggccaaacttccaaactgatccagtgaacaagcctatagatatgctaatgctcaacaaactaaaagagtcatacagccagataagaagtggaagttttgatgctgtcagtgttgttcattcatatgagcatgaaaaatcagttggtcatcagaaaacaaagctatcggctctgaatgtacctcctatggggctactttatccaagggttcttgtcccagaagaataccctccacctcctcgatcttggttccaagattatgatgacatgttagaagatacatggcaaacaagtgacagtctttactcaagtgggaatggtgggttcggacgtattgagcttcaaaggaagctattctgcagcattcagctggttggtggtacagcttcaacagcaggccttgcaccagttctagaacaaagggttctcaatactattccatcaaatcaaccgatagagaaagcagaggtattacagtcgaggagttatccattatttgtcccatggaaaggtggtgtgaataatagatttaaagaggctcactaattttcttcaggcacaggcaatgtgttactacaattcataacaggtatctctccaccctggtgagcgccatgtacttgtccctgtcgtcatttccatgctcagagcctcagttatgttatttcttggtcaattctgtagttataaacttataatctacatttgagctatcatgtaggaaattttaagtggaaattttagtctgcctttttaagggataaaaaaaaaaaaaaaaa

SEQ ID NO: 27910 - DNA, 1821 bp, Oryza sativa
  Clone ID: PAT_MRT4530_3255C.1
atggcctcaaggaaattgtgccactatttccaagcgcatcgggtgtccgtagtgacatcctaccctctcgaccaaatcttgcacaaccgagagggtactggtcgggttgtaaagtgggccatcgagcttgctgagtttgacctgcacttcgaaccacagcacacgatcaaaagccaggtcctggctgacttcgtcgcggagtggaccccagttgacgaccttgttctatccaacgttccttccctccccggagatggagaggacccaaacgccgacattcgtggcgggcactgggttatgcatttcgatggctccctcaaccttcaaggtgcaggtgccggagtcacgctgacttcgccaagcggggacatcctcaaatacgtcgttcggctcgacttccgagccacgaacaacatggcggaatacgaaggactcctcgcggggttgagggcagcggccggaatgggcatccgccgtctcctggtcctaggcgactcccagctggtcgtgaatcaagaaagactcgcgcagccgtcggcgcgaccgaaccccccgagggaccccgagaccacgccttctgcgccgacccttggtgacccgcgtgcctcggggcccgagggggtcgaccctggcccccctcgtcaggtcgtttggatgacggacatccgggcgtatcttgacaaaaatactcttcctgaggatcgcgtagaagctgagaagctcgcgcgcatctccaaacggtacgtgctcgtagaagggatcctctaccggtgtgctgccaacgggatactcttgaagtgtgtttctcgggagcaaggcatcgagctcatagccgacacccatcagggtgagtgcggggcccattcggcctcacgcactttggttggtaaagcctttcgacaaggtttttactggccgactacgctgcaggatgcccaagaatgggtccggcggtgcaaggcgtgcgagttccacgccaagcaaacccaccagccggcccaagccttgcaggggctagacatcctcggaccattgaaagcggctcgaggcgggtatcaacacctgtatgtcgccatcgacaagttgaccaagtggcccgaagcatacccggtcgtcaagatcgacaagcattccgccctcaagttcatcaggggcatcacgtcccgattcggagtgcccaaccgtatcattacagataacggcacccagttcactagtgagctgttcggtgactattatgacgacatgggcatcaaattgtgctttgcctcgcccgcccaccccaagagcaacagccaagtcgagcgaggcaacgccgaaatcctcaaaggcctcaagaccaagacgtacaccgccctgaagaaacacggggattcgtggctcgaggagttgcccgccgtgttgtgggaaaatcggaccactccaagtcgcgccacgggggaaacgccctttttcctggtgtacggcgccgaggcggtcctaccttcggagctttccctaggatcgcctcgcgtcgcgctgtacgatgaggccaaccaggattatcttcgccgcgacgacctcgactatcttgaagagcggagaaggcacacggccctacgtgcggcgcgctaccaacaaagcctgcggcgccaccatcagcgccacgtccgggctcggtcactgcaagttggcgacctcgtcctacgccgcgtgcagtcgcgtctggggctaagcaagctctcgccaatgtgggaagggccatacaaagtgatcacagttccccggctaggctctgttcgactaaccacggaggacggcaccgagttgcctaacccctag

SEQ ID NO: 27911 - DNA, 3559 bp, Oryza sativa
  Clone ID: PAT_MRT4530_32560C.1
ctaggcccactggatcaaggcgacggcggcgaggttggacgcggcattgacctcgagctcctctccttctccgcgctttccccatcgagccggcgagcttctccgacgaggatggtggcggcggcacggatcgaagcggcgcggcgacgagctccccggcgacatcgaggtcggcggcacggagcgggagacggcaacgaggtcgacgctggagagggcgcgaggggacggtgagttggaggcatgccctccacagcgcgagctccaggcgttccctcgatggatgaggccagctctgcatgcacgatagaggcagcggaggtggcggggatcgaacgacaggatgaggtgagccaaggtgaggtagcggtggttgcgaaagtggacgaggaggcggtgcgagcggcggaagcggtgaggcggtggtggcggaagcggcaaggaggctatcgaggagacgatccgagcggttgatttggcgcagaggtggtgaagaaggccgatgacaagtagggtggcgttgagccgagccgctccccgtggatctggcgacggcgtggaccaccaccggtaggtggcgatggctggtgagcaggcgcgtatcgaggacccgcgcgggctgtcgagctccaggaccgtcgcggaggcacatgagcagcggagccaccaccaccacctcgtcttcgctggaagcaagtgccgatggcacggatcaaggcaggatggggccaaggagctcccggtgatggttcaccaaaagcgttcaaaattggataattgtagccagcccataagtgaatctgatgatattaattctgagtctttgcctactaaagatgatgattacaattgtgattctgatgataactcagccagtcatatgaaaaggtctgaatctattgaattggacaatgatgtaatgataaatcaggacaaaaatgttgacactgatttgaagtctgatgcattctctagattctcagtcaaatatttctcaaaagttcttgattctttaagtccacatcacaaaacagtcattgaaaattattgttttcaaagcatgctgctatttgacaagtgttttgttcccaattcttttgctctctggattacaaaacaagtagatgtgaactgttctgatatagttttgggccaaaaacttattccattgaacaagcaatctgtccatgttgtgctaggcctccctgttggtggtagtacaatccattcaaaatttgattatggcaaacaaaagattcttcagatttttgggaaaacttctattccttctgtcaagttctttggagaaaagttaattaaaaatgaagaacttcccgatgatcaaattctcatctgctttatgattgtttccttgaattgcttcctttgtccaaactcttctttgattccaagtacaaaatacctaagtgcctttgaagacatggacttaattgaaagtttggactggtgcaagttagtttttgactggttgatggaacacattagcaagattgagaaatcgaaaacttttggtggttgtttattccatttagcggttaattacctggattttctcaactttggttcacaaaaagtattacttgatacaccaataattaaagtttggaaaagatctatgattaaggactattccaaatttgataaaatatctgaaggagtgtatggaaaaagaccagtcaatgatatcgcttcaacttgttaccaaatggtgaataatagctcatcttcatttgctgatatgctcaaaagttctgttggtgatctgttgccaagtgatgttcaagacaaaatttgtcatttgctctgcaattattttggaaaagaagatgaaatctttgaagacaaggctaagaaacttcttatagatgttctgttgttgttagctgattgcagttccaattatcctactcaacctgctgcacatgaaaattcaggaattgaaccagatcatgaaccagttgaagaaaataatgatgatgttaatcaagctgtgcaaaaaaataacaatttcacctcatctccaaagggaaacagtaaaatagtactagatgatgataagttgccaattccaaatgaagaatttaatcctgtgaataagtctaccattttgaattcttcagaagagattaaacatatcaacattgatgaaataatgacaaagatgaacaaaacaggtcatgttcctattaatccaccagatgaaacagagaaaaattctgccttgactgattcatatcaagttattcctgattcatactccccaaatcctgttttaagaaataagatcactccaagaaagttgtctcaaacttttgctgctgctgttgaaagcccaataatctgttcagacagtccggataagatgtacatggtgacacttgaaaattcaacttctcctaatgcttctctcaatgaaaacaaagaaaatgaaaaagtttgtcacatcataaaggattcacctgatgtttttattggtgaaaagaaattctctaagaaatgtgctgatattggaaacaaaaccaacatgatgtacaataaaatgaatagaattctgttggattctcagaaacaaaacttcaaaacctttgctagtccagaaagagttttgttatgcaacatgaagaatttcaatccaagtacttctggaacaaaaccaattcatcatgatcttagaagggtaatcaatcccacaaagtattgcacagatccttatactcctcaaagatcaaacttcacagtctcacaatatgaaagacaaatttataatgctgtctgcactctatcaacaagcagatatcaagaacgacatgcagttgaaattgatggtgttcactgcaaattcagttcttttggaggatcatttaattttggacatgaagtttctaattttgttgtctctgtgttctgccgatatttgtttcatttatctcacccctcaaaatccaaaaaacattatttcttctcttctattggagatgatcttctaaagcatccatcaagaactgatttctcatcagttaggaaatgctttgatggtgcatcaaaagctagacctattcaatcatgtgaaatgctcttctttccaattttctacaagcgccactggtttgttttcattgttcatctgaaagatgaaatgtttgtctttcttgactcattacatgaagaaggttttgaatatcaagatgaagttaagaatagattgacatccaattttgcacttgcttggaattccatcatggaagaatatcaaatcaattttgatgctttcaaaaatgtatatccaccagtatctcgccaaaataatctatgcccaattgttctcttgttgacaggaatcttttttgattgtggagtttttactctaaaatacatggaactatggggtgcaagagttcagctgacaaaccatttctctcaaaaagacattcaaaacattaggattcaatatgtcaaccgtcttttcttccatccagacaattctgttctcggtacaggaacaaagaaactagtgattgactttgctcagggaaattga

SEQ ID NO: 27912 - DNA, 482 bp, Oryza sativa
  unsure (1)..(482): unsure at all n locations
  Clone ID: PAT_MRT4530_32561C.1
ctccctttttctttcttcccccgctccatttccgaatcgtcgtctcgcctccacttccgacttccgagtcgtctcgcctcgccggcgcaggatggcggcggcgacgaccgccgcggcggcgcgangggtggggctgctgtacgacgagaggatgtgcgcgcacgcgacgcccgacggggaggagcacccggagaaccccgagaggctgcgggccatctggcgcaagtctccgccgacgggttcgcctccaggtgcatgatcatgaaagcgaaggaagctgaggacaagtatatagcttctgtccatagccagaaccatatcaagctgatgaggagtatcagctcaaaagaatatgattcccgtcgaaacaagattgctagaaaatttaattccatttacttcaacaagggctcctcagagtctgcttttcttgcagctggttctgggattgaggtaacttanaagttgctgcaggagaanta

SEQ ID NO: 27913 - DNA, 723 bp, Oryza sativa
  Clone ID: PAT_MRT4530_32562C.1
atggattacctcaagacggtggttccatcacagctgatggccgagcgcggcgccaacctcgtcgtcatcaacccaggatcttcaaatgtgcgcattgggttcgcaagtcaggatgttccattcaatataccgcactgcattgctcgacatatcactcagcagaaggatgatacaccaaggctttctgtgcgagacaaggtggtgcaaatattgggagctaatgaggtgatagacttgcagattgcatcgctgctcaaaataccctttttggatgaagacatgccttcagcgaaccaggcgttacctcctaagatgggacgtgttgatgccctttcttcacagcaaaacaaagatgatagtaaattcacatggacagatgtaatggacagaaggagattagaagagcagttttgcatcaatagtgaagtaacctatgttttacctatactattttatgatatcaatgttttgctgaactactcaaattggtcagaaaggccagttgacaaggatgctgacgtggatcccctgcaaagatcaactcctgacgatactgagcctaattctgaagaaaacatgtataaagaaataatatttggagaggatgctttgaaaatcccaccttctgagtcatactgtctgagtcacccgatcaggagaggccatttcaatatttctcaggattattcattacatcagaaaggatttgctcaaatgtattga

SEQ ID NO: 27914 - DNA, 1044 bp, Oryza sativa
  Clone ID: PAT_MRT4530_32563C.1
cggacgcgtgggtcaacattggcgcgcaagttacacaagtagtttgtgttgaggatggtgttgctttaccccacacagccctggcgcttccatacggtggagatgacatatctagatgccttctttgggttcaacgtcgtcattgcacatggccaaacttccaaactgatccagtgaacaagcctatagatatgctaatgctcaacaaactaaaagagtcatacagccagataagaagtggaagttttgatgctgtcagtgttgttcattcatatgagcatgaaaaatcagttggtcatcagaaaacaaagctatcggctctgaatgtacctcctatggggctactttatccaagggttcttgtcccagaagaataccctccacctcctcgatcttggttccaagattatgatgacatgttagaagatacatggcaaacaagtgacagtctttactcaagtgggaatggtgggttcggtatgtgggacaattatccgatgtttcccaccagattaaaaaagtttgataacatcggtcttgtagaacccattgttagtagtatcctttcgacaggacgtattgagcttcaaaggaagctattttgcagccttcagctggttggtgggccagtttcaacagcaggccttgccccagttttaaaacaaagggttttcaatacttttccctcaaatcccccgataaaaaaaccagaggttttcccgtcggggggttttcccttttttgtcccatggaaagggggggtggtaatttttttgaaacctgtcctgggatgtagggtgaattgagtgcccttcatggtggaaccctttggatataccaaaaggttcttcaaaaaggggcccggatgttctaccccttccgttaaaagtacccttgcatgtagaaccttttttttcccagtaatttcctaaccctgtaacttgtattgtcgccccaggatacccccccatgagattgggtaaccatgctttgtgaggtcaggaaattgttttctgggcctgagttgcccccgttttttttgcc

SEQ ID NO: 27915 - DNA, 573 bp, Oryza sativa
  Clone ID: PAT_MRT4530_32564C.1
cctgacgaattagtatttggcgcgttaaaaggcggttttacaaccgaatgctacgacaaacaatacttttttgacaccgaccacccggtcggcgcaaaccctgacggcaccagccctacttcggtatctaacatcaccgatgacggtacaagcgtgaccgcagacggcgcatggtatttgctcgactgttcccgtgcgttaaaaccgcttatcttccaacagcgcaaacctgcaacgccggcgcaaatgaccgacgccaacgcgcagaaagtgtttgaggataacgtgtacacccgttgcaacgtgggctacggattctggcagatggcgcatgcggtgaaaggcaaactaaacgccgagaacttatggaaagccattaaagcgatgcgcgcggtgcatagtgacggcggtcataagcttggcattaagccgactcacattgtggtgccgacaagcttgcaagaagaagcggttaaattgttggagcgtgaattgcgcgtagaagacggtgcagccgtggacaacgaatttaaaaacatgaagttgacattaatcgttgccgattatctgtaa

SEQ ID NO: 27916 - DNA, 825 bp, Oryza sativa
  Clone ID: PAT_MRT4530_32565C.1
tttgtttttttttttttttgtttcacatccagataacgattactaccatacatataatcctgagcaaaaacatagacatgaacgtgactgaaaccaaggcacaggcacacgataattttggaagattcaggcatacgatttgcctcgaaatttaagcgacaggatcatgatcccaggcagggtgtttgccacggagtcataggtacgggacatgcatagagaatgataaaacaatgggggttcccagttctgataaacaaggatagcggtagacttccttcttcatccggtgctacagtgcaccaggatcactccttcagtttccaccaaagaggtagcccagggaagatccaccaccaggggcagcatggaccttggtcgaagggcgatccgtaagaaagtttccagtgttctggccatcagctctatggtagttgttattgctccggctgccctgaatcccagctggaatctgcttggtggcatcagcctttgcaggtgatggtttctcagcaggagcagccacagccgcagctggtgctggtgctggcgctggtgcaggtgcagctgcaggtgctggtttagcagctggcttaggggcctcattgcctccaaaaaggtaacccagagaactttggccaccaccggcactcccaccacgactcatcttgattgttgatgaagtgaagcgacgaggaggcctgcgtgcagacgggcggcggcggcggcgaggggggggggggatttggggattgggcctcacgcactcgcaccctgcgcccggatccgttcgaaatgggggaggagcccggccggggcggccgg

SEQ ID NO: 27917 - DNA, 408 bp, Oryza sativa
  Clone ID: PAT_MRT4530_32566C.1
atgccgcccatctctaggaaggggactgaggaggaagcctcgtcgccaacccagcggacctgcaccctccgattggcaacaagccaactgcttgggactggatctgagaagaaaaggtggaaaagggagaagagagaaagggaaaaggtgaaagggggaggaggaaacagggaggagttgacatgcaaaaatgggtggaggtccacccaagaaattagaatccatcttctggtggccggggtacgtggaggcgaggccattgtgccagagggtcagcgacatctacttggcgctcaatccggcggcacacaaggcgtgcatgctactagagcgctaccggaggatacaagcgcggcgcagggcggcaatggaacgctatcggaggatgcgagtgcaacgcagagttga

SEQ ID NO: 27918 - DNA, 249 bp, Oryza sativa
  Clone ID: PAT_MRT4530_32567C.1
atggccggactcaggctaatcacgtctccccatatgtcaatccaggcgggagtgaaagagtcccaggctaggaaccaaacaaagcttagaataagccaggctagtctcaggctggcaaattcttctcaagttagaggcgcgggcgtgcggctcgatgattgtgcctttgttgcggcatggcagaagtgcgccggcgctatcggcctagccaaacggttgcagcagcagctgcaggcagcattgcaatag

SEQ ID NO: 27919 - DNA, 544 bp, Oryza sativa
  Clone ID: PAT_MRT4530_32568C.1
cggacggtgggaaacccggcgccgacgacgacgccacaatgatggccggccggcgaacgcccacgtcgacgccgccgtcatcgccgccgccgccctcctcctcctcgccgcgacggcggcggagggcgccgtgtccagctgggagtccaactccgacgaggactaccacatcttcgtggacaaccgcatgtcggacaacatgcacctgagctgctacgccgtgcagggcggcggccggagcgagttctaccacagcttccgcgccgaccccgggaggggggtgcagctgccgtacctgcagccggcgcccaacgcccgcctcgtctgcaagtgggcgtgcgcggggaactacctgaagggcgtcaccctcttcagctcgtcgtggcgggaggccacctccggcgagtgccgccgccgcggcggcggcttgcaacatggtgttcgacgggcacgagatgttcgtcgacggccgcttcgggcggcggcgggaggaggctgcttcggcgaactgccgcagcaacgagtgccagaagatgtgctggtt

SEQ ID NO: 27920 - DNA, 913 bp, Oryza sativa
  Clone ID: PAT_MRT4530_32569C.1
ttacttgtagcagacaggagatagactggctttccttatcatgtgttctgggagtagacccaaaaccctctccatcattgctaagtgctcaaggttcttatatgtttgaaacaatgcttcccccgagcatagctcaacaatgatgcatccaacacttcaaaggtcacaaagcaaactccaccctaagcccaagattatctcaagcgctctgtaattccaaggcgattgaacacatcgatgtcaatcattaccacatccgtgtactcgcggatgctacgaacaacttttattgcgacatattcatgtgtttcacggtcccagcattccaaaacacgcccaaaagtaccttctcccattttgctcaagattttgtatcgtcggttcaagttctcgccgaggtcgaacacgtagtgcccgtcgcggtcgtcgtccctccacggcggcgacgcgccgcccctcgccaccaccgcccgctccgcctgcggcggcgacgctcaaagcgccgtccaagtcgtggccggcccgcttccgcgaacgagacgacttcatggactccgattcgattagacggtgaagcacatcgatctcaatcattgcagcatccctgtacttgcggatgctacgaacaacttttattgcgacatattcatgtgtttcacggtcccagcattccaaaacacgcccaaaagtaccttctcccattttgctcaagattttgtatcgtcggttcaagttctcgccgaggtcgaacacgtagtgcccgtcgcggtcgtcgtccctccacggcggcgacgcgccgcccctcgccaccaccgcccgctccgccggcggcggcggcgcgccggcgccgtcccagtcctggcgggcccgcttccgcgaccgcgacgactccatggattccgattagattaaa

SEQ ID NO: 27921 - DNA, 2654 bp, Oryza sativa
  Clone ID: PAT_MRT4530_3256C.1
tcacggtgtcccccgccttgagcctggtgaatgacaggtgggcccgtcctgcgcgtgggaccaaccggtcagggggtcggtgcggagctctgggctttgcagctgcaggtcgcacgtgtcgcggggctccatagcggattggatgtgggccccactctccccagccgcacccatgagcacggaggcggcaacggcgacgacggtggtggcaacggcggcgacgacgatgacgacggcgatgccgtcactactagcccccgcggatgacctagacgacagtcggcggaccaccacgggcgacggccgccgtcgagaagcctcctcatcaagctcctcaagccgctcctcctcttcatcattcttgtcgctggcttcctcgccgctgccgccctcctcctcctcggctgcgctggcgcctcctacagtcggggagcgcttggcacaacatgagcgacgaggagctgctctaggtggcgtcaatggagctacgggttcggcggtttggagcgaggcacgacgacgagcgacggaatggcacaaggtaggcaccagatctatcgcctcctcttcctcttcctccgccgccgcccagctgctcgacctccccgacctccaacggagtaagggcatgttcaatgcgtagcccggcgagtggctctggctcacggtgtcgattttttcggtcggagccgtctcccagcagagggccatgacccctctgcaggggacgcgcctcctgtgttcctccgctcctttttgtcgagccacaggaccgggcttcacgttggagacaccgtggctaggggagtggctcatggacacggtcacttcccactccccagttcccagtgaacagagcaggagcagcctccactcctcctctgccactccactccccaccaccactcgcatcaccatccatccatccatctccaacccaagccgaatcacaccaatcgccatcgccatcgccatcgccgtgcgtggtcgccggtgccggcggcggagggggagggggaccaagggaaaagagagaaggtgagctgagctgagctgaggtgaagtggtgctgaggcgagtgactggggggcaatggcagcggcgtgggtgctggccgcggcggcggcgttggcgctgtgggcggcggcggcggagggggcaaggtcgccggcggcgagggtgcaccggcacctcaagaggctcaacaagccggccgtcaagagcatcgagagcccagatggagacatcatcgactgcgtgcatctctctcaccaaccagcatttgatcatcccctactcaagaaccatactctccagatgaggccggcctaccaccctgaaggcttgtatgatgatgacaagagaagcgtggcctctgacaatgccggcgagaagccgatgctccagctatggcatcaaaaggggaggtgcccggagggcaccgtcccgatcaggagaacgaagaaggatgatctgctcagagcgagctcgttgcggcggtatggcaggaaacggcataccgccgtgaacccgctgtccattgatcccaacatgctcaatgagggtggtcaccaacatgccatagcgtatgtggagggggataagtactatggtgccaaggccaccattaatgtgtgggagcccaagattcagcagcctaacgagttcagcctgtcccagctctggatcttggggggttcatttggtgaggatctcaacagcatcgaggccgggtggcaggtcagcccagacctctatggagataataacactaggctgttcacatactggactagtgatgcttaccaagcaacagggtgctacaacatattgtgctccggattcattcagatcaacagcgagatcgccatgggcgcgagcatcttccccatctcgaacatcgccggctcacagtatgatatcagtattctgatctggaaggacccaaaggaaggaaactggtggatgcagttcggcagggagtatgtcctcggctactggccgtccttcctcttctcctacctcgtcgacagtgcgtcgatggtcgagtggggcggggaggtggtgaactcggagcccgacggcacgcacacgtcgacgcagatggggagcgggcggttcccggaggaagggttcggcaaggcgagctacttcaagaacatccaggtggtggacagcagcaaccagctgaaggcccccaagggggtgggcacctacaccgagcagtccaattgctacgatgttcagaacggcaacaatggcgactggggcacctacttctactatggcggcccggggaagaactcgaattgcccatgaatttggtgatgaagaagctgatgatatatatatatttatatatatatatataatatatggtgaagtgtgcaagtgtaaccaagcattaatcatgtgtggaatacagattgatctgcatctgtttcttaatttagccctaggtagtatatgtgtatctttcctactgattttctttttcttctcttcattagttttttcttcttctttttctgatgtgccatgtaaaagtttctgaagagaagcatggcgtgaggtggtggtgcaggggtgatgatgacaattgatttgtgggtaatttgcaagtcaaaaaaaaaaaaaaaaaaaaaaaaaaaaaa

SEQ ID NO: 27922 - DNA, 345 bp, Oryza sativa
  unsure (1)..(345): unsure at all n locations
  Clone ID: PAT_MRT4530_32570C.1
ggagtcttcatatagcttgacgtttaaatgctcaagtggtatcagtcctgtggaggagcagctctataccatgaaacctgatgaagtgattgcccgatcatttgagtngcgttcaacaacagatcaagcagcaatgcatcaatgtgaagctattctgaaggcatcagactttagtgaacttgacagagaaggataccgtttctctaccgcagctacggtttataacaatggagcacagatcggtccaacgaatgaccacaagaaaggcggcttctgggattccatcaaagctttgtggcgtaacctgatcgatttcccttactggcaggaatttttttttttttn

SEQ ID NO: 27923 - DNA, 834 bp, Oryza sativa
  unsure (1)..(834): unsure at all n locations
  Clone ID: PAT_MRT4530_32571C.1
aaattattatttttttgaaaaatatttaaggagggggccctaggaccctacctggaaaccttgaaacccctttttaccttttttagggcccctccccctgccgcaaaaaaataaacaaagcttgcagggaacaggcaccctttaaaacttcccctacctatcgatcccagcggggaaagaacaagctagaaattaattgatcttggaacaatccacggaggggctgatgggaaaggggaaggaaaccccccatttgctggggaaggagggggggttgcccctgttgagggtcctgaaggaggaggccctgtttttgagggaactgcagggggggcggggggtnncccacaacaaggccttgcccttggggggccccaccccgctgcggcccgaaaacaaaggggaactttccctcccccttacgttccaaagggccgggccgatcgaacacctcccctgcccgcagtttacccgcggcgacgcccttttcgcccccccggcggcggccccccccggcccaacgcgcttgggcgaagttttgggccggggggcaaattcccttttggggggggggttaaattcgcaacctggcctacccgccccccgcgggaaatggggtttccgctccccgttgccggcgggttgagggcgggggggcgttagaggtagaaggcaggngggcccctttgtcngagagccagagcaggtcttttttaggagagggagtagctcagggaggtttttccagagggggagcncctagagagcagagaggctagagcttagagaagcnagggggagggggagaggagagagagagaaaagagaagggag

SEQ ID NO: 27924 - DNA, 395 bp, Oryza sativa
  Clone ID: PAT_MRT4530_32572C.1
gctggtcgctctcctgttctctgagggaatcctagaacaacgttctggggtggacatgtgagaaaggactccaggatagaacaccaggagcgggggctcagagctcggattcgaatccggactccctgggttggatgacctagatcgcactcgctggctgacgaagaatgaggatgcactgtgacctatgagggacactgtacttgttggtatgtgcttggattcagcgccatggaccctcatacatgagaccacgtctactttgcctacatgcacgctgcctatgggcaatcagaggctgctgcagcggcggaagcagagtaagcaacatctccaggggaaaagcagttgcggtatgatcctaactccagactacagggcccattgtttctgtc

SEQ ID NO: 27925 - DNA, 2076 bp, Oryza sativa
  Clone ID: PAT_MRT4530_32573C.1
ttgttcttctataagccaaacctgtggtggccgaatggcatgggaaagcaatccttatacaatgttgagattggtgtggatgccaatggattcggtgaatctgattcatcgaatcatcattttggattccgtaagattgagagtacaattgatggttctaccggtgggaggatcttcaaggtaaatggtgaacctgttttcatccgaggagggaactggatattgtcagatggccttcttcgattaacaaggaagcggtatatgactgacatcaagtttcatgctgatatgaactttaatatgcttcgctgttggggtggtggattagcagaaaggcctgatttttatcatttttgtgatatctatggtttgatggtttggcaggaattctggataactggagatgttgatggacgaggaattccaatatcaaatccaaatggtcctttggaccatgatctcttccttctatgtgctagagatactgtcaaattacttaggaatcatgctagcctagctctatgggttggtggaaatgaacaagtcccaccagttgacattaacaaagcactgaagaatgatctgaagttacatcctatgtttgtaagtaaccatacaacaaaaagtccaggaaaggatatatcagaagacccaactgacccaagtaaataccttgatggcactcgagtgtacgtccaaggatcaatgtgggatggttttgccaatgggaaaggcgactttactgatggtccatatgagattcaatatccagagagctttttcaaggacagtttctacaaatatgggtttaatcctgaagttgggtctgttggggttccagttgcagcaacaattagagcaacaatgccctcagaaggttggagcattccaatttttaagaagaggatcgatgggtacataaatgaagtaccaaatccaatatgggattaccacaagtacatcccctactcaaaaccagggaaagtccatgatcagattgaactgtatggccatccaagtgatctcgacgatttctgtgaaaaagcacaattggtcaattatgttcagtacagagcacttctggaaggatggacttctttcatgtggacaaagtttacaggtgttttaatttggaagacacaaaatccatggactgggctacgaggacagttctatgatcatctcctagatcaaacagctgggttttatggttgccgttgtgctgctgaaccaattcatgtacagctgaatttggatagttacttcatagaggtggtaaacactacagccgatgaacttcgggatgtggctgtcgaaatttcagcatgggatctagatggcgcgtccccatattacagagttactgagaaaatagcagtgccaccaaaaaaagtgcagcaagtcacggagatgtcatatcctaagacgaagaacccaaagcctgtatattttctacttctcaaactttttaagctgtcagacaaccaggtactctccaggaacttttactggctacatcttcctggaaaagactacaagttgttggaacagtatcgtcagaaacagataccactgaagatcaactctaagatttccatctcaggctctggatacaaggtcagaatgtccatagagaacagatcaaagaaaccagaaaacgctaacgtatcaaccatgaatctagccgatgcaaacggttccgacagaaccggagaagaagccatccaggatggacatagcagtggcctgtgggggaaaatccgcagaggcctcatcatcacaaggtcagatgacaacgtaagaacagtggaggtgaaaggggccgattcaggcgtctcgtttttcctccatttctcggtacacacatctgagccatcatccagtcaggatgtttacaaggacacaagaatcctccctgtccactactccgacaactacttctccctcgtaccgggggagaagatggccatcgacatctcgttcgaggccccccagggatccacccccagggtcattctgaaaggctggaactatcacctggaccatgcagtgacgttatagtaagagtacttcaac

SEQ ID NO: 27926 - DNA, 546 bp, Oryza sativa
  Clone ID: PAT_MRT4530_32574C.1
gttatagtcaacaatagttcattttcaggtaccgatttcctctgacctgtcattcagatacttgtatgcataagaaagctggcgtatgcatttgggtgaccgctttatagaaagttttgaattaacaatgctagttaactttatgatttgtttgcatagcaccctatgaatgctatactatattttgttcatcaatttttgaaaaatacataactagataccaacagtctaatttctaaccacaattatttatggtaatagaaatggaagaagtttccctctctttcttaaataaaaaagtccacaagcttaaataaaaattcatctatgtggtatcagcatctatcattattatgcacatgatgtttatctagcttattcttaggtttgttatgattaacaaatagtctccaaaatttcgtactgttatgcataccatttgcatgtgcacaacctgcatcactatattctgtttaataaagtgtactgtctgtacctttctgcccttttgtttatatagacataatatttactgcaggttgtatg

SEQ ID NO: 27927 - DNA, 1308 bp, Oryza sativa
  Clone ID: PAT_MRT4530_32575C.1
atgggaaggccagtggcaacgctgctggtgctgtgcttcatctctgtcacggcgcgcgccgccgcgttccgcgtgcacggccgcctcctcgccgacgccgcgacggagggaggcgccgtcgtgcccatccactggacccaggcaatgaactacgtcgcgaacttcaccatcggcacgccgccgcagccggcgtcggcggtcatcgacctcgccggggagctcgtctggacgcagtgcaagcagtgcagccgctgcttcgagcaggacacgcccctgttcgacccgaccgcgtcgaacacctaccgggcggagccgtgcggcaccccgctctgcgagtccatcccgagcgacagccgcaactgctccggcaacgtgtgcgcgtaccaggcgtccaccaatgccggggacaccggcggcaaggtcggcaccgacaccttcgccgtcgggacggccaaggcgagcctcgcgttcgggtgcgtcgtggcgagcgacatcgacaccatgggcgggccttccgggatcgtcgggctagggaggacgccgtggtcgctcgtcacccagacgggcgtcgccgcgttctcctactgcctggcgccgcacgacgccgggaggaacagcgcgctgttcctcggctcctccgcgaagctcgccggcggcggcaaggccgcctcgacgccgttcgtcaacatctccggcaacggcaatgacctgagcaactactacaaggtccaactcgaagggctgaaagccggcgacgcgatgatcccgctgccgccgagcggcagcaccgtcctgctcgacaccttctcgccgatcagcttcctcgtcgacggcgcctaccaggccgtcaagaaggcggtgacggccgccgtcggcgcaccgccgatggcgacgccggtggagccgttcgacctctgcttcccgaaatcgggggcgagcggcgcggcgccggacctcgtgttcacgttccggggcggcgccgccatgacggtgccggcgacgaactacctgctcgactacaagaacggcacggtgtgcctcgccatgctgagctcggcgcggctgaactcgacgacggagctgagcttgctgggaagcttgcagcaggagaacatccatttcctcttcgacctcgacaaggagacgctctccttcgagcctgcagactgcactaaactctcctagctaatcaatggctgctgctacttaattactttcttcatatgtatgtgtacttctgaataacgcagccttgcggcatgagctgcagcatgctcatgttggtcaaaacaatactccattcttatt

SEQ ID NO: 27928 - DNA, 273 bp, Oryza sativa
  Clone ID: PAT_MRT4530_32576C.1
atggacgtgacccggttcccggtgcaaattatcccgatccatttgtctccacatggatcgttgccattcccccagttcgatgagccgaggcggcaggccgcggcgcaagaggggaggcggcggacgacaggtggcggcggcaggtggagacggtgcggcccagcggcgggaggcggcatcggtagtgatggtcgcgccctcccctccacggcagcggtgtgcggcgggaggagcggcggccgcccagaggcgccctccctccgccagatctag

SEQ ID NO: 27929 - DNA, 1353 bp, Oryza sativa
  Clone ID: PAT_MRT4530_32577C.1
atggcccaacccgctacctcctcccggagctccggcgacttcccggccgactgggtcttcctcgacaccgtcgcgcacgccggccgctgccgccgcgacaacgcgagcaccaccaccgctcgggcgaggtcgagcgacgggcaccccatcgaggtctccttcgcgctcgccgatccgcctgcgctcacccgctggctcgtccactgccccgccggcctgacggcgggcgagttctccaggtcgccgccctccgtcgccgcctcggacggcgccttcctcctcctccgagtcgtcttcccccaccgctccgaccgatgcatggccaccgactggttcgtctacaggcagccgggcccggccggggcgccgccgccgtctctcgagctcctggtccagcgccccaacccgctcgacgtcgtgtccaggcacgccggcgtcttgtcccgtggcgaccactgcctcgtcgtcgaccccgaatggggattccacgacgacgacgacgacgacggtgatgatcgccggatgaagctccagttccacctgcatatcttctcgagcaagaccaagcggttgtcgcgaatctgggccgcggcgccatggaggcgttcgaccctttcttcttccccaccaagcatcctactgttcgactcggtccccggggactcccccgaggtgagcctgatccgtctgccgccattgatgcccatcaacaacgtggactcaggcagccccgatggaccttgcgtggatcatgtccgtgatgtcacctgcaggaatgatggctggttcaagttcatcgagatgggattcccgcacctggatcctaacgatgcgcggttgaaccgtggatgggaggccaccatgttcaagaggaggatcatccgttcagatgatgattgttattggcaatgggagccgtgcggcactgtcgactctgctagcctcctcttgcctgcagccgactcgtgtgttcctgattgcttgtttcctgagatctttgactacgaggagcgcaagcttgccctgaacaatgttttgagctcattccccacattggatctgtaccgtgacgatgttgtttacatgatgaccaagatcaaggatgatgatccagacggttggatcattgctgtcaacactgagagcaagaggctggagggaatatcgcccttttcgcaagaaagttatcatctccatcgcatctaccagcaatgtgacttctccaagcacctgatcaacaaggctctagggactcacttggccaaggatatggataaattaatggaccaacagcctcctgaacttgctaccgttgagcgtgcggcatgcagggaggaggatgatgtcagttga

SEQ ID NO: 27930 - DNA, 216 bp, Oryza sativa
  Clone ID: PAT_MRT4530_32578C.1
atggtgcccggcagtgagcctcgatccacgttgatctcgtcgccctccgcctacgagctcattagtggatgcagtccggtttgcaagagaggcgggaccaccggggaggggagaggagtgccgccggtgaagatattgaagtgggagagaggtggagaagaggggagattgagcaagaatgcaagatggataaggataagaaaagtgagaggctga

SEQ ID NO: 27931 - DNA, 462 bp, Oryza sativa
  Clone ID: PAT_MRT4530_32579C.1
atggtgagaaccgggtctatgctcagggtggagcagaggtctagtgcggtcgggataccatgtgagcaggtgactagagtcaggattcttggaggtcaacttcggttaacggtggggatcgggactaggctcagggaggagttgaggtccagacggtcaaggataccgagtgaggaagttggatacgagatggcatacagtggatggacatcgtgggggagagatcttcgtaacggtcttcacgagcatgcaggacatgcgcaggtgcagctagttggttgggctggaggcttcggttggctggcaagccgagtcggcccaggcagcagagagcggctcggtggcagttggctggagaccgagctggagacaggggcctacgtgggctggagatcaaatgcagagtccgatatggatggggataggattctggctcgtatgattttggtaacgtggaattga

SEQ ID NO: 27932 - DNA, 350 bp, Oryza sativa
  Clone ID: PAT_MRT4530_3257C.1
cctcttgcattaggacacatccaagtccgtggcgggatgcatcgcaatagacttggaagtctttcatctgatcgggcagaatcaaaactgcaactgagtcatgggtcgggcgatcctggagaagttttcgatgaatcggcggtaatatcccgcaagtccaagaaaactttgaatctgcgacacggtcttcggtggggtccatttgataagtatgtcgtcgatgaataccacaacaagcttgtccagaaattccatgaacactttgttcatcagattcatgaagaatgcagcccgtaccgagtggtgaaggccgtctttggaatatcctcttcccggattatcaactggtg

SEQ ID NO: 27933 - DNA, 342 bp, Oryza sativa
  Clone ID: PAT_MRT4530_32580C.1
ggctggacctatagatggccaaaaggcccgcccagcacggctgggcacggtccaccagccatcaggccggcacggcccgatcggcacttcgtgtcgggccgtgccggcccatgggctgcactttgtgtatcggggttggctgccggcccatcgtgccgggccggcctggtcgtgctgggccagcccaacgtgccgttggaggggcccaggcacggctcggtggtcgggccgggccgacacgggcccgacctccgtcgggccgtgccgtgcttgggccaggccaaaatgccgtgccatgggctgagccgtcgggcctcgagccttttggccatctatagctgg

SEQ ID NO: 27934 - DNA, 881 bp, Oryza sativa
  Clone ID: PAT_MRT4530_32581C.1
gggaggcggagcgaatcggcggatcggtgggttgcgggcttgcacgtagtcgaggctcgagaggagggggggatggcggcggcggcggcggcggcggggtacagggcggaggaggagtacgactacctgttcaaggtggtgctgatcggggacagcggcgtggggaagtcgaacctgctgtcgcggttcgcgcgggacgagttcagcctggagaccaggtccaccatcggcgtcgagttcgccaccaagaccgtccgcgtcgacgacaggctcgtcaaggcccagatctgggacaccgccggccaagagaggtaccgcgccatcacgagcgcctactaccgcggcgcggtgggcgcgctggtggtgtacgacgtgacgcgccgcatcacgttcgagaacgcggagcggtggctcaaggagctccgcgaccacacggacgccaacatcgtcgtcatgctcgtgggcaacaaggccgacctgcgccacctccgcgccgtccccgcggaggacgccagggcgttcgccgaggcgcacgggaccttctccatggagacgtcggcgctggaggccaccaacgtggagggcgccttcaccgaggtgctcgcgcagatctaccgcgtcgtcagccggaacgcgctcgacatcggcgacgaccccgccgcgccgccccgggggcggaccatcgacgtcagcgccaaggatgacgccgtcacccccgtgaacagctcagggtgctgctcgtcttgactttgactcgctcaaactcatcgtcgtcgagctatgcaaattgccaccgttcacagctttgtttataccgtgtgttttcgtcactgctgattgatactacaaacttgagaattgggatcaaaaggttgcctttt

SEQ ID NO: 27935 - DNA, 227 bp, Oryza sativa
  Clone ID: PAT_MRT4530_32582C.1
gctgtgacgagcacacgcgtgcgcacacacatccgggtatgaagtgatggtggagtacatgtaaatggttgcgaacactgcctatgtggaagagctcactggagtggaacgcaacctcttggctgctgctgacaagaatgttaatgcagcccacagagcgtgctggcgtattgccttatccatcgtacaaactgaggaagggcgtgccaatgaagaacatgttactc

SEQ ID NO: 27936 - DNA, 334 bp, Oryza sativa
  Clone ID: PAT_MRT4530_32583C.1
acccaaaaagacaatttgttttatttttccggggggaatttacccaaacatggggctggtacattttcataggtatggcgcctgacaaaaaaacaaaatcaagcttttgacagccctattccccctttgtccctgactgcaatgaatggaataaaatgaaaatttccctgtttgccaccttggaaccctttggaagaactactttccctggtccatttcagggcactatcgggaaacccctctacaattacaacggaagaagggactttctcatgaaaattggaagatccgttggtcaccgaaaggaccatatcccccacctctggcaatggga

SEQ ID NO: 27937 - DNA, 1808 bp, Oryza sativa
  Clone ID: PAT_MRT4530_32584C.1
gggctgcaggaatcggcacgagggtctagtgagttacctcgttttccgtgcagaagagaggtttttagcgtggagcaacaaaaagagttcgtcacgtccatttttggttaaaatgtgacagcggctctatacgacaaagttagctttacatgtatcccacaatattgtagtattcttttatgttactttactatattattgctactcaattattatcgcagattctatgcgctacgtctttttatttttctttttctccaaagtactttcttttactgcatcgtttataacacttgttataactttccctctgttttttataaaaatataataacatttttattgtctacgtatgtatacaaagttatatctagatacatagtagaatatttaatttatttgtttattttttaaaatatttaatttattgctagtagtaataataattgagttctacgctaaatccagtaagtcctcgacttataagaaacaagaccacatcaaattgagtcctcttttttttttgagaggaaaagaactttccattaacttaaggactcagcaaaatcgctggccaccaagtcctccatgcccggaggcatactgtcccattgttcaacagtattccgaggacatttacaacccaaagctgctaaagcatgcgctactctattacattctcgtggcgcaaaaacaaaggaacaagaaaggaaactacttccgatcagcttcttcaattcataaatcaagccacccgttgctgcaagtctgtgatcatcggcatccatagcttgcttcaagataatggaatcagtttcaaaaacgacatggcccattcctagtgcattcgcggcccttgctccggccaagcacgcaacaacttccgcctggaaagcatccaacagataagatattctaccagcacttgacaggataacctctccctccgaatcccgaattacaaaaccccatcctccttccccttgtgaatcgttgtggactctttgttgcttgccacaagttgagaaatcctccccgactgccgtggggacaacaaaacgtgtctcgcagacaaaacacaacgaccctcctcccccgcgctctctgccaagcccaagggtagcacgagggctcctcccgccggagaagacgacgacagcatagcacccctgctgatgcgtcgccgccaccttctctccttccctatatgctccttctctctcctcaccgataggggaaagctccttctctctcactttctcccgtgcgtggcggagaaagaaaatggaaagggggatattactgtttttcgaactgtagcggaaataatgggctgaaaatatgtgacgcgaggcgagggtcccgctgctgcttggttgctgggcttttagggcatgcaattgcttgggctggagcacaattccttggcccgccatctttctgtgacctatttgattttggctgtgatgtacgagcagaccatggacattcggcattctattgaatgctgcagaaactttctgccacccacttggcagtgccccgatctgttctgcgtccgctgacggcgtgaacgcgggcgagtttggtctacggctaggtgcaccgataatagttacatggaatatgtagattctcattgcccctggttgctgacagtctaactccttaacattcatattcattctcatcttgaggttggtcatttctaactccttaacattcatattcattctcatcttgaggttggtcattttgtttgctctgtacctatgagatttccccttgcgctgtgaaacatatgccat

SEQ ID NO: 27938 - DNA, 424 bp, Oryza sativa
  Clone ID: PAT_MRT4530_32585C.1
cctcgcaggtgccgttgaccccttccggctagccggcgaggcgggcggcggcgcggtggggtggtggcggcggggatcgcgcgaggacggggtggcggcggcgtgcgatatgaatcggtggggaggaggagaggagaaagtcgacggccatcgcacaccatcagcccagccatcgacgaccatcgtccactgccctcgcctgaccgtggtcagaacggggcactggagctcacctaagtcgtcggtgcctctaggacgtggagggctagatccctccactgttgttatcgccggtggcagagccgtcactgcccaacaccaccaccagcgcgctccctaccgcctagcaggttgccagcgtgcgctgccgctgccaccaccgcctggccggctgccagcatgtgccgtcaatgagaacatataa

SEQ ID NO: 27939 - DNA, 571 bp, Oryza sativa
  Clone ID: PAT_MRT4530_32586C.1
ggggggggaaaataaaagggtaaggggacccaaaaacgggggggaaaaaaaaaaatttgaccaaaaaaatttaacccccaaccaagtttttttttttggggggcaaaaagctagggaataaaaaacctttttgggggccaaaggggaaccaatccctttttggcgcagggaaaaaaaatcgatttgaagcccaaaagggaaaaaaaaaaataaagggcatctaaaggaaaaagggctgaaaaaaaggggtttggagggattaaaaggcatttggaaaggggaggtcccgggatttttgggacaggcatcccccttttgagggggggaaaccaagcttccgggggcaggggggaaatttggaaaaacggggcctttctcccctaaaaaaccattgccttcaaaaaattttgggcttggggaagggggagggggaccctggtttttggccaaaaaagaagggggggggggaaatttgccggggggaaattttgggggaaaaaaaagggggtggcattttgggggtggggggagacgcgccatagggtgggggggatgccacgggggaagggct

SEQ ID NO: 27940 - DNA, 768 bp, Oryza sativa
  Clone ID: PAT_MRT4530_32587C.1
atgcatacatctccaatcagaaagaggaggttgtctcccaaccaaaggaagaaggaggaggaaggaaggaaggaaaagaaggtctccgttcgacaggagctcatgagctgcgtcgacatggtctctgggaactatgcgttgacgcactatgttgatatgctaaacaacgttgcaagctgcagtagcactcgatgtgcctctgttaacgtcaaaatttgcagatttttcgtcaatagccttgtgaggttgtccaacgcccgctcgtcagtctatggcagaggaggacgaagcaccgcaatcgacatggatgtagggccaccgtggtgtcggggaggagagcagactggcggggcggtggcgagcgccgcccatcaccgccccgatgatattaaaaatgggcaacggctgatggcgtggaggctggcggcggcacagaggtggcggctaccggcgggaggcggagggtgcatgggcggtgacgtctcccctccctcctcccagatccggttgaggcagcggcggtgcagaggtggcggctaccggcgcgaggcggagggtgcatgggcagtggcatctcccctccctcctcctagatctagtggaggcggcgcacagaggacagtgacggtggagggcggcgccggtgaggaggtggcggctactgacgggggcgaagggttcatgggcggcagcgtctccccacccctcctagacctggtggaggcggcgtcggtgggcagcggcgacctcgcctccggatctggctag

SEQ ID NO: 27941 - DNA, 335 bp, Oryza sativa
  Clone ID: PAT_MRT4530_32588C.1
ttttgtgtcagatttcttcaaccagtggctcagtatattttctcaaaaaattacaaaatacagtaggaagggtttattgaagcagcaaagaagaactacaggccgcccacattctccgcctatgcccaaaacttaaacttaggtctggtttagttcccaattttttcttcaaacttttaacttttccatcacattaaacttttctacacacacaaacttccaacttttccgtcacattggttcaatttcaatcaaacttctaattttagcgtgaactaaacacacctttaagcataatttataattcaatttttaataaaaacattaccacttat

SEQ ID NO: 27942 - DNA, 225 bp, Oryza sativa
  unsure (1)..(225): unsure at all n locations
  Clone ID: PAT_MRT4530_32589C.1
tgatttttgtctgtagtgaatatnattcaaacaagggggggaaggatacaatccaaggggggttgaagatacaagcacatatatgggcaggattctggtaattaaacaatacaaaaagtgaattccttgcgtttcagacgctaaacctgtgccgctgtttaacaactaagtcaccgaaattggactgggcaagctcaccatcgattgaggaaaaagggtgaggag

SEQ ID NO: 27943 - DNA, 505 bp, Oryza sativa
  Clone ID: PAT_MRT4530_3258C.1
ctaaccaataaactccacaaccttttatgggccccccgaacttttgttttgaatccgccatgaataacccaagcacgcggaacgggggaccaaccaaattttttttgcccctccccacccccgggggaagggggggggggggggaacttgagccagccaaggacgtcgccaaaaaccttgggaaagttttcctggggctcgccgaccagtgggggccaaatccccgggaacacccgaagggttttgtctttgctcccgggggggggggggagctcctccgggcacccgggggcgaacacggggtcctcgccgccggggacaaccagaagcggaagttccacctcctaaaaccggaacgggagttgggggcacacccggaggagttccagccccggggtgggccgggggggccccgggggggggggggggcttcccaccggcagggcgggtgttccgggccccttgaaggaacggggggggaatgttccccggggtgaaggggaac

SEQ ID NO: 27944 - DNA, 1828 bp, Oryza sativa
  Clone ID: PAT_MRT4530_32590C.1
atctctcgacaaaacccacacacctccgcgcagcgcagcctcccacacacgcgcactcgattccccactcctctcgcgggtcgcggccacttcgccgccggcgctcgcatcggtcaactcgacgccacggccacacacgcaccggccatggccgcggcggcggagcagcagcagcagcagcagcagcagggcttccgcccgctcgacgaggcgtccctggtggcctacatcaaggccacgcccgccctcgccgcgcgcctcggcggcagcctcgacgccctcaccatcaaggaggtcggcgacggcaacctcaacttcgtctacatcgtcctctccgacgccggctccgtcgtcatcaagcaggcgctgccgtacatccgctgcgtgggggattcgtggccgatgacgagggagcgcgcctacttcgaggcctccgcgctgcagaagcaccgcggcctctgcccggaccatgtccccgaggtctaccacttcgaccgggccatgtcgctgatcgggatgcgctacatcgagccgccgcacatcatcctccgcaagggcctcatcgctggcgtcgagtacccgctgctcgccgagcacatggcggattacatggccaagacgctcttcttcacctcccttctctacaactccaccactgatcacaagaaaggagttgctcagtactgcgataatgtggagatgtgtaggctcacagagcaagtcgtgttctcagacccatacatgctcgccaaatacaatcgttgcacatcacccttcctagataatgatgctgcagcggttcgagaggatgctgagcttaaattggagattgctgaattgaaatcaatgtttattgagagagcacaggctcttcttcatggagatctccacactggttccatcatggtgacaccagattctactcaagtgattgatccagaatttgctttctatggcccaatgggttacgacattggggccttcctggggaacttgattttggcatatttttcacaagatggacacgctgatcaagcaaatgatcgtaaggcttacaagaaatggatcttgaagacaattgaagattcatggaatttgttccacaagaagtttgtcgaattatggaataaacacaaagatgggaatggggaagcatacctgccccctatatacaacagctcagagcttttgtgccttgcacagaagaagtacatgacaagcctatttcatgacagtcttggatttggttcagcaaaaatgatcaggagaattgttggaattgctcatgttgaggattttgagtcgattgaggatgccagcaagagagcttcgtgtgagcgacgtgcccttaattgtgcaaaggcaatcctgaagggaagacgccagtttgaaagcatcgggcaagtgattgtgcatgtacaatcgtttgatcgggactgataatgccaaccatctacacgacctttctgattgaggagacaaaagttttcatctgtttaccataagcgattatctgtgcctattacaaagcagaattggccagttatttgtgcttttagtactttggatcatgaaaagtgtgtgcactctgcaagatcgatgttttttttcaccacttggctaagccttccaccagcttccgggcttcttagtttatgagctgaataatggaagttcagcacaaacgtttgtccatggatatggacgagtgtgttattacaaataaagttgatagttttcggcaaatagattgttgttgttttatttcaaaaaaatgtaacccccttttgatccctgcatcacttaggctgcgttcaaccgccggaaa

SEQ ID NO: 27945 - DNA, 675 bp, Oryza sativa
  Clone ID: PAT_MRT4530_32591C.1
atggccgcggcggcggagcagcagcagcagcagcagcagcagggcttccgcccgctcgacgaggcgtccctggtggcctacatcaaggccacgcccgccctcgccgcgcgcctcggcggcagcctcgacgccctcaccatcaaggaggtcggcgacggcaacctcaacttcgtctacatcgtcctctccgacgccggctccgtcgtcatcaagcaggtccctatctcctccacgcgccgccgccgcgccacacatgtacgcatcttctctctccgttcctccgctgacgacgctgcaatccaggcgctgccgtacatccgctgcgtgggggattcgtggccgatgacgagggagcgcgcctacttcgaggcctccgcgctgcagaagcaccgcggcctctgcccggaccatgtccccgaggtctaccacttcgaccgggccatgtcgctgatcgggatgcgctacatcgagccgccgcacatcatcctccgcaagggcctcatcgctggcgtcgagtacccgctgctcgccgagcacatggcggattacatggccaagacgctcttcttcacctcccttctctacaactccaccactgatcacaagaaaggaggtttattgagagagcacaagcttttcttcatggagatctccacactagttccatcatggtga

SEQ ID NO: 27946 - DNA, 420 bp, Oryza sativa
  Clone ID: PAT_MRT4530_32592C.1
atggcgtcgaagctggtgggggaagacggcgatggcggcgacgaggacggcggggacgatcgatggtggcggcagtgggggagcgatctggtggaggacggcgtgggcggcggggaggatcgatggcggcggtggcgcgggacggtgggggaggacggtgggacggcggggaggatcagctggtcgaggaggacggcgagggcgagcgggcgagaggaagggtggcgagaatgcggcgaaaagcgagcgggcgcgcggaagccggaaggccagggcgtactgggtagttggagcacgattggagcgcgatggtgcgggcggataggagcgtctggagcgtcgatttggtgcgaggatcctagaaaacatgtcagccgttcgattgtccaggactcaccaccaccactaggaactttttaa

SEQ ID NO: 27947 - DNA, 3797 bp, Oryza sativa
  Clone ID: PAT_MRT4530_32593C.1
ctcgcccctcgcccctcgcttgaacgcttagagatacagtttttgcccgcgctagttgatccctcctgcattcgcaccatggtggaggctgcctcggctgcgccggcgacggtggtcgttccgctgacgcagacgctctgcgcgaatgcgcctgcgacgagcgtcaccgtcgtttcgaagcagaccgttcggcccgacggcgcgtcggcggttggagacgtcaagctctcggtctccgacatgccgatgctgtcgtgccactacatccagaaggggctcttcttcccgccccctggcgtgccgatcgcctccctcgtgtcgtcgctcgtgtgcgcgctctcccgggcgctcgcggtgttccctgccctcgccggccggctcgtcacgctggatgatggccgcatcgtcatccggtgcgacggcgtggccgttgagttctaccacgcggtcgcgcccgctctgtcgctgggagacttcctcgtgcccaacgccgacgtgccgaccaggctgacgaaggatttgttccccatggaccgcaccgtgagctacgacggccaccgccgtccgctcacctcgttccagctcaccgtgctcggcgatggagctgtcttcgtcggcttcgtcgctaaccacgccgtcgtggacggcacctccttctggcacttctttaacacgtgggcaggtctctgccgcggcacgccggtccagccgccggacttgcgccggaacttctttggcgactccacggccgtcatccgcttccccggtggcgcgggtcctgccgtcaccttcgacgccgacgcgcccctccgcgagcgagtcctccatttcagcgccgccgccattcgcgagctgaaggccaaggccaaccagtggaaaagatccgacaaatttgccgaggctaacgggaagcatgtggatgaaacgaaggctcatggcggttacagagagatctcgtcgttccaatcgctgtgcgcgcatatctggagggcggtgacgcgatcccggcggctgctggcggccgacgcgaccacgacgttccgcatggcggtgaactgccggcaccgcctgcgcccggcgatctccccgctctacttcggcaacgccatccagagcgtagccacaaccgcgacggtggccgagctggcgtccaacgacctgcggtgggcggcggccaggctgaacgcgaccgtggtggcgcacgaggacggcgccatccgccgggccgcggcggagtgggaggccgcgccgcggtgcttcccgctgggcaaccccgacggcgcggcgctcacgatggggagctcgccccggttccctatgtacgacggcaacgacttcgggtggggcagggcgatcgccgtgcggagcgggcgcgccaacaagttcgacggcaagatgtcggcgttcccgagccaggctggggacggcagcgtcgacgtcgagttttgcctcgcgcccgacaccatggcccgcctgctcggtgaccacgagttcttgcattgccagaagaagatcacaataggggatcttgtcattagacacagcaggagtaaagagatgtcagctgagcttttgcgagcacgtattctggggttagattttactgtatgttggagagctatggatactcccaccaaatcgacgctccagacgcccctatccgcccacaccgtcgcgctccaactacccactacgcggctacgcgctgcatccgcgtctctccgcccttccggcttccgcgcgcccgctcgcttttcgccgcattctcgccgccctccctctcgcccgctcgccctcgccgtcctcctcgaccagctgatcctccccgccgtcccaccgtcctcccccaccgtcccgcgccaccgccgccatcgatcctccccgccgcccacgccgtcctccaccagatcgctcccccactgccgccaccatcgatcgtccccgccgtcctcgtcgccgccatcgccgtcttcccccaccagcttcgacgccatcgatcctccccgccgccctctctttcatcctccaccagctccctcccccaccgtcaccgtgattcccctaaacgatcagcgccaccgcctccatcgatcctccccgccgccctcgccgttctcctccaccaggtccctcccgcaccgccgccaccgccgcaaacgccgcccacgatctccgccccgacgaccggctccgcgctgccactcgtcccgatcccctctcgtcctcctccgcatcgcccccaatctctcctcgatcgtctcccgccaccaccaccgccaccgttaccaccgatctcagccgagcgctactgttccctttgccggaagctccaccaccgccccgcgcagatcgacgtgctgttgtccccggccctcaagctccatcgccacccatccgctgcaagctctgccgccagctggccgtccgcctcgccgaccgcctcggcgccgcgagccccggccgcaacctggccttctcgccgctctccgtccacgcagcgctctccctcgccgccgccggcgcggccggcggcaccctcgacgagatcctcgccgtgctcggcgcggcgtcgcgcgatgacctggcggcgttcgtcggccgcacggccgagacggcgctcgccgacaggggcccggagtccctcgggccgcgcgtcgtgttcgcgcccggcgtctggtgcgacgccgcgcgcccgttcaagcccgcctaccgcgccgccgtcgccgccgagtacaacgccgaggccaccgtcgtcgacttcaagaacaaggttggttatagcatactcatcgatgcatttattcttttacttgatccatccatgatcgatcaatgtgttcttgatttggtttctgagaaggcagaggaagcgaggaagcagatcaacgcgtgggcgcggcgggcgacggggaagctcatcaccgacgtcctaccgccgagatccgtcggcccggagaccgccgtcgtgctcggcaacgccatctacttcaagggcaagtgggatcgtcccttcaatgagagcgacacggagaggaagccgttctaccgccacgacggcgccgccgccgccgccgccgtcgccgacgtgccctacatgtcgagccgttcctaccagcgcgtcgccgtgcacgacggcttcaaggtgctcaagctccgctaccgatcgccgcgactcctccgcgacaagcgcaagcgcggcggcggcggcgatgtcggcggcgagttcacgcggtacgccatggccatcttcctccccgacgcgcgcgacgggctgcgcggcctcgtggagaggatggcgtcgcggccggggttcctgcacgagcacatgccggcggcgtggccagtgcccgtcggcgagtttcgggtgcccaagttcaaggtgtcatgcggcggcagcgtcgtcggcgccctcgagcagctgggcctccggctgccgttttcgccggagctcgccgacctgtccgacatggtggaggacgacggctccggctggccgttgttcgtcggcgacatccagcacaaggcggtgatcgaggtgaacgaggaaggaaccgtggctgccgccgccaccatgacaaggatgcttccttccggtgtgccgccgccgccggtggacttcgtcgccgaacatccgttcgcctacttcatagtggaggagatgtcaagtgcggtcgtcttcgccggacacatcgtcgacccgtcgatggaatgaaatatgatgtaaattttcatgtgaaattggtcaaaaacacagtagaaggatacgcttccaaacgatgaacaatgatggataatta

SEQ ID NO: 27948 - DNA, 312 bp, Oryza sativa
  Clone ID: PAT_MRT4530_32594C.1
tgcgagcgcaagagacacacagcccagaagcatcacgcggcatctgcttctagtcctagactcgagacaatggcgccgtccaccatggcactctgctcccctgccgccctgcccggacaggcggcctccaatgccaaggtggccggagagggctcgctaacaatgcgcacgccggcggccaaacccaagaccccccctacgtggaggagcccgttccaccgtgccgaccgcctgctctacctgtgcccgcactgcggctgagccggcggctacctcatcccacgagataccctgcgactacggctgggacac

SEQ ID NO: 27949 - DNA, 1271 bp, Oryza sativa
  Clone ID: PAT_MRT4530_32595C.1
gactcgtggccggattgaccgtcggcgccgtctcgttcgtggtggttcttggtgtctcaatctggctcctcttgcaccgccggcggaagcacgccggcctaacgatggagcaggagatggacgagggtgacttcttcgacgatgaggccggtgactttgagaaggggactggacccaaacggttccgctacggcgagctcgccatcgccaccgacgacttctccgacgagcacaagctcggggaaggcgggttcgggtcagtttacagagggttcttgaaagaattgaaccttgacgtcgccattaaaagagtgtccaagagctcaaagcaggggaggaaggagtacgcgtcggaggtgcggatcatcagccgcctccgccaccgcaacctggtgcagctcatcggctggtgccatggcggcggcgagctcctcctcgtctacgagctcatgcccaacgccagcctcgacacccacctatacggggggggggggggagttttgagtgcaaattccagcgccggcgtgctcccatggccactcaggcacgagatcgtgctcgggatcggctcggctctgctgtacctgcacgaggagtgggagcagtgcgtggtgcaccgcgacatcaagccaagcaacatcatgctcgacgccgccttcaacgctaagctcggcgacttcggcctcgccaggcttgtcgaccacggccggggaccacacaccacggtgctcgccggcacgatggggtacatggacccggagtgcatgatcaccggcagggccaacgccgagtccgacgcgtacagctttggcgtcctcctccttgagatcgcctgtggccggcgaccgataatggcggaccaccaatccgaggtagacgaagaccggatccaccttgctcaatgggtctgggatttgtacggcaatgggaggattcttgacgctgctgaccggcggctcaccggcgagttcgacggtggcgagatggagcgtgtcatggttgtcgggctctggtgcgcgcaccctgaccggagcgtgaggccggtgatcaggcaggccatcagcgtgctgaggggtgaggcgccgccgccgagcctcccggcgaggatgccggtggcgacgttcctgccaccgattgatgcttttggctacacgtcatctttggctgtgacagggagcagcagcgtagtgggaaaggataggaaggacatatcgtgtggggggagagatcgagagagagtgagtggaataaacgagacactgctgctgctg

SEQ ID NO: 27950 - DNA, 268 bp, Oryza sativa
  Clone ID: PAT_MRT4530_32596C.1
atgataaagataaacaaaaacacataccttcatgatctccatgttctcaaagtaaaggagactatcaacaagggcgggaggggaggcgcgacgacagacgacggatctggagccgtggtgcagtggcggctgaggcccgacggcggcagtgcagcagaggagtgcctctttgagatcctccgccgtctccccggccgctgcgagcgcggcgcctccacctgcgtctcccgtcgctggtccatcatggaggatgacgaactgtcggcca

SEQ ID NO: 27951 - DNA, 1151 bp, Oryza sativa
  Clone ID: PAT_MRT4530_32597C.1
ggaagcgcgccggcgaggcgagggagctggagatggacgagggcgacttcttcgacgatgaggccgatgactttgagaaggggactggtcccaaacggttccactacggcgagctcgccatcgccaccgacgacttctccgacgagcacaagctcggtgaaggcgggttcgggtcagtgtacagaggattcttgaaagagttgaaccttgacgtcgccattaagagagtgtccaagagctcgaagcaggggaggaaggagtacgcgtcggaggtgcggatcatcagccgcctccgccaccgcaacctggtgcagctcatcggctggtgccacggcggcggcgagctcctcctcgtctacgagctcatgcccaacgccagcctcgacacccacctctacagcgccaacgccggcgtgctcccatggccactcaggcacgagatcgtgctcggcatcggctcggcgctgctgtacctgcacgaggagtgggagcagtgtgtggtgcaccgcgacatcaagccgagcaacatcatgctcgacgccgccttcaacgccaagctcggcgacttcggcctcgccaggctcgtcgaccatggccggggctcacacaccacggtgctcgccggcaccatggggtacatggacccggagtgcatgatcaccggcagggcgaacgccgagtccgacgtgtacagcttcggggtcgtcctacttgagatcgcctgcggccggcgaccgataatggcggaccaccaatccgaggtagacgaagaccggatccacattgctcagtgggtctgggatttatacggcaatgggaggattcttgacgccactgaccggcggctcaacggcgagttcgacggcggggagatggaggctgtcatggtcgtcgggctctggtgcgcgcaccctgaccggagcctgcggccaacgatcaggcaggccgtcggcgtgctgaggggcgaggcgccgccgccgagcctcccggcgaggatgccggtggcgacgttcctgccgccggttgatgctttcaaccacacatcatcttcaggcgccgcggagggagacggcggcggcggcagcggcccgggagaggagggtggccgccatggatagggttttggggggttctagaaggttcgcgaaggg

SEQ ID NO: 27952 - DNA, 339 bp, Oryza sativa
  Clone ID: PAT_MRT4530_32598C.1
atggctccaaactccaaggcgcaaagagttcagtttgcacatgttcttcagaacactaggttaaataatgcttggaatgtactgctggaccttaagcatgggattacctcaattttaaagaaagtttctacgtgtggtgcattgttaagctcttccattgtaaacagaacttgtgaactcatgagcaatggtaccattaaggccagtggcggagccagaaattatataagactagggctaagctatccaaatgaacaatatgaaaataaggcagtttacagtttgatggtctttgctgcggattttacagtctgtatccagttctttttctgcaaatag

SEQ ID NO: 27953 - DNA, 822 bp, Oryza sativa
  Clone ID: PAT_MRT4530_32599C.1
atgcgccgcctccgcctcgccgccgccgccgccgcgccacacggcgtcctcctcctcctcctcatcctcctgccgctcgtggccgcggccgggccggcggcggccaaggcgcccgcggccccgccggctccgcccaacgtgacgacggcgatggcgaagggcgggtgcaaggccttcgccgacctgatcgcggcgtcgcccgacgcgtcctccacgtaccagtccgccgccggcggcggcatcaccgtgttctgccccaccgacgacgccgtcagggcgttcctgcccaggtacaagaacctcaccgccgacggcaaggccgagctgctcctgttccacgccgtgcccgtgtactactcccgcggcagcctcaagtccaacaatggcgtcatgaacaccctcgccaccgacggcgccgccaagaactacaacttcacggtgcagaacgagggcgacgccgtcaccatcaagaccgccgcctccggggacgccgcgcgggtcaagtccacggtggtggacgccgaccccgtcgccatcttcaccgtcgacgcggtgatcgagccggtggagctgttcaagccggcgccgtcgccgacgcccgcgccgtcgcccgctccggcggcggacgctcccaaggccagtaagcccgcgcaccacccggcgcccgtcgtggcggacgctcccggccccgccgccaccgactcgcctccggcggaccagaagaaggaggccaagaagagcgcggcggccggcgcgccgccgtgcgtccggtggttcgccgcggcgttggccgccgtcgccatggcctccacattggcctag

SEQ ID NO: 27954 - DNA, 349 bp, Oryza sativa
  Clone ID: PAT_MRT4530_3259C.1
ccccggagcggagtgacacgaagatacacgtaatcccctgcctcaaaattgacgctcgcctgtctgatcccagaagaggggtgtgcggcacttccggccgtataaagcttcaaacgacacatgattctcgagaggtagagctccgccaaccttttgcccgtatacgtggtatgtactggtatgaagtgagcaaccttaagtgcgacgaattcagctatttctctcctcatgctgacccaccaaaacttttctttgaggtcttgatacattttggtgctgcctggatggatggagtactgggtctgatgagcctcggtgagtatcagatccttcagttccttgtcgtcag

SEQ ID NO: 27955 - DNA, 508 bp, Oryza sativa
  unsure (1)..(508): unsure at all n locations
  Clone ID: PAT_MRT4530_325C.1
gtttgttcctttttttttttcctcatgtattggggcttttttaacaagaatttggtgtttctgatcttcattccggtaagtgttgccgcaccaacattttatttacatgttttttcttgcagcaaatctgttttgtatggatattgctgtaattggaagaacaaataactgaaggtagtctgtagatgtttgtttggaaaagcgtttccctactcgatgggtgtatatcatctaagtagttagaaacaataacaatatagattgatttgtatcactccataaacattgcacattcaaattcgattgctataagttgaacaaagtatttgtatacaagttttaatttaattttttgtttttttataactggtttttacaacttatacaagtcgaatttcaacatgcatacttatggattgatatatctcatactaatctatttttttggtacttttttatttatttataactatttaagttacatgcgatctatgagtaactgngtcat

SEQ ID NO: 27956 - DNA, 460 bp, Oryza sativa
  Clone ID: PAT_MRT4530_32600C.1
caaggggaggcagcatggcaggggaccaaaacagcccaccgaaacatggacaacgaacgggggagggccaaaggccaaacaaattttattacagaggcgacccacagggggagtcggggggtcaacacgggccctagcctaaaggcaaaaaaagagccccacgggcaaggtcctagcagaagaaaacaaaaaccctttaaagcatcagcaaaccccagttgggaaagctggggggggcccccctggaagcctaaaaaaaaagccttctaatcggaagaaaatttctcaacaagggggcggaaggcagggccactcaacagggcttggccactaggaagcgaaaaaaggccctcctggccaccactaaaaagctccggaaagaaaaagtggccaaacggcaaagggtttttgggccaaggcccctaaaaaccaaatttttccttggggcactttcccaggg

SEQ ID NO: 27957 - DNA, 225 bp, Oryza sativa
  Clone ID: PAT_MRT4530_32601C.1
atggcgaaagtgtacgctacctacgaagaagctgcaaggtctagtagctacacttactataagatccgggtggccatctccaccgaaagtgttcctcagctagtgaaaaaggccctggggttcggcaccctatgctgggatggatcatttgttaaggactctgctccaagtcaagatgtgacactgctgttgcctcgtcattcgtcggtgtggcgagccaattaa

SEQ ID NO: 27958 - DNA, 287 bp, Oryza sativa
  Clone ID: PAT_MRT4530_32602C.1
gcacgaggcaacattttacgcagcgtaggtgatcggccgttgctctcttccgattccaaatttccaattcaattcttccacctgatcgaatacctgatacagctacagctagagtacacacaacttcccccatctctcgtttcgtttcgtttcgaatacctgattctgccaatgatgatcgggctgggcatggtcgcagctgccgtcgcggccaccaccgtcttcaacgccaccggcgccgcaccaccgccggtgggggtcgtggtgcttctctgtgccgcgttcca

SEQ ID NO: 27959 - DNA, 722 bp, Oryza sativa
  Clone ID: PAT_MRT4530_32603C.1
tcggttaatcatagataactaatcaaattcatgcgtgcaagcagcgatcaaaggagtggatgatgaataaggccgataagctaaaacaagctgtccgtacactgtttaggacctgtaatgacatggtggacaagatgcacttagtagacgctgtccaacgtcttggaattgatcacctttttcaagaagagataagcagcacactaagcgatatcaatggaagtcaatttgctagcaatagcctccatgaggttgctcttcgctttcgtttgcttagggagaatggcttttgggtatcaccagatgtgttcaaaatatttaaaggtgaggatggaaggttcaccgatgcaatatctaatgaaccaaggggattactaagtttatacaatggcgcacacctcctcgtccatgatgagacagaactcgtagaagccatctctttttcaagggaccatcttcaatcaatatgtgattcaagtgagctcaagccccctctagctgatcaagtgaaacgtgccctagacttaccattaccaagggcatacaagagaatggaagcattgcattatatgttcgagtatggacaggaggaaggccatattgtggtccttctggatctcgcaaagctggagttcaacctcttgcagcatgtccatttgaaagagctgaaatccttttctcagtacgcatctttccttgacatatacacatatacaaagtaa

SEQ ID NO: 27960 - DNA, 231 bp, Oryza sativa
  unsure (1)..(231): unsure at all n locations
  Clone ID: PAT_MRT4530_32604C.1
gaaaaccaagaggggancaaccgggaataacttgcagtattctttagatagcgggggagcaaaccaaccaaccaaacgaacgaacgaacgaacttatttttttttacaaaggggtgggctcttagacccacttttatatgctattatcttctaaaagagtcttcttgcaccactactatagcaccaatactgaaaaaccaactagccttgttttttttcttttaaatccaa

SEQ ID NO: 27961 - DNA, 1302 bp, Oryza sativa
  Clone ID: PAT_MRT4530_32605C.1
aaagtcttcttttggctttgggccgaaagtcggcccaaaacccttttctctctcctcggcccagtccggcccaatccgccgccgcgcgcgcgcgcgtccgcccgctgacgggtggggcccacctgtcagggtcgtcgtcaaccttcggccgccgccgcccgaaaccctaaccgagcgccgccgccgttcccttccaaatccggccgctcctttccttctccggccgaatcaatagaggggaaacaatctccgggatctcctccgccttttcccctttggaatcatcagctaaatcggcttggaaagtgttggattcgaagtcgaatcggatcggcttttctctctccgagcccgatcttttcttctcgtcgccggccgccgtgggccttcgtcgtcgccctccaacccctttaaaaggacccccgagctctcctctacccgccgccaccctcgccttcgcctctcgtcgtccgtagcgccctagcgccgagtagcctcgagccgccgtcgccgccgtcgctccagccgtgcgccgccgccgttccggtcgtcgtcgtcgctcgggaaggccaccgtcgggatcgccaagccgtcgccgttctcgtccgctccttcgccgccgccgaagatcgtcggagcaccgccgtcaccgtcgacccgaagcccgccgccgcttcttcctcgtcgccggcgccgtccgttgctcttccgccgctcctttggtcaccgcgccgccgttcgccggcgagcgtgcgctgtccgagccgccgagccgccgccgccggtggtgacgtcatcgccgacgtcatcgtccccgtctcccggggtgattatgatccaggaaaggtgcgctgcggtggattgtgttatgcaaggggtattgtcacaactcctttccgagccgggatggttgttcagaatggttgggcctatgcaacaggcccggccgcccgtgaccacctccactgccgccgcttggccgctagcaccgagcacgaccgccagccgagctcccttgaccacctaagtcggtttcctcccccaaaaccgacttcccgtgcctataaaacccaagccgagctcctcctcctctctatccctctcatcttcgcctgccgcgccttgtcgccctgctcggctcgcaccgtcgccgttcgtcgccaagcaccagggaggccggtgcgtgtgtggacgtgtgacgaggagctccgggcacctcttcttccccttccccggccgctcccggagagctttctcccgcgccgccgccgctcgtcagggcgccctgtcccgacgcggtag

SEQ ID NO: 27962 - DNA, 528 bp, Oryza sativa
  Clone ID: PAT_MRT4530_32606C.1
ccaatgtctagcttcactcacttcatctcgcttccggtgggtatccacccacaacttggtgataagctgaatgaattcaagaggtcaatcctgacttctaatgaatataaagctgcaggtttccgcatcgacgagtcaatatttgctattcccgaatcacttcacctaacggttcttatgttggagctaaagggtgagaacattgctaaggcttccagtgtgctccagtcagtatcggacaaactaatggaagccttgaaaaacagacctatctccatacagcttagaggtctggcatgcatgaaaggctcaccagataaggcctgggtagtatatgctcctgtgctggaagttggtgaacagggacgcctacaacaagtttgcgacattataattgatgcctttaccagctcaaacctagcacctacaagtgatgagaagcgagaactgaagttgcacgctaccgtgatgaatgcaaggttcaggaagggctactgtccggatgcttcatttgatgctcgcaagata

SEQ ID NO: 27963 - DNA, 756 bp, Oryza sativa
  unsure (1)..(756): unsure at all n locations
  Clone ID: PAT_MRT4530_32607C.1
ggtttgttgtgttgccctccgttaccgccctgcctatatttcctttttttttttttttttttttgaaattttcacacgaaccacacgtgttgtccttttatttacggcaaagtgttgcctgaaattctgaaaccacaagcggtgccagcatagcacggtaaaaaaaccctaaccactaagtattgcacaagctttaaaatgtagcagcaccttctgcaagcagaaaacttgaaaaggctggaactttttacatgttaaactagtaagaaattatcctttacagcatttcaatggagggcgtggtctggaaagatgagatgccctcggataccgccctgacaaaaattactttggcagacgttggacctgtttatcttgaatcagagttgttcttaagtgcattgaacgtttccttgtcaaaattccctgtttctatggccagttgcaacccctgtatgagattttggcttccaaaacgcttcccagccatttttgagccttccaggcgttctggcagctttccaccattttgctcaataaattggcagaggtacatcacaccagcacatgaaaagttctgnttggcttccatcgaatccattttttcatccagaccccaaaccaattgtttgatgttcttaatttctgaaccaatattctcaagcttcagtcgtgcatcagtaacatcatcgcttatttgtccagaaagcgccttttgctgatccaatttatcatccaacctttcaacacgctgag

SEQ ID NO: 27964 - DNA, 394 bp, Oryza sativa
  unsure (1)..(394): unsure at all n locations
  Clone ID: PAT_MRT4530_32608C.1
aaccactaagtattgcacaagctttaaaatgtagcagcaccttctgcaagcagaaaacttgaaaaggctggaactttttacatgttaaactagtaagaaattatcctttacagcatttcaatggagggcgtggtctggaaagatgagatgccctcggataccgccctgacaaaaattactttggcagacgttggacctataaaattgttggtcattccttcagaacatgactgtaactcttgaagtaataagctcagctgctcaggcaacaacatgcaaagggtcagtcctcngaccttgttatcttgaatcagagtttgtcttaagtgcattgaacgtttccttgtcaaaattccctgtttctatggccagttgcaacccctgtatgagattt

SEQ ID NO: 27965 - DNA, 402 bp, Oryza sativa
  Clone ID: PAT_MRT4530_32609C.1
atcaaattgcatgtatatcttataatccattctaattttgattattttattacattaaaattagcgatgttcaaaagagaaaaaaaaaaaaaaaaaaaaaaaaaaaaaaaaaaaaaaaaaaaagccgaaaaaagggcgggcgcccaaaggaagcaacgtacaggacacggggggcgacgccatatggtgaccaaaagtcacccacatggactgcaatggcagcgttttacaagggagaacctagaaaaaacccggggcaccccattaaaacgcattgtatggaaaacccctggcgacaccaaaaataagaccgaagaggaccccccccctagcccatcccaacatttaaggaaaaaggacccccacagggacccgccccataaaggcccattaatgaagggg

SEQ ID NO: 27966 - DNA, 686 bp, Oryza sativa
  Clone ID: PAT_MRT4530_3260C.1
ccggccgggacaccacgctctgaaatgcaactccaccacacatcaccctcctctctcctcacttccacatctgtgaacttggccacaccctactgcgccgccgatggccaactccacgccgttcgtccacatgaccaatccgcgctcatccaccctctcgatgcgcagatggaggtgaaccacatccaccagacgcggacggcggagaacttccgcgcgctctgcaccggcaagaaaagaatgcagaacagcggcaagtcgctgcactacaagtggagcaccttccaccgcgcgatatcttagttcatgtgacagggcgactacttcacccgcggcaacgggacgagagctaagtcaatatatggacagaagctcaccaacaaggggttcaaatgcccacacgacaggcccgcaatactgtccatggccaacgcctgctccaacactaccggaacccagatcgtcatctgcacgcgtgccctgctcctgtctgaacacaagatacactacgattctctaccgtgtcttcaccaaatggaaggcgtcaaagccacacacaaaggacgatccctacccggaaaaaccgacaagccggacgtaatcggccactgagaacatctctcctatatctgagatggtccccttcatctatcgccagtatcagtcgaatagagtcttcgagatcc

SEQ ID NO: 27967 - DNA, 353 bp, Oryza sativa
  unsure (1)..(353): unsure at all n locations
  Clone ID: PAT_MRT4530_32610C.1
gtgcgccntttgaanagcccaagtcgnncccnccgaaacanagtatanaangagaggagcggancgccatcagccgtccgatcnaagtgatcngatggctctcgctctctccacctctgctgctgctgccgctgccgccgcggcgcgggcgctcgcggcganggtgacgacgacgangggttacgccgcgtcggcggcgtcgtcngcgatgaagcgggcggcggcggcggtggaaaggaaaggcgctgcggggatgacgcnngcgaangacgggtcgtcntcgtcggcggcgaaggaagtgtttttggtncccnaccccgtgacgggccactnccggcctccaacttcgccgg

SEQ ID NO: 27968 - DNA, 825 bp, Oryza sativa
  Clone ID: PAT_MRT4530_32611C.1
atggcacaagagcctaacaattgcatacatgagtgcttctcacttgagagatataagaagacataccaacatgtactacagccagtggaacatgagtcggcttggcctgtgtctccgaatcccaaaccattgcctcctagagtaaaaaagatgccaggccgaccaaagaaaaataggagaaaagacccttcagagccagtgaaatctggaaccaagtcatcaaaagttggtactaaaattagatgtcgtcgctgtggaaattatggtcacaactcgaggacatgctgtgtgaaaatgcagcaagaacacgctgagtcatataatcctcccgccaccaatgcaagtcactcaagcccattgcaaattgaacctgcacagtcgaagcaaactaaaggaaaatccatagcgacatcatcaagtaagagtaagatgcctgagggttcatcatttatacagtctggccataagagaagactggtatcttttggaaagagtgctcaagcatctgcgaagtcaagtgctcaagcatcggcgaaggcatctgctggagggagtgcttctgttgtcattgaaaccaatgctgggactgctagctcatttgcaaaggcaacaatcaatggctgctcaacttgggagcatgccaggaaccttcttccagtgtctggaccagaccaacaacaacacaaaattgggaagaatccatgccgacataagattcagagtgctgactggtggttgggcttaaagatctgtactccatacccttcaacttatagggaaaatatgtggtggaaaccacaaatagagcaaacctggaaactatag

SEQ ID NO: 27969 - DNA, 481 bp, Oryza sativa
  Clone ID: PAT_MRT4530_32612C.1
ttgtttttttttttttttgtgttttttttttttttttttttttttttttttttttttttttttttttttttttttttctttggttcaaagggcctaacatccaaacaaaatttagctgccccgggcccttgggtaatacccccccaagaactttgaaacccaaacaagggctttgtcccccttttagggcacccccccaaatggggggggataccttaacccttgaagccttggggggtcccccttcctttgggcttttaaaacttccttccctttgggccccccaaagggttggggttcttggggggccccccaggggcaggaccaaaggggttcactgttccccgggggttcttaggacccctaaggaaaaccgtgttctggcccaaagggggccggagccccaccttaccaaaggtaagggcctcccccccagttttcacattgggggcccttcggggtttggggaaccggggggggg

SEQ ID NO: 27970 - DNA, 527 bp, Oryza sativa
  Clone ID: PAT_MRT4530_32613C.1
ctaaaaacacacttttgaattattttaagcatgcccaaaggccagtagctgcaagggaaattacagaatcctactttgtccaaaaattcaaactggatcagccattaggctacatcctaaagtaattggcattaagcaagcaattttgagtccaacaaacaaaaataaaagggcatgttcaattgttcttcagtttcaattcaacaaatttgggggtgttccacgattcgccagaagggagtcccacggaacaaagatcccaatccccccaacctataaaatcacaggggggtccttttttacagaagggggaggggatttcaaacaagagggacaaatccgccgaccccaaaaacgggatcaaggcaggaggagaccgaaccgtgcgaaccccacccacccttaacaaacgggggggacaaagcgcagcgccgccacccccgcggagaggaggcccgcaagcctccgcacgggaaactgggtgcatttggagagcgcaatgaggcacatgagcttgtacaccaccc

SEQ ID NO: 27971 - DNA, 329 bp, Oryza sativa
  Clone ID: PAT_MRT4530_32614C.1
cactcatagtattttatttaatcttacacttagatgcttgggtttgccacctataatcaacatcacacattattttaggccttatcacgtcttcacgatgtgctacgaaaatgcctaccatcctgagacctgaggtgtaacagaatggctgcgcataagacacaatgatttattagaagcatctattgctcgaaaactcattgctcttcaaaggcactgttaagatcgagtttatcaccacgctcataatctaagccattctaaagatgcagatatcgcacctgaaaccgaccgcatacctgtgaccgcctggggctcatgcactatga

SEQ ID NO: 27972 - DNA, 687 bp, Oryza sativa
  Clone ID: PAT_MRT4530_32615C.1
gaaaaggttggaagcgctgaacagtggaatcgtaaaaagagggagccaaagttctccagtgcaagagacaactcctgcagtcaggaagagccgctgagcccggacagccccatcctgagggaccccaacgtgatccccatctacatgacccccggctcgtcgcccaccgtggcgagctgctacaaccagaacaacacggcgtcgggccccgactgcacggtcgagccgcgcgcgtgcccgcgcggctgccgcgacatgtgctacgttcactgccccacctgcaagctcgccctcggcatccgcttcggcggccaccgcctctacctcggcgtcaggaggaccgtcaggtgggacgccgccgtcgaccgcctcgtgatcaccttcgacggcgcgcccgtcgagctggacgccgtccccgccgccagctggagcccagcctccgttccggcgctctcggtcttccgcaccggcccggccaacggcgtggtggtgcgcctcgacggccggttccgcatcgtcgccaacgcggtgcccgtcacggaggaggactcgaggatccacggctacggcctcaccgccgacgacagcctcgcccacctcaatgtggcgttcaagttctactccatcagcgccgacgtgcacgggggcttggcacgacaggtttcccgactggaaagcgggcagtga

SEQ ID NO: 27973 - DNA, 544 bp, Oryza sativa
  Clone ID: PAT_MRT4530_32616C.1
cgataataaaatggctgggaatgcgtcagtatttctgttaatggttagcggtcagattgaaactgccgaggtgcccagagttttgacgatatctactgtctgctattcatttgtatatggtcaagactggattgtgacttcacgacttgacgaaggtatcactcaggtagctcgcaagagtctggatgatcgacagacgttcgtgtttagctttcctgtggagtataacattcaagagcaccaatccgtacggctggccacaaatagttgtctacgcgtttggcaatgacgcttttggcaacgaagtggtgcgaggctatggtgttacccacatacctctggtgcctggcaagcacacacagcgtattgccatgtttgtacctgagtcctcgtccaaatttcagcagtttctcagctggctaatgagtcgcaggccagagttcactgaccccactgtcattgctcgtggtgaaggtcgcgaagtgacacgggtgcgatcacagggcttcatgacgctgtcgttcaacctagtgacgaaggatct

SEQ ID NO: 27974 - DNA, 261 bp, Oryza sativa
  Clone ID: PAT_MRT4530_32617C.1
atggcggcagttgaattgaggaggctggaggtttttgttcttcatcgatggccgtccatcctcgcctcctcggccctcgccgccgtggaggaagaaggatcagcgtcctctgttcctcccactaccactcccactcctagtgggccaactggcagcctcctcaacatgggaatgtcggcaattgagttgaggaggctggaggttttcgctcttaatcgatggacgtccttcctcacctcctcggccttggccgccggataa

SEQ ID NO: 27975 - DNA, 1144 bp, Oryza sativa
  Clone ID: PAT_MRT4530_32618C.1
cttgcgttcacccccctaacaactatctcaccccgctaacaactatctcaccggctcgatcaatctctcaccggagatggtgcccgtccggccgtccgcggcggcgctgctgctcgccgccaccgctttcctcgtcgtcgcggtgggcgcccagccgctgagcccggacagccccatcctgagggaccccaacgtgatccccatctacatgacccccggctcgtcgcccaccgtggcgagctgctacaaccagaacaacacggcgtcgggccccgactgcacggtcgagccgcgcgcgtgcccgcgcggctgccgcgacatgtgctacgttcactgccccacctgcaagctcgtctgcctgtgtgagctgaccggcacggagtgctacgacccgcggttcgtcggcggcgacggcaacaagttcctgttccacgggcgcaaggacgccgacttctgcctgctctccgacgccaacctgcacatcaacgcgcacttcatcggcaagcgcaacgcggcggcggcacgggacttcacctgggtgcaggccctcggcatccgcttcggcggccaccgcctctacctcggcgtcaggaggaccgtcaggtgggacgccgccgtcgaccgcctcgtgatcaccttcgacggcgcgcccgtcgagctggacgccgtccccgccgccagctggagcccagcctccgttccggcgctctcggtcttccgcaccggcccggccaacggcgtggtggtgcgcctcgacggccggttccgcatcgtcgccaacgcggtgcccgtcacggaggaggactcgaggatccacggctacggcctcaccgccgacgacagcctcgcccacctcaatgtggcgttcaagttctactccatcagcgccgacgtgcacggcgtgctgggccagacctaccgccccgactacgtcagcgccggcgtggacgtgggcgccaagatcccggtcatgggtagcgccgggaagtacgccgtttccgacatcttcgccacggactgcgaggtggcgcgcttcgccggcgaggacggcgcgctcgcctcgtccgttggcatggtcgacgcgccggccgacgcgctctgcggcagcgggaagggcagcgccggcctggtctgcaagaagtga

SEQ ID NO: 27976 - DNA, 1152 bp, Oryza sativa
  Clone ID: PAT_MRT4530_32619C.1
atggaagcaccaagaagttggagagctccagcgtgtgtgatctttgtgctcgcactagtggcgcagtggtggagctcgtcaatggcggcgagctgtagcttcacgatatccaaccactgcgcccagacgatatggccggcgacgctggccggcgccggcacgccgcagctggccacgacggggttcaggctcgacccggggcagagcgtgcaggtcccggcgccggcggggtggtccggccggatatgggcgcgcaccgggtgcgacttctccggcgccggcggcgccgccgccgccgctgccgctggcgccgccgcgtgccagaccggcgactgcggcggccgcttggagtgcggcggcacgggcgccacgccgccggcgacgctgttcgaggtcacgctggggaaggtcggcggcggcgccggcgccggtgacctggactactacgacgtgagcctcgtcgacggctacaacctccccgtcgtcgccgtcccgcaggccggcggcgccaccggcggcggcggcggctgcgccaccaccggctgcacggccgacctcaaccgctcgtgtccgaaggagttgcaggtggacggcgtcgacggcggcggcggcagcgggacggtggcgtgccggagcgcgtgcgaggcgttcggggaggaggagtactgctgcagcggcgcgtacgcgacgccggcgacgtgccggccgacggcgtactcggccatcttcaagacggcgtgcccgcgcgcctacagctacgcctacgacgacggcacgagcaccttcacctgcagcgccgccgcctacaccatcgccttctgcctccctcccaccgggtcgaacacctccggtgtcactccgctgattagctcgccgtcgccggccaatggccagaacggcgccggaggcagcacacctcctccggctggcaacaatggcgccgggataatcagctaccagccgcctccgacggaggacatcaatggtgccgggagcgccgatcagccggcgtggatgacgatgccgtcgtcggcgagcaagcggatgatgccgtcatcgtcggcggcgagcacgcggcacaaccagctgtggtctctgctgctgctgctacctgcattgctcttgttccatttcaagcaagagttattgtag

SEQ ID NO: 27977 - DNA, 2871 bp, Oryza sativa
  Clone ID: PAT_MRT4530_3261C.1
atggtgggacagctaggtgggccttccaccctgatcgtctgtcagcaccatccctatcacccgagtaacttcaacaatgactacaacggtggcagtcacaacaacagtaagcagcacaaccacaactcgactccacccccattaatggcaccagcccagtcagatctaccagctatgctggctcagttagaacagctcaagaaggagtccggaggaaagccgggaccctgcttcaactgtggcgagcttggccacttcgctgacaaatgcccgaagcctaggcgtgccgggccaaggtttgtccaggcccatgtcaaccacgcgtccacagaggaggcgcaagcagcacaagaggtcgtacggggtacgtttcctgttaagtcaatccctgcaacagtactttttgattctggtgcaacacattcgttcatttcaaagaagtttgtcgggatgcatgggttaataagagaggaacttagcacaccaatgcgggttcataccccagggaatagctccacttcggtacaattcagcccttctataacaatagaaatccaaagatcaccatttctagccaacctcattcttctggaatccaaggacctagatgtcatacttgggatggattggctgaccaagttcaagggagtcattgattgtgcgaaccgcacagtcaccttgaccaacgagaagggagaaacagtagtgtacaaatcactagtctcaccaaagcaaggggtctctttgaatcagattgaggtggaaatcccagtggtcatcgaggagaagaattcgcggaaattggaggatatccccatagtctgcgagtacccagaagtgttccccgaagacctcactaccatgtcacccaagagagaaattgaattccagattgatttggcaccaggaactgcccctatttacaagagaccgtacagaatggcggccaacgagctagcagagggtgctccggtcatttttgtggagaagaaagacaagacgaagagaatgtgtgtcgactatcgcgcactcaatgaggtcacaatcaaaaacaaatatcccttacctcggatagacgatttgtttgatcagctgaaaggagctaaagtgttttctaagatagacctgcgatcaggctactaccagttgagaattcgggaagaggatattccaaagacggccttcaccactcgtcagttgcttaagaaagatgagaagtttaaatggacagctgagtgcgacaagagttttgaggagctcaaaaagaaattagtatccacaccagttttgattctgcacgaccagatgaaagacttccaggtctattgcgatgcatcccgccacgggcttggatgtgttctaatgcaggaaggtagagtggtcgcatatgcctcgcggcagttgcgtccacatgaagggaattatccaactcatgacctggaattggcagcagtggttcatgctttgaagatctggaggcactatctgattagcaaccgctgcgaagtatatacggaccacaagagtctgaaatacatcttcacccaaccggacctaaatctccgacaacgaagatggttggaactaatcaaagactatgacatgagcattcactaccacccgggtaaagccaatgtggtggcagatgcgctaagcaagaaaagctactgcaatgccctatgcatcgagggcatgtgtgaagaattgcagcaggagcttgaacatctcaatgtgggagtcattgaacacgagttcgtagccgctctggaagcacggcctacgcttgtggatcaagtcagagcggctcaagtaaatgatcctgaaatagctgagctcaagaagaatatgagggttggaaaagcccgagattttcatgaggatgagcatggcacaatctggttgggagaaagattgaaaaggttggcagagctttacctttcaagaatcatgtgtttgcttggggtacctaagaagatagtatctgatcgagggagtcagttcacttcaaaattttggcagaagttgcaagaagaattggggactcgtttgaatttcagcacagcctatcatccgcaaactgatggtcagactgagcgagtcaatcaaatattggaagatatgttgcgagcctatgcacttgactttggcggagcttgggataaaagtctaccgtatgctgaattctcttacaataacagctatcaggccagtttgcaaatggcaccgtttgaagcattgtatggacggaagtgccgcactccgctcttctgggatcaaactggagaacgccaactgttcgggacagaggtgctaaccgaggcagaggaaaaagtcagaactgtcagagaaaggctgaggattgcccagtctcgacagaaaagctacgcggacaaccaccgacgagagctcacgtttgaagcaggggactatgtgtaccttcgtgttactccgctccggggagtgcaccgttttcagacgaaaggcaagttgacaccacgcttcgtgggaccatacaaaatcttggaacgaagaggtgaagttgcttaccagcttgagcttccctccaacatgcttggcatccacagtgtgttccacgtctctcagttgaagaaatgtttgagagttcctgaggaacaggcaagtccggatcaaatcgaaatccaagaagacttgacgtatgtggagaagccgactcgtatcctcgaaaccagcgagagaaggaccagaaacaaagtaatcagattttgcaaggttcagtggagtcatcactcagaagaagaggccacctgggaaagagaagatgagttaaaggccgcccatccgcacctcttcgccagctcttccaaatctcggggtcgagattccgtttaa

SEQ ID NO: 27978 - DNA, 357 bp, Oryza sativa
  Clone ID: PAT_MRT4530_32620C.1
atggggatcgatattgctactggagaaccacaatatggtgatgggagtatcacagctcctagcacccacggccacggcatcaagcaagacattagagcgccgccgatgacaactcaagcaggaggggaggagaaggacaccatggacacatggccgcggtctgacgacgacatcccgacgacggcgcggctcagacgatctttctctgcctggtgcggtgccaccgctcgagggctcgggctcgactcctccgccgcggcgcaactcacagcgccgttgtccgccggttccgcctacctcgtcaagctcctcggctgcgtgatgccagagacaggaatgggcgaatggctagtgtag

SEQ ID NO: 27979 - DNA, 2502 bp, Oryza sativa
  Clone ID: PAT_MRT4530_32621C.1
atggccttccactacgcagcaatgccctcctcctcctcctcgtccctctccggcgtctccccccagcccccgcttcacctcccccgtctccgatcccctcaccaagcgtcccgccgcctctccgcgctccccttctcccgcgcgctcccgcttcccctccgcctccgcctccgcattccccgtccccaacttcctccgctgcccctcgcgttctcccacggtgggggcggagataacgatggcgacgataataataacaatggcggcggagatggcgagggggatggcggcgcgcccgacaaccggagggaggcgctgttcgtgctcgcgcaactggggaggaagctcgagagcctgccgtccgacctcgcggccgccgtggagggtggccgcgtcacgggggagatcgtgcggcgcttcgctgagatggagggctcggcgctgctccggtggctgctccagttccaggggttcagggagcgcctcctggcggacgatctcttcctcgctaagcttgccatggagtgcggcgtcggcgtcatcgcaaagactgctgcggagtatgagaagagaagggagaattttgtcaaagagattgatatcgtgattgccgatgtggtcatggcaatagttgctgatttcatgcttgtctatcttcctgctccaactgtatctctgcaaccaccacttgcaacaaatgctgggcatattgctaattttttccacaattgcccggataatgctttccaaattgctttggctggaagatcatactcaattctgcagaggctaggggctattctgagaaatggtgcaaagcttttcactgtgggaactagtgcttctctgattggcaccggtgtcacgaatgcactgataaaagcaaggaaggctgttgacaaagagctagatgacgaagttgaagatattccagttttgtcaactagtgttgcttatggtgtatacatggcagtatctagtaacctcaggtaccagattttggctggtgtaatcgaacagaggatgctggagcccctactacataaccacaagcttctattgagtgctctatgctttgctgttcgcacgggcaacacattcttgggttctttactatgggttgactatgccagcctctcgatctcctcgtatttccccaaacccttgccgccacgatccagacgtccatcgttcccgccgctggtgcagcagccaattgcgatgtcgtcgtggccgccgccgccgccggtgcaactcagcatgcagttcctccctccccggccggagccggccgccgccgcgcgcacgtccatctgctgcacctgcggcgtccccatggcgcccaacgcggccaacacgtgcgccctctgcatccgctcgcgcgtcgacatcgcggcgggggtgccgcgccacgccgacgtggtgcactgcccgtcctgctcctcctacctccacccgccgcggctctggctccgcgccgcgccggagtcgccggagctcatgagcctcctcctccgccgcgtcgaccgccacatcgcccgcctcggcgtcgccctcgccgccgcggagttcgtcttcaccgagccccactcgaggcgcctcatgctccgcctccgcctccgcggcgaggtcctccacggcagcggcggcggcgtcacgctggagcagggccacgtcgtggagttcgccgtccacgaccgcctctgcgacgcgtgcgccatggcgagagcgcgggccgccgagccccccgaccagtgcggctggtccgccgtcgtgcagctctgcccggtgtgccgcgacgacctcgtcttcctccccaaggaggcgtcccgcgacctcggcggcctcggccccatcgtcctctgcgtcaaggtcaccaacgcgctcgcgctgctcgacacctccacgctccgcgtcgtccacctcggcatcaaggagtacgacaggtgcaggctcgagcccgcgctcaccagccggcagctcgtcgagtacgtcgttctcgacgtcgaccacgagccggagccggccgccggcgtcgcgtacgcgcaggtcgcgcgcgcgtcggacttgggcaagaacgacaccatcttcaccgtgaggacgcacctcggccacgtcctgaacgccggccaccgtgcactcggggacgacctctacggcgccaacgtgaacaaccatgacgtcgagagccatggcttgccggatgcagtgcttgtcaagaagatcaatgagaagggtagtactcgtaggcagctgcaggatggcgacggctgcaggagaaggaagcgagacggcgatgagatggaagagatcgccatggggatcgggtgcattgatctgaacccgcctgatgagaaggagcttgatgagttgctcagaggacctcacaatttgagggcatctgcagtcacttcaccgtgcctttgtcaggcccacatgtccccacatgtcagtgacaatggcacgatgaagtcgactacggaggatctcaatccaatttga

SEQ ID NO: 27980 - DNA, 535 bp, Oryza sativa
  Clone ID: PAT_MRT4530_32622C.1
agtgcaaaaactattaagttgagaattcaatggtacaccacaaagttccaagcttttggattgggaaacaaaaataaactataacatcaataaatagatacttcaaaaagtgtttaaagacaagatttgcagctctctcacattccctaaggacgaaagctctatcatttgatcaaaatgtcaggtcacaccggaaataaagtaacttcagtgagtcgaggtggagttggtgacccaatactgcttcacggcaatcaaaaccttctcaggaactaaaggaccatcctcatgatcgacaagcttcgcatcccatctcattccagcgatgattctcttcaccttgatcaatgtatccacatcatcccggattataaccgctccttctggtcggagaattctatccatctctagaagaatatcatccgcattgcacttgttcttgtatagactgaagaggtggttcgcgtggatcaggtcatatgttcttggatatgtagagaaagcctcacaccagtcatggtagataccgatgagt

SEQ ID NO: 27981 - DNA, 507 bp, Oryza sativa
  Clone ID: PAT_MRT4530_32623C.1
taatgtcgtatcattcggctcacctgcatgctgatctttggggattaacctctagctagccatgcacagcagtcaaatgactcgctccgttcgatttatagatgtagtcagggttttccatacctctatgagaacagcactagctcggatatgaccatgactaccttatttattcatcaactgcaaagtatcaacttcaaacgaacctaaccgctaatctagaaggaatttcggggcctatgagtacttgttggaaagctaatgggtctacttccatatggttttagttccacgtcaaaattccttcttaaatgtcgtggatcggaaatgcaagccacggattacccttctcggcaaagccaatcgggttttggtatggttgataaccagaggagatgtggtgttatgattgtaaggttcgggtcgtgtcgatcggaagccggatcatgtgtgtcgaatttccaccaaattgagggttatcagtacatatcgaaagatcgggaccta

SEQ ID NO: 27982 - DNA, 1068 bp, Oryza sativa
  Clone ID: PAT_MRT4530_32624C.1
atgatgaacggaggagggggagggagggtgccgacgtggagggagcgggagaacaaccggcggcgggagcggcggcggcgggcgatcgcggcgaagatctacgcggggctgcgggcgtacggaaactacacgctcccgaagcactgcgacaacaacgaggtgctcaaggcgctctgcaacgaggccggctggaccgtcgagcccgacggcaccacctaccgcaagtactggagcctggacagaattgaagctgctcatgtgaaaaaaggactggtgaaagaggcaattatggagacaaaaggatgcaagccgccggcgtcagagctcgctgatcagctcggccgctcgccgtcggcgagcccgtgctcgtcgtaccagccgagcccgcgcgggacgtcctccttccccagctccggctcctcctcccagatcacgctcggcggcggcggcggcggcgagggcagcagcctcatcccgtggctcaagaccctctcctccgccggcgtcggcatcggcggcggctcgtcgtccaagttcccggcgcactactcctacttcggcggcggctccatcagcgcgccggtgacgccgccctcgggctcgccgccgcgcacgccgcgcctcaagacggccgcctgggaggagtaccaccaccaccacgccggcagcgtgctgccgccgtgggccaccgtcggcgcgagctacgcctacgcggcctcgtcgtccctgccaaactccaccccgccgagcccgcgccgcaaggtcgccgcagccgccgccgccgccgggcggcggcaacgacgcggcggcgtggcttgccgggttccagatatcctccgccgggccgtcgtccccgacgtacagcctcgtggctcctcctcccaacccgttcggcgccgccgccgccgccgcggggtcctcctcgagggtgatgagcggagcgtgctcgccggtcgccggcggcgacgtccagatggccgacgcggcgcgccgcgagttcgcgttcggcggcgagggcggcaagatgaccgggctggtgaaggcgtgggaaggggagcgcatccatga

SEQ ID NO: 27983 - DNA, 171 bp, Oryza sativa
  Clone ID: PAT_MRT4530_32625C.1
atgggcgccaccgctaaccactcactcgccgtccccaagatcgggtgcaccaccgaccccccgctctcccttgccaagatcgatgccgccgcacctattgaagagtggctggcgccgtcgcgccagcctctctggcgccgtccccctgccgacgtggcggggcgatgctga

SEQ ID NO: 27984 - DNA, 599 bp, Oryza sativa
  unsure (1)..(599): unsure at all n locations
  Clone ID: PAT_MRT4530_32626C.1
ccctaggtgggatcggtgagggaggtggggaccatttgtgcgtggcgatgaagatcggggggtcgtcggagtcgtcggagaggaggatgcgggagggggctggcctaatcctcgccttacacgaggagcgccccgctgtccgactctacgccatggagaacaccaccaatcttctcctccttgctggtgaaaaggcagtgtgatgcgcatctgacccctgatctacaaagagacccgcggaatgcgttagatcttcttacataacgactgcggagagaccttccctgcccagatctcgcctccacactataccggacgaactggaacagctcttgcacggtattgcgccgatgaacgacctctctcttattaccactgactaccttgcttaattaggccagtcgatgtctacacggatttatgatggtcatgtgatctaaatcgtagtaaaagcactacactactatgctgtagatgttggttatataacaacactggatcttcattaactcgggcatgttgaactactgttatcctgctgtcgctaggagattacatgcagactgaattaccgtctcagcgatacctattgntactgg

SEQ ID NO: 27985 - DNA, 536 bp, Oryza sativa
  unsure (1)..(536): unsure at all n locations
  Clone ID: PAT_MRT4530_32627C.1
cttgtgngttttancagntgcgaggatccccaacatcagcccatttttgcccacttgcccactatatatattcagctgctaggataaaaaacatgagagatacactgaatggcatcaaacaaataattaataaggcctaatttgctgcccatttaccattcgtgattgaatcaatgccgcttatatatggattccttccttgagattagctgaattattgtgggattgggaggcaccaggatgttcactgcttagggtaccggcttgaggccgaagcggcaacagatatgtttcatgttgagctgctctgctgggatatgaaagataggtctattcagctgtgtgtgaccgtcctggcttgtgttgagctcggatgtgctcagcctggccagatctagtgttttggtgagctgtgagtacctttctagcaatctatgccgcaccacgcgatatgtttgtgcatgcgccttcactactccgtgccaaattactattttatagttcggggataattagaatacctatattttacatgt

SEQ ID NO: 27986 - DNA, 218 bp, Oryza sativa
  Clone ID: PAT_MRT4530_32628C.1
cggatgctaatcagctagagaaactggagaaactgctgacacaatgctttgaggatacgaaatcaaagaagatggttgcaaaaacaaaatggtgaagggagtaggaccagaccaaactccagtgctttaggggcaggagaagtgcatgaccaggaacacagtgtcctggcataattgcagcagccacctcccaaattaaaaagctaataaaaaaaaaa

SEQ ID NO: 27987 - DNA, 247 bp, Oryza sativa
  Clone ID: PAT_MRT4530_32629C.1
tttaagcccaacggcatctgaattcatcacctatgactcataggatgcggtggacgaggcactgcacaaaaacctcaatgagctgactggaacgatggttgcggccaagagagcctgtccaaggctgcactcaactggacctgttgcgcgtacacctgcggtagggctgacctatgctatgaggaggctccatagctcgttgaaagcttccaaccaggggtataacccaaaccctatgggaagttat

SEQ ID NO: 27988 - DNA, 798 bp, Oryza sativa
  Clone ID: PAT_MRT4530_3262C.1
atggcggcttcggcgacgacgaccatcctcgtggcggcgatgttggtggtgatggcggtggagtctccggtggcgaacgggcaggcggcggcggctgcgccggcgccggcgccggcggcgccgaagacgatcacggcgatcctgaccaaggccggtcagttcaccaagttcctccagctactgcagtcgacgcaggccggcgagcagatcaacaaccagatcaaggggaaggcgtcgtcctccggcgggctcaccgtgttcgcgccgccggacaacgcgttcgcggcgctccccaccggcaccctcaacaagctctccgaccagcagaagacgtcgctggtgcagttccacgtcgtgtccgcgctgctccccatggcgcagttcgacaccgtcagcaacccgctccggacgcaggccggcgagaccgccgccggcaagtacccgctcaacgtcaccgccgagggctcccgcgtgaacatctccaccggcgtcgtcaacgccaccgtcgacaacacgctctactccggcgaccgcctcgtcgtctaccaggtcgacaaggtgctgctgccgtgggcgctatacggcccgcccgtgcccgcgccggcgccgtcgccggcggacaaggccaagaagaaggccggccccgtcggcgtggccgacgcgccggcggccgacacggctgccgggacgacgacgacgacggtggcgacggcgtcggaggcggcggcgcggggcacggtgcggcggggcttggtcggcgtggccgtcgccgtggctgtcgcgtggtgtggcatgtga

SEQ ID NO: 27989 - DNA, 486 bp, Oryza sativa
  Clone ID: PAT_MRT4530_32630C.1
atggaggccacatcccgcgccagcaacaccaacaaccacccggcagcgacggcgaatgaggggatgctctcctcctcatcggcgtcgacgacgcggctgtccacggggagacagccgttgctcgcccccggccgccgccagcttctcctccgcctcccgcgccgagacggcgacagccgcagcgcacgcatcaggcggtcgcggccatcaccatcccgagtgagatggaaacgctgcgaccgcctgatgcgtgcgctgcggctgtcgccgttccgggcgcgggaggcggaggagaagctggcggcagcaggggcgagcaatggctgtctccccgtggacggccgcgtcgtcgccgccaacgagaaggttcgccgtcgccgccgggtggttgttggtgttgctgacgcgagatgtggcctccatggaacagccgcagccagccgccgtcgcggcgccgctctcctcctctcccgcctcacccggtga

SEQ ID NO: 27990 - DNA, 1473 bp, Oryza sativa
  Clone ID: PAT_MRT4530_32631C.1
atgtggattcgccggggtggtgtcggggaggacccctgggcttcctggcacagtatggtctgggacccctctcgtcggcatatggtaaacctgtgtcggctttcgaaatgccttgtcatgaaagcttggaggtctcccgacgtggctgatccccacgggctgggtgacccggccgaggttgaggtggacgaggcagtcgtcgtcggtgacgctgtagttgtggacgcgcgacggcgcgactcctccctcgtgatgggcaccgagctggccacgatgcggaacacgcccctgagctctacaaccacacgccgttggcctgcgtggtgcgcgccacggacagcgctggggcgttgggcggtgaccaccgcgcgccgtcgtggcgaggcaggtcacgacgtggtcgtcgtggaaggcaaactgttcggcggctggggaggaggccgccggggcgaggcgggagaggaggagagcggcgctaggcaaactgttcggcggctggggaggaggccaccggggcgaggcgggagaggaggagagcggcgctacgacggctgccggcggcggccgcagtggggaggcggccgttccatggaggccacatcccgcgccagcaacaccaacaaccaccccgcagcgacggcgaatgaggggatgctctccttctcgtcggcgtacgtcgacgacgcggctgtccacggggagacagccgttgctcgcccccggcagccgacagcttctcctccgcctcccgcgccgggatggcgacagccgcagcgcacgcatcaggctgtcgcggccatcaccatcctgagtacgacggttcttccagcaacggcgcagcggcgacgggccccatggccgccggtgggaactgctcacttgttgttgctgccgctgtgctcgccatcgcagtgtttgtctggaactgaaacattgagatggaaacgctgcgaccgcctgatgcgtgcgctgcggctgtcgccgtcctgggcgcgggaggcggaggagaagctggcggcagcaggggcgagcaacggctgtctccccgtggacggccgcgtcgtcgccgccaacgagaaggttcgtcgtcgccgccgggtggttgttggtgttgctgacgcgggatgtggcctccatggaacggccgcagccagccgccgtcgcggcgctgctctcctcctctcccgcctcacccgcgagattgtattccgcaccaaggacatcaagctcgccatcctccacccatggcgctactcgatcgcctccccacgcgtagttgctcgccgcttctcttcctttgcaactttgccgccgcagacgacgccggtgtcttatcccgttgggaacctcgttggtgctagggaggggaactaccgctgcattgccaagatcctctcccgtggtcacaattcatgctcgtcgtcgcggcaacgcgagagaaatagaagagaggaagaaggagaaggaggttga

SEQ ID NO: 27991 - DNA, 1829 bp, Oryza sativa
  Clone ID: PAT_MRT4530_32632C.1
cggctcgtggtgtgttcttgtctcgtgttttttttttttttttttttttttttttggttttaagtttcactgatacataaatcactaaaggtcttctgaacaaatccagactgatgtagaagttccaataaatacaagtagtacaattcctgttctgccaaaaaaaaacattctctgaaaatacagcacaacagagctcagagttgctagttcaccaaatctcctagaatctctctattcaggcattcagttctgtaagaacccttttggtgcattatacaggaaagattaggccctcaattttgttgcctacatgaattcaatacccaattaattggtagctcccattgataagctgcagactctatcttcatctctttcaatctttcttgacacggttccgagccgccttggctgagctcgatcgctctgactgcgagaacatgatgaagacatgcatgaccgccgtcaccagtgcgagcccaaggcccgtaaacccgactcctttccatgtcgacaggagttgagtccataggaagagcttgacggcgccatataaaaggagacatgaccaaaacaaagtcaccagcaatgattttactgggcggccaattggtctaatctcctcatcaaaagtgcctgtcgccaaatgcttatccagtaatgcatcctttgctacaaagatgtctttgcaccattttgaaacatcgtcttctgactttggcatctcactcattgcatgacgtttcatgcgaacatgtaccactgaagattgccctttcaaaatccgcagcattgttggttgaggtgaatcttttggaataattactgttgtatcataaatagctggaacaaaatcccgcataatagttacagctgatacaaatccctttgtacgtggaatcaatacatttctgggtgctggcaaaccctgtgaaacagcatactcctgagctgctagaagctttgctggagtaaagcgagtgccctcaacaaaaagggctagccaaaatggtctggggaagtccttcaacctttggaggccccatttcaatgtcttttcatcctttgcccagctcctttccaaaaagaggtattctgcaaaccacatggaccagccaataactggaaggaatttcgatgatttcttcataacagcaagtgtacttccaaggcatcctgagcgctgtgccaaaatccacccaataagccaatcgatatcgctccgatgatttgatatgacaagtgcatgctcattccccattgccttgtaagtttcgtcatcagcatgcagttgtatcttaactcctgcccaccaatccacaagccagaccagctgaagccacagcagctcggccaagaacctgttgatccgccggtacaagctcttcgagaacggccttatcgagagaaacaggacggcctggatggcgttgatgatgaggccggagaggaggaagaggaggccgagcgggagcacgacgagcacgagtgggaccgccatggcccctgccgccctgccctgccctcacttccaatctcgcggggccgagatgcgaagaggaggcaacgggccgaggtggctggatgctcacccccgagggagcgccctctcctcgtcctcctcctccggcggcggcggcggaggcggcggcgaatccaccggcgacgagaagagaagagaagagacgagacgagaccacgaggaagaggtgaggtggggtgttggatttggagattttatagggggttggatggaaaaagacgcagtgaagcgtgtgcgcccatggttccccctcaccaggagaagaagaggatggatggtgtga

SEQ ID NO: 27992 - DNA, 1788 bp, Oryza sativa
  Clone ID: PAT_MRT4530_32633C.1
atggcggggttgatcccaccattctccaggttcttccatgaggttttggatttctacgagatccatgccctgcatctcgcacccaactccgtgatgacgctggccatctttgcgcatctgtgcgagatgttcgtcggggtgcggccgacgatgcgactgttccagtccttcttcgtcccgcagctgctgcaaggtgcggtggtggggggatgctacttccagccccggccaggcacggcggggcaatacatcgagagtcatctccgcaagaagtgggaggactggaagaaggactggttctacaccgcgctgccgaaccacccgcaacttcggctcaccggccgccccgaacgatccgccgcatggctggcggtttcggaactaggcgaggagtacgacgcagtgcgggatcacctcaggggcctgcgaagccagggcctcacgggggcgatggggcgccgcgccgtggatgacatggtggaggtggggtgcaaaatgcgccaagcccaactggcagagatccaggcatgcgaggagacgctggactctgtcatgcgggagatggaggaagagcggcaggcggcactgatcgcgtcaagcatcctggatgaggcgttgggtgacatccgcttgcaatacgaggcccatgccgaggacctggcgaagagggtcgaaaacgcccgcggtgtccttgtcgcggctgccgcccaagagcggcgggcatcggaggccgacgcctcgttgcgggctcggacggcggcactcgaggccgaacgcaaggccttggatgagcgcgcccgctctgcgcaggagtttgaggccacgattcgtcggtgtatcgaggtcctcgaccggaaccagcgcgagcaggacgcgcgcagccgggatcaggcgcagcgagcccaggagctggaggggcgagctcaggcgttggaggagcgagcgcatttgctagaccagcaggagtccatcttggccgcccacgagagaacggcgacggaggcggaggcctcccttcgtcttcgcgaggaggccgcagccgagcgtgaccggaccaccctcgctgcgaaagctttggcggcccgtcgcgcggaggagctatggctctgggaagaggtgtgccgggaacgggacgccgcgcttgccgagcgcgaagccgaggtgaaccgccgtgaggtggcggcgccggctgggcgagcaactcgcgaaacacgaggaggccgtcgccgggcgcgaggctcggcatctggagagtgctcgcgccgagcgcgcggcgatggcggcgagggcgcttctgagctggaggcccgggagaaggacctggcggcgggcggacagcccggcggcgcggagttggtgagccagcttaccgcggctcagagcacccttgccgacctagggcgcttggtgcaagaccaggctggggagatcgcggccctccgccttacccacgagatcggacccgggcaactctccgatgccatcgattggctggagcgcgcggggcaccgagtgggcatcttcgtacgccgggataggaagctccctcccacacagccggcactcgtgatccggctggacgggctggcggcggatctggagaggctggaggaggaggtcggcgagatcgtgaaatcgtcgttggcttccttggcgcgggctgcggtggaattggtcctcgcaagccaccaagcacgtcaccccgacttcgtcccatggcgcgcactcgaggatttccccccggggactgaggcaagggctcgggccatcgtgccatcttgtctgtaa

SEQ ID NO: 27993 - DNA, 510 bp, Oryza sativa
  Clone ID: PAT_MRT4530_32634C.1
cgcaggaagcggcggagctgcgcgaggcagaggccaccggagagcaggcctcgtcgtcgcgcgaggcgaagaccatcggggagaaggggacgccgcccgcggaggaggcggcctgggatttgggggccgaacgaacgaacaggcggagaagacgggccgccggaggagactaaatcgaaccagaccatgcaccggagaggatgcggcaggacgccggagacgctgctcgcgcggatggagatcagcgccgccggccggcgagccgagcccgcgaggagattggggacggggagatcgatcggctagggcagggaggagcaaacactgcagatgagataactcccccccccccctccaactccaaccacaggaagcgggcaggaaggggggagctcggaagagaagaaaagctcaccggcgaagtccggcggcgggcggcgtcggcggccgaagaccaccgcgggggcgtttaagccggtctaatggtggagatatggcggtgttccattc

SEQ ID NO: 27994 - DNA, 314 bp, Oryza sativa
  unsure (1)..(314): unsure at all n locations
  Clone ID: PAT_MRT4530_32635C.1
ctcacacaggtagcagtagtacgtagccagccagtagttacacacgcgctctgctcctctcgcctacccacgattccaaggagaagagcgcctcccgcacagcgtaggctggcaaccgctgaccgcaccgcgcgccacaatggagtcgtcgcgggggaagcccggcctgaacggcagcggcggcggcgnccctttcggtactacagcagccgccggggctactacacgggcgccggcgnggcgtngccgacgtttggacgatggttccagggcgacgacggtggacccgtgctgcgtggttctgcgggtgtcgt

SEQ ID NO: 27995 - DNA, 1377 bp, Oryza sativa
  Clone ID: PAT_MRT4530_32636C.1
tcacggagtgcccgagcccccgaggccggtgtcgttgaccacgtcgtcccaatcctcgccgccgacgtcgtcaccaccgtctccgctcccgctctcctcatcttcgctcccgctctcctcgtccgaggcaagcccggaggtgaaccgaggggccgaccccttgaaattagagacgatcacgtcggccgcctcccggacttgctcccgagcccttgcctcggttcccgaggggaattcctcgagtgcgcgccatgggacgaagtcggggtcgcgagcttggtagcttgcgaggaccaattccaccgcagcccgcgccaaggaagccgacgacgatttgacggtctcgccgacctcctcctccagcctctccaggtcagccgccagcccatccagccggaacacgagtgccggctgtgtgggcaggagcttcctgtcctggcgtacggagatgcccactcggcgtcccgcgcgttccagccgatcgacggcatcggagagttgcccgggcccgatctcgttggtaaggcggagggccgcaatctccccagcttgatcttgcaccaggcgccctaggtcggcaagagcgctctgagccgcggtaagctggctcgccatctggagagcgcttgtgccgagcgcgcagtgatggcggcaagggcttctgagatgggtgcgcatgggatcattgggtccagtgtactcccacgcctcgcgggaccgctcttggagaggtgcgatgcggcggcggaagtaatcaccaaagaccatcgcccccgtgaggccctggtttcgcaggcccctaaggcggtcccgcgctacgtcgtactcctcgcccagttccgaaaccgccaaccatgcggcggatcgttcgggagggccggcggggagtcgaagtcgcgggtggtccggcagcgcggtgtagaaccaatcctcccacttattgcggagatgactctcgatgtattgccccgccgtgccaggccgggactggaagtagcatccccccaccaccgcgccttgcagcagctgcgggacgaagaagaactggaacaaccgcatcgtcggccgcaccccgacgaacatctcgcacagatgcgcgaagatggccagcgtcatcacggcgttgggtgcgagatgcaaagcatggatctcgtagaaatccaaaacctcgtggaagaacctggagaatggcgggaccaaccccgccatggcgaaggacaggaggtgcacggatcgctccgggtactgcggtcacggccgcgactcccccgccctcacggcggcgccctctggcatgatcttgcgggggagactaaggtgccgatccgccgtgatgcacgatgccggaagcacagcgtcgccagcatcttgggccat

SEQ ID NO: 27996 - DNA, 582 bp, Oryza sativa
  Clone ID: PAT_MRT4530_32637C.1
gagagcctttcgcttttttggtctcctgcatgctaacctttgctgcttgtttgtgctaacattcgctctctgaggttgcggtgtagtttcaatcaatggaagacgccgatatatatattggtcccaagttaatgtaaagtttacatctgtaattctcaggcctgggtaaaattagttttagttctgtatagacctattcttaattgtcatgcaagctaattaatatctgaaaacctgacaatcttgcgacgagaattatctctgaaggttctgaaagagcaaggtaaagccatcccttgaatattgctgcatcataaaaaatgacttgtggctctaacaaaaccattggttaaaaggtctcaacaaaaacccttcttattatggttctcatcagcagcctaagaaattctgtactgtctgcttacatctttgcatgctaaaaattacaattaaagctgttggtttctgtattgttccctgtcacttgaccacaccacttgtgcgtgatgattctctccacaccgtcgccctcgtgcactgaaagccgctgcatcggtcgagtctgctgttacgactgtcttc

SEQ ID NO: 27997 - DNA, 402 bp, Oryza sativa
  Clone ID: PAT_MRT4530_32638C.1
atggggccgtacacgttagatagcgggaaggctgttttggctcgcaataaagctagggtcctgatcgagcaagactacgtcctatctatctacctctccaaacacaatatcttgagtacctatgatgaaagggcgggcactctcggctcggaggtaggcactctcgtctttcaaccccaccgtcactttgaatttagtggggcactgtttacttacagcctctacgagttgcaagtaatggggcccgggcgggtgaacccaaggggggcaattggtttcaacccgactgggaaggcccccttggaaccttatgtcaactttcaaccaggtaacccgagaaaccccttcccggccacaaagggttttctccttccggggttccgcgggttcctattgccccgg

SEQ ID NO: 27998 - DNA, 498 bp, Oryza sativa
  Clone ID: PAT_MRT4530_32639C.1
atgtcgtcgtcgtcgtcgtcgttgaaggccttggtggcgttcatggccgtggccaccgtcgccgagctcgccgccggcagcaagacgtgggccatcaagtgggcctccggcgggaactacggcgactggtcgtccaagaacacggtcgccgtcggcgacagcgtcgtgttcacgtacgggacgccgcacaccgtcgacgagctgtcggcggcggactacacggcgtgcagcttcgccgccccgctctcgtcggacgccggcggcagcaccaccgtcgtcttcgacaagcccgggacgaggtacttcgcctgttcgtccgggtcgcactgcagcatgggccagaaggtggccatcacggtctccaactcgacggcgccgccgtcgtcgtccaagggcggctcgtcgtcgtacggcgcggcggccggcggcggcgccgagctcgcctccaagctggtggtgggcctcgcagtcggcgccggcgccattcttgcgctctga

SEQ ID NO: 27999 - DNA, 2220 bp, Oryza sativa
  Clone ID: PAT_MRT4530_3263C.1
atggaaaaacctaagagccctctgaatccttttcattgcatatgttctttgcaattggatttgttccgggaaaattgggatctgttcttgtggttcaagggaaaaatcttggtcgctcgtttaaaggtcaagaagcaggttgatgagcagctgcagaaagggtacattcgaccaagtacttcatcttggggtgctccggtcatttttgtggagaaaaaggataagacgaagaggatgtgcgttgattatcgcgcactcaacgaggtcactatcaagaacaaatatcccttgccgcgaatcgatgatttgtttgatcaactgaaaggagctaaagtgttttctaagatagacctgcgatcaggctaccaccaattgagaattcgggaagaggatattccaaagacggccttcaccactcggtacgggctatatgagtgcacggttatgtctttcggacttaccaacgcacccgcattcttcatgaatctgatgaacaaagtgttcatggaatttctggacaagtttgttgtggtgtttatcgacgacattcttatctactcaaaatccgaagaagaacatgaacaacatctccgtctagtactcgagaagttgaaggagcaccagctatacgccaagttcagcaagtgtgacttctggttgacggaagtcaaatttctgggccatgtcattacagctcagggtgtggcagttgatccatcgaacgtggagttggttaccaaatggaccccgccgaagaccgtgtcgcagattcgaagttttcttggacttgcaggttattaccgccgattcatcgaaaacttctccagaatcgcccgacccatgactcagttacttaagaaagatgagaagtttaaatggacagctgagtgcgataagagttttgaggagctcaagaagaaattagtatccgcaccagttttgattctgcccgaccagatgaaagacttccaagtctattgcgatgcatcccgccacggacttggatgtgtcctaatgcaagagggcagggtggttgcatggttggaactaatcaaagactatgacatgagcattcactaccacccgggtaaagccaatgtggtggcagacgcattaagccggaaaagttactgcactgccctatgcatcgagggcatgtgtgaggaattgcggcaggagtttgagcatctcaacgtgggaattgttgaacacggttttgtagccgctctggaggcacggcctacgctcgtggatcaagtcagagcagctcaagtaaatgattctgaaatagaagagctgaaaaagaacatgagagtcggaaaagcccgggatttccacgaagatgagcatggcacaatctggttgggagaaagattgtgtgtacctgacgacaaggaactgaaggatctgatactcaccgaggctcatcagacccagtactccattcatccaggcagcactaaaatgtatcaagacctcaaagaaaagttttggtgggtcagcatgaggagagaaatagctgaattcatcgcactctgcgatgtttgccaacgagtgaaggcagagcaccaaagaccagcagctttatacggccggaagtgccgcacacctctcttctgggatcagacaggcgagcgtcaactgttcggaacagaggtattagcggaagcagaagagaaagtcagaatcatcagggaaaggttgaggattgcccagtctcgacagaagagctacgcggataaccgtcgaagggagctcacttttgaggcaggagattacgtgtatcttcgtgtcactccgctccggggagtacaccgttttcagacaaaaggcaagttggcaccacgcttcgtgggaccatacaaaatcctggaacgaaggggggaagttgcttatcagttagaacttccatccaacatgatcggcatccatgacgtgctccacgtgtcccaattaaagaagtgcttaagggtacctgaagaacaggctgattcggaacacattgatatccaggaggacctaacatacgtggaaaagccggttcgtatacttgataccagtgaaaggagaaccagaaacaaggtcacccgattttgccgagttcagtggagtcatcattcagaagaggaagcaacctgggaaagggaagatgagttgaaagccgcccatccgcacctcttcaccaacttctccgaatctcggggccgagattccgtttaa

SEQ ID NO: 28000 - DNA, 234 bp, Oryza sativa
  Clone ID: PAT_MRT4530_32640C.1
ttatggaaaaccggcgaaaaccccagcattgatatactgaacccggagaaatcccttgatgtggagtttgaacgagggctccaatagcaacgcctgcacaatggccggacaaacgtcattgatgacctgctcagccacctcgccggactgatggagcaccactaaactgcagagctcgtcggcaccaccggaccatcggcgccacacaggcccacccgtcgtcaccaccgccat

SEQ ID NO: 28001 - DNA, 364 bp, Oryza sativa
  Clone ID: PAT_MRT4530_32641C.1
actgcgaactaaatttactgagtaggcatgggccagacatacattcatcatgatatgacgacagtctagttcatgtacaatgtgaactttccaaagatgttaatgcagaatatatagccctagctattaattaaacttgcaataaatgcaaatatatacattattcaaagaggctgactcacgagtctaaaagaggatgctggacaacacgattgacacaagacgaaaacggcatctagctctccatggtagatacaaggaagtagctttggtgcaaaacgctgtccgaagtgatcttgaataaagcctcatctgtatgtgggagtgtaatcaaaccgaaggccggaatcgatacgaatgaact

SEQ ID NO: 28002 - DNA, 294 bp, Oryza sativa
  Clone ID: PAT_MRT4530_32642C.1
atggggcgtgaagaagtccgtgcacagcctgtgaagtgtgcgctcgacgccttcgtggccggtggtggggccggcggcgacagcgcgggcagtgtcggggaagacgtcggcacggacacggtcctcgttcgtggtcacctcacgcctagggatcgcaacggggcggggccgagttgggctgaaacggcctcgcccccgacccctgactacatcccccgcccctggccccgactggagatgtgggccaaatcaggccccgtccccgacccctctagggccccgcaacccgactag

SEQ ID NO: 28003 - DNA, 866 bp, Oryza sativa
  Clone ID: PAT_MRT4530_32643C.1
atggactccccagtgacccccgtgggcttatctcagccacttctcagtctggaaaaatgatttattgcgtcagcgggctcgggttcacggtggaccgggttcacagaaacggtccatggaacgaacggctgagatctaatctaaactgaacgaacggccgagatcgatctaatctaccgcgggtctacggctgacgtggcgctgacgtcgacgatgacgttatcaccggcggtggctcggcacctcgtgctcgccggtgaatgacagtgcggcggcacaaatggaccacacctacggatagagggcgacgcgatgaactcaccgagggttcggacgacgacggacagcaaccgacggcgacggcggcgaggtccaggtggcggaggcattccggtcgacgaggacggtgatgctccggcgatcttcggcggaaacttggcgaacccgacggcggccttccggagcaacgacggcgactggaacagcggcggcgcacgactggacttgcggcggcgacggcggcgcacggactgatgcggaggcggtactacaagcgacggcgggctaaggtaaaggtggcggcgaacaaaggaggtctcgggggtccttttgtaggggctagggggtggcggctaggcccactgcgtccggcggtggcgatggaaggattagggttggagaagagaaatcgaatccgaatcgaactcgaatccgacgatttccaaacaatattagatgaagtttctataggagaaaagatagaggagatcaaggggatcatttcccctctaccaatttgatcggatcgggaaagatgcgaccagatttggaaggggcggcggcggcttgcgcgcggctagggcgcg

SEQ ID NO: 28004 - DNA, 543 bp, Oryza sativa
  Clone ID: PAT_MRT4530_32644C.1
atggcgcaggcttgcctgttctgtggcaagcctaaggaggatgcaaatgcttatttgcagcaattcctgttaagttgtagcaccttgggaaaggctgcaggaatgcgtcaccgcccgtcctcatcatgggatggacgagtggctcatcctgcagaatttcttcaacggattaacaacggattaacactctcgtcctgggatcaactggacgctgctgctggaggagcacccttctcaaagatggtcagagataccactgatctgattgagaagaggctctcaaatatgggttggagcgagaaacaacataaacccgtcaatgcgttggatctccttatgaagagactggacaacaatgagaaggacgccaagcagggtaccattaaggccctgggctctcacatggcatgtgaggtctgtggcaatgacggccactttgggacgaattgtccaaaaacctgtgagaatgtcaaagctcacgaacaacaacaacgggtatcatccacaaggagaccaaggatggagcattgcttcatggggtag

SEQ ID NO: 28005 - DNA, 2349 bp, Oryza sativa
  Clone ID: PAT_MRT4530_32645C.1
atgggcttccagcgcagccccaaggtgtccaagtcgccggcgcacatcgcgctcgcctgggcgtttccctccccgccacccgcttcccaaccccaaagacgccgcgcgctactgcttaaaccccggaaccaccaaccaggggcagcgctgcacgcccatgcagtgcgagaggcagcgcccccacgccgcacgcgctgccacggacatatccgtgctgccgcgcccccaatcctaacaatccgctcggcgtcggctcgccttcaccatggtggccggccgcgtcaaggcggccatgggcttccagcgcagccccaaggtgtccaagtcgccggctcacgtcgggcggacgccggagactcctggccgggggtcatcgtctggctccccggcgccgggcggctcggcgtccaaggctgtctccttcgcgcggtccttaggcgtgcacttcccgcgctcgtcggctcaggtgcagccggcgcgcgccccgccggaggtcgccgacctgctgcgcgccatcgagcagctccaagagagggagtcgcgcctccgcgtggagttgctggagcagaagatcctgaaggagaccgtcgccatcgtcccattcttggaggctgagctcgccgcgaagagcagcgagctggagaaatgcaaggacaccgccgcgcgactggagtccgagaacatgcggctgtgcgcggagctcgacgctgccgtgctggaggtgacgagtaggaaacagaggattgttcacatggagaaggaaatggcggagctgaagaagcaacaggaggctgccgctgctgacgctgacgactgctcgtccacggcttcggtctcacacgagcaacccgagagcgccagttccgcagccaatcccgcgagtctagttcaacgtggaccgcccattccaccgcccccgccgccagtgccaccggcggcattcaagtccaagtcctactctgcctcgtcgcgcgtgtcgcttccgagtacttcggcgccctcgccatcttcttccacctcgacttcaccaacgtactcctgctcgtcgtcagacaccgtgaccacgccatgaaaccgaaaaccagagctctcgaagctgacgcccatacctccgccaccaccaatgccagcactcagcgtttggagtcgcgcagccgcgccacctcctcctccgccgcctcctccggctcggagaacgtcgggggcagcttcgccggctgcgtcgggaccgcgcgtgacgagagtgcccgaggtggtagagttctaccactcactgatgcggagggattcaagatcaagggacgggagcggcggaggcgaaaccgccaacggaggcggagtggccgcgacgagggacatgagtcggcgaaatcgagaatcgttcggctcacctcctcgcgatcaaatcggacgtggagaggcagggcgacttcatccggttcctgatcaaggaggtggagggcgcggcgttcgtcgacatccgaggaccgttgtcacgttcgtcaagtggctcgacaacgagctgtcgcgcctggtagcacggcgtctacaacctcgcccgcttccgggacggcgccacgggcaggtacagccggttccagatcccgtgcgagtggatgcagccagacaccggcatcgtcagccagatcaaactccagtcggtgaagttagcaatgaagtacttgaagcgggtctcttctgaacttgaggccataaagggtggtcctgacgaagaagaactaatgcttcaaggagtgcgattcgccttcagggtacaccagtttgcaggcgggttcgacgtggacaccatgcgggcattccaagagctcaaggagaaggcatctatgtgccggatacaacgacaagagcagaaccgtcatctaaggaggcagcaaaaactcgttgccagggcctgagcaccattttactatcccgatgtatcatatcatttcgtcgttaccatagttcgtttgctttcttgcttgtttctgttgagaaatgttctcactagatttatcacaccagtgaacaatctatgttctcgttgtcactgtagccgtctttcatttttgtcccctccatgttctctctctagggccctattcctaaccagtatctcgtcagcttggctgggttgtgattagctttacataattttgcagcgaaatgtatgtgtgtggtggtagataaatctgttgtctggaaattctggtactaccatatgtaaaggattactgccaacggttgagatcaacgttgtgcttgcctgcttggtatatctttattaagcgtattggattagactcgaaggaaaaaaaaaaaaaaaactcgagactagtcctcgtgccg

SEQ ID NO: 28006 - DNA, 236 bp, Oryza sativa
  Clone ID: PAT_MRT4530_32646C.1
tgcccatgttgggaacatccacgctcacaaccttccgtgtatattactgcagggcctgcccccggtttccaagttctcaacaacactgggaaaagacagtgttcaacggcgagtttcccgcggacagctgcttattataccactacacctatgcagttgtaaagaaggctcaaagagaaggatgcgcttacacgtggcagttcagagacccatccctagactctatggtaagccac

SEQ ID NO: 28007 - DNA, 518 bp, Oryza sativa
  unsure (1)..(518): unsure at all n locations
  Clone ID: PAT_MRT4530_32647C.1
tcaagacccgcatcgacccggagctcatcgccggcttcaccatccagtacggccgcgacgggtccagcctcatcgacatgagcgtccggaagcagatcgaggagatcacctccgagttcgagatgcccgcagtaaccctcgacgtctgatcggcatccaccaccctcccggcggcgctgccttggcccttagctccattgtcacagggaatctcgaaggcttgtcaagaatgctggtcctcatccccctcagaactgaagatataatggaggaggctcaaatacatatgacgatcacgacaacattcttttctgcatttcttttcattttttggccggagccaatgtaattctcttttctttcgttgcccttgtaatttgcttcaaatactaaactatagcgaggctgctcctccattatgtacctgccgatagagtttgcagatatgtatagaaagtgccattgttttcatcaaaaaaaaaataatccanaaaataaaaaaatataaaaataaaatg

SEQ ID NO: 28008 - DNA, 406 bp, Oryza sativa
  Clone ID: PAT_MRT4530_32648C.1
ttgtttttttttttttttttttttttttttttttttttttttttttttttttttctttttttttttttttttccccgggaaaagggggacaacttcaacatttttgttaaaacgggcaggcttaggatccagggacccagagacgttctaaagctcacatattaggggtttggatcacacagcagggttttaatgaagtccacagaccccatttgggatataaacccccccattttagcataacagtttttaccaatttaacaaatttgggtggcctttgacgggacaagggcttatagcagtttgggaattatttttggggggaaaaccctaagccgggggccttaagctaaaccaggcggggggagaggtcttttttataaacagccttttccttttccttggc

SEQ ID NO: 28009 - DNA, 1852 bp, Oryza sativa
  Clone ID: PAT_MRT4530_32649C.1
tacaccaaaaaagtaagcaacacacaattcaccaggatacggaccacataagactcccaagcaaccgtagatgccctctataacaaacgaaaaaatcgatgacaagacaacgtaccccggtacagaggctggccaaacggaccaccccaacaatttttgggtacgtggcggaaagattaaagggaacctaagggaccccatttaaagtttcagggaaaaccagcgcagggggagcaagaaaggcaccaaccgaaaaggcgggcgtaaggcccttgcaagtgaagagtcacaatgggggtaaccaccacccccccccgggtttatgggccgttaaaggggggttccctttccctataagggtgggaaaattttggaaaggcgaacggtgcgggccctttgctatttacccaagctgggaaaaggggatgttcttccaagcgaattaatttgggaacccccaggtttttcccgtccccacgtttttaaaacaccggcagttagggggggttaaaccactccctataagggcactgcggggcccggccccccccccccggctttttctgttacatgagactcggttgttcctgaggctccaccttttttcagcttacgggtttcttttgctagccagatgttgtcgtcaatccgtagcgtcgattcaaacacctgagagactttttacttctctcctcgcatcatttgtccaaaaatttcagccttacaaaccagggtgcaagtgaaaaacaattagaccaaaagttttgtgcagcactacattttagcaccagtcactcacaaccacaagttttattcttcttaagatgtacccttttgcttcttgggcatcctgtaaccaccaacgacgcaggcatggtcacgctcgaaaggctccagcgtcacctgctcagagggcttgaactgatctgccttcagcttctcaacttcactagcaaacacagcctcagctggcatggtggagtcgatacaattcgccttgattgaaatgacaaaatgtccaccattcttcaggaagtaggatgcattgagggctaagatcctagcctgatctggctgggcaacatcagagaagataacatcaaccatgccaaccaacatccggtacctcgccgggtgcctagcatcttcaatgatgggaattacattggtcctctttttggccatgttgacaagatccctaccactcctgtgcgagaactcaacagcatagaccaaaccggtcggtccaacaatatcagacacatgagacacggttgttcctgaggcaccaccgagatacagcacacgggtaccaggagcaatccagatgttgtcaacaccaccaagcacagcagcagccaactttgaacggaagggattccacaccctgtattcaaccttggttccatcctcattctggacggagatgcgcttctcgccatagacggactcgccggggaccatgttcttggtgcagagcgcgtcctccttggccttggcgatgaacacgccgtcgtgcttgtgcggcaccacgaccaccttgctcccgcccttcatgccacccctcccgccgccaccgcggccgccgccacggcccctcggcgtcctgcctcccctcccaccacggcctcctctcccgccgctgtccccgaccctcccgaatcccctcccaccgccgccgccgcggccgccgccatcgcctctccctcctcctcccctcccgaatcccctgcctcgcggtggcctcatggcgtcgactcgacgatgttgctctccgccgccgccgccgccgccgccgcaggtgagggggtgggtgtagggttttggcctgcagcccggggatccactagtt

SEQ ID NO: 28010 - DNA, 10053 bp, Oryza sativa
  Clone ID: PAT_MRT4530_3264C.1
atgggttccaagatggccggccacccacccaaccaccgcggagaaggcatgatcgactttgtggcagagttggcacgcatgacactggtggtgggctaccccaacgcgccagagtacacgacgattccacagctcagtggcgagcttcctcaccgtgttcgcttggaggtccacggctacgtgggtacctgcctagctaacatggtggtcgaggcatctggaggcacagcagatcatgcctgtcaggaggcagcctacttgatgatggccagactacgggagcgccacaactacatcttccacgacacggcgtaccgcttccacccccgtcgagccaacggtgatgacgtcagctccttccgtccgacagctggcgagaacgacaccacctttggtcacatgtgtgctgtgatgaggggattggacaggatgcactcggacctgcacaaggcgaccaaggccttgaacgatgggaagctcatgaggatcgtcgctctgaaggacgagatagcgcgcctgaagagggagaacgctcagctaaagggtcttccagcgccaggaggagtccggatccgcactacgccccgcaagacgacgacggcacccgtgcgcatccagcttgcgcccaggaacccacctccatccgcagctcccgcagcacctccagttccgcccgcagctccggcagttcctgcagctccagctcccgcgtccgctctctccttcgctcccgcatcagccgccaggggtccagccagtggcaatggaggttgcttgtttgggatggtctacaccaggaatggtagccgcgcaacaggcgagggcagcaacggcgaagaacgcgctgacggtgtgcaccccagcagtgattccggcaatggtccgccaccacttcccgagaatccgacccttgcccaagttatggcacatcagactcagatgatggcagccatgatgcagcagatgcagcagcagcaccagcagatgcaccagaggatgatgcagcacgtcgaacagcagcaccagcagtttggtccccctccccctcagtccaagttgcctgagttcctacgcgagaaggtcgctttcgccacacaccagcttcagggtcccgcgtcagcttggtgggacaatcacatggccacccgcccaccaggtactgaagtcacatgggcagagttctgccgtagcttcaggaaggcgcaggtgccagacggggtcgtggcacaaaagaagagggaattccgggcactccatcagggcaacaggactgtgacagagtacctccacgagttcaatcgcctcgcgcgatatgcaccagaggatgtccgcaccgacgctgagaagcaggagaagttcatggcgggtctggatgatgagctgaccaaccaactgatatccggggactacgctgactttgagaggctggttgacaaggcaatccgccaggaggatcaacgcaacaagatggacaggaagaggaaggccgcacagttcagggcacctcagggaagtcaccagaggccgcgcttcgctcctgggcagcagggtggacctaccaccatgatcgttcgtcagcaccgcccgttcaaccctagcaactttccccagggcgccagtggcagtcagaaccaccatggaggtcagtccaaccgcggtgcagcttcacgcccaccaatggcaccggcacagtcaggccagcccgcgcaagccaagaaggagattggagcaaaaccagggtcctgcttcaactgtggcgagcttggccacttcgctgacaaatgcccgaagcctaggagtgccgggccaaggtttatccaggctcgtgtcaaccacgcatctgcggaggaggcacaagcagcaccagaggtcgtactgggtacgttccctgttaactcaatccctgcaacagtactttttgattctggtgcgacgcattctttcatttcaaagaaatttgtcgggatgcatgggtttataagagaagaacttagcacaccgatgcgggttcataccccagggaatagctccacttcggttcaattcagcccttctataacaatagaaattcaaagatcaccatttctagccaacctcattcttctcgaatccaaagacctagatgtcattcttgggatggattggctgaccaagttcaagggagtcatcgattgtgcgaatcgcacagtcaccttgaccaacgagaagggggaaacggtagtgtacaaatcaccagactcaccaaagcaaggagtctccttgaatcagattgaagcggaaatcccagtggacaccgtggagaggaatttgaggaaattggaagacatacccatagtctccgagtatccagaagtgttccccgaagacctcactaccatgccacccaagagagagattgaattccggattgacttggcaccgggaaccgctccaatttacaagagaccgtacagaatggcggccaacgaactagcagaggtcaagaagcaggttgatgagcagctgcagaaagggtacattcgaccaagtacttcaccttggggtgctccggtcatttttgtggagaaaaaggataagacgaagaggatgtgcgttgattaccgcgcactcaacgaggtcacaatcaagaacaaatatcctttgacgcgaatcgatgatttgtttgatcaactgaaaggagctaaagtgttttctaagatagacctgcgatcaggctaccaccagttgagaattcgggaagaggatattccgaagacggccttcaccactcggtacgggctatatgagtgcacggttatgtccttcggacttactaacgcacccgcattcttcatgaatctgatgaacaaagtgttcatggaatttctggacaagtttgttgaggtgttcatcgacgacattcttatctattcaaagtccgaagaagaacatgaacaacatctccgtctggtactcgagaagttgagggagcaccagctatacgccaagttcagcaagtgtgacttctggttgacggaagtcaaatttctgggccatgtcattacagctcagggtgtggcagtcgacccatcgaacgtggagtcagttaccaaatggaccccaccgaagaccgtgtcgcagattcgaagttttcttggacttgcaggttattaccgtcgattcatcgaaaatttctccagaatcgcccgacccatgactcagttgcttaagaaggatgagaagtttaaatggacagccgagtgcgataagagcttcgaggagctcaagaagaaattagtatccgcaccagttttgattctgcccgacccgatgaaagacttccaagtctattgtgatgcatcccgtcacggacttggatgtgtcctaatgcaagagggcagagtggttgcgtatgcctcgcggcagttgcgtccacacgaagggaattatccaactcatgacttggaattggcaacagtggttcatgctttgaagatctggaggcactatctgattggcaaccgctgcgaagtatatacggaccataagagtctgaaatacatcttcactcaaccggacctaaatctccgacaacgaagatggttggaactaatcaaagactatgacatgagtattcactaccacccgggtaaagccaatgtggtggcagacgctttaagccggaaaagttactgcactgccctatgcatcgagggcatgtgtgaggaattgcgacaggagtttgagcatctcaacgtgggaattgttgaactcgggttcgtagccgctctggaggcacggcctacgctcgtggatcaagttagagcagctcaagcaaatgattctgaaatagcagagctgaaaaagaacatgagagtcggaaaagcccgggatttccacgaagatgagcatggcacaatctggttgggagaaagattgtgtgtacctgacgacaaggaactgaaggatctgatactcaccgaggctcatcagacccagtactccattcacccaggcagcactaaaatgtatcaagacctcaaagaaaggttttggtgggtcagcatgaggagagaaatagctgaattcgtcgcactctgcgatgtttgccaacgagtgaaggcagagcaccaaagaccagcaggtttactccaacctcttcaaatcccggaatggaaatgggaggagattggaatggactttataacaggactgccccggacatcatcgggtcacgattcgatctgggtagtcgtggatcgactcactaaggttgctcacttcataccagtacataccacatatacgggcaaaaggttggcggagctttacctttcgagaatcatgtgcctacatggagtacccaaaaagattgtatctgaccgagggagtcagttcacctcaaaattctggcagaagctacaggaagaactggggacccgtttaaatttcagcacggcctatcacccgcaaactgatggtcagaccgagcgagtcaatcaaatcttggaagatatgttgagagcttgtgctcttgattttggtggagcttgggacaaaagcttgccatatgcggaattctcgtacaacaacagctaccaggccagtctacagatggcaccgtttgaagctttatacggccggaagtgccgcacacctctcttctgggatcagacaggcaaacgtcaactgttcggaacagaagtattagcggaagcagaagagaaagtcagaattatcagggaaagattgaggattgctcagtctcgacagaagagctacgcggataaccgtcgaaaggagctcacttttgaggcaggagattacgtgtatcttcgtgtcactccgctccggggagtacaccggtttcagacgaaaggcaagttggcaccacgcttcgtgggaccatacaaaatcttggaacgaaggggagaagttgcttatcagttagaacttccatccaatatgatcggcatccgtgacgtgttccatgtgtcccaattaaagaagtgcttaagggtacctgaagaacaggctgattcggagcacattgatatccagggggacctaacatatgtggagaagccgtgggtagtactcagtcttgctctacttttcccaacctcagagttcgagttcgggtcagatgaaggtgtgacaaccatcatcgaaaaatacgacggaagcgtcaaccccgccgagtttctccagatctacacgaccgggatcgaggccgccgggggtgacgacagggtcatggcgaatttcttccccatggccctgaagggtcaggcgcggggttggctaatgaacttgccacccgcgtcggtccactcttgggaggatttgtgccagcagttcaccacgaacttccagggcatatatccgcgcccagacgaagaagcggacttgcatgcggtacagcgaagggacgatgagtctcttcgctcatacattcagcggttctgtcaagtccgcaacaccataccgtgcatccccgcacacgcggtgatctacgcgttcagggggggcgtgcggcacaaccgcatgctcgagaagatcgcctccaaggagccccagaccaccgcgcagctttttgagctcgcggaccgtgtggctcgcaaggaggaggcctggacctggaactcctccggttctggtgtggcagctccggccgcccccgggtccgccgctcggtcagggcggcgggacaggaggaggaagaagggctcggcccgttccgacgacgagagtcatgtcctcgccgtcgagggcgcttcgcgggccccccgaaaggggaggcctgcgagcaacaaaaagaaggaggccggcgctcccagcagggagcgcccgaccggcaagtggtgtaccgtgcacaacacctccctccacgacctcgcggactgccgcgcggtcaaaagtttggctgagcggacgagaaagtgggaggaggagaagaggcaggagcgtcgtgagggcaagaccccggcggctcccgccggcaaccggcgaggtgaggccaagcagaaggccaccgccgaggacatcgacgatggcgacgatgacctggggttccaggagcctgaggccaccgtcgccaccgtcgatgggggagcgtgcgctcacgcttctcgccggagcctcaaggccatgaagcgagagcttctggccgcggcccctacccatgaggcgacgtggcgggcgcggtggtcggaggttgccctctccttcgaccagaccgaccacccgccgtgcgttgcccggggaggacagatcgcgatgccgctgggtcatatcgacctcccggtcaccttcggtggttccgccaacttctgcacggagcgggtggacttcgatgtggcggacctcagtctgccctacaacgcggtcctggggaggcccgcgttggtgaagttcatggcggcggtccactacgcctatctccagatgaagatgccgggccccggtggccccatcaccgtccatggcgacctcaaagtcacgcttgcttgtatggagcagcgcgcggaccaccttgccgcggcgtacaagcccgcgggtggcgacgagaggctcagcacctccgtcccggccgccccaaggcagcggatggtcacgtgcgatgaggtctcggtcaaggaggaagacgcgctcgtctccttactgcgggcaaacaccgacgtcttcgcctggagaccggcggacatgcccgaggtccccagggaggtgattgagcaccgtctcgccgtgcagctgggcgcaaggccggtccggcagaaagtgcggcggcaggccccggaacgtcaagccttcatccgcgaggaggtggcgcgacttctggaggccggattcatccgtgaggtcatccatccggagtggctggcgaacccggtcgtcgttcccaaggcgaacggcaagcttcggatgtgcatcgactacaccgaccttaacaaggcatgtcctaaggacccttaccccctgccacgcatagatcagattgtcgactccaccgcggggtgcgaccttttgtgttttctagatgcatactctagttatcatcagattcgcatggctagggaggatgaggaaaaaactgcattcattacccctataggaacttattgttatacgacaatgcctttcgggttaaagaatgcaggtcctacttttcaacgtactactcgaatttctttgggtagccagataggacgcaatgttgaggcctatgttgatgacttggttgtgaagacgcgcaaccaagagaccttactctcggatctagcggaaactttcaaaagtctccgctccgcccgcataaagctgaaccccgataagtgcgtgttcggcgtgcctgcgggcaagcttctcgggttcttggtctctgcccgaggcatcgaggccaaccccgagaagatacgagctatagagcggatgcacccccccagcatgcttagggatgtgcagtgcgtcaccggctgcatggccgccctaagtcggttcatatcgaggctgggagagaaggcactacccctatttaagctcctcaaacgctccgggccgtttacctggacggaggaggctgagcgggccttcactcagttgaaggcgtacctcagttctcccccagtcctggtcgccccggagccagatgagccgttgctactctacctggcggcaaccccgcaggtggtcagcgcggcgttggtcgtggagcgcgacaaggacaaccctcactccgcgcatccccaccctgtgtcgactcgacccgggagagagcagggaggagaggcccccgagccgaacggcggcccaggccctcgacggccggagctggccctccgcctgcttgtccgacggtgccaggtcgtcggcacagaagccgagtgcgccccgtgtggcctctcggacgaagagcgccctggagatgcggcccctggcgaagaggatcggccccgccgaaagatgcagcggcccgtctacttcgttagcgaggccctccgggacgccaagacccgataccctcaggcccagaagatgctttacgctattctgatggcttcgaggaagttgcgccattatttccaggcgcatcgggtcacggtggttacgtcttaccccctcggccaaatcttgcataaccgagagggtactggacgggtggtgagatgggcaatcgaactctctgaattcgatttgcgctttgaaccacgccacgcgatcaagagccaggccctcgccgactttgtggcggagtggaccccagctcccgagcccgtctccgcccccaaggccagctcgggcccctcgcagctgcctcacaccgcctactggggcgccggtgcgggggtcacgttgacctcgccgagcggagacgtcctcagatacctggtccgcctcgactttcgggcgaccaacaatatggcggagtacgagggactccttgcgggactcagagtggcagctggactggggatccgccgcctcctggtgtttggcgactcccagttggtcgttaaccaggtctgtaaggagtaccagtgctctgacccgcagatggacgcttacgtgcgccaggtgcggcgtatggagcgccatttcgacgggatagagcttcggcacgtgcccagacgggataacacggtcgccgacgaactctcaaggctcgcttcctcgcgagcccagaccccaccgggcgcctttgaagaaaggcttgcccagccgtcggcgcgacccgaccccctaggagagacggacgcgcctgaacggcccccgaggcccgtcggagtccaggcctcgggacccgaggggagcgctcccagctcccctagattgattgcttggatcactgagatccaggcgtacctcgcagataagactctacccgaggaccgcgaagggagtgaacgcgtccggcgcatctccaagcgctacgtgctggtggaagggaccctctatcggcgcgcggctaacggagtcctcctgaagtgcattcctcgggaacaaggcgtcgagcttctcgccgatatccatgaaggcgagtgcggagcccactccgtctcacgcaccttggttggcaaggcctttcgccagggtttctattggccgacggctctcaacgatgcggtcgacctggtccggcggtgcagggcgtgccagtttcatgccaggcaaacccatcagccgacccaggccctgcagaccatacctctttcgtggccgtttgctgtctgggggctcgatatcctgggtccgttcaggcgggccccgggcgggttcgagtatctgtatgtcgctgtcgacaagttcactaagtggcccgaggcttatccggtcatcaaaatcgataagcactccgcacttaaattcatcaggggcatcactgctcggtttggggtgcctaatcgtatcattacagataacggcacccagttcactagtgagctcttcggtgactactgcgaagacatgggcatcaagctctgcttcgcctcccccgcccaccccagaagcaatggccaagtggagcgcgccaatgcggaaatcctcaagggcctcaaaaccaagaccttcaacatcctcaagaagcacggcgactcgtggatcgaggagctgccagcggtgctctgggcgaaccgaaccacgccaagccgagcaaccggggaaacgcctttcttcctcgtctacggcgcggaggcggtcctcccatctgagctcaccctgaggtcccctcgggtcaccatgtattgcgaggctgatcaagatcagcttcgccgagacgacctcgactatttggaagagcgaagacggcgcgcggccctccgagccgcgcgctaccagcagagcctgcggcgctaccatcagcgccacgtccgggcccgatcactctgcgtcgacgacctcgtcctacgccgcgtccaaacgcgtgctggactgagcaagctctcaccaatgtgggagggtccgtatcgagtaatcggcgtcccccagccgggctccgttcggctggccacgggcgacggcacagagctgcctaacccgtggaacatcgaacaccttcgtcgcttctacccctag

SEQ ID NO: 28011 - DNA, 607 bp, Oryza sativa
  unsure (1)..(607): unsure at all n locations
  Clone ID: PAT_MRT4530_32650C.1
tcggtcgattggcatcggagaaactacacaatggcttctcagcgggtatttcagcttggtctgcgacgggccgccgcgcccagtctgagggtacaacctgcgggacgcatggtccagcggagacttgcagcaacggaacacgcctcgcagtctgaagccgccgagatcctcgcgaaacagcgtgtcaaccgccccgtctccccccacctggccatctacaagccccaaatcacctggtacgcctcgtcgctcaaccgaatcaccggcattaccctctcatgttccctctacctcttcggtatcgcctacctgattgccccatacaccggatggcaccttgagacgcagtcaatggtagccactgtcgctgcttggccagcggctgtgaaggccggattgaaggcgttctacgctttccccttcttcttccacagcttcaacggcttgaggcatctggcctgggacgtcggtattggtttcaagaaccaacaggttatccgcactggatggaccgcttgtggcttgaccgtcgcattcagcttgtactacactnntcctcgataagaatgcagtatttgctgtgggagcgactganggaatgagggaa

SEQ ID NO: 28012 - DNA, 594 bp, Oryza sativa
  Clone ID: PAT_MRT4530_32651C.1
atggcgcgtcaggggagcacgacgcggcggccgcggccaacgacgtcgaagtgcatcgcggcggcgctgctggcgattgtcgtcttgctggtgatcatcgtcatcctgtggctgacggtccgcccggcgaagccgctgctcgtctacgtcgaccacgccgcggtgaccgggttcaacttcacgtccggcggcagcctcaacggcaccttcgacatcaccctgcgcgcatacaaccagaacaagcgcgccgccgtgtggtacaagtcggtcgaggtcggggtgtggtacggcggcacgtacctcgccggcgccgtggcgcccgggttcgacctgccgccgctgaacgtgaagaggatcgacgtggccgcgcccgccgtgagggcggcgctgccgcggggcgtggaggcgaccgtgaagaaggacaggtccgacgggaagctgccggtggacgtgcacatcaagggcaaggtgcggttccggtacggcttggtgaggacacggcgctacaagttgcgcgcgagctgctcgccggtggtcgtcgacttctcgtcgccgagctcgttcgatcgggtgaactgccacgtccatatctga

SEQ ID NO: 28013 - DNA, 467 bp, Oryza sativa
  Clone ID: PAT_MRT4530_32652C.1
aaaaaatagtggaaaataatgaggagaacgtgctcaaatcagaatttagtcagcatgttcatttgcgagagaacaagagtcttgtatggtgggcaagtataaccatgagtattttttttatcactgctaaataaagtttgtattaaaaacaagagctattctattgtacccccaaatcgttagagcttagaagttatagcacaatgataactatggagttcacatagctttgactagtatttcgatcaccgaaactcatatagctttgattactattccaacctccgaaaagtgtggcctggtttttgaaatatggtttcatttgcttagtgtttgattgcaccatttcaaagctagttgtctcctgtggttagtaaagaaacattttttttttttaattggcaccattgtgtaaaattatatgtatgatttactgtagcaatacattgtagtcaccggaacactgg

SEQ ID NO: 28014 - DNA, 323 bp, Oryza sativa
  Clone ID: PAT_MRT4530_32653C.1
gcaaaggagtcccagtacttaccccagtacttttaataatttgctctcaattgaatgcgtcctgatttagtccctaaatttccaaatgtttactaaaaaatgtacatcaagtcactcaaaatttgctgccaaaggatagggccatttgctcaacctggaaaaaactgttaacacaccctactcactttagttcctgatagcaattttttcaaagttccagtccctgacaaaatcccttgaaacaacacgggtttctttgaagtcaaggagccccttcagtgccttggccagcagccattaaaggaaaaggggtcaccttcaac

SEQ ID NO: 28015 - DNA, 520 bp, Oryza sativa
  unsure (1)..(520): unsure at all n locations
  Clone ID: PAT_MRT4530_32654C.1
aagctgaagaagaagggttatgaggtcctgtacatggttgatgccattgatgagtacgctgttggtcagcttcttgccttcaaactccttaagcttgatgagagtgaggacgagaagaagcggcaggaggaactcaaggagaagttcgagggtctgtgcaaggtgatcaaggaggtgctcggtgacaaggtggagaaggttgttgtctctgaccgtgtggtggactctccctgctgtctagtcactggggagtatggctggactgctaacatggagaggatcatgaaggcccaggctctgagngactccagcatggccggctacatgtctagcaagaagaccatggagatcaacccggagaatgccatcatggacgagctccgcaagcgtgccgatgcggacaagnttacaagtccgtaaagaccttggtgattctgcttttcgngactnccctctnacctccggtttnagttngagncccaanactttggaccaggtccnccgattttaagttggccta

SEQ ID NO: 28016 - DNA, 435 bp, Oryza sativa
  Clone ID: PAT_MRT4530_32655C.1
gtgtgcctaggcctctgcctcagcacagggggctggctcagcacggcccggtccaatgatcaaggaggtgaaaagtagacttatttcagctatatggaggcatagcccaaagagctgagggatgccaaatagacttatttcaaccatctcagatatggccgaagagtgagggccgcaaaataaacttattccaagaaggagacaatgagcttttgtgccttcggctagcctggcacagctcgagtattattgggccgtgcttggacaattggtgcagcctgcgggtgggtccgacctggcccagcgtgtaggtcgggccgtgtcggcctgactgatctcaagctcgggttggtccaggcggctcatttggccatctatacttggcgctagtggagcttgagcatgtccaacgtctttggatcctagctggcccgg

SEQ ID NO: 28017 - DNA, 596 bp, Oryza sativa
  Clone ID: PAT_MRT4530_32656C.1
ggcacgaggcctagctccttccccggcggcggcgggagggggcaggaagcccggagagatgccaccggggtcgtcggttgcgtcggcggtggagaagcttcaggcggcggcgcaggacgcggcgaactcctcgtcgcgctcggcggccgccttctccgagcaggcgcaccaggtcctcgtgcccagggccgcagggtatactctcctctcctcctcacttgccctccacctactctagcttgaatgttttcgcacattggagctccaggttcagctcaatttcttgcttgccttgaattggtttggtgctggatttgcagtatcgaatgactccaattgctcccgatttgtgccatgtagctactatctgaaattagcaaactgcaattaggcgtgtttacaaaaactgatcagagtttgatagggtgatttggtatgttctatgaaaagccataccgactgagggattgtaaaataggtcaatagctcgaagttgagaagtgctcttcgcaattaggtggtgcagtgttcaagtaacttttggcatcactggcatatcgagttcctgaattcaggagtattgcaagggctcgtct

SEQ ID NO: 28018 - DNA, 1350 bp, Oryza sativa
  Clone ID: PAT_MRT4530_32657C.1
atggcgtcggagaccgagacgttcgccttccaggccgagatcaaccagctgctgtccctcatcatcaacaccttctactccaacaaggagatcttcctccgcgagctcatctccaactcctccgatgcattggataagattaggaccaagattgctgagctcctgaggtatcactccaccaagagtggtgatgagttgaccagcctcaaggactacgtaacccggatgaaggagggccagagtgagatctattacatcactggtgagagcaagaaggctgttgagaactcccccttcctcgagaagctgaagaagaagggttatgaggtcctgtacatggttgatgccattgatgagtacgctgttggtcagcttaaggagtttgaaggcaagaagctcgtctctgccaccaaggaaggtctgaagcttgatgagagtgaggacgagaagaagcggcaggaggaactcaaggagaagttcgagggtctgtgcaaggtgatcaaggaggtgctcggtgacaaggtggagaaggttgttgtctctgaccgtgtggtggactctccctgctgtctagtcactggggagtatggctggactgctaacatggagaggatcatgaaggcccaggctctgagggactccagcatggccggctacatgtctagcaagaagaccatggagatcaacccggagaatgccatcatggacgagctccgcaagcgtgccgatgcggacaagaatgacaagtccgtgaaggacctggtgatgctgctcttcgagactgccctgctgacctccggtttcagcttggaggaccccaacaccttcggcaccaggatccaccgcatgctcaagctcggcctgagcatcgacgaggacgagtccgccgaggctgacgccgacatgccgccgctggaggacgacgccggcgagagcaagatggaggaggtcaagtacacattcagagaaacaaggctgcactcttgctgcagatcaagcggaggacttgcaatggaggcaaccaaggagacccagcagcagcagcagcagaggaagccggacgccggcgacacggtgcagctgccgatggacaccagcccgtacgtgcagtacaagaaggacgacggcctggaggactacaagctgcgcgcctacggcgcccgcggccacctccccgtctccgacgtcccccacggcggctgcggcaccgacgcccccaccatccccggcaccgccgtccccgtcgccacacagcgccgccaccaacaaggcgacaccgccgctgccgccgccggcaccggccgcgttgacaccgccaccgacgccatcaatcaccatggcgtgccatag

SEQ ID NO: 28019 - DNA, 159 bp, Oryza sativa
  Clone ID: PAT_MRT4530_32659C.1
atgtcggcacatatgtgtccgagaggcattagctcccgcacgcgcactacggcgccattcgccaaagggctcggccctgagcggctggtggtgacccccgtcatccacggtctttctcgggtcaaaggccgcgacttggaagaagaaacttactcgtag

SEQ ID NO: 28020 - DNA, 414 bp, Oryza sativa
  Clone ID: PAT_MRT4530_3265C.1
gcgaattcgagctcggtacccaaaaattaaaaatagttaatcgttcaatgatggttagccgctattggtacaaccgttgctcatatccaaccgagagacagcaatatcaagccacacaagttctagaatcaaattcagccacctgcagcagcattgacttcaaacagcccccaaatttgcatacgagctccattttgggcccatgagtacttgatagaaagctctcgaagtcctctttccaatggatctagtctcatctccaaattctgagtcagccgtcgacaaatagagaaacaagatgttgcgccacctgtcataggcctttgggcttgtaactttgtttgggacctcagtctaagtagggctcatgtggggtgtgctccaacctggtggagtacaaccctggggtctctg

SEQ ID NO: 28021 - DNA, 573 bp, Oryza sativa
  Clone ID: PAT_MRT4530_32660C.1
atgggcggcggcggcggaggcacgacgttcaccatcccgcacaacaagcggtggcacaccgtcgccggcaagggcctctgcgccgtcatgtggttttgggttttctacagggctaagcaggatggtgctgttctcttgggtttgcgtcatccttgggatggtcatgatgaccattctcatggtcatggacacgagcatgagggttcatcgtcgcctcattaaaccaactgcttcttagtggccgagggagactcactgctttggttgttgcaatgaaagccctgaagttaataaagtacaatctattaaaactaagatgggttttcatgttgttttcaactgtttaatgcaaactggttaagtatttgcttttgagatagcttcaatggtggaatgtgtggctggagaggaataaaagaaatttcaggatgatcaccagcaggaagaacgggtggtggccttggtgattcagaacatgaatgaaagagtgtttacgattaataatttcatagggtaattcactcttttatgcacgctgtgaaagttgtataattctgggtttgtaatcatttg

SEQ ID NO: 28022 - DNA, 1558 bp, Oryza sativa
  Clone ID: PAT_MRT4530_32661C.1
gggaagaaattcaaatttgcgaatattctctctccctccccggcgaaggcgacggcgaaggagaaggctacggcgatcggcggcgatcggcggcatgaagcttaagatgaacaaggcctgcgacatcgcctccatctccgtcctccctccccggaggaccggagggagcagcggcgcgtcggcttccggttccgtggcggtggcggtggcgtctcagccgcggtcgcagccgctctcgcagtcgcagcagtccttctcgcagggcgcctccgcctcgctcttgcactcgcagtcgcagttctcgcaggtctccctcgacgacaacctcctcaccctcctcccttcccccacccgcgatcagagatttggcttgcatgatgactcatccaagaggatgtcctctttaccagccagttcagcttcttgcgcgcgagaagagtctcagctgcaactggcaaaattaccaagcaacccagtgcaccgctggaacccctccattgcagatactagatgtcaggttactaatgaggatgttgagcgcaaatttcagcatctggcaagctcagtacataagatggggatggtggtagactcagtccaaagtgacgtaatgcagttaaacagagccatgaaggaggcatcattagattctggtagcatacggcaaaagattgctgtccttgaaagctcacttcagcaaattcttaagggacaagacgatctcaaagcactctttggaagcagcacaaaacacaatcctgatcagacaagtgttctgaattctctaggcagcaaattgaatgagatatcctcgacccttgcaaccttgcagacacaaatgcaagcaagacaactgcagggtgatcagacaactgttctgaattctaatgccagcaaatcgaatgagatatcctcgactcttgcaaccctgcagacacaaatgcaagcagatataagacaactgcggtgtgacgtcttcagagtttttacaaaagagatggagggggttgttagagctatcaggtctgtcaatagtaggcctgctgcaatgcaaatgatggcagtatgtaaattcatgactcaagaccagagttaccaagtaccagtttcaaatggatggacccagattaaccagacaccagtagcagctggaaggtctccaatgaaccgagcaccagtagcagctggaaggctttctgcacatttggtttatcctgcaaaggtgacagatctgaagccaaaggtggagcagggaaaggtaaaagcagctccacaaaagccgtttgcttcgagctactacagggtggcacctaaacaggaagaggtagcgattagaaaggtcaatatacaagtgccagcaaagaaggcaccagtcagcataatcatcgagtcggatgatgacagtgaaggacgtgcgtcctgcgtgattttgaagacagaaacaggtagcaaggagtggaaagtgacaaagcaaggcaccgaagagggcctggagatcctgcggagggcgaggaagaggaggaggagagagatgcagtccatcgtgctcgcatcctag

SEQ ID NO: 28023 - DNA, 365 bp, Oryza sativa
  Clone ID: PAT_MRT4530_32662C.1
cttgcgctctaatattcaaatgttataaacaccggatgaaacatcaacgctgcaccaacggaaacccctgtgcctacgggaggaaatactgagtcctaactccaggatgggtgccgccgcttaccccacaaactaagaagaaggtgaaatgcaccttgttccccgaagaaaggggtaaccctataagccaatcgtgacgcttaggctcaaccgaaccggtaaaaagctactgttgggtccatgacctggacctttagcttgaacattcaggggaacgctcctataagccctctcctaggccggacacatactaagggtgtatcaacaaactgggatcgatctgcatgatgcttgagagtaccact

SEQ ID NO: 28024 - DNA, 230 bp, Oryza sativa
  Clone ID: PAT_MRT4530_32663C.1
gctgcccctcccctcgcccggccgcctcaaaaaacccaagcttttgccgccgccccgactggctgaccatcccaagaaagaaggcacctcctcgtcgcctctgctgcctccacactgcccgcggcgtgagggccctagacctccgggagggctccggcgaggtcccggcggaccgcgagttggaaatgcaattaacagattcaaatattcaattcgcttcttgattgagc

SEQ ID NO: 28025 - DNA, 1308 bp, Oryza sativa
  Clone ID: PAT_MRT4530_32664C.1
atggcgtcgccggcgaaagagcgcgacggggatgggaggcgggcgcacgctacgatggttggggtgcagttcatcaacgccgggcaccaccttctcgccaatcaggcgcgtcctctcggcgtcaaccgcttcgtcctctgcgtcttcctccgcgtccgcgccctggccgtgcacgcgcgcctggctttcctccggcacctcgtgtcgtcttcgcaggaccgcacgcctctcacggggcctctgctaaccaccttcttttcctgtgcggtctcagccaccctcgccccccatatgctgttgctactcagcctcacctacacgtatccaccttcatcttcgccaatttaatgttccattcctgtcttcaccttcatcttggccgccctcatggggatatgcattcaagtatggttcagctcttaaacgctgattctgtgcacccatgcaggcagggcgcagatttggggaacgatcgtctgggtaatgaggactgttataatgatgttgtacaggggtcctgctttgttcggtagtggcgagctcgaacttgatgatgctcatagtcatggtgtcattgctgacatgtcacagcctgagccagtcggacccttgtccattgtgtttgggctccaaaagtggcacattggagtgctgtgtttgacagggaactgtctttgtatggctacttatcttgctttccaggcgccaattttgatgaagtatccgtgtagtttgtcattgacagcgtactcgtacttttttggtgctgttttaatggtcatttcaggagtttttgcaacaaattgtaaagaagattggactttgactcgatctgagtttggtgctgttgtatatgctggattcatttcttctgctcttaatactggtttactgacatgggccaacaaaattttgggccctgctatggtgtcactttatatgcctcttcagccagtggtttctgctctactgtcgaagttttttctgggaagctcagtttaccttgcaagtattattggagggtttctgatcatctctggtttatatcttgtcacctgggcccggcatagagaaaagttgacaattggagtaccatatgaaacatgtgcatctgagttgcttgaaagtacttctcatgtcgtaaagagcagaaacatggcctcgaagttggtggtctctgctatcacttcctttgggtatatcctgtcctcccttgctcagaacgtagatacagaaagaagtgctgcaaagaagattcaagcgaagttttgtgatagtgagactaacaacactgtggatgctgcctga

SEQ ID NO: 28026 - DNA, 2963 bp, Oryza sativa
  Clone ID: PAT_MRT4530_32665C.1
atgagcgggcacgactcccagtacttctccgtcatcctctacaaagaggtccccaagctcatgatcggtctctacggcagattccagctctttctgcgcctcccctctccgatatcactggtgagcgaggtgagcacagagcattcctagagggccttagagcgttcagatctcagaataggcctgtgggagtcgcccgtgcggttgctgcgggtgcagctattcgtgatagcactactcgtcgaaggtttagattcaccagtcatacgctgtcaaagcttctgatctgctctgaatgaatgcacagaatggggccaggtttttattttggattctctgtcaaggtacaaagcagcagatgccagggaagcagaaaatatagtggaacgggttacaccccgtctgcaacatgcaaattgtgctgttgttctctctgctgtaaagataatccttttacaaatggagctcattactagcacagatgttgtccgtaatctctgtaagaaaatggcaccccctcttgttacgcttttgtcagcagaacctgagattcagtatgtagcgttaaggaacattaatctgattgttcagaaaaggcctactatacttgcacatgaaattaaggtcttcttttgcaagtataatgacccaatatatgttaagatggaaaagctggagattatgataaagcttgcctctgacagaaacatagatcaggttctattggaattcaaagagtatgccacagaggtggatgttgactttgtccgcaaagctgttcgtgctattggaagatgtgcaattaagttggagagagctgctgaaaggtgtatcagtgttttgcttgagctgattaagataaaggttaattatgttgtgcaggaggctataattgttattaaggacatcttcaggcgctaccctaatacgtatgagtcgatcatcgcaacactctgtgaaagcctagacaccttagatgaaccagaggctaaggcatcaatgatttggattattggagaatatgctgaaaggattgacaatgctgacgaacttcttgagagcttcttggaaacattcccagaagaaccagcattagttcaattgcagttactaacggcaactgttaagttgttccttaaaaagccaactgaggggcctcaacagatgatacaggctgttctcaataatgcaacagttgaaacagacaatcctgatttgcgcgaccgagcttatatatactggcgacttctttctactgatcctgaggcagctaaagatgtagttttggcagagaaacctgtgatcagcgatgattccaaccagcttgattcttctctcctagatgatctgctagccaatatttctaccctttcatcagtttatcacaagcctccagaagcatttgttagccgcgttaaaacagctcctagggctgatgatgaggagtttgctgatacagctgaaacaggatattcggagtcaccatctcagggtgttgatggggcatcaccttcctctagtgctggcacttcttctaatgttccagtgaagcagccagcagcaccagctgctcctgctccaatgccagacctccttggtgatttgatgggtatggataactccattgttcctgttgatgaaccaacagcaccttcaggccctccactacctgttttgttgccatcaaccactggccaaggactgcagatcagcgcacaactagtgcggcgtgatggccaaatattctatgatatatcttttgataatggcactcaaactgtgctagatggattcatgattcagtttaacaaaaatacctttggccttgcagccggtggtgcacttcaggtctctccactgcaacctgggacctcggccaggacgctgctacctatggtggcattccagaatctctctcctggagcgccaagctcactgctgcaggttgcggtgaagaataatcagcaacctgtgtggtacttcaatgacaaaatccctatgcatgccttctttggtgaagatggcaaaatggaacgaacaagttttcttgaggcctggaaatctttacctgatgacaacgaattttcgaaagagttcccctcttctgtcgtcagcagcatagatgcgaccgttgagcaccttgcagcatcaaatgtgttctttatcgccaagaggaaaaactcaaacaaggatgttctgtacatgtctgcaaagattccgcgtggaatccccttcctgatagagcttactgctgcagtcggtgttcctggcgtgaagtgtgcggtcaaaactccaaacaaggagatggtggctctcttcttcgaagccatggagtctcttctcaagtgatacaaaattgaaggatcattgttccttccaaattgatcagttcatgagctattgtaggtttggatgcggcgttgtttcacaggagctggtgtgaattgtatttgttgttctttgtattagattactgtatttaaactgctagtttcctggtttcaaagttttttcacgacgaacactcgacatggccattttgtctgcgtaatttgtatatctcggacctgaacctcttttcatgccatagcatatgaaatataagtagcttgcaaactcgtaattgatgaggtacagatatcatttttatcaaaaaaattattgaagcctggaaatctttacctgatgacaacgaattttcgaaagagttcccctcttctgtcgtcagcagcatagatgcgaccgttgagcaccttgcagcatcaaatgtgttctttatcgccaagaggaaaaactcaaacaaggatgttctgtacatgtctgcaaagattccgcgtggaatccccttcctgatagagcttactgctgcagtcggtgttcctggcgtgaagtgtgcggtcaaaactccaaacaaggagatggtggctctcttcttcgaagccatggagtctcttctcaagtga

SEQ ID NO: 28027 - DNA, 250 bp, Oryza sativa
  Clone ID: PAT_MRT4530_32666C.1
atgccctgcaaccgccatcaggagttaatccggagcgtccacgccaaaggggagagccaacggctaagatcagggttcggccgaaccctagactggcccaacaggcctggtttctggcctgctgcttcctcctcggcctccattatctcctggccaaaatgcggctggattgggctaaacaaggggtcggccgaccccatatgggctcttttggcccccagcttcctccaggagacttccatgtgggccc

SEQ ID NO: 28028 - DNA, 1568 bp, Oryza sativa
  Clone ID: PAT_MRT4530_32667C.1
ccggccgggatccctgcttcctcttctacacctcattttccgcttgcatcttgctcattcagatctcttctgctttgagcaatggccaacctcaccgacctcgttaacctcaacctcagcgactgcagcgacaagatcatcgccgagtacatctgggttggaggatcgggcatagacctcaggagcaaagcgaggactgtgaaaggccccatcaccgatgtgagccagctgccgaagtggaactacgacggctccagcaccgggcaggctcccggcgaggacagcgaagtgatcctctaccctcaagccattttcaaggacccgttcaggaggggcgacaacatccttgtgatgtgcgactgctacacgccacaaggtgagccaatccccactaacaagaggcacagtgccgccaagatcttcagccaccctgatgttgttgctgaggtgccatggtacggtattgagcaggagtacacactccttcaaaaggatgtgaactggccccttggctggccagttggtggcttccctggcccacagggaccatactactgcgctgccggtgccgaaaaggcgttcggccgcgacatcgtggacgcccactacaaggcctgcatctacgccgggatcaacatcagtggcatcaacggggaagtcatgcccggccagtgggagttccaagttggcccgtcagttggcatcgccgctgctgaccaagtgtgggttgcccgctacatcctcgagagggtcacagaggtggccggagtcgtgctctcccttgacccgaagccgatcccgggtgactggaatggcgctggtgcccacaccaacttcagcaccaagtcgatgagggagccgggaggctacgaggtgatcaagaaggcgatcgacaagctcgcgctgaggcacaaggagcacatcgccgcctacggcgagggcaacgagcgccgcctcaccggccgccacgagaccgccgacatcaacaccttcaaatggggcgtggcgaaccgcggcgcgtccatccgcgtggggcgcgacacggagaaggagggcaaggggtacttcgaggacaggaggccggcgtccaacatggacccatacgtcgtcaccggcatgatcgccgagaccacgctgctgtggaagcagaactaagccgtccggcgggcctctcccgtgcatttctgcgcccaaaaaaaacaaaaaaaagaaacgtacgcgtgcgtgcatcagccgtgatgtgtcaacgttggatttcggtctcggtctatccttggcgtcgacaaggccctttgaattttattactagtctgtcctgttcaccgagtgtcattttgtgtactctgaataataatgctttgtaaaacggatttgctttttccgtagggacggatgttcttgattttcctatatcgtgatttatatatatggaaaaccgctgtctttttttgttcaaaaaaaaaaaaaaaaaaaaaaaaaaaaaaaataaaaaaaaaaaaaaaaaaaaaaaaaaaaaaaaataaaaaaaaaaaaaaaaaaatattaaataaataaaataggccaaaata

SEQ ID NO: 28029 - DNA, 129 bp, Oryza sativa
  Clone ID: PAT_MRT4530_32668C.1
aattcatcatcataccagtcggaaaaaaattactatgaggttaatccatcgaaaaaaagaaactactactcctactaggttaaatcttggattcttggtagtaagaattttaccaccccgtctcacgtg

SEQ ID NO: 28030 - DNA, 258 bp, Oryza sativa
  Clone ID: PAT_MRT4530_32669C.1
atgacgtcggtgatgacgtcaccaccggcggcgaccggatggcgcaagctcgccggcgaacgacgacacgacggcgctaacgaagggcaccaaaatgatgcgggcgacgcggcgaactcaccggtgacgagcgaaaacggaggggcggacgagatcggcgacggcttggcgaccacgacggtgacctccccgagcgacgacgacgactggagcgacggcgacgcagggctgaacgaacaacggcgacggcggcgctaa

SEQ ID NO: 28031 - DNA, 219 bp, Oryza sativa
  Clone ID: PAT_MRT4530_3266C.1
ttttgtccaatttggcggctcattctctagttgggcatgccgatctttctatgtgtactgtgtaccgttatataatactggattacatccggggcatactttgtgaagatgttgcttgatcaatgaatggcatatgacgcctttctccaaaaaaaaaaaaaaaaaaccctcaccagttcagttaaaagaataatagaaggtgtagtgttgttgattccc

SEQ ID NO: 28032 - DNA, 2205 bp, Oryza sativa
  Clone ID: PAT_MRT4530_32670C.1
atggcggcgccggggagccacacccgccgccgcgcgtggccgctgctgttcctcgccgtcctcatgttccactcgctcgccatctacctcttcacccgcggcttcctcctcacccgcaccgagctcgacgtccacagccaccgcgacgaccgcatcggcatctccccgggctgctcctcctggcccccgcccgccgtcgaccgcctcgtcatcgtcgtcctcgacgccctcaggttcgattttgtggcaccaagtacattctttcaagagaggcaaccatggatggacaaactgcaggttctgcaaagattggctgctgatgagaagacctctgctaggatattcaaagcgcttgctgatccaccgacgactagccttcaacgtcttaaggctctgacgacaggtggtctgcctacatttattgatgtgggaaatagctttggagctccagcaatagtagaagacaacataatgcatcagtttgccaaaaatggaaagagggtcgtcatgatgggagacgatacttggatccagttataccctgaacatttcaacaagtcatatccttacccttcttttaacgttaaagatcttgacacagtagacaatggtgttattgagcacttgcttccatcattacacaaaaatgattgggacgttcttattgcacatttccttggcgtggaccatgcagggcatatattcggtgttgactctaccccaatgatccagaagttggagcaatacaatcggatcctagaggatgtaattgacacattgaaaagtctatcaacatcgggtggtccccatgagaatactttacttcttgtaatgggggatcatggccaaacactaaatggtgatcatggtggaggaactgctgaagaggttgaaacatcgctctttgcatggagtccgaagaccccaccaaatgctgtcttgtctgttcttggtaaaaatttatgcaacgctgatctgcatggtaaagaggtgtgcgtcagcactatgcagcagcttgattttgcagtaactatagcagcgctacttggtataccttttccttttggaagcattggacgtgtaaacccagaattgtatgctctgagtgctggaacatgggataatcaacagatcggtgccaatgattgtacacagcagaatgatctagaagcatggatgcggagatatgctgaagctctctgtataaattgttggcaggtaaagaggtacattgatcgatattctgccacttctgttattggatttcgagcagaagacctgaaccatgttgcagatctgtattcaaaagctcaggcaaattggtcctctgtcctgaggtctacatgtccagtggaaacaagcagtcaggatgaattaaaggagtgcgcaaataaggaatgcacaagttcagctctgcggttgcaaattgatgcatactctgacttcttggagagctttgcaaagcttgctcgctctgcatggactgagtttgatttatggctgatgggcattggtctttcagttatgatactgtcagttagtactcaggcatcatggtgtataataaagttacagcagaaaaatcagagagagctgaaacttgacaaaggaatacatgctgctgactctgtttcagtaacacaatggagctttctggcagtttgtctattttatctgacgggtcattggtgtacctttgatggcctccgttatggtgctgcattcattgggtttgatcatttccatattatccgacaaggccttcttctttccattgatacttttggcgtttctcacatactgcctgttcttagtcttccgtttattgccatatgctggtacaattctgcatccaagaacagcaaggtgaatgatgccactgtcaccagattaatacaggtgcttttgatgtatggtttaattacatcaatcacaacaacgcttacaatcatttgtgttaccattcaacggcgtcacttgatggtctggggtttatttgccccaaaatacgtatttgatgctatcgggcttcttctgaccgacttgttagttgttctggcatctatctattacagctgaccttgctattttgtttcttcagatagacaggtagttttaaaattaacgcatttacgatttgattgcatctatagagctgaaatatttttttggtcactacagtcagtggtgtaaaatcatgtgtat

SEQ ID NO: 28033 - DNA, 671 bp, Oryza sativa
  Clone ID: PAT_MRT4530_32671C.1
agggaaagggaattattgcgtcatcggctagggttcacggtggaccgggtgcacgacggcggctcacgaaaacgaacgatcgagatcgatccatccaaaacgaacggccgggatctatcggcgcacgaccagtccacgggacacggcgacgatgacgtcggtgatgacgtcaccaccggcggcgaccggatggcgcaagctcgccggcgaacgacgacacgacggcgctaacgaagggcaccaaaatgatgcgggcgacgcggcgaactcaccggtgacgaggtcgaagcggcggagatgatcgggtcgacgacggcggcggtgctccggcggtcctcagcgaaaacggaggggcggacgagatcggcgacggcttggcgaccacgacggtgacctccccgagcgacgacgacgactggagcgacggcgacgcagggctgaacgaacaacggcgacggcggcgctaagcggcacggtgctagagctctaccggcgacgagagacgagagcgagggtggcgacgggtagcggagggcctggggaaccttttataggggctagggagcggcggcgaaggcccacggcggccagcgacgtgatggaaagattagggttagagggaaagaaacgaatccgattcgagctcgaatccgacggtttccaaaccgatt

SEQ ID NO: 28034 - DNA, 2849 bp, Oryza sativa
  Clone ID: PAT_MRT4530_32672C.1
gttcttgatgcgtcgacgctacttgctagcttcttcttctcctcgaggaactcgacgaggcccgcgagcgcggcgtcggcgtcctcgctgcgcagcagcatctccgacacctcggccggcgtcgcctccacgccggcgagcagctcccgtatctccgggaacagcgggtggtcgccgacgaggaagtagttgtgtgcgagcgtcttgaacgcgtccccgccgcagtagcccatgtagatgtgcatgtccatcctccccggccggagcagcgccgcgtcgaggcgatccttgtagttggtggtgaacacgatgacgcgctcctcgccgctcgtcgaccacagcccgtcgatgaagttgagcagcccggacaatgtcacgtcgccgtagcagaccgccggtggcgtcttgcgatctttgccatcctccctcgacctcgcgctgaagcagcaatcgatgttctcgatgacgaggatggtgcggttgggcatgccaatgagcagcctctgcagagccgagttgctgtgcacctcggagaggtcgaggtcgtagaggttgaagcggagttggttggccatggcggcgacgaggctggacttgccggtgccgggcgggccgtggaggaggtacccgcgcttccacgccttgccgatgcggcggtagtactccttccgcttcaggaagcggtcgaggtcggcgacgatggattgcttgagctccgggtccatggcgagggtgtcgaacgtggccgggtggtggtggacgatgccgcgctacgaagagcgctcgttcatgaagatcttgaggtcccggtcccgccgccgcgcctgctccacctcctccgtgatgaagggcacgtacctgcccagcgccatgtccgtgtgctccgcgtcgaagctgagctccagcgacgactcgctgaacctgcccccgccttctgcgacgacggaagtccacctgaactccacgccctcgaagacgtcggtcatcgagtcgccgggcaccatggacagggcattccgtcggccgcgcccgtccccgacgccgccgctgaggcggaaccggctcaaggcccggggatcgatcctggtggcgaggtaagcgtgggcgtcggcgaagcagccgtcgtggcgtccgtcttcgtcgacgcggcggatgatgacggtgcgccgctccgccgggcgggggccgaggcgggcgcggacgagcgtggcggcccagctcaccgccgcgcgcaggtcgtgcggcacgagctccctcgccatgccgcgcgccagcacggcgtacgcggtcaccgtggccgccgtggccaacaaggaggttggggatcatggaacatcggagatgctgctaaatacgcgtagccgtcgagcgccgcgagggacgggaggcggaggaagacggcgagcaggagatcgtcgccgagcgagtggatggtggtggtggagcggatgctggccgaggcttccgccttcgaccgcttggtcgttgcctgcttcacacatggcctgcttcttcttcttctccttcttctcctcgaggaactcgacgaggccactgagcgcggcgtcggcgtcctcgctgcgcagcagcatctccgacacctcggccggcgtcgcctccacgccggcgagcagcgcccgtatctccgggaacagcgggtggtcgtcgacgaggaagtagttgtgggcgagcgtcttgaacgcgtcccagccgcagtagcccatgtagacgtgcatgtccatcctccccggccggagcagcgccgcgtcgaggcgatccttgtagttggtggtgaagacgatgaccctctcctcgccgctcgtcgaccacaagccgtcgatgaagttgagcagcccggacaatgtcagtttggtcagcgtcggtttcttgcgctctttgccatcctccctcgaccttgcgctgaagcagcaatcgatgtcctcgacgatgaggatgcagcggttggtcatgccaatgagcagcctctggagagcagagttgctgtgcacctcggagaggtcgaggtcgtagaggttgaagcggaggtggttggccatggcggcaacgaggctggacttgccggtgcctggcgggccgtggaggaggtacccgcgcttccacgccttgccgatgcggcggtagtactccttccgcttcaggaagcggtcgaggtcggcgacgatggattgcttgagctccgggtccatggcgagcgtgtcgaacgtggccgggtggtggtgggcgatgccgcgccacgacgagccctcgttcatgaagatcatgagctcgcggtcccgccgccgcgcctgctccacctcctccgtgatgaagggcacgtacctgcgcagcgccatgtccgtgtgcgccgcgtcgaagctgagctccagcgacacctccgtgtccgcgaatctgccctctgcggggacggaagtccacttgaactccacgccctcgaagacgtcggtcatcgagtcgccgggcaccatggagaggacattccgtccgcgccgcccaccgccgccgccgccgaggaagaacctgctcatggaccgggggtcgatcttggtggcgaggtacgcgtgagcgtcgacgaagaagcggctctcgatgcactgagcgtggccgtggccgttcccttcgatgctcctgatgatggcggtgcggcactccgcggggcggggctcgacgcgggcgcggacgagcgacgcggcccagatcagcgccgcgcgcaggtcgtgcggcacgagctccctcgccatgccgcgcgccagcatggcgtacgcggtcaccgtggcatatattataaatttggatttcaatgcgaaattaaaaaaacttaaagaaatcat

SEQ ID NO: 28035 - DNA, 341 bp, Oryza sativa
  Clone ID: PAT_MRT4530_32673C.1
agaaaaaaggttgtttgggggaccgggccgatcaaccatgggtgcacacacatgcatgcatggggattggtccagaccttaacttggttattttttattccagaatacagatttgatacttctaggactgggtacaaaatttgggttcacacattggcccagggagaattttcttggggggaaccggggcgctggtggatatatttgaaccggctttttggtcgaggggttaacttaccctggagcacatcatggaagcgcttttggggtaagggacccttaccccccactttggggggaagtttggggggttttccgggtttagcccctttatggcccgg

SEQ ID NO: 28036 - DNA, 262 bp, Oryza sativa
  unsure (1)..(262): unsure at all n locations
  Clone ID: PAT_MRT4530_32674C.1
ctcacgcgtncgtgattatggaattatggttgggcttgtgtacgtgtcatataagttaccgatgctgaattttactagcaatattgacaggctaggaaatatggatcttgtcgacatttgatgtcgctattcctgtgtttgcatggtgtggggatcgaaggtactaaggtatacgctatactgaggtaaaagagaccgagaccatgggttttatacaggttcgggccccttaaatatcaaggaattaccctacatcctgttg

SEQ ID NO: 28037 - DNA, 481 bp, Oryza sativa
  unsure (1)..(481): unsure at all n locations
  Clone ID: PAT_MRT4530_32675C.1
gtttgttttaagcccgccgcagtattacacaaatcggcggcctatctcttaccgaagggcgggcaccacagtgtgccatccaatgaggagcatggtggccacaggcgcgcccagcatggtcaatgtcaaggacgagttcgactcgatcctcccgggcaggtcaaggtccatgtgttcgacgagtacctcgataagagcactggcaacattgatctgaatgacaatataaggctggatacaagcgtgcccaattttttgatggcgtacaacgtccagttccgcagcttccagctcccctacaactgcatctgctgtcacgacctngtcaagaacaagaaagtgcaattcatactacatgatctcgagatcctacgcgacgctaaagagaattacaacgtgccaatccaacgtctttagaaatcgtgatgatctgatgatgatcatccatcgattgaccaaccattaaaacatttctgtacct

SEQ ID NO: 28038 - DNA, 225 bp, Oryza sativa
  Clone ID: PAT_MRT4530_32676C.1
atgccacgtcatgcccctcgggccctcgcgccgctttgccccgaggcccccgcccagctaccatgtggcggggggagcgagaatgaccggtctgtgaccggcctgtcgccggtcacgtctgactggacgggcggctgtgcccccacgtcgcctctgtccccggcggagtggagggctgtcccccgtgttaggcgggggacggtgctgggtcccgctcaaggatga

SEQ ID NO: 28039 - DNA, 203 bp, Oryza sativa
  Clone ID: PAT_MRT4530_32677C.1
ggcaaggcggaaaaagattgaaattttattaaagggaccttattttaagggttggcacacgaaagtatgcaacacctaaaaaataggggacaggaaaccaaggttggaacaaaaacaaccacaggaagggggttggaagttgacaggggccatgttgcccatggaggggatcggaatcgccattataaaaatttggcgcggcg

SEQ ID NO: 28040 - DNA, 689 bp, Oryza sativa
  Clone ID: PAT_MRT4530_32678C.1
ccacatcaggtgcggcggggtttagggtgattacgtgcgaaaatcacctttttcatgcgattatgctgcccgtgtgaaaaaatgttaatttttatatatattatgaggaaagcggtttgcgctgctgggtgcaaaaacacttttagccgcttataaaaatgttttatgtagttgtgacaatgactcatttgaagaacaccggaggaagtagtccacgaaccaatgttcccgtcgttgccgttggagtatgcacgtacgtacgcacacgtccgtccgcggccgcagcttttgcgtcgttcgaattgtcaaccgcccccggacaaacaagccgcggcgacgcgcaacaagccaaacaaagaaatttttgaaaaaaagaaacatgctttcgcatatctaacacggtcctttcatcgtattaaaaattttctgggatagaaatttcgatataggccatgtttacattcaaattcaaaatttaaaattttctggaacggatggagtagaccacaaaccgttatcgtcagccacacgtcatatacttatacagagtatactaatgctgcgttcgggagaaacagagcagcgattagagcgtgattaattaagtatttgctattttttaaaaaagaattaatttgattttttaagcaactttcttatagaaactttttgaaaaaaaccctcgtgcc

SEQ ID NO: 28041 - DNA, 1317 bp, Oryza sativa
  Clone ID: PAT_MRT4530_32679C.1
atggacactgctgttggaggagccttctttgcaaagaccgtcagaggagcagttgatttaattgagaagatggtctctagcatgggatggagcgaagagcgactccaaccccgtcaaaggggcatgaacaccgtcaaggagatggaaatgcttgccgccaagctagaactcctgatgaagcacttggacgataaggagaaggaaacgaaacagggtaccgttaaggccctagactctcacatgacatgtgagatctgcggcaatactggtcattctggaacgactgtctggagacccatgaagaggaaattagctgctaatgacaaagtcttagaaaacataaatgtaaggttagatggttttgcttctgctcttcaaaaccagtcgaacttcaataaaattctagaaacacaattagctcagctggctgcttttgttcttactcataaatctaggaagattacagggcaacccgagccttctctagaaaatgttaaggcggaaggcaagaacaatgctccattcaacactgttggagatatcgaaaatccacaacaaggaaagacaacgccgccagaatattgcgacaccaacatgctgccatttcctcagtgcaacaagaagccgtctgtggatgagcagttcgctcactttgtcgaggccctatacgaccttggggcaagagtgagcgttttgcccaaggaagtcttcgacaggctccagctggctgattcctcggtccactacctgttgggtatcgctgaggatatcccggtgaagatccgggatttcttcgtccatgttgactttgtggtgctggatatggactccaataaagacatgccgctcatccttgggcatccattcctgagcaccgcagagacgaacattgatgtgggagctagagaaatccggctccgcatcaatggaaaggaggagaaattcgagttccggccgaaaatggagcaatgctccatggtgttggtatttcataaggacattactagaaatatgaattcccagcaatggcgcagaaatagtcctgcattgaaggcagagaagaacaaagacgaagagggggaggagcactgccttgttcctaacccttccttgtccttcttgtctagatacagggcgatctttcccaaggattgctgcaatggccttatcctctgcgtgtacaagaattatacgagagatgaatccgactacgtggtctacaaccctgccactcagagatggatcatcctgcccaagatcgaccgtgtgaacccggtctccaccgtccgtttcagttttgatccggcattgttgtaa

SEQ ID NO: 28042 - DNA, 2625 bp, Oryza sativa
  Clone ID: PAT_MRT4530_3267C.1
atggtctacaccaggaatggcacccgcacaacaggcgagggcagcaacggcgaagagcgcactgatggtgtgcaccccaacagtgattccgacaatagtccgccaccacttcccgagaatccgacgctggcccaagtgatggcacatcagactcagatgatggcagccatgatgcaacagatgcagcagcagcaccaacagatgcaccagaggatgcaacagcacgccgaacagcatcaccagcagtttggtccccctccccctcaatccaaactgccagaatttctacgtgtcaggccacccactttctccagcaccaccaaccccatggaggcaaatgactgggtccatgccatagagaagaagctgaatctcctgcagtgcaatgatcaggagaaggtcgctttcgccacacaccagctccaaggtcccgcgaaggcgcaggtgccagacggggtcgtggcacaaaagaagagggaattccgggcactccatcagagcaacaggacagagaaattcctagcaggtctggatgatgagctaaccaaccagttgatatctggagactacgccgactttgaaaggctggttgacaaggcaatccgtcaggaggatcagcgcaacaaaatggacaggaagagaaaggcggcacagtttcggtccagccaaggaaaccatcagcgaccgcgcttcactcccggacagcagggtggacctaccaccatgatcgtccgccagcaccgcccgttcaactcaagcaactttcaccagggcgccagtggtagtcagaaccaccatggaggtcagccccaccgcggtgtagctccacgcccactagtggcaccagcacagtcagctccgcccgcgcaagccaagaaggagaccagaacaaagccagggtcctgcttcaactgtggtgagcttggtcacttcgccgacaaatgcccaaagcctaggcgtgccgggccaaggttcgtccaggctcgtgtcaaccacgcgtctgcagaggaggcgcaagcagcaccagaggtcgtactggaggtcaagaagcaggttgatgagcaactgcagaaatggtgcattcgaacgagtacttcaccttggggtgctccagtcatttttgtggagaaaaaggataagacgaagaggatgtgcgtcgattatcgcgcactcaacgaggtcacaatcaagaataaatatcctttaccacggatcgatgacttgttcgatcaactgaagggagctaaggagcacgagttatacgccaagtttagcaagtgtgacttctggttgacggaagtcaaatttctgggccatgttattacagctcagggcgtagcagttgatccatctaatgtggagtcagttaccaaatggaccccaccgaagaccgtgtcgcagattcggagttttcttggacttgcgggttattaccgccgattcatcgaaaacttctccaggatcgcccgacccatgactcagttacttaagaaagatgagaagtttaaatggacagctgagtgcgataagagttttgaggagctcaaaaagaaattagtatccgcaccagttttgattctgcccgaccagatgaaagacttccaagtctattgcgacgcatcccgccacgggcttggatggaaagccaatgtggtggcagatgcattaagcaggaaaagttactgcactgccctatgcatcgagggcatgtgtgaggaattgcagcagttgtttgagcgtctcaacgtgggaattgttgaacaggggttcgtagccgctctagaaacacggcctacgctcgtcgatcaagttagagccgctcaagtaaatgatcctgaaatagcagaactgaaaaagaacatgagagtcggaaaagctcgagatttccttgaggatgagcatggcacaatctggatgggggaaagattgtgcgtacctgacgacaaagaactgaaggatatgatactcaccgaggctcatcagacacagtattccattcacccaggcagcaccaaaatgtaccaagacctcaaagaaaagctttggtgggtcagcatgagaagagaaatagttgaatttgtcgcactctgcgatgtttgccagcgagtgaaggcagagcaccaaaggccagcaggcttactccaacctcttaaaatcccggaatggaaatgggaggaaattggaatggattttataacaagactgccccggacatcatcggaggtgttagcggaggcagaagagaaagtcataaccatcagggaaaggttgagaattgcccagtctcgacagaagagctacgcggataaccgccgaagggagctcacttttgaagcaggggattacgccaattcggagcacatcgatatccaggaggatctgacctacgtggagaagccaattcgcattcttaagaccagtgaaagaagaactagaaacaaggtcaccagggtcgtcgccacaccgcaccgtcgccgccgacgggttcgcgaggccgaactccaccccgtccgcccctcctccgtcgagggcatcccgaagctcgtccgccggttgccgtcgtcctcccgtggctcgccgtcgccgttcgacgtcgtcttcctccgcgccggccaccctcggtga

SEQ ID NO: 28043 - DNA, 4788 bp, Oryza sativa
  Clone ID: PAT_MRT4530_32680C.1
atgttggcaacagcctttcaactattacagaattggaacaacccagcaggggcaaccaacgttcaagtacctacagtccagcaacagtgcaagttatcagaatttctcaaaactgagcctccaacctttgccattgccgtcgatcctatggaagccagtgattggttgcgcacagtcgagaagaagctagggttgattcagtgcaccgaccaggagcgggttggcttcgcaactcatcagttggttggaccggcttcagagtggtgggatagctacgaagcatcacggccagaaggatataccatcacctggaacgagttttcatctgtattcaagagatcacatgttcccgcaggaatgatcacactaagaaaacgagagtttcgctacctgaagcaaggagatttgaccgtcacagagtacctgcacgagttctatcatttggctcactatgcaccagaagatgtggaaacggatgaagacaaacaagagaagtttctccaagggttaaaagatgagcttgcagtgcaactactcctagaggattatgaagattttgagaaacttgtggacaaagccatgcaacttgaaagtgagcataatcggatgacgaactgcaagagaaggattgtcaacatcccagtatttccaggtggtaaccaaagacagcgcactgagccacttcagatcaccggatcttctgttgtgcatcaagagttcctgccccaagaagatggacgcaatgcagacaacaacactagcaatactaatgatgatgataccaccaacaaccatggttcttgccccattagtgaccactcgaataaagcgtgcaatgtcagtagcattcaccaagatgtcaacgatagtatcaatgttggaacccagaatgacaaccttagcaattttgacactgagaaagactccaatggtgatagcaactatggtaccactgatgccaatgtcatttctctagagattgtccacagccgaagcgtaacctgcgccatcactccggccattatgcaagaagaagacaagtcactcgccttgtggtcactggagcaaacgccgtacctccgcctgtgccgcctcgaccgtgcgccggccggccgcgccgtcgcctcctccagcgtcgccgccacctcctccaccccggcctgccctccgtttcgcgcggtgaccgccggaggcgcgttcccgccgtcgcccttctctttcctccgcgccggccgcctccagccgcctctccctcctcgccggagcaccgtccggccgcgccgtcttctccctcggcctcgcagccacctcctcaccctcggtcagccctccgtttcgcggggaaagcaccggagacgcgtcctcgccggcaaaacagtggcgttgccgccactgttccacctccggccgccactgtcgcgtttcccgtgcgccggccgacgtcgccaccacctccctcggctccgcgacgccgccctccaccccgactgctcctcggtttcgccggaacgccgtcgccgcgccggcctctccatcctcttcatcgccggcgtcctttcggccacccattcctcctcgtcggctcgtcgccccgctgcaccaccaccttctccaacatcgctgcggcgtgttccacgccgtcctcgtctccgtgcagccgctgccggctgccctcgtcgcctcctcgccggctccgcccccgtcgtcgtcttcgtcctcggctccgcgtcgtcaagcctcgtgccggccgcgtctcgccttcgtccaaggatcgccgccgaagtcgtcccctcgccgttcgtctccgtagttcccggccgcctccgccgcgccccggaaacttttgagagtctccgctccgcccgcataaaactaaaccccgataagtgtgtgttcggtgtacctgcgggcaagcttctcgggttcttggtctctacccgaggcattgaggccaaccccgagaagatacgggctatagagcggatgcgcccccccagcaaacttagggatgtgcaatgcgtcaccggttgcatggccgccctaagtcggttcatatcgaggctgggagagaaggcgttacccttatttaagcttctcaaacgctctggaccgtttacctggacggaggaagccgaaaatgctctcacccagttgaaggcgtatctaagctctcccccagttctggtcgccccggagccagacgagcccttgttactctacttagcggcgaccccgcaagtagttagtgcggcattggttgtggagcgcgatgaggacaattctcatttcacgcttccccaccctgtgccgacttggcccgggagagagcagggaggagaggctcccgagccgaacggtggcccaaggcccccgacgaccggagttggccctctgcccgcttgtcagacggtgctaggagcccccgacccccaggaaggccctgaggccactgtgggaaggccgcacctatcgccctttgaccccgaggctaaccctgtgctgactcgacccgggaaagagcagggagaagaggcccccgagccgaacggaggcctaaggcccctgacgaccggagtcggccctttgcccgcttgtccgacgacgccaggagcccccgacccccaggacggccccgaagccactgtgggaaggccgcccctgttatcctccgaccccgaggtcatcagcacagaagacaagtgcgccccgcgaggctgcttggacgaagagtgccccagggatgcggcccctagcgaagaggatcggccccaccgaaaggtgcagcggcccgtctactttgttagtgaggccctccgggacgccaaaacccgataccctcaggcccagaagatgctttacgctattctgatggcctcgaggaaactgcgccattatttccaggcgcatcgggccctcgccgattttgtggcagagtggaccccggctcccgagcccgtctcgatccccgaggccagcacggacccctcgcagctgcctcacaccgcccactgggtaatgcagttcgacggctccctgtctcttcagggcgccggtgcgggggtcacgttgacctctccgaacggagacgtcctcagatacttggtccgcctcgactttcgagcgaccaataatatggcagagtacgagggactccttgccggactcagagtggcagctggactggggatccgccgcctcctggtgttaggcgactcccagctggtcgttaaccaagtctgtaaggagtaccggtgctctgacccgcagatggacgcctacgtgcgccaagtacggcgtatggagcgccattttgacgggattgagcttcggcatgtgcccagatgggataacatgattgccgacgaactctcacggctcgcgtcctcgcgagcccagaccccaccgggcgcctttgaagaaaggcttgcccagccgtcggcgcgacccgaccccttaggggagacggatgcgcctgaccggcccccgaggcccgtcggagtccaggcctcgggacccgaggggagtgctcccaactcccttagattgattgcttggatcgccgagatccaagcatacctcatagataagactctacccgaggaccgcgaagggagtgaacgcgtccatcgcatttccaaacgctacgtgctggtagaagggaccctctatcggcgcacggctaatggaatcctcctgaagtgcattcctcgggaacaaggcgttgtgcttcttgccgatatccatgaaggcgaatgcggagcccactccgcttcgcgcaccttggttggtaaagcttttcgccaaggtttctattggccgacagctcttaatgatgcggtcgacctggtccggcgatgtagagcgtgtcaattccacgccaagcaaatccatcagccggcccaggccctgcagaccataccactttcgtggccatttgctgtctggggactcgatatcctgggaccgtttaggcgggccccgggcgggtttgagtatctgtacgtcgcgatcgacaggttcactaagtggcccgaggcttatccggtcgtcaagatcgataagcactccgcacttaaattcattaagggcatcacggcccggtttggagtgcctaaccgtattattacggataatggcacccaattcactagtgaactcttcggcgactactgcgaagacatgggcatcaagctctgcttcgcctcacctgcccaccccagaagcaatggccaagtggagcgcgccaatgcggaaatcctcaaaggccttaaaaccaagaccttcaacatactcaagaagcacggcgattcatggatcgaggagttgccagcggtgctctgggcaaaccgaactacaccaagccgagcaaccggggaaacgcctttcttcctcgtctacggcgcggaagcggttctcccatccgagctcaccctgaggtctcctcgggccaccatgtactgcgaggctgatcaagatcagcttcgcagagatgacctcgactacttggaagagcgaaggcggcgcgcggccctccgagccgcgcgctaccagcagagcctgcggcgctaccatcagcgtcacgtccgagcccgatcactctgcgtcgacgacctcgtcctacgccgcgtccaaacgcgtgctggattgagcaagctttcaccaatgtgggagggtccgtatcgagtggtcggcgtcccccggccgggctccatacggctggccacgggcgacggcactgagctccctaacccgtggaacatcgaacaccttcgtcgcttctacccctga

SEQ ID NO: 28044 - DNA, 2082 bp, Oryza sativa
  Clone ID: PAT_MRT4530_32681C.1
atggctgagcaagcaaaggcgcacaacctctctccgagtgtgagtggcgacgacggggagccgaacccacgccgtcgagctcgtactccaccgccccctccacgccaaagtcctaagcagggggaggcgctcgagagggccgaaggatccgcgacttcgacatccacaggaggtggaaaggggcggcgagatggggagcatcgcctcctcgtctatggtgacggcagcacgccccagggcgcgctccaagctgcgggcgcgctcctacgtcacccgcccgtcgcccatgacccggagtctccagcccaacgctggctggacgatgtggccaaattggtcatgactgcacggcagtgtatagatgctggtgggcggtcctccgccaccaaggcctctggtgctgctaccaccggctccgcgtcgtcaagacgaagggcgcggcgagcggcagccgccgttcgccattcggccaccactccttcgtcgactccttcggcccggaaagatctgcgagggaggccggacgcccgcaccagcatcgagcggcggcgtaatgaccgacgtgctacccacgcaacggagggcgcttcctcgtccagagtgtcacctcagcacagacgcgggaatcagccctccgtgcccccggttggtggtgtcggctgtagagcctttgtggcgagtcttcggaatgtccgttggcccccaaggttccggcccaccatcgccgaaaaatatgatggcagcgtcaaccccgccgagtttctccaggtcttcacgaccgggattgaggccgccgggggtgacgacagggtcatggcgaatttctttcccatggccctgaaggggcaggcgcggggttggctaatgaacttgccacccgcgtcagtccactcctgggaggatttgtgccaacagttcaccatgaactttcagggcacatatccgcgcccaggtgaagaagcggacttacacgcagtacagcgaagggatgatgagtcacttcgctcgtatattcagcggttctgtcaagtccgcaacaccataccatgcatccctgcacacgcggtaatctacgcgttcaggggaggcgtgcggcacaaccgcatgctcaaaaagatcgcctctaaggagccccagactaccgcggagctttttcagctcgcggaccgagtggctcgcaaggaggaggcatggacctggaacccctccggttccggtgtggcagcttcggccgcccccggatccgccgctcagacagggcggcgtgacaggaggaggaagaagagggcgctccgcgggccacccgaaaggggaggcctgcgagcgacaaaaagaaggaagccgacgctccctgacctcggctacttggaagagcgaaggcggcgcgcggcccttcgagccgcgcgctaccagcagagcctgcggcgctaccatcagcgccacgtccgggcccgatcactctgcgtcgacgacctcgtcctacgccgtgtccaaacgcgtgctggactgagcaaactctcaccaatgtgggcgggtgcccccgacccccaggatggccccgaggccactgcgggaaggccgcgcctgtcgccctctgaccccgaggtcgtcggcacagaagccgagtgcgccccgcgtggcctctcggatggagagcgccctggagatgtggcccctgacgaagaagatcggccccgccgaaaggtgcagcggcccgtctacttcgttagcgaggccctccgggacgctgagacccgataccttcaggcccagaagatgctttacgctatcctgataacttcgaggaagttacgccattatttccaggcgcatcgggtcacggtggttacgtcttatcccctcggccaaatcttgtataaccgagagggtactggacgggtggtgaaatgggcaatcgaactctctgaattcgatttgcgctttgaaccaagccacgcgatcaagagccaggccctcgccgactttgtggcggagtggaccccagctcccgagctcgtctccgcccccgaggccagctcgagcccatcgcagctgcctcacaccgccctctgggtgatgtag

SEQ ID NO: 28045 - DNA, 5979 bp, Oryza sativa
  Clone ID: PAT_MRT4530_32682C.1
atggctgagcaagcaaaggcgcacgacctctctccgagtgtgagtggcgacgacggggagccgaacccacgccgtcgagctcgtactccaccgccccctccacgccaaagtcctaagcggggggaggcgctcgagagggccgaaggatccgcgacttcgacatccacaggaggtggaaaagggcggcgagatggggagcgtcgcctcctcgtctatggtgacagcagcacgtcccagggcgcgctccaagctgcgggcgcgctcctacgtcacccgcccgtcgcccatgacccggagtctccagcccaacgttggctggacgatgtggccaaattggtcatgactgcacggcagcgtctagatgctggtgggcggtcctccgccaccaaggcctctggtgctgctaccaccggctccgcgtcatcaagacgaagggcgcggcgagcggcagccgctgttcgccattcggccaccactccttcgtcgactcattcgacccgggaagatctgcgtggggggccggacgcccgcaccagcatcgagcggcggcgtaatgaccgacgtgctacccacgcaacggagggcgcttcctcgtccagagtgtcacctcaacacggacgcgggtatcagccctccgtgcccccggttggtggtgtcggctgtagagcctttgtggcgagtcttcggaatgtccgttggcccccaaggttccggcccaccatcgccgaaaaatatgatggcagcgtcaaccccgccgagtttctccaggtctacacgaccgggattgaggccgccgggggtgacgacagggtcatggcgaatttctttcccatggccctgaaggggcaagcgcggggttggctaatgaacttgccacccgcgtcagtccactcctgggaggatttgtgccaacagttcaccatgaactttcagggcacatatccgcgcccaggtgaagaagcggacttacacgcagtacagcgaagggatgatgagacacttcgctcgtacattcagcggttctgtcaagcccgcaacaccataccatgcatccctgcacacgcggtaatctacgcgttcagggggggcgtgcggcacaaccgcatgctcgaaaagatcgcctccaaggagccccagactaccgcggagctttttcagctcgcggaccgagtggctcgcaaggaggaggcctggacttggaacccctccggttccggtgtggcagcttcggccgcctccggatccgccgctcagacagggcggcgtgacaggaggaggaagaagaggtcagtccattccgacgacgagggtcatgtcctcgccgtcgagggcgcttcgcgggccacccaaaaggggaggcctgcgagcgacaaaaagaaaaaggccggcgctcccagcagggagcgcccagccggcaagtggtgcaccgtccacaacacctccctccacgacctcatggactgccgtgcggtcaaaagtttggctgagcggacgaggaagtgggaggaggagaggaggcaggagcgccgagagggcaagtccccggcggttccttccggcaatcggcgcagtgaggccaagcagaaggcccccgccgaggacatcgatgacggcgatgatgacctaggtttccaagagcctggggccaccattgccactgtcgatgggggagcgtgtgctcacgtttctcgccggagcctcaaggccatgaagcgagagcttctggccgcggcccctactcatgaggcgacgcgccgggcgcggtggtcggaggttgccctcaccttcgaccagaccgaccacccaccgtgcgttgcccagggaggacagatcgcgatggtggtttcccccactgtttgcaacgtgaagctggggcatgtcctcattgatggaggagcggccctcaacatcctttcccccgcagcctttgacgccatcaaggccccggggatgatgctccggccgtcccagccgatcatcggtgtgacgccggggcacacttggccgctaggtcatatcgacctcccggtcaccttcggtggacccgtcaacttccgcacggagcgagtgaactttgatgtggcggacctcagtctgccctacaacgcggtcttggggaggcccgcgttggtaaagttcatggcggcggtccactacgcctacctccagatgaagatgccgggccccgatggccccatctctgtccatggtgacctcaaagtcgcgctcgcttgtatggagcagcgcgcggaccgcctcgccgtcgtgtccaagcccgagggtggcgacgagaggcttggcacatccgcccccgccgccccgaggcagcggatagtcacgtgcgatgaggtcccggaagacgcgctcgtctctttcctgcgggcaaacgctgacgtcttcgcatggagaccggcggatatgcccggggtccccagggaggtgattgagcaccgtctcgccgtacggccgggcgcaaggccggtccggcagaaagtgcggcggcaggccctggaacgtcaagcctttatccgcgaggaggtggcgcgacttctggaggccggattcatccgcgaggtcatccatccggagtggctggcgaacccggtggtcgttcccaaggcgaacggcaagcttcggatgtgcatcgactacaccgaccttaacaaggcatgtcctaaggatccttaccccctgcctcgcatagatcagattgtcgactccacagcggggtgcgaccttttgtgttttctagatgcatactctggttaccatcagattcgcatggctagggaggatgaggaaaaaactgcgttcattacccccataggaacttattgttatacaacaatgcccttcgggttaaaaaatgcaggtcctacttttcaacgtactactcgaatttctttgggtagccaaataggatgtaatgttgaggcttatgtcgatgacttggttgtaaagacgcgcaaccaagaaaccttactctcggatctagcggaaacttttgaaagcctccgctccgcccgcataaaactgaaccccgataagtgcgtgttcggtgtacctgcgggcaagcttctcgggttcttggtctctgcccgaggcatcgaagccaaccccgagaagatacgagctatagagcggatgcgcccccccagcaagcttagggatgtgcaatgcgtcgccggttgcatggccgccctaagtcggttcatatcgaggctgggggagaaggcgctacccttatttaagctcctcaaacgctccgggccgtttacttggacggaggaagctgagcgtgccctcactcagttgaaggcgtatctcagctctcccccggttctggtcgccccggagccaaatgaacccttactactctacttagcggcgaccccgcaagtggttagtgcggcgttggtcgtggagcgcgatgaggacaatcctcattccgcgcacccccaccctgtgcagacttggcccgggagagagcagggaggagaggcccccgagccgaacggtggcccaaggcccccgacgaccggagttggccctctgcccgcttgtcagacggtgctaggagcccccgacccccaggaaggccctgaggccactgtgggaaggccgcacctatcgccctttgaccccgaggctaaccctgtgctgactcgacccgggaaagagcagggagaagaggcccccgagccgaacggaggtccaaggcccctgacgaccggagttggccctttgcccgcttgtccgacgatgccaggagcccccgacccccaggacggccccgaagccactgtgggaaggccgcccctgttatcctccgaccccgaagtcatcagcacagaagacaatgaggccctccgggatgccaaaacccgataccctcaggcccagaagatgctttacgctattctgatggcctcgaggaaactgcgccattatttccaggcgcatcgggtcactgtggttacgtcttaccccctcggtcaaatcttgcataatcgagagggtacaggacgggtggtgaaatgggcaatcgaactttctgagttcgatttgcactttgaaccacgccacgctatcaagagccaggccctcgccgattttgtggcagagtggaccccggctcccgagcccgtctcgatccccgaggccagcacggacccctcgcagctgcctcacaccgcccactgggtaatgcagttcgacggctccctgtctcttcaggacgccagtgcgggggtcacgttgacctctccgagtggaaacgtcctcagatacttggtccgcctcgactttcgagcgaccaataatatggcagagtacgagggactccttgccggactcagagtggcagctggactggggatccgccgcctcctggtgttaggcgactcccagctggtcgttaaccaagtctgtaaggagtaccggtgctctgacccgcagatggacgcctacgtacgccaagtacggcgtatggagcgccattttgatgggattgagcttcggcatgtgcccagacgggataacatgatggccgacgaactctcacggctcgcgtcctcgcgagcccagaccccaccgggcgcctttgaagaaaggcttgcccagccgtcggcgcgacccgaccccttaggggagacggatgcgcctgaccggcccccgaggcccgtcggagtccaggcctcgggacccgaggggagtgctcccagctcccttagattgattgcttggatcgccgagatccaagcatacctcacagataagactctacccgaggaccgcgaagggagtgaacgcgtccatcgcatctccaaacgctacgtgctggtagaagggaccctctatcggcgcgcggctaatggagtcctcctgaagtgcattcctcgggaacaaggcgttgtgcttcttgccgatatccatgaaggcgaatgcggagcccactccgcctcgcgcaccttggttggtaaagcttttcgccagggtttctattggccgacagctctcaatgatgcggtcgacctggtccggcgatgtagagcgtgtcaattccacgccaagcaaatccatcagccggcccaggccctgcagaccataccactttcgtggccatttgctgtctggggactcgatatcctgggaccgtttaggcgggccccgggcgggtttgagtatctgtatgtcgcgatcgacaagttcactaagtggcccaaggcttatccggtcgtcaagatcgataagcactccgcacttaagttcattaagggcatcacggcccggtttggagtgcctaaccgtattattacggataatggcacccaattcactagtgaactcttcggcgactactgcgaagacatgggcatcaagctctgcttcgcctcacctgcccaccccagaagcaatggccaagtggagcgcgccaatgcggaagtcctcaaaggccttaaaaccaagaccttcaacatactcaagaagcacggcgattcatggatcgaggagttgccagcggtgctctgggcaaaccgaactacaccaagccgagcaaccggggaaacgcctttcttcctcgtctacggcgcggaagcggttctcccatccgagctcaccctgaggtctcctcgggccaccatgtactgcgaggctgatcaagatcagcttcgcagagatgacctcgactacttggaagagcgaaggcggcgcgcggccctccgagccgcgcgctaccagcagagcctgcggcgctaccatcagcgtcacgtccgggcccgatcactctgcgtcgacgacctcgtcctacgccgcgtccaaacgcgtgctggattgagcaagctttcaccaatgtgggagggtccgtatcgagtggtcggcgtcccccggctgggctccatacggctggccacgggcgacggcactgagctgcctaacccgtggaacatcgaacgccttcgtcgcttctacccctga

SEQ ID NO: 28046 - DNA, 5052 bp, Oryza sativa
  Clone ID: PAT_MRT4530_32683C.1
atggctgagcaagcaaaggcgcacgacctctctccgagtgtgagtggcgacgacggggagccgaacccacgccgtcgagctcgtactccaccgccccctccacgccaaagtcctaagcggggggaggcgctcgagagggccgaaggatccgcgacttcgacatccacaggaggtggaaaagagcggcgagatggggagcgtcgtctcctcgtctatggtgacggcagcacgccccagggcgcgctccaagctgcgggcgcgctcctatgtcacccgcccgtcgcccatgacccggagtctccagcccaacgttggctggacgatgtggccaaattggtcatgactgcacggcagcatctagatgctggtgggcggtcctccgccaccaaggcctctggtgctgctaccaccggctccgcgtcgtcaagacgaagggcgcggcgagcggcagccgctgttcgccattcggccaccactccttcgtcgactccttcgacccgggaagatctgcgtggggggccggacgcccgcaccagcatcgagcggcggcgtaatgaccgacgtgctacccacgcaacggagggcgcttcctcgtccagagtgtcacctcaacacggaagcgggaatcagccctccgtgcccccggttggtggtgtcggctgtagagcctttgtggcgagtcttcggaatgtccgttggcccccaaggttccggcccaccatcgccgaaaaatatgatggcagcgtcaaccccgccgagtttctccaggtctacacgaccgggattgaggccgccgggggagacgacagggtcatggcgaatttctttcccatggccctgaaggggcaggcgcggggttggctaatgaacttgccacccgcgtcagtccactcctgggaggatttgtgccaacagttcaccatgaacttccaaggcacgtatccgcgcccaggtgaggaagcggacttgcacgcagtacagcgaagggacgatgagtcacttcgctcgtacattcagcggttctgtcaagtccgcaacaccataccatgcatccctgcacacgcggtgatttacgcgttcagggggggtgtgcggcacaaccgcatgctcgaaaagatcgcctccaaggagccccagactaccgcggagctttttcagctcgcggaccgagtggctcgcaaggaggaggcctggacttggaacccctccggttccgtcaaaagtttggctgagcggacgaggaagtgggaggaggagaggaggcaggagcgccgagagggcaagtccccggcggttccttccggcaatcggcgaagtgaggccaagcagaaggcccctgccgaggacatcgatgacggcgatgatgacctaggtttccaagagcctggggccaccattgccactgtcgatgggggagcgtgtgctcacgtttctcgccggagcctcaaggccatgaagcgagagcttctggccgcggcccctactcatgaggcgacgcgccgggcgcggtggtcggaggttgccctcaccttcgaccagaccgaccacccaccgtgcgttgcccggggaggacagatcgcaatggtggtttcccccactgtttgcaacgcgaagttggggcgtgtcctcattgatggaggagcagccctcaacatcctttcccccgcagcctttgacgccatcaaggccccggggatgatgctccggccgtcccagccgatcatcggtgtgacgccggggcacacttggccgctaggtcatatcgacctcccggtcacctttggtggacccgccaacttccgcacggagcgggtgaacttcgatgtggcggacctcagtctgccctacaacgcggtcctggggaggcccgcgttggtaaagttcatggcggcggtccactacgcctacctccagatgaagatgccgggccccgacggccccatctctgtccatggcgacctcaaagtcgcgctcgcttgtatggagcagcgtgcggaccgcctcgccgtcgtgtccaagcccgagggcggcgacgagaggcttgacacatccgcccccgccgccccgaagcagcggatagtcacgtctgatgaggtcccggtcaaggaggaagacgcgctcgtctccttcctgcgggcaaacgctgacgtcttcgcatggagaccggcggatatgcccggggtccccagggaggtgattgagcaccgtctcgccgtgcggccgggtgcaaggccggtccggcagaaagtgcggcggcaggccccggaacgtcaagccttcatccgcgaggaggtggcgcgacttctggaggccggattcatccgcgaggtcatccacccggagtggctggcgaacccggtggtcgttcccaaggcgaacggcaagcttcggatgtgcatcgactacaccgaccttaataaggcatgtcctaaggatccttaccccttgcctcgcatagatcagattgtcgactccacagcggggtgcgaccttttgtgttttctagatgcatactctggttaccatcagattcgcatggctagggaggatgaggaaaaaactgcgttcattacccccataggaacttattgttatacaacaatgcccttcgggttaaaaaatgcaggtcctacttttcaacgtactactcgaatttctttgggtagccaaataggacgtaatgttgaggcttatgtcgatgacttggttgtaaagacgcgtaaccaagaaaccttactctcggatctagcggaaacttttgaaagtctccgctccgcccgcataaaactgaaccccgataagtgcgtgttcggtgtacctgcgggcaagcttctcgggtttttggtctctgccagaggcatcgaagccaaccccgagaagatacgagctatagagcggatgcgcccccccagcaagcttagggatgtgcaatgcgtcaccggttgcatggccgccctaagtcggttcatatcgaggctgggggagaaggcgctacccttatttaagctcctcaaacgctccgggccgtttacttggacggaggaagctgagcgtgccctcactcagttgaaggcgtatctcagctctcccccggttctggtcgccccggagccaaatgaacccttactactctacttagcggcgaccccgcaagtggttagtgcggcgttggtcgtggagcgcgatgaggacaatcctcattccgcgcacccccaccctgtgcagacttggcccgggagagagcagggaggagaggcccccgagccgaacggtggcccaaggcccccgacgaccggagttggccctctgcccgcttgtcagacggtgctaggagcccccgacccccaggaaggccctgaggccactgtgggaaggccgtacctatcgccctttgaccccgaggctaaccctgtgctgactcgacccgggaaagagcagggagaagaggcccccgagccgaacggaggtctaaggcccctgacgaccggagttggccctttgcccgcttgtccgacgatgccaggagcccccgacccccaggacggccccgaagccactgtgggaaggccgcccctgttatcctccgaccccgaggtcatcagcacagaagacaagtgcgccccgcgaggctgcttggacgaagagtgccccagggatgcggcccctagcgaagagaatcggccccaccgaaaggtgcagcggcccgtctactttgttagtgaggccctccgggacgccaaaacccgataccctcaggcccagaagatggtttacgctattctgatggcctcgaggaaactgcgccattatttccaggcgcatcgggtcactgtggttacgtcttaccccctcggtcaaatcttgcataatcgagagggtacaggacgggtggtgaaatgggcaatcgaactttctgaattcgatttgcactttgaaccacgccacgctatcaagagccagaccctcgccgattttgtggcagagtggaccccggctcccgagcccgtctcgatccctgaggccagcacggacccctcgcagctgcctcacaccgcccactgggtaatgcagttcgacggctccctgtctcttcagggcgccgttgatctggtccggcgatgcagagcgtgtcagtttcacgccaaacaaatccatcagccggcccaggccctgcagatcataccactttcgtggccatttgctgtctgggggctcgatatcctgggaccgtttaagcgggccccgggcgggtttgagtatctgtatgtcgcgatcgacaagttcactaagtggcccgaggcttatccggtcgtcaagatcgataagcactctgcacttaaatttattaagggcatcacggcccgttttggagtgcctaaccgtattattacggataatggcacccaattcactagtgaactcttcggcgactactgcgaagacatgggcatcaagctctgcttcgcctcacctgcccaccccagaagcaatggccaagtggagcgcgccaatgcagaaatcctcaaaggccttaaaactaagaccttcaatatcctcaagaagcatggcgattcgtggatcgaggagttgccagcggtgctctgggcaaaccgaaccacaccaagccgagcaaccggggaaacgcctttcttcctcgtctacggcgcagaagcggttctcccatctgagctcaccctgaggtctcctcgggccaccatgtactgcgaaactgatcaagatcagcttcgcagagatgacctcgactacttggaagagcgaaggaggcgcgcggccctccgagccgcgcgctaccagcagagcctgcggcgctaccatcagcgtcacgtccgggcccgatcactctgcgtcgatgacctcgtcttacgccgcgtccaaacgcgtgctggattgagcaaactttcaccaatgtgggagggtccgtatcgagtgatcggtgtcccccggccgggctccatacggctggccacgggcgacggcactgagttgcctaacccttggaacatcgagcaccttcgtcgcttctacccctga

SEQ ID NO: 28047 - DNA, 1053 bp, Oryza sativa
  Clone ID: PAT_MRT4530_32684C.1
atggcgacgcgcggcgatgggacggcgcggagcagcgttgggatggcgagcgcgacggcgactgtgcgcggcgcaggcggggcacgaggcggtgatggcgccggcgaggagtcgacggcgacgggacgacaagtgacgcaacggcgacagcgcgcgccggctcagggcgcgagacagacggcgacggtcaagcggcgcggcagcgacagggcgcggggctcgaaggcgcagaagcgcgacggcgacggctcgcggcgcgcggcgatggcgacgcgacggcgacggcgcgcggcgtggcagcggggacgggacgcgacggcgacggcgcacggcgcggcagcggcgacgggacgtgatggcaacggtggcgcggggcgcgaggcggctaggcgcggggcgatgacatgggtgggctcgatgcaggagctcggactcgaggtcgtaaagaggaacaacagtggaacccgcacgagagtggccagcatccgtcatgtcggggctgacctgggacagcatgggggaagacctcggaaggctgtcgagcctcgactttttcccgacatcgagcaccgcctccgattcctcctccacctagcacggccaccatgcacatcgccgaaaagcttcgccttcgtctccgttctgcctctatggtccatgcttgcatcaagagatcacatagagaccgtggaagcaaggcagcgcaaggtggcgaagatcgccgaccagctcacgggtgtgtcagatctgctctccctttgtggggcgaggatgactccttgtcgcactgccactagttgtgccctccgtctttgcgccgaggcctgtacctcttccccaccatcacctgtgttgggcctcctcggcagcctccatgagtggccgccgccaggcggtcccctccacatccgtgatgacctaagcgcacccgtcggccacctccacctctctccaagccatctctggtctgtccgcgagcgtcggctcccccactgccatgggcacctcccagcaagcgccaacctcaggtgcagcaagtctcagcggcgatga

SEQ ID NO: 28048 - DNA, 5655 bp, Oryza sativa
  Clone ID: PAT_MRT4530_32685C.1
atggctgagcaagcaaaggcgcacgacctctctccgagtgtgagtggcgacgacggggagccgaacccacgccgtcgagctcgtactccaccgccccctccacgccaaagtcctaagcggggggaggcactcgagagggtcgaaagatccgcgacttcaccgattgcgggcgatggagaaaaacggcgagatggggagcgtcgcctcctcgtctacggtgacggcagcacgccccagggcgcgctccaagctgcgggcgcgctcctacgtcacccgcccgtcgcccatgacccggagtctccagcccaacgttggctggacgatgtggccaaattggtcatgactgcacgacagcgtctagatgctggtgggcggtcctccgccaccaaggcctctggtgctgctaccaccggctccgcgtcgtcaagacgaagggcgcggcgagcggcagctgccgttcgccattcggccaccactccttcgtcgactccttcgacccgggaagatctgcgtggggggccggacgcccgcaccagcatcgagcggcggcgtaatgaccgacgtgctacccacgcaacggagggcgcttcctcgtccagagtgtcacctcaacacggacgcgggaatcagccctccgtgcccccggttggtggtgtcggctgtagagcctttgtggcgagtcttcggaatgtccgttggcccccaaggttccggcccaccatcgccgaaaaatatgatggcagcgtcaaccccgccgagtttctccaggtctacacgatcgggattgaggccgccgggggtgacgacagggtcatggcgaatttctttcccatggccctgaaggggcaggcgcggggttggctaatgaacttgccacccgcgtcagtccactcctgggaggatttgtgccaacagttcaccatgaactttcagggcacatatccgcgcccaggggggggcgtgcggcacaaccgcatgctcgaaaagatcgcctccaaggagccccagactaccgcggagctttttcagctcgcggaccgagtggctcgcaaggaggaggcctggacttggaacccctccggttccggtgtggcagcttcggccgcccccggatccgccgctcagatagggcggcgtgacaggaggaggaagaagaggtcagtccattccgacgacgagggtcatgtcctcgccgtcgagggcgcttcgcgggccacccaaaaggggaggcctgcgagcgacaaaaagaaaaaggccggcgctcccagcagggagcgcccagccggcaagtggtgcaccgtccacaacacctccctccacgacctcatggactgccgtgcggtcaaaagtttggctgagcggacgaggaagtgggaggaggagaggaggcaggagcgccgagagggcaagtccccggcggttccttccggcaatcggcgaagtgaggccaagcagaaggcccccgccgaggacatcgatgacggcgatgatgacctaggtttccaagagcctggggccaccattgccactgtcgatgggggagcgtgtgctcacgtttctcgccggagcctcaaggccatgaagcgagagcttctggccgcggcccctactcatgaggcgacgcgccgggcgcggtggtcggaggttgccctcaccttcgaccagaccgaccacccaccgtgcgttgcccggggaggacagatcgcaatggtggtttcccccactgtttgcatcgtgaagctggggcgtgtcctcattgatggaggagcggccctcaacatcctttcccccgcagcctttgacgctatcaaggccccggggatgatgctccggccgtcccagccgattatcggtgtgacgccggggcacacgtggccgttaggtcacatcgacctcccggtcaccttcggtggacccgccaacttccgcacggagcgggtgaacttcgatgtggcggacctcagtctgccctacaatgcggtcctggggaggcccgcgttggtgaagttcatggcggcggtccactacgcctacctacagatgaagatgccgggccccggtggccccatctctgtccatggcgacctcaaagtcgcgctcgcttgtatggagcagcgcgcggaccgcctcgccgtcgtgtccaagcccgagggtggcgacgagaggcttggcacatccgcccccgccgccccgaggcagcggatagtcacgtgcgatgaggtcccggaagacgcgctcgtctctttcctgtgggcaaacgctgacgtcttcgcatggagaccggcggatatgcccggggtccccagggaggtgattgagcaccgtctcgccgtacggccgggcgcaaggccggtccggcagaaagtgcggcggcaggccccggaacgtcaagcctttatccgcgaggaggtggcgcgacttctggaggccggattcatccgcgaggtcatccatccggaatggctggcgaacccggtggtcgttcccaaggcgaacggcaagcttcggatgtgcatcgactacaccgaccttaacaaggcatgtcctaaggatccttaccccctgcctcgcatagatcagattgtcgactccactgcggggtgcgaccttttgtgttttctagatgcatactctggttaccatcagattcgcatggctagggaggatgaggaaaaaactgcgttcattacccccataggaacctattgttatacgacaatgcccttcgggttaaagaatgcaggtcctacttttcggcgtactactcgaatttctttgggtagccaattaggacgtaatgttgaggcttatgtcgatgacttggttgtaaagacgcgcaaccaggaaacgttactctcagatctagcggaaacctttgaaagcctccgctccgcccgcataaaactgaaccccgataagtgcgtgttcggtgtacctgcgggcaagcttctcgggttcttggtctctgcccgaggcatcgaagccaaccccgagaagatacgagctatagagcggatgcgcccccccagcaagtatagagcgacttggcccgggagagagcagggaggagaggcccccaagccgaacggtggcccaaggcccccgacgaccggagttggccctctgcccgcttgtcagacggtgctaggagcccccgacccccaggaaggccctgaggtcactgtgggaaggccgcacctatcgccctttgaccccgaggctaaccctgtgctgactcgacccgggaaaaagcagggagaagaggcccccgaaccgaacggaggcctaaggcccctgacgactggagttggccctttgcccgcttgtccgacgacgccaggagcccccgacccccaggaaggccccgaggccactgtgggaaggccgcacctgttatcctccgaccccgaggtcatcagcacggaagacaagtgcgccccgcgaggctgcttggacgaagagtgccccagggatgcggcccctagcgaagagggtcggacccaccgaaaggtgcagcggcccgtctactttgttagtgaggccctccgggacgccaaaacccgataccctcaggcccagaagatgctttacgctattctgatggcctcgaggaaactgcgccattatttccaggcgcatcgggtcactgtggttacgtcttaccccctcggtcaaatcttgcataatcgagagggtacaggacgggtggtgaaatgggcaatcgaactttctgagttcgatttgcactttgaaccacgccacgctatcaagagccaggccctcgccgattttgtggcagagtggaccccggctcccgagcccgtctcaatccccgaggccagcacggacccctcgcagctgcctcacaccgcccactgggtaatgcagttcgacggctccctgtctcttcagggcgccggtgcgggggtcacgttgacctctccgagcggagacgtcctcagatacttggtccgcctcgactttcgagcaaccaataatatggcagagtacgagggactccttgccggactcagagtggcagctggactggggatccgccgcctcctggtgttaggcgactcccaactggtcgttaaccaagtctgtaaggagtaccggtgctctgacccgcagatggacgcattcgtgcgccaagtacggcgtatggagcgccattttgacgggatagagcttcggcacgtgcccagacgggataacatgatggtcgacgaactctcacggctcgcgtcctcgcgagcccagaccccactgggcgcctttgaagaaaggcttgcccagccgtcggcgcgacccgaccccttaggggagacggatgcgcctgaccggcccccgaggcccgtcggagtccaggcctcgggacccgaggggagtgctcccagctcccttagattgattgcttggatcgccgagatccaagcatacctcacagataagactctacccgaggaccgcgaagggagtgaacgcgtccatcgcatctccaaacgctacgtgctggtagaagggaccctctatcggcgcgcggctaatggaatcctcctgaagtgcattcctcgggaacaaggcgttgtgcttcttgccgatatccatgaaggcgaatgcggagcccactccgcctcgcgcaccttggttggtaaagcttttcgccagggtttctattggccgacagctctcaatgatgcggtcgacctggtccggcgatgtagagcgtgtcaattccacgccaagcaaatccatcagccggcccaggccctgcagaccataccactttcgtggccatttgctgtctggggactcgatatcctgggaccgtttaggcgggccccgggcgggtttgagtatctgtatgtcgcgatcgacaagttcactaagtggcccgaggcttatccggtcgtcaagatcgataagcactccgctcttaaattcattaagggcatcacggcccggtttggagtgcctaaccgtattattacggataatggcacccaattcactagtgaactcttcgtcgactactgcgaagacatgggcatcaagctctgcttcgcctcacctgaccaccccagaagcaatggccaagtggagcgcgccaatgcggaaatcctcaaaggccttaaaaccaagaccttcaacatactcaagaagcacggcgattcatggatcgaggagttgccagcggtgctctgggcaaaccgaactacaccaagccgagaaaccggggaaacgcctttcttcctcgtctacggcgcggaagcggttctcccatccgagctcaccctgaagtctcctcgggccaccatgtactgcgaggctgatcaagatcagcttcgcagagatgacctcgactacttggaagagcgaaggcggcgcgcggccctccgagccgcgcgctaccagcagagcctgcggcgctaccatcagcgtcacgtccgggcccgatcactctgcgtcgacgacctcgtcctacgccgcgtccaaacgcgtgctggattgagcaagctttcaccaatgtgggagggtccgtatcgagtggtcggcgtcccccggccgggctccatacggctggccacgggcgacggcactgagctgcctaacccgtggaacatcgaacaccttcgtcgcttctacccctga

SEQ ID NO: 28049 - DNA, 4635 bp, Oryza sativa
  Clone ID: PAT_MRT4530_32686C.1
atggctgagcaagcaaaggcgcacgacctctctccgagtgtgagtggcgacgacggggagccgaacccacgccgtcgagctcgtactccaccgccccctccacgccaaagtcctgggcgggagaaggcgcccgagagggctgaagggtccgcgacttcgacatccacaggaggtggaaaagggcggcgagatggggagcgtcgcctcctcgtctatggtgacaacagcacgccccagggcgcgctccaagctgcgggcgcgctcctacgtcatccgcccgtcgcccatgacccggagtctccagcccaacgttggctggacgatgtggccaaattggtcatgacggcacggcagcgcctagatgctggtgggcggtcctccgccaccaaggcctctggcgctgctaccaccggctccgtgtcgtcaaggcggagggcgcggcgagcggcggctgttgctcgccattcggccgccactccttcgtcgactccttcgacccgggaagatctgcgtggggggccggacgcccgcgccagcatcgagcgccggcgtaatgaccgacgtgctgcccacgcaacggagggcgcttcctcgtccagagtgtcacctcgacacggacgcggggaccagccctccgtgcccccggttggtggtgtcggctgtagagcctttgtggcgagtcttcggaatgtccattggcccccaaggttccggcccaccatcgccgaaaaatatgatggcagcgtcaaccccgccgagtttctccaggtctacacgaccgggattgaggccgccgggggtgacgacagggtcatggcgaatttctttcccatggccctgaaggggcaggcgcggggttggctaatgaacttgccacctgcatctgtccactcttgggaggatttgtgccaacagttcacaatgaacttccaaggcacatatccgcgccccggtgaggaagcggacttgcacgcagtacagcgaagggacgatgagtcacttcgatcgtacattcagcggttctgtcaagtccgcaataccataccatgcatccctgcacacgcggtaatctacgcgttcagggggggtgtgcggcacaaccgcatgctcgaaaagatcgcctccaaagagccccagactaccgcggagctttttcagctcgcggaccgagtggctcgtaaggaggaggcatggacctggaacccctccggttccggagtggcagcttcggccgcccccggatccgccgctcagacagggcggcgtgacaggaggaggaagaagaggtcagtccattccgacgacgagggtcatgtcctcgccgtcgagggcgcttcgcgggccacccaaaaggggaggccagcgagcgacaaaaagaaaaaggccggcgctcccagcagggagcgcccagccggcaagtggtgcaccgtccacaacacttcccttcacgacctcgcggactgccgtgcagtcaaaagtttggctgagcggacgaggaaatgggaggaagagaggaggcaggagcgccgagagggcaagtccccggcggttccttccggcaatcggcgaagtgaggccaagcagaaggcccccgccgaggacatcgatgacggcgatgatgacctaggagcagccctcaacatcctttcccccgcagcctttgatgccatcaaggccccggggatgatgctccggccgtcccagccaatcatcggtgtgacgccggggcacacttggccgctaggtcatatcgacctcccggtcaccttcggtggacccgccaatttccgcacggtgcgggtgaacttcgatgtggcggacctcagtctgccctacaacgcggtcctggggaggcccgcgttggtgaagttcatggcggcggtccactacgcctacctccagatgaagatgccgggccccgatggccccatctctgtccatggcgacctcaaagtcgcgctcgcttgtatggagcagcgcgcggaccgcctcgccgtcgtgtccaagcccgagggtggcgacgagaggcttggcacatccgcccccgccgccccgaggcagcggatagtcacgtgcgatgaggtcccggtcaaggaggaagacgcgctcgtctctttcctgcgggcaaacgctgacgtcttcgcatggagaccggcggatatgcccggggtccccagggaggtgattgagcaccgtctcgccgtacggccgggcgcaatgccggtccggcagaaagtgcggcgcccgcataaaacttttgagagcctccgctccgcccgcataaaactgaaccccgataagtgcgtgttcggtgtacctgcgggcaagcttctcgggttcttggtctctgcccgaggcatcgaggccaaccccgagaagatacgagctatagagcggatgcgcccccccagcaagcttagggatgtgcaatgcgtcaccggttgcatggccgccctaagtcggttcatatcgaggctgggagagaaggcgttacccttatttaagctcctcaaacgctccgggccgtttacttggacggaggaggctgaacgtgccctcactcagttgaaggcgtatctcagctctcccccagttctagtcgccccggagccaaatgaacccttgctactctacttagcggcgaccccacaagtggttagtgcggcgttggtcgtggagcgcgatgaggacaatcctcattccgcgcacccccaccttgtgcagacttggcccgggagagagcagggaggagaggcccccgagccgaacggtggcccgaggcccccgacgaccggagatggccctctgcccgcttgtcagacggtgctaggagcccccgacccccaggaaggccccgaggccactgcgggaaggccgcacctatcgccctctgaccccgaggctaaccctgtgccgatttggcccgggagagagcagggagaagaggcccccgagccgaacggtggcccaaggctcccgacgaccggagatggccctctgcccgcttgtccgacgacgccaggggcccccgacccccaggacggccccgaggccactgtgggaaggccgcccctgtcgtcctccgaccccgaggtcgtcggcacagaagacgagtgcgccccgcgaggccgctcgggtgaagagcgccccagggatgcggcccctagcgaagaggatcggccccaccgaaaggtgcagcggcccgtctactttgttagtgaggccctccgggatgccaagacccgataccctcaggcccagaaaatgctttacgctgttctgatggcctcgaggaaactgcgccattatttccaggcgcatcgggtcactgtggttacgtcttaccccctcggtcaaatcttgcataatcgagagggtactggacgggtggtgaaatgggcaatcgaactttctgagtttgatttgcactttgaaccacgccacgctatcaagagccaggccctcgccgactttgtggcagaatggaccccggctcccgagctcgtctcggtccccgaaaccggctcgggtccctcgcagctgcctcacaccgcccactgggtgatgcagttcgacggctccctgtctcttcagggcgccggtgcgggggtcacgttgacctctccgagtggagacgtcctcaaatacttggtccgcctcgactttcgagcgaccaataatatggcagagtacgagggactccttgccggactcagagtggcagctggactggggatccgccgcctcctgataagactctacccgaggaccgcgaagggagtgaacgcgtccatcgcatctccaaacgctacgtgctggcggaccccgggcgggtttgagtatctgtatgtcgcgatcgacaagttcactaagtggcccgaggcttatccggtcgtcaagatcgataagcactccgcacttaaattcattaagggcatcacagcccggtttggagtgcctaaccgtattattacggataatggcacccaattcactagtgaactcttcggcgactactgcgaagacatgggcatcaagctctgcttcgcctcacctgcccaccccagaagcaatggccaagtggagcgcgccaatgcggaaatcctcaaaggtcttaaaaccaagaccttcaacacactcaagaagcacggcgtttcatggatcgaggagttgccagcggtgctctgggcaaaccgaactacaccaagccgagcaaccggggaaacgcctttcttcctcgtctacggcgcggaagcggttctcccatccgagctcaccctgaggtcttctcgggccaccatgtactgcgaggctaatcaagatcagcttcgcagagatgacctcgactacttggaagagcgaaggcggcgcacggccctccgagccgcgcgctaccagcagagcctgcggcgctaccatcagcgtcacgtccgggcccgatcactctgcgtcgacgacctcgtcctacgccgcgtccaaacgcgtgctggattgagcaagctctcaccaatgtgggagggtccgtatcgagtggtcggcgtcccccggccgggctccatacggctggccacgggcgacggcactgagctgcctaacccgtggaacatcgaacaccttcgtcgcttctacccctga

SEQ ID NO: 28050 - DNA, 1945 bp, Oryza sativa
  Clone ID: PAT_MRT4530_32687C.1
gtctttcctgtcttcagctgtgaaacagttcaagccaatctcatggccatcactaaccatgaactcaaaatgcatgttctatgaatccaggcaagcattccatcaaacccaaccaatttccatccttttttttgttcttgctggtaaagactggagtttctagccattcccagcatttcttttgctctacttcttctacatctacctctctactcttagtttcactatggagaacacaaccacaattacaaccatggtggggatggttagattcactcaatggccggcttccattcctaatgctttagctctccttgcctccaagagcttgtctttaagatggagggaagaaccggttgaggttgaagggcagggtgtagaactcctcattccggctgtcgcctctgaacgtcctgaacctcgcccaccatggcatcccccggtccctcgccgcatccctcacctccagggtgttgtcgaggatcaccgcgacgatcagaccgacggtcgggggcgaggagaagacggtgttgatgtagtcattgaaccatcctgccctggtgtgtgcagggccgtgcagagcgctcatggtgtagcggaagaagtactccgggatggaaatgccgaggaacagcgagacgccgatgatgaagaggctgcgcatcgagttcatgttggtgaactgcatgaaggagagccccactgcaccaacatatccaaacatgacgcagtatatggcggcaaacattgtgaatggaatcgaagcaaacagagccccaaatctccctagaatggagaagaagatcatgaaaccagcggagatctgtatcactcttctgctgccaatcctggttgatccaagaagaccaatgttctctacagagaccgtggagccagttccagtaccaaatagcccatcaaacagcagcccaattccctgattgttcacataaagggcaaaagcattatactcctgccatccaatgcctctgctgaggacatatggtggtgggggtgttgcactcgccaaccgcgcagcagccttgaatgctccagctgactctatcaaggacaccacaacagcagccatcataccaaatgcatgatctgcgctgaatgttggcggaccccattgcagtgggtatgggatgtcaatccagtctgcagaagtgatgagattggcacggtctgttcggcagtttatctgggtgagcagagaggtatgtttgtatgtcccacttgctgtgaggatgtgagcataaacccagacaagcgcgatcgaaatgagcactgagaacctctccaatatcggaaaatggcgcacttgtacatgcttcagatattgggaaagagcaacaaacaggacaagcattggaagcccaatctccacgcacctcccaatcactgggaatcctctctcgaaaaggccaagccccaccagcgcaaccaccggaaccatcccaagtggactgaagaacctggagcatatcccccacaactggctgtagccaagaattatttggatgcaggaggatattattaaagccccctgtatggctctcatagtcatgataaacctagtatggtcatcagttatttgtgccagtgatgggtcttttattatcgatataaccgggatcacgaacgcatacgagcctccgatgatggtcggaagccgagttccaaacaaagtttggagcattgtgtttatcccagtcacaaacagcatggtttgcaccacctttgccttgtcatgagcatttccacccatgagtggaaccagtaaggtggggatcatcacagccgtccccaggcaaaggatgtaatgctggaaccccagggcaattgcctccccccaggatgggttggagtctatgcagtactccagcccctgcagctgatccattggtggatggctgatctcctcttgcttcatgtcagccat

SEQ ID NO: 28051 - DNA, 615 bp, Oryza sativa
  Clone ID: PAT_MRT4530_32688C.1
atgggtctgttttcccgtcttgtgtccaagttttcccgtgctctacgtgcatcagcacctgcaaaacctcgttcattcagcgcagatgtaagagaagcttgctggaataatgctcccaaggtgattggacgatctggtgatcgttggcggctggatgccaacggaaatcctgtcctgaaggcgctaaatggcaaacatggaggcccaaatgatcagagtaactgtcaaatcatacagactggcgcgaacagatcaaaatcaaaccgtattcttaggaaagaccagatgaaaggtctatccaggacaatgaactggactcatccccacttagacaccatcgagatagctgtatacgcctcagtggagagggatgatctgagctgcacttgcccaaccatcgacaacctgtctgatgcaaacttcaaaaaaaacatatgtgaacttccagagtttatgaccgaggaaggaattcactgtcttcaggtagctgatgccatgtcaagatttatgagcaatcctctcaatgagatcacttgtgctgctgatgcgagcacgcccaacaacctcacagcgtcaggtaccagcagggtagcagagaagatttgcccaggataa

SEQ ID NO: 28052 - DNA, 3222 bp, Oryza sativa
  Clone ID: PAT_MRT4530_32689C.1
atggcacggggctccgctctgctcgatggtagcgtgctgccgccttcccgcattgtgagcgagaggcaggctgggctggcgcgccgtttcatgccgggatctgccaccggccgggagatagtcacgctgggcgagggacgcccggcgccagactacccggggcggtccgtcttctttctcccctttgcaatggcagggctggttccgccattttcttctttcttcatggatgttctggagttctacgatctccagatggcgcacctcacccccaatgcggtgatgactttggccatcttcgcgcatctgtgcgagatgttcattggggtgcgcccatctcttcggctgttccggtggttcttcaccgtacagtcggtgtcgccgccatcggtagttggtggctgctacttccagccacgggagccggtgctgaatcgctacatcccctgcgccctccgcaagaagtgggacgactggaagagcgactggttctacaccccccttgccgacgaagcgcgcctccgacttccgagccagcccccggcgcaggcctccagctggcgggcgccggtagatctgggggatggctatgacgccgtcctcgaccgcctggcgggcctgcgatcccaggggctcacaggggccatggtgtacggcgactacctccgtcgtcggattgcgccgctccagcggcgcgctcggggcgcctgggagtacaccgggtccgaagacttcatgaggacccaccagggagtgagatgggactgggctcctgaggacttcaagatattggtccaacgggtgctgaatctcaactccgtggaggcgtccctcattccccaaggaatcctccccctctgcagcgatccagaccgcgtctccatcctgaccattatgatggcggtcggggcctcagaggagcgagctccaaagggccacgacggcgcaggcgggagccgcagggggaacaatctaccccgggagggggtcgtgcttctgggtcccgcgacaggggcccggggaacagccgccctgccgagtggtgacgacggggagccgaacccacgccgtcgagctcgtactccaccgccccctccacgccaaagtcctaagcggggggaggcactcgagagggtcgaaagatccgcgacttcaccgattgcgggcgatggagaaaaacggcgagatggggagcgtcgcctcctcgtctacggtgacggcagcacgccccagggcgcgctccaagctgcgggcgcgctcctacgtcacccgcccgtcgcccatgacccggagtctccagcccaacgttggctggacgatgtggccaaattggtcatgactgcaaggcagcgtctagatgctggtgggcggtcctccgccaccaaggcctctggtgctgctaccaccggctccgcgtcgtcaagacgaagggcgcggcgagcggcagctgccgttcgccattcggccaccactccttcgtcgactccttcaacccgggaagatctgcgtggggggccggacgcccgcaccagcatcgagcggcggcgtaatgatcgacgtgctacccacgcaacggagggcgcttcctcgtccagagtgtcacctcaacacggacgcgggaatcagccctccgtgcccccggttggtggtgtcggctgtagagcctttgtggcgagtcttcggaatgtccgttggcccccaaggttccggcccaccatcgccgaaaaatatgatggcagcgtcaaccccgccgagtttctccaggtctacacgaccgggattgaggccgccgggggtgacgacagggtcatggcgaatttctttcccatggccctaaaggggcaggcgcggggttggctaatgaacttgccacccacggggggcatgcggcacaaccgcatgctcgaaaagatcgcctccaaggagccccagactaccgcggagctttttcagctcgcggaccgagtggctcgcaaggaggaggcctggacttggaacccctccggttccggtgtggcagcttcggccgcccctggatccgccgctcagacagggcggcgtgacaggaggaggaagaagaggtcagtccattccgatgacgagggtcatgtcctcgccgtcgagggcgcttcgcgggccacccaaaaggggaggcctgcgagcgacaaaaagaaaaaggccggcgctcccagcagggagcgcccagccggcaagtggtgcaccgtccacaacacctccctccacgacctcgtggactgccgtgcggtcaaaagtttggctgagcgaacgaggaagtgggaggaggagaggaggcaggagcgccgagagggcaagtccccggcggttccttccggcaatcggcgaagtgaggccaagcagaaggcccccgccgaggacatcgatgacggcgatgatggcctaggtttccaagagcctggggccaccattgccactgtcgatgggggagcgtgtgctcacgtttctcgccggagcctcaaggccatgaagcgagagcttctggccgcggcccctactcatgaggcgacgcgccgggcgcgatggtcggaggttgccctcaccttcgaccagaccgaccacccaccatgcgttgcccggggaggacagatcgcaatggtggtttcccccactgtttgcaacgtgaagctggggcgtgtcctcattgatggaggagcggccctcaacatcctttcccccgcagcctttgacgctatcaaggccccggggatgatgctccggccatcccagccgattatcggtgtgacgccagggcacacgtggccgttaggtcacatcgatctcccggtcaccttcggtggacccgccaacttccgcacggagcgggtgaacttcgatgtggcagacctcagtctgccctacaacgcggtcctgaggaggcccgcgttggtgaagttcatggcggcggtccactacgcctacctacagatgaagatgccgggccccggtggccccatctctgtccatggcgacctcaaagtcgcgctcgcttgtatggagcagcgcgcggaccgcctcgccgtcgtgtccaagcccgagggtggcggcgagaggcttggcacatccacccccgccgccccgaggcagcggatagtcacgtgcaatgaggtcccggtcaaggaggttgccctgggcgacggcccgtcaaagaccacacggatcggtggtcttctggacggcaaatag

SEQ ID NO: 28053 - DNA, 961 bp, Oryza sativa
  Clone ID: PAT_MRT4530_3268C.1
ttggcttataccccagttgagctgcctgtgggagtggagctgaagccatcgcaattctttgcaaatcgttttgtcgttcttcccccttcctctttcaacttgagtagtcgttaatcttgatggagaaactcgaagaccttgttgtttgctttgtgtgtaggtatggttgcattcccatcattggagtagttcattgatgaagcagaacgacaaccaatcacttgggaagagtttaccgaaggattcaagaagacacgtacctgtaggagttgttgctttgaagaagcgtgagtttagggctttgaagcaaaaggatcgtaccgtggcagagtatcttcatgagttcaatcgtctggctcgctatgctccagaagatgtgcgtactgacgaggaaaggcaagagaaattcttggaaggtccgaaggatgaactgtcagttatgttgatctctcatgactatgaggattttcaggagttggttgataaagcaattcgactggaagacaagaagaacaagatggataaccgtaaaaggaaaatgactgtatcccaggaggcacaaggtagtagccagaggcagcgtatcaagccactccaaattggtgaatctttttctgcaggtcaagaacagtcacaacaacagtcacaacagttgggcatcagtggtgagatcaactcagagactaatgcaagcaatgaagacaatgatgagcaagctactcaatcagtgtcatttcagcaggatcagtctcaagaagataacagtaatggaagggagcatcgggtgtgtttcaattgttatgagccaggtcacttcgtaaaagagtgtccgaagccgaagcgtcaacagccacaaggccaagtcaacaacattgtcctcacaggagcaaatgcagtgccggttgcgtctcaagggatacagctcagccatcagttccaaagcagcagtagctttctttaa

SEQ ID NO: 28054 - DNA, 1122 bp, Oryza sativa
  Clone ID: PAT_MRT4530_32690C.1
atggcagagtacgagggactccttgcgggactcagggtggcagctggactggggatccgccgcctcctggtgttaggcgactcccagctggtcgttaaccaagtctgtaaggagtaccggtgctctgacccgcagatggacggcctacgtgcgccaactcccaatgatgcggtcgacctggtccggcgatgtaaagcgtgtcaattccacgccaagcaaatccatcagccggcccaggtcctgcagaccataccactttcgtggccatttgctgtctgggggctcgatatcctgggaccgtttaggcgggccccaggcgggtttgagtatctgtatgtcgcgatcgacaagttcactaagtggcccgaggcttatccggtcgtcaagatcgataagcactccgcacttaaattcattaagggcatcacggcccggtttggagtacctaaccgtattattacggataatggcacccaattcactagtgaactcttcggcgactactgcgaagacatgggcatcaagctctgcttcgcctcacctgcccaccccagaagcaatggccaagtggagcgcgccaatgcggaaatcctcaaaggtcttaaaaccaagaccttcaacatactcaagaagcacggcgattcatggatcgaggagttgccagcggtgctctgggcaaaccgaactacaccaagccgagcaaccggggaaacgcctttcttcctcgtctacggcgcggaagcggttctcccatccgacctcaccctgaggtctcctcgggccaccatgtactgcgaggctgatcaagatcagcttcgcagagatgacctcgattacttggaagaacgaaggcggcgcgcggccctccgagccgcgcgttaccagcagagcctgcggcgctaccatcagcgccacgtccgggcccgatcactctgcgtcgacgacctcgtcctacgccgcgtccaaacgcgtgctggattgagcaagctctcaccaatgtgggagggtccgtatcgagtgatcggcgtcccccggccgggttccgtacggctggccacgggcgacggcacagagctgcctaacccgtggaacatcgaacaccttcgtcgcttctacccctaa

SEQ ID NO: 28055 - DNA, 5964 bp, Oryza sativa
  Clone ID: PAT_MRT4530_32691C.1
atggccgaacaagcaaaggcgcacaacctctctccgagcgttagcggtgacgatggggagccaaacccacgccgtcgagctcgtactccaccgccccctccacgccaaagtcctaggagggaggaggtgctcgagagggtcgaaggatccgcgacttcgacatccacgggtgatggagaagggcgccgagatggggagcgtcgcctcctcgtctacggcgacggcagcacgccccagggcgcactccaagctgcgggcgcgctcctacgtcacccgcccattgtccctgacccggagtctccagcccaacgttggctggatgacgtggccaacttggtcatgacggcacggcagcgcctaggtgctggtgggcggtcctccgccaccaagacctctggcgctgctaccaccggctccgtgtcgtcaaggcggagggcgcgacgagcggcggctgttgctcgccattcggctgccactccctcgtcagcgcctccgacccgggaagatcagcgtagggggccagatgcccgcatcgatatcgagcgccggcgtaatggtcggcgtgctccccacgcaacggagggcgcctcctcgtctggagtgtcacctcaacacggacgcggggatcagccctccgtgcccccgcccccaaggttccggcccaccatcgccgaaaaatatgatgggagcgtcaaccccgccgagtttctccaggtctacacgaccgggatcgaagccgccgggggtgatgacagggtcatggcgaatttctttcccatggccctgaagggacaggcgcggggttggctaatgaacttgccacccgcgtcggtccactcctgggaggatttgtgcaaacagttcaccatgaactttcaaggcacatatccgcgcccaggtgaagaagcggacctgcacgcagtacagcgaagggatgatgagtcacttcgctcgtacattcagcggttctgtcaagtccgcaacaccataccatgcatccctgcacacgcggtgatctacgtgttcagggggggtgtgcggcacaaccgcatgctcggaaagatcgcctccaaagagccccagactaccgcggagctttttcagctcgcggaccgagtggctcgtaaggaggaggcatggacctggaacccctccggttccggtgtggcagcttcggccacccccggatccgctgctcagacagggcggcgtgacaggaggaggaagaagaggtcagcccataccgacgacgagggtcatgtcctcgccgtcgagggcgcttcgcgggccacccgaaaggggaggcctgcgagcgacaaaaagaaggaggccggcactcccagcagggagcgcccaaccggcaagtggtgcatcgtccacaacacttcccttcacgacctcgtggactgccgcgcagtcaaaagtttggctgagcggacgaggaagtgggaggaggagaggaggcaggagcgccgagagggcaagtccccggcggttccttctggcaatcggcgaagtgaggccaaacagaaggcccccgccgaggacatcgatgacggcgatgatgacctaggtttccaagagcctgaggccaccattgccactgtcgatgggggagcgtgtgctcacgtttctcgccggagcctcaaggccatgaagcgagagcttctggccgcggcccctactcatgaggcgacgcgccgggcgcggtggtcggaggttgccctcaccttcgaccagaccgaccacccaccgtgcgttgcccggggaggacagatcgcaatggtggtttcccccactgtctgcaacgtgaaactggggcgtgtcctcattgatggaggagcagccctcaacatcctttcccccgcagcctttgacgccatcaaggccccggggatggtgctccggctgtcccagctgattatcagtgtgacgccgggtcacacttggccgctaggtcatatcgacctcccggtcaccttcggtggatccgccaacttccgcacggagcgggtgaactttgatgtggcagacctcagtctgccctacaacgcggtcctagggaggcccgcgttggtgaagttcatggcggcagtccactacgcctacctccagatgaagatgccgggccccggtggccccatctctgtccatggcgacctcaaagtcgcgcttgcttgtatggagcagcgcgcggaccacctcaccgccgcgtccaagcccgagggaggcgacgagaggcttggcacctccgcccccgccgccccgaggcagcggatagtcacatgcgacgaggtcccggaagacgcgctcgtctctttcctgcgggcaaacgctgacgtcttcgcatggagaccggcggatatgcccggggtccccagggaggtgattgagcaccgtctcgcagtgcggtcgggcgcaaggccggtccggcagaaagtacggcggcaggccccggaacgtcaagccttcatccgtgaggaggtggcgcgacttctggaggccggattcatccgcgaggtcatccatccggagtggctggcgaacccggtggtcgttcccaaggcgaacggcaagcttcggatgtgcatcgactacaccgaccttaacaaggcatgtcctaaggacccttaccccctgcctcgcatagatcagattgtcgactccacagcggggtgcgaccttttgtgttttctagatgcatactctggttaccatcagattcgcatggctagggaggatgaggaaaaaactgcattcattacccccataggaacttattgttatacgacaatgcccttcgggttaaagaatgcaggtcctacttttcaacgtactactcgaatttctttgggtagccaaataggacgtaatgttgaggcttatgtcgatgacttagttgtaaagacgcgcaaccaagagaccttactctcggatctagcggaaacttttgagagtctccgctccgcccgcataaaactgaaccccgataagtgcgtgttcggtgtacctgcgggcaagcttctcgggtttttggtctctacccgaggcatcgaggccaaccccgagaagatacgagctatagagcagatgcgcccccccagcaagcttagggatgttcaatgcgtcaccggttgcatggccgccctaagtcggttcatatcaaggctgggagagaaggcgctacccttatttaagctcctcaaacgctccgggccgtttacttggacggaggaagctgaacgtgccctcactcagttgaaggcgtatctcagctctcccccagttctggtcgccccggagccaaatgaacccttgctactctacttagcggcgactccgcaagtggttagtgcggcgttggttgtggagcgcgatgaggacaatcctcattccgcgcacccccaccctgtgctggcttggcccgggagagagcagggaggagaggcccccgagccgaacggtggcccaaggcccccgacgaccggagctggccctctgcccgcttgtcagacggtgccaggtgcccccgacccccaggacggccccgaggccactgcgggaaggccgcacctatcgccctctgaccccgaggctaaccctgtgccgattcgacccgggagagagcagggagaagaggcccccgagccgaacggtggcctaaggcccctgacgaccggagttggccctttgcccgcttgtccgacgacgccaggagcccccgacccccaggacggccccgaggccactgtgggaaggccgcccctgtcgtcctccgaccccgaggtcgtcgacacagaagacgagtgcaccacgcgaggccgcttggacaaagagcgccccagggatgtggcccctagcgaagaggatcggccccaccgaaaggtgcagcggcccgtctactttgttagtgaggccctccgggatgccaagacccgataccctcaggcccagaaaatgctttacgctattttgatggcctcgaggaaactgcgccattatttccaggcgcatcgggttacggtggttacgtcttaccccctcggccaaatcttgcataatcgagagggtactggacgggtggtgaaatgggcaatcgaactttctgagttcgatttgcactttcaaccacgccacgctatcaagagccaggccctcgccgattttgtggcagagtggaccccagctcccgagcccgtctcagtccccgaggccagctcgggcccctcgcagctgcctcacaccgcccactgggtgatgcagttcgacggctccctgtctcttcagggcgccggtgcgggggtcacgttgacctcgccgagcggagacgtcctcagatatttggttcgccttgactttcgggcgaccaataatatggcagagtacgagggactccttgcgggactcagggtggcagctggactggggatccgccgcctcctgatggacgcttacgtgcgccaagtacggcgtatggagcgccattttgacgggatagagcttcggcacgtgcccagacgggataacacgattgccgacgaactctcacggctcgcttcctcgagagcccagaccccaccgggcgcctttgaagaaaggcttgcccagccgtcggcgcgacctgaccccttaggggagacggacgcgcctgaccggcccccgaggcccgtcggagtccaggcctcgggacccgaggggagcgctcccagctcccttagattgattgcttggatcgttgagatccaagcatacctcacagataagactctacccgagggccgcgaagggagtgaacgcgtccagcgcatctccaaacgctacgtgctggtagaagggaccctctatcggcgcgcagctaacggaatcctcctgaagtgcattcctcgggaacaaggcgtcgagcttcttgccgatatccatgaaggcgaatgcggagcccactccgcctcgcgcaccttggttggcaaagcctatcgacaaggtttctattggccgacagctctcaatgatgcggtcgacctggtccggcgatgcagagcgtgtcaattccacgccaagcaaatccatcagccggcccaggccctgcagatcataccactttcatggccatttgctgtctgggggctcgatatcctgggaccgtttaggcgggccccgggcgggtttgagtatctgtatgtcgcgatcgacaagttcactaagtggcccgaggcttatccggtcgtcaagatcgataagcactccgcacttaaattcattaagggcatcacagcccggtttggagtgcctaaccgtattattacggataacggcacccaattcactagtgaacttttcggcgattactgcgaagacatgggcatcaagctctgcttcgcctcacctgcccaccccagaagcaatggccaagtggagcgcgccaatgcggaaatcctcagaggccttaaaaccaagaccttcaacatcctcaagaagcacggcgattcgtggatcgaggagttgccagcggtgctctgggcgaaccgaaccacgccaagccgagcaaccggggaaacgcctttcttcctcgtctacggcgcggaagcggttctcccatccgagctcaccctgaggtcccctcgggccaccatgtactacgaggctgatcaagatcagcttcgcagagatgacctcgactacttggaagagcgaaggcggcgcgcggccctccgagccgcgcgctaccagcagagcctgcggcgctaccatcagcgccacgtccgggaccgatcactctgcgtcgacgacctcgtcctacgccgcgtccaaacgcgtgctggattgagcaagctctcaccaatgtgggagggtccgtatcgagtgatcggcgtcccccggccgggctccgttcggctggccacgggcgacggcacagagctgcctaacccgtggaacatcgaacaccttcgtcgcttctacccctaa

SEQ ID NO: 28056 - DNA, 263 bp, Oryza sativa
  Clone ID: PAT_MRT4530_32692C.1
cttatataggggttggtcttgccctctacaggccctcctccacgtccaactcggggtagaaatcaaaggaaacccgaaacatgccttcccgagcaaggaaacctcgaaacccgacgaaacagagtcggactcagacctgccggtcagaccggccacacaacgccaatctgaccggccctcaaccggcggtctgaccgcccaacacaaggcggtcagaccggcccactcggaggaaaccggtagacttccaaattttggcaata

SEQ ID NO: 28057 - DNA, 395 bp, Oryza sativa
  unsure (1)..(395): unsure at all n locations
  Clone ID: PAT_MRT4530_32693C.1
gtctcatcnanaccgcctcggtngaaatcncacatatacttgcgtttgncgcnctagttnatctctattgcttttggatgatgggtgggaagctgcctccattgggccggcaacggtggtcgttccagtagacgcagacactctgcgcgaatgcgcctgcgangagcgtcaccgtcgtttcnaagcagaccgttcggcccgacggcgcgtcggcggttggagacgtnaagctctcggtctccgacatgccgatgctgtcgtgccactacatncagaagggggctctttcttcccgccccatggcggtgccgatcgccctccctcgagtaggccgctcgngtgcgcgcttctccnggggcgctcggaggtgttccntggccctcgccggccggatt

SEQ ID NO: 28058 - DNA, 315 bp, Oryza sativa
  Clone ID: PAT_MRT4530_32694C.1
atggaatcaactgggattaatctctacaagttctacgatttcgacgtcgatcggcccattatgccgccgttgttgggcgtctacgacttcaccaccggcctgcctccgtcgccgccgactggtgtcctcgcctatacgattggttggtcacaccaccgttcatgggcgtccacgtcttcaccgacaggcttgcctttgctgccgcctactggtgtctctgcctacacggctagcctattatgcctccgttggtgggcattttcgctttcaccgtcgaccgccttcgtcgccgccgactgttgtcttcattgttat

SEQ ID NO: 28059 - DNA, 554 bp, Oryza sativa
  Clone ID: PAT_MRT4530_32695C.1
gatgccacatgcctaaaaattacatagatttcatatgtatacatatatatatgtacttatgtaaacacacaaatacacacttttttaacttaaaaagccttagatcctggggagttccctttgtggcacagcagaaacgaatccgactaggaaccacgaggttacgggttcaatccctggcctcgttctattgggttaaggatccagcatagccgtgagctgtggtgtgcgtaggtagcagatgcagctcagatcccacattgctgtggctgtggtataggccggcagcggcagctccagttggacccctagcctgggaacctccatatgccatgggtgcagccctaaaaagacaaaaaaaaaaaaaaaaaaaaaaaaaaaaggccttagatagttgtccttctcctcccagttccattcctctgcctgggaacacagttcctgatggaacggagttttatttctttatggctgggtccagtaacatgagtttctattctacacagtaagagctaggcacctctgcttttttaactgcatcaatacaagatttg

SEQ ID NO: 28060 - DNA, 358 bp, Oryza sativa
  Clone ID: PAT_MRT4530_32696C.1
ttgtttttttttttttttggggttttttttttttttttttttttttttttttttttttttttttttttttaaaaaagggggtccccaatcccaaaacctgggaggctcccaaaacccccccgttaccgggaaccctttgaagacaggcaaaaccctgaaacgaacccggagcaacccaaaagcccgaacctgtccttctaagagggctcccccaggcaatggggtgccgaaccctttacttgtttcccccccaaaataaaaacccaaccttgggggggccccagggcccggccctcggggggtccccaaagggcccaccggggcgcatcccgacccaaaaccgcctggggcggttttg

SEQ ID NO: 28061 - DNA, 1193 bp, Oryza sativa
  unsure (1)..(1193): unsure at all n locations
  Clone ID: PAT_MRT4530_32697C.1
ctcatccaagccaactctcccctcctctcctaggtttcgcctccgccgccgccgaccgccgccgccgtcgccgccgtagaccgatcgagcgggagtggggaggatgacgacgtcggagagggagccgtgcccggaccgcatcctggacgacgtgggcggcgcgttcgcgatgggggcggtggggggcaccgccttccacttcctcaggggcgcgtacaactcccccaacggccaccgcctctccggcggctcccaggccgtccgcatgagcgtcccgcgcaccggcggcaacttcgccgcctggggcggcctcttctccgccttcgactgcgccatggtccacgcccgccagaaggaggacccctggaactccatcctcgccggcgccgccaccggcgccgtcctctccctgcgccagggcccgcgcgccaccgcgacgtccgccctcgtcggcgcctccctcctcgcgctcgtcgagggcgccggcatcttgctcacccgcaccatggccacccttccccaggaggaccacgcctacccgttcccggtggtgccgccgcctgaggaggtctcggcccatgaatcgagccctatcgcatgggttaggggaattttcgggaggaaggaggagaagcctgctgctgctggtggtgaccgcaagtcggacgtgttggagtccttcgagacgcccagccctccaattccatccttcgactacaggtgaaaaggggncatctgatcttcaagtttggatctgaagtttctaatgaatcgtacgaaggaagagaggaccattttgttagataaacatcaaacttagttcaggatcatagaatcacgtaacatattttgaccacttaccgtctcattacgtttaagttatttcctaacgctgttagcttttatttattatatggtatatgctctactgaaagtgaagttagtccagatatctccattctattacgtaggtgaagaggctcaaattttttaaatgtggaattaacaacagtatgccttcttaatatgtactttgggatctctttctttgttttgttgtctttatttctatatttcagccatgccaagcgtaccacgaaactgatgaggtgcagatattatgcaacttgcaatacagatgagctacatatatgaattggacgcaacttaaaaaaaaaaaaaaaaaaaaaaaa

SEQ ID NO: 28062 - DNA, 201 bp, Oryza sativa
  Clone ID: PAT_MRT4530_32698C.1
aggacaaggaggggattcccccagaccagcagcgtctgatcttcgctggcaagcagctggaggatggacgcaccttctgcctgactacaaacatccagaaggatgtccacctctcacaccctggtgctcacgcactccgtggtggtcaagtaatcagccaagtttggtggagctgccgatgtgcctggtcatcccgagcac

SEQ ID NO: 28063 - DNA, 481 bp, Oryza sativa
  Clone ID: PAT_MRT4530_32699C.1
aattactagggcccacatgtcagtgggtcccaccctcctctttatctccacggatggtgacgcttcatccctttccctcctggcaatccctcctccctcctcgagctccctcaccggcgggttaccgttgcgcccggagctcttcggtcgcgaggctcgcgtgatctggagcaggtggttggtggcggcaatcaccgtcgcgtccgtaggaggcggcggcggtggtgggaggtccacggcgatggggctcaaggagggcagcgacggcgacgacgtagatggaaggagctcaagggggcggaggcggcggctgctggggacgtttgcggacacttctttctctgccggtgcggctgcggccgccgggcgcggcggcggagatgagatctacgtgaagaagccggcagcggcggtgaagaagctggctgtgacggtgacgacgcgggatgagacatcgtggcaatgtcgatgttgtttatga

SEQ ID NO: 28064 - DNA, 559 bp, Oryza sativa
  Clone ID: PAT_MRT4530_3269C.1
atggcggcgagcgcgcagacgtgggtggtggtggcggcgctggcgctggtgatgctgccgcggcggccggcggtggtgggggcggagtcggtggcggcggcgacggcggagaagtcgatggggatcggcggcgccgggaagcccaagtgccagccgggcgccgcgacggggccgtgccgcgtcggcgcggtgcacgacccggagaactcggaggaggaggggctgttcagcatgagggccaccccgccgccgaccgccgcgccgccggccgacgaggactacttcgaccccgacctctccaacgacgacgacctcgtcgtcctcggccactgaattgaacggcgtgtggtttggttgtgatcgatcgactgatcggcaatggatctcatcggctgggtgctaactgtggggttaattttgtgtgtgcttgttgtttgatgaatttatgatgaaggtaactgattgttttgttgttgattatatgttatgtgtactagtggtactaattagctagtgttaatggctaattgtgagcttcatacgattatgtgatcgataa

SEQ ID NO: 28065 - DNA, 297 bp, Oryza sativa
  Clone ID: PAT_MRT4530_326C.1
ggggccccaaacattgggctaaaaaaaaccattcagagattcaaccccccgggtggaccattgggggttaatcaccccccccccaaggcccagggttggcatttggcccttgctgaccggggaccgaaggggcatttttggataaaaacccccttacctggggaccggcgttttttcagggggattttaagggggtttgggcaaaatactgccaaatgatgtaagatgccgggaggggcccattgccacccgtgatagcccaggtttttcaggatctggggggggggaccaaacccc

SEQ ID NO: 28066 - DNA, 193 bp, Oryza sativa
  Clone ID: PAT_MRT4530_32700C.1
gttgttgccgccttctatgactctcacggtagaggggtttttttgtttcaggattgaaactgacatcgagatatactatattggctgagacttctcgcatctataatagtagaatgtgtcccctgaccgaaatctgcctcgtgggacgactaatctaaccgtcgttatagtcgcagttctgatcgaggagatg

SEQ ID NO: 28067 - DNA, 138 bp, Oryza sativa
  Clone ID: PAT_MRT4530_32701C.1
atcgcaaacaactttgtcagagctgcgcaaacatcaaagcatgtgcgaatgtagatcacaggtgcgagtctacagtatgcatcacgcatcagatataacgtccatactccatacagataatagacgcggccgactgag

SEQ ID NO: 28068 - DNA, 593 bp, Oryza sativa
  Clone ID: PAT_MRT4530_32702C.1
tttttttttcatgaatgggcaagagaactgcttattattatttcatgaagcaaagagaaaaacatcatgaagggaaagaaaccccaatcctaaactcaaaccagtcttgcaattacatattgtaaggaccccctaccaaaagaaaccaccttacgcagtataaggaatagcgacctactatgcaaatcaagctctagccttaaactccacccaacacgaatgcttcctgatttccgaagtcatcgttatgacaagtgaattgaaactcttcgggagagtattttcagatttgggatgcggtccaggaggtgcagctgcaagggggagaggaggatgagacaatgtagaagtgggctgtaaatgggaggttcacccctgcttcggcttacgacctgttcttcatggtgaatacagaagcgagatgctgcagtctgatttggcacactagactgccttccaaagtgaaattctttaagtggttggctgataaagggaggtgtctcatggccgataatctcagcaagcgggggtggccacaccaacaatcttgcccgctctgcatgacgaacgacgaagattgcaagcacctcttt

SEQ ID NO: 28069 - DNA, 317 bp, Oryza sativa
  Clone ID: PAT_MRT4530_32703C.1
cggccggggaaatcaattaccagcctaaccaaactgcgctctgttaacctgtcaacggcgcctcgccgccgtcgttgcgcgtccccgccggccatcgatgaagagctccggcgtgagatcccccgtatctccaccgcatatcaccacgtctgcacgtcaacgagtgccagatccatttctgccctcgtcggcgtgacgaacgacggcggacgtacgggcggcgctgatgagcagagcgagggatgcagcacgagctcgaggaggggatgacatttcttcgattcctgcaccgatcggagtgtgtgcccgcgcttctt

SEQ ID NO: 28070 - DNA, 156 bp, Oryza sativa
  Clone ID: PAT_MRT4530_32704C.1
gttttctccttggaaaggaacacatatgcaatgggaaatggcgagtaccactccacatgctaagtgttaactactcccatgattttagacttgttgtttcgaataccctcgatatcccgttatatatccccgttaaaccgcttcgtctccatcttt

SEQ ID NO: 28071 - DNA, 323 bp, Oryza sativa
  Clone ID: PAT_MRT4530_32705C.1
gaggtggtgatgacgctctctctcgtggcctgattttctggtgaggtggataactctcgctttgattgagtgcaacgtttacgacgtgggtaccaaccagaacaagtccaggacgccgtgcaatcgctacaccacaaacgatgtcatactaaccgtgacgcgcggttgatgatccccggaatgaatttgaatatgagaagggatgcgtttgaaaggtagtgagataagccttccatcaagtccaagatcacccaaatcagagttggcatgaaggcgctaggtctgtttcaatttagtgctgtctcgggaggtcgaattggatt

SEQ ID NO: 28072 - DNA, 557 bp, Oryza sativa
  Clone ID: PAT_MRT4530_32706C.1
cgcaatggaactgaggtataagttaagaaaaacaataagctaaagacaagtcgcccttttgttatctttatgcacatttgtgttcaaattataggtaacagacatgatgctgtttcaagagatttaatcatggaaacaggaaagtttggatattaacaatgtatttaattaacattcctgtgttcctgcacatcaaagtacagtgaatgatagattgggagattgtcctttataacctagaattgagatgacttataaattttaccggccctgtgaaatattccttccgtttataaacatgtcgttttagacattgacatggtttccaagatgcaaagttgaccactaatttctattttagtatattagtataacccaataaaattgtaatattatgaaagtggttttcgagacaaatgtacatatcattttcacgcatccaactattaaatgtaaaacacaaatcacacacctttattatagtccattttaatattatttgagtttaatcgtatcagatctgatatccatacagttgacttgagctggtaacaaaa

SEQ ID NO: 28073 - DNA, 1722 bp, Oryza sativa
  Clone ID: PAT_MRT4530_32707C.1
atggagtcgacgtgctggtcgtgcggcgagggcgcggtggtggcggacccggacaccggtgtgctcgtctgcacctcctgcggccgcatccacgactccggctcgtcggagttcgtccaccagtcgatctgcaccgacaacggcgtgtacgacctccgcgcctcctccttcgtctaccaccagtcgcagtcgcagtaccgggaccagaagctctcgaacggcgtcgtcaccatcgcctccatcgccgcccgcctcggcctctcccccaccgccgccgacgaggcgctcgccatggccaagtccgccacgggcgggaacctcgccacccaggggtccgccttccttccgggcctcgccttcgcctgcgccttcctcgtcgcgagggcccaccggcttccgctcttcctggccgagggcgccgagaccgccttctgctcggtggcctcgctcgccgacctcgtcttccgcatcgcctcccacctctcgctccccccgctcccgttcttcgactacgccgccgcgctcgagcgcgccgtgcgcttctcgccctcgctgtcctccgccgcgagcgagaggacggaggtgatcctctcccaatcccggttcctcctccgctgcgcctccaagtggtcgctcaccacggggcggttccctctccccctcatcgccgcccttgtcgcgttcgccgcggaggcgaacggggtcacctccatcaccgtggaggacattgcgcgggacatctctgcgaggctgcacaccagcctccgccggtacaaggagctcgtcgatgcgctggtgcgcgtcgcgcgggagctgctgccgtggggcgccgatgtcaatgcgaagaacttgctcctgaacgcacccgtgctgctccggctcatggagatgaggtcacagtccgacccatcagagcagtttctcgagagcttcgctccggacattgccgggattgtgcaggcgtgctcagccgttgatgatgatgaatccaagtaccttcaggttgctccccaattggcttctgatgatttggattccaataattccgggcaggaggggaaggaattggagaattttaagatctcggaggagtgcctatcaagtgcttaccaaaatgtcttgaagaggcttgctcaactacaaagacttgggcaagttggtaaaggtgctaacaggaagaggcagcggataggagggctggagctggagccatgtatagattcgctggatgatggttggaccaaggacatggtgttggaggatgtagtgaatattgacgtcggctttgatgttcctccgccatcgtttgctgctggaatgaagttgcagaagaaaaggagagcacggattgaagctgctaagtgccgaattgatgcgattagaaaaggtcctgttgagagcgagaataaattgcaggctgctctgagaaatgaagatgcctgctcaccgcaaaaaccggccaggaagaagcgaggcaaaaagaggatagctggaagtgatcgtgccatgaatggagagcttccaatagagatgccggatggtccaggtggtgagaagaagagacggaaaggagctccctctgatggtattgactgggaggactgtatcattgagctcctgttattacacggcgcaaatgaggaagagatcgaacaaggacaatacagaagattgttagatctacatgtcttctgtgcagtgagtgccagtggacacaaatga

SEQ ID NO: 28074 - DNA, 1979 bp, Oryza sativa
  Clone ID: PAT_MRT4530_32708C.1
gtgcgataaaaggcttcacccaatctgatcccttttccttttatgtgcttttcaggaagcaagagaacgcatcaacaaattgacttccacaaggaccatttttcaactcagctacacatggacagtccagtgctttctgtaccttcacatcaattgactcattgccatcctcgtcaaatgacatagcctctgcggcgagcgcctcgagggaagatggcgccggggcaggagacggcgacgacgacggcgccgcctcgacggcaggcggagaaggctcctccaccgcctgcgcgggctggctcagaccttgacccatcgaggtgtagcgctagagaagaagcaggcggcggccacactctctcgtcttcccgggctgcgacggcgagaacgggagcaagcggcggcgcggcgagttggagcgtggtcaagtcggccggcgtccaagtccaactaaataacaggcccgagcaccaccacatcaccggaagcaaaattggacccgagttcaactccggcgagcgctttcccagccgtccaaatcgcatcaagattcgtgcaacgcggagacaggcttactgggccggcccggcccgtttgttgagcgctacggggtcgcagcagaagatggggctcggccaagtggtggaccggctcatgtccgcctccggccctgcaggcctttacagtggcattggatggtcagtattgggcaagctgcctgggttgggagcacgttttggaacttatgaactcttaacagccttctataaagatggaaaggaggacaactatgtttcttactctgaggctatgttggccggcatagctgctggtgctgttgagtcagttttgtgcacaccatttgaacttctgaaacttcggagccaagttggttctgtgaaaccaatgaaagccacagacccagcaaacattacaaaagtggcatttccactgctctccaaactgttgcctggttatgtccctgacatcagagtatggaatagcagtgtcagccttttgtccaatctttccccaaagcatcctgacatgatgggtgccctgaaacagcatccgtggatgcttactggttcagggaagcccccattgccctctgatgttcaggttccttcaagagtgatagcacttgaaggatggggtgctctatggagaggacttagaccagggatgacccgggactgcgtctttggaggaatgttcttttcaacttggcaattcatacacacagcgatgcttacttggagtgctgttaatatgaaccctcaacccagcaaactggaagaagcaggccctgtatccccttttgcttctagtcttgctgcaggcttctcaggagttgtagcagctgctgcttcccatacatttgataccgccaaaagtcgttcggaatgcactgttataccaaagtatatcgcgatggagaggaggcttcttaaatggaaagtaccaggaaattggatagagagaaagacaggaatatctcctgccgataggaatgttctgttccgtggtattggtcaacgaatggcccgaagtggatttgcatcttttctacttgttgggtcctactattttgttatagatcagttcttgtagtcgacatgaagagacatcatttaactaagagatctctttaatgaatttcgaacattctatgtgcatctggtgaataattgaagaacagaattcaaggctgcctctcatgatatcaggcttttgttgttcagataacaagtatcttgtatggaaaccgtattgttggtaggatgactgatgagtagcaactactgaagatcctttttaagtttttgataaggattttgtgagaaaaaaatatgtcttcattattgttcaaggttaatttcatcataagattttacttcttctctcttttttcttgtcattagaaagtaaacggtaaggctttttgtgaatatttttggggatgccataattccctg

SEQ ID NO: 28075 - DNA, 693 bp, Oryza sativa
  Clone ID: PAT_MRT4530_32709C.1
atggcggcgttcgacctcagcgagctcgagagggtaggagcggccgagagccaccgttgcattcctcaccccgccggtcatccgtcacgtttgccacgccggtccttgtgggtcggggcaaggggtggtgcaagcgcgggcgaggatgcgtcggtgagtgcggggagcgaggacgaggagtatgggggcggcaccaagggcgcggaggatggcgaggaggggcttgggctaggggaggcgggcctgctcgagtttggcctggtcggcgccgaggacgtcgacgaaggttacacaattctcgggcacctgctcgaacttgctcttggagcggtcgaagtccaagcgccaaccgaggctaccagggctggtgtcaggatcaccctgggcgcggcggaagatgaagaagaggctagcgaaggcaaggaaggggaagaggaggttgcctacgaaggcgaggaattcgcccaggccggcggcgtcaccctcgacgacggagatgtcgacgtcgttggtggcgaggatgtcaatgaggtcaggggcgttggggatgacaacgatggtgtaacgaccgtcgatggcagtaagctacagtactcaggtggtgtcgatgtcgacgtcgatggcagtgtccattatccacacgcgcctttgcacgctgccgcaactgggcccacaacagcctcgcgcgcgtga

SEQ ID NO: 28076 - DNA, 819 bp, Oryza sativa
  unsure (1)..(819): unsure at all n locations
  Clone ID: PAT_MRT4530_3270C.1
acacaatacaacaagcctacaactcatattgtagatggacctgacattgttgagagagagggagatgacaaggaagtccatggtggcagtggggaggagcaatgggaggagcagcggtggagggatggtgtcattgaggaggaggaggccgttccagctgatggtgctgaggcggctccgggagctgaagaagatcgtgccggccaccagccgccgcagcagcggtggtcgcggcggcggcggcgccgacgtcgacgcgctgctccaccgcgccgccgagtacatctgcgccctggaggtcaaggtcgccgtcctccgcaagctctccgccatctacggcgcttaattaggctcatgcatatgcaccacggacagccatgtcgccgccgccantcgccgttctgcatgcatgccagtgtcgccggccatgcactgtacatgtagcctatgtaggaaggtgaacgaaggccgggaggtgcagctagccacctccatttctctgatctacccctttctctcagctagcttagctctctcccatcttctatcaccccccacaactagtagtgtagtagcatatcatgtgcctcctgtaatacaatatgtgattattggttaattggtcacatatgggagtgcgttaattatcgatcacttattaattagcctggctagctaaactagctgcagaatcaaagctagccaaaccgtttattctcttcagttgttactaccaaggaaatgttttgactggtgtttgttagttggctgggaaaatgaagaaatatgcatgcatgattcaagtaaaaaaaaaaaaaa

SEQ ID NO: 28077 - DNA, 632 bp, Oryza sativa
  unsure (1)..(632): unsure at all n locations
  Clone ID: PAT_MRT4530_32710C.1
ccacgcgtccgatcaatcccgatcgtatattttttgggatgtgagagggcggtggctccggcggctcggtggagcagttgagcgacggcagtggcgacgaccctggctaggagcaacggcatccatgtagcagcaacgctagcgtcacggagcaattgcggcaacgtcaaggagcagcagcggcgacgaggatgaagcggcgtcctccatatccctctctcggcacctgtcaccagcctcaccgatccagccacctgcttctttgccccaggaagagagacggagaggaagaagaaaggagcgctagatccagcggcaccggctcgagagacgctggattcggcgaggacggcaggggaaccgcccatgctgcctctgccttgtcacgtgtcctcgacaccaaaatccgaaggcaagtaagaggatcagaacggttcatgcaggtgggcgcgcagccaccgatgcttccgactcacacaacacggnggatcgcccctgaggccctgagccccgacgacgacgataccgccgggagaaccaggtctcgttcctggtggcacttccctccacggtcagaggctgtcgatgaaggangccaatgcacttgccccaatgcagcctgtggatgtagc

SEQ ID NO: 28078 - DNA, 1087 bp, Oryza sativa
  Clone ID: PAT_MRT4530_32711C.1
atgccgaagccgaaccaccaggttcccgaagccgccggcgagataggctccgcggggaggaccagcgtcaagggacgccgcggcatccgccgtcgaccgcggagcgcctccgcctcctcctcctggggcggcggggcagcaggatgcaagaagaagaaggcgcaggtgggggaagaggagaaggaggcctcgtccacggtgcccgccgtgtacgacgccaacgctgacatcgaagaggagtacaggctgttcctggagaacgtgcgtgtctacgagaacgacgacttcgtggtggagtacgagggggtggtggtgaggtatggaggagaagccgtggctgatcatggcgcaggtagaggggctcctccggtgaagggtgttcctgaccccaaccagctcaacggcagtgtgcatcggcagaagcttactgccatcgacggtcgttacaccatcgttgtcatccccaacgcccctgacctcattgacatcctcgccaccaacgacgtcgacatctccgtcgtcgagggtgacgccgccggcctgggcgaattcctcgccttcgtaggcaacctcctcttccccttccttgccttcgctagcctcttcttcatcttccgccgcgcccagggtgatcctgacaccagccctggtagcctcggttggcgcttggacttcgaccgctccaagagcaagttcgagcaggtgcccgagaattgtgtaaccttcgtcgacgtcctcggcgccgaccaggccaaactcgagctgcaagaggtcgtcgattttctaaagaaccccgacagtcgccggcctcctcctcctcgtcctccttcctccaccaggcccgcctcccctagcccaagcccctcctcgccatcctccgcgcccttggtgccgcccccatactcctcgtcctcgctccccgcactcaccgacgcatcctcgcccgcgcttgcaccaccccttgccccgacccacaaggaccggcgtggcaaacgtgacggatgaccggcgggccgccggagccgccctttcctccctgcctgaccaggctgcgatagagaaggagaaggagaagggcaggagatag

SEQ ID NO: 28079 - DNA, 732 bp, Oryza sativa
  Clone ID: PAT_MRT4530_32712C.1
atggtcggtttcgtcgacgccgtcctcgccgctctcaagcttgtccacgctccgccgccggagaagctacacgccctggtcagcatgtacgggcacgccatggacgcctcgtctctcctctggtcacagtgccgccgcgtgctgatcacccaccaaaccacccaggccatcacgttcgacgccatggagaacgccctgttcaggaaggcgaccgagctgcacggcgccatatcgagcaccatggaggagaccaaggcgctcgtcgaggccgccgccgacgacgacccgacggagatcgcgcgaggtagcggagacgacgtgcacacgagcgctcgcgtcatggtggactgcgtcgccagctcgagccgttctccaacctacggtggattcgttgccagtggcggctacatcgacggctatttcagcgcttcttgggcgcccgtgctgtcctgcctatcgtcgaagtctggcctctctccctggagcaacaagtcctcgccattgaggaaattcgagttggcgttccatgagacgtacacggctcagaagctgtggaaggtcccaagccctgagcttagaggaaggctgcgaaaaactatcaccgagagagttgtttcaggttatcgcgagtacttgttggagcatcctgagctgaagagactggttagccgcggaaacagcaacactcctgctgacctggaggagatgctggcagagctgttcgaagggtga

SEQ ID NO: 28080 - DNA, 834 bp, Oryza sativa
  Clone ID: PAT_MRT4530_32713C.1
atgcgccgcgactgccagatccgccactccatcggcagcaggttcgttgagagcctctacatctgcaggaacggctggaatgccagggcttccgacgccgtgcgatgctggggtgacaaggagcacttgtacgacagagacatcggcaactgcactgccggcgttgacttccacgagtgcggccacttcgccttcatggttaggcccaacttcactaggatcggctgcgcccgcgcgagtgcttcaacgacggcatcttcatcacctacaactactacaaagacgaggagcagccggctacacctcctacctactcctagttgcacaatatgctcttcttctctctcatcaacaccttacctgctgcctgcctgcctgcctcatgcacatacagctgaccggaccaccgccgacgctgccgccttctccgcctgcctcatgtacatacagctgaccggaccaccgtcgctgcacttcaggaaaggggagggagttggaagaaaaggaaaggggaaaggggtgagcagcgctcgcggccctccgttgcagctccatctcgtgcatcgcctttgtggacgcagccgccgacaccctcgccacttcgccgcccttcgctcccgccacgacgacctccgccttgagtgcgacaacttccaccgtgacgctgcgctcccgccacgcccgcccccgccatgctcgttgctgtgttctacgtctggccttccttccgttgattcccccgcacgcacacccaccttattcttcatcctgtactgtgctgatgagtcggttttcggtgttagtcattctctcataaacatacagaaaatttag

SEQ ID NO: 28081 - DNA, 252 bp, Oryza sativa
  Clone ID: PAT_MRT4530_32714C.1
atggaggagcacggcaagcacgtcaagatcttccaccacctcgtgctgctcctccggtggcgccccagcaccagcgacgaccgcgaggatatctgcaaggtgtactgcaaggattgcgcgccgcgggcgcacgaccgcgtgcacatgctcgtcgtggcagtgcttcttcgcgtcacctgcttggcgcagcacttctgctacactctcttctggagctacgcgtgcaaggaccggctaggctgggctccatga

SEQ ID NO: 28082 - DNA, 2109 bp, Oryza sativa
  Clone ID: PAT_MRT4530_32715C.1
atggccactcgtttcctcgtactcctcttcttgttagccacctcggcctcctcctcctcgacatccacgtcgctcgccaccaacactaccgacgtcggccgcgatggcggcgacaatgccgtcagcttcagcttctccagcttccacgccgaggcgcgcggggtcaacgtgacggtggtcggcgacgccaacatcaacggcggcgcgctccagatcaccccggactcgctcaacgacgcgtcgcgctacctcaccaacaagtccggccgcgtcctcacggtgttcaccgtcaacgtgttccggcccaatggcacggtgcccggcgaggggttcgcgttcgtcatcgcgccgtcggcggccgcgccgccggccgggagcactggcgggttcctcggcctcaccaacgccgccaccgacggcaatgcgacgaaccagatcgtcgccgtggagctcgacacggaggagcagccgtacgacccggacgacaaccacatcggcctcgacgtcaacggcgtcgtctccgtcgccaccacctcgctcaagccgctcggcatcgagatctcccccgtcgaccccgtcaagtacgacgtctggatcgactacgacggcgccgcccgccgcatcgaggcgtacatggcggtgtccgggcaggcgaggcccgcgtcgccggttctcgccgcgccgctggacctcggcgccaccgtggccgagtggtcctacttcgggttctcggcgtcgacggggctcaagtaccagctcaactgcgtcctcgcgtggaacatgacggtggagaggctcccccgcgacgacgacggcggcggcgaccacggcaagggcctcacgctcgccctggccatcggggtgcccgtggccgccgccgcgctcgccgccgcattgggttacctgtacgtggcgaagcggcggcggaaggtgagcggcggcgacgacggcagcggcatcaccgggacgatgatccggagcctcgccggggggccgagggagttcgagtaccgggagctgaggaaggcgacgaacaacttcgacgagaggatgaagctggggcagggcgggtacggggtggtgtaccgcggcgtggtggtcggcgaccacaccttccccggcggcgccgggagcgcggtggaggtcgccgtcaagaagttctcgcgggcgagcacccaggggcagaacgacttcctcgccgagctcagcatcatcaaccgcctccgccacaagcacctcgtccgcctcgtcgggtggagccacgacaatggcgagctgctgctggtgtacgagtacatgccgaacgggagcctggaccagcacctgttcggcgcggcggcggcggagcggcggctgctgggttgggacctccggtacagcatcgtcgccggcgtggcgtcggcgctgcactacctccacgatgagtacgaccagaaggtggtgcaccgcgacctcaaggcctccaacgtcatgctcgacgccgccttcagcgcgcgcctcggcgacttcggcctcgcccgcgccatcgagaccgacaagacctcctacatggaggaggccggcggcggcgtccacggcaccgtcggctacatcgccccggagtgcttccacaccgagaaggccacccgcgagtccgacgtctacgccttcggcgccgtcgtcctcgaggtcgtctgcggccgccgcccgcgctgcgacatcgacggcttctgcttcctcgtcgactgggtgtggcgcctccaccgcgacggccgcgtcctcgacgccgtcgacccgcgcctcgacggcgcgttcgacgccggcgacgccgagcggctgctcctcctcggcctcgcctgcagccacccgacgccggccgagcggcccaagacgatggccatcacgcagatcctgctgcggtccacgccgccgccggaggtgccgccgttcaagccggcgttcgtgtggccggccatcgacggcgggatcgacacgacgacgtccacggcgtccagccacgtcagcacgaacatgacgtcgacgtcgacgtggagcggcaacttcatgaggggaagccggagccacgcgccgccgacgccggagcaagacgcctcggactccgtggtgtga

SEQ ID NO: 28083 - DNA, 546 bp, Oryza sativa
  unsure (1)..(546): unsure at all n locations
  Clone ID: PAT_MRT4530_32716C.1
ccggccggaaccgtcaccacaattcagatagatattcatagaagcgatgcgagaaaggcgaaagaaaggaggagcctttccatgttggcccacgttgctattcgcggcatgcgatggcgtccgcgaaagctctcctcgctctgtangatgaacatcagtaaggcgcagatgccgactaccagttccctagcttcgctattgaccagtaacgacgggaatcatctcccatcgcatctgcacgcctctatccgctactcgtaataggcatcaaggggttataccctcctgtcnaggcatagacaccgtactccttccaatatggatacaacaacactaagacactcgcatacaacaaagatttcgatcacacatcttcagataacaacaaactcaatacctgcccaataagactgataaagcaaatatgcaacatctacgaatccaggaaaaaacggcagatgtacataatgattgcactcaagaatcatgcacgactcagttcatctacaacgtgccattcatataggtcatctaccctagactatc

SEQ ID NO: 28084 - DNA, 354 bp, Oryza sativa
  Clone ID: PAT_MRT4530_32717C.1
atgaccgccctttgtcgatgccgcctgcacgtctaccgtggctgcactgctccgtctagcgcgcaccgctgctcgcggcacggctcgtaccttgcgcctttcttcttgcagccttgcctgtccgacctggtcacctggatccaggaactggaaggcggaaagagaaaatatgaggaaataacgattactctcatccccgactccaagccctccgagcaagacgccaaggcgtacaaagaattcttctccgagcctctaaccactgaacacattcaagcgttggcggacctattcggcatggacctcatccaggcgccaccagtgcaggggtcgccgatcgcggtggaggcttaa

SEQ ID NO: 28085 - DNA, 348 bp, Oryza sativa
  Clone ID: PAT_MRT4530_32718C.1
atgtctccgagtcctacttggagactagctgacttgcgatataaaagggactccctgggaggacctaaggcatcgaatctcatagccaagacaaccaccacagcctacgaagccggagcctacaggagccaagtcgccggagcaactacctacgagaggcccaacttaaaggtcggcaagaggaggttcccagtcggtcaactcgagtacgacctcactctactggtcacaagtcacaactaccagcacggaatacctgccactgccagaaaggacaccccctcccccacatgccaccaccggaccccacccgtcagcgacccccaccccctacaaatcaaacccaac

SEQ ID NO: 28086 - DNA, 1528 bp, Oryza sativa
  Clone ID: PAT_MRT4530_32719C.1
atggcttcttcgtcttctgacctaaccctagacgaccaccaccatctgacggcggtggctgcggcgtcggggcaggcgacgcagaagcttcaggagttcttgtcacgtctcgaggaagagaggctcaagatcgacgccttcaagcgtgagctccctctctgcatgcagcttctcaatcatgctatggaggcgtacaggcagcagctggaggcgtaccagatggggagccagcatagcgccgcggcggcggcggcggcgagggcgccgctggtgctcgaggagttcataccggtgaagaacatcgggatcgacgtcgtggcggcggacaaggcggcggcggcggggggcaacagcgtgtcgtcggagaaggcgagctggatggtgtcggcgcagctgtggaacgcgccggcgtcggcgtcggcggcggacacggcggcgaaggggccccagacgcccaaggagcactcggagcaccacccgctcgacacgagccccaagctgatcaccgcgctcgacggcggcggcggcggcggcggcgcgttcctgcccttctccaaggacaacgccatgggtgacggatcagccgccgccgccgccgcgctgccggagctcgcgctcgcgcccgcggagaaggcggcggacgcgatcaccatcgccgccggcgaggtcgacaagaagccgtacgcccacgacaacggcgtcgtggcgagatcgagagaagcccagaacggcgggaagccgccgtcgacgccatcggacgggcaggccgtcccgccgccgccacagccccaccggaaggcgcgccgttgctggtcgccggagctgcaccgccgcttcgtcaatgctcttcagatcctcggcggcgcccaagtggcgaccccgaagcagattcgcgagctgatgaaggttgatggattgaccaatgatgaggtgaaaagccatctccagaagtacaggttgcacacaagacggccgatgccgtcgccggcgccgccgacggcagcgacgccgcagctggtggtgctgggaggcatctgggtgccgccggagtacgcgacgcaggcggcggggccggccatctacggcgcgcacccggcgacgcagccgcactacacggcggcggtggcggcgcaggagtactaccaccaccaccaccaccacctgcagcaccaccccgccgccgccgccctggtgcaccaccgcgccgtagccccgcccccgccgctgccgcctcagcagcagctggcccctccctacagcgccaagtcgtcggcgtcggcgaggctcgggtccccggactccgacggccgtggcagcggcggcggcggcggcgccgccgcctccggagccggaagggacatgtccgagagcatcgaggaggaaggcgagggcgaggagcgggaggacgacgacgacgacgacgagatggcggcgaccaacaacgcccacgccgtcgacggcgacgacgacaacgacgagatcaacaccaccaccaccacgagcgcgggagcgattaactactaattaa

SEQ ID NO: 28087 - DNA, 236 bp, Oryza sativa
  unsure (1)..(236): unsure at all n locations
  Clone ID: PAT_MRT4530_3271C.1
catgcagagagaagacaaaatacactacttttttttcntccatttatttcctgctgncattattcagacncctgagaaatgctgattgtttttctttgggctttctccagtgcntntgaaacntgatttcaattttcncccattttgttctgtacagggnaaatctatagaaatgtaccgtttcccttttnccgtatagcaaaaaaaaaaaaaaaaaaaaaaaaaaaaaaaaaaag

SEQ ID NO: 28088 - DNA, 184 bp, Oryza sativa
  Clone ID: PAT_MRT4530_32720C.1
ccgcgacctttctctttgtgtctccgccgccgccgcctccgccgttcgccgaatccgtcggaggcgagatggccatcaagggttggccgaacctttgggcggacaaggcgcccaaggcaataaaggagcaaaagttcgagagctacttcggccggcgcattgccgtacacgccagcatgagcat

SEQ ID NO: 28089 - DNA, 945 bp, Oryza sativa
  Clone ID: PAT_MRT4530_32721C.1
tagttgccgcctcctgctcgtcgcgctcgtgtcggccgcggccgtcgtggccggcgcgctactgccggggtgcgcggcggcggcggcggcgggggagaaggtgccactcgcgctctactacgagacgctgtgcccgtactgctcgcggttcatcgtcaaccacctcgccgggatcttcgaggacgggatcgtcgacgccgtcgacctccgcctcgtcccctacggcaacgcccacgtcgtcggcgccaacaacaccatctcttgccagcatggaagcgaggagtgcttcctgaacaccgtggaggcttgcgccatcgatgcatggccggatttgagagtgcatttccgtttcatctactgcgtggaggacctggtggtgaaccacaagcaacgggagtgggaatcctgcttcgggaagctcaacctcgatcccaagcctgtcaccgactgctacaagggcgaacgcggccaccagctctcgctcaagtatggaagacagactgacgctttgcagcctccccacaagtacgttccctgggtggtcgtcgacggtcagccgctctacgaggattacgagaacttcgaggcttacatttgcaaggcccgtcctccgactccgactgtgcttgaggtagcggaggcagtcaatagagtcagctattacgactccggtgatatcaggcttaagcctgatgaagatggccacgccaagatcaaaaaggtggttccagatgatgatgattgaatgatggggggaagatatcaacataggcagtcccatgtttctgtttaggctataggacatagttcatccagtaataatgaagtgccgttcaaaaaaaaatggtaataacaaagagattaagtttatatataaaaaaaaaaaaaaaaaaaaaaaaaaaaaaaaaaaaaaaaaagaaaaaaaaaaaaaaaaaatttgcggcc

SEQ ID NO: 28090 - DNA, 1014 bp, Oryza sativa
  Clone ID: PAT_MRT4530_32722C.1
acccacacctccccgcccggggcggccaccaccacggccgccggtgatcgccggagcaatccccatccatggcggccatccgccgattccgccctgccctcctcctcgcggcgatcctcctgctcgccgccggcgctgtcgaggggaagaagggcgggaaggtggacgtggcgctctactacgagtcgctgtgcccctactcggcgatgttcgtggtgggcagcctcgccaaggtcttcagggatggcctcctcgacgccgtcgacctctccctcgtcccctacggcaacgcccgtgtcaaggacggcaaaatctcctgccagcatggaagcgaggagtgcttcctgaacaccgtggaggcttgcgccatcgatgcatggccggatttgagagtgcatttccgtttcatctactgcgtggaggacctggtggtgaaccacaagcaacgggagtgggaatcctgcttcgggaagctcaacctcgatcccaagcctgtcaccgactgctacaagggcgaacgcggccaccagctctcgctcaagtatggaagacagactgacgctttgcagcctccccacaagtacgttccctgggtggtcgtcgacggtcagccgctctacgaggattacgagaacttcgaggcttacatctgcaaggcctacaagggccatcctcccaaggtgtgcgaggggctggcccgtcctccgactccgactgtgcttgaggtagcggaggcagtcaatagagtcagctattacgactccggtgatatcaggcttaagcctgatgaagatggccacgccaagatcaagaaggtggttccagatgatgatgattgaatgatggggggaagatatcaacataggcagtcccatgtttctgtctaggctataggacatagttcatccagtaataatgaagtgccgttcaaaaaaaaatggtaataacaaagagattaagtttatatattgtgcatttgtgctgattaaaaaaaaaaaaaaaaaatttgcggcc

SEQ ID NO: 28091 - DNA, 174 bp, Oryza sativa
  Clone ID: PAT_MRT4530_32723C.1
cccacgcgtccggataaaatgaggttatattagaactatttagaatttgcaagaacggggttcaagttctgtgcctgtgaatgatatgcaactaaaatgatctttgtgttatcttctgccttctctagttttctgcttcagtgcaaatggaagagctcagtgcttatatcccgc

SEQ ID NO: 28092 - DNA, 639 bp, Oryza sativa
  Clone ID: PAT_MRT4530_32724C.1
atggacactactacaaatatcaacgactacatcaataacaataaagattacacagaagatgaagtgacatttgctcaagtggagatggtttacgacaacgagcagaccgggcaggcccagggcagcgttgcagagaggaggccaagggcggcggcacggcgagggggcctagggcgcggcgaggaggcccgcggtgccggcacggcagggagcggcgaggaggcccacggcgccggcgcggctgcgagcggcgaggaggcccacgatcgcggcgctgcagggcgcgtcgacgcggttcacgacggtgtggcggtcacagcctgcggcgcaggggccgtaggcgccggcgaggaggacatcgacgccaccaccccgccaccgcgcacggcgggcggggaccggaacagcagccataagaggcaggtcgcgacaacccccaagcgccgtcgccgtcgagggcggccgacggctcccctgttcctttctgctccgttccaaagtggcgaaactaataaaacgaaaaaggaatcaggtgccccttccggtttggagatggtgaaaaccgacgagaaccgggctgctttctcggtgtcgtatggtggccgtttgttgccttgctgccggtggggcgtgaggtga

SEQ ID NO: 28093 - DNA, 690 bp, Oryza sativa
  Clone ID: PAT_MRT4530_32725C.1
atggatgctagtatcgacggctccttcggtgacggggtagaggtggaggcggagacgtggacgacggggtatcggcggcagcggttgtttgatttggaggtcgacggaaggcacggtggccgagctcctgcggacggcggcttctgtgtgcagaaagagggaggcggcggcgccggccgctggtgccgccaaggggaaaggagccgctgccggcgcacggagcaaggaaggcggcagtcccggcagtggagctcgagcggcgacgaggagtggcggcggatccggtgggagatgggcatgcgagctgccggcgtcctctcaccttcctgccggcgccgccttgccctctctttgcccaggcacaaccttggctctcgccgccgtcacctcgccttctccctccgagaagagagaagatgtagccaggggcaaaaagggtacaagtggcggcggtggcggcggaggaggaccgaggagagcgaggcgacaactgctgagggggaggcggtaagggagaggattggagtgtcggcgctcggtgtggaggagacgacgcgtgcgcgaaagagagattggagcgtgatccgtaggagtgcaggaggagggcgatctagcctggaggttggtggcgtgggaatagggcccgtgcgaatgacggggatggatgcgggggcgtgcgacgcgatctga

SEQ ID NO: 28094 - DNA, 3951 bp, Oryza sativa
  Clone ID: PAT_MRT4530_32726C.1
cgattggggcgcttgtgaacaccggggcgccacgtggagaggacgttacactccagccgccaaatttccactcccacacccgcgctcccctcccctctcttttccgtgatcgcacctcgcccacgcgccccccgccacacacaatctctgcagctctccagcttcgttggaactcgcgaatctctctccgatcccaggtgaagcgcgagcttggagttggaggggagatcgatcagggccaggatgccgtcggtttcgagggccgtgtgcgtgcagagggcgagcgggaataacggcaggaggtgcagagatggggcggccgccgccggccgccgatccgtcgtggcgcagagagcgcggcacggcaagccggaggtcgccatccgctcggggtccggcggctcggcgcggggcgggcattgctcgcctctcagggcagtggcggcgccgatcccgactaccaaaatacaccagctcgcaggattccacacataaccttttggcctagcccaagtccggcctatgccaagggcccaccccgcagccgactccgatgcagagggtgtttcacttcggcaagggcaagagggaggggaagaaggccatgaaggacctgcggggagggaagggggcgaacttggcggagatggagtgcatcgagttgtcggtgccgccggggttgaccgtgtcggcggaggcgcgcccgaaataccaggccgcggggaagacggtgccggggggtctgcgggagagagatagtggcggagagccagtggggtgatggagtacatggcggcgggcctcggcgaccccgccctccctctcctcctcggcgtccgcaccgccgcccgcgagtcgctgccgcgcctgatggtcaccatgctgtatctgggcctgagcgacgagtcggccgcgggagtggtcgccataagcaaccaaggcttcgcagacgacgtcttccgccgtttcctccacatgatcggcaaggttgaagttgaggactctggactccgccccccccccaccttccgcaccgccggcccggaccatccccacccaccacagggggggaaagctgaagccatgtaagcggcgttaggtttgaggaatgacaccgagttgactgccagggatttgatcatggacattcctcatgcactgttcgaggagaagctcgaagccatgaaagcagtcaaggggctgcacaacgacactgacctgactgccactgacctcaaagaactagtggcacagtacaaggatgtctatgttgaagctaagggagagccattcccctctgatcccaagaagcaactgcagctggccgtgttggccgtgttcaactcatgggatagcccaagagcaatcaagtacagaagcataaacaagatcactgggctgaagggcactgctgtaaacgtgcagaccatggtgtttggaaacatggggaacacctctggcacgggtgtgctcttcactaggaacccaagcactggagagaagaagctttacggcgaattccttgtgaatgctcagggtgaagatgtggttgctggaatcagaactccagaggatcttgatgctatgagggaccacatgccggagccttatgaagagctcgttgagaactgcaaaattttggagagtcactataaagaaatgatggatattgaatttactgttcaggaaaataggctttggatgcttcagtgcagaacaggaaagcgcacaggaaaaggtgctgtaaagattgctgtagacatggttaacgagggccttgttgagcgccgcacagcacttaagatggtagaaccaggtcacctggatcagcttcttcatcctcagtttgagaacccatcagggtataaagacaaagttattgccacgggcttacctgcatcacctggggctgctgtgggccaaattgtattcactgccgaggatgctgaagcatggcatgcccaagggaaagatgttattctggtgaggacagagaccagcccagaggatgttggtggcatgcatgcagctgttggaattcttacagcaagaggtggtatgacctctcacgctgctgttgttgcgcgcggatggggcaaatgttgtgtgtcaggatgctcaagcgtccgtgtaaatgatgcgtccaagattgtagtgattgaagacaaggcgctgcatgaaggtgagtggctatcgttgaatggatcaactggtgaagtgatcattggcaagcagccactctgcccaccagcccttagtggtgatttggaaactttcatgtcttgggtggatgaagttaggaaactcaaggttatggcaaatgctgatacccccgaggatgcaacaacagccagacagaatggggcagaaggaattgggctatgccggactgaacatatgttcttcgcttcagacgagaggattaaggctgtcaggcagatgattatggcttcaagtcttgaactgaggcagaaagcactagatcgccttttgccttatcagaggtctgactttgaaggcatcttccgtgcaatggatgggcttccggtaactattagactcttggatcctccacttcatgagttccttccagaaggccatgttgaggatatggtgcgtgagctatgctctgaaactggagcagctcaggatgatgtccttgcaagagtagaaaaactttccgaagtaaatccaatgcttggtttccgtgggtgcaggcttggtatatcataccctgaattgactgaaatgcaagcccgtgccatctttgaagctgctataaccatgaccaaccagggtattcaagtctttccggagataatggttccccttgttggaactcctcaggaattggggcatcaagtggatgttatccgtcaaattgccaacaaggtgttcacagacatgggaaaaactattggctacaaagttggaactatgattgaaattcccagggcagctttagtggctgatgagatagcagagcaggctgagttcttctcctttggaacaaacgacctaacacagatgacatttggttacagtagggatgatgtggggaagttccttcccatctatctgtctcagggtatcctccagcatgacccctttgaggtgcttgatcagaggggagttggggagctggttaagctggctacagagagaggccgcaaagctaggcctaacttgaaggtgggcatctgtggtgaacatggtggagagcctctgtcagtcgctttctttgcgaaggctgggctggactatgtttcttgttcgcctttcagggtcccaattgctaggctagctgcagctcaggtgctcctctgatgatgacgcccttctctttaccggcaaccagatcgcctgctgttggtgcacctggtgaagaataataaatacatagccatggaatggtggaaactctgctgcctgtcaaaggcgccgttgtatgtagtatgcatgttcgcatgtaagcctatgtggtggtagttttctgaaaatttcgcttgaactgccatggtaatgtaccaaacagcgatgacgacgaagaatcgaataaaggtggtgattacctataaaaaaaaaaaaaaaaaaaaaaaaaaaaaaaaaaagaaaaaaaaaagtaggagaggaagtcggagtagacggtgaggaggaaggcggcgttggagacgtactggaggttgttccacgggcggatgaagaggaggcccgccggagtgcggccggcgttgtgggcggcgccgccggggttgcggcccatgcaggagcacacgtagtactccgcctttgacctgtacttctccagcacctcgcgctgctgcgagctcagatgcttctcctctaccagcagctgctctccaatatccatccatgcattatcacaaaattattgttaataattattactgcctgaaaaaaaaaaaaaaaaaaaaaaaaaaaaaaaaaaaa

SEQ ID NO: 28095 - DNA, 267 bp, Oryza sativa
  Clone ID: PAT_MRT4530_32727C.1
atgtcccggcatggtccagtggtggaccctgactcgacgtgccggctgcctgtgatgaagtcccggcatcctactagaattgcgcagagtgcgaggccgacacagttgcctgagacgctgaccttgcagcctgggagaagtgggcggcctgtgtcgtaccgaactgggcgaaacctatacatcgacaacaagaccctttacctgtgggggcacaataggaggcatactcgtggaaggcggggtggtgaacggtgcacgaaaccctga

SEQ ID NO: 28096 - DNA, 773 bp, Oryza sativa
  Clone ID: PAT_MRT4530_32728C.1
aggagttacatgacatcccattgtttttcagtctccacaacatatgtgctaatgttaaatgcacatctccatctgcagtattgttccgatctgcagtcctaaatgcgggttatcggatttctagcacacatgtgaatccacttggactaaaaactgatgccccttgggatgttatttgggacatcatgcgctgctgggtgaagaatcatcctgtaaaggaacaaccacatgactctgtagggacagcgatcctttcaaaatcacccaagcttgaagcaaatttctctagagcggctgctgccctcagcagggctcaagcaaagaaggtcaagcggttccttccgaacccagaacgtcattggggtcccaaaatcagagctggtcggaagattacaagtaaacatgcttctctgttaggtccagacgttgtcaaccgtgttatcaacggtgctgccagcaccgaagatgaaaaggtggccgagccaaataatccaacgacagaaaccggaggagatgcaacgaatgaagaggatgaaccttcaacaaagcgccaaaaaaacggcgatgttggattggcaaccgaaccttaattgtcactgaacctgagcacgtttcgctttcaccactcaattcttccatgtttgtaatgcttcacttttcttgagggtgtgactgatgggtatatctatcagctgtgttgctaaacggtttttagcaatgaattttgatcgcgaaaaaaaaaaaaaaaactgcagcccggggatccactagtt

SEQ ID NO: 28097 - DNA, 929 bp, Oryza sativa
  Clone ID: PAT_MRT4530_32729C.1
cccgggctgcaggaattcggcacgagggcacgctcgctgcgactgcgacgccgccccgcgccaacttctctccctcccacctccaccacctcctcctcctcctcctcctcctctcctacagcgccacaatgccgcgcgcccgcgtcgtccacgtcatgctcctcctcttcgtcgcgctcggcgcgtgccgtgccacccacaacatcaccgccatcctcgccgaccaccgcgacctcgccgagttcggccgccagctcacggccacgggcctcgcggacgacatcgacgggcgcaacaccatcacggtgctcgccgtcgacgacgcccacatggcgcagctcagggcgcgcgggctcccgcgcgaggcgctgcgccacgtgctctcgctgcacgtcctcgtcgactactacgacgacgccaagctgcaccgcctccccggcggctccgcggtcgtgtccacgctgttccaggcgtcgggcgacgcgcccgggagcgaggggatggtgaagatcgccgtgcgccgcggcggccgcgtcgcgttcgtgccccaggacgtcgacgacgcccgggccaacgtgttctacgtcaagtccgtgcacgaggcgccctacaacatctccgtgctgcaggtcagcgccgtgatcacgtccccggcccccgaggcgccgtcgtcggcgacggagtcgaagcccaactctacggacgcctcgtccaagcacgggccgccgaatgctggtgcacacgctgcaccgtcgccggtggggcaaggttcgtcgtccgacgacggcgccgacgaggggaagaaatccggcgacggaggagatggtggcaagaagaacggcgccagcgtcggcgcggcaccgcgtgggctacccttcgctctggcgtttctcatggctgccagtgccatcctcgtggtgaattggtga

SEQ ID NO: 28098 - DNA, 640 bp, Oryza sativa
  unsure (1)..(640): unsure at all n locations
  Clone ID: PAT_MRT4530_3272C.1
ggcacgagatcaggtgcatgcatatgtggccgatggacggcatcaagaagttcgagaccctatggtacctgccaccgnccaccgtggaggacctcctgaagcagatcgagcacctcctccgttccaagtgggtgccctgcctctagtgcacaaaggtcggactggtataccgcgagaacgacaggtccgccggtttctacaacggctgggnctggaccatgtggaagctgcccatgttcggatgcaccgactccacccaggtgctcaangagctcgaggaggccaagaaggcgttaccctgatgcatgcagtgcgtatcatctgctgaaacaacgtctggcaggtgcaagctcatcatcttcatcgcctacaagcccccgggctgcgaggagtctggtggcaactaaaccgtcatcgtcatatataacctcgtttaattgttcatctctgattcgatgatgtctcccaccttggttcgtgtgttcccaagttggtcatcgtcttttgatttaccggccgtgcttgtttggtttggttaactgactntctctgactgtgtagatggatctctcacttttgtggtggtgagcatatgggatgaatcatgaaactccgtttttattaaaaaaaaaaaaaaccg

SEQ ID NO: 28099 - DNA, 1112 bp, Oryza sativa
  Clone ID: PAT_MRT4530_32730C.1
atggcctcgcacggccgcgaccgggacgtcctcgcggccatccgcggcggcgacttcctgctcacccgccgcctccgagacctcgacgacggcggcgcgcccctccgatggcgcgtctccgactgccggggcggctacctcctcctcgtgaactccgacgccggattggtcgccaccgtcaaccccatggccccgcggatgacagatttcatcaatatgccctttcggatcaacgattctgcggccaacaatgcgggtgcggcagatgccaccggccaagaagaagaatcttcgccaatttccctcgacctacacttgatttgctcgggagaggatcccatgtcattccagctggcaaccgtcttctcaaatggcaccaacggttggtgccatctcccgtgggtagacattgaggcgagagcttcgccggttgcgccgcacgacggtaacaagcattggcttaagcccgggatgcaggccaatggcctcattttctggcctttcaagaacaaggagcacatgctggtgctggacaccaacaccatgaagttcacagtccacgagatcccggtattctccgaggtccaacagggttgcagcttcgccgttggtgaaaccaaagatgacgtcccttgcattgtctgcgtcgtcggaaccaccgttagtgtatggatgcgcaaattcgacgagaagggtgttgagaggtggagatttgctgacagtatcctttccagtgaggaagcaaaccaactgggaatccatggtgggctgaaggtggtgactctataaacgatggctttgtgtacttggccacaacagagatgatcttttcactctgcatagaaacaaagaagattgagaagctgtttccaatgagttttcggtcccgtcatctccatccctacatcatggcgtggccgccgtctttagtaggaaactatgggaagtctgcagctccaagactatctcaccaatgtttaactgctaactaggctaaggtcggcaaatttaatctttaattatctcttgagacattgttctatccaattctcttatcaggggacaagcattttggtgatattctgaaaaaaaaaagataatttttccacttc

SEQ ID NO: 28100 - DNA, 1230 bp, Oryza sativa
  Clone ID: PAT_MRT4530_32731C.1
atgggagcagctagctgcaacctgcagggcgaaaaggcggttgcgcaagcaggcaaggagattttgacagcaatcaaaggtatgaactctaacagtgcacctggacctgatggttttggcccaagtttctactctgcgacctggaatgttattaaagaagatgtcctcaagctcactacagggttctgttcaaattcagtccagctcgaaaggattaacagagctcatattgttctaattccaaaaccgggcaaagaaaacacagtaaaaatcctatccaaagtgctggctcttaggctacaaaaaattcttacaaggatgattcacatggatcagacaggttttcttaaaggtagatgcatctctgaaaacttaatatatgccactgaactgatccaagcttgccatgcaagaaaatgccagactcttataatcaagctggatttcgctaaagcatttgattcagtaaactggcaaagcctgttccagattttgtcggtcaaggggtttcctgataattggatttcttggatcaaaaacttacttcaaacctcaaagtcggcagtgcttctccatggtattccaggaaaatggatcacttgcaaaaaaggacttcgacaaggggaccctttatctccttacctttttattctcgtcgcagatgtgctacaacgattgcttgagagaaacctgcaaatcagacaccctatttatcatgatagaccctgtgcaactatccagtacgctgacgacacgttggtgatatgccgagcagttgaagatgacgtcttggctctcaagtctgccttgcttcagttctccaaggccacaggtttgcaaatcaactttgccaaaagtactatgatctcccttcatattgatcagtcaaaagaatcgtcgttgtcggaactgcttcagtgcaaactggaatcgcttccaatggcttacttgggacttcctctctctttgcacaagctcactagcactgattttcagccgattgtatccaaagtggatagatttctagcagggtgggaggcagctcttctgtcacaggctgaacggctaattttagttaatgcagtgctcagtattgtgccagtttacgcaatgtcagccttcaagctccctccaaaggttatagaagctattgacaaacggcgacgagcattcttttggacaggtgaagatgtttgctcaggggcaaaatgtttagtggcttgggatgaa

SEQ ID NO: 28101 - DNA, 285 bp, Oryza sativa
  unsure (1)..(285): unsure at all n locations
  Clone ID: PAT_MRT4530_32732C.1
cccacgcgtccgggcgcgtgggcgcggcgagagcgagacgacacagggatctgagatctcgcgcgcgcggtcgtttcgggcgcggctatggcgactccaggtctccgatctgtcggctctcgctggctgatgcgcacaagcgcatgcaggtgacgccaggnatgatatgtgtacgccccgcacgctgccccgctgcctgtgtatgcagcggcgcgtcacgtgttgtgggcgctcgccgcccccgctgcttatcttcttctctgtgatctatggatctctgtgcgc

SEQ ID NO: 28102 - DNA, 6549 bp, Oryza sativa
  Clone ID: PAT_MRT4530_32733C.1
ttgtttggcttttgactccacgagattggaaattttcatataatttatgcaggtagttctttacatcttacgttaactagctaaaggagctaaaatttgctacctatgtacaaacccagaaactttgtttccgagaaaaagaatgtagatacaacaaagagcaaaaacatcagcaagtctacatgtacaactgcctgcctatcaaaacttccattatctacaagaacaattgatcggtgtcggtgcgccacatctttgtacagaccagctgccattccacagctcctgctctgtgtagtgggcaaaaatgaatcaaccctgggatgttgcagagtactcgaagagaagtcgattggacggcgtagattggaagagaacacggagcctgctggttagctgatatatgagtgaccactgcattgccatttctgaatctttcatctgcctgacaacagaggcctgaaggcgttttccaagttgcacttcgacctcagtagcaaaagatatattgtttgccagcgatttaagtgggtcaaccgttggatctacagatagtaaactcggaatctgcggtgcataaaccagtcgccaccgtgcttgaccaaattcacccttgccttcaatccttggcatcaaagtttcgagtgttgcagttgcgagtttcttgaacgcgagctgtccatcaccttccaatagtgactccgcaagctgtgactcaaaaacctttgcagcctcactaggtgaaagaacatcctggtccacagagcgtgtggaggttacaacaagattgtcttgccacatgcttgctcgactttggatcttaaattgccactcagatccaacaagaacaagatccagaataggatccaaaccaagatctggctcaaactttgctacattcaaatgatcatttttaagtcttacctgagtagcaaccaaattgacctcaccattttcaaaagttaagacacccttaggtcttatgtacttcggatgaaccatgccattaagctcaaggtcgccactcacagcaaaattcaaaattaaaggataaacaatccttaattcaggtccaaatgtgagcttcagatcattgagtcgggcatcaatgtttggcttaaaacttccatgttcaggagtcctttcagtttctgattgttggccgtctggactagttgatagtgatcctagaaagtgggagacatctcgtgagactgttctttggtcaaaaccagcaggaacagagatggatttatttgaagacagcctggtggcaacagcaccattgcctttatcatgaggcaaatacgcttcaccatggcttagccgaatcattccagagacatctggccgcaatattgagcctgtaacctgcagctggctgtctacttggccactcaaaatattttttgctcgtatgtccagaacttcgcatttcagttcaatcttgtcattggctgatggctcaatattgtggagaggtagagtccctttcattgacaatctccctttcctcccaactctgctttccatggaactgatacatagtctgttagatataacatgaacattgccagcgaaatttgtcagtggtgtccgaaggaaaggagaagccacggttgcacggtgaaatgaggcagacccatcaacaacagggtgatcaacagtgcctttaacctggagaagaacttcagcatagccttgaagccagtttgagtaaggactcagtgcagttatcagtgtcatacccccatcctttatatctgcatttattctcacttcgcctggttctagcatattccagcttaaaccctttaggctttcagctaattgaaactcccaaccctcatcaggcttgtctctcatgattcttgtttcgctgatgtcatttgtcaagcctctgtctttcgcccaaacagggattcttattataccttgtttaccatctcccccttccaggtcttcctcaatggagttgctgtctacataagtaacaggaacactaccttgaatgttaacgtgcccactttgtatggtcggttcgaagtttgcatcaaaaacaaaacggcttgttggggttacagaagctaatacttcagctcttccgagatcaatgcctccaatggtgccatcaagaagtcttatttgaacatcacattcaggctttgctagagtacctctcaaatctccctccatatgtagaatgcctttgattggtgtcaaccattgcctcagaaaatgaatcgagtctgtggttgatgattctatagcctgaactaatgcgggtataagaccaactgggaaattaagcacagcaaagtgaagatttgttaatgggccaagaattgatccatcagcatgaagagtggcattatccttctgaataaataacttatcaagacgcaggccatcattattgctgaatgaaccagatgccagaacacgctgtgtcttgtaagtgccccactcccaatcttcaccattgaaatcaaaatcagccatagtatcgccgttccctccaccactggcatcaagagaaccacgccaataacctctcagttcagctaagccaggaagagttatatcctcaattgtatcatcatccaaccaatcaggatacatttctaatgcctttagctggtcacgaagactttcagcattgaatccaacagaatgcaaagtttgcataaaaagttcctttgatctggaacgaatagctgggtctgtacttcgtgatagaagtcttgccaacggaagcatttcagctacttcagcaccaggtacttctaatctcatcctccacctgcccatcgaagacatcatgctaccaagatgccctcccatcgctttctctatgaaaccattactctgactttccatagggaatctatcacgtgttccaggaaaaacatactccccttgaagttcatacttgctattagcttgctctaggactgatttttccatagtaataacatcaccactccatcgagcagctatatcaagtgattccccaagcatgccactaaattttgggcggataactgacagcaaaccatgacctcttcttttctggaaattaagctggagttctgccttctgaacaaacccacgtaatgaagcaaactccagctcatcaagtggcaaatttcgaaccattatagaatctggtgatatggaaagaaaaccagtagattgtggtgccagcataagttggttaagtttaattcctgacagagaaatctcgccaacaagccttgatacatcgttctcaagcttactttggtcaatggtaccttgtatagcaccatggttcttctcatcaactaactggctatatttcaccacttttccttgaaatttaaaccttccagatgctttcaaatgtagaggccgtggtgaatcaaaaggtatcgaagaagctatatgagcaaactcaaagcccctcatgcgtaaatccaaatccacaccctccacaatcagtggcataatttttttcctttgatacatctccttatgcagcaaataatcatcaatatatgatgtttgaatatgagtattcaaatcaaaagaaactgatgatgagttgaccataatatagtcatgtgcaataacaatattgccacgcgcatcagaaaaagaatcttctgcatttggtgcagcccatttgatatcaaatttcggcctaataagggaaccagaaagtctagtctctccattgagctctccaattttgagtggaatcaactggatgcctccaggaatgtagcgatgcaaaactttgtcaagtaaaatgctcccagacaaattaatatccatagcagaatcatcaccttccccctctgggcaaatccaaacattaccagctcctcgaatttctccaccatccaaaaggcatgctctaatgccatataaatcagcaacgcagttatcaaggttgaaagtgaaatttgctgaaacatgagtgaagggaatatgatcaaaagcggccactgcaccagactctttgttttgcatcacagcttcagaggctgccgatggaagcataccagatactgaaagagacttccttgagacaatcccacttccaacaaaaacaggagcatcaagaggcccttgacagttaaatacggcagtaacagcaccagccaacggaaacattaagggtcgcattttcattgttttcataagtgcattaacttcaactgatggaacctggcacattagatgaaactctccatcctcaggatttagaccaaaatcaccagaagcttctaccggagcatcaccaaaccaaccacttgcattatgtagaaatactctttgaccacgaaaagatagagttgccactatatctgaaaacgatgatggagcatctaaaatctgaaaagctaggcccttcacatcaagctggccatgaatgctcgggaaactatcacccttcgacatacagagatgcacctcgccagtagctctccctttattccaaacaactggtatttcgaggatccgctcaaacagcggagcaaaagcattgactacattcaaattagcatgccatgtttgctcagctatatcaacaaaaacatcagtagaaagataaccccctccttgagaagtccggtcttgcctccactccatgcagttcccagtgacatgcacatgtacacgattataactgtttttgaacttgatgtgtccattagcatgtttcatttcccttggttcttggtcaccatatcctagaagcatcagattccctccattgaaatatacagaatccagggtgatgggaagagtttgttgaacagcaccaggatggatctggccaacaccttgtgaaagttcggcagaattgtctcctggaccaatagcaaacaatgacctcaacttctggatctgaacattcagagaagctgatggtgcattgaacccgacaggaaaccccttcaattggaagggccaaaatgatagccagttgtgagcatatgtgcatgaaccaaaagccccaaaatcgaattcttgccggtaatcatcttcggatatatttttacgtttcttcaaaacaggggcttcagatacttgctcattattttcccaagagtgtgaactaatctgactaggttgttgattatgagaacttccattcaagacatccgtattgccaatcagcattgtactagcgaaattgcttttctctggcggtaattcaccataatccatagatgttgtctcagagtattcagttggtccatcatttggactaccttcctcaccaccaccatttgtatgacctccatcagatgagctttcaccaggaccaggcaaagagtcatcaggattaccactacactcgttttgaaaatatgcaacagcagcatatgcgctacgcctaaggatcctttgctgagaagaattgtcagtgtccgatatcaacttgctatgagccttcctcctgtacctgcgcctgctagggtttggaatcatcctagaccagaagctgatccctggaatacgagctttcacgccgaacgatttctccaaatcggcatgtttcgagctggagtcaatgcccgcatcaatgtgatggtccttcctgtgcatttcatcaggacataggtgtgggctggatttcccagtatcaacaggtccatcgtcttccatcatctcatcgatcgaaggcgaaatcgattgggcactaggaacaatgtatcccatttcggcggcttcccttgcagccttatccctctcctcattccactgctcggcggccttctccctcgcgagccgcctcgttttggtgcggtaatcgatcccctcctcccccgaatgcctcttgggtgagccctcggatggcgcggggagccccagccatgagaaatccttcctctgggccacgagcgccgagggctcggacagcacggcgtcgacgacgaccctcccccgcctgaggctggcgaatggcctgaccctgatcttcatgacgggcacctcggcgcaggagaactcctccgcgtgcgggccgatggagcaggtgtggagggtgatcccgagcggggagacgctgcgcaccctgccgaggtggacctcccgctggaggaattcccccagggcggcgcacgcggcggggaggaggcgagactcgacgaaggagcgggcgcggagctgcgcgtaccaggagagcgcggcggcaacggagagcgccgccgcgaagacggagcagcgcacgaggaagagcccctcccgccatagcggcgcgagggaggcgacgagggcctggtacggcggcggcggctgctgctgctgccgccgcgtcgggagcagcggctggtgctgcgagtgcgggtggtgcggcgcggggcagtcgctggagtcggagaccttgaggcggagcagcggcggcgggtcgaagcgggcgcgcgcgacgaggggcctcgtccccggggaggtgtggatgcagcctccctggcggtggcggcggcggcgggacgggtggaggaggggaggcggcggggagaggaagggcgacgcccggaggcagtgggacat

SEQ ID NO: 28103 - DNA, 513 bp, Oryza sativa
  unsure (1)..(513): unsure at all n locations
  Clone ID: PAT_MRT4530_32734C.1
ggtctcgtgggcgcgnngatggcggggccgttgctggtcgtgatgatcgtgtntgtgcgggtgttgctgttcntgaggccgctcagcgaccgcttcatcggcctcttgacttgctggcgctggcctctngggtctcgtctcccgtgtctggtgtatgttctcgggctgccctttgctgcctggtgttggctctggttctgtcttgatgacgaggccttgccttcccntctttttctcgatgtttgtcgtccgcggtgtctctgtgctggagttgcttatgttgctcatctggtcttgctgtgctgtgttcgctcnctttgtctcgtcggttatgcgcttggtgttcgtggtgcgtgctgctctgcttgttgtcgtggtctccttcctgcttgcctggcttggcngcctgggggactagttacttgtttcgctggttgagctgttttttggtcccgttgttttgttggtggatctttgccctgcttgtggaagttcacctaatcgttgtgtgtt

SEQ ID NO: 28104 - DNA, 528 bp, Oryza sativa
  Clone ID: PAT_MRT4530_32735C.1
tttgttagtagttcttctgggtttctttggccaactgataagacgacgagctgcttgtctgcgctggaagcaagccggccgagcatcttaccgctgcagctagcaccttgacaatttctcagttctacagctttgtttatatatgttaatgcatgaaatacatgaggatgaacgcccagttgttgcaaggcctgtgttctgatggcatatggaagtatgttcttctatggtcattccaaggcaatagacatcatgggatattgacttggggcgatgtttatgtcgataaagtgatcacagaaatcaaaggagatctttatgatagccccattgatagcaagaaccagatagtaatgtctactttgtacaacaatgaccagtaccaaagctatccactgtgccccattgaggcagcattactgagcatgtccagccatacatactctctaggagaagagcttattggtaaagtagcgcttaccggacaacattgctggattcttcctatgagttctcttcaacatttat

SEQ ID NO: 28105 - DNA, 239 bp, Oryza sativa
  Clone ID: PAT_MRT4530_32736C.1
ctaggggtgaaaacggtacggaaactttccggattccagacttattttcgaaaacggaatcggtcggtcggaatttttttggaatttttcggaaacggaaacgaaatcggaaatattttctcggaaatggaatcggaaatgataagggcagttttcgtcggaactcggaatcggtcggaaacttcttggaaattttctcggaattttcggaaattttctcggaattaccagaaattttg

SEQ ID NO: 28106 - DNA, 307 bp, Oryza sativa
  Clone ID: PAT_MRT4530_32737C.1
tttcggatggtgttcatcgcgtgcacgatgcacctacacagctacactacgctgttaatattacgtgtagaactcgcgaatcacatgattgtttattacaattggaaataaatatatatatatatatatatatatatatgagatgttttacggtgtttgcgagatacctaaaggtacttagaggtggaacaacgtgcaagagatggaacaaatttattgtaacatgatgcagtggtgtaattaacttgtaaaacatgggcattatactttaattgaatacttacatccaaaaaaaaaaaaaaaaaaa

SEQ ID NO: 28107 - DNA, 354 bp, Oryza sativa
  unsure (1)..(354): unsure at all n locations
  Clone ID: PAT_MRT4530_32738C.1
ctggaatncctcatgttccnatntcgnaccgcntgctccgcntcngcgggntgctctggattgatagctacctgtgccagagtgangngcngangcaattggttgtgaatctcattnagagatttggctncangaagctcaagtggatggtcggagagaaanccgncacggggagcgcnaagacggcnttgtncctctcggcattgttgcaaaagccggcgagggattgatactgaactgatggatgaattgctccaagctcatcacttgatccgaggtacgaatgtncctcacaactattacttgtngttcagctnttttgatggcaaaaaaaaaaaaaaaaaaaaaaaaaaa

SEQ ID NO: 28108 - DNA, 492 bp, Oryza sativa
  Clone ID: PAT_MRT4530_32739C.1
atggcggtgaccctgggagcacgctcctgggcatccatgtgcacagaggcgttcctgtcgactcactgcatggaaagggatgagattagagggaatgaaaccagtgtcttgaggagtcatcgctgcctgctgttgctgcttcgatgctgccaccacctcctctccctcaccgccgttgtcatcgcctgctactgcttctggaaagttaggggtgagggagggtttctctacagccaccgatgcctcctccgccctcccatggccgcaaacaaccttatcgccgtcggatatccacgtcgggtcatcggccactccgcccttggggcagtgtgtccttgctccggccggctggtaatgaggaggagcgcatattcagcgaaaagtcgaaggaggaggcacagatccagtgcacgcaacggtgaggaagagatggagaagaggagaaggtggcgcatacccgggggcacatgtgaagaggaggagaggaggtag

SEQ ID NO: 28109 - DNA, 200 bp, Oryza sativa
  Clone ID: PAT_MRT4530_3273C.1
cacagaaaatcaatccttgcatgcaggggaaatcgggggatctacctaattggtgaacttgtcctaaatcctcatgtacaatcaaataaacacacacgcacactcacttgctttcactacatctctcttatcatcaatctctaaatatttgaatttgattcattagggattaaagaaaattttgtatatacaatttatat

SEQ ID NO: 28110 - DNA, 537 bp, Oryza sativa
  Clone ID: PAT_MRT4530_32740C.1
atggcggcgcacctccgcctgaatagaatactcaagtgttccctagcccaacaatcttccgtggatgcatcggtgcattgcagacctgccactgccactgccaccaaatatgcccgtgcgttgcaccgggtaaatatcaaacaaatattgatggggtcatccccggctgtgtggttgctgcggtgctcaggccgtcgaggcgaatatgaggcaccacccaatgatgacagggagaagattaataaggccacaacactcaaggacgtggtgggcggtgtcgcggaggtgctcctggcaaacaagctggccaccagggagggcgtcgataaggtggcggtcgccgctgcgcagaacgacaggaggcatgccagtggcggcagggagctaacacgatccattcaatcccgatccgagtcgatcaagaatccaatcccgcactgtgcagatgtgtttttcttttccgcggggaaagcgatcaccgatggtagggacaaagtgcgtgagagaacgcattctacaaagtccagttgttcctag

SEQ ID NO: 28111 - DNA, 1216 bp, Oryza sativa
  Clone ID: PAT_MRT4530_32741C.1
atgggcaaggacaagctgctgctccagatcttgcgcgtcactgcctgctcaccagcacgcaggagcaaagcttcccatgtgcctgatgtcgcgccggtggtgtgcaattccggcgacaacgacggcgacggcttcctgcctgcttctgctttctctctcttctcttctctcctttcctcttgagaaagaggaaagggagagagaaagaggagaagagcaatcagcccaagaaggagaggccttcatcttcacctgatcggttcttcttcttcttcagcaggcagcatagtacttcatggctggacaaggccccgtggtgcccaaattcggatcgtgggacgccgagaacatcggctacaccgtcttcttcgacaaggtgcgcgagaacaagaccgcgcccacgccggcgacggcggcgccggcgacgcacgacgacgactacgagttcgatccctacgagcactacgagaacctgagcaggaaagcggcgtcgcgcccgccgagctcgcacggccacgggcacggccacgcgccgccgccggcgcaccaccaccaccaccaccgggcgccgccgccgccgcagcagcagcagcatcaccaccactacccggcgtcgcagcgtagcggcaatggctaccaccggaggagcggcagcaacggcagcagcgcggcgtccgaggccagcagccgcggcagcaagttctcgccgcccaagccgtaccagccgcggtacagcagcaacagcaacagcggtggcggcggcggcggctaccggtacagcggccccagcgccggcgcggtggccgcgtcgccgccgcgccacgcgctgccgcaggtgagccgcgccgcgaaggcggcatcggccgtgcccaagttcggcgtgtgggacgagcagaacgcggcggcggcggggcagggcttcacggtgcagttcgagaaggtgaagcggcaccgggaggttgcgaaggccgccgccgccgccgggccggacgtcacgccgcgcatgtcgccggcgcaggcggcgccggcgcggcatcctcggagaaaagccgagaagaggtccttcttatcaaaggcacgtgtacaggtgcatgttcccaaggagactcgaaagattgttctcctgtacggccacattttggcccatgggcctcttcaaattctgagaaaatcaccagaccctgaatctaagcccatggttacctcgtggtcttga

SEQ ID NO: 28112 - DNA, 233 bp, Oryza sativa
  unsure (1)..(233): unsure at all n locations
  Clone ID: PAT_MRT4530_32742C.1
caccattggttcctgaaattgagtcatggctgccangctagctngtctccacagtctccgngaacgcntcgntgccanctnctcgtctcatcccaatnagttgattgnactcttctctagggatgntacccagggaaagggaattctccagcgtnaccagctgctttgcggnnnttcgatgccttgntcnaagctgncaaagagaaatattgctcccttttgaaggacattct

SEQ ID NO: 28113 - DNA, 1755 bp, Oryza sativa
  Clone ID: PAT_MRT4530_32743C.1
cggaattcccgggtcgacccacgcgtccgcttatgaacatgattgcattaccaaaagcctaaaatactgcactttgcatgttcatatgctgcaaggaccaggtgagaagagagagagagagagaggagggttgcaaaagcagaagccaactcaagaaacaaacaaccaccatgtccttgggtaggtaggtagaaggttaaaggcttgagctgttcttcttctctcttttgcctttccagtttccttcacctgcaactctgttacggttacacctctctatctccataaaggcagtggtacatacactggcaggcagggcaagggcagcacattctctcttccagctgccaccctgttgagttttgcttgcacagagtcacacagctgggtgatctcctttaattaggaatttagggaggctgtcagttctgaaccccaatcataaaaccatccctggtttctctgtcctgtcctgccatcattcctgcctgcttctgctttctctctcttctcttctctcctttcctcttgagaaagaggaaagggagagagaaagaggagaagagcaatcagcccaagaaggagaggccttcatcttcacctgatcggttcttcttcttcttcagcaggcagcatagtacttcatggctggcgtccgccccgtggtgcccaaattcggatcgtgggacgccgagaacatcggctacaccgtcttcttcgacaaggtgcgcgagaacaagaccgcgcccacgccggcgacggcggcgccggcgacgcacgacgacgactacgagttcgatccctacgagcactacgagaacctgagcaggaaagcggcgtcgcgcgcgccgagctcgcacggtcacgggcacggccacgcgccgccgccggcgcaccaccaccaccaccaccgggcgccgccgccgccgcagcagcagcagcatcaccaccactacccggcgtcgcagcgtagcggcaatggctaccaccggaggagcggcagcaacggcagcagcgcggcgtccgaggccagcagccgcggcagcaagttctcgccgcccaagccgtaccagccgcggtacagcagcaacagcaacagcggtggcggcggcgccggctacggtccgggcggccccggcgccggcgcgtacgcggcgccgccgcagatgcatcaccaccaccagcagcagcagcacgccgcgcagccgtgggtggccgcgtcgctgccgcgccacgcgctgccgcaggtgagccgcgccgcgaaggcggcatcggccgtgcccaagttcggcgtgtgggacgagcagaacgcggcggcggcggggcagggcttcacggtgcagttcgagaaggtgaagcggcaccgggaggttgcgaaggccgccgccgccgccgggccggacgtcacgccgcgcatgtcgccggcgcaggcggcgccggcgcggcatcctcggagaaaagccgagaagaggtccttcttatcaaaggtgtacaggtgcatgttcccaagggtgagggagtgatgcagaagctggatttgtattattaatccgaccttaattaattactgtaaaactcccaatcgtatacgtatttccgacaggaaatgtactgtgtaattaattaatttgttcattcttgttctttattacagtcccctggcacaaatcaaatcacaatatgatgagattggcacatgtaacttacctgcctattcttgtgcggaaattgtaaattttgattttagacatccgg

SEQ ID NO: 28114 - DNA, 1220 bp, Oryza sativa
  Clone ID: PAT_MRT4530_32744C.1
atggggagggaggagaggttcccggtgtgggaggcggcactgctcgccggcgtcgcggccgcctttgccacgggtctcgtcggcgtctacctctccatgcctcattcggactacagcttcctcaagctgcccaagaacctccaggagctccaaatcctcacggatcatctcgaggactacacgagcgactacaccgtgcaggtgctggtgggctattgtgccgtgtacatcttcatgcagacgttcatgatcccaggaaccatattcatgtccctccttgccggagcactctttggccagcttggtggtgttgcccttgtggtctttgccgccacggctggagcttcttcatgctacttcctgtctaagctgattgggaaaccgttggtcttctcattgtggccggacaaacttgggttctttcagaagcaggttgcaaaaaggagagagaagctgttgaattacatgcttttccttagagtaactccaacattgcccaatactttcatcaatttagcgtcgccgatagtggatgtgccctaccatattttcttcctggcaacctttattggactaatcccagctgcctatgtgactgtcagggctggaatagctttgggagacttgagctcattgagtgacctatatgataaacaatcaatagcactgttgttcttgattggggttgtttcggtgacaccgacattgttgggcaagaacgagaagcaacaaggcaaagggccagaaatggtagctagcagtagctgatcacttgcacgcgaactccttctcacctccccttctgtgtacatatgaagatcctgcatttggttgcttccatggcctttgtttggatcggtgcaacttatggccggccaaagggcaacagaacatggcaagggcccctctttctttctccacttgtggaaccctatgtgcatggtgctgcgaaagggacacctcactgtcacaacattatgattctggggaacaagatgggccaccagagctaaaatgacccatttgttctgtttaacatcttgtttagatcgaaggaacagctgatcttatcatcattgtatatgcactgctaaccagattcagtttttcaaaaaaaaaaaaaaaaagtgatctgtgaatctgtccatgaaatggtctgtttgggcgcggaagtgaacagcccgagggggggcccggtaccccgagactagcctcgtgcc

SEQ ID NO: 28115 - DNA, 237 bp, Oryza sativa
  Clone ID: PAT_MRT4530_32745C.1
atgtcacctacactaagccacacgtcgaatgaaggatcaaggcagcggaaaaaagctgctctacgtcccaccagcacaatcgacacgaacgttcaggtccaacagtgggcaccaccaattgttggggacaagaccgaccctaaccacccctttgagctgggttccatctgtgtacaatcccatgttgatccacgtgacacgaatcgtctcgcttccgcacacccacttcaaggctga

SEQ ID NO: 28116 - DNA, 651 bp, Oryza sativa
  Clone ID: PAT_MRT4530_32746C.1
tcggtactgcatacgcgcattatttcccatttctggttaggtcttatgaaagctaataatactttcttgaatatgggttcttggatagtgaataatgggcaacaaacaagattttgggaagataaatggttaagtaattctggcctttaaagataagtatccttatttatatgctcccgtaagaaggaagaattcttcaattgctaccgtcatgggttctgttccacttaatgtatctttcaggagagctttagttggtcagaatcttgtattttgtcatgatttatgtgcgtctattatacatatccagttgaatcaattttctgattgtgtctcatggaattataatcagaatagtcggttatgtgtaaggtcaatgtatctagctttgattaataatggatatattgagaggaataagataatttggaagcttaagatgctgcttaagattaaaatctttatgtggtacttgcttaaagggatggtgttaatgaaagataatttagcaagacaaaactggaatagctgcttaagatattgtttatgtatgaaaaatgagacaattaactatctttttattgattgccattatgcaaaattcatatggagagcaggtgcgttgcgattggacgcgccactgatgcactt

SEQ ID NO: 28117 - DNA, 746 bp, Oryza sativa
  Clone ID: PAT_MRT4530_32747C.1
atgtcaccggaaacagaaactaaagaaaatgttaaatttcaagctggtgtcaagaattataaattgacttactacacccgagacgagagtacgaaaccaatgacaccgatcgacagcattccgagtaactcctcagacggggggttccgcccaaaggagaggctacaatagctaccaaatcttctactggtacatggacaattgtttggattaatggacttactagtcttgattgctacaaaggcttatgctatcacatcaagcccattgttggaaaggaaaatcaatatatcgcttatatagcttatctattagacctattttgaagaggggaagtcaacggcgtcatctattaaaaaacggagattgtatttggtttcaaagccccacgcgctctagtgctctacgtccagaggattacgaattccctctacttattcaaaaacttttcaaggaccacctcatggtatctaagttgcaagggataagttcaacaagtacgattgtcctttattagaatgtattagtaaactaaaattgagattatctgcaaaaaaaatatggtagagcatgatatgagtttctatgtggtggacttgattttactaaagacgatgaaaacgtgaagtcacaactatttatacgttggagggactgttttgtcttttctgccaaagctatttataaagcacaggccgaaaccggttaaattaaggttcattacttgaatgcgactgaaaaaacca

SEQ ID NO: 28118 - DNA, 699 bp, Oryza sativa
  Clone ID: PAT_MRT4530_32748C.1
atggagaagtggaggttctatgggggccatcagtttcagagttacagctttcacgaagaggagaacctctttcaggattggagtcttgattacctgctgctgggagaggatgagccctttttcactcaccacttcagcactagtgttcatagcaacttcgtgcaagacgagctttacaccctcttcgacggagatatcctgagcatttggggcgacatgaaagaagacgcctatcacaggagcgacaaagatggcggcgagaaggaagagaagctggatcatgagaaggccatggagctgcagctgcaacgactcccgagcggccgtcaatcaggggaaaagacactgacgttcgagctcgtgtcccagtacttctgcctgccgatcaagcaggcggcgcaggagctcaacgtcgggctcacgcttctgaagaggagatgcagggtgctcggcatcccacgatggccgcaccgcaaggtcaagagcttggagacgatcatcaagaatgtccaggagctagggatggagactggccaagacgaagataatactaggaacgcagtggagatgttgcagcaaacaaagaagctcatcgagcaaagtcctgatgctaagctggatgattggacgaagatgttaaggcaagcgtgtttcaaggagaactacaagaggaggaggctcctggcgattgaaggatga

SEQ ID NO: 28119 - DNA, 522 bp, Oryza sativa
  Clone ID: PAT_MRT4530_32749C.1
atgtcgactgaatctactcaatcctccacctcctcggcttccagtggtggatcttcttccaccaccgagttccttcacccctatgccaccgtcgctgtcaaatcacatgtccccatcactctagaaaacacacttaatgctagtgagggatcatgcagaatgccaatagcttataaatcacctctacttcaaaatgttcaagaacgatgttctaagtttgatgatactatgataagccaagtgcactgtgccatgggcaatttggccatattgaaaagtataatggaggttaacgatgaggagtgctggatagcggacccttgcatgaagaggctgcctaatcgaggaaactatgtcttctctgaccagaccttagaaaccatcggccacatcttagtctttcccggaatccctgcaggagagaaatacttcaaccaactcagcaagccctggtgccaactatctatgcggaggaagcggcattgtaggttgacaggagcaacaatccaggagtttacctag

SEQ ID NO: 28120 - DNA, 509 bp, Oryza sativa
  unsure (1)..(509): unsure at all n locations
  Clone ID: PAT_MRT4530_3274C.1
aacaaacaaaagaggaaaaaaaacatatacacnttctagttgattggtctgattggatcaaatcaatggcttagcagagggtcggtcttnncttcgcggcggcgcctcataggcggcnncatggtggccaatcnntccggcgcgccagctganngcgagtcggagaatgagaggttcagggaccaggcnnagtgccagcgggatggtggcagggacagcnctcgctggaccgctgtgctctggcaggttgcttcgacccggctagcttcacccggcgcgggaagagagttctcagcnncgatgttctcgcccgcctcggggcgcagctcgtgcctgctggatgcccagtgcttgccaagcagctgtcaggaccgtgaagccgcgagttgccgctgcgccgccatcccgccggatggtgaaggagctaccgaggagaagcatgccgatgcccctggagcaagagctggtcgtcgtcgtcgtcggagtactactgcagggaggggtcgtcg

SEQ ID NO: 28121 - DNA, 367 bp, Oryza sativa
  Clone ID: PAT_MRT4530_32750C.1
gcgcccacgcgtccgcccacgcgtccgcccacgcgtccgaaaaaaaaaagaacgaataaggaagagagtctactttgtaccgtgaaatatagactccccaaatttacttttcgctcccaaataaggctgtgttctattggaacttcgcaagtaaaacgaagcgacgaattaacgtatgattaattaagtattagcttaaaagatttttttctttaaaaaaaatgtaccatttaatagtttgagaagcatgtctgtgtaaatgagcgaggtaaggttgggatcctcgagggaagaacacagcctaaggctaagctacaagtccacatattttttttcgaataaggacaagcccacatatttaacatct

SEQ ID NO: 28122 - DNA, 2052 bp, Oryza sativa
  Clone ID: PAT_MRT4530_32751C.1
atgacgcggagccgcagcgtgaggcaacggagcaagaagaagcgggtgcacgcgctcgaggtggccacggagcggtggaaggtgctcaccaaggtgctcgccgtcgtcgacgcgctcaagaaggaggaggagcacgtcaccccgctcaagcgcctcgagatcctgcgcccgcagctcgggctcaccaagcccaacaaggtggcccacttcgtgcgccgctcgccgcagctcttcgaggtctgccgcgacagccgcggcgtcatgtgggcgggcctctcgccgcaggccgaggcgctcgtcgaggaggaggcgcgcctgctggaggatcactcgcgcacggccgctgagtacgtcaccaggctgctgatgatgtcggtggaccgtcgtctggccatcgacaagattgcacatttcaggcgcgacatggggcttcctcatgatttcaagacacgatgggttcacatgttccccgagcagttcagggtggtcaggttggaggacggcgattacctggagcttgtctcttggaacccaaactgggcagtcaccgagctcgagaaaaagacggcagcattgactggtgatgcaaatgctaacggcattggcagtccaccaggagagctctcactatcattccccatgaagttcccaccaaattttacaagttactacaaattccgcggaaaagttcatcattatgtgaaaaaagggaataccgagcagtttcagaagacaacatacctatctccttatgcagaggcaggaggattgactcctggctcgccggagtttgacaagagggcagttgcagtgatgcacgaggtactgaacttcacgttggaaaagaggctggtgactgatcacctcacacatttccgtcgtgagtttgttatgccgcagaagttgatgaggctgcttctgaagcattatggcatcttttatgtgtctgagagggggaagcggtttagcgtgttcttgacggagtcttatgatgggacagaattaatagagaagtgcccattggtgaggtggaaggaaaaagtccttcaacttaccagctatagagggaggatcaagaatcttggtaaatttgccgagttgtctgattcagaggactatttgtttggtaatgatgatagtagcggtgctactgattctatattggatgtcaaaagtgaagattcggatgatatcatggatgatggcgctcttgcagatgatactgagatggatgtaggggatctaagtgattgttgcatagagtgaataagtgacatcgattaatttaaagagcagtgttttatttttgttccctaacgatcaagctccaaaagtctattcttgtgatcctaggccaatggttatattctgttactccctcgctcatggcatatttggattctttatattaacctagggcttaaaaactgttgctgattggatatgtcatgtttgcttattgctaaaaacctaaaccatgcgtactttatgttattcacagaagatgatatttacaaaccatccaagcaagatttgttttaacagtaatcgctgtctgaagtcagttttctagccttccagttggtgatggattcaatattcagataagtacatcgctactatttgtcatcggctattcgaaagctttatttacacatagttaactgtgtgctgtaagaagggaatgtttttgttatggtgtcataataagactttcaaaagggttttgaagcagctgaacagccggccaacgtggaagcgtggaacttgaactctagtgctcggtaagaaattctatttggagcatttctagagactcaaaagaaaacatactgtagtacataattttattgacagagagattttgtagatgttgccacgtttttttgtaaacttggtcaaatttgactctaagacaaaccccaattgcgttgtattatggaatggagggagtagttactccagtaaattagtaatttgctctaggtgttattagttttccaaaaaaaaaaaaaaaaaaaaaaaaaaaaaaaaaagggggggggcctgcag

SEQ ID NO: 28123 - DNA, 372 bp, Oryza sativa
  Clone ID: PAT_MRT4530_32752C.1
atggagcagacgaacagtcaacgcgtccaccatctccgagagagacagagcggggggagggagagcgccaggcggtgggcgttgaggccggcgaacggatgggaggcgctggtggagacgtgctgtcggcgcagccaaggagacaacctcgaggtgagcagccgaggccggcagcccggcggacagcagaaagcggcaccccgtcagccaggccggcgaccgaaggcggagggcgtgcggctgccagatggttgcgaccgcacctcgaccgcacctcgaccgcaacgacgacgacctccagatgacgactgccagatggttgcgtggatggtggagggggcgtcgacggtgaacggcggcctgcaggcgtag

SEQ ID NO: 28124 - DNA, 589 bp, Oryza sativa
  Clone ID: PAT_MRT4530_32753C.1
aaaaccccaccttcccggttttatggccctataattttatattaacaaacccaatgtttttatggaaatgcatattcgggctccacccaccaatagggggcacaaaatttttgtctgtcctgccaaggaacaccccataggtagtttgctccacccccccagaaatttacagttgttttgatagcccccaaaaccttgttttttgggggcatgtaaaatgtttcataaacaaaagggaagggggtgtccaggcccaatacttttgggaggggcgcttttaacctttgaaaacacccctcggggatggatgcggaaatttttgccccaaaccctccggggatgggagcctcatggttaaaaaaaagttttcctgttttgttgacaaaggcctttactgtttttttgccccatggaaacagggtttttaaatttatgagctcacaagaaattccatcctttggtggattttcgcaggctttttccagaactgaagggtgagccccccaaccaaatagggttaaaaaacttccttttaaaaaaacctttgcctaaaaacagggcaaaaaaaaaacctcctttggaacttttt

SEQ ID NO: 28125 - DNA, 465 bp, Oryza sativa
  Clone ID: PAT_MRT4530_32754C.1
atggagcagatgccggatcggctgggcttccctggtggcggcaacctcgacggcggaaccaaccggatcgtctcggactcagcaacaagcatgaggaactggcggcgcggtggagatggctgtaggagcggtggatggcaagatacaggcgaaacagtgatgggggcgcgatcggcagggcggtggtcgcagcggatgggtggagaaatcggtggcggcgggggaagggacgacctcgggggcagcggtggactgcagcggcgatggcggatggggaagatctcgtctccggctgtgcggcttcgttggcctgtcacgaggagggaggatgcgcgcgaatcgagtaggagcgaggagggcggcggggattcgcggggaggagtcagcgcggcggggatttatgcgaccgagtcatcgcgaggcagaggaatcggtggaatcgctcataaatggcgtagaggatag

SEQ ID NO: 28126 - DNA, 940 bp, Oryza sativa
  Clone ID: PAT_MRT4530_32755C.1
gcacgcgtacgccagccttggttcttttttttggtttttttttttttttttttttttaagagttaaccgaatgccatgacttattaatattcaaaacaacgtcaaatcgctgtacctaggcagttttgtgctatatctgcaagaaaacccactgtatctgtcgggcaaacggtgagaccaaaaataccggccccagtaaagtttctatagaagagaaattcaattacacatctgaaacaaattgagattaacaacacggcacattcaacacatatgaagtgaaataacgtttgcacggacaccctttcttgggattcttgcaagcttttccgatacaaaataacccaaatgctttctttgttgttcttgctccgttgtatggcgaagtaactctactaagcttggatttctttgtagtttgcaactcaggaatgttattcagcctggtaaatcctcttatacaaagtccccatgatgcaatcggaccatagcctaccaaatcatcagctgaggtcacttgaagggtgcaaacaaaaccgatgagttatgcccaccgaatccgaacgagttcgacaacgccacctttacatcacatctctctttttgtgatcccactagaatgctgacatccacatttttctccgggttgtctaaattgatatttgggtggacccaaccagtccttatagcttgtatagcagccacagcttctattccacctgcagctcctagcagatgacccgtcattgactttgttgagtttactctaagctgagggttctgaccaaaacagcggttgagagcttcaaattccttcaaatcacccatctgcgtcgatgttgcatgggcatttacataattaatgtcttcctttgctactcctgcatctgctagtgcattttcaatacaaaggataacccctctaccttcaggatgtggc

SEQ ID NO: 28127 - DNA, 453 bp, Oryza sativa
  Clone ID: PAT_MRT4530_32756C.1
ctctacaaaagagtctgacacgtcatgcgcacgcgcgcgtgcgctggtactctatagagcgcgcgctctttttttttttttgggcttgaatacacatattttggttatgtagggcatgctgcttatcccgaatccagtttcataagagaagacaactaacttgcctactaagagcttacgtgcacacctacctgagctttacatatacattctaaagcaaatttggcccctttggtgccggctgaacccgattgtttacatgtggactacaccatgaatctatctttgaagacaagctacttagagtgctgggcttcaatggcgagctttgcgattgtgttcgtcaagataccggctagctcattcgatgaggcgaccacactggctctggacggacagatacggctctgaaattgctcaagcgctgttcttcttgccgttgccaaacaagaa

SEQ ID NO: 28128 - DNA, 680 bp, Oryza sativa
  Clone ID: PAT_MRT4530_32757C.1
catgtattcaatttattacttgttgtaatgggcattgaagttttctgggtaaagaatacggattagtggcaaaaaggagccatgaaacacataacaagaagagtatacgcgatatgctcgctgcctggtcagcatagaatccaaaacacctgaaattgaaattgttgtatcctgtaaccgcccggttgccgtcaggggatctcaaacgtaaaccgcgaaattggctcagcgtcaatttgaacttctaagtgtatatcgttccaagaagaagtatcatttcttgaccaatctcaacacatcaccaacgagatgcagggagccagtaaccaggacctgaaaagaagttgatcggttttgtcgggcatttgtcctcagccactccattgccagtggaagtgattcaaaaaccagactgttctcactggaatttgtgttgttcatacctttatcaccatgaagtaatttctgccacactctttgaagcgacaattgccatgacaaatcaatttgctcaggctctgcaggagctgatgaattggtaccaagcttgttgtattgtgattggtttggcacaaaaagagccatctcaaagtggaccccattttgagttgatgtatccagaagatgcggaagcaacctcataggatccctcacggacatgcaattgaataaaagaataa

SEQ ID NO: 28129 - DNA, 1805 bp, Oryza sativa
  Clone ID: PAT_MRT4530_32758C.1
cgattccttcatacaaaccctcgccgtcgcttcctgcctggatcgcacacacaaagagatccctcgcaggcggagtggtgcttcccctctcggatcatcttcgcctctgcaagattggcaagcaatgaggtgcctgcctttcttgcatggagattccaaagaggaggatcccgtcaacaagtcggcttctgtccggtcgttgagcacaacatcgacggagcgggatgtccggtccggctccgacttcaactccttgaatgtctctgacatgagtgccgaatcaatacggaggacacagtatcccagcttcactgatcggcccagtaacctcagggtgttctctttctctgagctgaagaatgccactcgcaattttagccggtctcttatggttggtgagggtgggtttggatgtgtgtataggggtgtcatcaagaattccgatgaaccaactgagcgcaccgagattgctgttaaacagctgaatcgcaaaggacttcaggcaagttatttctcgtctgaactgtaccgattacaagctttcaatgcacatagcaacttccttctacttgggcagaaagaatggttaacagaactgaatgtgcttgggattgtagagcatccaaacctcgtcaaactaattggctactgcgctgaagatgatgaaaggggcgtacagcgtctcctagtatacgaatacatgcctaatggaagcgtggatgatcacttgtcaagtaggtcaaattcaactctatcatggccaatgagactaaaagtagctctggacgctgctcggggactgaagtatctgcatgaagagatggaatttcaggttatcttccgtgacctaaaaacatctaacattctgttagatgagaactggaatgcaaagttgtctgactttggattggctaggcatggaccatcagaaggcctgacccatgtctctacagcggtcgtgggaactcttgggtatgcagctccggagtacatgcagaccggacgcctcactgccaagagtgacatatggggctatggtgtgctcctttatgagctcatcaccggccgccgtcccattgaccggaaccgcccaaagggtgagcagaagctcctggattgggtgaaaccatacatatctgatatcaagcggttccccatcatcatagacccacggctagaggggcactacaacctcaagtccatgacaaagctggctagtgtggcgaaccgctgtctcgtccggctaccaaagtcgcgcccaaagatgagtgaggtgtatgagatggttcagaagattgtggccagcattgagaccggcacaccacagcctcctctgcactaccatgggtcggtttctgaaccgggctcaaagcggccaaagaaggggtcactgaagagaaggttccaagaattcaaattcggttgccggcagattgtatggcggagctggaagcctgagatcataaagacttgctgagagaatacagtagcttcctgcctgtaagtatatagctaagttgttcatagggataaagctcttcttcctctgtatgcttcctgtccttggggtgatctgatcccatttcgggcacacagttgagtacttgagttgcagtgtgaagctttttatcttatagggttctgtgtgatgcatcttgaggttgtagattccatgtgttttcagtataatccctgtggctttcctcatcatgtaatatagatcttgtttgtgcaatatgaaagaaaaaaaaagatgagctttcttgtatgaaaaaaaaaaaaaaaaaaaaaaaaaaaggggggag

SEQ ID NO: 28130 - DNA, 642 bp, Oryza sativa
  Clone ID: PAT_MRT4530_32759C.1
atggcgggtttttcaaaccgccagggccggagttaccgcgccccggcggaggttaccgcggtatttacattaccgtacccccgcggtaagcccggtaaccgcgcggttaccggcggtatggtgcttatgtcgtccgcatgcaaaactaaaaataaaatcaaaaacctgaaccctaacctcctcctcctcctcgtcgccgtcatcctagttagatccatcatcatcacgccttctccgaaccctaacctcgaagccgtcgtcctcgtcaaatccgctgtcgccacgcctcctccgaaccctaacctcgaagccaccgtcgccgctgtcctcgtcagatccgccaccgccacggctcttccccaccgcccaccggctgccgccaccaccaccggatccgcgtggatctatgtgggggacggccgccgtcgccggatccaagcgggggacgatcgccgtcgcccctcgctgccttctgcatgcggccgtcgacgtgagcacgtcggccgccgcctcctgcctcgtcacctcgccatgcccgagcccgccgagccgcgagccgccactcccggctaccacctcgtcggcgtcgacgccgagccggccaccgagccgcggagaggagaggaggaaagagatagatag

SEQ ID NO: 28131 - DNA, 960 bp, Oryza sativa
  Clone ID: PAT_MRT4530_3275C.1
ttttttttttttttttttttaggcaccaggccccccccttctcttttgttgttctttttttttttttccatactaaataataatagagaattgaatagccagaagtaattgtgatacagaaggaagaaatgacacagaatccttttgttctaaaacttatgtcttactactactgaatttaactgaactgaactcatgattctcatctatacaaccacatatatccctgcacctacaatcctctgccaaaccctcctgtccctctcaaacttttccttattattcacaacccaattagccatcaatcatatgttcccaaatcctccaaatccccacacccccaccacttcccaatccctttcaacaccacagcaacacaaactgtttcgatgctgacgccgacaaatcataaccaaacaaaattttgtgcaccttactacgctcttcacgccggtagtcatcaatcaaccaaccaagaacactagtagctaataagaacgataatgaccacgtatacttgtgtgcgacttccgctgctgtcgatttgccggatgtgaggagcaagagcggaacacatgcatgtttccaaacattcttcggagaaattctatcaatgcagcgggggaggaggtggtgatccatatggtacgctgtggatcggtggccatgagctgtggtgttgcagagggggaggtggtggtgagccatatggtactccatggacaggtggccatggcccggggtagtaaggtggtggtggtggtggtgacaatgctggtgttgcgccgccgcagggtggcggcggcggtggtggtggcggcagctccggacatggcggatgcggttgtggcgcgggtggtggcggcggcggcggcgaacacggtgggtggaagattggtgcaggcggtggaggcgatggtggcggtggagatggcggtgatggcgatcaacccctcgtgc

SEQ ID NO: 28132 - DNA, 348 bp, Oryza sativa
  Clone ID: PAT_MRT4530_32760C.1
gccgcccttgtttttgtttttttttttattttttggcaaaggtgctggattaggtttacctttggacccacccttttccattcagtttaagcaaacagccaaaacgtttaactttttcgaccttccggaaaacttggggctagtttggcaaatttttccagctggccggaggaatggacttgaaataaatggaaaccacccaattggaactaaggccaaaacaagcaaaaaggggttggcttaccctcaatccaaaattttgccttttcactagcttaaagtaataaaacaaaacttcttaggttcccaccaccagaaccctaattggaacccaccaaataagaaaaa

SEQ ID NO: 28133 - DNA, 337 bp, Oryza sativa
  Clone ID: PAT_MRT4530_32761C.1
ctgcggctccagcctccggtggattctggtctcgccggattcgagctctggtcggcggagagcaccggatccggaggtcacgcgggcaattggtgtgccccggaagaacaagaaccgggagaccatgcagtaccaacccctcgacagcagcggcactgatgacgaccttcctccgacataccaacctagaggaccaagagtgattttcaatggaaatggatcacttcctcaaccaaacctacacagcaacgtggacagagaaatacgtcagatcgagcaacaagcgtacactggtgttctcagagcatttaaagtgcagtctgatgctataacttgg

SEQ ID NO: 28134 - DNA, 744 bp, Oryza sativa
  Clone ID: PAT_MRT4530_32762C.1
atgccggagctggaggtgtgtagccctgcgtcgtcgggtggggcgtcgccgccggagtcgccggtggaggggaggaggggaggaggaggaggggagaagagggggagatcaggggatggcgggaggcacccgtcgtaccgcggcgtgcggatgcgggcgtgggggaagtgggtgtcggagatcagggagccccggaagaagtcgcgcatctggctcggcacgttcccgacgccggagatggccgcgcgcgcccacgacgccgccgcactcgtcgtcaagggccccgccgccgtcctcaacttcccggacatggccgcctcgctcccgcgcccggcctccgcctccccgcgcgacgtccaggccgccgccgcccgcgccgccgccatggagcccccccagccgccgccgtcgtcgctcaccgtgcaggccgactccgccgccgccgcattcctgacgcccaagaacggcggtgtcagcggcgccggcgcggcggacgacgagctcgaggcgatcgtcgagctgccgcggctcgacgagctggacgccgccgagctcgtgttcggcgccgcgttccaggacacggcggcggaacacccgtggtgcgaccccgtctggatcgacggcggctacgcggcggccgccgcggcggcggcggcggccgcggcgcacgacgacctgttcggcctcgacgccgaccaccatggatgggcccagtcggttggtgccctcttatggaacctgtga

SEQ ID NO: 28135 - DNA, 351 bp, Oryza sativa
  Clone ID: PAT_MRT4530_32763C.1
atggggcccacgtgtcggcggctgcgcggggccgcgtcgcgcgtcgccgtgccgtgccagggcaagtgtgtcactgacaggtggggtctcgttgtggtcccctcatggatggctcgtatagtcggggtagtacacgtgttttgggcgaggagaaaccgggcgtgtcacgtcgtgatctggaccgtccgtcgggtgattgacgttggcccccgtctttggctgatacgcgacgaaaaatatcagatcataatcctcgtgcttgtttgggtcgctgtcgatgctgctgatgttaaggtgggtgttgctttggctgttcgtggcataattggtcatgttttcaaatatgtttga

SEQ ID NO: 28136 - DNA, 453 bp, Oryza sativa
  Clone ID: PAT_MRT4530_32764C.1
gtcattgagcagaagtaactaatcaacttcttgggaagagaaaaatacaagatttggtttcacaggtagatcccctgggcaaggttgatccagaagtggaagatttgcttttggagattgctgatgacttcattgattcggtgactgcatttgcgtgtacccttgcgaagcataggaaatcatcagtcctggaagccaaggatgtattgctgcacctagaaaaaaattggcacttatctgttcctggtttcttaagggaggacaagaatccgcaaagacatcctgtaaaggtatcagtggaccctcaacaaccagaatgtgatgcttctggtattagaagcacaggacataaattggtattaacaattcagttgccaaccataaaacaagacctccggttactgagcctttaccaatgcccacaatggggcctttgtcaaaagtggcccgttt

SEQ ID NO: 28137 - DNA, 371 bp, Oryza sativa
  Clone ID: PAT_MRT4530_32765C.1
gtacacacttagttttttttcttttggacatggtcgcacaaaaacattgcctctcctagatcaaaattatttatccctatgccagtggttttggcaatacgatatttccaaaccggcattatttatcactcaaccatagacttcggcaccggtgtgtctccccaattcgcctatgggaaacagttgccaaccattctactcaccttgtccggtgatacttgtccactcgccggtatcatgaaacatcatacttgcacttacttctggcactgctttctaattccatatgcactcaccatcaattcgggtgggtccacatgctatttttgactccaatacctggctttggaaacgctgatgtaggaagggtc

SEQ ID NO: 28138 - DNA, 450 bp, Oryza sativa
  Clone ID: PAT_MRT4530_32766C.1
atgttgaggtcaaatatgctaccgttgcttgcccgaggccgaggacgccaccgctcccgctacctggcaaggccaaggccgctgcacatcgaggtcgtcgccaccagtgccaacgccgttgcctctcccgccacccgacgaggccgagaggccgcgcctctcctgcttctcaacgaggctgatgtttctgctcgccagtcggggctaccaccgcaattgttgccgctcgcactatcgtacggctacggcttctcccgcgtcgggccgaacgccattcccatgccgcccacacaaaataagttcactttaggtcccttaagttgtccccgattctgttcccatgctgtccacactattgggctatatcattacgagtaccgatttgactacttggttatgaaggaaagctttcatccaggcggctacggttcgattgccaccttccactaa

SEQ ID NO: 28139 - DNA, 323 bp, Oryza sativa
  unsure (1)..(323): unsure at all n locations
  Clone ID: PAT_MRT4530_32767C.1
cggacgngtggtgnaacanttctttggattgttgaccatgtatactccaatagttcacacattccaattttccaagaaaccaggcattagtggtgataattgttaagcatagccaatatacttgantatcagatctgtcatggcaatatggcatagataattgantaaatgatcaactccattatctggtgttcgaatagatttatgttcctggagcatatattcggtgtctttcatatagcattggtcgagtaatatactaccaagagaagatgacagaatggaagagtgtacagagatttatgaaatgggcagctagatca

SEQ ID NO: 28140 - DNA, 225 bp, Oryza sativa
  Clone ID: PAT_MRT4530_32768C.1
atggaatcatccgaaattccgaacttcttcagagacgtgacataccggtgcagggtaatccgcacttttgggaagagaaagccagggcaggacaggcatctccgtagcaaaaaagtgaacctaatctgcagccctgagatgatcccagaaatgatggagtacttgaaaatagtcctaccactggtggagaagtgctttttagtcccggttcgtaaccccctatag

SEQ ID NO: 28141 - DNA, 474 bp, Oryza sativa
  Clone ID: PAT_MRT4530_32769C.1
atggctggagaggtggcatcatctgtctcgttctggaactcaaaggttatgttgcctctgtataactgtatcgagcaaagatcttacttggatacttggatggcccctttccatgtgtcaaaactgaaatacattttgtctaactcattttctgatattagtttctggcccatttctggtgacttgaggtcagccttagtcaatggtgaggaccgggactatgctcagggaggagcagaggtgactagagtcaggattcttggaggtcaacttcagtcaacggtggggatcgggactaaactcaaggaggagttgaggtccagactattaagtatatcgggtgacgaagttggatacgagatggtacacggtggatggataccgtgtaggagagatattcgcaacgggcttcacgaggtagcgatgcagcggctcggttggatacagaccgtgtcgccctggagggcaaggtag

SEQ ID NO: 28142 - DNA, 1897 bp, Oryza sativa
  Clone ID: PAT_MRT4530_3276C.1
ccttcaatccaatggagtgtgccctgcatttgcactcttaaaaacagagctcgtagtaccatttccatttgtgctctattatcttcactaccccaatcaataagccctacattacagaagagccaaagctcggcggtcagaggagcttttcgttcgtgtcaaacaaatcccataaaagaagaggtaagcctatttgtcttgagtcttgacagcgtctcatcgcagctgcttgtctacattttacagtgggagttcttccccgtcgacttatcagttatcacccttgattctcttatggctcctgtgtatgaaacataatcttaactcccacatagaatgagataaatatgaaggcaaggacaggaagggcatccttcccaagcattcgtgacatgagaagtttaatgccggagggtcctacaacataaccgacaaggtttgccaccataaggcagcttattgtcacagcaccagcaattgcacttaactcccggtgaatgaacaacccaagggcacttcttggctggaacttgttggatagagacttgaccaatatttcagggacgaaaaataagcatgttaaccatgcccatgaaataagtttccattccaggtcatgccaaactgctacaaacgtgaataccacccagatactaagtagttttctttgagcacccccaagaggaatgtacagatacctgaccaaccatctgttaaaagaagcatgccagcttttccagaaactctccagatcatgacaattatttatacaccttggcatattttcaggcgtctcaactcctcctaccagtgaccaaaacctgaagtagcgccaaatcaggaagaatttcaaccacataaagttcagcaccccataactaatgatgaagatctcaaatggcgataattgctgccataatcggctaactacaaaggcgttgtagtggaaaaaatgtgtcatagcttccataagaaggaaacttaggatccacctcaccccataccaagatatttgtgcaactgaataatttttctggggtgcatctaactgggctgcaaatgcattgtagcttacaataggtccagcgatgtagagtggagcatatgtcaagtagcataaatatgttagtaatgtgtatttgtcaccaatgagcgctctctccataaacaaaggtaaataagatacactaatgtcaagactcaagacctgcaaagcaaagtagcatgttttgccagaataacaaacttggcatcgctgcatatgcttattgtgcacatccacaaacatatgctcgattgacaaatatgctacctctaataccttcactatggagtagttaatcaatgctattaggagaatgaaactaacacaagcaccatgtagatagcataaataggtgacagacaggagaagccacaccaaagaggcccctcttcccttcaagctgtagcagtagcgaagcatattcgccaacatcagaaatgcacccatcacaatggtaagaacaggtaagttcccccggaaatttctccattgtgcatcggacaagtcgttcagatggccagcgagtgagcctgctcgtaggccgtacaacctcccagagtaatcatgagagaggcgaagcgacttccggatcacgacgaggtagaaccccagcgcgtaggcgcagagcgcggcgagctccagccgcctccacgacatgctgagaattgagtttggcaagtgaagatctctccgcccctgataccaacgatgagggagcgtgatccgcccggcgagcggcggatccgccgccttctccgacctaaaataaccggatgcggagaaggccaagcgaagaggatgaggtgtgacggggccgcggcgaggattccaccggaggcggcggagacgacg

SEQ ID NO: 28143 - DNA, 403 bp, Oryza sativa
  Clone ID: PAT_MRT4530_32770C.1
attctagcgcacccgcaacagcggccatgtgcttgtatatatgtatttatacgctcgcacgtacctaagtacgtacgctatacatatgcaatctgagatcgctgcgccacacattatgtacggttggattaatacatttattgtaatatatctgtctgataccgccatctgtctgatgatcacttccatgcgtaccgcttcctcacgcgctatttgcgtggtggcgggaattagacacgcttatcttgatccctgggatcaccccatattgctccgcgtgcccgtggcgctgaagtgtcaaagtgcaagtatatacaaattacaaatcattagtctagatatatatgtatgtctgatctgttggtttgcagtactcatgcacggtggcctgaacccctatccc

SEQ ID NO: 28144 - DNA, 2877 bp, Oryza sativa
  unsure (1)..(2877): unsure at all n locations
  Clone ID: PAT_MRT4530_32771C.1
ttttttttttttttttttttttttttttttttttttttttaacncccaaatctaaatcattattcataaatacgatccattgatatgcaaactgttctggagttttcaagtcgccatatttgaaacaagaataatttttttttttttttttttagaaaaaaaatacattttattaggctgtcttttctgctatgagaaccaacgggtcgccctaggatctacataatcacagctatttcaatgatagttgtggccgaagctgtaaaatacacggcaccataatttcatgaccaccaaaacaccattgaaaaaataaatggaaaagaaagcttaacaaaaaactaatatacacactgatggcaccaggccagggcatgtcaaccttcccagaacgaattttcttagagcacctgcatgagctggcttctgcgaattctaccaattttatgattcaggaagtgcaggttgatgaggttctcttgttaaactcatcttcactggcagttagcgaagcaatcgatgcaagccagggcaggcaattcatatcagtcgaatgtctggcgttatgtttcttcatgtttcttcgttgtcatcatccctaatgtcttctatttcttctcggcagtacaatgcatttaactcttgctgcaactgtacatgctttagcttagctgcaatcagttcatcagtcaaagtaatcattctagattgcaattctgaaattttaacaagtaacgaccgttctttttcagaattaactgatccaaccattgtgtcactatccgtatttcggagttgtggggatattccagacaatactccatcaactttctcattctgttgcaagctacttaacacattcattatcagatcctgctgaaacatagtttgtttcacaaggttctcaaggtggggaattaaaattgatgatgatacggagctattgcagagttccttcacatgatgactgttagacattggcttagtgttcaccaaccaatcaccaacgctagcagatttttttagtggtgaagcctgtggtgatttgcgggagaggctactcaatggaacttcctgaaccttagcaagatcaacattctcagatgtcacggaaaaccgtcctttaatctccaccacgttacgtttagacttgtcgcccaaagaatctacatatcctcctgaagatcgaataggagctgacagactgtttgcagaagcacgagttggcagtgacaatggaccactaagatttgttgctcttctcgtttcagtcctaagtttatcagatgccaattgaacagttgcatccctttcaacaccatggcccttttcagttgttgagctattaaccccaccagaatggacagctggagtgccagaagtttgttgtttctgtccagaagtacttctccaatattttgactctggatcttgctttgatgtagagggtgatgagctattctctgatctagcgttttcatacccattgggcataattttagtatcaacgttgttttcaccaaaatcaaaagcttcaaatgaaaaatcgccttttccatccgaatttgctgcagtggtagaggtccgtccacagaaagctgcaacttcatctgaaaagtttggtcccaccatggagagtgcctcctgctcagaagaaggcattttcttcaaggccaactgtgctgcatctttaagctggagagcctttacacggtcccatagaggaggtaaatcagttaagatacccttcattgtcaattctggaggttttgcatttttgaaaaatgaatgctttagcaacttctcagctgttggtctctttgtttgatcttttaccaagcacattgcaaccatctccttaaatgactttgagaatcttcggtctcgatcatagttgagactagtttgtatatacaggaagatcatgtgtatagaccagatcgatattgtatacgatagtaacgcatacatgaatattctatatgtatacagataacgcatgcatggatattgtatatttattctagcgcacccgcaacagcggccatgtgcttgtatatatgtatttatacgctcgcacgtacctaagtacgtacgctatacatatgcaatctgagatcgctgcgccacacattatgtacggttggattaatacatttattgtaatatatctgtctgataccgccatctgtctgatgatcacttccatgcgtaccgcttcctcacgcgctacatatgtagatagagtttaagagtggaatcgcctatttgcgtggtggcgggaattagacacgcttatcttgatccctgggatcaccccatagtgctccgcgtggccgtggcgggtggcctgaacccctatcccgtggctgtccttcagtactgtttggctgcttcacacttacgcccaatcgggagcccctttgtgtagatgggagcgtcttgagtcctgggatctccccggattgatacccattgcgggtcttgacagccacgacgtcgttcctggggacgaacagcgcgcggttctggtgcggcgtgcgcccagtacccgcccccctccatgtgctggtgcgccgtgggcgatgtcaccgccccggactccgccggctcccgattacgacctgagcttcacgctcccgttcctccccacactatgcccgttcgagctggcaggcgagccctcaccactccgcccccccccctccctatcgccggtgcttctaccgctttccgccgccccaaccgcctgcggcgccaagcggcccgttgacccgcgcccacctatggggcagcgaggagagagagagagagagaggcagcgagaggctggggatggagagaaagagacaccatgtggacgcgtgggtgccgacg

SEQ ID NO: 28145 - DNA, 410 bp, Oryza sativa
  Clone ID: PAT_MRT4530_32772C.1
ttttctccatcgcgccgggctacttaaatgcaaggctgctgctgctgcatataacttcacgcatgtagagttttgcctagaccgccacacagaacaaggatcaatatcgccaagaagcttgaactttgggcatctcaacattgcaagaatgatacttgcggagctgcgaatcctattgaattgcacacaccatggtgggtggcaatcgggagactagaaccatgaatcgatgatacgaaggatggctaggagctgtatcacccatagcaggggaggagatgtttgatcacacgattttgattgagatgtgcctcgcacacttgccagtgatggtgctgagaagagcaatggactggatcgactgtgaaatgcttactgcggcttgtggcctttgtctgcaacaagagcct

SEQ ID NO: 28146 - DNA, 3344 bp, Oryza sativa
  unsure (1)..(3344): unsure at all n locations
  Clone ID: PAT_MRT4530_32773C.1
ngtcatgtttctcttgttaatttcttgagatcctgacaatctgttatcagagcctctcttgcttctcaaattctcttgattctgcggtgaaattgttccttggggtggattggagctgatcttcggatcggcaccgcgaaaaggaaacttgccccctaaggttcgcggaattcggagcgagagcagtaggtacctgatccagatccgaggccatggagactgataagaagttggacctccttctgcaacttgtggaagggaatgagaagaaacgagttgaggctgatgagcgcaccagggcggagtaccaagatctcaagcgtacggtggagtcacggattcctgccgtggagaagagggtggatgaactgggagccgcgttccaggagttgaatctcaaggtggacaagctcgagagtaagatgatgcaagctgccaagaaatctggtggctgtggtggtactatggaaattagtggtagtgttcccccaatgatatgcccacaattcagtggtgataatcctcagatgtggaaggccaactgtgaacagtactttgatgtatatggaattcatccagcaaattgggttaaaattgccaccctgaatttctcgggaaatgctgcattttggttacagtcagtgaggtctcagatggcaggaatttcttggtatgggttgtgtgaagctgtttgtgctagattcgctaaggacaagcatcaggccctcattagacaatggattcacttaaatcagactggtactgtagctgagtatgtggagaagtttgatggtttaatgcaccaactgatggcatatgactcctccctgattccagtatactttattaccaagttcgttgaagggctcagagatgaaattagggtggtggtaatggtccaaagaccccaggatcttgatacagcttgtgctattgctctgttgcaggaagaggcaattgaagggattaaatcaccagctcctaaaagatcagactcagtacttggaattaagggcagtagacccatcagtaattacagtaatccgctcaatacaaagtccagcaataccagtgctgaagacaggagaggtatagaggcagctagagccagagatgaaaaattggctgctctgaggtcctatagaagagctaagggtctgtgctttacatgtggagaaagatggggcaaggaacataaatgtgccagttctatacagttacatgtggtggaggaattattggaagctctaactgttaattcagaagctgaccctgattccagtcctgaagatagtgagatccaacagcagggagtcttactggccatttcacagcaagcagtttggggaactgagtccacaagatctatcaaactcaggggttgggttcaggatatggaattactaatgttggtggactctggtagcacacactcatttattgataaggaagtaggtctgaagttatcaggaattcagaaactaaaacaacctctcattgttaggattgctgatggaggaactatgagttgcacacatgaaattactaactgcaaatggtggatgcaggggtatcagttctgcaacaatttcagaatgttgcccttgggaaactatgatatcatccttggaatggattggcttgaatctatcagccctatgcaggttgattgggcaaacaagtggatggaattcaatcatcaaggtgccagcatcagggtacaaggactgctgtccactcctgtgcaatgttcacctgttacatgccatcaattgaatggaatgagtagaaggggatcactcagttacctggttcaactgcagcctataactagacaggaagatattaacattccagaccaggtacaacacattattcaggattataaggagatttttcaggaacctgagggattaccaccaaggagaacatgtgaccatataattacccttgtcccaggagctaaaccaatcaacctcagaccctatagacacaacccagctctcaaggatgaaattgagaagcagatttctgacatgctcagttctggtgtcatacagcatagccaaagtccctttgcttctcctgcaatacttgtcaaaaagaaaaatggcacatggaggttagtcattgattacaggcagctcaatgccataactgtgaaaaccaaatatcctgttcctgtgatagaggaattacttgacgaactcactggtgctcagtggtttaccaaactagatctctggtctgggtaccaccaaatcaggatggcggccggagaagagtacaaaactgcttttcagactcactcaggacactatgagtataaggtgatgtcctttggattgactggggctccagccacatttctcaaagctatgaatgacactctgaagtcagtactcaggaagtttgtcttggtgttctttgatgatattctcatctacagtaaagatttttctagccacctggatcacatcagacaagtgctgcaacttctgaaggaacatcagtggagagttaaaatcagtaaatgttcatttgcacaacagcagctatcttaccttggccatattataggagtacatggtgtttccactgatccctctaaaatacaggatgtattagattgggctgtacctgtgtcagttaagaaattgaggggttttctgggattggcaggctattacagaaagtttgtaaagaactttggaatcattagtaaacctctcacacagatgctgaggaagggaatcccatatgtctggtcacatgaagctgacaaggctttcaacaccctcaaacaagcattagcctcagctccagtttttgcccttccagattttcagaaaactttcacagtggagactgatgccagtgaatgtgggataggagctgtattatctcaagataagcatcctatagcttacattagcagagccctagggcccagaactattggactttctacatatgaaaaggaatgtatggctattttattggcaattgatcattggcgatcttatttacagcatgaacaagccatatgggaggatctggaagatttgaagatgcgtttccctggagccttggcttggggacaagccaaatttcatggggaggggattgtcaggaacctgcctgtcactatgggtactgaagaaggagaacctgatgaagcagaagctgaacagggagagaaggaacctgaagaaggagaacctgatgaagcagaagctgaagtccaggaggaggagatacagactactactccaggaagagcaagacccacaagagggccaaagcccaatcctcgttaccatgggtccgagtgggttgcgtag

SEQ ID NO: 28147 - DNA, 2499 bp, Oryza sativa
  Clone ID: PAT_MRT4530_32774C.1
gaagaggcaattgaagggattaaatcaccagctcctaaaagatcagactcagtacttggaattaagggcagtagacccatcagtaattacagtaatccgctcaatacaaagtccagcaataccagtgctgaagacaggagaggtatagaggcagctagagccagagatgaaaaattggctgctctgaggtcctatagaagagctaagggtctgtgctttacatgtggagaaagatggggcaaggaacataaatgtgccagttctatacagttacatgtggtggaggaattattggaagctctaactgttaattcagaagctgaccctgattccagtcctgaagatagtgagatccaacagcagggagtcttactggccatttcacagcaagcagtttggggaactgagtccacaagatctatcaaactcaggggttgggttcaggatatggaattactaatgttggtggactctggtagcacacactcatttattgataaggaagtaggtctgaagttatcaggaattcagaaactaaaacaacctctcattgttaggattgctgatggaggaactatgagttgcacacatgaaattactaactgcaaatggtggatgcaggggtatcagttctgcaacaatttcagaatgttgcccttgggaaactatgatatcgtccttggaatggattggcttgaatctatcagccctatgcaggttgattgggcaaacaagtggatggaattcaatcatcaacgtgccagcatcaggcctataactagacaggaagatattaacattccagaccaggtacaacacattattcaggattataaggagatttttcaggaacctgagggattaccaccaaggagaacatgtgaccatataattacccttgtcccaggagctaaaccaatcaacctcagaccctatagacacaacccagctctcaaggatgaaattgagaagcagatttctgacatgctcagttctggtgtcatacagcatagccaaagtccctttgcttctcctgcaatacttgtcaaaaagaaaaatggcacatggaggttagtcattgattacaggcagctcaatgccataactgtgaaaaccaaatatcctgttcctgtgatagaggaattacttgacgaactcactggtgctcagtggtttaccaaactagatctctggtctgggtaccaccaaatcaggatggcggccggagaagagtacaaaactgcttttcagactcactcaggacactatgagtataaggtgatgtcctttggattgactggggctccagccacatttctcaaagctatgaatgacactctgaagtcagtactcaggaagtttgtcttggtgttctttgatgatattctcatctacagtaaagatttttctagccacctggatcacatcagacaagtgctgcaacttctgaaggaacatcagtggagagttaaaatcagtaaatgttcatttgcacaacagcagctatcttaccttggccatattataggagtacatggtgtttccactgatccctctaaaatacaggatgtattagattgggctgtacctgtgtcagttaagaaattgaggggttttctgggattggcaggctattacagaaagtttgtaaagaactttggaatcattagtaaacctctcacacagatgctgaggaagggaatcccatatgtctggtcacatgaagctgacaaggctttcaacaccctcaaacaagcattagcctcagctccagtttttgcccttccagattttcagaaaactttcacagtggagactgatgccagtgaatgtgggataggagctgtattatctcaagataagcatcctatagcttacattagcagagccctagggcccagaactattggactttctacatatgaaaaggaatgtatggctattttattggcaattgatcattggcgatcttatttacagcatgaacaagccatatgggaggatctggaagatttgaagatgcgtttccctggagccttggcttggggacaagccaaatttcatggggaggggattgtcaggaacctgcctgtcactatgggtactgaagaaggagaacctgatgaagcagaagctgaacagggagagaaggaacctgaagaaggagaacctgatgaagcagaagctgaagtccaggagaggagatacagactactactccaggaagagcaagacccacaagagggccaaagcccaatcctcgttaccatgggtccgagtgggttgcgtagcccagctatctgttgtacagctggctactgtgtgtgtcgtatcctgacaatctactactccatccatggcagtgccagtgccacggggctggcgctggatatgatcgtgaagctgttggaagaaggctctgtccaatcgtatcaccccctcactgatggcctccctcacgtcctcgcgagtgctctcgtgaacttctgcgagcgttaa

SEQ ID NO: 28148 - DNA, 1869 bp, Oryza sativa
  Clone ID: PAT_MRT4530_32775C.1
cggggtttccatctccatttccttcatcagaggttgttctgctcagtcagaggcatcctttgccaaaaacatttatctgcttcaatggcaacttcttggtctgttgctttcactatcttcttctcctgtattctcctgcttgaaaccatctcttcttcagtagcatctcttgattgctcatatggttcagctcaagtgaagatactgtccagctcggtggtcagtgagcagcaaaatgtgtacctcttcttgaagccgtttcagagcacgagatcatgcagcgcgaggcggctcgccggcgaattcgtcaatggcgtcgtcgtgcccaacctgcggctcaacgtcaccggcgtcgtggtcacggccaacgagcggcagctcggcgcgctgcgctgcacgctggagtcggttcaggcggagctcgccgtcgccggattgggtcggagcgtcaaggtctcgccggagctctcgctgccttctctgcgagccatggcgaagtgccgccgccgcggcgagaagcattggcgcagagtcatggagttcgtgaggaggtcaggctcgtttgtcgtggtggagatgggtgcagaagagaaggcagacctcgccgtcgccgatgtcgccgccgcgttcgaggagggcgtcggcgtggcgttccgtatcagcggccgcgcggctcggagcgcggcggaaatggcgaggctgatcggcgatgcggataaggggaggaggtggacgggtgttcttgcggaggttgcgtctccctctccccggcgggagctcgccgcggcggcaaggacgacggcgcgcgacgtgttcgcgccggtgactaacccgacgacgacgccggcgacgaacccggtgacggtgcccgcgacgaacccggcgatgaacccggtgacgccgggcatcgtcaccgtgccgtcgaccaacccggccacgggatactccaacaaccccaacctcccgccgctgtacccggagccgacgccggtgacgatgcccgacccgacgacgacgacgacgccgacgccattcatgaacccggtcaccgcgccgaccatgccatccccggtgaccaaccccgccacgacgccggccgtcacaaacccaacgacgatgccttacccgtacccgccgcagcaaggcggcgtcatgccgacgactccgacttaccagccgccggcgacgatgccggcggcgggcgggcagacgtggtgcgtggcgaaggcggggctgatggacgcggcgctgcagagcgggctggactacgcgtgcggcatgggcggggccgactgcacggcgatccagcccatgggggcctgctacaacccaaacaccctgcaggcccacgcctcctacgccttcaactcctacttccagaggaacccctcgccggcgagctgcgacttcggcggcgccggcatgctcgtcaacatcaacccaacgtgcatcactgacagaatcacactgaatgattcttgcaggttcaggaacttgcttgtttcaggcatcatcagcagggatttaaacgtttgcagctacggcgcgggatacagcccgggggtgacggggacagtgccggtgggcggcggcgcgggcgccggcgccggggtcggcgtcggcgtgacgccgatgggaccggcggtgggcggcaccggaggcgccggagtgacgccgatgggaccggcggtgggcggcggatcggggtcgacggtgctcaacgccaacagccccggcgggaactcgatgtacggctccgacagtaacccgacgagcctcaccggcgccgccgccgccgcgctgtcatccggctgggtcctgtgccttgtctggatattcacctttgcatatgtcaaggagaaagtgtag

SEQ ID NO: 28149 - DNA, 410 bp, Oryza sativa
  Clone ID: PAT_MRT4530_32776C.1
aagttggacctccttctgcaacttgtggaagggaatgagaagaaacgagttgaggctgatgagcgcaccagggcggagtaccaagatctcaagcgtacggtggagtcacggattcctgccgtggagaagagggtggatgaactgggagccgcgttccaggagttgaatctcaaggtggacaagctcgagagtaagatgatgcaagctgccaaggtggagatcgggacaggaagtcagctcaaagaggaacaaactaatggtatgggtgggagcacacaaacccacccctctggtatgaaatctggtggctgtggtggtactatggaaattagtggtagtgttcccccaatgatatgcccacaattcagtggtgataatcctcagatgtggaaggccaactggggtgcagg

SEQ ID NO: 28150 - DNA, 528 bp, Oryza sativa
  Clone ID: PAT_MRT4530_32777C.1
atggacctcgtcggcgccatggcctcgctcgtcttccttcaccttctgtgtgcggggtggcggatgctgaggatgtggacggcggcggggtggccgtggccgtacctggcggcggggaccctggatcaggcgctgcgaccacagtgcaagctgtgtaaacagaagatgatggccggcgccgtggtccgcgcgctctcctgcgaccacgtcttccacaaggcctgcgtcgacgagcgcctccgcaaccgcaagcacggcatgagatgcagaatatgcaaccgtgtcgcccgctgcatgctgccgtggaaggcgtcgccggcgaacctgatagaccacaacgctcagaggtttcagcacatccgtgctcgcggcggcgtcaggacactggaccgggcgctgaacgacgcatgcccgatctgccagcacaggatggtggcccgcgacgatgtccgcacgctctccggtgggcatgacttccatgaggattgcgacatcgcgaagtggctccgcgacaacaagaaggcctga

SEQ ID NO: 28151 - DNA, 584 bp, Oryza sativa
  unsure (1)..(584): unsure at all n locations
  Clone ID: PAT_MRT4530_32778C.1
ttgccatctacccgacctatggagccgtcgccttcaagacaacatttcacaccggggggggctttccctcccttccgcccctaaccccattcccacatgcaacgaccccactggtccaccgcccataactaaatagggttccccttccccatccccttccctcccttcccccttccgagcccccccttccggacccccggcccgacacgcccccagaccgaaccccttccggggccccccccccgattatatgggccttngncatttgacccccccctaacttgagagcccccctggacacccgcccaccccacgccaccgtttttcccttgaccccccccagaccttccactagaacccacncngntggccccccctagaacgttataccgttggccgggaccccccacagtagccccgnacccccgttcccgacactccccttgggggccgcacgtaccccgcccggctcccacaagccgcacgctgccccgatgctncnggccgacctagctggtcccgcacgataaacgactngctaggccgcccccaccatactacactaggccccccgagcctcctta

SEQ ID NO: 28152 - DNA, 465 bp, Oryza sativa
  Clone ID: PAT_MRT4530_32779C.1
aactgtggtcgcggcgcgtcgccaccatgctgccatggctggtgctcccgctcattctcctctgggcgcccgccgctccgcccgccttcgcgaggagcgccgcgcccacgccctccagctccacaagctccgcaagaccgccacccgtcgctgccgcaactgcaacaacccctaccgcgaccagaaccccggcggcggcaagttcatgtgctcctactgcggccatgactccaagcgccccgtcctagacctcggccctgccgggaccctccccaccggctggccctgctccctggattggcccaatgctgccggtgaccctgcctactggctcgaccttcgctgctcctccgataacctggtctcggggttctcggggagcttgttctacttcttctgcgtcagcatgaggcggttctggagggaagcgctcagatttggctccttgggggacggcgatggctt

SEQ ID NO: 28153 - DNA, 675 bp, Oryza sativa
  Clone ID: PAT_MRT4530_3277C.1
cggaattcccgggtcgacccacgcgtccggctcaatgtgcctcccggccgatggctcaccgcgccgttcaacctgaccagccacatgacgctatttcttgccgagggctcagaaatccttggcattccggacgagaggtattggccgctcatgcctgcattgccgtcttatgggtatggcagggagaggaaaggacctcgctttggaagtctcattcatggacaaaatttgaaagatgtagtcattacaggacacaacggtagcataaatggacagggtgaagtttggtggatgaagcatcgcagaaggatactgaataatacaagacctcctcttttgcagctgatgtggtccaaggacattattgttgcaaatataacattgaagaattcacctttctggcacttccacccatatgattgcacgaatataactgtttctaatgttactatcttagctcctatttctagtgctccaaacacagatggcatagatccagattcttgtcaggatgtgcttattgagaattgctacatttcagttggtgatgatgccatagcggtaaagagtgggtggggatcaatatgggattgcatatgggcgcccatctcgtaacattgtgatacgcaatgtaatggctcgttcattggtcagtgctggaatttaattggcagt

SEQ ID NO: 28154 - DNA, 326 bp, Oryza sativa
  Clone ID: PAT_MRT4530_32780C.1
accacgcgcgttttttttttggctagcaaagtcttttgcttgttgttcattttaaatatcttgcagggctttactgcccccccacttttccttgctttgtcacgcacaccaaagctcctgccttacccaatctccgttcgccttccctgacccccgttgtagtggcatcagctggctgctctcctgtcgcgtttcctctgctgaattgggacgatcttggcagctcgtaaatccgggtggaatggataagatctgtggagaatagcatgagatctttgatatgaacttcagccctcccaaccagtttccgtcggggacggagccgt

SEQ ID NO: 28155 - DNA, 453 bp, Oryza sativa
  Clone ID: PAT_MRT4530_32781C.1
ggaccgaagatatcaactagcatagcctgatggcggacaattgaccatggaacggataccacggtgccacataatactagtataatactatacacacatacagagcgagagactctactgagccgacatctaacaaagagcaacctaactttcataatctgtaggaaagaccactatgcaagcttgacatgaagctttactggccaggaggaccaacaggaacaccctgagcagaccgtatgttcttgctgccttatcactcatcagagaggctgtctcgacttccggatactgatattgtacttaagctcaaactcggtgatgtactactgtgtctacgccagcgcttcatgcatgcgagcgagcacctactaaaggccgtccttgatgcgatgcaccgtaagcacgactcccatgatggtggcttcaaccaggacgccaccaaccatggtg

SEQ ID NO: 28156 - DNA, 273 bp, Oryza sativa
  Clone ID: PAT_MRT4530_32782C.1
atggcgatggcagcagcagcaacggccaacgagcctttgtctgagacactgtgtgtgcgtgtgctcccaaaaaaacccagccgaattgttgggaggcatcccattggctcccgcacaaaagccgtcgccaccagcagcagcttgggaggaagggagcgaggaaaaggaccggacaagggacacccctacgaccaactttacggcgagtacaactgtttatccacagtgagctccggactccggtgggtgaccgtccattgcaaagtggagtag

SEQ ID NO: 28157 - DNA, 250 bp, Oryza sativa
  Clone ID: PAT_MRT4530_32783C.1
ccacaagcggacgacgggagcatatcgcttgagccagatgtcaaggagcataatattcgctgggcagagattggtggtcaagcgccaggccacaattgataatgactgcaaaggggaggacagtgtatagtacgcgtacgcactgccttctcgcctactttgatcgtgacaacgttgctctcaagggattcgcaaattcttcaaagaatccagcgatgaggaaggacacgcaagactataagccaacatg

SEQ ID NO: 28158 - DNA, 236 bp, Oryza sativa
  unsure (1)..(236): unsure at all n locations
  Clone ID: PAT_MRT4530_32784C.1
cccatcaccctctccctccaccacactacacccctctccactctcacgcaggcaatcagcggcgaggcaccattctcttctccgtcaatntcntccactttcttttttctccaccactccacggcccgcttcntctcgcgcgtctccttctcgtccccttctacaccgacccaccttctcgtctgctgcgcccagaatcatgactactcctacttttcccgccgtgcgacttctct

SEQ ID NO: 28159 - DNA, 2633 bp, Oryza sativa
  Clone ID: PAT_MRT4530_32785C.1
gtgctcgaccgggtgcgggagccgcgggacggcaaggcgtgcaggctcgtgagccgcgccttcgcccgcgccgaggccgcgcaccgccgcgcgctgcgggtgtccgccgcgagcccctggcgcgcctcctccgcgcgttccgggcgctggagcggctcgacctctccgcctgcgcgtccctcgacgacgcgtccctcgccgccgcgctctccggcgcggatctcgccggggtgcgccgggtctgcctcgccccgcgccagcggcgtcgggtggcgcggcctcgacgcgctcgtggcggcgtgcccgaggctggaggccgtcgacctgtcgcatgcgtcggcgccggcgaccgcgaggccgccgcgctggccgcggcgacggggctgagggaattgagcctcgagaagtgcctcggcgtcacggacatggggctcgccaaggtggtggtcgggtgcccgaggctggagaagctgagcctcaagtggtgccgcgagatctccgacatcggcatcgatttgctctccaagaagtgccacgagctccggagcctcgacatctcctacctcaagttagcactaggaatgatatgcgacagcacggcgacaaataaggccgtaaagtgtgacttggatagttcgttgtgggttgattttgacatggaaaatgtacagtcatcggagcttgggcttactgattggttaattctggttggaaatgaatcccttagatcaatatcctcacttgagaaacttgaggagttggcaatggtttgttgctcatgcatagatgatgatggcctggaattactaggcaaggggagcaactcactgcagagcgttgatgtttcaagatgtgatcatgtaacctcccagggattagcttcactcatagatggtcacaattttctccagaagttaaatgctgctgatagtttgcatgagatgagacagtcgtttctgtccaacttggcaaaactgaaggataccttgacagtgcttagacttgatggtcttgaagtctcatcctctgttcttctggccattggtggttgtaataacttggtcgagattggccttagcaaatgcaatggcgttacagatgaaggaatctcttcacttgtaactcaatgcagccacttaagggttattgatctcacatgctgtaacctccttaccaacaatgcccttgattcaatagctgagaactgtaagatggttgaacatctccgtttggaatcctgttcttccataagcgaaaagggactggagcagattgcaacctcctgccccaatctaaaggagatagacctcactgactgtggagtgaatgatgcagcattgcagcacttggccaagtgctctgaactgcttgtactgaaattaggcctgtgctcaagtatttctgacaaaggtcttgcttttatcagttcaagctgtggaaagctgattgagcttgatctctatcgctgcaattctattaccgatgatgggctggcagctttagctaatggctgcaagaagattaagatgctaaacctatgctactgcaacaagattaccgacactggtttgggccacctaggctctctagaggagctcacaaaccttgaactgaggtgcttggtccgtataacaggtattggaatctcatcagttgccatcggctgcaagaacctgatagagatagacttgaagcgttgctattctgtcgatgatgctggcttgtgggctcttgcccgatatgcactaaaccttagacagcttactatatcatactgccaagtcactggcctgggcctgtgtcacctgttaagctccctgaggtgcctccaggatgttaagatggtacacctctcatgggtctctatagaagggttcgagatggcactgagagcggcttgcgggaggctgaagaaactgaagatgctgagtgggctgaagtctgtgctgtctcctgagctgctccagatgctgcaggcctgcggctgccgcatccgttgggtcaacaagcctcttgtctacaaggactaaacctgctctcatatcatcatctgtgcagtgttaatatcctcggatgaggatggtgtctgctcttccccagtgcaatatcctgtcgtgctgtgatcgcctagaccaatagtggtaattttcatatccaagatgtactgacgatggacattcggcattgcaacagtgcaatccttatgtttgtcagctcctagaccaatgttgtcatcatcagattaaaatccaacatttgctaacatcaggcatcgaaacagtaatgttaagagcaagtgatccttgttgcagatgtccattaaatgctactccatttcaactgatatatgcaaagaacaatggcatgtttgcctttgtcattgctccaactccaggcttgctgaccgctgcatcttttagagtttaagggcagctttagatcgcagtaaaactcttcctatgagtggtgacccgtcctctgggacactggtttcatggttgtctgtattgtatgactggtggacccgtccttttttttttaccttgattacaataatctcgatgtactcattcaggcagagatttgaagtaatgtactgaatcagtttttatatgtcaaaaaaaaaaaaaaaa

SEQ ID NO: 28160 - DNA, 2639 bp, Oryza sativa
  Clone ID: PAT_MRT4530_32786C.1
gacgacggcgccaacactctggtgccccaaaaaggaaccatttctggaataagtttttccaggggtctacttgcgaaataagttttttaaaagggccaaaatgtgaaaacggccatcgtgagcgccgtgctgagctcgctggcgccgacgctctacgcgctcgcgcgcgacaggtacagccttgaggagaacgtccggcgagacgtccagtccgtgaaggccgagcttgacatgatgctcgccgccatccaagtccacgccgccagccacggatccggacccgtcgttcaggcggtgtgggtcgacaaggcgcgccgcctggctcaccagatggaggactgcgtcgaccgcttcgtctacgaccagctcaccgccgcccacggctcctcgcggcacgcagcaccgctcggctcgcgtccgacgtcagggcgctcagggaggagtcggcccggctgtatgagctcaagaccaagtacgccggccccatggccccggtgccagctctccgacgtaacctcgtcggcatggaggctccccggagggagctgctggagctggtggaggaggaggaggaggaggaggaagccgagggcggcaagaagcggcggcagaaggtgatctccatcgtcgggttcggtggcctagggaagaccgcgctcgccaagcaagtgtacgacgacgtcggcggcgggcagttcagcccgatggtttgggttagcgcggcggagaagaccgccgaggaggttctcgaggagatactgattaagaagtttgggtcgcaggttagggatgacgacgacgacatggccgacgttgagcatctaagcttgcgtctcagaacacacttgcgtaacaagagtttacaattttcctcttttcttggtttcttttcttgtaggtattttattgtgattgatgacatgagggaagaactgtggtgtgatacagagcatgctttccctgcggacgacggtgtcagcagcaggatagtggtgaccacgaatatccagtccatagctaatgcatgcagcactgcagaaggttatgtgtacaaaatgggaaaactcaacactgaatattcaaaaggtttgttcttccaaagtgcttctattgaggattgatcaccagacatggagagaggttcagaacaacttcggaagaaatgcgatggtctacctctagctctgatctgcaaccttggtcaccatctggaaaacaagagcaacagcaatgccctggcaagaatgcaaagggtactaaccaggagctacacctgcctgtctggtgatgctgccaaagcatgcctgctatatcttggcatgtttccaggtaaccattcgatcaggaggaagaggttgttgaggcgatggttggctgaagggcttgtcaagagacagcctcacccccggctcggtgacagtgcagtcgagagcttcaagatgctcatggaccagaatatcgtccagcccgtcgatgtgagcaacaacgaaggggtgaagacatgccaactgcctgggatgatgctcgagttcatcatgcacaggtccatatcagagggtttcatcaccatattccgcggcgaggatgagatgctcctgctgcctgatcagtacgccgtccgttgtctctctgtccaatgtcgtagcaccgctgctgcaaatatcggacttgagagaaatgatctctctcttctccggtctctcacggtctctggtgaagtatgccaagattttttggacttcaaggagtacaaactgctgcaagtcttggatctggaagaatgtgacggcttgatggatggccatctcgatggcatatgcaagctgttactgctcaagtatctgagcattgggggagctgttaccacacttccaaagatgattggtagactaaaatttttggagacatttgatgtcaggagaactaaggtagaggtggtgataatgccagccgaagtactcgtgcttcctaaattagttcatctctttggaaagtttgaactttcaggcagtatagagaacggcaatgatccaaatgatgcgcgttctctgtcagtggatttcagtgaatgctccgaagacatcctgcaaatttctcctcgaggagattgcaaccttaggtccctgaaactctacggcgaactgcaaaaaatccccaagtttttcgcttcgctattagctctcagagaattgtacctttcatcaactactatccgaggggatgtcctaacagccctgagtgagttaagatacttggtttatctcaaacttatcgcagaaaaccttgaggattttatgataaaatatggggcattccaaagcctgcaaaggctatgctttgtgattcaacgtctgactcttcctggaatccaggagggagctctgccacagcttgtctccctccaattgatctatgaaaatcttgctaatgtttgtttgatcaacattggaggcatcaaacgtcttaaagaagtgatgcttgattctagtaaatttcacattgcaccatatattttgaccaaagtttcacaatgggcaagggccaaaccaaccttttcacttaacaccacgtatctttgcactagttggcactttggactagggttgagcacattaaaagaagtaatgaataaaaataaa

SEQ ID NO: 28161 - DNA, 414 bp, Oryza sativa
  Clone ID: PAT_MRT4530_32787C.1
atgcttatgcaacaactattgcttgagctcgaggttgttatgaacgccaggaacaagccacgagagaagatagagcagagcagggtgtatgcactgattgtgctcctgctggcatggactactccggtgaagaaaacagtgatggcggtgaagacgatggaagcggaggataagagcagcggtgctgctagggccttggagattaccgacctcagcgacattcataggaacgtgatggcgacaatgtggttcagctcgggttccattgcgacagcgaccatcgtggttgattggaattattttgtgtaccaactggcgacggcaaaaagcaggcgtccacatgcggacagcctcgccgccggctgctccccgcgcgaaaacggcagccggcaacctcctctacggttccgctag

SEQ ID NO: 28162 - DNA, 339 bp, Oryza sativa
  Clone ID: PAT_MRT4530_32788C.1
tcaggagtcaggacagccggggaggttgtcaaccaaaatctccgacttctcgtcctcgtctgccttcagccgcagcttcatgcatcgaaaaccattgattccgcagaagtaatcacagatctgccacacgacaaatctcacaagagcgatatgggcgaaccctctccatatcattctagctccgctcctgatcctcggcaggccgttgccgccgatgaagcgccaccgttcccacgaccctttggggtgcatccctttgtcccttgtcgccgccacggccatgtgcacgtcgtccggccaggcgaccagcccttccccgagcttctccagcctctgcat

SEQ ID NO: 28163 - DNA, 530 bp, Oryza sativa
  Clone ID: PAT_MRT4530_32789C.1
ttcgctaatccccctcctcaatctctcctcctgttttgtcctatcgccgccggtgcgcgctggcaaatctgcatgccaagccgcgatgccatgccatggcaaggccaggatgggtctgaatttgtcgtgtcatatccactcgagtcgcgagttggccggacgccgaggagagtagccgcggatctgactgcatgacgcggtcagcgggcctggattcctacgaaaggagccgcctttgatctataatcggaggaatatgaaggattaaataccttaacaactgccaaggcaccattgttctctacggtgcagaagcgagcctaaagtgccgctcattttggtttataatcggattagtctttgttcagctgatctgcgcaatccaataccgagtcgtgaaggaacatgctgatgatgcattctatgaattgcagaatccccaacagcaaattcaggcctatgcctttgatgtggtcctggccctagttccaagaatgaatcttgatgacctttttgagtaaaagatgatg

SEQ ID NO: 28164 - DNA, 1853 bp, Oryza sativa
  Clone ID: PAT_MRT4530_3278C.1
ctcctttcttccacttcactcgaaaggctccctccacttataaaccccaccaccaactcctccaatggcggaaatccccgaccctgcgccccttgcctccgccccaatccgcggaatccgagctcgccgcgtcctgccctaccgatcgatctgagcctcgccgcgcgccgtgccctagatcgggagatctcgcctccggcatcggggacagcgcaatggtggagacgtccggcggcggcgggaggctccacccccacggccagcggcggagcgtggccgcgttcctcgcggccaacaagacgctgctcgccgccgcgtgggtcatcgggttcacgctggtgttcctgtggcagagcgccaaggtatcggtcggcggcggcggcgggggcggcgggttcctcaggctgcggtcggcgccgccgccgccgccgtcgcgcccggcgccgctgctgcgccccaaggcgtacgaactgacggattttggcggcgtcggggacgggcgggcggtgaacaccgaggcgttcgagcgcgccgtcaaggccatcgcggcgctcgcggagcgtggcggagggcagctcaatgtgcctcccggccgatggctcaccgcgccgttcaacctgaccagccacatgacgctatttcttgccgagggctcagaaatccttggcattccgtcttttcgtgaagttcaaaaattagttcttttgagtggttttgatcgggacgagaggtattggccgctcatgcctgcattgccgtcttatgggtatggcagggagaggaaaggacctcgctttggaagtctcattcatggacaaaatttgaaagatgtagtcattacaggacacaacggtagcataaatggacagggtgaagtttggtggatgaagcatcgcagaaggatactgaataatacaagacctcctcttttgcagctgatgtggtccaaggacattattgttgcaaatataacattgaagaattcacctttctggcacttccacccatatgattgcacgaatataactgtttctaatgttactatcttagctcctatttctagtgctccaaacacagatggcatagatccagattcttgtcaggatgtgcttattgagaattgctacatttcagttggtgatgatgccatagcggtaaagagtgggtgggatcaatatgggattgcatatgggcgcccatctcgtaacattgtgatacgcaatgtaatggctcgttcattggtcagtgctggaatttcaattggcagtgagatgtctggtgggattgcaaatgttacagtggaggatgtccgcatttgggagtcacggcgaggtttgagaataaagactgccataggaagagggggctacatccgcgatatctcctatcgcaacataaccttcgacaatgtccgtgctggtattgtgataaaggttgactacaatgagcacgctgatgatgggtatgaccgggatgcctttccagacatcacaaacatatcattcaaggaaatacatgggcgaggtgtccgggtgccagtccgtgctcatggcagcagtgacattcccatcaaggacatcagctttcaggacatgtctatcggcatcagctacaagaagaaacatattttccagtgttccttcattgaggggcgtgtcatcgggtcagtgtttccaaaaccatgcgagaatttggatctctacaatgagcaagggcagcttgttaagcgtgcagcaatgtggaagctgcatggttacatgacaaggagttcaggagtgaaagctgtgaacaagagatcaatcatgaagcaaggttggacagagcttgaggaagtggtgaactttcttttctga

SEQ ID NO: 28165 - DNA, 2345 bp, Oryza sativa
  Clone ID: PAT_MRT4530_32790C.1
tttttcttcttcttcttcccagccgccatggcggctcctcctccttcctcctgcggtgctcttcgacgattcaacccagccgccatggagagcggagggaggtagctgactagctggggctggggatttccggcgaacggaggtgaggttggtgccgctccggccgctacttccgcgacccaaagaatcggcaagtccatagataccggacctccgcgaatgccccgcggccatagacgccgccgccgctgcgcatgcgccaccaccacctcgccgtcgccgccgcgaggtcccacgcctccctcctcaagtccggcgtcgccgcccccacgccctggaaccagctcctcaccgcctactcccgctcctcccccgatggcctcgccgccgcgcgccgggtgttcgacgaggtgccccgccgcgacgaggtctcctggaacgcgctcctcgccgcgcaagccgcgtccggcgcgcacccggaagcatggcgcctcctccgggccatgcacgcgcaggggctcgcttccaacacgttcgccctcggctcggccctccgctccgccgccgtagcgcggcgtcctgccatcggcgcccaactgcagtcgctcgctttgaaatccggccttgccaacaatgtgttcgcggcaagtgcattacttgatgtgtatgctaaatgtggccgcgtgagggatgcccgacaggtgtttgatggaatgccagagcggaacactgtttcttggaatgcactcattgccgggtatactgaatctggggacatggcatctgcactggagctgtttcttgagatggaaagagaaggtttggctccagatgaagcaacatttgcgtcgctgctcacagcagttgagggcccaagctgtttcttgatgcaccagttgcatgggaagattgtgaagtatggatctgcgttagggctgacagtgttgaatgcagcaatcactgcatattcacaatgtgggtccctgaaagactctagaaggatctttgatggaattggggacattagggatttgatctcatggaatgcgatgcttggagcttacactcacaatggaatggacgacgaggcgatgaaattctttgttaggatgatgcaagagagtggagttcatcctgacatgtatagtttcacaagtatcataagttcatgttcagagcatgggcatgatgatcatcaagggagagtaattcatgggttggtgatcaagagtgctctggaaggagtcacgcctgtttgtaatgctctgattgccatgtacactaggtacaatgagaattgcatgatggaagatgcatacaagtgttttaactctttggtgcttaaggacacagtgtcctggaattctatgctgactggatattcacagcacggtttgagtgccgatgccttgaagttcttcagatgtatgtgttcggaaaatgttagaaccgatgagtatgcattttctgcggctctgcggtcctcttctgaacttgctgtgcttcagttaggtaaacaaatacatggtttagtcatccattctggttttgcttccaatgattttgtttccagctcgctaatcttcatgtactctaagagtggcattattgacgatgcacggaaatcttttgaggaggcagataagagtagttcagtgccttggaatgctatgatatttggttatgcacaacatggacaagctgaaaacgtagacatacttttcaatgagatgctgcaacgtaaggctcctttggatcacataacgtttgttggcctaattacttcctgcagtcatgctggtcttgtagatgaagggtcagagattctcaatacaatggaaactaagtatggagttcctcttcgaatggagcactatgcatgtggtgttgatctgtatgggagggctggacagcttgataaagcaaaaaagctaattgattctatgccatttgaaccagatgccatggtatggatgaccctattgggtgcttgcagaatccatgggaatgtggaactagcaagcgatgtggccagccatctatttgtggcagaacctagacagcactctacctatgttctcctgtccagcatgtattctggtcttgggatgtggagtgatagggcaacagtgcagagggtaatgaagaaacgaggattaagcaaagtccctgggtggagctggattgaggtgaagaatgaggtgcattctttcaatgcagaggataaatcacacccaaagatggatgagatctatgagatgttaagggtgttgcttcaagtagagcagatgctttctaattgtgaagatgaagatattctcatgataacttccagtggcatatga

SEQ ID NO: 28166 - DNA, 504 bp, Oryza sativa
  Clone ID: PAT_MRT4530_32791C.1
atggggatgttggcgctgaggcgtctcatggcggcgcagcgagatcgtcgccgtcgtcgcaaggcccaagcccgtaatggagtaattacttccatggctaaacgaaagggcgccttcctccaaggggatgatacttctcagggtggtaaaagattgagatattcagagccatacctcacggaggacatttggcgccatatacattccctaatgccgctgcgagatgctgcccgtgctgcctgtatatctcaagcatttcttcgttcctggagacgctatcctaacctcatcttaacagcgggcacattgggcttggaactgagaaaaaattggaaggttcatatggcaagagtcttttgctctgaagcatttggatctcagcgattgcagagagatggtgtatctgaagataccatgttcgctggagcaactcagctacctggatgtgtcctcgtgccgtctgcaaatgatagagagcaaagctccgaacctgtccagtcttag

SEQ ID NO: 28167 - DNA, 782 bp, Oryza sativa
  Clone ID: PAT_MRT4530_32792C.1
ctatccctatttaaactctttatgtgatgtcctattaacagtatagaatcgttaactagctatagtttaaatttatctttttgttgcaagttaaagaattcgaattttaacttatatatatgtggagccacatataaatctttttatcagctacacaatggtgatagggtaattagtggtgatgcgatttaaaggcacatatcaccacttattatagtctttttggctctcctatagcttgttctttaacgttagatgaatgccaaataagtgatattccccagatttctcaattagaaaataatgctttattacaagatttttctaagaaggaaattaaatatgtgatttttcaaatggaacataataaagccccgagtctgaatggattcccatctgagttttatcaggttttctggaatgttattaagcacgatttggttgatttgtgtaatgattttcatagtggtaatttatctctttactctcttaactttggtactattattttactgctcaagtgcaaataggctttgaaaattcaacaatatagatccatttgtttacttaatgtcagtttcaaaattcttttactaaagttgctacaaatagaatttctggagtggcttagaaggttattagtcccacacagacagcttttatacctgggaggaatattatggagggggttgttaatcttcatgaaaggatacatgaattgcacccaaaaaaagatattattttggttttttctattgacggggcggcacattacccgcccg

SEQ ID NO: 28168 - DNA, 517 bp, Oryza sativa
  Clone ID: PAT_MRT4530_32793C.1
atctgagttcctctttggccgcttcgccgccgaccacgccgccatcgccatcgccatttcaggagtcaaagtcgaagtcgccgccgcagcctgcttcttccgcccgccgccgttcccctcatcctcccactgcttctcccgcccgccgctgttcccctcgtcctcccactgcttctcccgcccgacgccgcccgcgggccgccgccgctcggccgccgccgacgtctcaatgccggccgctgatgacgtctcgatgccaggcgctgggtggtgtgggtggtggtggtgcgagaggaacggcaagcggccgccgcttcagctccagcccacggtcgccgccgcagctccagccgccgccgctcgctccccgcggacggctgtaggggagagggagcaagaaagagagaagggaggggaggaagaagaaagggagaagatggcgtgtggggcccacatgtcagtgggccccataattgtgtgtgtgaatgacaaatgggtcccacgtataacattttaa

SEQ ID NO: 28169 - DNA, 216 bp, Oryza sativa
  Clone ID: PAT_MRT4530_32794C.1
atggtcgcttatattttatgtgtgggcttggtcgctgaaaggataggatgtatattaggtcgagaaaatagtaaagctccaaccactatacgcatcaaggtgtgggggtgccaggagcagcacttcgaccttaggtttggttttgccaggctttacaaccaacggttcgacgtcggggcgagtagacgcgaacggacgtcaccatggaaggcgtaa

SEQ ID NO: 28170 - DNA, 194 bp, Oryza sativa
  Clone ID: PAT_MRT4530_32795C.1
atcactggatagcaattaagctcgggaaattattattgaatggatcagaagtacctaaaaaaaaacagtgaatcccaaaacatgtctactgttcagaaatcagtcaggagggccactgtaaacatggtttttgctttatgcttagactttagttaatcagcaagtcctccaatttttcattttttatataaaat

SEQ ID NO: 28171 - DNA, 1314 bp, Oryza sativa
  unsure (1)..(1314): unsure at all n locations
  Clone ID: PAT_MRT4530_32796C.1
gcacgaggggccggtgacgggatggccggggcgcaggcgctcgtcgccgtgccgtcgtcgtcgggcgcgtgcgcgggccggacatacaacatctccgggtacgcgctcggcgagccggggccgatcgcgttcccggcgtcggacctcgccgccgagctcggcgccgacggccgcgtcagggtgttcggcacgctgagcctcgccgcctacggcggcgccggcgtgctgaaccaggtgtggcaggtcggccccgccgtcaccggcggcgtccccgcgccgcacgccatgggcggcgccaacctcgccgccaaggcgaagctagacctactaacacaaaccaccaccgccgcctcctcctccgacgccatcaccaagaagcgcaacatccatggattgctcaacgccgtgagctggggaatcctgctgcccatgggagcgatcttggcgaggtatctcaagaccttcagatcggcggacccggcatggttctacctccatgtgagctgccagctgatcggctatggcgtcggcgtcgccggctgggccaccggcatcaacctcggcaacatgtccaatgggatcacctacactctccaccgcaacatcggcatcattgtctttgctcttggcaccctgcaaatttttgcgctgttcttgaggcccaagaaggagaacaagtacagggtctactggaacatgtaccaccactccgtcggctacacggtgatcatactggggatcaccaacatcttcaaggggatgaccatccttggcgtcgagcagcggtggaagacggcctacgtcgccgtcctctgcctcctcggcgtcgccgccatcatccttgaggtcgtcacatggggcatggtggtgaagaggcgcaatgccgagagcaagaccttcaacagcgcctccaatggccacctgcctcgccatgtgtgattttttttgaagttcttttttggggcttttgtttgtgctgtgacagtgttcattgtggtgtgtactgtagcatatcatagattttcggtcttgtgagttttttggcctgcatatctttttaccatgagcgttatgcatttgtagtacattagagtgaagattgagtgtgtagtgaccagttgcagtgagtatgtttgggtttacatggctaatcccattagatagcttttgagttgagggattttattgtttttggagaggtacagagatgtaccccaaatttttagtattaatttatggtatatttacactaagtgacttcaggatttcagagataccnaaaaaaaaaaaaaaaaaaaaaaaaaaaaaaaaaaa

SEQ ID NO: 28172 - DNA, 189 bp, Oryza sativa
  Clone ID: PAT_MRT4530_32797C.1
atggcgcggggggagctcggcggtgcgcttgcagggttcggggcggccctctccgtcgatctgtcactattgcgttcagaggcggggcggaacggtgacgacgatgaggaggaagagtcgctcgttgatggtgatcctttcattccctctggcctctgcaagtctgcgtcttggcttcggacggcatag

SEQ ID NO: 28173 - DNA, 187 bp, Oryza sativa
  Clone ID: PAT_MRT4530_32798C.1
aggcaggccccaggagaagacaccggggggggttagattatgataggacgaaactcatacagacccgctggcttaccccataactgaaacaacagtggaaaacaattgcctacacaggaactgacaagacccactcaggcacaactgaaacatggtactgacaggaagggccgaggaaacactgacg

SEQ ID NO: 28174 - DNA, 561 bp, Oryza sativa
  Clone ID: PAT_MRT4530_32799C.1
cgccgcgacggcgtgcatgctgggtgggcctcggtggccatgcggacggggcggcgcgacagcaggagagctactacggcgtggtggagcagtacatccccaaccacaacgacagcgtgtccaccgtgtctgtcgaggttcgcggccatcggggtggacacggagggagcggtggcgctgctgggcgcgcactcggtggggcgcgtccactgcttcaacctggtggggaggctgtacccgcaggtggacggcagcatggaggcggcgtacggggagtacctgcgggggaggtgcccgacggctgcggcgacggaggacacgagagaggtggtgtacgcgcgcaacgaccgcgtcacgcccatgctcatcgacaacatgtactaccgcaacctgctcgccgggcgggggctcctcctggtggaccagcagctggcctccgacgcccgcacggcgccctacgtccgccggatggccgccgacaacgactacttccaccagcgcttcgccgcagcgcttctcaccatgtccgagaacgcgccgctcaccggcgcacagggggag

SEQ ID NO: 28175 - DNA, 422 bp, Oryza sativa
  Clone ID: PAT_MRT4530_3279C.1
actaggcgtccgcctatgtgttcgatcgagtaccgtccatggccgctccatcggctgccggcgtctacatctccggccttggacatggcgacaaggcctgctcggtgctacccccctattaagagcaatgcgcgccaaaagccaaagcactgcaccagcgcggccggctgcatgacgcgcatgtatgaaccagccacgccgacgacgggcgcggatgacctgccctaatggatacaatatgcgagaagcatgacggagacggtctccccagcaactacaggccgctggagccttagcttgaaagtgcctacaccacacaatgatcgccaggaagcattccccctaagggacatggcacacccgcttcatgaccttgggagaaacacgatactctgaggtgctggcgctgagaggcttcaacc

SEQ ID NO: 28176 - DNA, 259 bp, Oryza sativa
  Clone ID: PAT_MRT4530_327C.1
tacgtccacacgtgagacaccacacatgaactgagagctgaacacgcgagccagcgtacatcacacgatcaatctaagccgcgggcactctgatgcagccgtgcaatctcgccggtcgggcctcgtccgccgcgctgtcatcgtgcacacctttgcacgtggccagagcatttgctgtctacaccggtgcatccggcaggatcacaagctgcgtgcagatcgacatccggtaggccgctaacaagtgcgcagatgacgt

SEQ ID NO: 28177 - DNA, 1627 bp, Oryza sativa
  Clone ID: PAT_MRT4530_32800C.1
ccggccggccgggacacaattagctttgttttattagtatatacaaaagctatgactatttccgttttctctcgattttctatatacttttgtgttcttctcttgtgcaatggatctatggcccaactatttgatccagccacaaaccaatggcaaactcatcgacaaggaagctttagggagtgtagatttgagagactacaagcatttgagcctcttcagaatgtgaggtcggaagctggtgtgaccgagtactttgatgagacgaatgaattgtttcagtgcacaggtacatttgtcatccgacgtgttattcaacctcaaggccttctaatacctcgatacgccaatactcctggcatggtctacatcatccaaggaagaggttctatgggtctaaccttccctggatgccccgcaacttaccagcagcaatcccaacagtttttgtttcaaggcgaaagtcagagccaaaagtttatagatgagcaccaaaagattcatcaatttagccaatgcgtatcccatcttactggaagaggcttcgaagacattcaagaacaccatgggtagacagagtatggtccattccctcccagatgacacaacaacaactcctacccagaattctcgaatgaatctaaaggcgagacttcagagtaatgtaactaagatctaatattaggaaagcaaaataaaggggtaattggatccaaataaataaaaaaaataagtattgagccactaagtgaggctttaaacatcaacacagtaacaacaaagaggctacaaagccaaaatgaccaaagaggagagatcatacatgtaaagaatggccttcaattgctgaaaccaactttgacacaacgacaagaacaagaacaagctcaataccaagaagtccaatatagtgaaaaaccacaaacatcttcccgatggaacggtttagaggagaacttgtgcacaatcaagacgaggttaaacattgaaaatccaagtcgtgctgattcatacgatccacgtgctggaaggatcacaagtcttgatagtcagaaattccctatccttaatatcatccaaatgagtgctactagagtaaatctataccagaatgctattctcacaccattctggaatgtaaatgctcatagtttgatgtatgtgattcgagggcgtgctcgagtccaagtcgtcagtaactttggaaagactgtgttcgacggtgttcttcgtccagaacaactattgattattccacaaaactatgttgtcttaaagaaagcacaacatgaaggatgccaatatattgcaatcaacacaaacgctaatgccttcgtgagccaccttgcaggggtagactcagtattccatgccttaccagttgatgttatcgctaatgcgtattgcatctcaagggaagaggctcgaagactcaagaacaacaggggagacgagtatggtccattccctcctagattacaacaacaaatctacccagaattctcgaatgaatctaaaggcgagacttcagagtaatgtaactaagatctaatattaggaaagcaaaataaaggggtaattggatccatgtcattgcaaaaatgtcgattaagataattttcattac

SEQ ID NO: 28178 - DNA, 985 bp, Oryza sativa
  Clone ID: PAT_MRT4530_32801C.1
atggctgagaagaccctccgtgagttcgttgctccctccgctgacaatgtgcccattgggccgcacgtcaacttaggagatggcgactttgacttgaagactagcctcattatgatggcacaggcaagctcattctatggcatgccggtgctcatcttcaacagttcttggatatctgtagcacgagcacgattaaaggcgtcagcccagacaccggcaggcttagactgtttccgttttccctctatgggaaagcaaagcagtgattttatgccaaccgtgcaaagatagacacttggaactaatgctctacggcattcctatcaaagttctttccgatggaatcctgggaaaggctgcaagagtacgttgccgcctgtcctcatcatgggatggacgactggctgatcctgccgagtttttacaatggactcaccccctcgtcccgggaccatttggacgcgtctgctggagtagccttcttctcaaagacgatcagaggagccgtcgacttaattgagaagatggtctcgaacatgggctggagcaaagaacgactccagacccgtggcatgcataccatcaaggagatggaaatcctagctgcaaaactggacttcctaatgaagcgcttggacgactaggaaaagaacaagctgaggcacagtcaaggccttggactcgtacatcacgtgtgaggtctgcgagaatgcaggtcattccgggacagactgtctcgagacccgtgaggaggaagcaatgttcatgaataacaatagatattgtccgcaaggaggccacaggtggaaccagccctgcctgttctaccaaggaggcaatggcaacaacggtaattttaataatcaacctcccttgaaagatcttgtttttgcccaagctaaaactactgatgctttaagcaagaagctaactgtcaataagataatcactgaaatagttccaccaaactaacaatatataatat

SEQ ID NO: 28179 - DNA, 493 bp, Oryza sativa
  Clone ID: PAT_MRT4530_32802C.1
cgcgctcaacaattaccccaaacggtcgctcttacatcatcgaggtccactgctctactgcatggacccacgtcaacctggggacaatgcgcacagacggcccagcactgggcgcggtgcgcagagccatagctgcggcgaagcaggagatgaacggaggaggggaggtagaatattgggaggagtgggtcactgtattcgggaatgaggtggctgagcttggaatttgatggctgagcttggaatgaggtggctcgtgttagtgtagttgaacttccagccgtcatccccttttggtacttccgaacttggtggtgtatgtgcctgctattgtatggtgtttgtggctgctagaacttggtgctactgctgttgcttcaggttggcgcttttgtatggaacatgttggaaactaaattctggaacttgcttttgtatgggctggaaaattaattatggctggaatgtgatttaaaaaaaaaaaaaaaaaaaa

SEQ ID NO: 28180 - DNA, 424 bp, Oryza sativa
  Clone ID: PAT_MRT4530_32803C.1
ttgaaacattttttacatttatattttttaaaaaaatataatttatctgttatatgctttataaaatattttttattgatgtttttaatataaatcatctttcatatactacataagatatttttttgtgttattatccctcgtataagcatatttttttcccattatataccacatacaaaatttttttctaaaatctaaatatactagaaaaaattaaagcatgtatacttgtgtaacgaggccacataaaaattttcatatttttttgaaacttctaattagataaatcaaatgttaatcttgtatgtatctaaggtttttttgcgtatttttgaaaagaatgcccagtccaatagcatattgtagaacaattaataaagtcaccggtatattatagaaagagacaatatcggaggcaaat

SEQ ID NO: 28181 - DNA, 461 bp, Oryza sativa
  unsure (1)..(461): unsure at all n locations
  Clone ID: PAT_MRT4530_32804C.1
cagttgtccatgcccccatctttttcaccaccgtctctcctcttcctcctcccctaggtacagtcccccccggtttgcaatttccgtcatctccgtcgtccaaagttggaaggaaaggtggtggtggccatgcagcacccccagggtncnggcgacccgccgtatgggtncgtccccgcgccgccgaccatggccgccgcgttcgacctgcctccggtgaccacgncggcgcccgcgctccaagtgacgtcctgctgccgacgcagccgaagtgtcgggtcccgaagaattcccgctgccgccgtnaacttcaacgacgacgacaatgatgatggtcgacgacgtgtgtggccggcgggttcggcgggancgggagaacggaaacggttgccgcgggaggagangtttgngttataaagatccgtttgagaattgaagccgctttcgaaaagcaacttaaa

SEQ ID NO: 28182 - DNA, 371 bp, Oryza sativa
  unsure (1)..(371): unsure at all n locations
  Clone ID: PAT_MRT4530_32805C.1
ccaactcaactcccctccccttcgcttcccttcccttctctcctctcctctcctctcctcttctcccccccaaatnggccgccgcctcctctccccctctcctcctacccttccccgcggcggcggcgagaggcggcgcggtgcgtcccctnccctngnccgnantctgctggtgctggtgctgggctgccgttgggggagncgggagatccgtccgggcccggggttncgtttcctncttctgntnggtctcaanctgttgtaatactatccatcancagcaatgaataccccagaaaagaaacccactgtggctatacttntagaagannantnnaacaagaggacaagaattcttttttggaattgat

SEQ ID NO: 28183 - DNA, 2061 bp, Oryza sativa
  Clone ID: PAT_MRT4530_32806C.1
ctactgaacaagaaccatttgatgtctcactgcctgcatgcgctgcagataatcatttcagctttacaaaatcccacagcctcagatcatctcagagcagctgcatggatggatatatatgtcatcccgtaaacatatatagagttggtaacatcctagtagctactagcttgcttaaggtatagatagtcagctaatgtgcgctacatatataatatatacaaaacgaaaactttcgtcatcatactatatatgctaaggttctccatctgtgagtttctctcctagattggtgccgctgacctgtgttttgccgcgatttagtattgattctttaacctccctgtatttcttcagctcctcaagggcgtcagttgccgtcaccggtgtagaacttgatgcgatgctgccatgttcctcagtcacgaccttctgaactgacgaaggttcttgaggaaccacagcagctgcatctgactgtaggccttctctgaggcttggtgcagtcttcagcagatgcacaagagcaccaatggctgcagctggagaccttgtggacgagccaccagcatcttggttcttctgttcctccctgtctgagatatcagccctgttaagctgatcaattatggtgtctctatcttcccatgcaaaaaccaattcatgttcatccagttcatccataataaaaagtttacttgatgtccgagtcaatttcagtccatgaaagtatcccaaatcatatttactgtaagataataccttttgcaaggccatgtccttttcaaattcacccaacctgactagatccttccttacatttgagttatgatcaggggaatgtgccaggttgtcattgtgagatgagaactggtgcttacccttcgaacatggagaaggaggcaacccgctacctcctcctccgcctgacttcaatgtgggaatagtaactggtgcactctcatatcggaacaaagggtttttagggtagttagctgaaggggattgggatggtgatggtgacaatggtggtgatggatagcattcttcaaatggtgtatatttcttctgcccagaggatgatgcattttgtggatgtgagcatgtttttagagaaacatgcagaggaacgcctagctgtgggcttccacgggattgtgccttagtgggagaaggagatggcgacactgacgttccagctccatgctcaatactccaactgtgcctcctggtcattgcagcacatgcaggtgcaatgccagctgaagggagggaattgaatttctttagaaagtcagttgtggggctcccaacgtaatccgttatgatctctggtggcattggtgatgtaggttctgaagctgccaccacctccaacactggcacataagaaactgacaagctcaatcggccaaacagagtttcaattggagcaaatgcatagtgtttcatctctgcatcctctgcccgggtgaatggctcaacaaatgaagatatcttgtgtgacaggttgagaggacggattctcccagatgagttcagttccctgaagagactgtatgctggcaagagcctgacgagcagatgcaatgaccggagtaacactgtcgatccctggtaggtagccctgtacaagctatgatcctcagccgagctgttcctagacttcctgccattgttcttgctgccattaccattgccaccgccagacttgcgagcttcatactgtatcacccacctctctattatcttcccactcccagcagctgtgttgctggtgctgtcccggcataagaggacaatgtcaatgaccaacggctcaaggttgctctgccgccacaggtcaaagttctcgagcacagccgggcagtcccggagcgcaaggttgaaccaccggtcgcgtggctggctcccggacagcggcgaggacggtggcgagggccgcgtgaagttgcgcgacgactcgtacggagagcgcgactccagtatgatgtggaggctcttggcgaaaaactcggtgatcacttgctccaccatgggtggctccgcggcagcagccat

SEQ ID NO: 28184 - DNA, 894 bp, Oryza sativa
  Clone ID: PAT_MRT4530_32807C.1
atgacttctaggcggtcgacggccccaatgtcgtcgagggcctcgggaagctggaggcatcatgacggcctctatgaggagcaggacgctcggatcaacatcgagcgacgcagggacgagcgccgtgttgcccgcatgggagagggcgcctcctcatccggagtgcagcgttcctccacgcgaggcggcccgccccccacgttcaccctggagggaccggttgtagggctttcgtggcgagtcttcggaacgtccggtggcccccgaagtttcgccccaacctcacggagaagtatgacgacatggacatcgcccgcccaccccaagagtaacggccaagtcgagcgggccaatgccgaaatcctcaaaggcctcaagaccaagacgtacaatatcctaaagaagcacgaggattcttggctcgaggaactacccgcggtgctatgggcgaatcggactaccccgagccgcgccacgggggaaacgccttttttcctggtgtatggcgccgaggcggtcctacctttggagctttccctgcgttcgcctcgcgtcgcgctgtacgatgaggccaaccaggatgatctccgccgcgacgacctcgactatttggaagagcggagaaggcgcgcggccctgcgcacagcgcgctaccagcaagccctgcggcgctaccatcagcgccacatccgggcccgatcactacaagttggcgaccttgtcctacgccgcgtacagtcgcgcttagggctaagcaagctctcaccaatgtgggaagggccatacaaagtgatcggcgtcccccggctgggctccgttcggttaaccacgggggatggcacggagttgcctaacccctggaatgtcaagcatctccgccgcttctatccatag

SEQ ID NO: 28185 - DNA, 182 bp, Oryza sativa
  Clone ID: PAT_MRT4530_32808C.1
atgatgccaagagacatgtggattcaacggggtggtgtcggggagaaccctcgggcttcctggcacacctcaaggtctccagacgtggccgttctgcacgggctgggttatccggttgctgaagaagatgaagcggatcccgctgacgaggagttcttccaggagcaagccggctacgatga

SEQ ID NO: 28186 - DNA, 216 bp, Oryza sativa
  Clone ID: PAT_MRT4530_32809C.1
atgactgaccagcacccctgctttggtctccatggattcaatgccaactgcactgcaattgctgccggccccctgagacaatgtcaggcgcttgcagcattggacacaagcctctcctccttgcagctgcagccttcaaagcctgcacttgctgtctgccgcgagacggtgtctgccggccagcaccgtgacagtctccggctcaagtaccggtag

SEQ ID NO: 28187 - DNA, 1059 bp, Oryza sativa
  Clone ID: PAT_MRT4530_3280C.1
tcaggtcactagcaaagcagttgcctcaatgtctgcagctgcaatgatgaacaaggtgtggcccaggttgtatagttttgtaatgctgggttgctccccaacaattattgaaggctccttcggaagatgctcccatagatcagcatctgaggtagtcaatgaccacaatgcagtgatccggcgagcggggccagtgaacgccgcctccatcccgttcttcccgcggaaggcgacgggcacgccgtcgcacatgaccctcatgaccctccggcgcgtgcgccagccaccgcgatcgaagacggcgacggcggcgagcctgacctggacctccatggtaccaacgcccccgcccttgagcggcgcggcgtcgtcgggacccacgtatgcgccatccacctcgaggcggaaggcgagcgtggtgatgttccgcggcggctgcgcgaagggcgggagcgtggcgacggcgatgggggaggacggggcgagggagacggaggcgagcggggagaagtaggtgacggtgagcttggagtttgggttgtcggcgaggagggaggcgtcgaaggaggcggagagggaggagttggcggcggagtaggcgacgcgggagagggtgagggaggcgagggagaaggccgggacgcgggggcggaggaggagccagacgatgaaggtggcggcgccgaggaggaggaaggcggcgacgacgaggccgaggaggcggcggaggcaggtgggcggaggcgggtgaggcgggtaggggtggtggtgaggaggaggaggtggtgggtagtggtggtggtggtaggcgtgcggaggaggagggggcgggtgggagtgggagtggggcggcggcgcagggtaagggtaggcgacggcgaaggcggcggtgccgttggtggcggcggggggtggggcggcggaggcgaagtaggcggcgttggaggaggggggtgggggtgggtggttggctgggtagcccatggcgggcgcgggtggtggcggggacttggggttggggtgatcgggcgggtgggaggaggaggaggaggggtgcat

SEQ ID NO: 28188 - DNA, 595 bp, Oryza sativa
  Clone ID: PAT_MRT4530_32810C.1
tgagctcttctcactagctatagctagatcactactagctatagcagctagcttattaccactggtggccggcggcgatcaccggagatgacgatggccggcggtggcagtgcggcggcggcgaatgcgaagaagaagaagaagatgggggaggagaagctgatcataatgtcggagaaggtgaggttcatcgacatcctgtcgctgctgctcctccggcggccgatcaccagctaccacttcgtggacgccggcgacgcgaccgccgccgccgccggcgagctgggcagcacgccgggggagtggctggtcgccctcaccgagataatccagaaggcgctcgccgccgcatactacccggccaagtacctcggcgccgccgtcgagttcttcctcaacttcgtctccctcaacggcggcgtcatcggcatcctctggaacatcgtccgatttaaactggtgatcccactgaaccgggaggcgccaaacttccggtccatgatcgccatgatcgacgggaggacggagctgaagccgatgaagccggccgccaccgccggagtcgaggacgacgacttggagagcggcgggtgcg

SEQ ID NO: 28189 - DNA, 526 bp, Oryza sativa
  Clone ID: PAT_MRT4530_32811C.1
cagagaaatacgtacatattttcattacttgatcagaaccaagtcatgaagggagtaacacaaacctcaagccaagaatcagtaactttaaacaggtactctgatactattcacaacatcaaagaggttaccaacttggttgttgttgaggtgtggattaaatcaccctgaggaacataaaaagcttgtgcacatggtgctaatctgccaataatccagatttaaattaacaaagcggttcattttaaattaaggtgcacactgaaaacaaaatgaacatgttaccattctaaaagcaaacctcatagcaccagtaacacttcctcaatcgtcattgcaagacatgattactaattcaccttatctaaagcttttccataatcttcagtacacatccaataccaggtttcaatacaataatcatctacggagtactaactagcccaatttgcacaattaattcatgtagtatataaatacaataaatcatttaactatgtatttttcggttatattttttaaaaac

SEQ ID NO: 28190 - DNA, 400 bp, Oryza sativa
  Clone ID: PAT_MRT4530_32812C.1
acgcgtacgcttggaattcgaaatccacacgagcgcggttgctttggcggcggcgatggcgagcagcattgacgtggcgtcggccacctcgaggctcctcgctggccggcgggaacggcggcagcggcggcggcggggccagccgcgtgagcttcacggcgaacagggtcgggaggaggatggtggtggtccgcgcctaggacgaggccgtgtcgtcgctgatccacctcacggtgtaagaggacggccagcgcgcttctaggagggacgcgctgtataactggatggcagacctccctgggagccttgttctcggcggcgtcgccgcgttctctgaggctagcatgaacggctacttttctgacaaggatctctactactacgcgctggatttcatcat

SEQ ID NO: 28191 - DNA, 255 bp, Oryza sativa
  Clone ID: PAT_MRT4530_32813C.1
atgacggcggaagtgctagcatgcaagcgagctgctaaactggcgatggagatgggtacagataaagtgataattggaatagatagtttagaggtggtgaggacaattgtccaactcctcgaggacaggctgaagaggtttccagaaatcaagatcaaatgggtgcaacaatcagcgaataaagcttacccatttagtagcaaagaaaggacacttaacaggtgcaacatcgacttggttatcggtttcacatga

SEQ ID NO: 28192 - DNA, 5648 bp, Oryza sativa
  Clone ID: PAT_MRT4530_32814C.1
tttctttttatttcttaccatttgttcagatcacagaaatctcgcaaaggggggcttggctccatcctcagaggctcttgtagttacaagaaggcaaagcagaaacaagccgtgcaattggatgacaccgaggttcctgatagccagccaatggacattttctgagactgaacttgatacttgaaagaagactaaacaagcgctgcgatctcagctggaatgtaatcactatctggtggattgtcctcaatcagagattccactgatttttttatgaggcggtgtgcaactcttccaaaaaggataaatgtagcattggagctggcatcaccgccgatgagcactactttatatcttggatctggtattcctatgttagaacagcttgagcatttgtagctagaaccgtatggcttagaagttctatagcataatcggcatgaattgtaccaccaggaattttcgctgcatatcctcctaacagtgacattgacaatgaaacgtgtactcctgttcttgtgaggattgagggcaagtatttcttgaatagttttttcctctgcagtgtcctggttgtaacctgttgctgggttatcaacccagctcactggacgaaagtttgcactgaagctctctttgagttctagcacttcaggaatatcaaggtttagataccatttgcacggcgaactaccagtcactgtaagacctaatcctgtgtaatctttgacaagtgtcccaacaaagacaataacttgggcctgagtttggccagcattgtatacactattagcgtcaaaagcatcagccctttctccccagagtgtaacaggcattgttgaattgcttgcatcacatatctgtattgttctttttaagctatcagcattccttgacttcggccgcacaacggttggcgaaccaacctcagtgatgacacccatgacatctggttgcatgccatataagccaacatagaagatggtcttgtccactaaattggggatatcactgaatggtgtcaatgaaaaagttatgccagggaaatcagcagcgggctcaatgtattcttcaaatgttgtccatttactgaacacaatcattaggctattgtcgactggcctgtatgtcctattcgcatacctcacagtaaaggagtcaatatagtaaaccttttgttccttaagcaaaggcctcaggctgtcaattgcaggtggataaatctgagcgtgaatgctgtttcccatctgatcgagcagcacaagatcagtgtggaaaatattgccactgccgttgagatcgcagaaatcccataacctagaaactcttgcaaggatccttgtgtttaagtctccacaggacagctgtgaaatgagcacatgtgccatcttggacgtgcgggaaatcaccgcttggactgtagcgctgagcacttcagagtaaactatattttttgtctgtgtaccacatgatccatcatcattttcaattaatatttttagccctgatcggcttgttactcttgaaatagcaacgtataattgcccatgtgtaaagacaggcttcttaagatatacgccaacccgctggagtgtttgaccttggcttttattgatggtcattgaatagcaaactcgaacagggaactgccttctctgcagtgtaaaaggccatttcatctttgtggtgccaagtgtgattcgaggtatgtaaacagtttcaccaatgtttgatccagtcagtattatacactgtaaaattctgtctcctaaaactgtgactaatagccttgttccattgcataacccaattgattgattaagatttcgtagcaacattacgacaacaccttctttaagaacaagtttatgcgttggaaagttagtagcatttattgaattcagaaactctggggggtataacagatcgaaatctggaatttgctcagagctttttgatatggtatcacagcttaggtatactctagaatctcctggcactaaaccaataatataatcgtttatttcatcaaccgttgtattagtaggacaaacaattgcacgagaagccagatattcaatgtctctgtagcacgtaaggaaatctgagtaaacctcatgaacaatagcagctattttgtcaccgctagtcataacaagtaagtcatcgggaattgtgatccatgcaggataattctcaccttcctttgctgtcataggtaaagtgccattgcctatagctaaaacccattgactaaaatcatgcaattcttttttttgattgtctggtaacattggattgagtaatctcatgtttatattcaggctgagtagcgctacatgtttccatagttctgagtttgtgatagatgcattgattatagcctgacgggatcctttaggaataactgggagtatttgtttgaaatcaccacctaggacaataggctttcctccaaaaggtacaatagaatttgaagggcatgtctctgataaaatatctcgtaacgttcgatctaatgcttcaaagcatcgcctatgtgtcattggagcctcatcccatatgatcaatgcagtttcagctaaaagctcagcaagcattgtgcctcgttttatattacagatgcttgtttcatcaatgtcaattggtattttaaaccgagaatgagctgtcctacctctaggcaataggagagatgctacccctgatgaagcgacagcaagaacaatcttgttttgtgatctaagtttcgcaattattgtattccagagaaatgtcttgccagttccaccatgaccagacacaaaaaagaaaccaggttcattagcgatagcacgagaacaaatagtgctaaaaacagttatctggtcattattcaactgctgtacgaaagagtctgcatgcatagcaagcataagtgggtcaattgtgatttcttcatcgattaatctattagtaccaagaacatgtggaacagatgatggatgtggcaggttaaaatctttgatattaccaccgctatttgcaaatacagcaataagctcatgtagtagcatgttaagcaagtggtcatgtggaatcacacagtgtggattgtcaagggccttttttagcgtgccataaacaacaccatcgtatgtgcgaacatcagcatagctttgagcacctttgacaatcattaacaacattctaagatagtaaagctcgcccgcagttggatgcacataatatattctgccaattttaggagcaggtgttcgctcgtgccaagttttagatgatggctcccatgtccattccttaggaaactcacagtatgtcaatgaatgggccttagaattttttttgttagtttcaaaccattcagtaagcatagaccgttttgcaccaggactctcaaggactgcccgtaggtcagctcccttctcgtatctcacaaagtttttcccaggcagatggacaaccaatcgctcaacaggtggcactctataatgtatatcaaattcaaataatcgatgaagtgcctcataggttgagagaaatcttgcatccatgtattctaatatttcattgcgtggagcaaggtcatgatttggtgatgcattttgtgtttttcctgttgtttcaaaatagatcctagctcggtcatggccttttgtaatatatttaaataaatactttatcaaatttgatttgttacaccactcaacatttatgtgtgcctcatattttttcagtaaagccatgttgtagggtacaactgatctattgtctaaaaggatcccattcttcatgatagatcgtccatcatttcttcgtctatagattgtaaacccagattcatcaacaatggtttcatcttggaaatctttaggataatgttttgaacatttatcgtttttcatacaaggacacttcttgttcgcatcactgcaaggaccatgcatcataaactcgctaaccaattcatatcctagccggtcggtgtcatagtcaggtatctcagcacagataaacccatctattatagaggctgagacatcggcagtggcagcagcaagccaaactaagcaatgtatgtgtggaaggccacgcttctggaattcaacagtgtacaacactgcaagaactttaccaaaagttctgccttccctaatatcagttataaattcattaactttcatgttaaacacacgcacaataatatcagctctatcagatggttgttggccaggctcaaatcgaatcgcatctgcaatttcttgccatttggaatgacatgtgtatgtgacaaaaaggtcaggaggcccatagacacgacatattgccattgcatcttgataattcatgaccatatatcttcttcctccagtgaagctagcaggaagtatgacacgcttgccaactgaatctccatcagtgacacctttatcaatcgcatcaacaattccatctacagactcagagcgcaactctttttgatgatcgatgaagtattgtagcctatttgtttcaatagtagaaaatatatcaacatcgatttgatcgctcaagcgaccatagcatgtgaaaggatttggttcatttagtctgtaatgcatttcatatctataatattccggcatcgtgacatactttttgccaattccatcatagttactgtatttaatgcctaaatggaatccgcgttcaccatatggaaacaacaaaggatattgcaatgccatataagatggatgcaagggagaaatctggcacaggccacgacctttatcgtagacaagcacatcaaatttgtattctttcgcagaaaaatcacctactataatagcagctatttcactgttcgttggtaaattgtattgcacatcgtcttttgcattgcaacctaaaaggcgaagtgtcacttgctgattgccatgctgaataacacgttctctagcatacctaaagctctggacaagagtattttcagcatcaagcatcgatgatagggcacgaattatctcaggatctgctttatctgaattatcaccgtcgttttcaaatatatttaatcggttttgtaattcattttctggatcatacacatataattgcgcaaatttgggaggtgagccacaggatggcacaagagtaccaatcctatggtgcacaactccattgatcttgaatacataaggtgcatttccagtgttaatcgatttatcaatagctgcacccattgagctgaaagcaaacatcgaattatacgatcgtatttgcctcaaaaaatttttcgaacgtgcatcaccattatagttcaataatgatgctagtggctcaggaggggcacgcagttttggcaattgtatgcgtcctcctttgcaacatagattgtaaattatttttctttttgaaatagcagatgcactcttgaccctctcctggtaccagaacatggcaccacaatacgggcattcatacgtcggagggccatagtatgatctgtctgggtatgatgctgccacaaaagcggtgcacgtattcagaacagcggccgaaccctttagcaatcggatatactccttgtctgtccgggaggaactaccgttggctcgtgcagtgtgatttgcatccacattggccaaaggaacggacggatccat

SEQ ID NO: 28193 - DNA, 8405 bp, Oryza sativa
  Clone ID: PAT_MRT4530_32815C.1
ctaatgtgtatccttgatgaacttcttagcatttggatgtagaagcgcagaattttcccttttcttggctgtggctgaagtagctgaagttgcggctgataaattaatttcttctgcttgtttagctttggaaaatgtgcaggtccacatgaacagttcacttctttagcaattacagagagagttcatgaggtttaacatctgtaaacttttgatccttgtagccagctgcttaatctgccctactgtttattggaaagaattaggattgaccccctacaaaattcttcagcagcgacaacagtacatgccgattgccgcaccaccatgcgcatctacagttagaattctgtcacaatttctctgcaaggttacactacatgagatgggcacggccggccaggcctttagtctgaaactctcttctgttacttctcttcgtctgattgtgaaggcccgttgatggcatcagcaaagtactcaactatgtcattctggtctggggaatcaagtaaaatgtcggagtctgaggccaggaaaggagtacctgcgtagttctcaagtgcttccaagtctcccaaacttgttaaatctgctgttaggtcagaaaggctgaaattccagagctgtcctaaagatctgatggagtcccttgacgagccatctggtcctaactgcagttgtcctgtgttctcaacatgggatatgtcaaatgtgggatcgagagctgatgtatccatgcttattcctgtctatctcagatggattgaaaggagcatgattgcgagcatttgtagctagagccgtaaggcttattagtgctgtagcataatcggcatgaactccaccatcagcagttttcgctgcatctcttcctaacagtgacattgacaatgaaacgtgtactcctgtttttgtgaggattgagggcaagtatttcttgaatagttttttcctctgcagtgtcctggttgtaacctgttgctgggttatcaacccagctgagtggacgaaagtttgcactgaagctctctttgagttctagcacttcaggaatatcaaggtttagataccatttgcacggcgaactaccagtcactgtaagacctaatcctgtgtaatctttgacaagtgtcccaacaaagacaataacttgggcctgagtttggccagcattgtatacactattagcgtcaaaagcatcagccctttctccccagagtgtaacaggcattgttgaattgcttgcatcacatatctgtattgttctttttaagctatcagcattccttgacttcggccgcacaacggttggcgaaccaacctcagtgatgacacccatgacatctggttgcatgccatataagccaacatagaagatggtcttgtccactaaattggggatatcactgaatggtgtcaatgaaaaagttatgccagggaaatcagcagcgggctcaatgtattcttcaaatgttgtccatttactgaacacaatcattaggctattgtcgactggcctgtatgtcctattcgcatacctcacagtaaaggagtcaatatagtaaaccttttgttccttaagcaaaggcctcaggctgtcaattgcaggtggataaatctgagcgtgaatgctgtttcccatctgatcgagcagcacaagatcagtgtggaaaatattgccactgccgttgagatcgcagaaatcccataacctagaaactcttgcaaggatccttgtgtttaagtctccacaggacagctgtgaaatgagcacatgtgccatcttggacgtgcgggaaatcaccgcttggactgtagcgctgagcacttcagagtaaactatattttttgtctgtgtaccacatgatccatcatcattttcaattaatatttttagccctgatcggcttgttactcttgaaatagcaacgtataattgcccatgtgtgaagacaggcttcctaagatatacgccaacccgctggagtgtttgaccttggcttttattgatggtcattgaatagcaaactcgaacagggaactgccttctctgcagtgtaaaaggccatttcatctttgtggtgccaagtgtgattcgaggtatgtaaacagtttcaccaatgtttgatccagtcagtactatacactgtaaaattctgtctcctaaaactgtgactaatagccttgttccattgcataacccaattgattgattaagatttcgtagcagcattacgacaacaccttctttaagaacaagtttatgcgttggaaagttagtagcatttattgaattcagaaactctggggggtataacagatcgaaatctggaatttgctcagagctttttgatatggtatcacagcttaggtatactctagaatctcctggcactaaaccaataatataatcgtttatttcatcaaccgttgtattagtaggacaaacaattgcacgagaagccagatattcaatgtctctgtagcacgtaaggaaatctgagtaaacctcatgaacaatagcagctattttgtcaccgctagtcataacaagtaaatcatcgggaattgtgatccatgcaggataattctcaccttcctttgctgtcataggtaaagtgccattgcctatagctaaaacccattgactaaaatcatgcaattcttttttttgattgtctggtaacattggattgagtaatctcatgtttatattcaggctgagtagcgctacatgtttccatagttctgagttcgtgatagatgcattgattatagcctgacgggatcctttaggaataactgggagtatttgtttgaaatcaccacctaggacaataggctttcctccaaaaggtataatagaatttgaagggcatgtctctgataaaatatctcgtagcgttcgatctaatgcttcaaagcatcgcctatgtgtcattggagcctcatcccatatgatcaatgcagtttcagctaaaagctcagcaagcattgtgcctcgttttatattacagatgcttgtttcatcaatgtcgattggtattttaaaccgagaatgagatgtcctacctctaggcaataggagagatgctacccctgatgaagcgacagcaagaacaatcttgttttgtgatctaagttttgcaattattgtattccagagaaatgtcttgccagttccaccatgaccagacacaaaaaagaaaccaggttcattagcgatagcacgagaacaaatagtgttaaaaacagttatctggtcattattcaactgctgtacgaaagagtctgcatgcatagcaagcataagtgggtcaattgtgatttcttcatcgattaatctattagtaccaagaacatgtggaacagatgatggatgtggcaggttaaaatctttgatattaccaccgctatttgcaaatacagcaataagctcatgtagtagcatgttaagcaagtggtcatgtggaatcacacagtgtggattgtcaagggccttttttagcctgttatgtatgtcatcagtcatgtatagccagtatttatcaaacaatgaacgaacatcaccaacagaacagtaaagaaggactgtcacaaaaagttgtctaagctgcgctgaagacgcagtcactatggcctcatcaaaaaggagatgccattcattatctccttcaagaagccctcgtgcctcacatgcctctctatacgtgccataaacaacaccatcgtatgtgcgaacatcagcatagctttgagcacctttgacaatcattaacaacatcctaagatagtaaagctcgcctgcagttggatgcacataataaattctgccaattttaggagcaggtgttcgctcgtgccaagttttagatgatggctcccatgtccattccttaggaaactcacagtatgtcaatgaatgggccttagaattttttttgttagtttcaaaccattcagtaagcatagaccgttttgcaccaggactctcaaggactgcccgtaggtcagctcccttctcgtatctcacaaagtttttcccaggcagatggacaaccaatcgctcaacaggtggcactctataatgtatatcaaattcaaataatcgatgaagtgcctcacaggttgagagaaatcttgcatccatgtattctaatatttcattgcgtggagcaaggtcatgatttggtgatgcattttgtgtttttcctgttgtttcaaaatagatcctagctcggtcatggccttttgtaatatatttaaataaatactttatcaaatttgatttgttacaccactcaacatttatgtgtgcctcatattttttcagtaaagccatgttgtagggtacaactgatctattgtctaaaaggatcccattcttcatgatagatcgtccatcatttcttcgtctatagattgtaaacccagattcatcaacaatggtttcatcttggaaatctttaggataatgttttgaacatttatcgtttttcatacaaggacacttcttgttcgcatcaccgcaaggaccatgcatcataaactcgctaaccaattcatatcctagccggtcggtgtcatagtcaggtatttcagcacagataaacccatctattatagaggctgagacatcggcagtggcagcagcaagccaaactaagcaatgtatgtgtggaaggccacgcttctggaattcaacagtgtacaacactgcaagaactttaccaaaagttctgccttccctaatatcagttataaattcattaactttcatgttaaacacacgcacaataatatcagctctatcagatggttgttggccaggctcaaatcgaatcgcatctgcaatttcttgccatttggaattacatgtgtatgtgacaaaaaggtcaggaggcccatagacacgacatattgccatcgcatcttgataattcatgaccatatatcttcttcctccagtgaagctagcaggaagtatgacacgcttgccaactgaatctccatcagtgacacctttatcaatcgcatcaacaattccatctacagactcagagcgcagctctttttgatgatcgatgaagtactgtagcctatttgtttcaatagtagaaaatatatcaacatcgatttgatcgctcaagcgaccatagcatgtgaaaggatttgattcatttagtctgtaatgcatttcatatctataatattccggcatcgtgacatactttttgccaattccatcatagttactgtatttaatgcctaaatggaatccgcgttcaccatatggaaataacaaaggatattgcaatgccatataagatggatgcaagggagaaatctggcgcaggccacgacctttatcgtagacaagcacatcaaatttgtattctttcgcagaaaaatcacctactataatagcagctatttcactgttcgttggtaaattgtattgcacatcgtcttttgcattgcaacctaaaaggcgaagtgtcacttgctgattgccatgccgaataacacgttctctagcatacctaaagctctggacaagagtattttcagcatcaagcatcgatgatagggcacgaattatctcaggatctgctttatctgaattatcaccgtcgttttcaaatatatttaatcggttttgtaattcattttctggatcatacacatataattgcgcaaatttgggaggtgagccacaggatggcacaagagtaccaatcctatggtgcacaactccattgatcttgaatacataaggtgcatttccagtgttaatcgatttatcaatagctgcacccattgagctgaaagcaaacatcgaattatacgatcgtatttgcctcaaaaaatttttcgaacgtgcatcaccattatagttcaataatgatgctagtggctcaggaggggcacgcagttttggcaattgtatgcgtcctcctttgcaacatagattgtaaattatttttctttttgaaatagcagatgcactcttgaccctctcctggtaccagaacatggcacgacaatacgggcattcatacgtcggagggccatagtatgatctgtctgggtatgatgctgccacaaaagcgcgttggctcgtgcagtgcgatttgctgcgaacaaagacagtaaaacggcctatgaacctaaacttccgcatggaatatgctcgtcgacaggcagaatccactaaaacgcaccacgaagcgaacacacaagctgtgaacagaggcaaggaagaagacggaacagagctgctaggtcttagaagcagcccgcacacgtgcaatggaagatgatcaggaacctttaaaggtccattgcagcccatgcagatcgcctccccaatagcggagaagccatcacagagtaatcccactacaggcatggacacagcgcacacgcgcaccaagcgaccaaagcaatctgacacagcagctaaggcaaacagcatagacctgttccacgttaggtacgaacaggcagaggccatgcggcccacacggcagccacaggcaatctgtggaccatggctacctcaaaaaacaaagaaatgcaccacgcaacgcataacaccggagaaaacaatggcaaggacacccaccctaccctgcgcgcggcgcaatgcaccgcacacaaaccaaccaaatgaggccaccacacagggaacaacacgtggcggacgcaacgcagagaaccagcggacgagaaaaaggaaaatgtggcatgccaaacgcaccgacgcacgatggtcatccaacggcggagaacgcgcgcaacgaccgcgctccaaatccacccctgggctccggctggatgacgtgccaagcaacggcaagggccacgacagcgtaaatcgccgcccagagcagccatttccggcggaagccttggccattgtgtcattcggcaacttacagattccagcagcaatcgcgcatgtcgagctcgcagggttgcgccttaatccaaagggctacgacggccaaggtggcaccccacatcttgtcccatctctaaaaatcttctatggaatggtgattagccagggaataccttacattgtagccggcatactggaggtcttctcgttcatccctcagagagccctcatccgaaatggtggatttacaggtcagtggggagtagaatctgtcaatctgtactacgcatacgcctacgacaaatacatggaaggagagagatctgaccagggcaaggctgctggagaaactcaccagttcaacacagacgatggccagatagacaagataaaaaaacatgatatagctggtgaccaagagccgactgaggacatcgataacctgttggaagcaccaacccgatcaatgcacatcaacgaccaaagatacatacctagaatttggcagaggatactggagtactggtcgattcccaaggagcagccattgacagacgatgatctcctccctgcactaggcatgtcaatcatatatagccttgctgaatgtgatcaaaataactgcgtggaaatcgacaaagtaactgacctgatccccaaaatcattggattcacaagctttagaagtgcaatggtaaattctgaagcacaacagaaggttctcttaaagtcatcactaaaggtgcttcagagactcacaagcattgaaggggaaattggcataacactgcggtacaagatatcaaaacatcccttcttattgagaaaccttgcagagatcttgggagacagcagcagcaacaaccaagaactgaggaggctcatggcaggaatcctcagaaaccttgcaattgacaaagacacaaggcaggagattggacaaatgaaaatgctcattaccaggctgatgaaagcattcctcgattctaacggatcatttagttcaaatgttgattgcttgctgccaaaggtcgctgggcaagcactggtgttggaaagaataatagacgctgaaggggcagaactagaaatcctcattggccttagttcacagatatgcaaactcattcctgaagaatttgcccaagagctagaacacgggcagattaagcggagattcattaagaggctagtggacgcactgaatgcaaacatgaaacaaaatgctcattgccctgggatcaggagggtgatacttgagcaatccatatacatgatggagtgcaattctcgcaatgccaagtgtttcaatgaattccggatgatggattcagtgtcgatggtcgaagagacaccctcaagggctgagaagtacatgtttttcttgggtgacatgggcttcatggaatgcaagacagctctctctgctctcgtggacagagcaaaagaactgatcagtcgccagtggctgcatgacatcaacagtgccaactga

SEQ ID NO: 28194 - DNA, 2429 bp, Oryza sativa
  Clone ID: PAT_MRT4530_32816C.1
atgtccgaaaagattagtcgattaccagaaaacactaatactcgtccaggcgtcaccacagccctcggctcctcccctcccccgagattcctccgccgccgccgccgcctaatccggcgtccccagcctaggcgagatttgggggcgcgcgatgaaggagaagcgcgggctggaagccgcggcggccggtggcgacggccaccccgaggccaagcgcgcgcggcctcccgcactggccagtgttattgttgaagcattaaaggtggatagtctgcagaggctttgctcatcactggaaccaattcttcgtagagtggttagtgaagaagtggagcgtgcgttgggcagactgggtcctgcaacaataactggaaggtcttccccgaagcgaattgaaggtcctgatggaagaaatctgcaactccagttcaggacaagactgtctcttcctctttttactggaggaaaagttgaaggggagcagggagccgcaattcatgttgttttgcttgatgctggaactggttgtgttgtatcttctggacccgagtcatgtgccaaacttgacattgttgttctagaaggtgatttcaacaatgaagatgaggagggatggtcgggagaagagtttgaaagtcatgtagtgaaagagcgtgaaggaaagcgccctcttttaactggtgatgtacaagtcacactaaaagaaggtgttgagactgtaggggagcttacattcacagataactctagctggataaggagtcggaagttccgacttggtttgaaaatttcctcaggatttagtgagggtattcgcatccgcttggcactgtaggggagcttacattcacagataactctagctggataagataagaagcactacccacctgcgttgaaagatgaggaggattttgtaagggtattcgcgtaggatggatctttccataagagactgaacatagctggaatttctacagttgaagacttccttaggcttgtggttcgagatcctcagaagttgcgcagtatccttggaagtggtatgtctaataagatgtgggatattcttgtcgaacatgcaaagacttgtgtcttaagtggaaaatattacatatattattcagacgaagaatagatctattggtgctattttcaacaacatctatgcattctgtgggttgattactggcgagcagttctatttcatctgaaagtctttatgatagccataagctctatgctgatgcattggttaagaagttatacgataattgtatatatgccattgaatatgatggcgaagctctcttgaactctaaaccgaagaaaaaggctgcacccactggacaagttgagacacatcctcctctgagtcaacctgcttcatacgaacaacgcatctcatcaacgagcatgacaggaccatctccagcagaaggatgcacccccggaacaagttgagctggaactgattccatagcgtatgatggcaaccgaacagcgccacagccatctcaacttgaaagtacatcctccaatgtgagtgtgccatacgatgacaccttttcaattttatgatctagactaagcagctacacagccatctcaacttcaaagtacatctgccaatgtccctgtgccatacgatgacaccttttcatttttaccgcctagtatgttgatggggtctgataatcaagaaaccggaaatgatggcatgggcctggaactaggccaattgcaacaagcaatttcacagagtcagtcgattcagccagcaaatgttggctatgatgattggactcgaagtcaaaacggtcagttcgctgatgacttcaccgaagatattcgcatgaaaagccaccaaatgctcgagagcgaagacatgcagcagctgctcagggtcttcagcatgggtggagcgtctaccagtttgcaggaagacgccttcggcttcccgacgtacatgccatctccattaccaaaccttgggttcgaaggtgagcgcacccgttcatctgggaaagctgttgttgggtggctcaagataaaggccgccatgagatgggggattttcgtcaggaagaaagctgccgaaagaagggcgcagcttgttgagctggatgattaacaacatgttaagcgtgtattggctaccgttagatgctattaatgttgaaatgttaataccatcagatgctctaaactaggttttgggactcatgctgccttgaaaggcattgaaacaaaccaaccgattatgtacagcgggtagttctgctttgttgtaaaaacacctgaaatgtttgcgtaccattttattttcctcgtttgttatagattgtgcagattataaacaaaacaatgtgaattaacgcggatagtatgtgtatggccgaagtcgttaaaaaaaaaaaaaaaaaaaa

SEQ ID NO: 28195 - DNA, 601 bp, Oryza sativa
  Clone ID: PAT_MRT4530_32817C.1
ggccaaacgggaaccctcccccccagggacccggaaaggagggaaacaaaacaaaaaaacaggggcaaaagggggggggaggggccccattcaaaaaccccccccccaaagggaaaaaaaaaacaacggccaaaaaaaaaacggggaaaaaaatgaaaaccccaagagaaggaaccccccaaatcccaaagggaacaaaaaatcagggctaaaggggggggtttaaccggaaaaacccccggactttggccttttccggggtccccaaaaaacccttccaaaaaatttaaaaaagggaaaagcaaacccccccgtatttggaaaggaaaaacccccccggaggggggttcccaaaaaaatccttaatggggggggggaaggaaaaaaacacccgggccaaagaaagcccaaaaaattcacccttgccaaaaagggacagggaaacacccccaataatgggaaaaacaaaaaaaacggccccgaaaaaaacccccatagtaaaaacccgcgatagggggaaaggttctatttaaaaaaaacaaaggatttgggggaaaggacaagcctgattcaaaagggccgcttaccggaaaaacaaaac

SEQ ID NO: 28196 - DNA, 558 bp, Oryza sativa
  Clone ID: PAT_MRT4530_32818C.1
gcaaatgcgtctctccaatgatccatctatccgcatccgtctccatccgcggcggcgactgggggagcatggcgtggcacggcaagggggccggccgaccggcgtggctgtcgtaccccccaagaaagggaaataaaatccaaactggcagcggcggcagcagcggcaggatcggatcggagcggccatccatctatcgtcgccacgctcgctgagtcaggtccgtgatgatatgatatgatcgagcccccggcccggggtctctccgcccttttcctttccttccttttctctatgctgtttatcgtgggaactggccagcggcagccgcagtggtggtcctggtacttgcgcacgtacagccactagctttccctgcagcagccacccactgcacctgctgctctctctctctcttcccctctccctgcccatgtccatcccgctttgggctaccatctccccgcttttccatcgccacaatcatgaccgcacgttgccacctaattacgccttggatcacctccaaattaatcgcccttaatgtgctctcttttt

SEQ ID NO: 28197 - DNA, 698 bp, Oryza sativa
  Clone ID: PAT_MRT4530_32819C.1
ggaagccacccactttaacaatcattttccaaatattcattacataaggtttaaagggagactatgcaaaactgaacaagtgcgagacatcaggccagtgctgtacaatgagactgcattaccttcgctcaacctattctttcctgcaagaaaccggtttgaaatgccacctcatttctgggataaaggagaaacaatctaccttcatggatttttctccataaagagaagtagagatcacatatcttcaaaggcctcgataaaaataattgtacacagcacccaacaaaaaatccttgtgtgtcatgatagcatactctgcatggagattgaagagcacatcaatacatatgcatttgcagaaacatggaaagcagcagcacatacagattaaatcataaaagttagcaggtcaggataaccatatgaagaatctccaaaaggaccttttgaaaaaagagatgatagattatagaattagcatatgcaatcagtggatggaaatgatcctcccaacacatcattggatgttctgtattttcatattacatttttagcctagttattccaattgtctagtttcttggattgggtaattatatccttaatgctttgctcttggtgggatttactaaataggagttggaaatatattaaatttcattacataaaagaaaatgaaaaggggttcccaaata

SEQ ID NO: 28198 - DNA, 1011 bp, Oryza sativa
  Clone ID: PAT_MRT4530_3281C.1
atggcacaccaccacttctttgctccccggaagcagcggaggtcggcggcgcaggagcgagggaagcgggagctcgacggcatggatcaggaggtgtgggctgacatgggcaccgccgtcagggtcggggcaccaccgcttctccacctctgcacccaattgctgccgcacccaactgccgcgggcaagctcctgttgtcgtcgtcgaatgggatgcaacctcctcactgcaccaagaagaagcagatagcgaaaatgtcgtcgactaacagttcaggcgatccggcggcggtgcgcgtggtgggcggctgggcgagccccttcatgaaccgcgtggtggtggcgctgaagctgaagggcgtggagcacgagatgttgcaggagacggtggggaagaagagcgagctgctgctccggtccaacccggtgcacaagaagatccccgtgctgctccaccacggcaagcccatcgccgagtctctcatcatcgtctagtacatcgacgaggtctggccggcctccgatggcgccccggccatactgccccgtgacccatactgccgcgccgtcgagcggttctgggcacagtacatcgacgacaagccggatgattttgctctcatcttggataatttgtgtgcagtttcctcgggggactcgcgtgttgagaggaaccgtggccggagaggaaccgtggttgaaatgtccaccgctctgaagcatctggaggaggcatttgtcaagtgcagccaagggaagaaatacttcggcggcgacaaaatcggctacctggacatcgctcttgggtcgttcctcggatggattaaggcggtggagaagttcgccggcgtcgagctccttgacgaggcgaaggttccaaacctggctgcttgggcggatcgcttctgcgcgcatccggccgtggtggacgccatgcctgacgccgataaattggtcgagttcgccgttaagcatgccgcttcgatgaaggctttggatgctcccaagtga

SEQ ID NO: 28199 - DNA, 333 bp, Oryza sativa
  Clone ID: PAT_MRT4530_32820C.1
cctcgtttggcgtcaatcaaagtatacgtggtagatagtataggacccactactggtcgccacaaggtgacacaaggctgccacagcccccacaatgtaatgtatacgtttgaagcccacttccggttacaaaaatggtcggtttgcatgtgctcccaagttgagatatgctgagttctagtgattttggttaaagtgttgtggccacaccggccatgggctctgcagttgtgcatgggacacagttgaatagatgctgctgcgcaaatggtgcgcacctgatggtcatcgtttaatactctcgtttatttctgttccggttaaaaaaaaaaa

SEQ ID NO: 28200 - DNA, 711 bp, Oryza sativa
  unsure (1)..(711): unsure at all n locations
  Clone ID: PAT_MRT4530_32821C.1
cagattncgcaagtggcatttgcaatccaaatgctctcctgctgcctaatcttggccttgggcacccncatgcttttgactttgcctttcgggtttgtaggattccttttggcagagggtgtgtattgtgcttgtgcattgttgctgcatgcattggggtttggtactttggtttggtgancgagagggagagggagagtggagggggtccctttggaggtacttaggcatgggggtttgtcatttggtgtgcaaaagtacaattaggggggtcattaaagggagtgtttgtttatggcttctaagcttctgtgctgggcttttcttctgtcctggcagggtggggacacctccactgcccttgctgctaaaccccctttcttaagggcttttgcagcctttttttggggggcaattttgtttgagctgcttctagccttctgccaaagctgtttttttttttctttctctctctctctctctctctctctctctttctctggtggtgttggactttggccagaaggcaagtgcatgtgagagtggactgttgtgtcagaaactcaaaggggaagaaagccctgtgttttgagtgtgtgtgtgtgttggatgtagcctatgcagagtgaatgatgatatgtacttgtcggcaaatacaaggcttggattggagccattcaacttaaaaaaaaaaaaaaaaaaaaaaaaaaa

SEQ ID NO: 28201 - DNA, 354 bp, Oryza sativa
  Clone ID: PAT_MRT4530_32822C.1
atggtgacggtggtggtggtggagggggaagcagcggggggagttcttggagctctggatgggggtggggctggggcactgacaacagcggtggcgggagcattggcggcggaggaggtgggggaggcgatggcggtggcggtggtagcggtggaagaaggtgctggtggggatgcggcaatggtagacggcgccacaaaggtggcaaagaaggcggcggcggcggcgagggcggagcgggaaaaggacggcgatggcagcggtggcgtggggatgaggagcgcgcggcgggggaggagggccaccgcagaagtcgagattgatgggcacgggccctatgggcttcgaaattaa

SEQ ID NO: 28202 - DNA, 288 bp, Oryza sativa
  Clone ID: PAT_MRT4530_32823C.1
atggcgcccaccaccacatgccaacgcatcctcctcctcctcctcctcctcctcctcctcgccattgctcggcctgcctcgtcgcagctcttcacgccggcgccgccgccaccggtacaggctgcggatggcggcgggagcgcgggctttaacgtggcgacgtcgctcctcttcgtcggggttgtcatcgcgctcttcttgctcggcttcttctccgcgtacctccgccgctgctccgaggccgccaccgccgcgcaccgtctccgtgggggcgggggcggcggcgcg

SEQ ID NO: 28203 - DNA, 282 bp, Oryza sativa
  Clone ID: PAT_MRT4530_32824C.1
aaaaaaaccctccctagggaaaatggggggaaaaaataaaaaaccccccaaggggggtctataaaaatatggggaggtgtgcacaaaggataataacccaaatttgtaaaaaaagaaggccaccccgttaaaacattgtaaggggggaaaattattccccccttttgtgaaaaccttttatttttgtcggggggggaaattttcccaattgaaaaaaagcccccctttttttttcccgaaaaagggctcttttccaaaaacgtttacaatgggccggacccc

SEQ ID NO: 28204 - DNA, 264 bp, Oryza sativa
  Clone ID: PAT_MRT4530_32825C.1
atgtcgcacgtcccgctggaagaactccctgccgtttctgctgcctggcgtgctctgcagctttgtagaaggtgtctgttcctcggcgccgctggtgagagcgccccgcaacggcgcaaggcgtccaggaactcggcgcggctgctcgagtggagcaggtggggtagcgacctccatgctcacaggacacgacattcagggtggccgatcgccttgagcacaggccagaaggatcatcaggggacaagaagaacatgggattag

SEQ ID NO: 28205 - DNA, 241 bp, Oryza sativa
  Clone ID: PAT_MRT4530_32826C.1
gacccacgcgtgccgaaccagcacgcacctcttgggggagccacggtttccctgtccaccccatgccttgccgccggcagagaggccttgcgtgcgccgccggagacgcgggcgcggatcccagcggcggccgccaccggccttcgaaacgaactgaaacctgaacccaggatgccactggtgtcaacacgccccaaagtgagaagatcgcagtgacctacggggaatcataaggatgctt

SEQ ID NO: 28206 - DNA, 413 bp, Oryza sativa
  unsure (1)..(413): unsure at all n locations
  Clone ID: PAT_MRT4530_32827C.1
nnctcaaggtggagcccgccaccggcgaggaactanactgngtaagnannggnccgtgttgtncgcngttttncagnaatgncnccnaatgctanggccnntncgangggtgganggngtanccgncagtnaaggtnanaaagcaagcctgttggtgttgcatctctggttggtgtgagtttgagtccaatggcngatggtttcatggtgttttaaattagaggaaannaannttttttttgtctgttnaaagttgntctnttgatggtgntnatatgtantgattgtgtnngatgagttnggtncaatacctgttantcattttttttggtagcatgtaatttagntnattannntttgnttgnaatattatatnnntgttnccctncngncaaaaaaaaaaaaaaaaaaaa

SEQ ID NO: 28207 - DNA, 250 bp, Oryza sativa
  unsure (1)..(250): unsure at all n locations
  Clone ID: PAT_MRT4530_32828C.1
gtcgccggccgctttccacatcaggtcgttccttctgcggcaggccgtcgtgcgcgcgtattgctgctccatgtgctcatcctcggacgcgtcgtccgcacctcaacgcgcagcttcgacgaccgaccttacaagtccacctatcctgcagcacggtggcccgccatggtcgttggagtaacatggagcttgctcggccgacgtcattatctacgaagctgngacgcggcatcagcgatggagcagcgct

SEQ ID NO: 28208 - DNA, 880 bp, Oryza sativa
  unsure (1)..(880): unsure at all n locations
  Clone ID: PAT_MRT4530_32829C.1
gaggcaccagctagagctaggttattcagtggttttaagctgtgtttcaatctcctgaagataaaaataaagataaagattaagtgttttacgtaaaataaggtggtaataacttgtgattaattgagttttaattattacaaacttaaaaaatggattaatttgatattttagaacaactttcatatagaaatttttttgcacgaaacgtatcgtttaacagtttgaaaagcgtgccataaaaatccaaaacttaatctcccatctgttgggttctcgaacaggaccacgaatctaaacaggctcatccacattttagtactacaaatatggactaagnanccaattcagattcntcgntactaggatgtgccacatctaacataaatctcttatattttgggacggatggagttanttgattgcggtgtgtnatggttgaactgcgtttaattgctgacttgtattgtttgatttanancatctccaacagattacttaaatcagacctccatctttgtaggaatntttggtataagttganaaaaaaaatcctctcaatatttcatttgtgctccgacaatctctccatctacattctctgtcgtaagtctatgananggaancatacattagcctcacactccttcctccctttggcaaatgttnggcttcatgtttganaaatggtttccacccnctaaatttngctagccaantganaaattnggccaccatttgacttnggcaatttgaanganaatttgttgaaagaatttttttccccatttatnaaatttttcttggaaaatanaaggataattttaaaattgccctaaccttctttttcttccctttaaattaattacaattgtgccaa

SEQ ID NO: 28209 - DNA, 1454 bp, Oryza sativa
  Clone ID: PAT_MRT4530_3282C.1
gcgagaggaaacgacgatatataattaagttgatggaatcaatcaaaattaaaggatgcgggtagtagtgaccagtgacagttagcagcggcgaactggcgatccgtttaataagctgtctagttgggattaggaagtcaaaggaacatgtgactgacatatagatcccatcgttcacgggtccacatccgccgccgcccttctttcctcgtgttctcctccctctgcggcgccgccgttgttgccgttgtctgctcgccgccgtctcgccgcggccctcccgcctgccctttgttatgccgcctggcggcgacgacggcggcttccctccggctccccggcttctggtcccccccctcctccgcccctctcatcagtaaccgcgtcaggagaaagtttacgttggaggatccgcttccgtctagctagttgtagttgttgctggccgccggcgccggtgaggtgaggtagacggcggcgcgacagacggggcagcgggaggcggtctggacccatggcacggcgcagccccagtggaagcggtgcgtgcaggggaggtgcgccaccgcctccccggcacgcagctcctctagacacaccgcgcactcctcctcctcctccggcgtcggcctccgccccaacctcctgaaccacatccgccgccgcccttctttcctcgtgtacacctcccactgcggcgccgccgtagttgccgttgactgctcgccgccgtcactgctcgttcctgccacctgcgctttgttatgcctcttgacgacgacgacggcggattccctctggctccgcagcttctggtccagcctctccttcgcctcccgcacgttgctgtccagcgtccaccacccgggctgctgctcctcgcacgcgctcctctgctgctgcaacataattgctattccaaggagggcgattgcaaattcaatatctgatcgacgattgtcaggcacaatgacggccgccgcgtcccgcacggcgcctccccgccgccctgccggagacgtcgccgccgcgcgcactccactccgggaagcatcccggccatcagtaccatctaccgagcgatcaacctctaaccttatctacgtatgcgagcgatcacagcagaagcaacaacacaccatctgcctgactgcctctctcaatcgcttttgatcctccattatgtgtttgtgtgctgtttctatcaacagagctttcctccaatgcatttcatgttcatggcgaacaagacagggaccagccactttggagcatcctggttgtggctgccattctgcattatttgtggcacccacccacaccaactggctgccttgctgtattagacgacgaacaatccaattctgagttgtcgcagaaaccaggatagagggggaggaaaatcttgggttcataccacggaccgaatttaagatggagaaaggacacctcat

SEQ ID NO: 28210 - DNA, 190 bp, Oryza sativa
  Clone ID: PAT_MRT4530_32830C.1
ctcgactgcatcgtctctatcgctctcccctacgcacgacactaccgaggctacgcctcctcgcgccctgggtgggagaacgccgatgcccgccctcctcgcagcgccggcgacgccacccgctctcctcgctgcgtagacgtcgcctgctcctctcacacccagccggatcgccgtgccttcttctcgc

SEQ ID NO: 28211 - DNA, 447 bp, Oryza sativa
  Clone ID: PAT_MRT4530_32831C.1
ataaaaaaaaaaaaaatacaataaaaacacaaaaactgataataaagttacccatatacaaaaaaaaacattcacaaaggcgaaggatggaaacaattaaaagcatatataaaacaaataaaaaagattgtgggggggccgttttagagattcaaaatttaatcacgcttgcttcaaaccttatactttttttttcggggcccttaaataaattttactgcccgccttttaacaccattttttctgggaaacccttggtttttccaaattaaatttcttgttgaaaaatcccctttttcccagtttgtttatttctaaaagggccctaacaggtcgccttttcaaaaaattgctcaatcttaaatggcaattggacccccccttttatcggccctttaaacccggctgtgttggtttttccccccatttgtccctttaaattttcaa

SEQ ID NO: 28212 - DNA, 403 bp, Oryza sativa
  Clone ID: PAT_MRT4530_32832C.1
cccgggctgcaggaattcggcacgagggtaagtactaccagcattactatgtagtcatgctacacatcatctgcactactgacggtctacgtgcttgttcaggtgtttgcatattgttttataatgccaactgaacctatctgaaatcggttcctctaggtgcttgtatgcccgtgcgttcattgcactattgtgcagttcgctaccaaatcaatctcagatttttctggcgagcccgattaatgaatttgtctatgatcaagtgtagctttaatttgtcagatatggtgacctttaatttggatttatttatgatatttccttgacaacctttataaagtttatctactttctttttatctatctgcaaagttaaacagatggttccttaatttgtagtgaa

SEQ ID NO: 28213 - DNA, 286 bp, Oryza sativa
  Clone ID: PAT_MRT4530_32833C.1
atggtgggttgttagcacatggttttgaaggtcgtgctcatgacaattaaggactggtttgcgagctactgttgtgaaacattaaccgtgccaaccacaagccagcatgggcaacggctttaccttttgtatagcatggttcattacggggtgccagactaagaagcggcgagaagtccgtgggggtcgctgggagtccatgcctctggttgtagaggaggtgattatgatctaggaacggtgcactgtggtgagttgtgttatgcgaagggtattgtcacgattt

SEQ ID NO: 28214 - DNA, 200 bp, Oryza sativa
  Clone ID: PAT_MRT4530_32834C.1
tttttttttttttttttaatgctactcacaccgagttgggtaaaaatcctaaaattttaatccctcctcaaattccaaggcagtccaccatgctctataagcttgcttcaccctacaatgtatacacacacaaacacaaccctctctagctaccccgtatatacatacggtaaatgtccacattttaactaatccaattg

SEQ ID NO: 28215 - DNA, 333 bp, Oryza sativa
  Clone ID: PAT_MRT4530_32835C.1
atgaggtcaatctatgtccaagaaaagctgccagatgtaagtgggcctggcctaggagaggtgagggcaatctatgtccaagaaaagctgccagatgtaagtgggcctggcctaggagaggtgagggcaatctatgtccaagaaaagctgccaaatgcagtctatgtccaagaaaagctgctagatgtaagtgggcctggcctaggaaaggcgagacgttacagatgtccagataactcatcagcacttagtagatcaaacttaactgatgcagcactaagtataaaaggaaacataatatttgacaatcaagcccccttgactgatttttag

SEQ ID NO: 28216 - DNA, 417 bp, Oryza sativa
  unsure (1)..(417): unsure at all n locations
  Clone ID: PAT_MRT4530_32836C.1
aaaaaaaaaaaaaaaaaaaaaaaaaaaaagaagaaaaaaaaaaaaaaaaaaaaaaaaaaaaaaaagagggggggaaaaaaaaaaaaaaaaaaggggaggaaaacaaaaaaaaaaaaagagaggaagcagggaaaagaaaaaataatgagggtnngtgagggaatgcacacgtaaggggtcccggatgaagcgctggggggccccgaaaaagtagatgcggccttagccaaagatggctaggggctgaggtttaaggagcaaatgaatcaaggtcagggccaggagtgtctgtaggcaataaatgggggacgggtgagacaagagggcaggacaggctaggaaatgcttgcattttaaagggccagaagttggtgttttatggaacaaaagtgacccctttgagggttccaacctttg

SEQ ID NO: 28217 - DNA, 257 bp, Oryza sativa
  Clone ID: PAT_MRT4530_32837C.1
ccacacaaactgactgactggtatatattggcgaaaccagtgatgccatctgtataaatgaataggtccacgcaccccgagaggcaaatcacgtattgagcaacaaacatgaccactctttacccattgaccacatcaccagatgattggcctacaacaactgttcctgaaagagaagacaacagctgaacactctttgaagccccaaccggctacaatactggaagatgggagcacactatcctatataacatgag

SEQ ID NO: 28218 - DNA, 1164 bp, Oryza sativa
  Clone ID: PAT_MRT4530_32838C.1
cgacctacattttgctaactatccagtaccaagaacggagctgcaaggaagagacgtacgatgaccatgacgtcgacgacgacgaaggccatggcgatggcggcggcggtcctcgccgccgccgccgtcgcggcgacgaacgcgcagacgtgcgggaagcagaacgacggcatgatctgcccgcacaacctgtgctgcagccagttcgggtactgcggcctcggccgcgactactgcggcacggggtgccagagcggcgcctgctgctccagccagcgctgcggcagccagggcggcggcgccacctgctccaacaaccagtgctgcagccagtacggctactgcggcttcggctccgagtactgcggctccgggtgccagaacgggccgtgccgcgccgacatcaagtgcggccgcaacgccaacggcgagctctgccccaacaacatgtgctgcagccagtggggatactgcggcctcggcagcgagttctgcggcaacggatgccagagcggcgcgtgctgcccggagaagcggtgcggcaagcaggccggcggggacaagtgccccaacaacttctgctgcagtgccggcggctactgcggcctcggcggcaactactgcggctccggctgccagagcggcggctgctacaagggtggcgacggcatggcggccatcctggctaacaaccagagcgtctctttcgaagggatcatcgagtcagtggctgagcttgtgtagatcgatgagtcgatcgtcgccatgagcgttttctgctttgtatgcctctcggcgtacagggcttttcagcttagctgcctttcaataaaatcactgatcatggcgatcgacatgcagagcagtgttgtgtacgtagttgctcatctgaataaataaaggggctgagcctgagctgctgcctagctcgcaccaacagagtccggccgggaggagttgtagtttctgaaggtgagctagctagctttgggatcgatgtatggatcagcaatgtaacaatgtgttgtggaagcccgtagctactaactagctcattggtgcatgaaaaatatgtcattatctgctatatatgcaaaaaaaaaaaaaaaaaaaaaaaaaaagggcaaacaaaccgcccacgaaaacgcccacgaaaacgaaaaa

SEQ ID NO: 28219 - DNA, 297 bp, Oryza sativa
  Clone ID: PAT_MRT4530_32839C.1
aggataaacaattggaaaacattcctgtctgataatcttaatttttacgaaacatattatccaagagaacataaccccctggttttaccaataattttgccccatcggcgatagtggctacagacatatatctgggtactaggactaaaaagcaacaaatcatattggggcatagaaccaatccgttgccaatcttctataaaaccttggaaagtattactattaaagcgagcatctgtccctaagcctattgtaaaaaacttgactcctgaaaaggatccccaggaacagagctcg

SEQ ID NO: 28220 - DNA, 2784 bp, Oryza sativa
  Clone ID: PAT_MRT4530_3283C.1
atggacatctctaggacaaatgaaggctacacgagctgcggcccggtagtcgagatgtcatggcacagggctggtgtcctgctgctaggggctcaatcctgcctacctgtcccggaggttccggccgtaggtggggttgggtcggagcttgaacacctcaacttggggcttgtagaatatgggtacgtggctgccctagaagcacgacccacgctcacggatcaagtcagagccgctcaagtaaatgatcctgaaatagcagagctgaaaaagaacatgagggtcggaagagcccgggatttccacgaagatgaacacggcacaatctggttgggagaaaggttgtgcgtaccgaatgacaaggaattaaaggatctgatactcaccgaggctcatcagactcagtactccattcatccaggcagcaccaaaatgtaccaagacctcaaagaaaagttttggtgggtcagcatgagaagggaaatagctgaattcgtcgcactctgcgacgtttgccaacgagtgaaggcagagcaccaaaggccagcagacaaccgccgcagggaactcacttttgaagcaggggattacgtgtatcttcgcgttactccgctccggggagtacaccgtttccagacgaaaggcaagttggcaccacgcttcgtgggaccatacaaaatcttggaacgaataggagaagtggcttaccagctagaacttccatccaacatgctcggcatccatgatgtgttccatgtgtcccagttaaagaagtgcttgagggtacccgaagaacaagccgattcggagcatattgacatccaagaagatcttacctacggggagaagcccgttcgtatccttgagaccagtgaaaggaggactaggaataaggtcaccaggctcgtccgtgccgtcgaggatgcctgtggagtggtgttcccgctgcagaccaagcgtgacaccgtgcagcggcagcaacgcggacacggccatgcggtggcgatgtggccggcatgtgggcacacggcggcggcgcggccaggacgcgggcatggccggccgtcccggccgtgcggtggcatggctggtggcgaccacgcgcggccggatggcggcggcacggctcggtcgaccggcggggctcggccttgcggcggcgattcgcaggcgcggtcggccggcggggctcggccgtgcgtcggcgaggtgcagatgtggtcgacggcggtcttgcgcggtggtgtcgcagccatgcatagcgcggctagtgctgcggccggaggtggctcgcggcgacgccgtgcagcggctatgcgggcggcgtgcgacggcgccgtgcggggacgcggccagcgacggcgagcgacggcgccgtgcggggcgcggcgcgcgcgcggcggtgccgtccggagcacggccggtggaggctcgcggcagtgcgcgtggtggcctgggatggctgctcacggcgcgacgccgtgcggcggcgtggccagcggcagtcgtcgttcacggcgtggttgtgcggtccggtgccgtggtgcagccatgtatggcgcggacggtcagtggccggtgatggaactccgtcaatcggcattcgccggcgactccgagtcggcggactccgccgcggcggcgcccccggcggggcggctgacgaggccgccgcctccgccgccgccgtcgtcgtcgcagccgctgccggtgccggcgccgcggacgacggcggagaggctgggctcgctgcgggagatgcggcgggtgtggtgggtgtgcgggctcgggtactgggtgcaggggttccgctgcttcccgtggctggcgctcaacttccacctcacgcgcggcctcggcctcacccccgccgcgctccagctcgtccagaacgccggcaacctccccctcgtcgccaagccgctctttggggtcctctccgacgccgtctacgtcggccgcgcccaccgcctcccctatatctccatcggagcgttactacagcttatggcatggggaacacttgcagtcattccagtaacaggggacacatttccaactcaaatggcttgcattcttattggaaatcttggcgcatctgtcactgaagttgtaagtgatgctgttgtcacagagttcagtagaacgcagaaggccggtgtactacaatcttacgcgttcataattctggcagctggatctctcttaggaaatttgtctggtggttacgttctgttgagaacacaggaaccaaagactatgttctcagcattctccatcctccttggcctccaactagcactttccttaagtacaaaagagacgcttccaagctctcatagaaactggaacatttgtcatgtcagaacctctctgtctgacaatctccgcaagcaattctcaaacttgaggacagcaatcagcgaggagcagatcttttaccctcttatgtggataatgacatcatttgcagttgtgcctattctctctgggacaatgttttgttttcaaacacagtatctgaagcttgatccatcagtcatcggcctatcaaaagttgttgggcaggtgatggttctatctctaactgtcctctacaataagtatctcaaaaagatccctttgaggcggcttgtggctggagttcagacgatgtatgctttggcagttctatcagacttggtcctggtgaaacaagtgaaccttatgttggggataccgaatgagatccatgtgctttgtttctcggctctagcagaagcaattgctcaattcaagcaatag

SEQ ID NO: 28221 - DNA, 494 bp, Oryza sativa
  unsure (1)..(494): unsure at all n locations
  Clone ID: PAT_MRT4530_32840C.1
cgacgctatccgtccacgcgttcgaccactcattcgccatgttaaggcgcatggtgaccatgctgaatcttgcacagatgagtgccgtaaagtaaatttttatcataacgcactgcttgcacctgtttaggaacatcaacgctcatagtggcgcgatattgctcaagggaccgccccagatcaagtcttcaacaacaatgaacagacagtgttcgaaggagagctccgtcgagggctgcttataattataccataacaccatgcaatgcttanattggcacatagggaaggttgcttttatatggcattgaccaccaaccctgactctctggttcgcctcctggcacgaaagaattgcatctgccgaacactttctgacgatgtgggagccgaagcatatgccatctaaagagaagaagctttgatgctcatncacaacaggcgagatgagttacgagtgtatactctctttcatgcctagaggagctcccaag

SEQ ID NO: 28222 - DNA, 315 bp, Oryza sativa
  Clone ID: PAT_MRT4530_32841C.1
tctatgtgaattagaaaaggcagccaattgttcagcacaaactagattgaagtttattttaaagtataagatgagtgttcgcaaaaaaaaaagtacaagatatacttcacaactcttactttcatatttacgcagacgattgtattttctttgtataattatagttgagcagtcctgttataatttgggagcatcatatgatccatagtctagatattagtcctcttttcccgattaatatgataatttaaatgcattcatagcaaatgcggggctcattttagtctttctataataatactgtatataatagat

SEQ ID NO: 28223 - DNA, 610 bp, Oryza sativa
  Clone ID: PAT_MRT4530_32842C.1
cctccgccgccaacatagccatatcaatctggccccaacagtgccaacccctatgctgccaccgcctccgccggccctttgctaccggcgcaagccgtccagaaggtgggcgggacaggggaggggggagggggggtggccggctcagcgagcgcgcgtaggcgtcggtagcgcaccggagcacatccttgatggtgggggaagaggaggccaggccagagtggagggatttagagaggaatatgtagtggcgacggagggcgaagggggagagggccgagccttgggagtgagaggagtcgaggagacagagggtagtgcagtggaaggactcgtctacgacgaggacggaaacgacagcgaggaggagcaaggcgcgctgggaatccgggtcgaggtgggcggtgtggcccgcgtgcttgtgcgctgcgcggaggcggatagcaacaaggtgaggagacggcaagctcccccctcgccgtccgcgctctccctcctctctatctctccaaccagccctgctcgcgctccatggtaacggctgggccatggttgtcgtagccggcgaggactcctcacggctgcggtggcttgctagtgcacatcggca

SEQ ID NO: 28224 - DNA, 431 bp, Oryza sativa
  Clone ID: PAT_MRT4530_32843C.1
tgacaccgcggtctcctcccctgctttcgtgtggctgcctgtgccgcgaggagccgtagccgtggtatgatgcaacgccgactgaaagggaaggaggtgctaagctgtgtgagatctagacattctaggagctaaagggaggagctttcacatcgtgccccaggccatggaccagtctatagctaggaatacgatggtcaccgagtgcacggtcagcatgaacacacagctcaatgtggacctaaagggataacacgcgtgccactctgttttagtgtacacagacctacacaactctgttcttatgggattttccaaatggttacaataaatcatctatgtagtgagtgatcacccaatgtagctaatgcatgtccagtacatgctgatagtctagtggcagttagctatgatggtcacaccatggtcag

SEQ ID NO: 28225 - DNA, 549 bp, Oryza sativa
  Clone ID: PAT_MRT4530_32844C.1
atgagcgcggggagcccatcgccgggtggcggcgatggcggcggcggcggcgggagtatatttgggtcgggtggcatcggcgggttcggctacggcgtcggcgcctccgtcggcgtgctcctcgtcgtctccaccgtcgcgctcgccatctacttctgcagccgcacgtccatgccggtggccgccgccgccgccggccgcccgccatctccgcctcgaccacgcgacgacggcgacgtcgagaccggcaccggcatcgacgacgcgacgctggaggcgttcccggaggtggtctacggcgaggcgaggaaggctcgcggcggcgcggcggcgacgcagacgtgctgccccgtgtgcctggagaactacggcgacggcgacgtgctccgcgcgctgccggactgcggccacctgttccaccgcgagtgcgtggacccgtggctccggcagcggccgacgtgccccgtctgccggacgtcgccgctgccgagccccatgccgacgccgctcgccgaggtgacgccgctggctctcgtcaggccgtcgtga

SEQ ID NO: 28226 - DNA, 1349 bp, Oryza sativa
  Clone ID: PAT_MRT4530_32845C.1
atcactcacccgctccgtacactcaaccaacacaccactgaaaagcaagattttgttgaagaaataagcatcttgccatgatcgcagcaagggctgcaaacctgcaggtggccatgaaggccctggcgctggccgtgctggccctcgcctacgccgcggcgacggcgcgcgccgagcagtgcggcaggcaggccggcggcgcccggtgccccaacaggctctgctgcagcaggtgggggtggtgcggcctcaccgacgactactgcaagggcggctgccagagccagtgccgcgtctcccgcgacggcggcgacgacgacgtcgccgcggtgctgctcacggcgccgggcggcggccgcgccggcgtggcgtccgtcgtgacgtcggaccagttcgagcgcatgctgccccaccgcgacgacgcggcgtgccccgcccgcgggttctacgcctaccgcgccttcgtcgccgcggccggcgcgttcccggccttcgccgccacgggcgacgccgacacccgcaagcgtgaggtcgccgcgttcctggcccagacttcccacgcgacctctggtgggccctactcgtggggctactgctacaaggaggtgaagggcgcgacgtcagacttctgcgtgccgaacgcgcgctggccgtgcgcgcccggcaaggcgtaccacgcccgcggacccatgcaaatcgcatacaactacaactatggggcggccggcgaggcgatcggcgcggacctgctgggcaacccggagctggtggcaacggacccgacggtggcgttcaagacggcgctgtggctgtggatgaccgcgcggtcgccgagccagccgtcgccgcacgccgtcgtcacggggcagtggactccgactcccgcggacagcgcggccggccgcgcgccaggctacgggctcaccacgaacatcctcaccggcgggctccagtgcgccggcggcaacggcggcgccgaccgggtcgcgttctacaagcgctactgcgacgtgctcggcgtcggctacgggcccaacctggactgcttcggccaggcgccgttcgacggcgacatcatgtcggcgtctgcggcgaagtagacgtgtgcgccgccgtgccggccccgatcgatcgaataaaattgcgtgtgagtacgcacttcgcacggtcgctctgcagccagagtgagtgagtttgctttatgtatttttcggtttcgggcgaggaattcttcatggatctgtgaaagcccatatgtatgcatggtcatggcatgaataaagtagtactgatcttctcgaataaaaaaaaaaaaaaaaaaaaaggctcagatctagaaaagacgtggg

SEQ ID NO: 28227 - DNA, 261 bp, Oryza sativa
  Clone ID: PAT_MRT4530_32846C.1
atggcgcggggggagctccgtggcacgcccgcgacgaacggcgcaacggagctcggcggcggcgcggcccaagcgcggcgccgcctctccttctcctcctctgattggcggcccgagcggcagaggctccgtgatcttcagttgggaatggcagatatgtacatgcgccgaattttcgacgaggaagagtcgctcgttgatggtgatcctttcattccctctggcctctgcaagtctgcgtcttggcttcggacggcatag

SEQ ID NO: 28228 - DNA, 1900 bp, Oryza sativa
  Clone ID: PAT_MRT4530_32847C.1
atggcttgcactagggaggttgctttcggcgtgaacctgatcggcaacaacggcgccgcaccggcggacgaggccagcagcctcgccggctgggcgccggtcggctcgcgcaccacgctgtccgctcacgtcgagaaggacgacccgccggcggccatgctcccggctgtggacgacggcgggcgcgagcaccggccgagcggctctcggtacgtcctcgcggcgcgccgtgacggcgaggaggacgggctgcggcacccggtcccggccggcgcgctcgtgccccgggtgacgtaccgtgtcgccgggtgggtcgccgtgcagagcggtggcggcgaacacgccggcggggagagccacgtggtgcgtgtcagcctccacgtggacgatggcggcgagtgccgcgttctcggctgcggcgcggtgtgcgccggagtggccggcggctgggtggagatcaacggcgcgttccgccttaaggcgaccccgcgcggcgcgacggcggtgcacgtccacggcgcgccagccggcgtcgacgtgaagctcatggacctccgtgtgttcgccgccgaccgcaaggcgcggttcaggcatctcaaggagaagaccgacaaggttcgcaagcgtgacgtcgtcctcaagttcagcggcggagccggagtggaggcgacggcgagcatccccggcgcggccgtccgcgtggtgcagatggacaacgtcttcccgctcggcacctgcatcaacggctcggtgatccaggaccccaacttcgtggacttcttcaccaacaacttcgactgggccgtcttcgagaacgagctcaagtggtactggacggaggcgcagcgcggcctgctcaactaccgcgacgccgacgcgctgctcgacttctgcgaccgccacggcaagccggcgcgcggccactgcatcttctgggcggtcgacggctccgtgcagcagtggatcaaggacctcggccgcgacgacctcgcgtcggcggtgcgcggccgcctcaccggcctcctgtcccgctacgccggccgcttcccgcactacgacgtcaacaacgagatgctgcacggccgcttctaccgcgaccgcctcggcgacgacgccgccgcgctcatgttccgcgaggccgcgcgcctggacccggccgcgcggctcttcgtcaacgactacaacgtcgagtgcgccaacgaccccaacgcgacgcccgagaagtacatcgagctgatcgacgcgctccgccgcggcggcgcggcggtgggcggcgtcggcatccagggccacgtctccaacccgtccggcgaggtcatctgcggcgcgctcgacaagctcgccgcgtcgacggggctccccatctggatcaccgagctggacgtgagcgagcccgacgtgtccctccgcgccgacgacctggaggtggtgctccgcgaggcgtacgcgcacccggccgtcgccggcgtcgtgctctggggtttcatgcagggccgcatgtggcgccaggacgcgtccctcgtcgacgccgacggcaccgtcaacgaggccggccagaggctggtcaatctccggcgggagtggacgtccgacgcgcgcgggaccatcgacggcgacggccatttcacgttcaggggctaccatggcacgtacgtcgtgcaggtgacgacggcgacggggaagatactcaagacgttcaccgtcgacaaaggggacacctcgctcgtgctggatatggaaatttaaagcaacttttacctcgatcacatacaacaactacaattttacattttcaactattgtatgagaaaagtaaggtattgtactggttaaagttaattaagaaataaagtaaaaacgggctattcctcgttttatagtaaaaaaaaaaaaaaaaaaa

SEQ ID NO: 28229 - DNA, 312 bp, Oryza sativa
  Clone ID: PAT_MRT4530_32848C.1
atgtccgacgtggtgctgggggctactgtcggagatatgggcccggggccgaggggcctcggggtgccatgtcgtgcccctcgggccttcgcgctgcctcacctcaaggctctcgcccagctgccatgtggcggggggacgtcatttggagttccctccgtggaggaggaccaccgcaagtcttcacccatttatgagggaatgaaagggctgtcccccgtgtcaggcggggggcagcactgggtcccgctcaaggacggactgctgcttagcttccgggcgaaggcacggatcgtggcccggtcaagatag

SEQ ID NO: 28230 - DNA, 1336 bp, Oryza sativa
  unsure (1)..(1336): unsure at all n locations
  Clone ID: PAT_MRT4530_32849C.1
tttttgattctcgcgtccgggcctcantcctacctacacaagaaagagaaggaggaggatattttagagggaggcggaaaagaaccccgagctagagaagaagtttgttgtatttgcagctgtcagaaagaaagaaagaaagcagcaggtagagagagagatggctgacggcgaggacatccagccccttgtgtgtgacaacggaactgggatggtcaaggctgggtttgctggggacgatgcgcccagggctgttttccctagtatcgtggggcgcccccgtcacaccggtgtgatggttggtatggggcagaaggatgcctatgttggtgatgaggcgcagtccaagagaggtatcctcaccttgaagtacccgatcgagcatggtattgttagcaactgggatgacatggagaagatctggcatcacaccttctacaacgagctccgtgtcgcgcccgaggagcaccctgtgttgctgactgaggccccgctcaaccccaaggctaacagggagaagatgacccagatcatgtttgagactttcaatgtgccagctatgtatgtcgccatccaggccgtgctctccctgtatgccagtggacgtacaactggtatcgtgttggactctggtgatggtgtcagccacaccgtgccaatctatgaaggatatgcccttcctcatgccatcctgcgtctggaccttgctgggcgtgacctcactgacagcttgatgaagattcttactgagagaggttactccttcactaccactgctgaacgggaaattgtaagggacatcaaggagaagcttgcatatgtggcccttgactatgagcaggagctggaggctgcaaagagcagctcatctgtggagaagagctatgagctgcctgatggacaggtgatcaccattggggcagagaggttccgatgccctgaggtcctcttccagccctctttcatcggtatggaagctcctggaatccatgagaccacttacaattccatcatgaagtgtgatgtggatatcaggaaggacttgtatggtaacattgttctcagtggtggatcaaccatgttccctggtattgctgaccgtatgagcaaggagatcactgccctcgcaccaagcagcatgaagatcaaggtggtggcaccgcctgagaggaaatacagtgtctggataggagggtccatccttgcctcccttagcaccttccaacaggtaaaccttacgcctacactttatgaggtagcaagaatgcagatgtggatctcaaagggagagtatgatgagtcgggtccagcaattgttcaccggaagtgcttctaa

SEQ ID NO: 28231 - DNA, 775 bp, Oryza sativa
  Clone ID: PAT_MRT4530_3284C.1
gattgtaatacgactcactatagggcgaattgggtaccgggccccccctcgagtacgaacaagtcaccagacgaacacacatcaccttaggagtaaaatttatagccgcagcccgtggctccagacacttttagtcaatgtgcattgaatatgcaatagcgatggaaaacttgcattctacttaatgttgcattccaccggtctatgccccccaaaaacaaacttgaataaaaaaggaaaaaaattccatacaggtccaatgtatagagaaggtgaaatctattaacggggcaatggccaaaaaagacccaaaagggaaagaaaaaaaatattatgaacaccaaatagttgctgtcttctagcacttcctgctacacctccctgcacatccttcgcagcaaccagtcctataaagcatcgtgggcaggccggtactttgtcaacaaatctcatcagtcttcagggaccaacgccgatggttgatgcaggcaacaaatgaatctagtagcaggttatgtaagagtccgcgcacattcccctcgcctattgcaactccgacggtatctgtacattactccctgaaatttcttgcacacaggtgcaggagtgactgattaaccaaatccgaaaccttcattcgcctcatgaatagccagtagcaatctctcctggagctgctctttcgatgtgtactcaggaaggtctagttggttaaagcaagtatgtgctgcgtgcggatggttggtgcttccgtaggccttgtgtatctggaatc

SEQ ID NO: 28232 - DNA, 378 bp, Oryza sativa
  Clone ID: PAT_MRT4530_32850C.1
atggcggtcgatggtgaggcgaaggacaagcacatcactgcctcccgtgaggcaataatctccgtagttgagagccctgagacgcggacacttgacgtcggtccatccgctgttcctgctagtcatataggtgactcgggcatggttgatgagggcagtcgtggtgaagttgctcagcgtcaggttaggagtgaacacgaccttcaacaccgccacattcctttagaggagcgaatggaatgggatctccttgccggtgagggcattcacgatttgggtagcctcaccattgtagaaggcgaaccgaccattgcaggagaaaggatagtggcgagcctttggtggagagcgatggagatccgagaggacacgcactag

SEQ ID NO: 28233 - DNA, 274 bp, Oryza sativa
  Clone ID: PAT_MRT4530_32851C.1
ttgcgcatcaggcggcgtggagggcggactggtaggcggtgccgggccgggggtggttcggcggagcggatggcggcgccggggccgggcggcaggtgtcggcggcgcaggcagtgggtgtcggcagcgcgggcgctgtctcctggcggcgcggacggtgactccaggctaccccttcctcgtaccccatatctcggaaaagaggattataaggtaaaagcacacacaaatctaacaccactacagtgataaacctcataaaccctaccaccac

SEQ ID NO: 28234 - DNA, 301 bp, Oryza sativa
  Clone ID: PAT_MRT4530_32852C.1
ataccaaagcgattatgttacagaggcaccgcccacaatatgcgggaaaaagaagagggatttgttgtgccaccacgcttcgtagaaaagtgggaactggcaccacgaatacgcggtaaccacaaaccatagggaagggaaggagcaccaaattgccccatagaccgaatactagtggaatctcgaggacgtatttcgaggaggaattacggtatactaaagctgtagcgaggcatatcttcaaatggcgaatacaatgttaaacgggagtagagatcatcaaccatcaccgagtggacgt

SEQ ID NO: 28235 - DNA, 432 bp, Oryza sativa
  Clone ID: PAT_MRT4530_32853C.1
cggacgcgtgggaaaaagtttaatcaaattgtgtcctaagtttcaaatatttatgactggaggaagtatctaagaaagtctcttaatgggccaaaagccctgtgaagctagggctcaacaagcccaattatgtaatgcatgtgaaagattcctccgtggttaatccccaactccacagcatgcacttacctcctgagctcgaccaagcacttttcctcacctcttcattttttttctcaattttctaataatttttgctatattttcccccatttatagaaccaaaattaagtccaacactaatacctgtagcttttcgctaaatccgacgatttttggtttctaacatgtggttatcgcagcctcgaaatttcaaccatttcactcggtttttggtggatgtttaacggaaccccagaattcaaattcaaa

SEQ ID NO: 28236 - DNA, 450 bp, Oryza sativa
  Clone ID: PAT_MRT4530_32854C.1
ggaaaagacatgcagctgttgcagcatcttcaattttaagtttttaaccatgtgtttttatttaatgatctaaatgggactacctattttagcaattcaatttcttatcagtaaataggtccgactgatttgaccttttgtttgattgttatctgtactgttcacctctctgctattcgacaacgccgagacagcattttattctccataattccttttcatacggctacaatcttctgaaaagtctttgttgctaaacagtcagcattcccgacttggagtttggactaaacaagctacttagtcataagaacacatcattttgctcccttttttttcagtaactactgattactcattttatccatttggcattcagcttgctttatgggacaagctagaaacacaaattgtttctcaaaaaaaaaaaaaaaaaactcgagggggggc

SEQ ID NO: 28237 - DNA, 1947 bp, Oryza sativa
  Clone ID: PAT_MRT4530_32855C.1
atggggaaactgttgttcttgcttgcatggattactctcttgcaagtaccatgcacgatagcggcggcggcggccggcgcagcgtgtcattgcttgcctgagccgccggagccccagtacggcggcggcgtcgtccggaacgccgacttcagcgccggcctccatggctggtcggccttcgggtacggcagcctcgccgagggctcgtcgccggcggggaacaggtacgccgtggcgacgaaccggacgcggccgtaccagagcgtcagccagaaggtcctcctccagaacgacacgcactacaccctctcaggtctggtggtcaagaaatcgcacgtgagcgacggtgtcgccgacgtgcgggtggtcgtcaaggccgccggcgacttcatccacgccggcggcgtcgccgccaagtccggctgctggtccatgctcaagggcggcctcaccaccgtctccggcggccgcgccgagatctacttcgagagcaacgcgacggcggacatatgggtggacagcgtgtcgctgaagccgttcaccaaggaggagtggagcaaccaccgcgacgcgtcggcgagcacggcgaggaggaagacggtgaggctccaggcgacggactccgccgggaacccgctgccgggcgccgccgtgtcgctggagaacgtccgcaacggcttccccctcggcgccgccatgagcggcgagatcctgcgcaacccgtcgtaccagcggtggttcgcgtcgcggttcacggtgaccacgttcgagaacgagatgaagtggtacagcacggagccggcgccggggagggaggactactcggtgccggacgcgatgctggagttcgccaggagccacggcatcgcggtgcgcgggcacaacgtgttctgggacgacccgaaccagcagccgcggtgggtgcaggggctcccctacccgcagctgctggcggcggcgtcgcggcggatccggtcggtggtggcgaggtacgccgggaagctcatcgcgtgggacgtggtgaacgagaacctgcacttctccttcttcgagcgccgcttcgggtgggacgcttccacggcgttctacgcggcggcgcggatgctggacaccgggtcgacgctcatgttcatgaacgagtacaacacgctggagcagccgggcgacatggcggcgctgccggcgaggtacgtgcagcggctgaagcagatcatcggcgggtacccgcagaacggcgccggcatggccatcggcctcgagggccacttcaccgcgccggtcaacatcccctacatgcgcgccgccctggacaccctcgcgcaggccggcgtccccgtgtggctcaccgaggtcgacgtcggcggcggcgcgtcgcaggcgtactacctggaggagatcctccgggaggcgtacgcgcacccggcggtgcagggcgtcatcctgtgggcggcgtggcggccgcagggctgctacgtcatgtgcctcaccgacaacgacttcaacaacctgccgcagggcgacgtcgtcgaccgcctcatcaccgagtggagcacggcgccgcgcgccggcacgacggacgccgagggcttcttccaggccgagctcgcgcacggcgagtacaaggtcaccgtcacccacccgtcgctcaacacctccgtgtcgcagagcgtcaaggttgaaatgggatcagggagccactacttcatccagggcgcgagcaaacaagaacccagagtaacgaagaggggatacctccgagccaggggttgcctggcgggagcaccgaccagggggagcctctcccccgctgccctcgcgcacgccttcatctccctcctcctcctcctcctcctctcccccgccgccggccaccgcgaaagattacgagccgcggagcgcgacgccgaggcggccggagcaaaatttctcccggagagagaggactag

SEQ ID NO: 28238 - DNA, 1367 bp, Oryza sativa
  Clone ID: PAT_MRT4530_32856C.1
atgggtaaggcctccaaagacaagagggacatctactaccgcaaggcgaaggaggaggggtggagagctcgtagcgccttcaagcttctgcagatcgaccaggagttcaacatcttccacggagtgaagcgtgttgttgatctgtgcgctgctcccggaagctggagtcaggttttgagtcggaacctgtatgttccagcaaaacaatctcctgattgcaaagaaggtgaccttcctcttattgttgccattgatttgcaaccaatggctccgatagaaggcgttatacaagttcaaggggacatcactaatgctcgaacagcagaagtggttattaggcattttgatggatgcaaagcagatttggttgtctgcgatggtgctcctgatgttaccggccttcatgatatggacgagtttgttcagtcccagcttatactggcggcattgacaattgtgactcacgtacttaaagttggtgggaaatttgttgcgaagattttccgtggaaaagatacaagtctgttgtattgccagctgaaactattcttctcacaagttacctttgcaaagcccaaaagtagccggaactcaagcatcgaggcgtttgcagtttgtgagaattattcgcctcccgaaggatttaaggaaaaagatttatatcacctgctagagaaagtggggactccttctggggctgatgatttagactgcagaagtggatggttagagggaccaaacaaggtctacatcccatttctggcttgcggtgacctcagtggttacgattcggatcgttcttacccactaacaagcacagagggaggatcctaccagagcttggatccagtccagcctccaattgctccaccttacaaaaccgcactggagatgaaaaaggtcgccagccatggcattggagcagatatcagcaaattatccctcgactcctgaactacactctggatcgctgtttgtgttcttgtaactgccaaccctgtggaatttgcaaattgtatggcattgttgttccacagattacacaagagatgaactgaaacttcagcttcatgtggttgttatatcaaccaaaaatgtactacctgttatttttatttagaaaaggcacgaattctttttctggatgccagatgtctgaacttctatgaatgcatggatgactagaataccaatattatggatgcaaaaaaaaaatgaccaaactcgggactagttctctctctctctccaaattttagtcggaagagaaactgaagaacaaacagaaatatatgattcatattaggaaatgtttacattactcgaacatgtttttcctttcactggatgactgaatcgattaagaa

SEQ ID NO: 28239 - DNA, 1820 bp, Oryza sativa
  Clone ID: PAT_MRT4530_32857C.1
atacaacttttattttgcgcgcgaaaagctatcaaagagagagaagaagaagagaaaaacttagcaaaagcagcttaaaaacagcgtcgtcacgctgcctcccgcttccccctcttcgtcttcttcttcttcctccaatggcggtggcgcaggcgtcgctgctgcagagcttcccgttcagggcggcggtgttcgcggcgtgcgtactgctgctccccctcgtgccgtcgccgcaggcgccggcggcggggggagatggtggcggcggcggcggccgtggggaggcgtttcttgccaaggtgtgggagctgctccacctgctcgtcgtcgggatcgccgtgtcgtacgggctgttcagccgccggaacaacgccgggaggcggggcgacgagaaggatgccgcggcgcaggcgaaggcggactccgccgggtacgtgtcgcagatgatccacgactcgctggtgttcgacgacggtggcggcgacgtggcgctcgacagcccgggtggcaacagggtgcggtcgtggagcgcgatgcaccaccccgacgagcctgtggtggtggtggcgaccggcggcgcaggaggcggccggagccacgccgtggaggcggcgcagcaggcgccgccgctgtcgctgcccgtaagaacactgaagccgcagggcgagtcgtcctccagcgcgggctacggcgacggcggcgagccgtgggcggcgcggccgcgcaggatctcacaggacacgcccggcggaggcggcggcggccatgaaaccgtgctcccttcgccgatcccgtggcggtcacggtcggggaggttcgacgcgtcggcgccgagccccccttcgccgtcgccgaagaggctctccccggcgtcgtccctgtccaaggagacactagccaaggccagtgaggactactcctccaggcggaggagcccgtacaagtcatccccaccggcgccgcctccgccgccacctccgttcctcgtccacggctaccatccgccggcggccgaacgccgcacggcggcgaagagtttcaacgaggatctgcaggagcaaacctcccacagcttcactacctccgaattcagccgtagcagcagcaactcctcgtcggcgaagccaagaatctccatagatagctcctcctcctcctcgtcgtactacccagttgccaaatcggtgagaacaatcagaggaggaagagaatcactccagagccagagccaagaacaacccgacgtcgccgtcgccggcgacgcgccggctcttcttcacggatcggattcagacgatccgtacggtggctacagggcgtaccaatccattcccaggttccagtacgagagaggcagcagcgaccccatcctgggcaacgtgacggtgtcctcggagagcagcgacgacgacgacagcgacgtcgacggcgacggcgagctctcgacgagggggaactcgccgaggagggagtcgtcgccggaggtggacgagaacgaggtggacaagaaggcggaggagttcatcgccaggttcagggagcagatcaggctgcagagaatcgagtcgataaagaaatccgcggggccgcgtggtgtcaagcacggcaagtagctcgcccgccgcccgccgccggcgatcaccggcgccacttttttacttttttttttgttctcgttttgagcagagatagatagtacggtactatttgtatttgtgatagctaattagtagttatcaagaaccacctgtaaacaaattacattcatgtagatgatgaatgagagtgagtgcatgttcatgctcaatttctgggcaagg

SEQ ID NO: 28240 - DNA, 903 bp, Oryza sativa
  Clone ID: PAT_MRT4530_32858C.1
accttgttttgttccccgacccgtattttttgtgtttgtggaccctcctccgtgtttttattgggaaaaacccttgttttaccctatctataaaaaaggttggaaatgggaattgggctcccccttttcccccccccttttaaattttccccacccccccctcaggggggggtgggtttggaatattttcccccggtaaagccccggggaaaaaaagggagggagtgtaattttaagttgggttttggggtttaaccttggggctgcatgggttttgcccttttttttttttgtttttttttttttttttttttttttttttttttttttttttttaatgtaacactcatcaatcatcagacaaatagtattagaacatttgactagtcattgaccacaaacacatatggtaacttccaacaagaggcatttgatgtcctccgatttatggatgagacaacatatgtaatgcttgaaatgggtaaaatccattaaatcaatccgcaatagtaactaatagcagagcaatcaacaaccaactaaattccttcatcattttgttggctcagtgaagaacttgttgatagctggcatgatctcaggggtcttgtcgcgcacatagtttcttagcccatgctctgcgtagcgccttccctcctcatggttctcgagcactccagctgccctccctaccttgttaaccctgacttcggggttgccggtgatgttgcggaagagctggaagccgcagatgccgacggccacgcccatcgccgcgaacagcgggtacacctccggtcggacccagcggctggaggccatcgtcggcgtcggcggcggcggagagagagagagaggggaaagtggaaggcgacggtaggagagagagagaggcccggccgg

SEQ ID NO: 28241 - DNA, 481 bp, Oryza sativa
  Clone ID: PAT_MRT4530_32859C.1
gcgatattcccccccaccattgccgcggacgtctgctccgattccgatcgtggaagggatccctatcgatatcgtcgtcgtcgtctctctcgtcgccctcgaaatgagcagcggctctgcatagttagtagtttgaatatatggacaatgacatgagcagtcgtttatgcaatcgatcatgaacccgtgcaatgagttcgagaggcaacagtgcagcccgatgaacctaccttgggagcaggcacgcaggatacaactgatgagttgtcaagtgatgagggagcaatgttgacaagatatgaggttgatggcggaagaatatcattgtcaggatatttgcaccatggcggaaggtatgatgcaggcaagcgcatgtttgatgctggcatcagctggcatgccacttggtgatgcctcaggtacactgggctctctttgatgccctccatgtgtggatcctattctggcaactgctggaatt

SEQ ID NO: 28242 - DNA, 1200 bp, Oryza sativa
  Clone ID: PAT_MRT4530_3285C.1
atggacgattttgtggcagagttggctcgcatgaccctggtggtgggctaccccaacgcgccagagtactcgactattcggccgctcagtggcgagcttcctcaccgtattcgtctggtggtgcatcgctatgtgggcacctgcctcgctaacatggtggttgaggcatctggaggcaccgcagatcacgcctgtcaggaggcagcatatctgatgatggccaggcttcgcgatcgccacaactacatcttctgcaacacggcgtaccgcttccaccctcgccaagcaagtggcgacgacattagcaccttccgcccgatagccggcaagaacgacaccacctttggccacatgtgcgccgtgatgaggggaatggataggatgcactccgacctgcgcaaggcatccaaggccttgaatgatgggaagcttgtgaggatcatagttctgaaggatgagatagcacgactgaagaaggagaacgctcagctgaagggtctccctgctcctagaggagtccggatccgcaccacgcctcgcaagtcgacgactgctcccgtgcatattcagcttgcgcccaggaacccaccacctcccgcagttcctcccgcaactcctccagcacctcccgcagttcccgcagcacccgcagctccagctccagccccagctcctgttccagtgtcagctccgatgtccgctctctccttcactccagcgtcagccaccaggggtccagccagtggtaacggaggttggttgcctgctaactccagtggcagccgcgaccacagcagcagcagttccagtggctcagagccgggcaatggcgagacgtatctgccagactccaggagccgcttagagggacctagcgacaagcaggaggacgccttcgactccaccaaccgtgagggcagcaacggcaaagaacgtaccgatggtggatatcccaacagcgcctctggcaacggtccgccaccgctccccgagaacccgactcttgcacaacaccagcagatgcaccagaggatgcagcagcaagccgagcagcagcagcagcagtttggtccccctccccctcagtccaagctgccggagtttctatgcgtcaggccacccaccttctctagcaccaccaaccccatggaggcgaatgattggctccatgccatagagaagaagctcaatcttctgtag

SEQ ID NO: 28243 - DNA, 316 bp, Oryza sativa
  Clone ID: PAT_MRT4530_32860C.1
catataaacgatgacagaacacagtttataaagtagtacatacttattacatatgattgcaacattgcacaagatcaaggtcctttatattgggtaagctacagaaacaagattgaatcacaagcatggcgtagcaaatcaagaaccccaacttcattatctagaaaagaaaaaaaaatcaagaaccccaacctgcgttcggttctgggtccgcggatgtggatgaactaaggtggcgggctccggcttggaggaggaggaggcctccaccgctgcctgtatggcgccgacggtgacatctctgcggacgcgtggg

SEQ ID NO: 28244 - DNA, 238 bp, Oryza sativa
  Clone ID: PAT_MRT4530_32861C.1
atgggggacattggccatgcgcgcccatatggcgccagcgccagcggaggcgtcacctgtgggcgcgcgacgtcgacgaccccattggctgacaaacacagcagcaaagccccgccgcgcgcgcgcgcgcggctggagccgacgcgccggcgcagccagcccgcgcagcgcatgaatgcgttcacgtggaccagtcagggcctcgcaactcaggggaacggccgcgcgctctcacgct

SEQ ID NO: 28245 - DNA, 127 bp, Oryza sativa
  Clone ID: PAT_MRT4530_32863C.1
gctagcgcgtccgcatcggccagcatcgaggttcctgctggccggcgcgaacaggcttcagcagaacaggctcggccagacacttgagcttttccgacaacagggtcaggtggaggatgttgatctt

SEQ ID NO: 28246 - DNA, 575 bp, Oryza sativa
  Clone ID: PAT_MRT4530_32864C.1
tttctatctgggcggccttcctttttttttttttttttttttttttttttgaaaaaaatgtggcgacgtcttttatgtgataaaaaaacataatttatgattttcaattaaaaggcaagagggaaaattgaccatgattgtccatctaatgaagggcacaaacaacctaataataggacaaaacctgccctacagatcatccacgacttagggtgacaaacaggaatttccctataactagttcgagggagtaacgcatggacctatgtttgcgggagtgcactccctcaatcgattcattccaaaactccattgcccaactctacagaaggagaaaggtgctcaccacctgcgggatgttggctaatcatgtaaaagatctaaccatttgcacaagagctctctttattcttcacagatcaaggactgtaaaactgagcaactaagggttgccgcttcatactattgtagaatttaagaatcacataactttttgaacagcagcacagttttaacctaccacagtgtccagtagccgccaaatccataactaacagctaatagaagccataact

SEQ ID NO: 28247 - DNA, 135 bp, Oryza sativa
  Clone ID: PAT_MRT4530_32865C.1
gtatgacagaacctaaataacggtgtgttggtactaattccacgcaccagctacatgatcattacatcctccattacacaggcactaatgcatcggttacacatagcaagtattgacacgggtgactagcttaac

SEQ ID NO: 28248 - DNA, 627 bp, Oryza sativa
  Clone ID: PAT_MRT4530_32866C.1
atggggacgacgcctccatctccctccttccttttcctccagatccggctctcctcttcttcagttgttcttcttccagtgctctccggcggtgcggcgcccgctcccctcatcttaggagaaactcctatcatcggttcctcgaaaaaaaatatagtaggaaaaaaacaccaagactgcagacctaagaggctatctatagtcaagaaggaaagacgtcgtgccataagccaacaacacaagccactgaggaaggagcctagcaccaggtcggccacggctaagcacggcctattgtctctgggcctaaaccttcgcctggagcccgactgcctgccatcttatctgtggtggcctcatcatccatcaactcagctaccaccaaacaccatcacctacacatggtcgccacatggcccacaaaccaacacccctctgctggccaacccctgctcgacgatgggcttcaaggagtctccactcctgctgttaccctccgtcggcaaccctcattggccctcagaccaccacattcatcctcaccatggagctcctcgactagatcgagaaacggattggacatacgacggtaggagctccaaggagaaagtggggacccaaccctaa

SEQ ID NO: 28249 - DNA, 610 bp, Oryza sativa
  Clone ID: PAT_MRT4530_32867C.1
tcccttggcgccctctattggggcggcaaaggacgcagatgaaaaagtacggccgcaagctctttatgggcggccaaaattacaattagccccttgccgccctctgtatgggcggcaagggcctaatcgcaattttggccaacgacggcagacggcgcggtcgacccaccgtctgccacgcacacatacgcgagagatccagaaggacaggactactcgcaatgcatcagattgttgcacaggacacaggcccggccctggaggagggcgatcagtgcggctgtctaagcccccaaaacccagtaaacaaattgtggggccctcgagcccctccgccgagcagcgcccctgctattgcccaccgctgccctcacctccatctcccgccgcaacgccgcctaccgctgagcaatgccctgtgcctgcccgccgctgccctctcctccacttcccacagcagcgctgcctgccatcgctgcccaactgcgtaagagagaatagagaagagaaggtgaaggaggagaggatgacaagtgggcctcacgtatatattttaattctaatgctacataagtgccacgtcaatacggccacgcaggtgccacgttag

SEQ ID NO: 28250 - DNA, 750 bp, Oryza sativa
  Clone ID: PAT_MRT4530_32868C.1
gttcgaaagctaggcttttcggatatttctaaatatttttggatatttccaaatattttccgattatgagcgagagagagatatcaccggggttcttataagatgttgtgttcccgaagttcaaatccctgaggggggttctactctccgttgaggagcccacaatgagccaggtcttttccagttctatcctcatgaggttgcacaaatgcacttcgccttccactaagggtatctctttcctttcggaggtgtcctccaccaccaagagtaacaaatgcaaaaaagatttcttggggataaatctcaacaaatatttacaaagttaacaacaagcactcaaacaaactaaaatcaaccactcacacacacatgtacactcacgaaatctaagcttgtagattggtggagaggaagaagtgagaaaggcaaggctcaaaagtggatctcaaggctcaaaagggcaaaagattttacaaaattccagcacgagcacagcagaaaactgggcaaaaaagcatttcggaaaaaaatctgaaaacacccgtactgattttgcgccaacactgcatttcgagaatttctgaagcaattttcaaaaattccgaaaaacaccagtaccgtttttgtaaactcgaagtagttcgggaatttccaaaatgacttttgagaacttctaacaaagaccattaccatttttcgaaggcaaaaaccaattcgggaacttcctaaatcaaatttagaaaactc

SEQ ID NO: 28251 - DNA, 366 bp, Oryza sativa
  Clone ID: PAT_MRT4530_32869C.1
agttcatggtgatggtactcagggggttcaaggtgaaggccctaatcaagacggcaatacagcacagttgcagttcaacaactttcaagatcaggttgactatgctgtacaccatgctttgatggttcaatggttgatggttcaatggccgagtatcaagctacaggaccaatttacctaccaggaggagtattcccgaattatcggccattaatcaccgataatcaacaattcgtccagtcaatccctcttaatgcaccatcggctcagccaacggcaccagtatcggctcccgcacctgctgtaccaccttcggctccaggccaattaattaatccccgattgtttcagcaaacaccgccaagg

SEQ ID NO: 28252 - DNA, 270 bp, Oryza sativa
  Clone ID: PAT_MRT4530_3286C.1
atggcaagccacggatcttatggcggcatattcggtggtgacggcatagatccggtggaggtgacaggtcccatggcgtgggtggcttcgatgaggctccgacagtggatccttgtccatggtgttggcgaggggagctcgtccatggcagcgatagacgttgtgacggcgacgaccactcctccttctcatcggcgatggaggaaagagactaggagagggcagcgttgctcggctcggcttgttcaacgcgattccagatcttgctga

SEQ ID NO: 28253 - DNA, 441 bp, Oryza sativa
  Clone ID: PAT_MRT4530_32870C.1
ctccaatccaatacatgagctaccaaaacgtggatggtgcggcagaaagctactaaggacgccttgccgataaagaataactaaataaataaattgcaagcaatcgttatgatgctatgtactgttcagtcttccgactaatgatgataaagcctctctttatccttaacagacaaaaaaacaggactgatgccgaaagaaaagccagaaatcctagtaaaaagatcgaaggacatcaagcgctgtgtctatgtcaccgagaaggacatcagtgcctgctacaaggccctgaacgaacaccatggcctcctggagggatacatcatgaaggctggcatggccacgggaggatctgaattcaacaaggcaccccgtgaggtaatcctcgattacaccgaccacgcccttcagaggaccgtccctgctgccgagcctgccatg

SEQ ID NO: 28254 - DNA, 588 bp, Oryza sativa
  Clone ID: PAT_MRT4530_32871C.1
gagacagcttctcaactgtaactagttccaaatcaaggaaccctaataatgcacaagcttcacgcctctgccgtgaacacaagctatctcctctatcagatgaagatatgattgctggtgtttcggagctctgtatttcacctgaatcaaataaaatctttaataaaggaatgccatcgaaaacagaagagagatgtatggctcccatagattcaaatgagaatgatacttataatttttaccaggtatctgatggccaacacctaattcttcatccgctaaacatgaaatgccttataaaccattatggaagttctgatatgctcccaccaagaatacatggaaaaatcttggagctagaaactgtaacacaatccgaagctacaagaaagcgctatcgttatctaagtcacttctcattgacaacaacgttccagttctgtgaaattgacctgggtgatatgctgcctcctagctcattagctccattcatggatgaaatcaagaagcgagagaaacagaggaaacgaactgccaagaaggaagaaagcgatagagtgaaagccgaagttgctgctgctgcacagg

SEQ ID NO: 28255 - DNA, 224 bp, Oryza sativa
  Clone ID: PAT_MRT4530_32872C.1
ttcgcgcgcgagaggggaagagatggcgcgcggcgcgggagatcgagcgccatcacccgggatcgtgcgggagatcgagcgcaattgcccaggatcgcgcgggaagggcggagatcgggcgggcgctgggtggaggggagaggggatctcgatcggctacggtggggaagggatcggctgctgtgagtggggtccacaaatcgcgttttttatcgcccaggtag

SEQ ID NO: 28256 - DNA, 447 bp, Oryza sativa
  unsure (1)..(447): unsure at all n locations
  Clone ID: PAT_MRT4530_32873C.1
cccacgcgtccgaacactttggtgctaggttgctcaccatagactcttccatgctatttggtgggaagactaccaaggaatcagattcatacaaaaagggtgatagagtgcggtacattggttcgttacagtcaacaggtattatccttgatggagaaagtcctccagattttggttcacaaggtgaaatatgtcttcctttcgaagagaatagatcatcaaaggttggagtaagatttgatgaacaaattccgggaggtattgatctaggaggcaattgtgaagttgatcatggtttattttgttcagttgattctttatgcctcgatgctccaggatgggaaattagatcgaaacacccatttgatgtcattattcantttatctctgaagaaatcgagcatggtcctttagtcttatttttgaaggacacagaaagaatttgtg

SEQ ID NO: 28257 - DNA, 255 bp, Oryza sativa
  Clone ID: PAT_MRT4530_32874C.1
atgccatactgggccgttctcggccgctataacacgatgcacggtatgggcctcacggcatcggcgacaggcggcgttgaggcaggaggtgaaggagagggcagcggcgagtggcaacagatggccgctcgacggaggggctcgagggaggtgcctgtcagaggcaacccaatatggacgcagggtcgtgcagatggaggtggggatctaggtagcgaggctgggtgggagtgtgctggcgagcgtgttctttga

SEQ ID NO: 28258 - DNA, 445 bp, Oryza sativa
  Clone ID: PAT_MRT4530_32875C.1
ttttagctagctatagctagaagcctagcacatgaacccggcgccgtcgagggcgccgcagcggcagcagcgcggaggggagatgtcggcgcgctacggcggcgggctgcagttcttcgctgacgccccgccggcgggggtggaggggggcgccgcgaccgcgcggacgttcttcccggtgccgggcgggggaggggagcagcagccgccggagcgcgcgatgaggcagcagcactacggcggcggcgggagtggtgcggccgagatctcgctggggcacggccacggccacggcggcaagcaccatttccatcagttcggcgtcgaggcgaaggacggtggcggcggcggcgaccagtcggggtttctgacgcggcacaacagctcgcctcccgggttcttctcgagccccgtcatggacaacgacatcagcgaaccaaagtag

SEQ ID NO: 28259 - DNA, 232 bp, Oryza sativa
  Clone ID: PAT_MRT4530_32876C.1
taatcttccgccaataattaaaaaaaaaaaagggaggaatttatttaagaaaccggggcgctcacatggtcctctcctaattactgactcatggtgactacctactccaactcccacggacacaacaagaagcccgtggagatcactcagggcgtctacagggcggccgcagctgtggctgccggcccctgcggcacgtttgacatcaccaaactcggcgccataaacaact

SEQ ID NO: 28260 - DNA, 627 bp, Oryza sativa
  Clone ID: PAT_MRT4530_32877C.1
atgggctgcctcccgctggagcgcgccacggggagcggcggcgcgtgtaccgacgagaaaaacaccgtcgtcgagcgcttcaacgtcggcctccaggacatgatcgcgaggctcaacgacgagctcggcgacggcgagatgatcgtgtacggcgacgtgtacaggccggtggccgccggcggcgtacggggtggagaacgtaggcaacagcaccgtgcccacgcgggtcaaccggcggcggctcacctgtgccatctgcttcgacatgttcgcccccgtcgccggcggaggcgagcgcggcgaccgttcctgaggagggcgcgggggcggaagacggtgctggagaacggccaccggaggccgaggcaagggggaagcggcggcggcggcgggaacatgcggaggcggcggaggcaggcacggcaggtgacgaggagagggcagcggcagccggcggtaggcccatgggggcgggagtggaggaggccgcgcctcgacgctgtccgcatctccgccgtgatagaattgccacataagcgccacgtcaaatgccatgtaggtgccacgtcagccaaaaccaccatcaaaccgcggagggatctcatctgcaccggttttaatagttga

SEQ ID NO: 28261 - DNA, 408 bp, Oryza sativa
  Clone ID: PAT_MRT4530_32878C.1
atggcgagagaaatcagagagcgtaaattatgcttcctgtctctcacaagtcgatccgttgatgtagatgatagtgtgatatcagacggcaaaagattgcaaaatctgcactgcgaaagctcacactttcagatgcatcaactgccggagaaaggatcgagagcgatatgctttcaaccattgaagattcctgcttctcctacaaacattcactaccagcttagatggaaaggcaaactgtcaaccagtggatcatgcaaacacagtgaaacagaaaagctactatatcgtgggctcagtaagtcagaaagatacacatcaacgttctggatggtctgcatggacaatcaatctatcaaaaagctagataacaattacatgcatgcagcacagcagtactgcccatga

SEQ ID NO: 28262 - DNA, 1798 bp, Oryza sativa
  Clone ID: PAT_MRT4530_32879C.1
atctaaagcggaaggtgttgactgtacatcacatcatcacacctcatttctccttttatgtataagtggtggtgcacacaaaatcacatggaataggagcttcaggtacaagggaacacctaatgaacttatcatcaaaacagtggtcatttgatacatggaatgcactcagctgagattactttgtagtcatattttcatacaggtgggtcctttgtatagaaaaaaaggggtagtcttacactaagactaaatgaaaacagagacatctaagctacctcaagactttctcagctgcgtacttctctactttcattgtcctgttccttcttctaatgttttcgttgttatcgcgctcgacttcatcaacaagaataatttcaggttcatcatcatcttcataaccagcgttctccatttcacccttgtcatcccaatcctcctccggctcctgctcctctttgccatcatcttcatcatcaatgtattcatcatccatatactgttgttgagctcgcagggtgtggaactctggtgggggagagcagtcttcagtgatcgcctcgtcccgtttcatcacgagatgcctaatgattctctcgtccttatctagcagggtcttgaagtcattgatgtattttgcctgtatctcaaagttcattaagatgtagttggcatgtcttgctttctttattttgtaagcaagtctacgcagtccccaattgttaagcctccatatccttcctttcttctctctgacaaaatcttgtacttttgatacaacatcttcaacttcttccacacgatcctcatgaattaggtaaaccacttcataatgccgcattcttttcagatttaaatcactctccatttggatattaagaaactcatatagcttttcttcatctgcatcagcaaattcaggtgcaacttgaccatcatctttcaccattttcttcctgagcaggacggcctcggggaacggcccggtggcctcgccggccttgggcgcgaagctgtgggtgtccaccctctcctcctcctcctccccctccccgcccttccccctcctcttcttggccgccgcggccaccatcagccgccgccccccgcctccaactccggtgaacgcggcgacccgctgcaacctcagcctcagctgctgcggctgcggctgcggctgccgcgcgaggagggacagacggccgcggcgcggcggtggcctccatggtggcgggcgaggagagcgaggtcgaggttctcgccggggtttcttctcatctggacccttgccgtcgacttcactccgaggcgttcgggctgccgccgctcgtcccggcccttgagcccgggcgtcaacatgagcagccttgccgccggcgcatgcttcgcctccgccggcgccggctacgacaatgccacctctgatcttttcgttagcggggtggagaatgtaggcaacagcaccgtgcccacgcgggtcaaccggaggcggctcacctgtgccatctgcttcgacatgttcgcccccggtaggatgagatcgacggggtgctcccacagtcccactacaactgcatcgcttcggtgcccggacccctcctgctcggtcgccggtggaggcgagcgcggcgacctttcctgaggagggcgcgggggcggaaggcggtgctggagaacagccaccggaggccgaggcaagggggaagcggcggcggcggcgggaacatgcggaggcggcggaggcaggcacggcaggcgacgaggagagggcagcggcagccggcggtaggcccat

SEQ ID NO: 28263 - DNA, 249 bp, Oryza sativa
  Clone ID: PAT_MRT4530_3287C.1
aataaaaatacgtacgtacatacacggctgatcatggagaggacgagttacactgtgcgctcctgtaaggctatgtatatgcgcgtgtgtgctagtcgtgtctttggtattttccttctttgttcttttcttttctataaagtgtgtgtcgtcatcagtgtgtggcttgtgctgcagtaataatatatatatatatatatatatatatagtactatgaaataaagagcagtgctgctatgtcatatagt

SEQ ID NO: 28264 - DNA, 544 bp, Oryza sativa
  Clone ID: PAT_MRT4530_32880C.1
tctcaccggcgccaccgctgctctgcctccaccgcgtgggtcctctccacaagcctcggtcgcccagtacgcatcccatccgtcgccgtcgacctagctgcctggtggaggtggaggcgagggggattgactcggctccggcgctccgattgagcccgcagccgaccgatccggatacgatccgctccgctcctcgccggagcggaggctgtcgcgaacccaggtaacatccccgccctaacctcccacgccgcacgcacgcgaaggccgacggcggcagcgccatcccctgacggccgactgcgcagcggcgctccgccccgcgccccggcctgggcctgcccgccttcggccttccccgactcgcgccgctgctgcgccccgccgtgcagccgttgccttccgcccttcgcgtcggcgctgccgtgtcgtcgctccgtgcagcgccgtcgcgcgcggcgcgcccgctgccaggcatccggccctcccccaagccccagcccccttggactccgccaatttagactaggaagcatgaggaggc

SEQ ID NO: 28265 - DNA, 651 bp, Oryza sativa
  Clone ID: PAT_MRT4530_32881C.1
atggacatctctagggcaaatgaaggctacacgggctgcggctcggtagtcgagatgtcatggcacagggccggcctgaagcacctttgtaataatgccgccggattcgtcgccgtcgtcggccaatccgccactccaaaccctagcccaccgctgcccaatccagccggcctccgcgccgccagattcgtcgccgtcgtcggccaatccgctgctccaaccgtcattcgtcgtcatcggcgccggatccgcatggggacgggccgccgccaccggattgacgtcgaggtcgcgccgccgccggatccacgccgaggtcgcgctgccgccgccagatccacgccgtcgtcgcgccgcgggggagggcggggaagtcgacgacgacaacagagggaggtagaggccgcggatcagcgcgggacgggccgccgaggtcgcgccgccgccgctggatccacgccatcgtcgcgccgctgccggatcgacgtgaggtcgcgccgccgccgccggatcgacacccccgccgcctctggcaccggagcccgcggccgctcccgcccgccgccgccgccgccgccgcgcccgccccgccccgcgccgcttgaattcgatggaaggaagaggcatcatttttacatgcggcctgcttaa

SEQ ID NO: 28266 - DNA, 471 bp, Oryza sativa
  Clone ID: PAT_MRT4530_32882C.1
atggatgcaccaattcatagattgtcgacaaaaatgccggatgaaggaagcgctcatcttgaaagcaatgctaacatgttgtcagtatgcaactgcatgttatggtttgaagtgatgataaatgagattgaaggggattgtcttggtccatttgctataattctaattaaatatgctagtgacaagtttgagatcattgcgataagttatcttgatcagtgcataactatggatgagaaagatatatggccaaagggagggtatgattcaattattgacttgaaaatggtgtcaagactcgaccaagagcaaactctggccatcagaaagatgatggatcgcactctcaaccaggttgatgaattaacgcttctttttagaggcttgaactacagaaggattagtattgttgagaggcagtacacccaaaggtggtttcagtctgaactgattcagatccttgatgtttga

SEQ ID NO: 28267 - DNA, 462 bp, Oryza sativa
  Clone ID: PAT_MRT4530_32883C.1
atgtccaagaagacggtgatcagagccgatctcatcggcagaagctgcaagaaagacatcttgcatgctgtctccacgctacaagggatcaagtcgatggacatcgacgaggagaagtgcacgctgacggtgctgggccccgtggacccggtgaagatcgtgcaccggctgaagaagaagtgcttcgcggcggcggtcgtcagcgtcgaggacgacaagcccaaggagccggatccgccggcgccggagaagaagaaggaggacgacgatgatccgtgccagtgccagtgcaaggaggcggagtgcgcctgcgtgaaggtgtgcgcggcgagctgccaccacagcccgtgctccctgccggactgctacttctacaaatcctacagttacagttacaagccgtcgccttcctttggctttggctatcacctagaatccggaggacactgcatcattcagtag

SEQ ID NO: 28268 - DNA, 394 bp, Oryza sativa
  Clone ID: PAT_MRT4530_32884C.1
aaaaaaaaggaatttaatttaggggccaggggggaacaagaaaaaaaagaaaccccaagggagggagctagctacctaccaacaaaaaaaggacttttttttaatctagggagccagaacagggcaaaagaaggggaacgggaagcccggtgacccccgaaaaaagggagggaaaaaaatttctttaaattgcagtggcagcagaaacaaccaaaaatggggccccacttggagggggtgaaaccgacaatgcagttttcccccccacaattggaacctgcggaagcagcaccaaaccccctggggggtgcaacagcaagaaaggggggtggggccgggggtcacacccaaaaaaatttccacacaactcaacctgttcgatggggcaacgagg

SEQ ID NO: 28269 - DNA, 349 bp, Oryza sativa
  unsure (1)..(349): unsure at all n locations
  Clone ID: PAT_MRT4530_32885C.1
gccgacggagctgcagtgtgttgagtgggtatggtgcttctgctagtgctattgtgtgctgttgtgtgctagctgtgtgttatggccgtgctgtgtgtgcctctgtgagttgctactgagtgactgctgctaagttttgctgctgctggtgcgactgaagctgaagttggttgctctgcctttttattccatcgttatgttagtgaaataatgtgttcgatttttaaatcgaacatagttatgttatatgcaggttgatttgtattgatgtaagaacaattcggcacacgttgcgtattaatctaagttggttgttctnatggaaaaaaanaaaaaanaaaaaaaaaaa

SEQ ID NO: 28270 - DNA, 430 bp, Oryza sativa
  Clone ID: PAT_MRT4530_32886C.1
agaagggctccacaatcagaggtatgtgttgattattgattgaattattctttggataacaaataacagaaactaaaaagcactatggcataatacactatctgacaagactaaatggttgagacaatgttttgaattctcaaaccatttaaacccttgaccctagatggagcaaatacactgctaaagtagatgattaagttttgctcagttattagttatgcaaaatcatgattcaaccactgtctgccacatcagcgtttgtaaaattttgtaagaactttctttgtatgtgtatcatcagtctgccgcgtcactatatttgtaactgcaacctatagctttcctatctctttttgcttttgcctgagggtatacagttggacatcacagatgcctgttaagatacgggggtcttggtgacctaaat

SEQ ID NO: 28271 - DNA, 336 bp, Oryza sativa
  Clone ID: PAT_MRT4530_32887C.1
atgggtgggttcgcggcgtcgaacattgtgtcagagagcggcgagaaggcgtccaacctggtctacaggggacggctgcagggggctggccgcgccgtcggaatgctcctcccccaacaggatgcccagctatatctagaaccaagcagcaggaaccaacagttgttttcatctagcagccatcatgagcgctattccagcggctttcgtcatcaaaccgccatactaggagtagctttcagcacagtacagtcatcaaccatcacgaagaaagaacagcgacagagcaaccacacatcaacacgacaaggtgcatcaggcaactcaggaaattga

SEQ ID NO: 28272 - DNA, 107 bp, Oryza sativa
  Clone ID: PAT_MRT4530_32888C.1
gccgagtcagaatgaggtcagttagttcatttcgtgttgggatctaacatcctggccctctccaccgtcgtgctcaagcatctgacccgcgcgtgatctctttgggg

SEQ ID NO: 28273 - DNA, 429 bp, Oryza sativa
  unsure (1)..(429): unsure at all n locations
  Clone ID: PAT_MRT4530_32889C.1
ccttgccccgcagccggcaaatcaatcactccccgccgccacggcccccatgacatggcccctttgtcctcgtcatcggtcttttattccttcgaccacacaagcttcccctcattcctacgactttgaacctggccccccatggtcttgactctgcaaccctcgcaagatcaatcaagatgaacaacccccggctaagctagggaatcttgagcggggcaacattgggggaagtgtttttcccaactttgtaatgacatgagctacgcatttctaaagggacccggtacggaaggaatcggttgcagagatatcacaggcggaacaggacggcagattatgaatttctagaaatagagacgcaaatctgagctcgaattgagccttccnaaaaaaaaaaaaaaaaaaaaaaaaaaaaaaaaaaaaaaa

SEQ ID NO: 28274 - DNA, 3609 bp, Oryza sativa
  Clone ID: PAT_MRT4530_3288C.1
atggccgaccacccacccaaccaccgcggagaaggcatggaagattttgtggcagagttggctcgcatgaccctagtggtgggctaccccaacgcgccagagtactcgactgttccgccgctcagtggtgagcttccccatcatgtctggttggaggttcatggcttcgtgggcacctgcctcgctaacatggtggttgaggcatctggaggcaccgcagatcatgcctgtcaggaggcagcttatctgatgatggccaggcttcgtgatcgccacagctacaccttctgcaacacggcgtaccgcttccaccctcgccgagcaagtggcgacgacgtcaataccttccgcccaatggccggagagaacaacaccaccttcagccacatgtgtgccgtgatgaggggaatggaccggatgcactctgacttgcacaaggcatccaaggccttgaatgatggaaagcttgtgaggatcatacctctgaaggatgagatagcatgcctgaagaagaagaacgctcagctgaagggtttcccagtgctaggaggagtccggatccgcaccacgccctgcaagtctacgactgctcccgtgcgcattcagcttgtgcccaggaacccagctcctcccgcagatcctccagttcttcccgcagttccgcagcgcccgcagctccagctccagcctgtaacgtcccgccttcccccaggccaggcccgcttacatctgatagctttcatagccctaggccgggatgttacacagccccagctccggttccagtgtcagctcccgcgtccgctctctccttcgctccagcgtcagctgtcaagggtccagctagtggcaacggagatggtcaacacccgaaatggcagccgagaagcaggtgagggcagcaacggcgaggaatgcaccgacggtgggcatcccaacagcgcctccggcaatggtccgccaccgctctccgagaacccgacgcttgcacaagtaatggcccatcagacccagatgatggcggccatgatgcaacagatgcagcaccagcaccagcagatgcaccagaggatgcagcagcagaccgagcagcagcaacagtttggtcccccttctcctcagtccaagcggccggagtttctacgcgtcaggccacccaccttctctagcaccaccaaccctatggaggcaaatgactggctccatgccatagagaagaagctcaatcttctgcagtgcaatgatcaggagaaagtcgccttcgctacacaccagctccagggtcccgcatcagcttggtgggacaaccacatggctacccgtccgccaggtatggaagtcacttgggcggagttctgtcacagcttcaggaaggcgcaggtgccagacggggttgtggcacagaagaagagggaattccgggcactccaccagggcaacaggatggtgactgagtatctgcatgagttcaatcgcctagcgcggtatacgccggaggatgttcgcactgacgcagagaagcaggagaagttcctagcaggcctggatgacgagctgaccaaccagttgatctctggggattacgctgactttgagaagctggtagacaaggccatccgtcaggaggatcagcgaaataaaatggacatgaagaggaaggcggctcagttccggtccaaccaaggaagtcaccagcgaccgcgcttcactcccgaacagcagggtgggcctaccaccatgattgttcaacagcatcgcccttacaacgcaagcaacttccaccccggcagcagtggcagccatcatggccaaggtcagcacaaccgcggcgttgcctcacgcccgccaatggcgccagttcagcaagctgcacccgctcccccaaagccaggagccggcttcaactgtgctgaagaggcgcaggcagcaccagaggtcgtactgggtacgtttcctgtcaactcagtccccgctacagtactttttgattctggtgcaacgcattcatttatttcaaagcagtttgttgggatacatgggttgataagagaaaaacttagtacaccaatgcgggttcataccccagggaatagctccacctcggttcaattcagcccctctgtaacaatagaaatccaaagatcaccatttctagccaacctcatccttctcgaatccaaagacctagatgtcattcttgggatggattggctgaccaagttcaagggtgtcattgattgtgcgaatcgcacagtcaccttgaccaatgagaagggaggaacggtagtgtacaaatctccagtctcaccaaagcagggagtctccttgaatcagattgagatggggattccggtggtcaccaaggagaagaattcgaggaaattggaagacattcccatcatctgcgagtatccagaagtgttccccaaggacctcactaccatgccacccaagagagagattgaattccagattgatttggcaccgggaactgccccgatttacaagaagccgtacaaaatcgcagccaacgagctagcagaggtcaagaaacaggttgaggagcagctgcagaaagggagccaaagtgttttccaagatagacctgtgattaggctaccaccagttgaggattcgggaagaggatattcccaagacaaccttcagcactcgacgaaagacttccaagtttattgcaacgcgtcccgccgcgggcttggatgtgtcctaatgcaagagggcagagtggtcgcttatgcctcgcggcagctgcgtccacatgaaggaaactatccaacacatgacctagaattagcagcggtggttcacactttgaaaatctggaggcattatctgattggcaaccgctgcgaagtctatacggatcacaagagtctgaaatatatcttcacccaacctaatctaaatctccgacagcgaagatggttggagttaatcaaggattatgacattagcattcactaccatccgaacaaagccaatgtggtggcagatgccttaagaagaaaaagctactacaatgctttgtgcaccgaaggcatgtgtaaggaattacagcaggagcttgaacatctcaacttggggtttgtagaacatggagcggctcaggtaaatgattctgaaatagcagagctaaaaaagaatatgaggatcggaaaagcccgggatttccacgaagatgaacacggcacaatctggttgggagaaagattgtgcgtacctgaggacaaagatctgaaagacctgatactcactgaggctcatcagactcaatactccattcattcaggcagtaccaagatgtaccaagatctcaaagaaaaattttggtgggccagtatgaggagagaaatagttgaattcgtcgcactctgcgatgtttgtcagcgagttaaggcagaacatcaaaggtctgcacgattgttacaacctcttcagatcccggaatggaaatgggaagaaattggaatggatttcataacaggtctgcccaggacattgttgatgaagaacacgaggcttggaagatctgcttatctccagtgcaggtccaaaactcgccttcgggtgtatgagcgtgccagttga

SEQ ID NO: 28275 - DNA, 1242 bp, Oryza sativa
  Clone ID: PAT_MRT4530_32890C.1
ctatctacgtgagaagccgccaaaaatgagcgcgacggcgaccgctacggcaggtaccaggccgctgtacggcggccgcggcgacgctccgttcacgtcgaactggcccgtgttcacgtactggttcttccccgacgacgtcgtcacgttcaccgacgtcgaacagtcgtagtcagtccagcccatgcgcatgttcgccaagtcatacacaaaaatcttgtccttcaaaactagatcctggttcctttgccaaccaatacaccacaatacattgttgtcaatagaagcctgctgcaaaagatagttctctggcttcaccgtcattgcaacaccacccataaaatatagtgacacggtaggaaacgacgagtcaacgctgctggaagttacaaagcattggttccccttgctgacaagagagcgcacagatggagagactgcagcagttatccacccgaccatgaacgggttggcggagccctccacggggaagtccaccacgccggcgacccctcctcctcctcccccgagcagccccctcctcccgtgccgcgccctgtcccgctccctcaggtgctccaccgccacccccttgtgcggcagcgcgcgctccagcctcagcgccgccggcaacggcgccgcgcccgccccagccgccagcaccagcgcggcgacgaccgccaccgccgccaccgccgcgaactccggcggcctcctcatccggcacgccgccttgcagtcgccgacgcggcgaggcggaggggtggcgcggaggctgcgccgctgcgcgtgtgcgcgtagcagcaactttttttttgcgtttagggactcgaaataaccaggatttagcttgccagcatatatacccccctccaacttgtcctcatcagaagattggccagataagtaggtcaagcaatcagctaatccagctttgctgcctacacggcacctagctagtgcctgttgccttgcgtcgtcgccaacacagatctctcccctcgggccctcgcgctgcctcgccccgaggccctcgggcagccgccatgtggcgaggggagcgagcggggaggaggcccaggctgagccgccatcaatgcgcaacacccagactgtgaccggcctgttgccggtcacgtctgatcggacgggcgaccgtgcccccacgttcgcccctgtacccagcggagtggaggcaggtatgccccgtcccatcaaaccatcatctgcagctccctccat

SEQ ID NO: 28276 - DNA, 2198 bp, Oryza sativa
  Clone ID: PAT_MRT4530_32891C.1
caaaaacttcccgacataaattttagcgataatttataattttcagacccacctataagtgataaagggggggtgcagccgactgcaaagatcctgacagccgcctgccccgccactctgaccgccagagacggcgtccaccaaaaccagacagttacattcgcaatcccaatacggaaaaatataccgtgaaaattccacgtgtggtgtaaatccagaaactaccggtagtacaaaagaatggacatataagatttataactttttactaatgctaacgtgaacaaatctcaaaaatcaatttgtacatgctacgatatatggagattgcacgacatttttcccttccaacgtgtaggtgtgagacagtgagagcgacaaaaaagaagaggggccgtgctctgctccatgagcaatgaactcttgacatttcatttttttttctccttttccctatctgtatgtacagtaagaatgggtcatgctcattcgctcgtgggggggaaccggacgcctgaatgcaccaacaaagaatggaatcacaatgtcacatgtcgggagatcgatatcggttagcccgtctgctatctacgtgagaagccgccaaaaatgagcgcgacggcgaccgctacggcaggtaccaggccgctgtacggcggccgcggcgacgctccgttcacgtcgaactggcccgtgttcacgtactggttcttccccgacgacgtcgtcacgttcaccgacgtcgaacagtcgtagtcagtccagcccatgcgcatgttcgccaagtcatacacaaaaatcttgtccttcaaaactagatctccgagtatggttatttgttgaccctggttcctttgccaaccaatacaccacaatacattgttgtcaatagaagcctgctgcaaaagatagttctctggcttcaccgtcattgcaacaccacccataaaatatagtgacacggtaggaaacgacgagtcaacgctgctggaagttacaaagcattggttccccttgctgacaagagagcgcacagatggagagactgcagcagttatcgcattaacaaatggatcatatgccccatctgcaagatatgctaaagttgttcctgagtccacaattgttccttgtgtatttgatgtcgtaaacaaggaggaatcaattggcagcttctgtccattgacaacgatactttccagattcaaattgtaatgaggctgtgatgggacgagtggagtatagactaatcctggctcgacaatttcaccaagaacgagaataccaccaccattatctgaacctttcaggcaatgagagaacacctttggggataccccaagagaattcagttgtgagacaacagacagctgatgctgtccaaacccaaaaatcccatcaactgccctgtctgtctttgtcaagtctcctgactgtgagttgctacatccaaaaacaatagaggctgaagaattggcagtttgctcatttcccatgacagtgtcaaaatacattgtgtcagacacgtaataacctgatgtgccacttccatcaccatacgtgaaagtgtaaccacatgggctgttgtctgaagtctggcagactgcttcgcttgtttgaagggcagctgtacacctatcatctgagcatggtattttggatgatgttgatgaagtgtcaggattgaagaactccaactggatattgagcccacttgaagatgggcaaccggtgcaagggctgcacgctacccataagatgtcactgccagtgtcaatctggacaaaatattcttttggtgggcttcccaatttcacacgcgtaaaatagagcccgaccatgaacgggttggcggagccctccacggggaagtccaccacgccggcgacccctcctcctcctcccccgagcagccccctcctcccgtgccgcgccctgtcccgctccctcaggtgctccaccgccacccccttgtgcggcagcgcgcgctccagcctcagcgccgccggcaacggcgccgcgcccgccccagccgccagcaccagcgcggcgacgaccgccaccgccgccaccgccgcgaactccggcggcctcctcatccggcacgccgcctcgcagtcgccgacgcggcgaggcggaggggtggcgcggaggctgcgccgctgcgcgtgtgcgcgtagcagcaactttttttttgc

SEQ ID NO: 28277 - DNA, 250 bp, Oryza sativa
  Clone ID: PAT_MRT4530_32892C.1
gttcaagacatggcggcgacggcaggcgaggagggttgaggtgcaggcgcaggcagcggcaggatgacaggcagggcgcaggcagcagggcgacggccccagcccctctctcccatcctggcggcagatggggcggaagacggccggggcagcgcccgtgaggcagacgcgcggacagatggctcccggcccctccctcccccccttgatgtgagatttttgcacctgataaaaaaaaaaaaaaaaaaaa

SEQ ID NO: 28278 - DNA, 1596 bp, Oryza sativa
  Clone ID: PAT_MRT4530_32893C.1
atgccgcccaagccagagcggcggctgttccagtacgtgagcaagccgcgcaggccggcgcgggagcctgcgccggcgcccgaggtctgcggcggcggcggcgaagaggtggtcgcgtccgacgcggatgccgacgccgtgtaccggatggtcacggcggcgcccacgccgtcggcgatggagtccgcgctgtccgcgtcgggcgtcgcgatctccgcgccgctcctcgacctcgtgctgcggaggttccggttcgcgcacggggacccgctccgcgcgctgtcgctcctctccctcgcgctcgaccgccacggcgtcgccccgtcccccttcgcgctcgacaccgcgctctacgtgctcggccgggcgcgccggttcgcgcacatgtgggacctgctgcgatcctcccgccgcctcgtcccggacgccgtcacgccgcgcaccgccatggtcgtcctcggccgcgtcgccaaggtctgctccgtccgcgagaccgtcgactccttccgccgcctctcgcggatgttgaggggccgcggggacgaccaggagggccaactcttcaacgcgctgctccgcacgctgtgccaggagaagagcatgtccgacgcgcgcaacgtctaccacgcgctcaagtacgagttcaaggtgaaccgccagacattcaacatcctgctctccgggtggaagtcagccgaggacgcggaggcgttcgtcgccgagatgcgggagctcggcgtggagccagacctggtgacttacaacagtttgattgattgtcactgcaagaaccggggcgtggagaatgcctacaagctgctcgacgaaatgcgggagaaggacatttctcccgatgtgatcacttacacgagcttgatcggcgggctggggttgattggccagccagacaaggcaaagcacttgctgaaggagatgcatgagcttggatgctaccccgatgtacctgcatacaacacggcgatacggaactttgtgatagcaaagaggcttggtgatgcgtttgcattgatggaagaaatggcctcgaagggactcatgccaaatgccacaacctataaccttttcttccgttgctattattgggcatacgacattggcagtgcttggcagttgtatgagcggatgcgttctgaaggatgcttcccgaacacccagtcttgcatgtttattgtgaggttatgtcataggcatgggagggttgcacaagcactagagctgtggagtgatatggtcaataatgggtttgggtcattcaccttggtgtctgatgtgttgtttgatctgttatgtgatgaagggaagctggatgaggctgagaggtgcttccatcaaatgattgagttagggcagaagccgagcaatgttgcatttagaaggataaagatactcatgcagcttgccaaccgtgaagaatctattgccagattaactgctcaaatggcacagtttggacggttggcgcctgaggattgccgaagagttgatcataccttgcagagcacacatcaaagtagtgatagaactgacactgacactatagtgaaacacagcaacacatttgaatcacgacgatga

SEQ ID NO: 28279 - DNA, 505 bp, Oryza sativa
  Clone ID: PAT_MRT4530_32894C.1
gtttgggtgtgttttttttttttttttttttttttttttttttttttttttttttttttgttttttttcttgtggggcttgccagggcccccaaccaggcccaccttccctgcccaagagccaatgcttaggtcccccgcccagggggggggggggggggggacccgggccacccgggccggtcccggggggcgtaacagcttgccctataggggggcgtagcaggggccggcggggaattgggcgtagctggctgctgggggaaaatgcttgcccggcacaattaaacgcaaaacccgagggggcaaacgaggggggcaagccgggggggccgagtgggggtcccagcccacattcaagggggggagcccaccgccccatctccagtagggaaaccggccacgccaggtgcgaaaaggactggggcagcggggcgggggggggggttctcgtctccggcgccagggggggtttttgtttgcccaccggggccgggccctgcggg

SEQ ID NO: 28280 - DNA, 825 bp, Oryza sativa
  Clone ID: PAT_MRT4530_32895C.1
gtcgacgacgatgacgacgacgatgatgatgacgacgacgacgacgatgacgaagaggaagaggaggaagtcgagggcgacgagcaggaggtataattttttttcacgccttgatccctcgaatatatgctagtatgctttgttcatgtgttcttcctgcctgccctgatagatctatctttatgctctactgttacgattagtatgaaattcttcagcttcctgcgcgttttcttgctaattttctcttgcacaaatctggaaaagtagttctattctcagatctgttcagcacctttgtccctaaaatactccagtagatgtatctgcttagttttgaatacaatagcgttctctcacatcagtagatgtatcagcttagttttgaagacttttcctctcaaaaaacctttctagaaggtcgagatttttgcaagtctgaggtcgttttttttttttttttttttgcatatcgatttctgtagacggtcaaaacttaattttgtttttgtgagttgtttttaccactcaggaaactagtagatctgggaataaagaagccttttttgggcaaaaaaaatatagatcttggagtaaaaaggttcagtttttttggcgaaaaaaaaagagagaagaaaaccctgtttccgtattttctgtagatctgggtgattgttctctgccataccgtttatcctttcccagtacttttgcgctgatgtggtaatttcctatgaggacatgttaggttttctacttttctagtctagtcttatccacctgctgtttgtgtggtctgtggtgtagcccatcagaggcccatct

SEQ ID NO: 28281 - DNA, 450 bp, Oryza sativa
  Clone ID: PAT_MRT4530_32896C.1
atggtgcggatccgacaacggccgccctccccccacacagtatcggtggggaggcgttgcggacatcgcccgcacggattcgacggcgtccaccctctcctgtgcggtggtggcagatctggaagtggtaaggtgtggaggcaatggatccgacggtggggaggcgcaacagctatcgcaagcgcggattcaatggcggccgcactccccctgcacggcggcagcagatcggacggtagggaggcacggcggcagccgatccagcagtggggaggcacggcgcccgttgcccatgcggatccgacggcggccgcgctcgccctgcacagctgctgcggatctggtggtcgggaggcacagcgctggcgaaaccagcagtggggaggcatggaggtggcggatccgtctccggtgacggcgacgggagacggcaaacccagccgcccctag

SEQ ID NO: 28282 - DNA, 450 bp, Oryza sativa
  Clone ID: PAT_MRT4530_32897C.1
aaaaagggggcccctttttttttcccatttatcccgggactataaaattaaaagggccaaaagggaaaggggacatggggcgaaaggttgggggacaaacccccaccccaactttggggcggggttcccccccaaccgggggggggggcccggaaaattaaaaaattggggggggcccctgggaggcccgcccaaaaaaagggccgggggggggggaaaaactggaatggggccccttttcggccaaaaatttacaaggaaccggaaatagggcccagggggttcccccccccaaaaaaagtttttaaggggtcccttcaccaaagccccaaaaagctttggaagcccccccttcccatgagcataaggaactccaaaaccaaaagggcccacagggggggcaccacccaaagggggaaccggggcccgttaagaatttgggcgccgggg

SEQ ID NO: 28283 - DNA, 422 bp, Oryza sativa
  Clone ID: PAT_MRT4530_32898C.1
tttttctgtcaatgatgtttgggaagaagttctaccttcatcaataaatggtgaatctgatgacaaggtgcgcgctgatggattagatacgggatggcacttcactgtcaacatgcctaaacactcagatcctttctctggcaaagagaaggttatccatgccaagtatgctgacaaggaatttgtacaaaagtatagcatggatgagattcagctagctcagcagatgtgggatactgtaactgcaaaagacaagagagctgtatacagtctcatagtgcaatcccgcgccaatgtaaattgagtttatggagagatgccctatagttcgcgatccgactactggaagatcatatgaccaagaacactctttttaagcatctgatggaaaccctgcatttctgattgccattcacatgaaa

SEQ ID NO: 28284 - DNA, 351 bp, Oryza sativa
  Clone ID: PAT_MRT4530_32899C.1
gttccaacccgtcggttcattacctatatcaactgcaccaatctacggctccttttaagcgtaagggccgttcctatcccccccgcaccagagacgggtggagacatcaagcttacctaaaaccttcgacttgcagggcgatcgacctcacggtctccgcctcccgcgtctgcggcggtgtaccggcgtatggagaaacgatggacctcgcccaccgacggctactcccggtcgagccgtaacagatgctgagagctacccgggtctcggcctcctcctccatgatactccaccttacattggtatgtgggttaatcggcccgacgacgacccccgtggcacccccggccc

SEQ ID NO: 28285 - DNA, 266 bp, Oryza sativa
  unsure (1)..(266): unsure at all n locations
  Clone ID: PAT_MRT4530_3289C.1
gcaagctcaaagcccaaaattgcatcattagttgcatcatgcagaaaggcagtgcccgtacaccacgactatttcgcccatcacatgtacgactgttttcacactgcgctggacacatgaatgggtgagcctagtgagtgagactgggacaggcttccgatccggcgnccaaacaacatgtactcgctgccacaacattagctggagctaacgatcccaagtcactcctttttcttgccggtgacacctgtaacaacatcattcag

SEQ ID NO: 28286 - DNA, 2185 bp, Oryza sativa
  Clone ID: PAT_MRT4530_328C.1
ctcgtctcctcctccttcgcctccgccttgtagggtttcgccgccgccgctgccgccggcgatggagccaccggcgggaggctcctccgatcatcgccggggtgccgggaccggcgcgggcgccggtggggccgccgcgccgtcgggcctccgccgctacggcttcagattctccgcctccagcctcctgcaggccccgctcgccgcgctgctcgagtactccggcgtcgtcccctccggccccggcgccccgcaggcggggccgccctcggcgctgtcgtcctcgccgtcttcttcgtcgtcgtcgtcggaggccgatgggctgctctccgcgcccgcggctggggacggggaggtctcgatccggatccagggcggccccggggaggccgacgcggcgggcgtcgcgggggcggcctcgtcgggggaggactcgatcgaggcgaccgccgccggggacgttgacccggcctcggctgccgcggggaggggtggcggcgccgacgcggaggcgagtggtgggggcgcggacggcgcgtccgggaacgggggtggggaccgcgcctaccagcggtatgacgtgcaccatgtcgcgaggtggatcgagcagatactgccattctcgctgctgctgctcgtcgtcttcatacggcagcatctccaaggtctaatactcattctcttgtgctcgtgccattgtgtgattataagcggtttctttgtcacaatttggattgctgctgtaatgttcaagtcaaatgatatattgcggaagcaaactgctttgaagggcgagagaaaaattgctgtgcttgtcgggattacagtaatcttcatgattcatgtgtttggtgtctattggtggtacaggaatgatgatcttctcagacctctgttcatgcttccgccaaaagaaataccgccattttggcatgcgatttttatcatcatgttggcatttctaaccaaatgccacttgcagatacaatggttcgccaggcagcaatggccattaagtgcatgctacttatgtactataagaatagcagaggtcgtaactaccggtcaaatgctaacccttgtggaataccttctgctcctatatcgtgccttgttgccaactcctgtttggtaccgtttctttctgaacaaggaatatgggagtcttttctcatctttaaccactggactgtacctgaccttcaagttaacttcagtagttgaaaaggttcagtcattcttggctgcagtgaaagcattgtcacgtaaagatgtgcattatgggtcttatgcgacagcagaacaggatacccccttgaactctcactctatcttgtttaaagaacttgttttttgctggaacctggtgcaggaaaagatgcatgttcctgtcctcctccgctgtaaacatattttctgtgaggactgtgtctctgaatggtttgagcgagaacggacttgccccctgtgtagagcattggtaaagcctgctgatattcggtcatttggtgatggttctacaagtcttttcttccagttgttttagacaccaaatgggaaactgctaacatataacaatggacaagcaattgcttatgaaaatccaagtgaatcctttttttctttatcatgtcatgccgtcttcccctgcactgatgtcaaagtgagaagattcgcagagattatgtgagcgcaatatgtctgattcatctatatgttcgagaaatagtttagagaactggtctgtggtcagttgcgacgttagcatagatttgcagcaaatctttatgggcctggtcggtttctggaggaatgatcaatcctagtgcaaagccctggtgtgtgtgatccccgccacgctattggcttgcataatgtaaaaattgggaatttttgcaaaagtatatgtaccccggcgcaactggagtgaacaagttttgcttcttagcaagacgagggaaggcagtggtaaaattgtaacctgtaaagctttgatacgtcaaaatgttgaaaccatatataaaatgtactttttactaaacagtaaatagtaccagaccgcaatgttaacatgtcttgtatgtcattgtacagttttataacgcttcatttgagaaaccagccgggcggtatgtttcatttaaaaaaaaaaaaaaaaaaatcgagactagttctctcctcgtgc

SEQ ID NO: 28287 - DNA, 380 bp, Oryza sativa
  Clone ID: PAT_MRT4530_32900C.1
gggggccaaataagggccaaaaggtgttccctccccctttggggggggcccggccccctggccccccccagggaaaaccccccctgttaaatcccccaaaaaattgggccgggcgccctcaacaaaaaggggggggccccccccccggccccaaatttagggggccccaaccccccctggaacaaaaacccccccaaaaatttaaactcgccccccctaactaaaaaggtgcccccaggggggtgggcccccccccccaaaaaaacccccccccccaaaaaggaccctcgggtggggacacccctccaggcccctatccaccttgactccgcaccccttggggcccccctcctgaaagcgggcacactcctgggggcccc

SEQ ID NO: 28288 - DNA, 141 bp, Oryza sativa
  Clone ID: PAT_MRT4530_32901C.1
atggccagagaaagcgattcgtacatcgtctggtacgtgtgtgccacgtgtgcaggggagattgaaggcgacaaatggggaactgacaggtgccatgcatcatggcctcgacccttcgccttcggtggccggcttgattga

SEQ ID NO: 28289 - DNA, 419 bp, Oryza sativa
  Clone ID: PAT_MRT4530_32902C.1
gggaacccaaaaataaaaaaacccttttgggggaaggccttaacattcaaaactgaaattaaaaaaaacttttacaggacaaaaaaaaaacccaattggtggcaaataaataaataaataaataaagaattctttaaccccattgccaacttaaaaagattcccccacaataaaaaccgcttggaaactcttggattgggggggagggaaagccccgaacccaactcctttggtatgcttgaacccctgaacccttttttttgaaaagcgaaatgcatttgctaaaacaacagttgggaaaacacggaaaaaggaaccctttcccgcaaggggggttaccaaaaaataaggggttggcttgaaggcaatggaaacaaatccttttttttgggccttctttacaaacaaaaagggggggg

SEQ ID NO: 28290 - DNA, 355 bp, Oryza sativa
  unsure (1)..(355): unsure at all n locations
  Clone ID: PAT_MRT4530_32903C.1
aattgaaccttttggtcaaccnccccctaacccaagtaaaaggncaggctggtacnctggtcccgattagttgaagaactccatccaggtgtggcttttatgtgacagttttgcagccgtaaaagattacggattaccttatcttaaacgcagttgcagatcgggtagaatacttgntctctcacaacacatcattcttatgtcagaggaaggtggtttctggacagtttgatgcctgttttgttgacgtgtccgcttaattgctttggtcaagtctatgatgcttctgttgttgcagagtactgagaacgactnatgggngaaaattgatcaaaaaaaaaaaaaaaaaaaaaaa

SEQ ID NO: 28291 - DNA, 540 bp, Oryza sativa
  Clone ID: PAT_MRT4530_32904C.1
tagagtggtttcagatcagagtagagtttgccacagtggtcgagcacgcgaacagcaggggtgtatagtcattgtcaggccatttatgacactgatctgtagatgttgctcagcccattatgcgaaacccagtttaagcttcctgcactgaccggtcgctctgttccaccaacatccttaatcagtaaactaataataaggatcaaggtcattatcagaactcacaaaacgtctacgtcgcacatactagatcctcacctgaagcttaacaactcgaaagctcgagcaaatgatcagaaaaggaatctggaggcgggcagagccagagcatggaaggaagccgatggtttttactcgcccgtggcccgccggattgaatgcgtggattcactcatgccagtatgccacggtcgagtcagtccgtccggccggctggctggctccattatttacggttgtttggtgagaattcaagccttgtccccgccgcattgaggagatcggccggctgcgcgtgagacatcaaagctggtgctgctt

SEQ ID NO: 28292 - DNA, 1677 bp, Oryza sativa
  Clone ID: PAT_MRT4530_32905C.1
tcaacctcgtttcttcttcttcttgtcaggaacatttggagtggtaggcgtcactttgaacggttgggaggacgagccggcgaactggctgaagcccagctgccggccggggatgaccagcttgggcggcgcgaatggcccgaactcgacggcggctggcttgctggcactgcccttcttcttccctggcttggccgccgttacgccggccttcgcgccgccgtcgtcgtcaccggctctggtcacagctggtttctgatcgtgtccctgctttgagctgctctcctggcgctcatggccgagcactctcctggctctctccatgaacgccggcctgccgatcagcacgaggagcttgagcacctcgtccgtcttcagcctgcaccgcggtggcgccttgttgccggcagcgtcggcagatgatgcagcggcagcgccgccgcctccgaacgccgcgctcggaggagacggcggcgggcagcggccgttgcgggaggaacgacctgctggccgtgccggcgccggagctggaagcgaaaccacagttcggcagtagcccggcgccgggcgggcctgcctggcccgtacgtcgcactcgaggttcctgaactcggcggcgacgcgcgccttaagcccggcgtgccggacgaatcgccggaggctatcctggtacgtgtgcgccgccgtctgcggccggtaaacgagagtggcgtgctggccagtggagacgacgggcactggccgccagccgccgtgatcagcctcgtcggcgtaggctaaccgtctctgctccacggtggcgctggcgccggcgccaccgtgctccgccgtccccggcgtcaccgatgcagcttttcttgctcttcttcccggcgcaccgttgctctccctcgctgcccgctgcctcgttgtgctcttaaccgaggtggcggcggcgacagcgccggttttggcggcgatcttcttcctcgccggcgcgctcggccgctgtggtgtggtcggagcggcgccgccggcgccggagccggagcctactttgctgccatcgaatttcccgtttagcttggccggcgactggctcaccagatttttctggcgccacgctgcgagctctgactccgagtacatctggttgctcttcagggacaggaatacctgcttggcttgatgtagcagtgacattgcctctctgtaaggtatagtgtcctcgctgtttatggacattgctttctggaacaccatgtaaacatcattctcgaattgctccagtgtgttgtacatgccatccttgttcttctgccttaatgttgcaaagtcaccgggcctgttcacccgttctgcataatcagttacttggatgtcatcaggcattgcaaataactcatgagtgtctctcatctctagtgtatcaagaatgtactcaatgatttgtactgctgaacttttgcttgacaaattattgatatcggttgttgcacacagtgcttggctagaagaagcttctccctgcaaatgctggatttcttcattcctttttctcttccctcgaacaccagcaatgctgtttcggattatctgccaaggatctaggagacaaccagtggcagtagtgtcatcgttcttctgctcttcaagcttcagtaatctagcacttcgcctcttcccttttccagacat

SEQ ID NO: 28293 - DNA, 509 bp, Oryza sativa
  Clone ID: PAT_MRT4530_32906C.1
gaacgccgtcctgccgatcagcacgaggagcttgagcacctcgtccgtctccagcctgcaccgcggtggcgccttgttgccggcagcgtcggcagatgatgcagcggcagcgccgccgcctccgaacgccgcgctcggaggagacggcggcgggcagcggccgtgcgggaggaacgacctgctgggcgtgccggcgccggagctggaagcgaaaccacagttcggccagtagcccggcgccggggcggcctgcctggcccgtacgtcgcactcgaggttcctgaactcggcggcgacgcgcgccttcagcccggcgtgccggacgaatcgccggaggctatcctggccgggcttacgtaaacgagagtggcgtgctggccagtggagacgacgggcactggccgccagccgccgtgatcagcctcggcggcgtaggctaaccgtctctgctccacggtggcgctggcgccggccgccccgtgctccgccgtccccggcgtcaccgatgc

SEQ ID NO: 28294 - DNA, 501 bp, Oryza sativa
  Clone ID: PAT_MRT4530_32907C.1
aaagctgaatattatcagttttatcggcttcctgaaattcatatgcaactgcagaatgatgtttacatggtgttccagaaagcaatgtccataaacagcgaggacactataccttacagagaggtcggttgtatcaaaacttagatagtacggagtatatcacaatcacatcatagatgtatcatgtatcaaaactttgatgataataagctcactaattcgcatggacgttttctttgtttcctctcttttgcaggcaatgtcactgctacatcaagccaagcaggtattcctgtccctgaagagcaacccagatgtactcggagtcagagctcgcaacgtggcgccagaaaaatctgctgagccagtcgccggccaagctaaacgggaaattcgatggcagcaaagtaggctccggctccggcgcccggcggcgccgctccgaccacaccacagcgggccgagcgcgcccggcgaagaagaagatcgccgccaaaccgg

SEQ ID NO: 28295 - DNA, 564 bp, Oryza sativa
  unsure (1)..(564): unsure at all n locations
  Clone ID: PAT_MRT4530_32908C.1
aggctgcgcacttgttggaaaaggcgatcggtncgggccttcttcgctattacgccagctggcgaaaaggtggatgtctgcaaagccgattaagttggcatgaatcaggaagtggtgcacaaaattaggaagatggagatgagcatgacatgtttgtacattctccactgggcggtgaaatggttgatgtggatcacaatctactgcaagacatgttacgtgatgttgagaacctagcttacaacgagagagattctataaagtttaacaagttggccagtgactcggagatgtctctgtatgccgggtgcaaagcaaaacacaccaaattgtcagctaccttggacctaatgaagttgaaggcaagtagtggatggacgggcaagattttcatagatcttataggaattttgaaggccatgcttcctaatgagaacacattgtccgagatgacatatgaagctaatcaggttttgtgtcccctggggttagaggtcagtagaattcacgcttgtccaaaccactacatattgtaccacaagcaatatccgaacatagatcttt

SEQ ID NO: 28296 - DNA, 360 bp, Oryza sativa
  Clone ID: PAT_MRT4530_32909C.1
acaaaaacaagagtttctttttttttaaccatcttaataatatcggcgtattagacactaaacgtgaaactgaaaacttaacatcccttcaacacaaaaatactttaattaacccacactaaatttacctctataccccccacctcaactctacagtaattacgcgcatttatgcacacctatctcttaccttgactcagataaaaccagacagctatacctccactcggcagtttgtaacactcttgaacttgaggccattcgcgccaaagtagccttttcctccgaactctatgaacaatgctcttcaagtcactaataagtagtattggcccaagatccatcttcctacctttcacc

SEQ ID NO: 28297 - DNA, 2535 bp, Oryza sativa
  Clone ID: PAT_MRT4530_3290C.1
atggattggctgactaagttcaagggtgtcattgattgtgcgaatcgcacggtcaccttgaccaatgagaaagaggaaacagtggtgtacaagtcaccagtcgcactgaagcagggaatctccttaaatcagattgaggtggagaattcggtggtcaccgaggagaagagttggaggaaattggaagatatccccatagtctgcgagtatccagaggtgttccctgaggacctcactactatgccacccaagagagagattgaattccggattgatttggcaccaggaaccgccccaatttacaagaggccgtacagaatggcagccaacgagctagcagagagtacttcaccttggggtgctccggtcatttttgtggagaagaaggacaagacgaagagaatgtgcgtcgattatcgcgcactcaatgaggtcaccatcaagaacaaataccctttgccgcggattgatgatctgtttgatcagctgaaaggaaccaaggtgtttttcaaaatagacctgcgatcaggctaccaccagttaaggattcgggaagaggatattcccaagacagccttcaccactcggtatgggttgtatgagtgcacggttatgtcttttggactcaccaatgcacctgcattcttcatgaacctgatgaacaaagtgttcatggaatttctggataagtttgttgtggtatttattgatgaaattctaatctattccaagtcggaagaagagcatcagcaacatcttcgtctggtactcgagaagttgcaggagcaccagctttatgccaagttcagcaaatgcgacttttggttatcagaggtcaaattcttgggtcacgtcattacagctcagggcgtggcagtcgatccatcgaatgtggagtcagttaccaagtggagcccacctaagacagtgtcacagattcggagtttccttggacttgcgggttattatcgtcggttcattgaaaatttctctaggattgccagacttatgactcagttgcttaagaaagatgagaaattcaagtggacagccgaatgtgacaagagttttggggagctcaagaagaaattagtgtctgctccaattctgattctgcctgacccgacgaaagacttccaagtctactgcgacgcgtcccgtcacgggcttggatgtgttctaatacaagagggcagagtggtcacctacgcctcgcggcagttgcgtccacatgaaggaaactatccaacacatgacctggaattggcagcggtggttcacgccttgaaaatctggaggcattacctgattggcaaccgctgtgaagtatatacggatcacaagagtttgaaatatatcttcacccaacctgacatgaatctccgacagcgaagatggttggagttaatcaaagattatgacatgagtattcactaccatccaagcaaagccaatgtggtggcagatgcattgagcaggaagagctactgcaatgctttgtgcaccgaaggcatgtgtaaggaattgcagcaggagcttgaacatctcaacttgggaatcgtagaacacgggtttgtggctgctctagaggcacggcctacgctcgtggatcaagtcagagcaactcaagtaaatgatcctgagatagctgaactgaaaaaagaatatgaggtacccaaaaagatagtatctgatcgagggagccaattcacttcaaagttctggcagaaattgcaagaggaattgggaacccgtctgaacttcagcacagcctaccatccgcagaccgatggtcagaccgagcgggtcaatcaaatattggaggatatgttaagggcttgtgcgcttgattttggtggagcatgggacaaaagattgccgtatgtggagttctcctacaacaacagttaccaggctagtctgcaaatggcaccgttcgaagcgttgtatggccagaagtgccgcacacctctcttctgggatcaaaccagcgaacgtcaactgttcggaacagaagtgctaactgaagcagaggagaaaaaaagctacgtagacaaccgccgaagagagctcacttttgaagcaggggattatgtgtacctctgcgtcactccgctccggggagtacaccgcttccagacgaaaggcaagttggcaccacgcttcgtgggaccatacaaaatcttggaacgaagaggagaagttgcatatcagctagaacttccatccaacatgatcggtatccatgacgtgttccacatgtcccagttaaagaagtgtttgagggtacccgaagaacaagccgattcagaacacattgacattcaagaagatctgacttatgtggaaaaaccagttcgcattcttgagaccagtgaaaggaggactagaaacaaggtcaccaggttctgcagggaccagtggagccaccactcagaagaagaagcaacctgggaaaggaaagatgagttgaaggccgcccatccatacctcttcgccagctcttccgaatctcggggtcgagattccgtttaa

SEQ ID NO: 28298 - DNA, 484 bp, Oryza sativa
  Clone ID: PAT_MRT4530_32910C.1
atggaagcatggaggcatgctactgacaaagctttcttcacaacggtcttagccatcaggacttctggaggcaacctcttgagtgccatgccactagccctagacactgcaatcctgtatggcaggtgcagccatggtgaaggggatctcaggtgtcggctcagttggcacaaggtagagcacttagagctagcctaggggctatgctgggtggtgatgtgtgccatggcaatagcagctagcagcggtatagctgcgtgcgtgtgtggtgacacatgaagcacgcacagcttctacatggtactagctagcagagtaatgttttttagaattatttgaatttccaagagaatagcatttacatgagctaaagttttacagttagacatgaataattgaaatgtaacactgtggctcggggcctagatgttaaggccgatgtaatctgatgtgattttatttgtatttagatgttggttggctg

SEQ ID NO: 28299 - DNA, 843 bp, Oryza sativa
  Clone ID: PAT_MRT4530_32911C.1
atgcagatagggatcaaagaaagcgaaggtccaacatcactggatcctaaattagctccggtgttatggtttcataacaactatgatcaatatgtggaagaaagtgatgacgaggatggtgaggtaagtggtgatgatgaggaggtgagcgacgaagacgagtttagtgcgacaagtgatgaggatgagtccatagaggaaaccgatgacgatggaataagcgacgacgacgacagtaacgatgatgaggaggagtctaatgaggtaaatgataccttgctcctctacagcatatctagccaacaattgctagccaacagcggactagatgatttgaaagacctcttttactggataacaccgcaagtggggggcaagttctgcacggcgttttttagcactgtcgtgacattagatttctccccgaatccaacatttgatattgttgctgttacactggtacaaaattcagtgtacaactttagggaaatctacttgttagaatcaagaggggagttgttctgcttgtacttctaccctccaggagcatgttctaataaaacagtggagatttctgtttacaagctggacataccaacgacagcttgggtgaaggtggacacacttggtgatagggcgtttattatcaataccaggaagggctacggagcatcggtcaatgcaaaagaagcttgcctacaggaaaactgcatttatttttcgaggcacagagacaaaggactatatgtttacagtatggagcgtggaactactgctgcaatcaatcccagtacagatcttgtagatgatgtggcagctcaaatattgatgcccgcatcttga

SEQ ID NO: 28300 - DNA, 460 bp, Oryza sativa
  unsure (1)..(460): unsure at all n locations
  Clone ID: PAT_MRT4530_32912C.1
cagcttcatcggcgggatagacctctgcgacggccggtacgacgacgagaaccacacgctgttccgggacctcgacaccacgtaccgccatgacttcatgcagaacaacttcaagcacgccggcctgcggcgcggcgggccgggngagccgtggcacgacgtccactgcaggctcgagggccgcgcggcgtgggacgtgctcgccaacttcgagcagcggtggaggaagcaggcgccgccggagatggccggctgtctgctcgaccttagccaggcggantccctgaccccggcagcttcggcgacgacgagccgtggaacgtgcaggtgttccggtccatcgacgacgcgtcggtcgtcgggttcccgccgagccggttgcggcggcggcgatgggcctaacgaacggcaaggacgtaacgatcgaccggagatanaggccggtacttgaggcaatccg

SEQ ID NO: 28301 - DNA, 792 bp, Oryza sativa
  Clone ID: PAT_MRT4530_32913C.1
atggcgtcgccgtccgccgcgcccaatccacggatccatgcccgtgcaagcacaagaggcgcagtcaaggagtgccaaggcaagagcaagttcttcctcgagcaccaagccaagtgggagaaggaagggaacaaaggctacgacaccaacgcgcacggctggcgcttcgcctacgagctcaccttcccggaaggcgaaatcccttctgactgggggtacagcaagcccctgtgggacgagcacgccaaggacgaggctcgtcgccgccaccgagaggcgaagcagcgcaagaacgaggcgctgcaacgccagcagcgcatagagcaagtacgaacacgctggcgggagaaatatgccgccgggaaggcaccgcgtaaagagcagctgcagaaggaggctatggatgatatgtttgactggcaagttctggctgagaagaggcacaccaagaatgtgcaaatggccttgaacatcatcaacaggaagcatccgggcagaaactacgagctctgggagatctctgcaaagagcacgatcgttgagatggaactatcctattgccactacaacttcactgcgtactccccaagcagtggatttgggttcttcttcgccgagacgagcgacgatgttaaatgtgaggaccaagttcactcgtggtgttcaatcgaaacaggcgaaatagggtgttgtgtgcgatgcatgagttatgagatttaccttgtacacccaagcaccgacaagttcttgttcggggatgaaagcttacattgctgctgtgctgaccactga

SEQ ID NO: 28302 - DNA, 266 bp, Oryza sativa
  Clone ID: PAT_MRT4530_32914C.1
ggggatcaacaacacttcaacagttatgctgatacaggtaggaatgttttggggatttacaggcaaacccaaacaggtctggcttaagcacaacgcatgggccaaaaattatttttgttcatagaggggaaaccgtttttttattacattggactggcttttctacataagggttgggctttgccttctaacacaaaacttgggccattttttattttcactgggggtccttcaggaagtcggggtttttaaccaaaacccctttt

SEQ ID NO: 28303 - DNA, 248 bp, Oryza sativa
  Clone ID: PAT_MRT4530_32915C.1
gcacgaggcgaccaggcggaaaaatccgtgtgcgcctgttctctccctcgttccccttcctttgccgtctccctccccaaaccttccaaatttccaatccggtgataatccagaaattaaccgatggaggagagcaaatcaggtcaaccagctatggatgcaactagattggatccttcgccgcgctcgtgtggctcgtgctcgcgctcatgtgggctgttgcacatgtcgccgtgcaatcagtatgc

SEQ ID NO: 28304 - DNA, 200 bp, Oryza sativa
  unsure (1)..(200): unsure at all n locations
  Clone ID: PAT_MRT4530_32916C.1
acccncgcgtacgacgatcatcacancgtccntgtcaagtctagcgatctcantcacgcataccncctctcttccnccntcgncggcgngcnanngcgctngcnntnagtggcgncccatcgagtcgcgganngcncggccgtgcgnatccgnngcatcgttatccgacntnagctcnannngcgtnatctnaacgtnga

SEQ ID NO: 28305 - DNA, 141 bp, Oryza sativa
  Clone ID: PAT_MRT4530_32917C.1
aaattaagttaggggaagggaaatgttccgtaagaaaggcacaaataagtttcgtacaaagacccctccagttgttcaaatgcaaataacatatgtacgggggataagatcatgagtgttacgagacacaggggaagtaaa

SEQ ID NO: 28306 - DNA, 735 bp, Oryza sativa
  Clone ID: PAT_MRT4530_32918C.1
gtttttgcaactcgacaacacagaaagcttttatagaagagcagtgtagggaaaatgaactatcaaatgtcgagataattgtggcagacatcagcaagtttgagatggagcgatcttttgacaggatcatttccatagaaatgtttgagcacatgaaaaactataaggcacttcttaagaagttatccagatggatgaaagaggacagcttattgtttgttcactacttctgccacaaaacatttgcataccactttgaggacaacaatgaagatgattggataacaaggtatttcttcactggaggaacaatgccatcagcaaaccttctgctttactttcaggacgatgtatctattgccaatcattggcttgtcagtggcacgcattatgccagaactagcgaggagtggctgaaacgtatggacaaaaacatcacgtccataaggccaatatttgagaaaacttacgggacgtgggcagctaccaaatggatagcttactggcgcacgttcttcatctcagtcgccgagctttttggatacaacaatggcgatgagtggatggttgcgcatttcttgttccggaagaagtagaagtcacccctggagccaagtactccctccatcccataaaaaaccaacctggtattggaggtgatattccctagtataacgaatctaggcaaccttctgttcagattcgttgtattaggaaatatcaccttcaattgta

SEQ ID NO: 28307 - DNA, 103 bp, Oryza sativa
  Clone ID: PAT_MRT4530_32919C.1
ggcctgatgccgtcatctcaccatcgactgagctgtcgcaatcttctatgcttaggctccgtcactgatttgctcaaatgctagaggcaaatactactgtgcc

SEQ ID NO: 28308 - DNA, 2010 bp, Oryza sativa
  Clone ID: PAT_MRT4530_3291C.1
atggtgtacaagtcaccagtctcaccgaagcagagaatctccttaaatcaaattgaggtggaaaaccctgtgaccaccgaggagaagagttcgcggaaattggaggatatccccatagtctgcgagtacccagaagtgttccccgaagacctcactaccatgccacctaagagagagattgaattccggattgatttggcaccgggaaatgccccaatttacaagagaccgtacagaatggtagccaatgagctagcagaggtcaagaagcaggttgatgagcagttgcagaaagggtacattcgactaagtacttcaccttggggtgctccggtcatttttgtggataagaaggacaagacgaagagaatgtgcgtcgattatcgcgcactcaatgaggagcttgaacacctcaacttggggcttgtagaatacgggtacgtggctgccctagaggcacgacctacgctcgtggatcaagtcagagcagctcaagtaaatgatcctgaaatagcggatatgaaaaagaatatgagggtcggaaaagcccgggatttccacgaagatgaacatggcacaatctggttgggagaaagattgtgcgtacctgacgacaaggaactaaaggatctgatactcaccgaggctcatcagactcagtactccattcatccaggcaacaccaaaatctatcaggccagtctacagatggcaccgttcgaagcgttgtatggccggaagtgccgcacacctctctactgggatcaaacaggtgaacgtcaactgttcgcaacagaagtgttaacgaaagcagaagagaaagtcagaaccgtcagagagaggctgagaattgcccagtctcgacagaagagctacgcggacaaccgccgaagggagctcacttttgaagcaggggattatatgtatctccgtgttactccgctccggggagtgcatcgtttccagacgaagggcaagttggcaccacgcttcgtgggaccatacaaaatcttggaacaaagaggagaagtcgcctatcagctagaacttccatccaacatgatcggcatccatgtcatgttccatgtatcccagttaaagaagtgcttgagggtacccgaagaacaagccgattcggagcacattgacatccaagaagatctgacctatgtggagaagccagttcgtatccttgagaccagtgaaaggaggacaagaaacaaggtcaccagtcgccgcaagccaccgctagaagccgtgccgagccgcgccgtcgacgccatcgcgttcgccgtcgtgcgggctgtcccgtccacccctcctccatcggaatccgccgccggaattcactcctcgccgtgcgccggtggttccggagctcgtcacgccgtcgccatcaccctccgtcgctcgccgtcgtcgatcgtcgtcggtgaggcccctcctcccctttctccctctctcccgcgccgcttagccgctgcgctgacgcccaaccgcttagccgctgctgtcgccatccgcgtcgccgcgacgccgccgctctctgccgctggccggtcgccgccggtcgccgccttgcgccgccgctgcgtcaagccacgccgccgtgcgccatggccgccgggccggcttgagccgcacgtgcgcgccggccgcgtaccgccccctccgccgtccgatccaccccgagtggatcggggccgtcggttcggctgcccgcgtggctgccgcgtgtgcgccgcgtcggcgccacgagtgcaccacgtggcgcaccgctccttcccggcttcgtccgtgccgtcgaggatgcctgtggagtggggatcccgctgcgccgatgaaagggaagacttggttcaatctagattgcgagcccttgcaaaggttaccaaggataaggaacgagttgctcaacattacaacaagaagggggtgcccaagactttttcggatggggatcttacatgttgcaaggactcgatggagaagtttatggacgagcgctaa

SEQ ID NO: 28309 - DNA, 529 bp, Oryza sativa
  Clone ID: PAT_MRT4530_32920C.1
catcatcaagctctgtgcgtgaagccacctctatggctatatgctacgcctgtaagaacagtagctacatcccttcttcttattgtcctttgaatgctactggagatgagataaatcctagtagagttgaggtgaaactcaagggatatgggatccccgagcaaggattctactgtctaaactctaaagctgaatgttcctgaatctggaggagggcgatgctaggttaagacggatcgttgctagaatcactatagagctgaatcatctatttaagaagattaagtgggattggaaggtaaagcaacggagtgaaattgactttttgattgatttgccttttgctgatgctagaagtcaggtcacagagtttaagggctttgctaaaacacctcaagttgtgagggatctgacagagttgatgggagaatgcaaagagattgatgagaatgggggtgatctgtgagaattaagactggttgtcttaaccctagtgcagttaattactctcttagggcccctttgaatc

SEQ ID NO: 28310 - DNA, 260 bp, Oryza sativa
  Clone ID: PAT_MRT4530_32921C.1
atccggtagattatcacacagatgcgcacgttacaggaattcagaggggctacagaatgtcgctgctgtaataagagcgagtttctggtgcacacgccgagttgtttaggctacagtaatggacacagctgggaagcaaagtgtactcagtcgattcctagagtgagccgtgaaatgttggaatgagctgctaggatggatggttatatcgaactcagaaggagctgaactagtggcacagcagagaaaaagaagataag

SEQ ID NO: 28311 - DNA, 525 bp, Oryza sativa
  Clone ID: PAT_MRT4530_32922C.1
atgtcgttgttgtcggacctcgcgctcgtcgtcggcgtagccaccgccggaccgcgcatcgcagctactggataccccatcccgctggaacctcaccaccaccgcagccgtaactgtatctgcttgcacgagagcaagctcgcgctgatctcgtcatcatcgctgaaccataggttgctgccaccggaccttgcgtccgccgcgcttgcatcgggcaagaacggggagcaagaacggggatcaatttgggatagggttgttggatttgaggctcgggataaaagtaatgccaccatgctgatcctcgcccaagacctcggcgcgccgttattcgtgtggttggtggcactctcgcacggcggcatcaagcactatttaggcccaattgagatagtgaaggacaccatccaccaccagggctggttctactccatcacctacaccggcgtcgttgagcagtgggactgtcacgacggggccgcctccggcaagttcacgatcgagcaggaccgtctgcgccattga

SEQ ID NO: 28312 - DNA, 4446 bp, Oryza sativa
  Clone ID: PAT_MRT4530_32923C.1
ttagtgacttgtgtcctggccatcgctgctgacctccatcttccgggtctgagctttgaacaagctagcaacatcagtagccgtgctacaatcctctggactccgatctggacgagagcgtatgtacctcggcatcctcactgagatcccacgcgacggatggaccagaccaatagccgcatggtgaacaggggatagcgtgaggtctgcaccgcggttgtcccaaacctgtaccgtacaaatccacaactcggaaagctcggctgtatcgtaataagtacttttctcggctggaattcggtctggaggatagaacttcttcatcgtcttcatcaattccatatctcgcgccatttgcagcatagaaccggcgtcaagctgatgagtgactacaggcgactgtacgggcgagcggtaggtgacacattgcccggcggagcactcgagcagaggaagtccactagcctctggccgttgggtgtacctccgtcagttggcacgagcggcggcaggctttggctctttatagaactcatctgagaaaccagacataacgcggcagacactttggaactcttcgtattcagggttgtagcacgccataagaaaagggctataccatccagctttccgaccatttccataccatgcaccaattggaaccaagtccaggctatcacccaagccaacatagtcacgcttaacctttaaccatgaatcacagcgcttggaagcagaatatccagcatcaacatccagtattttcagcataataccctcacaagaagactggcatgccattttgaaaaaggtgttcattctctccaaagtggtagaattatccacagaagcttcatctgcttctaccttgatgcggaacaagacaacccaaatgatatgtttggcccaaatagacaaatttgagggatctaggaggccaatttgaaacgcaagggaggaaattagcctagggggaaattcgggggaccaaactgggcatttaccatgaatctgctgctttacactaagaggtgcaacgtttcgagtatcataagtaagttgctgagctaactcaaaatgtcctggcttctcctggaacaagtcgtggatgtactttcttctttgccgaagtgagcagttcaataggctttgtccattgcagaacatgatatcaaaaacaaacacacaaatgtctacctcggcgtcaagtataaagctggatacttcgatgctgcacagctctttgatcatgccaaccagatcaggaaatcgagaggttgactctttcatttgccttgaaaatatttgcacagatccatcatttgatctgtgaatctgggctcgctgaccatcatacttgtactcacaggtaaatgctctaccattaaacaatttcagtgattgagtcaacccgttagtaattcttgcaagcataggtgggataggggtgccagttatcattgctaaggacgaggctgaaaatgcagtgtcttctctcaggagagagggaataagcaaatcaagattaggaatgacattgtatgcttcagcaacttcagttgaaagttcctgtaattgtggttttatgccttccaaagatagcacaggactatttgaatattttccatctataacaacagcatgtgcaagtgcaggtaaaattgtcttcatcatgaccccaatacgcaagttacggaccagtgttctaacaagaaatttcatctccatttctctgcaagaacggataagatgcaagacaagaatttttctccttccagtactcccactacctgctatcccacttagtttgcgaagtgtggaaaacacatcgcgaattgagaggggacgaggaggagcaagtaacatttgattctggcggcattcttgggcaacatcaccaagatcgccgaacgttttgtacatctcatgtattttagatctgctggatcctaatgcctcaatattttcatggtcaggagaaattttattagtacataaataaacagcaggtagcacatcatcaggtgataaggcaagcaaacttcggaacatgttgcaaagcatggcagtagttttgatctttcccttttctctttcaaccagatcaaaagtgcgagccaaatgtaagtatggtgcaggctgtcctgctgtccagcaagcatgctcgatcggtagatacttttcaattggcaatgatatacagactgaatctgcttgtgccacataagattgtacacataagttcggcatctttggagtggcctcagaagagttgcgaagcaagcccgtactactagatttgtctgtcatttcattttctgtgttttgtgtgacaatattcatatcattttcaagtacattactgttgtcggttttactgtaaaatatatcaactgctacattcacatccccttttgccttctcaagcaatgaaattgcagactctctggacattccaccatcgacaatctgaagaagctggcttacactctgcttctctgactctacaacttcagtaaactggtcgtcattcctcacattgttttgatttgcgtctacagttactttatcggatgtatcgcttttagaagcagctagcatggttctagcaaaatagttcgtaattgtggactgtttgcgcccactggattctgtcaagggtttaaaggcagttgaccgccctttcttttttggtttgtccgcagaattagagcccctcttcctttcccttttagaaagatttgacttcattctcatagcgttcaaattcagcaacttactagaatgatccatgggcttctgtgaaaataaaggaacttcttgctgactacttgcatcagcagaagatccatgatcagaagagagatctatctctgacttaggcgtttcactattataaacatttgcttcctcaaagaaatctctttctttctcaaaaaaatcagttgctgcttgaacaacatcaccgcctgacttaattagcaagtccaggatcaggtcctggctgacccatgagggtaggaaatctgataattctttcttcatttccactgtaatcttctcttgaaaactatctgatcgttcaaaagccaaacttgcaggtaacaaagtagcctcctccagttcttgcacctccccttcttgctggctcaatccagtaactgcatcctcagggccaagagtagcatttcttgagcttcggtggaatgccatcaggaactcctgtttgtttgctgtctcatccaccaaaccagcaaaatgcttctgcagagcaaatgcctctttactatcgagctttccaccatcaagccccacggttggaattacccgttttgggtgcaagaacttcacgtagtcccgcaactcattatagctcgagtgctcgctataaggcacaagatggatctcaagtgaatcctttgttctaactgcaaagccttccttcttggtctcgtacatccaaccggtcggtacaaatccaacagccttgttatatcctctctccaccatgatctccttcatcttcacaaaatttggccgaaaatagggccatgtttcacctaaaatattccacccagtgacatgcacatctgttgctgcagcatcctcagtaaaaactccatcctccccaccaatccccaatagagtcaggatttccatcttcctactgtccacatggatcttacagccacagcgtcgtgcaacttccagcaaaatcctctccttgcccaccacgtaggtcgcgatcaaacacagcacgcgctctccagatgctctgctctcctccttcacccgcttgattgagttcacgacatactccagtgactccttttgtggaggaaacgtaaatttgggattgcagtacgtggtatctagaaacacagcatcagcaccgatgaactccagcaaattaggttcggttatcatagactgcgaaaaccggaagtcgcccgtgtggacatacctctccgcatttggtccagatgagcggaagaggaattgaacggcaccggggcaatggttagcatccacagcgacgacgcaccacccatccacggtgacgcggacgccagcatcgagcacgacgacgagctgcggcggcacggagagcaccgagacgaggaggcgcgcggtgagcggggagcagaagacgaggccgcggcgccacgaggggccgaggccggtgtagtggtcggagtggaagtgggagaggaagtaggaggcggtgaaatcgccggcgtggcggaaggcgtcgacgaggaagcgggagcccgggatgagcgccgtgggcggcacggaggcggggacgggagagagcggcgatgcggcggaggcggaagggggctcgctgtggggggaagggagggaggcgagcgacgataggaacagggtggaggtggcgacggagagcgatttggagtccggggaggagaagaggtacgccat

SEQ ID NO: 28313 - DNA, 2976 bp, Oryza sativa
  Clone ID: PAT_MRT4530_32924C.1
tccccgggctgcaggaattcggcacgaggagagagagagaactagtctcgagttttttttttttttttttgatcactaaaacgtatgcgcgtgtactattcaatttcaggacactacatattgcaccaaaacgtgcaacatcaattactacatgggacaacatgccgatagtttatttacccaaaaaggcgaaaatggtcataaatcataagtcatagcctcgtaccacggttcgacgatctttcaggtacaatcttcaaagctttcatcatctccgatgctcccttcgtgtaagatctgcttcaccttgttcaagatctcctgcatctgctttctggaatggagagggcaagggtacatgcacgcgaactccagctgaccatctctgatggagtcaaacaatccgatggatggcccgacgccatgcacggtggcgcagcacacgaattcctccacgccggccttgctctgcagatcggagaggtcgtacaccaccggctcctcgaacacggagacgaccgccgtccggagcgcagagcccgtcgtcagctgcgggttctcgattgcccggcacatgaggaagttgaggtcggcaatgtcagtgaggtgcttcttgttgttcttggcgttggtatacgaatcttggcacctcttggccagctcccatagctcttctccgccatggattgcgtgcgtgttggtgatagcagaatggtagaacccaacgttgtgatcatccagggccggttcgagaaacttgcggcaattgataagggtcgcaatggagtacgtctcctgctggttgctcgccagctgcagcttcgactgccgtgcagcgagcagcgtcgcggccgccatggctgcacaaagcttcactccgttctgcttgcacgcatcgagcagcctcgtcgtctcgtcgcggtcgaagccgaggcgcagcatctgcgtggacctctccgtgccggtcacctcgaacggcagcgtcgacgtgcgtaggccgttgatggagtagcccaccatgtcgagcccccgcgcccagaacggcttccacgagtccctctgcggtatcctctcctccagcgacgcgcgcaccgccgcgtcctcgggttcgctcgctgccgcggcggcggcgccatcgccggccagctgcgcgaggagctccctcaccagcgaggccgacgccgcgcggtcgcacgcggccgtgtggatccggacgaacagcgccgaccccccacccgctggcggcggcagctcgtagagcgtggcgaagagcaccggtggcgcgtcgggctcgtgttcggacgcggttgcggttgcggcggcggcggtccatgggttgcggttgagctcgtgctcgaggagggaagggaagtcggtggcggattcgggcacggggaggagctcgagcgctagcgggggcggaggcggcgcggcggcggaggggaaggcgagggttgggctgccggaagcggacccgcggaggcgcgcgcggaggacggggtgagcgtccaggatggcccgcagcgccgcctggacggtcgccgccgccaccgccgcctctgcgccgcgcgcgaggcggagcgcgagcagcgtcgtgccggttccgcccggcacggcgcggtaccagccgtactccatcccgcccaccgcgcgggcgcgccactcggctgccgcctccggctcgccgccgccgccgccgacggtcgcgggatccatggatgaacaaaacgtcggcgcttggcgttgttcattggtagaattctggaacgtgcgagcgcgtgttgcatacttgcattgccgcacactcgcacagcactcaactggcgctaggcacttcctctcaaagacgacgtggttgccgcagctcatcgagtacatagaatcaacggtggatagaaagttgggaaccattatctccagtagccccttgggattgtccacatgaacccaatggccagagttggggagaacgtgaagagaaactttaccagcatcaggcttgctctctctcctagacaacgcttttagcctctgaacatcatcagaaagccatctatcactgagctctgcttgcactatggcgatgtccaaaccctttggtgggttctcaagcagtgtccaatagcttctttctctataagaattaaacatatctatggcagcctgaagatcaaacgcccatgtcacatgttcattgtccttttttaagttgctcccaatccattctgaaagagactttgaaaatcccaagttgatcatgtggtcgacaacccacttgcgcgatggaagcgatgaaggaagacttgccagcgtttgcaaaacccgttcaacttcaccatcactgttatctgtttctacttgaccaggaacagaatcaagcacccaaagaatttcctggcagagcatcctgtcataattatcaggaaaccaaccttctaaaggtgtttgtccaagctgtttgggaagatcagcggactccccgtaatcaccgcgggaacagctctctgcaaaatccagtgccaccttcccacccatggagtgacccacgacaacatccggccatgcccagccacgggccttcaccaaatcggcgaggtccctggccgcagttgacatgtcatgcggcggcctcaggcccttgatccccgctgatctcccgtggttcctcaaatccacgagaaccattctccactcgtcggaaggggagcggtcgcggagctcggaggcgagggcgcgggagaaggagcgccagttgcggccggagccgaggaggccgtggaggacgaaggcggtggcggtggacggcttctcgggggacagctggatctcgtcgaaagcgagggtttcggtctggttggaggcctccgagtggacggaggaggagaggacgtggctccacggagaccaagcggcggaggaggaggagaggaggcgcgagcggagggaggaggacgatgcccggagagacgccgccat

SEQ ID NO: 28314 - DNA, 1130 bp, Oryza sativa
  Clone ID: PAT_MRT4530_32925C.1
taccatccagctttccgaccatttccataccatgcgccaattggaaccaagtccaggctatcacccaagccaacatagtcacgcttaacctttaaccatgaatcacagcgcttggaagcagaatatccagcatcaacatccagtattttcagcataataccctcacaagaagactggcatgccattttgaaaaaggtgttcattctctccaaagtggtagaatcatccacagaagcttcatctgcttctacagtaagttgctgagctaactcaaaatgtcctggcttctcctggaacaagtcgtggatgtactttcttctttgccgaagtgagcagttcaataggctttgtccattgcagaacatgatatcaaaaacaaacacacaaatgtctacctttatgttctgaattgcaattgaggagtgcttgctccctctctctcttgaagacagctcttggagtctctgctagttgggtgctcatcgatgcagcagagataagcatcaagataggaatgacattgtatgcttcagcaacttcagaaagttcctgtaattgtggttttatgccttccaaagatagcacaggactatttgaatattttccatctataacaaaatgtgcaagtgcaggtaaaattgtcttcatcatgacacgcaagttacggaccagtgttctaacaagaaatttcatctccatttctctgcaagaacggataagatgcaagacaagaatttttctccttccagtactcccactacctgctatcccacttagtttgcgaagtgtggaaaacacatcgcgaattgagaggggacgaggaggagcaagtaacatttgattctggcggcattcttgggcaacatcaccaagatcgccgaacgttttgtacatctcatgtattttagatctgctggatcctaatgcctcctccagagcagatacaaccaaactcccaccaatgtttagttcaatattttcatggtcaggagaaattttattagtacataaataaacagcaggtagcacatcatcaggtgataaggcaagcaaacttcggaacatgttgcaaagcatggcagtagttttctttcctttcttcctatcaaccagatcaaacggacgcgtgg

SEQ ID NO: 28315 - DNA, 1180 bp, Oryza sativa
  Clone ID: PAT_MRT4530_32926C.1
tgcagagaaaaactcacttgctcagacatagctcgccacttctcccctgcagccttgctcaccagcggaggaggaggaggcggagtttgggaggcggcgcaacgggcgttgtctggccttttggggcggagcgcgacgccagcgcggaggggaggatcctggaggcgcccaacctccggatcttcacgttcgccgagctcagggccgccacgaggaacttcaaggcggacaccgtcctcggcgagggcgggttcgggcgggtgcacaaggggtgggtggacgagaggaccatgagccccgcgcggagcggctccggcatggccgtcgccgtcaagaagctcgatccggagagcttacagggcgtgcaagaatggcagtccgaggtgaattttctggggagactttcacatcccaacctggtgaggctactgggctactgctgggaggacaaggagctactgcttgtgtacgagtacatggcccaaggcagcttggagaaccacctcttcagaaggtcgcctcagcagccgctgtcgtggagcctccggctgcgcatcgccatcggcgcggcccgcgggctggcgttcctccactcgtcggagaagcacgtcatctaccgagacttcaaggcctccaacatcctcctcgacacgcaattccacgcgaagctctccgacttcgggctcgccaaggacgggccggccggcggcagcagccacgtgacgacccgcgtgatgggcacctacggctacgcggcgccggagtacgtggcgacgggccacctgtacgtgaagagcgacgtgtacggcttcggcgtcgtgctgctggagctcctgacggggctccgcgcgctcgacgccgggcggcccagcgggcagcaccacctggtggactgggccaagccattcctgtccgaccgccggaagctggctcggctcatggacccgcgcctcgaggggcagtactcgtccaggggcgcgcagcgtgcggcgcagctcacgctccggtgcctcgccgccgaccacaagaaccggccctccatgagggaggtcgtcgccgtcctcgaggagatcgagtccatgtccaggggcggcagcggcggtggcgcccccggctcggcgtccccgcgtcccgcggcacggggcggcggcggcggcggcgcgcacggttacggccagtc

SEQ ID NO: 28316 - DNA, 1674 bp, Oryza sativa
  Clone ID: PAT_MRT4530_32927C.1
ttttttttttttttttttttttttttttttccggaaaggaatcaagcctgacagataggcgccaactaactcaagaacacagacaacaccaacaccaacaacaacaaggagaagaaagaaacaatttttttaatcataacttttaacaggaaataataataaaaagatttaagaattcatcatccacagtccaagtccatggcctctccccttatcaagaacggtatgtattggtatctgtatccatatgggtacaacattttctttgccttttcttcaaacgccaattggagaacaataataaccctttttgacttattcccaatctgaatacacttcaatttctctcttcccccctaatttcctctctctctctctctctctctctctttctcagaatatatgcacacaaaagaatatcaaacatttgatggtgaagaagaagaagaaagaaagaaagaaagaaaaaacaaaattaaaaaaaaattactctcacatgatgaactgaactcatctagaagtggtagtagtaccatgtaatgtggccaaccaaattgctagagcagcagcaaataatccagggcaattcaatcatcatcttcatcatcatctcatcagggacaggacacctcggattttccggacatgggtgcaattcttgccaaccaagcaccaccattgcatctgccgattctgtgatgtgtgtgctcagaatagcatccagtcgagccggttcgccggcggcggcagcggcggcggcgcgccggaggaggccgttgagctgacggtggtcgttgaggaggccgacgacgtcgacggcagcgaggacagcaggtcgaacatctcccaccgcgtctgccccgccgccggctgctgatggtgttggtgagcttgctgctgctgctgcctcgccggcgggtgatggtgttgtttggaggtgagcttctcgccggacttgcgcacgatggcggcgttcttggccatgacggcgtcgagcgtctccacgtacttctgcacgcgcttcacctgtagccgcctctgcgccttgacgtcgccgtcggcgaccaccgcgtcgagcttgagcagctcgttcatgagcagctcggtcacctgcaccacgtcgttctccgccaccttctcccccttcctcaccgacgcgtccagcgccgccaccttgggggcgagcttgtcgacctcggcggtgacggcggcgacggccttggcggccttctcgaggtggccattgcggcgctcctcgatgaggcggcgggcgcgtgcctcggggtcctcgacgaccaccagcttggacctgtccttgacgccggccatgtccaggaacgccttggagtccctctccttgtccttgtacatcaccttctggtcgtccggatgcagccccgttcgcgccgccaccatcttcttcagctccccgaaggacgcctgcgagttgatgtagatctcgtgggtgatgccggcgtgcttgaccttgacgcggatggtgggcaccggcttcacgttgacgggctcctcgtcggcgccgccgcccctcttctgcaccagcatcccgcctggccgcacctcccacacctcctccgccggcaccttcccacccgccgccgccgccgctgctccggcggcggcgccaaccaccgggggaggaggaggattcttcat

SEQ ID NO: 28317 - DNA, 1305 bp, Oryza sativa
  Clone ID: PAT_MRT4530_32928C.1
atgtcgtcgtcgtggttccactcctcctcctcctcctcctcctgctcctccacccaccaccaccaccgccacgtcgtccaccacgcgtcgacctacttcgacggcgacgacgacgagggcgacgtcaagccggcggtgacgcagcactggcgttacgacgcccgcgctgcggcctcctacggcggcggcgaggatgtgaagccggcggtggtggtgaagcagccgccgctgcctcgcccgagagtgggaaggggtgtccacgaccgcgcggaggagaccacggcgctctcgtggccggtggtggagcccttcaggtccacgctccgcacgcaggagtcgctcgccgggatccgcgccaggtacagcgtccccgaggggttcggcctgcaccccgccggggccaaccagaccgcgtgcgcgccgcctccggtgactccgcgtggcgggcgcgggggtggcgcggcggcggcggcggtgccgatctgcgtgtacgcgcaggcgttcgcggcggggatgcgcctgccgctgcacccgttcgtcagcgacgcgctggcccacttcggcatcgcgccgtcgcagctggcgcccaacgggtggcgcgtcctggccgggttccccgtgctctgccacttccgcggcgtcggcgcgccgtcgctcccggtgttccgccacttcttcaccctggcgccgctgcccaaggggaaggggtggtactccttccgcgccagggagagcgtccccgcgctgttcacgggcctcccgtcctccgtcaaggcgtggaaggaggagttcctcttcgtctcgccgccgcccgccgcgccgtggcgctgccccgtgcgctggggaaccccgtccaaggaggccacgagcgacccggcgctcaccgagagggaggccgccgtggcgcggcggctcacgcagggccaaggcgtcgtcgacctcaagacctacctctcggagagcaacctcgtcgccgccaagatcagcagcgccccggcatgtctgggagggacggaagcttcacggggttcgtcggtggcggccgggaagaagaggaaggtgctgggcgatggcgtcagcaccggcggtggcgtgcttcggtcagagctgcaggcgaaggacaaggctctggccaaggcgcagggagagatcagccgcctgaaggcgcagctggggagcgccaaggcgagggagctggaggaggcgaggcaggcgttggagtacgagcggaagctggggacgcaggtgctcaagtctgatggcgccgccgccggggccagcaagcgtcgccgtggcggccagtga

SEQ ID NO: 28318 - DNA, 1037 bp, Oryza sativa
  Clone ID: PAT_MRT4530_32929C.1
tttttttttttttttttggtattgtaagtgttactgtatttgtatacaaacttgaacttggaatagtttgactttgaccaaagtcaaaacgacttataatatgtaatggaaatagtgcatagttaaaagttgctatattttaggatgaatgtagtactaagttacatgtaaattccacgctcatttcacccgaggatctgatgatctttgctaacagctgcagtgcaaatacgttgaagactccaagaccattgcgacaaggcagatttttcagattctgtcccatcaggggaaaaaaagttcagaggacatgaaaaaattgtaccataaattaaggatggtttgaacaatactttgaacttcgaagtaacacgatgaacatgaaggaaacagcatccttttttgactgaactcttaaaaggaccactgaaccgctgttttgaggaggcgctacacaagctaactcttcgttgtgtggaacatcaaagacgaccttagagctcactattgctagcaccaccggttgtctttccattgacggcgataagctccgtgtcaaagattagtgttgctccacctggaatcttcggtggggagcctctctccccataacccatctttgcaggtatctttagcttcctcttttcaccgacacacatacctagtaacccttggtcccaaccttttatcacttggccgtttccaagagtaaattcaaaggggtcacctctgtcatagctagaatcaaacactgatccatcagtgagtgacccacgataatgcactttgattttgtctcctttgtgagcttgcagggtgcatgactctggcttgtacttcacaccgatctgaagctccgtgacatctccggacttcttggccgaagcggtcaggatgagggccgccgcgacaacgacggcggcggcgacggcgaagcggacgagccgccgctgctgctgacgcttccccattcgcttctccagtacccgcgccgcgggggcgacctcgagccgggcccgtgccggcaggcgtaccag

SEQ ID NO: 28319 - DNA, 219 bp, Oryza sativa
  Clone ID: PAT_MRT4530_3292C.1
agatacgcaatatgagcacaactatatgggtcaataagcacattagagaacacacatggccaaggcacctatttgactcaaattgcaacactacttcagcactataatacaacaccatgccccagacataggagagcacatcgtcatagagagtgctggatggaggcagatagccagcctggtgcatcacttatttagtattcctttacttgacattgc

SEQ ID NO: 28320 - DNA, 531 bp, Oryza sativa
  Clone ID: PAT_MRT4530_32930C.1
atgacgcttcgagaagataaggtccgcagcgtcgaccgcttgtctcctctcgggaggggcggcctagtggcagcagcggaggtgcggcctagcggcggcagcggtagcagcgggaggcggcagaggggagggggatgcggtcagtggcggatccactgttggggctttcacattgacatatttatacacgagcatcctctcaatttacatcatagattcgccactagatgcggtggcggcgccctcccctctcgactctctcgctgcccgcggctggccggcggaggcggcagcggcggcggcgcccttccctccgccagatccggggagggacggcctagcggcggcagtggcgggaggcggcatgtggccgcggaagggaggggaatgcagcggcgcgacgagaagaggtggcgccttccctctgtcagatctggcagcctggcggcgggacaagaggcagtggtggcgccctccatgttctatgatgatttctgggataatttctgtgatgttcttctctgtgaatga

SEQ ID NO: 28321 - DNA, 511 bp, Oryza sativa
  Clone ID: PAT_MRT4530_32931C.1
cgagttggttggctctatttgtgtttgaaatgatgacatgatattaagttgatgcatggaaaacaagaaaatcattagcttataatcttaattaatatggatatatttgatattttaataaattacatatataatattcatatgtagtttatatagtttgaaaaacaggttaacaagaccgatgtggaggttaaatcttaatcaaacgagaaaccattagcttataaccttaactaaaatggatatatttgatatttaataaattatatatagataatatacatatgaaatacatctgtttagtagaataaaaaacatgttaaaagaccaagcaccaaaccttaatcaaacacatgatcttgtatcttgttgcgacatgtatggggatggactgtcacctgccctgtcacaattgtcaacgcaagtgacagcgataccctaatcgaagcccgtgatcttagtggttgcatcatgtgtctgatcggtgccggtatggaagccattgctgctc

SEQ ID NO: 28322 - DNA, 345 bp, Oryza sativa
  Clone ID: PAT_MRT4530_32932C.1
gcattgctcgtgctcaacgactatagcaataccattattaatttcagtagaagcggtgcgttcctacaaaaccagacgcatatggcataacattgttctgcttggtcacaacacaacgctgctttctataccctcctaatgaaaatgggggcttgagtaattcaatttaatctggcgggggtgtgccttctctggggcaaggtaaaaaaaagccctaagaatggggagctggaagattccaatggatgggctacccattggaactcggagggtggttccgggatcaaatggttggaggacatttgggtccttggggatcgctggcaactgctttttggaatggta

SEQ ID NO: 28323 - DNA, 298 bp, Oryza sativa
  Clone ID: PAT_MRT4530_32933C.1
aaatgaaattgttttatttttatatgaatttttggttttcaatgaatttactattgtttatgaatgaggttggaacaactaattttaacgagatgaggagtaaacttaacaaccatagaacaaaaaaatatggagtgcacaacaatattgtgaggaataaatatatagcactaattaaaaatactcaaagacagtgtaggactcgccggagctcgaggtggccgcgccgccaccatccgacggggggggggcgggggaagggggggggaatccgggggttctagtcttgggagggggg

SEQ ID NO: 28324 - DNA, 245 bp, Oryza sativa
  unsure (1)..(245): unsure at all n locations
  Clone ID: PAT_MRT4530_32934C.1
gcaaatgcaagtgcttgcctggggggggacccacaacccccaaactgcgtgcccggcataactgcaagaagctgcggccaaagactggtgttgaagtggagaacacagcgagagtcacacaccaccaaggttcgtggagatcgtggacagagctgggacagctganttagggcatcaacagggcaacgggtgggtatccacaccatgccaagaaagatccatattaacacacccgtgaaaaaaaa

SEQ ID NO: 28325 - DNA, 353 bp, Oryza sativa
  Clone ID: PAT_MRT4530_32935C.1
gtgaagatggattcattcttgaggttcatcgataagagaataaggggatcagataatatactgactgcagcatgcagagtctttatgtataacttgatcaggcataattaaccataaatgtatgttgtaatatatataattggtggggtatatatatagacatgttgagtacataactacatatgtaataagtcaggagtagtaactgatatgattaacttgtcaaagtgttgacatttgcatctcatcatcatttttggtttaagaaatcggtttctctaaagagaacatatatatcaagtttatatagcagttccaaatataaaaaaagcaccacatattagcaggggttc

SEQ ID NO: 28326 - DNA, 500 bp, Oryza sativa
  Clone ID: PAT_MRT4530_32936C.1
ggccaaaagccatgttaattatttcaccaagaataatagaacggtagtacatcatgttaaaaatacagcagctgggaaaaaacctacaaggctacaggattgccatatgattgacaaaaagggcaatacatttatgtgggtgtctttggaggaacacttgatgagtaattttccttgccaattgtgttcaagatgataagtggtggcaggaaacttgtacacaggtcaagcaacacaatgctcattgttcaaacttcaaagtgtcccaacttgccccaatcaaataaaagggctatcttatgtgaatgatcatcttgttgaaaaaagccttgtgctccggaaaatactccagtaactcatttttggtcacccacacgtggtcctggcattttccgatatcatatttcgtggcaccgaccacttgtgacttaaagaagaatcgctgcaagaagtatacttggattatggaactattacatatgacaacacatccaaccaac

SEQ ID NO: 28327 - DNA, 479 bp, Oryza sativa
  Clone ID: PAT_MRT4530_32937C.1
tttgttttttttttttttttttttttttttttttttttttttttttttttttttttttttttacgcgcgcagcatgcattttatttaggggcgggccacaattcaaacatgtataggggaaacctttgggggggagaaactcacgggatatgaggggagtcggggggacagggaaatagtcaaatttgggcgttttttaatgccggtcgttgactttgttgacaagggcagggtcgggcaggccaaatctggggggaccccacaaagggcggggccaccgacgatggggaaaatccggatgtagccgcgctcgccccatgaatggccccaagagttcttgatgggccaatacttggggccggaagacccgttggtgccccaccccaccaccgtgacggggtgggctaagggcgtgccaaacgggcccctgaaaaccccacccttggagaaatgaatcccgctaccgaccttgatgggca

SEQ ID NO: 28328 - DNA, 2902 bp, Oryza sativa
  Clone ID: PAT_MRT4530_32938C.1
atggccatggcggcgaggggagtgttggccatggtggtggcggtggcggtggtgtggtgcaataatgtggcgagggcgcagacgccggtgttcgcgtgcgacgcgtcgaacgcgacggtgtccgggtacgggttctgcggggagtgttggccatggtggtggcggtggcggtggtgtggtgcaataatgtggcgagggcgcagacgccggtgttcgcgtgcgacgcgtcgaacgcgacggtgtccgggtacgggttctgcgaccggacgaagagcagcgcggcgcgggcggcggacctgctggggaggctgacgctggcggagaaggtggggttcctggtgaacaagcaggcggcgctgccgcggctggggatcccggcgtacgagtggtggtcggaggcgctgcacggcgtctcctacgtcggccccggcacccgcttctcgacgctcgtccccggcgccaccagcttcccgcagcccatcctcaccgccgcctccttcaacgcctccctcttccgcgccattggcgaggtggtgtcgacggaggcgagggcgatgcacaacgtcgggctggccgggctcacgttctggagccccaacatcaacatcttccgcgacccgcggtggactggtggtgtcgacggaggcgagggcgatgcacaacgtcgggctggccgggctcacgttctggagccccaacatcaacatcttccgcgacccgcggtggggacgcggccaggagacgcccggcgaggacccgctgctcgccagcaagtacgccgtcggctacgtcaccggcctccaggacgccggcggcggcagcgacgcgctcaaggtcgccgcctgctgcaagcactacaccgcatacgacgtcgacaactggaagggcgtcgagcgctacaccttcgacgccgtggtgtcccagcaggatctggacgacacgttccagcccccgttcaagagctgcgtgatcgacggcaatgtggccagtgttatgtgctcctacaacaaggtcaatgggaagcctacctgtgcagacaaggacctcttgtcaggagtcatcagaggggactggaagctgaacggatacattgtgtcggattgcgattcggttgacgtactgtacaataaccaacactacaccaagaaccctgaagacgcagctgccatcacaatcaaatcaggtttggacctgaactgcggcaacttcctggcgcagcacaccgtggcggcggtgcaggccgggaagctgtcggagtccgacgtcgaccgggccatcaccaacaacttcatcgtgctcatgcgactcggcttcttcgacggcgacccgaggaagctccccttcggcagcctcggccccaaggacgtgtgcacgtcgtcgaaccaggagctggcccgcgaggccgcgcgccagggcatcgtcctcctcaagaacaccggcgcgctgccgctctccgccaagtccatcaagtccatggccgtcattggccccaacgccaatgccagcttcaccatgatcggcaactacgaaggtacgccgtgcaagtacacgacgccgctccagggcctcggcgccaacgtcgccaccgtgtaccagccgggatgcaccaacgtcgggtgcagcgggaacagcctccagctcagcgccgccacgcaggccgcggcgagcgctgacgtgaccgtgctggtggtcggcgccgaccagtccgtggagcgcgagagcctggacaggacgagcctcctcctgccaggacagcagccgcagctcgtctcggctgtcgccaacgcctccaggggccccgtcatcctcgtcgtcatgtccggcgggccgttcgacatctccttcgccaagtccagcgacaagatctccgccattctttgggtcggctaccccggcgaagccggtggcgccgccctcgccgacatcctcttcggataccacaatcctggtggaaggttgccggtgacgtggtacccggcgtcgttcgccgacaaggtctcgatgaccgacatgcgcatgcggccggactcgtcgaccggctaccccggccggacataccggttctacaccggcgacacggtgtacgccttcggcgacggcctgagctacaccaaattcgcgcacagcctcgtgtcggcgccggagcaggtggccgtgcagctggccgagggccacgcctgccacaccgagcactgcttctcggtggaggccgccggcgagcactgcgggagcctgtccttcgacgtccacctccgcgtgcggaacgccggcgggatggccggcgggcacaccgtgttcctcttctcgtcgccgccgtcggtgcacagcgcgccggcgaagcacctgctcgggttcgagaaggtgtcgctggagcccggccaggccggcgtggtggcgttcaaggtggacgtgtgcaaggacctgagcgtcgtcgacgagctcggcaaccggaaggtggcgctgggcagccacacgctgcacgtcggcgacctcaagcacacgctcaacctgagggtttaaattgattaggagttggaattaaacgggagatttgctagtgaggaagggcctctgatctgattgatacacggagtttggaattggattcgtcaagggaatttgcattacgagtggccgtcagaaatcagaattggttaatggggggtgtaataaggacggactcccccgttggagagaattggatcctcgggggtgggtcttttgctgtgggtgttaacatttgatttatttggagggtcgatttgcaactgtaatctttggaaaaagaaatttccgcaagtgtaattgattggaagggaaattagctcattttcgtccattcaaaaaaaaaaaaaaaaaaaactcgagcctcgtgccgaattcctgcaggcgtgcacatgac

SEQ ID NO: 28329 - DNA, 963 bp, Oryza sativa
  Clone ID: PAT_MRT4530_32939C.1
atggccatggcggcgaggggagtgttggccatggtggtggcggtggcggtggtgtggtgcaataatgtggcgagggcgcagacgccggtgttcgcgtgcgacgcgtcgaacgcgacggtgtccgggtacgggttctgcgaccggacgaagagcagcgcggcgcgggcggcggacctgctggggaggctgacgctggcggagaaggtggggttcctggtgaacaagcaggcggcgctgccgcggctggggatcccggcgtacgagtggtggtcggaggcgctgcacggcgtctcctacgtcggccccggcacccgcttctcgacgctcgtccccggcgccaccagcttcccgcagcccatcctcaccgccgcctccttcaacgcctccctcttccgcgccattggcgaggaaagaatgtgtgtgaacatagtcagtatggtacacgcattgccccagcaacagctgcgatgcaacgcacctatgcatggctgtgcctgcgccgtccaagatttacggcaggatatgctggtgtcccttgtcacgggcgttttgcgtcactgtctcatggggattaattcagaaatggaggctcaaaaagcttggtccatgatgtataatctgatagtactggtggtgtcgacggaggcgagggcgatgcacaacgtcgggctggccgggctcacgttctggagccccaacatcaacatcttccgcgacccgcggtggggacgcggccaggagacgcccggcgaggacccgctgctcgccagcaagtacgccgtcggctacgtcaccggcctccaggacgccggcggcggcagcgacgcgctcaaggtcgccgcctgctgcaagcactacaccgcatacgacgtcgacaactggaagggcgtcgagcgctacaccttcgacgccgtgcagcaggtgatacacatgcgagtaaatgagctccgcttgctacagtga

SEQ ID NO: 28330 - DNA, 618 bp, Oryza sativa
  Clone ID: PAT_MRT4530_3293C.1
atgcccagggtcctcaaggaggtgatcgagcaccgctttgccgtccggcaaaaagtgcggcgtcaagccctggagcgacaggccttcatccgagaggaagtggcgtggctcctggaggctgacttcatccgcgaggttatccatccggagtggctggcgaacctggtggtcgccccgaaggccaacggcaagctccggatgtgcatcgactacacggacctcaacaaggcatgccctaaagatcccttccatctaccacacatagatcagatagtcgactccactgcggggtccacacgcgtgaaactgaatcccgataagtgtgttcggtgtgccggcgggcaaacttctcggttttctagtctccttccgaggcatagaagcaaatcccgagaaaatacacgcgatagagaggatgggcccccctacaaacttagggatgtgcagtgcgtcactggatgcatggccgccctaagtcgattcatatcgaggctgggagagagggcgctacccctattcaagctcctcaagcgctctaggccgtttgtgtggacggaggaagctgagcaagctctcaaccagttgaaagcttacctcacctcccccccatcttggtag

SEQ ID NO: 28331 - DNA, 259 bp, Oryza sativa
  Clone ID: PAT_MRT4530_32940C.1
ggagagagagagagaactagtctcgagttttttttttttttttttttttttttttgttgttttttttttttttttttttttttttttttttaatctatcaaccgccggacaaatggcagcgagttcccattaaaacaccgaatatggttacatttaacatctcatactaaaacattaacaacatgaaacagaaagccaactgggaggccttcgttccttatcttcctttggtgctacatcaacatctatcatcagggtg

SEQ ID NO: 28332 - DNA, 623 bp, Oryza sativa
  unsure (1)..(623): unsure at all n locations
  Clone ID: PAT_MRT4530_32941C.1
gggtcaatcattccacatggacctatattgattgtagcaagtggtaccacaggtgaaaattttaaagagcccagatcacatcgctacaataattgatatatccctctgtttgtacattcatgagatccattgaacgagataatcttcagtactctcccgcaagcaatcgcaattaatcgcaacacaagcaccatctctgaaatatggaccacatagtggcagtaacaaagaagaacactacatctctcagtagatcacattgcctccctactagagtctgcacaatgcagaagcggattgtacacggtgcagcagcgacgcgctcttgtatgctcgatctgtgtctgtgaacgaaagaatggcttctacaacggaatcggggaagacgtagtctgtggagtggagctactacgtcctcgttgatttctttacagtttagtttgcagcaatggcatcagatcacggatagttccagaaaaaaaaaaaaccacggacctgacgcggacgaacgcgacgcggcgagcatggcggcggccggcggccgggcccggcgaagctggctggcttcaggtcaggtgaggggggcgtgnacgaggacacctcggccccggtcgagccgccgc

SEQ ID NO: 28333 - DNA, 310 bp, Oryza sativa
  unsure (1)..(310): unsure at all n locations
  Clone ID: PAT_MRT4530_32942C.1
acgttcgggcatcgttcggggacnacgcagtctccaaagaacgttcggcgtccgcctacgaccatcgggaagaaggtggtcggcttctcccccggagcttgctgatgaaatcgtgccacgcgtcacccccagcaaacgtacacgtcagcacgcagaatgaattaactgtctgcactctgcagtgtaatgctgcaatccaccaggtggtcagcgactggttttattaccatgatttctgaagatatataatcatatgattacaaatatgctaatattattttctcttcttacatttaaaaaaaaaaaaaaa

SEQ ID NO: 28334 - DNA, 448 bp, Oryza sativa
  Clone ID: PAT_MRT4530_32943C.1
cggacgcgtgggcggacgcgtgggctgctaccaactttgctaagacctctacttggaatcttgtgagattatatctgttaattatgtataattaagcttccgtaaaaaaatatatgtactccctttgtttcacaatataagtcattctagcattttccacattcatattaatgctaatgattcattagcattaatatgaatgtgaaaaatactagaatgacttacattatgaaacggaggaagtataataattaagcatacgcatgttctaacctatagatcaattttcatgtgggtgcttggttagaacttgaaataatcccaaggttttgtagcctgttctttatataggggtttttttttttcatgctctcgtgatgcaagtatggggtgtggtttgttctctgggagacatgagacgctaataagatgattattgtactttttt

SEQ ID NO: 28335 - DNA, 492 bp, Oryza sativa
  Clone ID: PAT_MRT4530_32944C.1
atggcggaggcgcgcacaacgcgcaagtggggttgtgggaggaccgggcagagtgggaaggaggtggggacgggatggaatgttaagcaagtagggtcggcggcgcagggggcgtcgagctcgagcggcaccggggagggaggccggaggcagcgcaggggagggaggcggcgctgcggcggcacagagcgtcgagccgtcgatcatcaagcgtcgctggggagggaggccggagccggcgcagccgcacaggggagggatgcggcgggccggtggcgcaggggagggaggcggcgggccggcggcaccgagggacgactagggactggggagggagacagcgggtcggtggcgcaggggagggagacggaggcggtgtccggcaactcctctcgccagtcgccaccagatgccagtcgtgcgcgcgagcggcggcgtgcctgcgcctgcgtgggatggagaatggggagggtcggcgagcggttagggtag

SEQ ID NO: 28336 - DNA, 486 bp, Oryza sativa
  Clone ID: PAT_MRT4530_32945C.1
aaaaagaatatcatctttggtgttttttctttcaccttgtaagaacaaatttcctctccatgttgttacaaccaatcattaacactaaaaaattagtttagaagttgacaaactgtttataacctgacaagctattccaattttacttcttgggaagagaggtggtgaaggaaaactgtcaaaaggtcaagggggttaatcagacaacttgagatcatgaacagtgattagtagtacagctaggttgtgctaatctactactacagtagcaatagctgttagatgtgatctgccaaaggacagttttgcacttaaaaaaaagtgtaatcactttagacttttcctgctcaatgattgaacctcatgtgtcccaatctctaggcacacacaccatgatgttcccaaatcttctccagaaagtttgcctttttttaacaaacaccactaatctcacctacctatactaccatcttaatttgttaacag

SEQ ID NO: 28337 - DNA, 418 bp, Oryza sativa
  Clone ID: PAT_MRT4530_32946C.1
aatttgctcggcatattcattatgaagtgttattgtgagttctattttacccaaagcaggagctttagagtatttgacccttgtatgggatggtagaggattgaaaatgtttaccaggaaaatgagaacggaagcagagctgcccttattctaagcatacaattcaacaagctgtattttgacatggagttgagaactgaacctcttcaactagcttaagggaaaacattccaaaatatcatgaaaggcacagccctttgctgcagagttgcccttattctaagcatacacattgcacagcacagctgtattttgacatggattgtctaaaattcagacaaccatgtgatagaacagttatatatatatattgacatgacactttgaaccgtcctactaaaaaaaaaaaaaaaaaaaa

SEQ ID NO: 28338 - DNA, 462 bp, Oryza sativa
  Clone ID: PAT_MRT4530_32947C.1
atggcggccgtcatcgacttcctccagttggagccgccgcgcgagccgcggccgcagccggccgtgcaggcggccctccccgtggcgaagtcggcgctgttcgtcgccatcaacggcctcgtcgcgccgtcctacctgtggtggtgcctggcctgcgacgacggcggcggcggcggcggcggcctccgccggcgctgcttccgcggcgaggccggcggcgacgtggagcagatgtggtaccagatggccagcttcgccaccgccgtcctcggcgtggcgctcctggcttttcacgtggcctcctcctcggcgccggcggcgatggcggcgtggctggtctggctcaccaaggtcttcacctgtgggactctccagtttggcctcaatattgtccacttttgtatcaaaataatttacttcaagttgatacgggggttggattctaatctttcgaggggataa

SEQ ID NO: 28339 - DNA, 440 bp, Oryza sativa
  Clone ID: PAT_MRT4530_32948C.1
gcaaggcaagaacaaggatcactagctgcagcatcatgtaaaaagattgtgagtattcaatcagaggagctaaaatctgcaaaaaactatgggagaattattaaggtatttgagttcaagaatcaggcacaaggtttgtccatggcttgaggtgatccggtgatcatgcatggtcagcccaagaggatcacaagaaagtttgcgaggtttgatgagctgcatcatcgatctgatctgcaaaggtgatgaaaaaaagcgcaaaattatgtcagcatgctacagctgaaggatagctttctgttcatttttttttttatgtgaaccagtagtagactagtattagtagtgtttttaattaccatgtttctttctgcgagtatttagtgttattatccgaaatagagggagaaataaagagcatctgtaaaaaaaaaaaaaaa

SEQ ID NO: 28340 - DNA, 379 bp, Oryza sativa
  Clone ID: PAT_MRT4530_32949C.1
aaaaggattagccagaggaattaaatttcaggttaatactaattgcaaggagaacactaagaactactactcctgcaaagcaggggaaacagagcagaagaaaagcagagaaggtatagtagatggggagcgagaaacagtctcccttcgacgctctgaacggcacagtcccgcaactgagtgcaaaggaggcctgtttgatgttgctcgagcattgaacctgaaggaaattgaggctgacaatgaggcagccagggttcttcttactctgagatgctatatgaaattggcagaacgtcctgatttcccaggcatggcgatggctgtccaagggctgcttaaggataactgctgctggaaatgcccagcaaattgctga

SEQ ID NO: 28341 - DNA, 2456 bp, Oryza sativa
  Clone ID: PAT_MRT4530_3294C.1
atggcaccagcacagccagctccatcagcccaagccaagaaggagactggagcaaaaccagggtcctcctacaactgtggcgagctcggccactttgctgacaagtgcccgaagccaaggcgtgccgggccaaggtttgcccaagctcgtgtcaaccacgcgtccgcagaagaggcgcaagcaacaccagaggtcgtactggacctggatatcattcttgggatggattggctgaccaagttcaagggtgtcattgattgtgcgaatcgcacagtcacctttaccaaggagaaaggggaaacagtggtgtacaagtcaccagtctcaccgaatcagggaatccccttgaatcagattgaggtggaaaatccggtgaaagggtacattcgaccgagtacttcaccttggggtgctccggccatttttgtggagaagaaggacaacacgaagagaatgtgtgtcgattatcgcgcactcaatgaggtcacaatcaagaacaaatatcctttgccatggattgatgatctgtttgatcagttgaaaggagccaaggagcatcagctttatgccaagttcagcaaatgcgacttttgggtatcagaggtcaaattcttgggtcacgtcattacagctcagggtgtggcagttgatccatcgaatgtggagaagagctactacaatgctttgtgcaccggcggcatgtgtaaagaattgcagcaggagcttgaacatctcaacttggggattgtagaacacgggtacgtggctgccctagaggcacggcctacgctcgtggatcaagtccgagcagctctggtaaatgatcctgaaatagcaaagctgaaaaacaatatgagggtcggaaaagcccgagatttacttgaagatgagcacggcacaatctggttgggagaaagattcgccgtcgccgcgttcgtcttctctgtccaccaccggcagccgctccagccgcctgtagcagccgcctcggccatcgacgacctgcgccgccgcctctctcggctccgcaaggtcaagctccaccccgtccaccccttcccccaagccaaaatccaccggagctttatcgtcgccgtcaacccgaacgccaagccgaaggccgtccaccccttcttctccgccggtgttcgccgtaaagccaccgtcacagtcgtcccgatctcgccgccgctcgaagctcgtcgccggctgccgttcatcgtcgctcgtcgtcgtcatggttcattgcggggcaccagactgagaagcggtgagaagcccgtggtggtcgctggggagtccatgcctctggttattgagggggtgattatgatccaggaacggaaaagctactgcaacgcttcttgcactggcggcatgtgtaaagaaatgcagcaggagcttgaacatctcaacttggggattatagaacacgagtacgtggctgccccagaggcacggtctacgctcgtggatcaagtccgagcagctcaggtaaatgatcctgaaatagcagagctgaaaaagaatatgagggttggaaaagcccgagatttccttgaagatgagtacggcacaatctggttaggagaaagattatgcgtacctgatgacaaagagctgagagaactgatactcaccgaggctcatcagactcagtactccattcatccaggcaataccaagataacaccagagacccgcaggattactacaacctctttagatcccggaatggaaatgggaagagattggaatggatttcataacagcacagcttaccatccgcagacagatggccagaccgagagggtcaatcaaatattggaggatatgttgcgagcctatgcgctcgattttggtggagcttgggataaaagtctgccttatgctgaattctcttacaacaacagctatcagaccaatctacaaatggcaccgttcgaagtattgtatggccggaagtgccgcacacctctcttctgggatcaaataggcgaacgtcaactgttcggaacagaagtgctaacagaagcagaggagaaagtcagaaccatcagagagaggttgagaattgcacaatctcgacagaagagctacgcagacaaccaccgaagggagctcacttttgaagcaggggattatgtgtaccttcgtgtcactccgctccggggagtgcactgtttccagacgaaaggcaagttggcaccatgtttcgtgggaccatacaagatcttggaacgaagaggagaagttgcatataagctagaacttccatccaacatggccggcatccatgatgtgttccatgtgtctcagttaaataagtgcttgagggtaccggaagaacaagctgattcagagcacatcgatcttcaagaagatctgacttatgtggagaagccaattcgcatccttgagaccagtgaaaggaggactagaaacaaggtcaccag

SEQ ID NO: 28342 - DNA, 443 bp, Oryza sativa
  Clone ID: PAT_MRT4530_32950C.1
ggaaaggctttaaaaaagggggatttttttaaaattaaaaggccacaaagttcaaccggccccccaggaggagccaggccttttttttaaccattggaccctttaacctataccaattaagccccaaccccccccacggggggaaagcccccccgggccaagggagaattagggaaaaaccccccaaagggggggaaggttaaagcccacaaaacctgggcctggacctggggcctaacaaaagaaaccacccccccccccccccacctgaatttgctccaaaacccccgaacccctacaaaggcccgggaaggaaaattgggccccccccacccggaccggggggaaacccgggggcggaaaaactggggggttaaaaaaaaaaaaccaaccgggtccccaaaagggggtgcccactatgctaggcgggggcctaacaaacc

SEQ ID NO: 28343 - DNA, 452 bp, Oryza sativa
  Clone ID: PAT_MRT4530_32951C.1
gacactatagaatactcaagcttgcatgcctgcaggtcgactttgagttgtgctttaaccagaaggaatttgtagttgtaaatttaaaaaaccaaaatcaggggcgggctatccattcaggcttacctggatttctttgccctctgggacctacaagtttgggggctagttaggggcaggattggcctccttcatgcagtgccagatgatgacttgcccacttggtggtgtgccgcgcgcaaggtggttaccaagaaggagaggaaaacctttgacgcgggcgtgattttggtgacttggctgatctggaaggaacggaacgctcgcgtgttcgatggccgagcctcgtcaccggcctgcctattcgcgacgatcaaggatgaatgggaaatgtggctggcggcgggtttgatccctcctccgtgagaaggcttgttgtagctctgttggga

SEQ ID NO: 28344 - DNA, 1590 bp, Oryza sativa
  Clone ID: PAT_MRT4530_32952C.1
atggcggagggggcttcggccttgcaggcgcagcttcaagctttcctccagcaactcaaccaaccccacaacatttcagtcggcgaaccaaggacaaccgccaaggccgagtcaagctcccatgaattggaggaaattcagaactcaccgcgcgggcaggccgtgatggctgtcaaagaagtccaagccctccgcaaggagttcgacgcccagcaagtaggcagccatcaacagcccattcgcaagaaggtcaggaaagacttgtattacgcctaccacagacgatcctcacacaccaccgagcaatgccgaaacattcgacagcgtgacaatgctcaagatccaaggccacaacaaggggcagctgtcgaagcacctcgcgaagctgctcaagaacaactaccccggcccgaacagcgccaagacgtgcagcgcagagtaattcaagtgattacaagggccgctccgccagttcaactatcaaaacggcagaagaagatgcagctgcgaatggtgcacaatatcacttcagcgggcgaaggagctccgaggtacttgaatcagcaaatctctttcgggccagaagatgccaaaggagtgctattcccacatcaagaccccctggtgatctcggccgaggtagccgtctttgaagtccggcgaatcctggtcgacggaggaagttcggccgatgtcatcttcgccgaaacatatgccaagatggggtggccaaccctagccctcacccaagcaccagccttgcttcgtggttttggcggtgaagcagttcaagtcctaggccaagtacatatggtggtagctttcggcacaaatgaaaacagtcccgaagagcaaatattgttcgacgtcgtcgacatcccatacaactacaatgccatcttcggccgcgcaaccttgaacaagttcgaagccatctcccaccacaactatctcaagctcaagatgcctggtccgacaggcgtcatcgtggtcaaggggcttcaaccttcggctgcatctaaggacgatttggctgcaatcaacagggcaatgcacagtgtggaggccgaacagcatgaccatgcaaaacgcatgtcgaagcccacccctcatggcaaggatgttacaggaaagtttagctggacgcccgaatgccaagctgcgttcgacgagctaaaacaatatctgcaaagcccacccgccttggtcagcccaacactgggaagcgaactgctgctctatctagaagcttcaccggtggcggtcagtgcagctctcgtccaagaaacagagttaggccagaaaccagtgtatttcgtctccgaagctttgcaaggggcgaagataagatacattgaaatggaaaagcttgctaacgccctagtgatggcttcgcgcaaacttaagcactactttcaggcccacaaagtcactgtgccatcgcagtattctttgagcgaagtgctccgggccatggaaattactggccgactcagcaagtgggcggcggagttatctcccttcgacctgcattttgtcacccgcactaccatcaagtcccaagtcctagctgacttcgtggctgaatag

SEQ ID NO: 28345 - DNA, 313 bp, Oryza sativa
  Clone ID: PAT_MRT4530_32953C.1
cccacgcgtccggcttggaacagaagttgggtaatacccctttctcccaaaataaaaaagaaataaaaggaaaaaaaacacttatctgtttcagttctttgttcttttcactcaatttaaggaaaccggatgtactacacacaagaaaatggctgttgtggattgccagctcgtgtgatcttctgtactagatggccatgatatgatactgctctttatgttgaacgtagcaaacaattaatgcaaatctcacgaattaaatgtagacatttctgtaaccattaatgggtcatctcagtggtgcaaagatact

SEQ ID NO: 28346 - DNA, 256 bp, Oryza sativa
  Clone ID: PAT_MRT4530_32954C.1
cttatataggggttggtcttgccctctacaggccctcctccacgtccaactcggggtagaaatcaaatgaaacccgaaacatgccttcccgagcaaggaaacctcgagacccgacgaaacacagtcggactcggacctgccggtcagaccggccacatgccgccggtctgaccagccctaaaccggcggtctgaccgcccaacgcacggcggtcagactggccctactcggaggaaaccggcagacttccaaattt

SEQ ID NO: 28347 - DNA, 630 bp, Oryza sativa
  Clone ID: PAT_MRT4530_32955C.1
atgacgcgggcgacgacctcgccggcgctagagaggtcggccaggctatccaagggcatctgcaccgggacccatatgtcagcctctataccttttcttttcactgattatcctaccctcatcttccctaaattcccctttccttttcatggcggggcggtggtggcggcctgcggcgacggcagggcggcggtggccgcgcgcggcgatggcggggtggcggcggtggggcgcgacgacgacggggcagcggtggtctggcgcgacgatgacggggcagcggttggccgggcggcggccgcgcgcggcgacggcggggcggcggcggtcgggcgcgacgacggcagggcggcggttgttgggagcggcaacgatggggtagcggttggctgggcggcggccttcgtgcgcggcgacgacggggcagcggttggcccggcggcggtcggggacaacgacgacgggatggcggtggtcgggcgcgacaacgatggaactggagggagaagagtagcacgggtagaggaggcctggagatgggatagccagcctaggaggctggccaatattggccacttggagagccgagtagagaagctgttggtgctcttcgtcaggttcaatctttga

SEQ ID NO: 28348 - DNA, 276 bp, Oryza sativa
  Clone ID: PAT_MRT4530_32956C.1
atggcgcttatcccgtcgctggccgccgcccgctacgcgctgctcgcgttgccgcctctcatggtggccgcgtatgtttataacggcgggggtcggggaaatggagatagaccgcgtgcaagaagcatcaacaaattcaccgatggcgacgacagcgagaagatgggagagtcagtgcatacgaccaacgaacctcccgcgtggccttgcattgacctcgcgattgacgagtcatatcgacagaaaaccaccaacaactacgatattgatccgtga

SEQ ID NO: 28349 - DNA, 474 bp, Oryza sativa
  Clone ID: PAT_MRT4530_32957C.1
cgtccgcccacgcgtccgatttctggcaggtagcaataattggccgcccaaatgttggcaagtcaagtctgctgaatgcttggagtaagcttgcagagtgaaagggctattgttactgaaatagctggaaccacaagggatgtagtagaagcaaatgtctcaattcatggcatccctattacccttctagatactgctggtataagagaaactgatgacatcgtggaaaaaattggtgtggaacgatcagaagctgctgcactgggagctgatctgattattatgacaataagtgcagttgatgggtggactgaagatgacactaaacttattgagcatgtgttgatcagtaagaaatcttcaggtgcctcagtgcccatggtccttgtaatcaacaaggtagattgtgcaccatttatttcaagagaacagtttgaacaattcccatggattttcaaaaaacatgtgcaaaca

SEQ ID NO: 28350 - DNA, 319 bp, Oryza sativa
  unsure (1)..(319): unsure at all n locations
  Clone ID: PAT_MRT4530_32958C.1
tntnttnngggttgacaaaatgagatcaccagaatggcaactagagtaccgtatttctcttatgactgctacaacattattctctcttttaagtccaataccaatggagacagcaaaacaaatctcatatctccacatgaactcctgttgatgaaataaagcagtaggatttcaaagcaggagtaatgaggggagaacaatacaatctaacacgtataactgatacaatagcatctactagccaagtcccgtattattaggccttctcgcatcaagaaagagggatccactgctcaaaagaaggatctacgtaatctgg

SEQ ID NO: 28351 - DNA, 1713 bp, Oryza sativa
  Clone ID: PAT_MRT4530_32959C.1
atggctcgcgctctctctcgcctcctcctcccgcccctcttcctatgccgccctctcccactcccacccctcctccaccgccgccgccgcgtcgtcctaaaccctagccccagaaccctcaccacgcgcgccgaggccctcttctcccgccactcccacctcctccccgccgacgaccgctccccctccccctccacccgcggctccgtccagccgccgccggactatggcggcggcggaggcggagcgggccccgggaccatcgccgccatcgtcacctccctcggcggcggccccgcggcggtggggatcgtgcggctatccggccccgacgcggccgccgtcgcggggcgcgtgttccggccggccaggagggcggcgccgccgtggcggccgcgcagccatttcgtcgagtacggggtcgcgctcgaccgcgatggcggcgtcatcgacgaggtcttagtggtgccgatgctagctccgagatcgtacacgcgggaggatgtggtggagctccagtgccatgggaatgacctgtgcttgcggcgtgtgctcagggcctgcttggaagctggtgctaggcttgctgaccctggtgagttcactgttcgtgcgtttctgaatgggaggttggacttggcacaagcggagaatgtgtcaaggctcatttcagccaaatctgcagctgcggcagactcagcattggctggcatacagggaggcttttctgcactagtaaaatcactgagatcaaggtgcatagaattgctcactgagattgaggcccgtctagactttgaagatgaattgcctcctttggatctaacaatgctggtcagcaaaattaatggtatgagacaagaggttcaggatgctttggacactgctaattatgataagctgctacaatctggtctgcaggtagcaataattggccgcccaaatgttggcaagtcaagcctgctgaatgcttggagtaagagtgaaagggctattgttactgaaatagctggaaccacaagggatgtagtagaagcaaatgtctcaattcatggcatccctattacccttctagatactgctggtataagagaaactgatgacatcgtggaaaaaattggtgagatattatcttggaaatattcaatgctgcacagtgcatacttgtataatggtgtggaacgatcagaagctgctgcactgggagctgatctgattattatgacaataagtgcagttgatgggtggactgaagatgacactaaacttattgagcatgtgttgatcagtaagaaatcttcaggtgctccagtgccaatggtccttgtaatcaacaaggtagattgtgcaccatttatttcaggagaacagtttgaacaattccatggagttttcaaaaaacatgtgcaaacatgtgcagtcactggtaaaggcatttctgagttggagaaggctataatagaggtcagaggtcttgagcctgtaccatcagagggacggcgatggactgtaaatcagaggcaatttgaacagctattgaggacccaacaagcttttactaggctagagtcatctatcaacgagcagttgccgatggacttctggactatagacttgagggaagcagcattggctcttgcaacaatcagcggggaggatatctctgaagaagtcctgagcagcatattcagcaaattttgcattggaaaatga

SEQ ID NO: 28352 - DNA, 3345 bp, Oryza sativa
  Clone ID: PAT_MRT4530_3295C.1
atggtctacaccaggactggcaaccgcacggcaggcgagggcagcaatggcgaagaacgcgctgatggtgtgcaccccaacagcgattccggcaatggtccgccaccccttcccgagaatccgacactggcccaagttatggcacatcagactcagatgatggcagccatgatgcagcagatgcagcagcagcaccagcagatgcaccagaggatgatgcagcacgccgaacaacagcaccagcagtttggtccccctccccctcaatccaagctgctagagtttctacgcgtcaggccacccaccttctccagcaccaccaaccccatggaggcgaatgactggctccatgccatagagaagaagctgaatctcctgcagtgcaacgatcaggagaaggtcgctttcgccacacaccagcttcagggtcctgcgtcagcttggtgggacaatcacatggccacccgcccgccaggcgctgaagtcacttgggcggagttttgccgtagtttcaggaaggcacaggtgccagacggggttgtagcgcaaaagaagagggaattccgggtgctccatcagggcaacaggacagtgacagagtaccttcatgagttcaatcgcctcgcgcgatatgcaccggaggatgtccgcactgacgccgagaaacaggaaaagtttatggcaggcctggatgacgagctgaccaaccaactgatatctggggactacgctgattttgaaaggctggttgacaaggcaatccgtcaggaggatcagcgcaacaaaatggacaggaagagaaaggcggcgcagttccggtccaaccaaggtagtcagcaccgaccgcgtttcactcccggacagcagggtggacctaccaccatgatcgtccgtcagcaccgcccgttccactctagcaacttccaccagggcgctagcggcagtccgaaccaccagggaggccagcccaaccgtggtgcagctccacgcccaccaatggcaccagcacagccagccccgtccgcgcaagccaagaaggagactggcacaaaaccggggtcctgtttcaactgtggcgagcttggccactttgccgacaaatgcccgaagcccaggcgtgccggaccaaggtttatccaggctcgtgtcaaccacgcgtctgcggaggaggcacaagcagcaccggagatcgagacggaaatcccagtggacaccgtggagaaaagcttgaggaaattggaagatatacccatcgtctgtgagtatccagaagtgtttcctgaagacctcactaccatgccacccaagagagagattgaattccggattgatttagcaccgggaaccgcagcaatttacaagagaccgtacaggatggcggccaacgaactagcagaggtcaagaagcaggtcgatgagcaactacagaaaggatacatccgaccgagtacttcgccttggggtgctccggtcatttttgtggagaaaaaggataagacgaagaggatgtgcgtcgattaccgcgcactcaatgaggtcacgatcaagaataaatatcctttaccgcggattgatgatttgtttgatcaactgaagggagctaaggtgttctccaagatagacctgcgatcaggctatcaccagttaaggatccgggaagaggatatcccaaagacggccttcaccactcggtacgggttatatgagtgcacggttatgtctttcggactcaccaacgcacccgcattcttcatgaatctaatgaacaaagtgttcatggagtttctggacaagtttgttgtggtattcatcgacgatatacttatctactcaaagtctgaagaagaacatgagcagcatctccgtctggtactcgagaagttgaaggagcaccagttatacgccaagttcagcaagtgtgatttctggttgacggaagtcaaatttctgggtcatgttattacagctcagggtgtggccgtcgacccatccaacgtggagtcggttaccaaatggaccccaccgaagaccgtgtcgcagattcgaagttttcttggacttgcgggatattaccgccgattcatcgaaaacttctccagaatcgcccgacccatgactcagttgcttaagaaggatgagaagtttaaatggacagctgagtgcgataaaagttttgaggagctcaagaagaaattagtatctgcaccagttttgattctgcccgaccagatgaaagacttccaagtctattgcgatgcatcccgccacggacttggatgtgtcctaatgcaagagggcagggtggttgcgtatgcctcacgacagttacgtccacacgaagggaattatccaactcatgacttggaattggcagcggtggttcatgctttgaagatctggaggcactatctgatcggcaaccgctgcgaggagtttgagcacctcaacgtgggaattgttgaacacgggttcgtagccgctctggaagcacggcctacgctcgtcgatcaagttagagccgctcaagtaaatgatcctgaaatagcagagctgaaaaagaacatgagagtcggaaaggctcgggatttccttgaggatgagcatggcacaatctggatgggagaaagattgtgtgtacctgacgacaaggaactgaaagatctgatactcaccgaggctcatcaaacccagtactccattcacccaggcagcaccaaaatagcatcaaaggccagcaggcttactccaacctcttcaaatcccggaatggaaatgggaggaaattggaatggactttataacaggactgccccggacatcatcgggtcacgattcaatctggaggtattagcggaagcagaagagaaagtcagaatcatcagggaaaggttgaggattgcccagtctcgacagaagagctacgcagataaccgtcgaagggagctcacttttgaggcaggagattacgtgtatcttcgcgtcactccgctccggggagtacaccgctttcagacaaaaggcaagttggcaccacgcttcgtgggaccatacaagatcctggaacgaaggggggaagttgcttatcagttagaacttccatccaacatgatcggcatccatgacgtgttccatgtgtcccaattaaagaagtgcttaagggtacctgaagaacaggctgattcggaacacattgatatccaggaggatttgacatatgtggagaagccggcaagggtgggcgtgatggagcggggcgggccctgcgacggcctctatcgcttccggattcacctaggcacgagaggggactgcccgttgcccgctggggacgggggtgaaacctga

SEQ ID NO: 28353 - DNA, 3190 bp, Oryza sativa
  Clone ID: PAT_MRT4530_32960C.1
atggtgatcgcggtggaggggggcttcgtgcacgaggaggaggaggtggaccacccaattcgctacctcccacttggccgcgtctactcctcctctgctccgtgccctctccccaagaagccccgctccgccgaggacggcaagccccccgtgatcgtctactaccgccgccgccgtaagaagccgcgggtcgaggggccacctccctcgcctgccacagcaccaccgatgctgcacccccgggaggacgacgaggatgaggaggttacacggcggaagggttctctcaagtacgagctgctgagcctggggcaagccccgcccgcattaggcggggatggggaggagcccgcgcggcggcgctgcctgaggcgtagcggaggggctgagaggaggggttacttctctgaacccaagaggcggcagcggcagggcgtgcacaaggaagctgcctcctcggctgggaggagatggttggagttggaaattgaggctgcggatccactggcctttgtgggattaggatgcaaggcaaaagtaaagtatgatgatggcgaatcagaggaccttaacctagctgatgaaaggataaaattttctatttcatctgaagaaatgaagtgcaggaacttgaaatttggaatttccaatctgaacaagaggggctatgatgagttgcttgcccttgctgttagccttcatgattaccaaggtcttgatccaggtgatcttgtgtgggctaaacttacaggtcatgccatgtggccagctgttgtggtggatgaatcaaatgttcctgctaacagggctttgaagccaggccgactagatcagtcgatacttgttcaattctttggtactcatgattttgccaggtttctctgcacacagcttctcccagaaaatatgttgcaactacagaaatccatggaaaagggcagttctgatgctaattccaataaagatgtacattcttgtgacaatttatctgaagataaaacagctgaaagcggaggggattatgatgagatgactccaatagaactaggaaatcttcgtgtgagcaaattaggtaggatagtaactgactcagactatttccataacaaaaagcatatatggcctgaagggtatactgctttcaggaagttcagatcagtgaaagatccacatgtagtaatactttacaaaatggaggtactgaggaattcagatataaaagctcggccattgtttagggtcacatcagaagatggaacacagattgatggctctaccccaaatacatgttggaaggagatatattgtagattaaaggaaaaacagcgcaatgtggcctctggattggacagagatgtttgtcagggatctggttcctatatgtttggcttttcaaatccacaaatacggcaacttattcaggagttacccaatgcaaggtcatgcttaaagtattttgaaaatgctggagacacctttcgtgggtatagagctgttcatgtaaattggaaagatctagactattgtagtgtttgtgatatggatgaggaatacgaagacaatttgttcttgcaatgtgataagtgccgtatgatggtacatgctagatgctatggtgaactcgaaccattgaatggagtcctttggctttgcaacctgtgtcgacctgaggcgcctcgtgtttctccacgatgctgtctttgtccagtaacaggacatgcttttaattatattaatcctaactttggtacagaaacttgcttaaaagatgtgaagagaatggaaccgattgatggattgagcagaatcaacaaggaccgctggaaacttctatgcagcatttgcggagttgcttatggagcttgcatacagtgttctcatcctacctgtcgtgttgcatatcaccctctttgtgcacgtgctgctgatctttgtgttgagcttgaagatgatgacaaaatccacctcatgttacttgatgaggatgaggacccatgtattcgtctactttcatactgcaagaagcacagacaaccatcgactgaacgtccatctcttgaaagtaaccttgctaagcctgctgtggtagttcagacagatgcagttccaccatccggttgtgcaaggactgaaccttataatatccatgggagaaggggccaaaagcaacctcaagttatggctaccgcttctgtaaaacgtttatatgtagagaatatgccttatattgttagtggtttctgccaaaatagagtaggccatgatgctatcagtgaaccaattcaatcagttggctttttggatgttgcacatcaagaagctgttggcaacgtgtcttctatgattgaaaagtataaaagcatgaaggctacattcaggaggagactagcttttggaaagtcaagaattcatggatttggtgtctttgcaaaggtttcgcacaaggcaggcgacatgatgattgagtacatcggagagctcgtcaggccaccaatatcagacattagagagcggcgcatatacaactctttagtgcctgaaggtgatatgtggaaaactctggtgaagttaattggtttattcatggagttcaaccctataactcagattaggggcatcttcacgtgaatcctttgtgcagggacctgaatgttcaggataggttatgagtgtgttagggttgtgacgcgcgcacggtgcttttgcggtgcaattagacaatcttgtgagcctaatcgttattcttgatgtgaaagagtcctcattattgtgtatatcaacattttacaaaagaaggacaaaaattaattgtaaatgtatatctgacattattcttttgattcgacttttgttagtcggcaccataattgtggattcccataatgccgtggagttgtaaacgatgttgatgttgaggggcaatcagccaaaataagaggattgtatttagaattgccccagggtactggattgcgaactgtgctccttcggggctagtggcaaaattgcaaaaatttgcctcagtttttcatgtgagaaatgctaattattctttgctcacatttacccaaaaatgccctcgtaattgtacatttattttgacataggtttggcattccctttgtttttggtaccataattggaacttactttgtggtggcataatcaaaatattcagatcttttcctgt

SEQ ID NO: 28354 - DNA, 461 bp, Oryza sativa
  Clone ID: PAT_MRT4530_32962C.1
ccacgcgtccggttgttttcgttgcggggaagcaaccaaccaatcgggagagttagcgagagaagaggggaggaggaaagtctcaggaccgacagtgataggcgaaatccctctgatcgagttcgcgttcttgggaaattcttctgggagttcttcgaagaatccgcctctgaccactacgacggattggaggcgtggagtgccaaagattcgctagatcggggggcctcttcctagcaggccttggttcaagatcgagaggaagcactttgtgagggtttccagtgcccgatacttttttttttccagaatcttaagcggccgcggcagtggtgttgatgcgctgcgtctccagatccactgctgcagtcggcagcgccagtggagattgcagcgactcattatcggggggtgccctgccctggtttcagtatcatctactttggctgtggttggggatc

SEQ ID NO: 28355 - DNA, 444 bp, Oryza sativa
  Clone ID: PAT_MRT4530_32963C.1
ggcttaatcaaaactttttttctttttatagataaaataagatttcaatctccatgttggggagatgcttactcacgtagccgtaggaccattttactttacacgagctaattacaatttacaatttgtcaacacgccgattttattctatcactacgaattatactgagagtatctagctatatgcacaggagaggacgaacacgaagagggagagagagaggaggaaaggatcgaatttaaaacgggtgatagctccgccgcaacccactgacgttggcgaacaacccgacgagctcttgcttgtagggaagatacgatctccgacggccgccgctgccgccgccgccgcccttgctgtaatagctccagccgtggcggccggcgtcgcccttgccgacgctgccgccgccgtttgcacccacgcgtccgcggacgcgtggg

SEQ ID NO: 28356 - DNA, 645 bp, Oryza sativa
  Clone ID: PAT_MRT4530_32964C.1
atgccccgtcacgtcatgatgcatcccgaccggagtcggttcatccgcactggtcaagcaaggttcccatttcctggtgcaaatgcgaacccagaaccgtctcctcccgtgctctctaacgccgccgcgccgttcgccgctagcgccgccgcttgccgccgcctccggccgtgcaccgccgcccctatagccgccaccgccactagcttcgccgtcgcgggagctatcccgaccgccgcttgcttgccgcgcgccgccgccgcaccgctctccccacgcgccgccgcctaccgccgcctccaaccgccgctagccgtcgctagtgccgtcgccgcgccgctccattgccgccgttggcctcgcgagatcgaggcccgtctcgtccatcccgcgcgccccgccgtccgccgtttgccgccgccgtccgctgtcgtcttcacccacgccggccgaatccccggtgaggactccctccccctcttttactcccccttccccgtgtgcatcgctgcctcctgtccgcgccgccgcttcggccgtgtgccgccatctcctcaccggccaccgccgtctcccgcgccgccggttgccgccgtcggtggccgctcgccgccgccgcaccgcctaaccggctggccggtttga

SEQ ID NO: 28357 - DNA, 330 bp, Oryza sativa
  Clone ID: PAT_MRT4530_32965C.1
tgtggtcctgcttcctcctcacgagctagtcggccgccttggctgcgtcgagctccagtgggcagcagcgccatggtctgctgcttgcgacgtatactcgcccgctgtcaagagcacccccggtgaatttgccagaacagtcgggagtaaggacattttggctgctgtaaaattggatgtcatacgcagagcacgagatgaggctaactgatgttcatgggcgtgatgaggctccgggcccagccttgtatggggatatgctttatcctgggcgacaaccacccatagagaatgcttttattaccacgagccgtttgaatttaccacacc

SEQ ID NO: 28358 - DNA, 375 bp, Oryza sativa
  unsure (1)..(375): unsure at all n locations
  Clone ID: PAT_MRT4530_32966C.1
ccacgctccggggggagtccgcgcggaagaagaggtcgtgctccgcgtaggctacgtcggcacggagtaccgaggtcttcaaaagcagcggaagctcaacgcggactcgagtaagctctgatttgtatgatgttgatgctaggtgctgctgcttcgttcaggtgttgagaagttgagttgcaatgatgagatcaataaatagaaataaaaacagttgcattgcaaaagtctgtgtgaaaaaactagaatattgatatttaatttcatcctaactgcatcnaattgttaataacttgatctatgcataaacatataaaaaactaaaatagatatatatataaacatataatgacttgattagagtaatgtcctttg

SEQ ID NO: 28359 - DNA, 348 bp, Oryza sativa
  Clone ID: PAT_MRT4530_32967C.1
atgaacgagcgggcggggaaggggggggaggcgggcccgcaacgctaccgttccgggtccggcatagattcgtaccctgcccagggcgtcgggcagcgcaacggcggcccctacaagacccccccgcccggcccccaccgagcacgacgcgcgacccccacgagcgcaccctcgaaccgcgcggcaccgcaccaatcaaccggggcaagcgcgcggcgtggcagcggcgagggcgacggcgcgcggcggcttggggcgcgtggcgcgcggcagcaggcggtgatggcgacggcgcgcggcggctcggggcacgaggcgcgcggccaggggaggggggtttattcctag

SEQ ID NO: 28360 - DNA, 270 bp, Oryza sativa
  Clone ID: PAT_MRT4530_32968C.1
cttgagcccttgaggttggaccataaataattgtcggtagctgaagcagatgaccatgtcaaatagttcaggttgtttagtaagaagctcaatgacctgaaattttgaattcaagtaacagaatgcgttgaatgtgatgcatcaaaagtgcatcgaaagttaaacctgaacatacactctagtcattgagacatgggacccatctgtaagttgttcacatgtctacagcatccattttacttggatggtctgattttcacctatgcaaaa

SEQ ID NO: 28361 - DNA, 493 bp, Oryza sativa
  Clone ID: PAT_MRT4530_32969C.1
gtagggaacccaagactagtttattgcacccagtgtcatttacatccacccacacacatagtacaagctaattaacaagcactagctaatgcaccatcagttcaattatagtacaacaggtcaaaaaatatatacacaaccaaaactttttacattaaccgcactaaaagtctactttttttggtggttttttttagggaattagtatagtctagtatgagcactagctccctcaagcacaaccaaggcaaatttaatcattctactaattaagcgaacagggacagcatgtcagctaaacactagcacatattgctggttcgtctttttgaatatgaagctcctgtcatcctatgccatatatatatttccttgcatctgctcatgataaaagcagcaatcgatctttcttattctcagttgcgggccaagcttttaaggatcaagcgcaacaccaaaaacttatcgtagcttcgccatgaactctaggatc

SEQ ID NO: 28362 - DNA, 832 bp, Oryza sativa
  Clone ID: PAT_MRT4530_3296C.1
ctactctcttctcctgcctcctccgcccaatcttcctcctccctttcccatcctgcctcaaagataggttcttgacgggggaaggaaagctgctcgcctccgctgcacagctcgtctgctcgcctggaagcacggaaattatgtctcattaaagggaatccagggtatggtgttgagctgtctgggctccatgtctaagtgggaaccagtcacatttgaggaatctctttgctttgtcaagaaagttaaggctcgtgattatgtgttgtacttgtcgctgcttgatgtgctcagtcgaaatgagcagatccctctggaagcttacagcgagctttcacttcttttccgggatcacgacgatctgctggaagagctagcgaagttcagaccccttcctaccccaagcacagtttatagccacagctcagtctggctgctcttcttcctaatgcccctccttgtcctaagcattctcctcaagtgcttccttcttcaacagccagttgcaagctgaaaaagatcaagcgtgcaatgtcatgtgatatctctgttaaaagccaaagcgtctttgtggcgatgtctcgctgtttatattggagatatctccgtgtactgatgcaaggaagtagcctcttagcttggaagagcgccaatacatggtaaaaacagtattgttttgacttgctgaaaaagaaaaatcactattcaggaaatgagatgaattgcccagcaaatgatgaagttgagggggcatgtatagcctgaatgagatagggcccaagaaggatgaacttgatcggtatggtcttactagttcattcaattccctagg

SEQ ID NO: 28363 - DNA, 576 bp, Oryza sativa
  Clone ID: PAT_MRT4530_32970C.1
atggagggggaggaggaggagaacgtggggccgttccgccgcaccagcgcgcggacgcggcggatggccacgcgcatggcctccgcgctcgccagctccgacaaccgcgcgcaggctgcactagctcgtcttgaagcgcttgagagtgataatgctggccctgaggtcgtagatcttaacgatgatgatgaatatggatctgcagatgaggaagaccatgttctcatgcagaggaagcagtcaaagaatatgaagcgcaagacgaggcaagggaaggcattggagaagaaggcggcgagatctttcatggacgtgttacaggagggccgccgttggtcccccgagcacctcgtcccggcgccattactgctcggtctgcggcagcacggcgaactacacgtgcgtcaggtgcgggacgaggttctgctcgtgccgctgccagctgtagctatgttcagtgaaatactgcttctgcttgtgatggctgactacaaatctacagtctttgctggtcaaagatggagatgcttgctgtacatatatcgtgtaggaggaatgggaaacgggcttgtctga

SEQ ID NO: 28364 - DNA, 642 bp, Oryza sativa
  Clone ID: PAT_MRT4530_32971C.1
catgtattgaattttttaaatgttgtatactgttttataaattgtgtctgctttatgaaagtattcaacaactgcaagtgtgcaaagttctcttctctctagcatgattgtcaaaatttcggtttgcttctccatgtcccacattcatgtttgtgtactgctgttctcatgtgattaataatcgtatcattctctgttaatatggcttaacttgctttttttaattttccgagatgtacagtacattaataaccaggctttactaactaaaataatgtgcttctgtagctgtttagttcttttagttgttttactggtctcttttgctgatgttttagtgggatatctggctgcaactttaactgaaatatcacatttctttgtaaaaaggactaacccagcagtgctaaatattgatcacatttatacctatggattccacacacagctaatcaacttcaaagtgctaaaaggtaaaaactcctcgaattagggtagggatattaatagatggttttcttagcactccttcattatctaaaattttgtacatatcaaaatattggtttggggacaagtttgtatctgccaatgattaagcatagtgattcaaatcttgcctgatccaaataagcttgtctg

SEQ ID NO: 28365 - DNA, 319 bp, Oryza sativa
  Clone ID: PAT_MRT4530_32972C.1
acagcaagcatctccatctttgaccagcaaagactgtagatttgtagtcagccatcacaagcagaagcagtatttcactgaacatagctacagctacacgagtacacatgcatatggagatgcaagcagatcgatcaggccacgaatttcaggcagcgggtatcgttgtgaatgacctggcagcggcacgagcagaaccttgtcccgcacctgacgcacgtgtagttcgccgtgctgccgcagaccgagcagtaatggcgccgggacgaggtgctcgggggaccaacggcggccctggagtacgttgggacatggggag

SEQ ID NO: 28366 - DNA, 302 bp, Oryza sativa
  Clone ID: PAT_MRT4530_32973C.1
ttttattgcgtgcgatcacattcttttgaaatggatccttctcaggttgagaatgtgaagcagcgtggcttgccacatgcactgatcttgcccatgctgcaggagtacgattttagaaacgacacagtgaacccagatatggagatggaattaaagtcccttgctcgcccaaggccatatcaagaaaagagcctcagcaagatgtttgggaatggcagaacaaggtcaggcatgattgagttaacttgtggtgctggaaagttcttggttggtgtatatgctgcatgtacaatcaagaagag

SEQ ID NO: 28367 - DNA, 281 bp, Oryza sativa
  Clone ID: PAT_MRT4530_32974C.1
ggcgtacgagtaggatgactgtgaagatgaagccggtggtggcgctgttcctagtgaccgtcctcatcgcctcgcgtgagtcatcttaattactaattatctagctcctccctcctcctcctcagtgcttaactattagtttcagttagcctgttcaatgcttgactattagtttaagttatcaagttagcatgaatgcatatacatgcagcactaaaagaagaagatggaaaatactattattattgcaaatgcaaacagctatagctagctgggcccct

SEQ ID NO: 28368 - DNA, 211 bp, Oryza sativa
  Clone ID: PAT_MRT4530_32975C.1
atggcgtcgctatgcagatctcatgcccccacacccctcctgggtccggccagccttccaggctccttgtgggccgaggccctccacacagctaccaacctcatcaaccggcatcctacaaaaatcctccacctccccccccccgaccacccccgcctccaccggcgtcgctgcactcaaaactttattaatagagtaaaatgcactatcg

SEQ ID NO: 28369 - DNA, 290 bp, Oryza sativa
  unsure (1)..(290): unsure at all n locations
  Clone ID: PAT_MRT4530_32976C.1
ctcacccgtgggcttccccctttcctcaaagcgccaatttagaccatggcggcgacactgacccgagcattcaaggggatgtacctctcctccccgagccattactactactacgnctacttcctccgcactgaccggggctcgctctccctccgcagcagggcctgcatgggggtgccgatgaccatgcccgggccgtggatgactatccagatggcgcacaaaaagggggccgggagcaccaacaacgggagggactcccccggacagcgccttcgtgttaagattta

SEQ ID NO: 28370 - DNA, 508 bp, Oryza sativa
  Clone ID: PAT_MRT4530_32977C.1
tcatgaaccaactatggcgggcgacgggcttgcgcgggatcgcggtggtcggcgccggcatcttcgcgcgcacccagtacatcccaaggctccgcgagatcgcccacctcgtcctcctcaagaccatctggagccgcaccaaggaatccgcggaggccgccgcggagctcgcccgggacttcgcgcccgagatccagcccagatggggcgacgcgggcctggaggagattatgggagacgcttccatctccgccgtcgccgtcgttcttgctggccaagtgcaggttgacctctccttaaaaatgctcaaggcaggaaagcatgtgatacaagagaaacctgcttctggatcaacaatggaagcagaaacagcattgtcagtttacaattcatttccaaaccaattcccatacaaaccaatttgggctctggcagaaaactacagatttgaacctgcatttgtggagtcaaggaagttgatgagtgatatggtgatatgatgaacatc

SEQ ID NO: 28371 - DNA, 1695 bp, Oryza sativa
  Clone ID: PAT_MRT4530_32978C.1
atggattcgatgccgcctcctccaccgcctcctccgccgccgcctccgccgccgccttcgccgccacctccgccgccgttcccagtgatctcacatacctccaccagcactgccgcttccaatgagcccttcaagggaccttcgtggtcatcgtcggtcatggtggcgcattcatcattgctcgtcgcacccactccgcccgttctgtcaatttctgtgggtggtgctatactagcttctgcttcaatcccgtcgacatctacacaggtgactcgagagggaggggtactggcttcaaatacctcgagggccaaagcaaagcgtaatgccccagcatcgaaacaactaaagcattcaacaacaaagcggtcaaaaccaactatggtaacaatggtgaggtctccggggattcgtattatgatgtcacccatgctaaggtccccaataccacgtgcattgtccccacctccaacacacgagaggtcaccatcttcttcccctgaggaagcaactacacttcaacatcgttcatctagaagcaaatcaaaacgcaaattaaggtcaactgtttggaaagactttgatccgatatatgaaggagagaaaaggataattaggtttgctcttgttgagacaccacatgatggcaaaaacatgttaagtgcaatggtgaaggctcttcaagattggaatattgaacataagctattttcaattgcattagacaatgcctctatgaatgatagttttatgagttctttgaaagaaaatcttgttgaaaggaaattgctaccgtccaatggcgatttatttcattctcgttgtgctgtgcacatcctcaaccttattgttcaagatgggcttagtgcgataagtggtgcaactcacaaaatcagggagagtgtaagcatgttaatagtatttcataaggccacactaacagtttcaggctccaaatatccaacatccaatctttggtttcatgaaatatgggaggtcaagaaattgttagacactaagatcttgaactcacaccctaacattgtatccatggcttatgaaatgatacagaagtttgagaagtattggaagctatcattcttgcaaatctgcatccctgtgatacttgatgctagatttaagttgacctttcttgagtatcgcttgaagcaaggatttgagataacagaagctagtgaataccttcagaaaataaacagtacaattcgagagctttttgctgaatattcctcaaagatgggtagcttgcaagaaagtaatatcgtggacttgactgctgatggaaataacccttgttctgatggaagtagtcgttggtctaattggggacaacatgttgatgcacaaaaaagaaaaagagcaaatgagcttgacaggtgtcttgaagaagaagtggtctctattagtgctgattttgacattttgcaatattggaagatgttctcccccaagtatcctatacttgctcagatggcatgtgatatattggctattccagcatcaaccgtgccgtcggaaagtgcattttctactggaggaagagttataagtgattataggagtagtctcagcagtgagactgtacaagctttgatttgtctccaaagttggattagagcagaagacactgaaattaatgatagtgagaatgatgaggatgatatgtccatctga

SEQ ID NO: 28372 - DNA, 1379 bp, Oryza sativa
  Clone ID: PAT_MRT4530_32979C.1
atggcgggcgacgggcttccccggatcgcggtggtcggcgccggcatcttcgcgcgcacccagtacatcccaaggctccgcgagatcgcccacctcgtcctcctcaagaccatctggagccgcaccaaggtcagccacacacagatcatccaccgaactccgctctcctgtcggtcgctggacctcaccattccgttgcaggaatccgcggaggccgccgcggagctcgcccgggacttcgcgcccgagatccagcccagatggggcgacgcgggcctggaggagattatgggagacgcttccatctccgccgtcgccgtcgttcttgctggccaagtgcaggttgacctctccttaaaaatgctcaaggcaggaaagcatgtgatacaagcaacaatggaagcagaaacagcattgtcagtttacaattcatttccaaaccaattcccatacaaaccaatttgggctctggcagaaaactacagatttgaacctgcatttgtggagtcaaggaagttgatgagtgatattggtgatatgatgaacatccaagttattgttgaagggtcaatgaatagttcaaatccatactttaatagctcctggagaagaaattttgtgggtggctttatactggatatgggtgtgcatttcatagcaggactaagaatgatggttggttcagaaatagcaactgtatcgtctatctcccgtcatgtggataaggctttaccaccacctgataacatatgttctcttttccagctagaaaatggatgcgctggggtctttgtgtttgcagtcaactcgagaacacccaagatattatggcgggtggatggaactagaggaacagtgcaaatagaacgtggaattgctagtgggaagcatgggtaccaggttttattcaccaatgaaaatgggcagtgccagacgacattttatccattctgtggcgtgaatgaagaactgaaggcttttgttcatgacattgtgcaggcaaacaaagatggggatcacaaggctgaaccccgcagttcttatgttgaaggcgcacgggatgtcgccgttctagaagccatgcttgaatctagtgcgaagcaaggaaccatggtccaagtgaagaaattctaacatccataaaattgttcaaaaaaagagagggaaatatattcttcagcaagttggtacgccaattatgtagctttactaataaggaacattttttccaagttcatacataccattgagagtacagcgtgcaaatagcagtgtttccagagaaccaactttctttgactccatacatatttgttggcttgttgccattgataaattgattattacaaaacgaaacaatgcacttcggcttgttctgc

SEQ ID NO: 28373 - DNA, 312 bp, Oryza sativa
  Clone ID: PAT_MRT4530_3297C.1
ccagtttcgtcgacttatggccttagaaacacagctggttaccatatggcacaaacatgttgctttgaaaatgatccccgtgcaactgcgaacacaaccccgaggcatcctgagaatcaattcactcagcatggatatgagcagcgggaaaatgatttcattttgtctgcacccaactttgttcgctggcataggccgccattctctgctggtggaactctgcctccacctcccccaacgcagcagccctcagcttttggtactctgcctccgccacgcccatcgcagcagttttctgcatgtggtaccatg

SEQ ID NO: 28374 - DNA, 897 bp, Oryza sativa
  Clone ID: PAT_MRT4530_32980C.1
acactccagcaccgaaggctcgtgttaatcatgttgcagcttcagaagcccagaatgcacccgatgtggtcttgggtacgtttcctgttaactctatacccgcatctgtgctttttgattccgatgctacacattcctttttgtctaaaagttttgcaagcaatcatgggatggaagttattagtcttgggagacctttactagttaataccccaggcaaccaagtatcttcaatgcagtactgtccttccgttactatagaaatagaagaaataactttcccatcctcactcatcttgctagaatccaaagatctagatgttatcttagggatggattggttatctcgtcacagaggagttatagattgtgccaaccgtaaggtgactttaaccagtagcaatggggaaacagtgtctttcgttgcgtcatcccctaaatctcatggtttgacattaaatcaagttgctttgcaagagatcccaatagtacaagattatccagatgtgttccctgaggatttgccaggtatgccacctgagagagacagagttccggatagacctagtacctggaaccaaaccctatccataagagaccatacagaatggcagctaatgagttagtagaggtaaagagacaggtggatgatttgcttcagaaaggatacattagacccagtacttcgccgtggggagcaccagtcatctttgtggagaagaaagatcatactcagagaatgtgtgtggattatcgagcgttgaatgaggtcactatcaagaataagtatccgctacccaggattgatgacttgttgtcacgcccagaaattcccaaatagaattccaagcagaatgtgcattaaaatccccaccggcgacgaggagcgacggagga

SEQ ID NO: 28375 - DNA, 1618 bp, Oryza sativa
  Clone ID: PAT_MRT4530_32981C.1
cgtgttgcttacatcattggtgagaatggtgaacacccgcactggaagtggaagtggaagtggtcacaatgaaggagatcccacacttgcccaacaagcgcagaaccagcaggcaaataacaacaatcaaccaccacctccacaaaacaagttggcagattttctacgtgtgagaccacctaccttctcaagcaccactaacccagtagaggcaggtgattggctgcatgctgtggaaaagaagttagatttgattcagtgcaccgagcaggagaaggtttcctttgcttcgcatcagttgcatggtcctgttgctgagtggtgggatcactttcgtctaaacagagccgcgggagagcctatcacttggcgggagtttactgctgctttcaagaagacacacataccatcaggtgttgtggcacttaagaagagagagttcagagcattcaatcggggatcccgttctgtcacagagtaccttcatgactttaatcgcttagctcgttatgccccagaagatgttcgcactgatgaagagcgtcaggagaagtttttagagggattgaatgatgagttgtcttatgcattgatggctatggagtaccgggatttccagcagttggtggacaaggcgagtcgccaagaagacaagtacaataggatggaacagaagaagcgtagggctgctcaattcaaggctcaacagggtagtagccagaggccgcacattggtatgggacctcaagctgcaccatacccacagggaggatcctcttcagttgttcgccctcaacgccagttctacaacaacaacactggtaatcgcagcaacaacaatcgtaatgtggtcactcgtcctgtagcagctccaacacagaatcagtctgtcaggaaggaacaaggaagcaagccaggggtgtgcatcaattgtggtgatccaggacattatgctgataagtgtccaaatcctcgacgtgtgaagaatgctcctgtccagaatgactccaatgctccagcaccgaaggctcgtgttaatcatgttgtagctgcagaagcccagaatgcacctgatgtggttttgggtacgtttcctgttaactctatacccgcaactgtgctttttgattccggtgctacagttttctccaagatagatcttcgttccggatatcaccaacttcaaatccgtgaggaggatatacctaagaccgcttttaccacacagtatggtttgttcgagtgtaccgttatgtcgttcggactcactaatgccccgtcctttttcatgaacttgatgaataaagtgtttatggaatatctggataagtttgtcatggtgtttattgatgacatccatatctactccaagacaaaagaaaagcatgaagagcatcttcgtcttgctttagagaaactacgtgagcatcagctctatgccaagtttagtaattgtgaattttggttgcccgaagtgaagttccttggtcatgtcatctcagctggaggagttgctgtggatccaagcaatgtcgagtcagtgctaaattggaagcaacctgtcacgtcccaaaacgaccctaaaatacatcctcgaaattgtgccgagaataattaa

SEQ ID NO: 28376 - DNA, 4581 bp, Oryza sativa
  Clone ID: PAT_MRT4530_32982C.1
atgggcgtctacgtcttcaccgaccggcttgccttcgccgccgccgactggtatctccgtctgcacggctggcctattatgccgtcgttgttgggcgtctacgactccaccaccggcctgcctccatcgccgctgactggtgtttccgcctgcacgctggcctattatgccaccgttgatgggcgtctacgtcttcaccgaccggcttgccttcgccgccgccgactggcgggcccgcccgccaccctcgctgacgggtggggcccacctgtcatcgccttccttgcgccgcgcccgccgcccgcccgtgccctagcgccgccgccgccgcgaatctcgccgcctcccgccgtccccgcgcgcattaaagtggggggaaacattccccgcgattccctctcccgtttcccccactttcccctctctctctccctcggatccgtttggaatcgctcccgcaaacctcgccggcgccatcaatggcggccgagatctccgcgcccgtttccttcacctccggccgctttctccccctcccggtgctatataattgctccttgtgcctctctcctccgtttccgccgttcgccgcttgctctcaccgtcggaatcgcgctcgcgccgtcttcctctctctccgccgtcgccgacgagctccggttcgccgccgccgtcgctccggacttcctcccgtctcggcgtcacctccatcggcttcgccgcgtcgtcgtcgaccccgtccgctcctccgattcgctcgccgaccgccggaacgccgtcgtcctcgccgtcccgaaccgcgccgccgccttcctccgcttcggccgccgttcccgtcgtcgccgtcgacccggggtgagccgaagaccgccctttcgcttccttctcctctccgctctctcgggcgccgctccgccgcgccggtggtcgccggcggtgaccatcggggcgcgggcgtgccgcctcccgtcggccgtgccggcgaggccgccttcgggcgcgccctcgcggctgccaagtgggcccggccgtcagccgcccgcgcccgcgggtgcggctgacgcgtgggacccacggcgccggccgccgccagccgcgtgctcccggtccaccgtggaccgagaggctgacgcgtgggccccactcccgtggacccgggcaaatgaaggctacacgagctgcggcccggtagtcgagatgtctaggcaaatgaagactacacggactgagccacaaactaagccttacccactagacatgtggaagtacggtagtgctttgcaacagaggcccgagcttaatccttatagtacccgaggtgaacaaggtaataataacaataacaataataataaggtcataacaaaggtgaggtttgatgattattgcaagaatgagcatatgacatactcaacaagccacacagcaaatatgcaagtgcacaaggattccaaaggatggcataatataggctcatttgcaaaagcagcatttagcaaagatttaagacaacgaaaacgctctcctccggaacgtcggaaaagttccttgctcatcttctatataaccgatggcttttcctcttctcatgttctttttgatttcttggatatcaggatcattcacttgagcctctctgacttgatcgaaaagagtaggttgagcttctaaagcggccacaaaacctttgttgactattcccaagttcaacttttcaaattcctggcataacttccaaggtagatgtcgtccttctaacatattacaatagcttttcctgctgagagcatctgctacaacttttgctttacctggatgataatgaattttcatatcataatccttgctcaactctaaccatcttcgttgatgcatgttcaaatcaagttgagtgaaaatgtacttcaaacttttatgatccgtatacatctccgtacggttaccaaaaaggtaatgacgccaaatcttcaatacatgaaccacagctgccaactctaggacatgcgttgggtagttattctcatgagggcgtaactgcctagatgcataggcaaccaccttcccatcttgcatcaaaacacaacccaaaccaagtctagatgcatcacaatacacctggaaacctttccttggatcaggcaagacgaatacaggcgcagtcactagccttttcttcagttcttgaaaactctgctcacattcttccgtccacttatacttcacatccttctgaagcagtcgagtcattggtctagcaatcttggagaagttctcaataaacctgcggtagtaccccgcaagaccaaggaaactacgaatctctaaaatcgtcttgggttgcttccaatttagcactgactccacattgcttgggtccacggccactcctccagctgagatgacatgaccaaggaacttcacttcgggcaaccaaaattcacatttactaaacttcgcatagagctggtgctcacgtagtttctctaaagcaagacgaagatgctcttcatgctcttcttttgtcttggagtaaataaggatgtcatcaataaacaccacgacaaacttatccagatattccataaacactttgttcatcaagttcatgaaaaaggccggggaattagtgagtccaaacgacataacagtgcattcgaacaaaccataccgtgttgtaaaggcggtctttggtatatcctcctcacggattcgaagttggtgatatccggaacggagatctatcttggagaaaactgtagcaccttccagttgatcaaacaagtcatcaatcctaggtagaggatacttattcttgatagtgacctcattcaacgcatgataatccacacacattctttgagtatgatctttattttccacgaagatgactggtgctccccacggcgaagtactgggtctggtatatcctttctgaagcaaatcatccacctggctctttacctctgctaacttattagctgccattctgtatggtctcttatggatagggttggttccaggtactaagtctatccggaactctatgtctctcttaggtggcatacctggcaaatcctcggggaacacatctggatagtctcgtactattgggatctcttgcaaagcaacttgatttaatgtcaaaccatgaggtttaggggatgacacaaagaaagacactgtttgcccattgctacttgttaaagtcaccttacggttagcacaatctataactcctctgtgacgggttaaccaatccatccctaagataacatcaagatctttggattccaaaaccagcttaggtgcattctgggcctctgcagctgcaacgtgattaacatgagccttcggtgctggagcattggagttgttctggaccggagcattcttcacacgtcgaggctttggacaccctggcttgcttccctgttccttcctgataggttgattctgtgttggagctgctacaggtcgtgtgaacacattatgattgtcgttgctgcgattaccagtgttgttgttgtagaactggcgttgagggcgagcaactgaagaggatcctccctgtgggtatggtgcagcttgaggtcccaaaacaatgtgcggcctctggctactaccctgttgagccttgaattgagcagccctacgcttcttctgttccatcctattgtacttgtcttcttggcgaatcgccttgtccaccaactgctggaaatcccggtaatccgtagccatcaatgcataagacaactcatcattcagtccctctaaaaacttctcctgacgttcttcatcagtgtgaacatcttctgatggtatatgcgtcttcttgaaagcagcagtaaactcccaccaagtgataggctctcccgcagctctgttttgacgaaagtgatcccaccactcagcagcaggaccatgcaactgatgcgaagcaaaagaaaccttctcctgctcagtgcactgaatcaaatctaacttcttttcaacagcatgcagccaatcacctgcctctactgggttagtggtgcttgagaaggtaggtggtctcacacgtagaaaatctgccaacttgttttgggcaagtgtgggacctccttcattgtgaccacttccacttccacttccacttccagtgcgggtgttcaccatcatcaatctcagctccctgacgaatcctagcaccttgatcaagtttttcggcggatgggcggcatccataaccgcgggcacggctattcgaatagttttactctggccagagatgtaccacacagtgcaccgttcctggatcataatctccccctctaaaccagaggcaaatagactccccagcgacccccacggacttctcaccgctttacagtctgacaccccgtaatgaatcatattatacaaaaggtaaagccgttgcccacgctggcttgtggttggcacggttaatgtttcacaacagtagctcgcgaaccggtccttaattgtcacgagcaccaccatcaaaaccatatgctcacaacccaccttcctcaacgaaaacgctctcctccggaacgtcggaaagtcatcgccagccat

SEQ ID NO: 28377 - DNA, 2217 bp, Oryza sativa
  Clone ID: PAT_MRT4530_32983C.1
atgggagggcggcggccggcggcgccccaccgtgcgacgggagggtggcaggagggcggtggccggcagcgccccaccgcgcgacgggagggcggcggccggcggcgcgcgcgacgggagggtggcggctggcgacgccccacctcgcgacgggatgacagcggccagcggcgcgcacgaccggggggggtcacgctacagatcaaacggaaacctaacgggagggtcgtgctctccatcccctcctacaccactactgcccaaccacaccaccacacgcccgccccttgccgattggtcggaaggcatcaacggcgccggcgaggcaccctcgaccgacctccttcctctctcctacctcctcgagctatcgatagccgacgtctgcatgaccatccctctaaccccgacaacatcccccttcttcccctcccaaccctcccatccccaccccaccccgggaccctaattcgtcggccctctgctgaagtttgggttgtcaccagcgccggagaagaagaggaggtcatcggagttggagaagacgcacatggagcacgaattatgaagcacatccagcgaggatgcttgaaggaggcggcaagtggagacgcggccgtgtggcggtgtgccgacgggcggaggcgaagcggaaatggcaacgacgagcggaggcagtgtagtgacaggcgatatcgagtggaggtggaggtggagtgtctctcccttcccttgcgagaagcagaggcacaccgcgcggaggaagcacggcctcgtcgtcgtcatcgtcgggaagaagccttaccttacctatgttgcgctgatgtcggagcggagcggaagcgccaagaaccaagagccccgcgcctctctccccctcaccggagcgggagcgccaagaacccaagatccgtgcgcctctctccccctctgctcgcctcgctcttcggaaccaatggagctgttccacggcggccaccacgtccacgccctgtgccccgtcgcggccgccgcctcggacgacgacggcgacagctgggtcttcctgcatccgctccgcgcgacggtgcacgcggcgtggccggcgcacatgctccgcgcgttcgacggacggacggacggcgccacgcggcggcaacgaccgtgttggcagattgggagcagattggcctcggcggcaaccgcgtcaccctgcgcgacctacaccgcctcggcttgttcaccgtcgtcttgggatcgggggacgacgtcctgctggatgccttggccgctcccacgagtacgtcctgcgtggtgcaagtcatccccccgagagactccctgccttcccttccagtttcagaaccaaatcttctgataagtggaaccagtttcccaatcggcggagacaatggtatgatgggtgcagataatgagagggctgaagggccgcagactatgcttttggtggaggagggcattaggaaggttgacacggagtttgcttgcatctcatacttaacaccatggcgctggtgcaaccaagctgtaagatggctggcatggaagactggtaccacacttgctgggctcgtgttaccagatacatggagctgggagaaaattgtcggatcacctgctgttcaaggcagaggtgggtgttcattgtctgcttgcactgtatgcactgaagctcagcatcggatgatttacgataggctccatggctcaggctcattccgatggagagttgaggtacctccaactactctgaggatggaatgcataaagaaagaagcatggaaccccgaagaaggtgggttgaataagtatcctggaccttacaagacccagatgctcagactgacggagtatgtcaaacccctgaccgccatagagacagccaggcttattcgtcagagagggccgatcattggtgcactggcggttaacccaccccactacttctcttatcgggcggatgcaaaacagcgagccaaaagagtgtacagaggctgtcccgagtctgcaataattgcccgtaaggcggcctggcacgcagttgtctgttttgagtataggttcgtgaagagtttgattggagaagagcttcagctgaagattatggacagccacagcccagacggacctcggaggtggatctgttttgatgccttcgacaggttctgtctgccagtcatttgccggccgccgtgtccccgcccgtcgtcatcggaa

SEQ ID NO: 28378 - DNA, 4924 bp, Oryza sativa
  Clone ID: PAT_MRT4530_32984C.1
gtgacaagttggtaccagagccaccttgaccttaggacaagccaaatgacgccgccccatccgccggaaagcttgatcaatgcggtaggattcgtcagggagctgagaatgatggcatttgaagtaggctacgacgttgcccctgagtatcgccagattccctatgaccccaacgaggagaagtgtcgtgttcgcgtgacgttgactagtgatcgagaagaccttctgtcgataaagtttgaagctgggggaagaaagtatagtcatgcttgtcaggaggtagccttggtggccattggagagctacgtcatcgctttgatgaggagttagagtcatcagctttccagtatcatccacacaagcctcatggtcaagactatggagtttaccactgccctgaagatgaagatagcaccactctgaagcatgctgtgtatatgcttagcgccatggatgcagtaggcgtggagcgggagaaaacagctgatgacagggaaaactggaaccgtggcaggatttgcaagttggagagcaaggtgtaccgtctgcagaaggaactggccgagcttaagggagaagcaccaccgccagcacccaaacttcgcctcaccgcaaggaagagaacccgtccaccacctcgtatccagttggcttcgaagactcgtgtggtgggagatgttgtgcctgatcatgctgaacctatcatccatgtcttaagtaatgatgaagaggaggaagacccagaagaaagagagccagctactccagaggaagaagatccatctcttcgttccgatgcaaggcgcaccactaacccagtagaggcaggtgattggctgcatgctgttgaaaagaagttagatttgattctgcgcaccgagtaggagaaggtttcctttgctttgcatcagttgcatggtcctgctgctgagtggtgggatcacttttgtcaaacacagagctgcgggagagcctatcacttggcgggagtttactgctactttcaagaagacacatataccatcaggtgttgtggcacttaagaagagagatttcagagcactcaatcagggatcctgttctgtcacagagtacctccatgactttaatcgcctagctcattatgtcccagatgatgttcgcactgatgaagaacgtcaggagaagtttttagagggactgaatgatgagttgtcttatgcattgatggctatagaataccggaatttccagcagttggtggacaaggcgattcgccaagaagacaagtacaataggatggaacagaagaagcgtagggctgcttatttcaaggctcaatagggtaatagccagaggccgcgcattgctttgggacctcaagctgcaccatacccatagggaggatcctcttcagttgctcgccctcaacgccagttctacaacaacaacactggtaatcacagcaacgacaatcgtaatgtggtcactcgtcctgtagcagctccaactcaaaatcagcctgtcaggaaggaacagggaatcaagccaggggtgtgcttcaattgtggtgatccaggacattatgctgataagtgtccaaagcctcggcgtgtgaagaatgctcctgtccagaacaactccaatgctccagcaccgaaggctcgtgttaatcacgttgcagctgcagaagcctagaatgcacctgatgtggttttgggtacgtttcctgttaactctatacccgcaactgtgctttttgatttcggtgctacacattcctttttgtctaaaagttttgcgagcaatcatggaatggaagttattagtcttgggaggcctttactagttaataccccaggcaatcaagtatcctcaacgcagtactgtccttccattactacagaaatacaagaaattcctttcccatccacacttatcttgctagaatccaaagatcttgatgttatcttaggggtggattggctaacccatcacagaggagttatagattgtgctaaccgtaaggtgactttaacaagtagcaatgggtaaacagtgtctttctttgtgtcctcccctagatctcatggtttgacattaaatcaagttgctttgcaagagatcccaatagtacaagactatccagatgtgttcccagaggatttgccaggtatgccacctaagagagacatagagttccggataaacttagtacctggaaccaaccctatccataagagaccttacagaatggcagctattgagttagcagaggtaaagagacaggtggatgatttgcttcagaaaggatatatcagacccagtacttcgccgtggggagcaccagtcatctttgtggagaagaaagatcatacccaaagaatgtgtgtggattatcgagcgttgaatgaggtcactatcaagaataagtatcctctacctaggattgatgacttgtttgatcaattggaaggtgctacagtcttctccaagaaagatctttgttccggatatcaccaactttgaatccgtgaggaggatataccaaagatcgcctttacaacacggtatggtttgtttgaaagtaccgttatgtcgtttggactcactaatgccccggcctatttcatgaacttgatgaacaacgtgtttatggaatatctagataagtttgtcgtggtgtttattgatgacatccttatttactccaagacaaaagaagagcatgaagagcatcttcgtcttgctttagagaaactacgtgagcatcagctctatgccaagtttagtaaatgtgaatttggttgcccgaagtgaagttccttagtcatgtcatctcagctggaggagttgtcgtggatccaagcaatgtggagtgagtgctaaattggaagcaacctaagatggtctcagagattcgtagtttccttggtctgcggggtactaccgcaggtttattgagaacttctcaaagatcgctagaccaatgtctcgactgcttcagaaggatgtgaagtataagtggacggaagagtgtgagcagagttttcaagaattgaagaaaaggctagtgactgcgccaatgttagtcttgcctgatccaaggaaaggttttcaggtgtattgtgatgcatctagacatggtttgggttgtgttttgatgcaagatgggaaggtggttgcctatacatctaggcagttacgccctcatgagaataactatccaacacatgatgtagagttggcagctgtggttcatgaattgaagatttggcgtcattacctttttgataaccgtacggagatgtatacggatcataaatgtttaaagtacattttcactcaacctaatctgaacatgcgtcaacgaagatggttagagttgatcaaggattatgacatggaaattcattatcatccaggtaaagcaaatgttgtagcagatgctctcagcaggaaaagctactgtaatatgtcagaaggacgacacctaccttgggagttatgccaggaattggaaaagttgaacttgggaatagtcaataaaggttttgttgccgctttagaagctcaacctactctttttgatcaagttagagaggctcaagtgaatgatcttgatatctaagaaattgaaaagaacatgagaagaggaaaaaccatcggttatatagaagatgagcaaggaactgtgtggctaggagaaagaatttgcgtgcccgataataaggagttgaaggatactattatgaaagaagctcatgaaactttgtattccattcatcctgggagcactaagatgtatcaagacctgaagcaacaattctggtgggctagcatgcgatgagagatagcggaatatgtggctctatgtgatgtgtgtcagcgagtcaaggcggagcatcagaagccagcctgtcagctgcaaccgttgaagattctagagtggaaatgggaggaaataggaatggattatatcaccggtctacccagaacgtcggcaggacaagattctatttgggtagtggttgataggcttactaaagttgctcattttatacctgtcaaaacaacctactcgggaaataagcttgcagagttatatatggcaagagttgtatgtttacatggtgttcccaagaaaatagtgtcagacagaggtagtcagtttacttcgatgttttggcggaaactacaagaagagatgcgtactcgtttgaatttcagtactacttatcaccctcaaactgatggccagacaaaaagagtgaatcaaattttagaagacatgttgagagcctgtgttctagatttcggtggaagttgggataagaatatgccgtacgccgaattcggttatatcaacagttatcaagctagtcttcaaatggctccatatgaagcattgtatggtcgaaagtgtcgtacaccgctccatttgggatcaaaccggtgagcgtcaagtttttgggacagatatattgcgagaggcagaagaaaaagtgaagattatccaagaaaggttgcgtattgcccagtcacgttagaagagctatgcagacaatcgtcgtagggatttgactttcgaagaaggagattatgtatacctacgggttacgctgctgcggggagttcatcgttttcagaccaaagggaaattggcaccgcgatttgtgggaccttttaagattgtgagtcggagaggtgaagtagcttatcaactagagttgcctccgtcaatggcgggaatacatgacgtgttccatgtgtcgcagttgaagaaatgtttgcgtgtacctacggaggaagcagatcctgagcatatagagcttcaaaaagatttaacttatgttgagaagccagtccgaattcttgtgtttccgacgttccggaggagagcgtttacgttgaggaaggcgattgatcaatactaaaatgctt

SEQ ID NO: 28379 - DNA, 5223 bp, Oryza sativa
  Clone ID: PAT_MRT4530_32985C.1
gtgacaagttggtatcagagccaccttgaccttaggacaagccaaatggtaaacccccatccgccgaaaaacttgatcgaggtgctaggattcgtcagggagctgagaatgatggcatttgaagtaggttacgaggttgcccccgagtatcgccagattccccatgaccccaacgaggagaagtgtcgtgttcgcgtgacgttgactagtgatcgtgaagaccttccgtcgataaagtttgaagctgagggaaaaaagtacagccatgtttgtcaggaaacagccttggtggccattggagagctacgtcatcgctttgatgaggagttagagtcatcagctttccagtatcacccacacaagccacatggtcaagactatagaacttacaactgtcccgaaggtgaaggtagcgccactgtgatgcacgccgtgtatatgcttagcgccatggatgcagtaggcgtggagcgagagaaagcagctcatgatagggaaaactggaaccgtggcaggatttgtaagttggagagcaaggtgtaccgtctgcagaaggaactagctgagcttaagggagaagcaccaccgccagcacccaagcttcgcctcaccgcaaggaagagaaccagtctaccacctcgtctccagttagcttcgaagactcgtgtggtgggagacgctgtgcctgatcatgctgaacctgtcatccatgtcttaagtgatgaggaagaagaggaagacccaaaagaaagagagccagctactccagaggaggaagatccatctcttcgttccgacgcaaggcgcaccactaacccagtagaggcaggtgattggctgcatgctgtgggaaagaagttagatttgtttcagtacaccgagcaggagaaggtttcctttgcttcacatcagttgcatggtcctgctgctgagcggtgtgaccactttcttctaaacagagccgagggacagcctatcacttggcgggagtttactgctgctttcaagaagacacacataccatcaagtgttgtggcccttaagaagagagagttcagagcactcaactagggatcccgttctgtcagagagtacctccatgactttaatcgcttagctcgttatgccccagaagatgttcgcactgatgaagaacgtcaggagatgtttttagagggactgaatgatgagttgtcttttgcattgatggctatggattaccgggatttccagtagttggtggacaaggcgattcgccaagaagacaagtataataggatggaacagaaaaagcgtagtagccagaggccgcgcattgctttgggacctcaagctgcaccatacccacagggaggatcctcttcagttgctcgccctcaacgccagttctacaacaacaacactagtaatcacagcaacgataatcgtaatatggtcactcgtcatgtagcagctccaactcagaatcatcctgtcaggaaggaacagggaagcaagccaggggtgtgcttcaattgtggtgatccaggacattatgctgataagtgtccaatgcctcggcgtgtgaagaatgcacctgttcagaacaactccaatgctccagcaccgaaggctcgtgttaatcatgttgcagccgcagaagcccagaatgcacctgatgtggttttgggtacgtttcctattaactctatacccgcaactgtgttttttgattccggtgctacacattcctttttgtctaaaagttttgcgggcaatcatgggatggaagttattagtcttgggagacctttactagttaataccctaggcaatcaagtatcctcaacgcagtactgtccttccgttactatagaaatagaagaaatacctttcccatcctcacttatctttctagaatccaatgatcttgatgttatcttagggatggactggctaacccatcacataggagttatagattgtgctaaccgtaatgtgactttaacaagtagcaatgggcaaacagtgtctttctttgtgtcatcccctaaatctcacggtttgacattaaatcaagttgctttgcaagagatcccaatagtacgagactatccagatgtgttccctgaggatttgccaggtatgccacctaagagagacatagagttctggatagacttagtacctggaaccaaccctatccataagagaccatacagaatggcagctaatgagttagcagaggtaaagagacaggtggatgatttgcttcaggaaggatatatcagacccagtacttcaccgtggggagcaccagttatcttcgtggagaagaaagatcatacccaaagaatgtgtgtggattatcgagcgttgaatgaggtcactatcaagaataagtatcctctacctaggattgatgacttgtttgatcaactggaaggtgctacagttttctccaagatagatcttcgttccggatatcaccaacttcgaatccgtgaggaggtatacctaagaccgcttttacaacacggtttggtttgctcgagtgtaccgttatgtcgtttggactcactaatgccccggcctttttcatgaacttgatgaaccaagtgtttatggaatatctggataagtttgtcgtggtgtttattgatgatatccttatctactccaagaataaagaagagcatgaagagcatcttcgtcttgctttagagaaactacatgagcatcagctctatgccaagtttagtaaatgcgaattttggttgcccgaagtgaagttccttggtcatgtcatctcaactggaggagttgccgtggatccaagcaatgtggagtcagtgctaaattggaagcaacccaagacggtttcagagattcgtagtttccttggtcttgcggggtactaccgcaggtttattgagaacttctcaaagattgctagaccaatgactcgactgcttcagaaggatgtgaagtataagtggacggaagagtgtgaacagagtttccaagaattgaagaaaaggctagcggctgcgccagtgttagtcttgcctgatccaaggaaaggttttcaggtgtattgtgatgcttctagacatggtttggggttgtgttttgatgcaagatgggaaggtgattgcctatgcatctagacagttacgcccccacgagaataactatccaacacatgacctagagttggcatctgtagttcatgcattgaagatttggcgtcattacctttttggtaaccgtacggagatgtatacggatcacaaaagtttgaagtacattttcactcaacctgatttgaacatgcgtcaacgacggtggttagagttgatcaaggattatcatccaggtaaagcaaatgttgtagcagatgctctcagcaagaaaagctactgtaagatgttagaaggtcgacacctaccttgggagttatgtgaggaatttgaaaagttgaacttgggaatagtcaacaaaggttttgttgccgctttagaagctcagcctactctttttgatcaagttagagaggctcaaatgaatgatcctgatatccaagaaatcaaaaagaacatgagaagaggtaaagccatcggctatatagaggatgagcaaggaactgtgtggctaggagaaagaaattgcgtgcccgataataaggagctaaaggatactatcatgaaagaagcccatgaaactttgtattccattcatcccgggagcactaagatgtatcaagacctgaagcaacaattctagtgggccagcatgcgacgagagatagcagaatatgtggctctatgcgatgtgtgtcagcgagtcaaggcggagcatcagaagccagccggtctgctgcaaccgttgaagattccagagtggaaatgggaggaaataggaatggattttatcaccggtctacccagaacatcggtaggacatgattctatttgggtagtggttgacaggcgtactaaagttgctcatttcatacccgtcaaaacaacctacatgggaaataagctcgcagagctatatatggcaagagttgtatgtttacatggcgttcccaagaaaatagtgttagacagaggtagtcagtttacttcgaagttttggcagaacttacaagaagggatgggtactcgtttgaatttcagtgctgcctatcaccctcaaactgacggtcagacaaaaagagtaaattaaattctagaagacatgttgagagcctgtgttctagatgtcggtggaagttgggataagaatctgtcgtatgctgaattctcgtataacaacagttatcaagctagtcttcaaatggctccatacaaagcattgtatggtcgtaagtgccgtacaccgctcctttgggatcaaactggtgagcgtcaagtttttgggacagatgtattgcgagaggcagaagaaaaagtgaagattatccaagaaaggttgcgagttgctcagtcgcgtcaaaagagctatgcagacaatcgtcgtagggatttgactttcgaagaaggggattatgtatacctacgggttacgccgctgcggggagttcatcgttttcagaccaaagagaaattggcaccgcgttttgtgggaccttttaagattgtgagtcggagaggtgaagtagcttatcaagtagagttgcctctgtcaatggagggaatacatgatcgtttcccatgtgtcgcagttgaagaaatgtttgagtgtacctaccgaggaagcagatcctgagcgtttagagattcaagaagatttaacttatgttgagaagccagtcagaattttggagtttccgacattccggaggagagcgtttacgctgaggaaggttcagaaccgcccctgccgcgccgctcaggtgcgggccggccgcgccgtctcctccttcggcgtcgccgcgtcgacctccaccccggcctgccctctgattcgtccggagaccaccgccgtgtcgccaccaacccctccacccgcctcgccggagtcctccggccgcccgttcctcctcgccggaatttccccggtcgaccgcgtcgccgtcttctccggcatcgcagcggcaaggtcgtcctcggcatcgcttcccctccatccaaacccctctgcggtccatcgtcgtcgcctccgttcgttctcgtcgtcgacgtcccgtcggtcacccggctcgtcgtctcgcagcgccgcctccgtcgtcggcat

SEQ ID NO: 28380 - DNA, 2977 bp, Oryza sativa
  Clone ID: PAT_MRT4530_32986C.1
atggcggcatggtcgtggttaattctactatgcctcgtcgccgccgccaccgccggcgtgctccaagctcgtgcccagcctgatagcaaaggtttcattagcgtagactgcggcctcccggggaagacgagctacgtggacgacaagaccaagatatcctacgcggcggacgacggcttcaccgacggcggctcgttccacaacatctcggcggagtacatcacgccggcgctctcggcgcgctaccacaacgtgcgcagcttccccgacggcgcgcgcaactgctacacgctccggtcgctcgtggccggcctcaagtacctcatccgcgccaccttcatgtacggcaactacgacggcctcagcaagctgccaatcttcgacgtctacatcggcgtcaacttctggatgatggtcaacatctcggacccctccggcgcgacgctcctggaggccatcgtcgtcgtgccggacgacttcgtgcaggtttgcctcgtgaacaccggcaccgggacaccgttcatctccgggctggacctcaggcctctcgagaagaagctctacccgcaggcgaacgacaagcggggcctgtccttgttcggcagatggaactttggcccaattagtactaccgagttcatcaggtaccccgacgatccacacgacagaatatggatgccttgggtctcgccatcatattgggtcgaggtatcgacgacgaggccggtgcagcacacggacgaggacgtattcgacgcgccgacgaaggtgatgcagacggcgattgcgccgctcaacgcctcgagcaacatcgagttcgcctgggtaccctacacgcagcccaaggacccggcgccggggtacatcaccgtcatgcacttctccgagctgcagctccgctccagcaacgccacgcgccagttctacatcaacctcaacggcaacatggtgtttagccagggctacacgccggcgtacctctacgccgacgccatcttcaacagcaacccgttcctacgatacccgcagtacaacatctccatcaacgccaccgccaactcgacgctgccaccgatcatcaacgccatcgaggtgttctccgtcttctccaccgccaccgttggcacagatggtcaggatgcttccgccatgatggtgatcaaggaaaagtatcaggtgaagaagaactggatgggtgatccgtgcgttccaaagacgcttgcgtgggataagttgacatgcagctatgacagctccaaacctgcaagaatcacagacataaatctgtcatccggtggtttaagtggtgagatatcgtccgcttttgcgaatctcaaggctcttcaaaacttggatctgtcaaacaacaatttgacaggttcgattccagatgcactttcacagttgccttcgttggcagtattagatttgacaggaaatcaactcaatggttcaattccatctggacttctcaaaagaattcaagatggtaccctaaatataaaatacggaaataacccaaacctctgcaccaacgacaattcatgtcagccagcaaaacacaagagcaagcttgccatctatgtagctgttcctgtagttctggttttggtgatagtatcagtcacaatactgctcttttgccttctgggacgaaaaaagaagcaaggatcaatgaacacttccgtaaagccgcagaatgagacagcgagctatgtgccgacaaatggcagccatgggcatggctcatcaatgcagcttgagaaccgacggtttacttacaatgatttagagaagataacaaacaactttcagcgagtgctcggcgaaggagggtttgggaaggtctacgatggcttcttggaagatggcactcaagtggcagtcaaattaaggtctgaatcttccaaccaaggggataaggaatttctcgcagaggctcagattttaactcggattcaccacaagagccttgtatctatgatcggttattgcaaggatgggaaatacatggcacttgtctatgagtacatgtcagaaggaacccttcgagaacatatttcaggtaaaagaaacaacgggagatacttaacctggagagagaggcttcgaatcgcgctggaatccgctcaagggctagagtacctacacaagtggtgcaatccgcctcttattcacagagatgtgaaggctaccaacattctattgaatgcgaagctagaggctaagattgctgattttggcttatccaagacgttcaatcttgagaatggcacacatgtatctacgaacacgcttgttggcacacctggatacgtggatccagagtaccaggcaacaatgcaaccaacgaccaagagtgacgtctatagctttggtgttgtcctattggagctggtcacagggaagccggctgtcctacgtgatccagagcccataagtatcattcattgggcgcaacagcgcctagcacagggtaatattgagggagtggtggatgcacgtatgcatggtgaccatgatgtaaatggtgtatggaaggctacggacatcgcactcaagtgtaccacacaagtatcggcacaacggcccactatgaccgatgtggtggcacaactgcaagagtgcctcgagctcgaggaggggcgttgtgccatcagcaatgcgaacaacaatttctataccgacaataacagcaactctaactcaagttatgacatgtatgccactgaccactctattgatgtaagtcagaacagcgctgcatttgagacggagcgtaattttggaaggatgccatcaacggccaccggtccagctgcacgataaatcattttgcccatctgatctgaatgctgtcattttctgggaaagatcttcatggaagttttaacaatgttgttttaccaaagtaaatgcaaatgtacaaattaatttcaaaaactcaagatcctcagtataaaccctttcggttatg

SEQ ID NO: 28381 - DNA, 297 bp, Oryza sativa
  Clone ID: PAT_MRT4530_32987C.1
atggtggtggcggcaacgagcgggcccgccacggcgcctctgacgatctggccgtgtggcccccgcgagagatatcgagagggccaccttcaggccgccgccgccgtgcagggctcgccgccgcccgccgtcacccagccgggacaccgcgccgccgtcgccacggctcacgccatcgttgccttggcccggtcgctggccgcgccgccgcacctagcctcgccgctgcaccggccgcgcaccatctttcttaatggcacagagggaaaaacctccaaaataagtgtacttaagtaa

SEQ ID NO: 28382 - DNA, 679 bp, Oryza sativa
  Clone ID: PAT_MRT4530_32988C.1
aatctagacatgtatgtgtgcctagattcattaacatctatatgaatgtgggcaatgctagaaagtcttataacttgaaacggacgattaggggtggacatttggtctaaccgaaaattttggtctcggttttcggtctttcggttatttcggtccgatgagactaatcgaattgaccaaacaaaattctgtctttcactacttaggaacgaattgatgaccaaatttctcgatctcggagacggacgccggcgcgtcgttgtcttccgcggggaggcggtggaacatgggactggtgaacgcgatggccatgatgacgatggtggtggcggcaacgagcgggcccgccacggcgcctctgacgatctggccgtgtggcccccgcgagagatatcgagaggtcaccgccacgcagggccgaccggcgcctgggcgccgcgccgccgtcgccttggcccgatcgccggccttcccccatcctccttcattgtgccggcctttttcccccgatgctgcagggccaccttcaggccgccgccgccgtgcagggctcgccgccgcccgccgtcacccagccgggacaccgcgccgccgtcgccacggctcacgccatcgttgccttggcccggtcggtggccgcgccgccgcacctagcctggccgctgcaccggccgcgtag

SEQ ID NO: 28383 - DNA, 153 bp, Oryza sativa
  Clone ID: PAT_MRT4530_32989C.1
atgccgtcagacatcgacatcagagatagcctagacaaacccaatccggtgcctgcagaggccgacaagagtgatctcgacgagttcatattcgacgaggaatactaccccgtcgtcgactacatattaggctatacagccatacagagatag

SEQ ID NO: 28384 - DNA, 4776 bp, Oryza sativa
  Clone ID: PAT_MRT4530_3298C.1
agggggaggaggcaaggagcttatcggaattaataaagcaagatagctagggctggtgttggcctccgccctggcggccccgtccaagctccgccgccgccgcgtcaaccaccgtctctctcctcgctcgagcttgctgctctcacgccctgccgtctcgcccttgcttgctgctggagcccgaggggaaccctatccctagcctagcagtgcgtgcgtgcgagcgagcgccgggggggcgtcccgggggagggcgaggtcgtgcgccggcgaaacgatccgcgtcgcctctttaaattccgagggccattcgacggtaggtttccgtccgacttctaccttagcgccatcaccgccgcatccacgggactccgccgcatctgacatgccccgccttgggatcacagactattcaagagtccgtgaccaataggtgtgcgagattgtggacgttctcttggttggcaaggaagacatggtggtgctgcaattcccgcagaatgagcagaaagtatgaattaacattatgctagccaacgggcaactctaagaaggtgttactaattgggctttagatggatcaagtaggttgttgtggccgcatccttgagtacacgtttgtaccattgcttaactctgggacggtggacaaggatatttagctcaaatggacaggtggaacatagtttaggatcatttttaactagcgaaaaaatgggattaaaattttcattactttgtatttattatatgactcaaaacgagttcgagaataagatgcttgctgttcttaatgaagatgtcgaagacagtgatttagttccttagagtgctgcttctttttttgtaatggttcaccattgtaatattttcgataagccatttagaattggcagagcgcggtaaactggcactgttcgtgtacgccacccaaaaagaagaatgcatctacactaaaaagcgatcaaacaagttggagtgagcacagcaccttaagtgtctacattgaacggaggaaattatttatcaacatattcatggcagcagagatgggcccagataataggaggcacaggtcatcagtttcacgtacccgccgcttgtagggtcttaccgtctgcactgctgcatccaaacgcctaagtagagggctatgcttttgttgcacagggtagattaacaatcatagctgtccagcaacgtattcttagatgagaatgcaagcaaccaactactaatgctgctcctaccggttcctctaattgtgcgagcgtatgggtttacagagtggaaattcagaagagaggcttcccgcgcgtccatagactcatcttccgtgatgtgcgaagctgctatactaaaatatctctccttgctaaagacatgaactacaaacaacctattcctcaataactccaaccctctgacatattgtacatgaattccatgatggcagcattatgtgttgacggcaatggaaacttcgtttacatatatgttaagaactattctaaacaggacgcacaagatattaactccaaaaattcagtgtattacaagtgggcttttccattatggcggggtgagaatggttcgcacgtccttaaaaatattttgaagtaagataatggtccgttcgttccatcaaacgtgtcctatcagcgagaatttgtggctcaactatgtaaagattcgtagatgaattctatgatgatcaatattctacttaataaaaagtttctgggaattgtattaactctgccatattcgacagaggggagacaggacaccattgactgtcgacattattttatcaacaaatgtgaaggttatttcattatcatgctgcttatttatatgaaatgagctaccatctttgcatatattctaacttactatgatctagtgggcgtcacattaaaggaagcttgtgctgctaggaggttgttaggtgaagagagagaatggtcatttgcaggtgctaaggcggtgagctgggggaccgggccttaactgagattgttcttagtgatcacggctgttccttgtggtattgcttttggtgccacatttttcactactatttgacatgcgagctcatatgatacactctttggtctgcaattaagctcaaaaaatgctgcatattctgaccctgatcatgaacttataattaaggttcagcaaggattataaatgcatgaaaacgcaacggatgtagagggaaaatttagtgctttatacatagagtgtggctatatctctcttgctaatacatttctatagacatgaaatatcatccatctcgaagctaaaaataatggtgttttttttgttggttcaaatggattttctaattagttttttctgagtggtagttctgtagatttacgcataaagatttagcaaaaagatgatgaaacaacagggtaacacatcaagcgtgataaatttttagcaaaccttattaaatcgctttttcctaatatcagggaggaagctctagggaaaaagcggcggtataaagaggggaaaaataggagtttgcgtgttattctttctgaagaagatcattcagctgcatcaattccttttggtggtatggtagttgtgctgggtggggaatttcggcagatctagtatttagttgaaggaggcgttagatcgataacaattgatgctacactatcaaaatctcctcttgggtcatatttatctgttttagagctctcgctcaatatgatgttaccttgttcctatctaaatggtgatgaggaacccgtactcgctgactttagtgatttgatctttactatcggggatgccacggcaattcagtgtattctgtgcagcgatgtagaacaaactttgcttgatatccttcatgatcttttggtcatgaataatgaaaaaaagattcgacctattgtcgctgaagtttacaccaacattggcgagccatacaatgatcgaatatatttgcaaggccgggcaaatgttgccgcgacgtatgatgcgtgtgttgctatcaactcttgtgtttggcaactttttccgggtgagccaagagagtactttagctgtgtttttcctgcatgagctaatgaaaagtttgatgatttagattttttatacccaaatgattttttgaatatcataaaagttaacaattaacgtgaacatgaattgtgcctaaaaataggtgttcccataatgcttttgagaaatttagatcagaccgctgggctttgcaatgggacaaggatgattgttacaaacttgggtgatagggtgatcgaagcgcgtattataactggttctaatgcgggggaaactgtttatatcccaagaataaccttatctgcgaccagcaaaaaatggcccttcacattagaacgtcggcagttccctgtccgtgtctgctacgctatgactataaataaaagtcaaggacaaaggttacgttcagttggtatttacttgaaaaaccctgttttttgtcatggccagttatacgttgctctttcccgagtcacttctcgcgcaggcttaaagatgccttttgatctgttctgtgatatatctcccacgagtaagaattggaagatctgtgcaacaatagcaaggaatgaatcttgtcagcctctaggtgcatcgaagaagctaacttttgaggtgggcgcgtccgaaggaaaggatatagatacagctgttgtttcagaaaggcaatggacgcgtttgaatcaagtccttagttatgtgctctgctcttgttctgtgattcttgttcacgcgaagggagatacagccatgaatccacctaggtttttcacggttagactaaccacagcaaaccagcgctatgtgcgcagaccagctgcaatcgcacaaggatatcagctggaggatggccagagactcaaattagtaacaacccataacctaatggtctacattgaactaaagagagcatctggcaaaatatacatcactacaggatggccccagttcatagaagccactggtttgcagcttaaagaatatgtggcaacaccaaacgcactatcaatgaaatgtgcttctgcaccggggagggacatcaatctatcaactgaactcaaagactacttcaaagatattgcgcaatttctgcacccctcaaacgaattctatgtcacaaccataaatccaactttcatgaagcaggataaggtgcacttttcaaagcaattctctatgacatacattgcactaatcgtgcggaagaagacatcgcagatcgaagtacggattccagggcactcctcaaccaccatggttcttcaccactccacagaaaagcgctttaacctgaaatcaggatggacccattttccaacaagcaacggcatacaagttggaacaatctgcatctttcacttccaccagactaatcagctgcaagcaacaatagatgtgctgtgagcaagatgctcatgcaacacaagctgttatccttttaatatcgtaggctatattttcactctgctacttctatagctgttagtatcattctttgtatgctttgcatgggtactcaatttccatgtaaaaatcacgcccaaactattatgccagcgtgctgttacagaacaggagctgacggtaccttacgtactgtctttggttgttttgcttgtacttatatgcaaccaaagacaattcaccctgtcctgtatgaacaaccatgctatcatattctgtttcacctttatctttatgtgtatgcagcaccct

SEQ ID NO: 28385 - DNA, 468 bp, Oryza sativa
  Clone ID: PAT_MRT4530_32990C.1
atgccgccaccgcccgccactgtcgccgcgctccccccgcccccctctggccagatatgggagggaggggccaggagctgccgccaccgttgtcgggagccgcgctgcctcgcctcctcgccaatgccacactccgtccccaccgcctgccgccaccgccgcgctcccccctcccccttccagccagatctgggagggacgggccgggagccgccggtagccgtgcttcccccgctcccctccagccagatctgggaggggggggctgggagccgccgccgccgcctcaaacccccttgtcacgcgccgcctcgcctccttgccgctgcggccctccgccgccaccgccaccgcccgccgtcgccgtcgggagcacacgccgccacccccgggagccgccgccgccttcggttggtggccggggagagtagaggtgaggggacgggagaggccgatgaggagaggtga

SEQ ID NO: 28386 - DNA, 522 bp, Oryza sativa
  Clone ID: PAT_MRT4530_32991C.1
tgcaaggcacgtccccccgccgggtctctcggctggccgctcgtcggcgagacgctgcagttcatctccgccgcctactcctcccgccccgagtccttcgacgagaagcgctgccgccggagaagcaccaccgccgacgccatggcaccggcagcgcgcgtacgtagtaactgcgtctgtggagctgaaaatatctcttgttcttgctgatcgattgattccggacgtacgggaaggtgatcaggacgcacctgagggggtcgccggccgcggttagcgcggacgccgaggcgagccgcgcggagctgcaaagcgactcagtagcgttcgagccacggtacccgatgctcctgatggagctgatggcggagtcatgcatcctggtgctcggaggcgcccttcagtgcccagtgcacggactagacagcgccttcttcaaggcggcggagctcaacgtccggttcaccgccaacatgctcagccggctctgcggcgccatggacgcgtggagagacagcgccg

SEQ ID NO: 28387 - DNA, 678 bp, Oryza sativa
  unsure (1)..(678): unsure at all n locations
  Clone ID: PAT_MRT4530_32992C.1
gtgtactatagcccatttgtttgttgaaaacattccctcctttngtacccaaaacatcaagnttcaccccgttgaacatcgtcacgagcaatatacttttcatttttttcttagaaatatacatgattgttancgaccaaatttggtaatgtcatggcccggattcaaagttagagccaaagcctatttggagaaaatccgttcgagaaggcagagtacacatcggctactagcagcatcggttgtcgcataaatcagctacaggcggtatcagctgccgcatgttcgctagcgccaaatccgacagggtcaagccgattcaaccagtcccgaaaaagatggccccacgactgtcgtcaagatttgtcaaagcactacacagccattgccgcacaaggattggagtcctaaaaagggcaattgtatatgttaattaggacattttcagtttccttagggatatgtttggtaagagtccaccaaagaacttatttgtattttaagttgtgttagagaacttatttgtattttaagttgtgttagagataagactcatgtccagaaaggacatattatgtacttcgggtataaatatgacccgacaccttgtaatcaagggacgacagttcaataatacttcggcgcatcgccacccttttctaaaaaaaaaaaaaaaaa

SEQ ID NO: 28388 - DNA, 107 bp, Oryza sativa
  Clone ID: PAT_MRT4530_32993C.1
cggcacgaggctgcagcttaagatggtaatttgtagcggccgctttacagtgagtgacaatttccactcaaaattttgtagttcaaaaagataaatgtttccttggc

SEQ ID NO: 28389 - DNA, 151 bp, Oryza sativa
  Clone ID: PAT_MRT4530_32994C.1
tcgtgcctcattgcgggaaagagtggcttcttccgtgctctcccaaatgacggtctagcacatgcctatcgcacattaggaggcgaggcttagaggctcatgcataatatacgagagccgtcctatgcatacactgccgtccaatacacga

SEQ ID NO: 28390 - DNA, 862 bp, Oryza sativa
  unsure (1)..(862): unsure at all n locations
  Clone ID: PAT_MRT4530_32995C.1
caccttcatgagaaatcacaacacaagacaacgctatatggagtagtctagcatgcatcacatagccatgaagaactttggcatactctctatcctcggcctcgtatcgagcagctcaccttctcactgttgaagctcgcacctatgggcaatgcccgtagaaaccggttatgcaaccggtcatgaacccgggcgtggggtatccgaggccaccccgcctcccccagagcccacctttgtagccccctcccctccctccatttatcagttgttacctgcttccgtctcattttctcccccccccccccgccccccccccccccctccccccccccccgccccctcccccccccccccctcccnccccccccccccaccctccccctttcccccccccccccccccccccccccctcctcccccacctccctccccccccccccccccccccctccccctccccccccccccccccccncccccccccccccccccccccccccccccccccccccccccccccccctccccccccccctcccccccccccccntcccccccccccccccctcccctccccccccctccccccctccccccctctctcccctcccccccccccccccccccccccccccccccccccccccnttccccccccccccccccccccccccctcccccctttttccccccccccccccccttctctcccttctntccccccccccccccctcccccccttcccccctttttctcctcttccctctttcctccctcctccccctctttctccccctccccctcccctcccccccccccccccccccttccctcccccccccccctcccccccccccc

SEQ ID NO: 28391 - DNA, 2259 bp, Oryza sativa
  Clone ID: PAT_MRT4530_32996C.1
tcacctctccctctctcttctccatgggccgcggacggcggagcagcgtgcgggtgggcgcaggcggaggggcagcagctgcacgagcggcggccggcgagggccgtcaccgcgtcgtcggccggatctcctctcccgcctcgcgcccgttggcctcgtctggctctccatcgaagaggatgcggcgaggagggagttggcaaaggggcggacgggaggatgcagcggcactcgatctctccgcggcggagagcgcggacgggaggatgcggccggcggaggcggcgtgcgagcggagcggaagcggaggcgcggcggtggcggcaggcgacgccccacgcggccaccgccaccgaacaaaaaaacaagaaggacgcttccgccgccgaccgccgctcgccgcactccggttgccgtgccgccgctcgtcgccggccaccctccgccgttcgtcgctagccgcacgccgccgagcctgagagccgatgcacgtcgctggcccccaagccgccggtcgacgccggcaactgtccgccgaccaccgtgcaagctagccaggtgcccaggtccaacctgcatggcaaagaggaggcctaggaggttgcactcctcgtcggcgacgaaaagcagcgacgacaccgactcgatggcgccggagcgcgtcccgcttcttgccgtcggagcgcggcctcgccgagccgcgggtttgtcacgaccgttccaggtgagcatctccaccagccggtccaccatcgccgctgacgtgccgacccgccggagcgcgacctcgctgagccacgggttcgccgcgacgttgacgaggatcccgacacggccgcggccgcccgtcgcgccatcctcctcgccggcggcattctcctgcacatcagaatacaagcctgctgccagccagtttttcatgaagcccttcttcacccgtttcataagctctataatgtaatcacctttactgttgtacttggtacaattatcccatataaattgcacgtccttatacacatcctctgagttcatatacttatcaccacgttctagattttgacatattgtgccaaaatccataggagtatcaataatatcaaaataatcaggtattcctagagcaacaggatccaccggtgtgttgaacggctcagctgcatccatcttcatgactttcttaatagcctccaactcttgtgagcttctcagctccaatgcagtctcgctttctacattttccaatacagtttcctgcttgcttggaagaggttcactgactgaatcagctttcctgtcctggtttttatcttctaccgaagataatcctacagacttgatctttatgcttgctacttttcttgccaccttatccttatcagaaccactcaattctgctgcctgcgcatctttctgtccgtctggtgatacaatagccttctccgcaacaacttctttgctcgcttcaggcgcagcacttgcaggtttaccaccaccaccatcaacaggtgcttttgcttctgaaggaccctggtgcgtctccaacactttggcagatttgaacttcaacctgactcggctatagacttttggcttagcattctgtacgtcagtagacacggctggcttctccggctcaggaggtgccggttcaggcactggtggcggagcaataacaggcgcattatctgcctgatgatgcgctgggctggtgccgttctcctctgtgcttgggctggagggggactttgaggaagcatccacggtgctcgggctggacggggacattggagaagcatccgctgtgatggaagctttcaacttgcccttcttgcccatcttacgcccacgcttgcgcttcatcttcctattagtttagctatcacctcaccacacaggccagcagagaagtacacacttctccttcctctcctggtgccctcatgctgggaggtgaaggaccacgcaggccccacctccaatccaatcggatgaagatcaagacgacgttgttgctgatggcggagggcggagtcttctccctggcgggggtggcggagaaagcggagaagagcggcgtggaatcgacggtcggtggtcttgcggcaaggcgttcctccttcttttcctcccgcggcgcggcgcggcgctgcgctgcgctgatcgggggcggcgagggaggagattagggttagggttaggggaggctgcggcgtcggcgtgacgagggagaccgcggcccgaattcctgcagcccgg

SEQ ID NO: 28392 - DNA, 2153 bp, Oryza sativa
  Clone ID: PAT_MRT4530_32997C.1
tttgaagaagaatcggcccaaatactaattaaatcttttgacaccaacaatacaattataaggttcaagtacaaccctactccagcgcggtaagcaatgtggcaacatgtgactatcacaattatcttgatacaaatatgaagcttacagccttacacatagataattgtcatacaatagacaggtatctcccaactaatttcgtacctaaatcaagctatagcctctgagctcaaagatatgtttcaactaacctgttttattccaaccagctcccgtgacttcagggtacagctttctttcccaaagtcacaacgctgccttgagcttcctttacacgaaacggctgctgctaagcagccattggagggacaaaactcctaccgtttcattatcgctgttatggccgcatgcagagggcttcccttcattgaaacctgccgctgttgctgtcggaacagagaatggcgtcccctgaaaacagaactctggttgctggggaaaagccgtgcgcagagttgcaagaatgattggttctccttctgtatgggataatcctccatttcaatctcctggcttgtttctgttggctccttatgttggtgttgtgcaatttcggagccatcattgggctgactggatgtatgttcctcctgactgatcaaatccgtatagtctacctcttctttttcgtcaaagtatggtctggagccttcatcctcataatcatgtggcagtggctggttgttgaagaatttcacatgattttctatcagagtccctgaatcatctgctaccactgttcttctgtacatatcagtttgtggtggttgctcctgactagaggtagtgtcatgactaccagcgttattaatgcctgagtctacctccatgatttgctggtcagaaatgttactattcactgcagctgtatcgttttcaatgacagccaagatttcatccttttcctttttgcggcgtgtaacttgacaaacagcacatgcacagtcatttttgtgtcgatcattccctaggcgccgccgtttttgcttagacttgccttttgaacctttgacatcctcatcgcctgtgttatcattgccaccattctcctgcgcatcagaatacaagcctgctgccagccagtttttcatgaagcccttcttcacccgtttcataagctctataatgtaatcacctttactgttgtacttggtacaattatcccatataaattgcacgtccttatacacatcctccgagttcatatacttatcaccacgttctagattttgacatattgtgccaaaatccataggagtatcaataatatcaaaataatcaggtattcctagagcaacagggtccaccggtgtgttgaacggctcagctgcatccatcttcatgactttcttaatagcttcaagtgcagcagttagctctctgtcatctcgctgacgttctggcgtagcctgctttacctccaactcttgtgagcttctcggctccaatgcagtctcgctttctacattttccaatacggtttcctgcttgcttggaagaggttcactgactgaatcagctttcctgtcctgatttttatcttctaccgaagataatcctacagacttgatatttatgcttgctacttttcttgccatcttatccttatcagaaccactcaattctgctgcctgcgcatctttctgtccgtctggtgatacaatagccttctccgcaacttctttgctcgcttcaggagcagcacttgcaggtttaccaccaccaccatcaacaggtgcttttgcttctgaaggaccctggtgcgtctccaacactttggcagatttgaacttcaacctgactcggctatagacttttggcttagcattctgtacgtcagtagacacggctggcttctccggctcaggaggtgctggttcaggcactggtggcggagcaataacaggcgcattatctgcctgatgatgcgctgggctggtgccgttctcctctgtgcttgggctggagggggactttgaggaagcatccacggtgctcgggctggacggggacattggagaagcatccgctgtgatggaagctttcaacttgcccttcttgcccatcttacgcccacgcttgcgcttcat

SEQ ID NO: 28393 - DNA, 279 bp, Oryza sativa
  Clone ID: PAT_MRT4530_32998C.1
atggggatcgaggtgggtgcggccgtcgtgctcactacttgctgtcgatgcccctgcgcactcaaccccacgaaggtgacagatgaacacgagcaggaggccgatggcagcggcctcggagacgctgacatagagcaagaggagccatcaccaccggcgcgcggagctactagctgctggcctcgagcgcgacgaggaagttgtacgggaatgccgtggaggacacgaggatcacgccgtcgagaacttcggccgccacagtgcgcctacgcgtcttag

SEQ ID NO: 28394 - DNA, 1659 bp, Oryza sativa
  Clone ID: PAT_MRT4530_32999C.1
ttagggcagcgcgagctcgccggcctccccgtccccctcgtgcggtcggcattggcggcgcgcggctacagccatcatcaccgatgcggagaggagggccgatgcggcggcgacggcgtcactcgggatcggcttggcgacggcggatggcgtcagcttcacggcggcggcccactccgatcgatgcgccgaggccgccttcgctccactctgcttcgccggccgccgcgcgctcgcccgcttgccgccaccgctccactccgcttcgccggccgccgcgctcgcacgccgcctccgcttcgccggccgctgcgctcgcacgacggcatcgccaacgcaaacggcagccacatcggcggcgccgtcgtcttcaatctccccttcctctgccgcctcaccccgacgacgaccgccgcgctcctcctcgcgcgacggcagccattggcggcgccgcccgtcccatcggccctcctgtccgcgctgctccttccccgtcagccgccggccacgccggccctcctccacgccgcgtcgaagacgatcgagctcctccgtgatctcctcgaactcccaagccatcatgcccttctgcccaccgccaccaaccttgccatcgatgcctctaccgtcgtgagacatgggaaaggggtcgctttgaccccgcgtcgtcggccggatctcctctcccgcctcgcgcccgttggcctcgtctggctctccatcgaagaggatgcggcgaggagggagttggcagaggggcggacgggaggatgcggcggcactcgatctctccgcggcggagagcgcggacgggaggatgcggccggcggaggcggcgtgcgagcggagcggagcggagcggaagcggaggcgcggcggtggcggcaggcgacgccccacgcggccaccgccaccgaacaaaaaatcaagaaggacgcttccgccgccgaccgccgctcgccgcactccggttgccgcgccgccgctcgtcgccggccaccctccgccgttcgtcgctagccgcaggccgccgagcctgagagccgatgcacgtcgctggcccccaagccgccggtcgacgccggcaactgtccgccgaccaccgtgcaagctagccaggtgcccaggtccaacctgcatggcacgctgcccaccgctcaccgctcttccgatcaggacttcctgaactctatggcagttcttgccgattatatatttcgatggcgccggagcgcgtcccgcttcttgctggcaagcttggacacgacgagcgcggcagacgccatggcggcggccctcggcggcgccgttccaggtgagcatctccaccagccggtccaccaccgccgccgacgtgccgacccgtcggagcgcggcctcgccgagccgcgggtttgtcgcgaccgttccaggcaggggcggatctacccattaggcggggtgggcatctccaccagccggtccaccatcgccgccgacgtgccgacccgccggagcgcggcctcgccgagccacgggttcgccgcgacgttgacgaggatcccgacgcggccgcggccgcccgtcgcgccatcctcctcgccggtggccgcccattgcagagaagctaaaaccggggtgaaaaccaccgagggatctcgagtgaccggttttgtatag

SEQ ID NO: 28395 - DNA, 4422 bp, Oryza sativa
  Clone ID: PAT_MRT4530_3299C.1
atgtcgacgactgcacccgtgcgcatccaacttgcgcccaggaacccacctccgccagcagctcccgcagcacctccagttccgcccgcagttcctgcagctccagcaccagctccagctcccgttcacatgtccgctcccgcgtccgctctctccttcgctccagcatcagccgccaggggtccagccagtggcaacggaggttgcttgtttgggatggtctacaccaggaatggtagccgcgcaacaggcgagggcagcaacggcgaagagcgcactgagggtgtgcatcccaacagcaattccggcaatgttccgccaccacttcccgagaatccgacgctagcccaagtgatggcacatcagactcagatgatggcagccatgatgcaacagatgcagcagcagcaccagcagatgtaccagaggatgttgcagcacgccgaacagcagcaccagcagtttggtccccctccccctcagtccaagttgccagagtttctacgtgtcaggccacccaccttctccagcaccaccaaccctatggaggcgaatgactggctccatgccatagagaagaagctgaatctcctgcagtgcaatgatcaggagaaggttgctttcaccacacaccagcttcaaggtcctgcgtcagcttggtgggataatcacatggccacccgcccaccaggtactgaagtcacttgggcagagttctgccgtagcttcaggaaggcgcaggtgccagacggggtcgtggcacaaaagaagagggaatttcgggcactccatcaaggcaacaggactgtgacggagtatctccatgagttcaatcgcctcgcgcgatatgcacccgaggatgtccgtaccgacgccgagaagcaggaaaggttcatggcaggtctggatgatgagctgaccaaccaactgatatctggggactacgccgactttgagaggctagttgacaaggcaatccgtcaggaggatcaacgcaacaagatggacaggaagaggaaggccgctcagttcagggcacctcagggaagtcaccagaggccgcgcttcgctcccgggcagcagggtggacctaccaccatgatcgttcgccagtaccgcccgttccaccctagcaactttccccagggcgccagtggcagtcagaaccaccatggaggtcagcccaaccgcggtgcagctccacgcccaccaatggcaccggcacagtccggcccgtccgcgcaagccaggaaggagactggagcaaaaccagggtcttgcttcaactgtggcgagcttggccacttcgccgacaaatgcccgaagcctaggcgtgccgggccaaggtttatccaggctcgtgtcaaccacgcatctgcggaggaggcacaagcagcaccagaggttgtactgggtacgtttcctgttaactcaatccctacaacagtactttttgattctggtgcaacgcattcgttcatttcaaagaagtttgtcgggatgcatgggttaataagagaggaacttagcacaccaatgcggctgaccaagtttaagggagtcatcgattgtgtgaatcgcacagtcaccctgaccaacgagaagggagaaacggtagtgtacaaatcaccaaactcaccaaagcaaggggtctccttgaatcagattgaagcggaaatcccagtggtcaccatggagaagaatttgaggaaattggaagatatccccatagtctacgagtatccagaagtgttccccgaagacctcactaccatgccacccaagagagagattgaattccggattaacttggcaccgggaaccgctccaatttacaagagaccgtacagaatggcggccaacgaactagcagaggtcaagaagcaggttgatgagcagctgcagaaagggtacattcgaccaagtacttcaccttggggtgctccagtcatttttgtggagaaaaaggataagacgaagaggatgtgcgttgattatcgcgcactcaacgaggtcacaatcaagaacaaatatcctttgccacgaatcgatgatttgtttgatcaactgaaaggagctaaagtgttttctaagatagacctgcgatcagcctaccaccagttgataatccgggaagaggatattccaaagacggccttcaccactcgcaagtgtgacttctggttaacggaagtcaaatttctgggccatgtcattacagctcaaggtgtggcagttgatccatcgaacgtggagtcagttaccaaatggaccccaccgaagaccgtgtcgcagattcaaagttttcttggacttgcgggatattaccgccgattcatcgaaaacttctccaggatcgcccgacccatgactcagttgcttaagaaagatgagaagtttaaatggacagctgagtgcgataagagttttgaggagctcaaaaagaaattagtatccgcaccagttttgattctgcccgatcagatgaaagacttccaagtctattgcgatgcatcccgccacggacttggatgtgtcctaatgcaagagggcagggtggttgcgtatgcctcgcggcagttgcgtccacacgaagggaattatccaactcatgacctggaattggcagcagtggttcatgctttgaagatctggaggcactatctgattggcaaccgctgcgaagtatatacggaccataagaatctgaaatacatcttcacccaaccggacctaaatctccgacaacgaagatggttggaactaatcaaagattataacatgagcattcactaccacccgggtaaagccaatgtggtggcagacgcattaagcaggaaaagtcactgcactgccctgtgcatcgagggcatgtgtgaggaattgcggcaggactttgagcatctcaacatgggaattgttgaatacgggttcgtagccgctctggaggcacggcctacgctcgtggataaagtcagagtagctcaagtaaatgattctgaaatagcagagctgaaaaagaacatgagagtcggaaaagcccgggatttccacgaagatgagcatggcacaatctggttgggagaaagattgtgtgtacctgacgacaaggaactgaaggatctgatactcaccgaggctcatcagacccagtactccatccatccaggcagcaccaaaatgtatcaagacctcaaagaaaagttttggtgggtcagcatgaggagagaaatagctgaattcgtcgcactctgcgatgtttgccaacgagtgaaggcagagcaccaaagaccagcaggtttactccaacctcttcaaatcccggaatggaaatgggaggagattggaatggactttataataggactgccctggacatcatcgggtcacgattcaatctggatagtcatggatcgactcactaaggttgctcacttcataccagtacataccacgtatacgggcaaaaggttggcggagctctacctctcgagaatcatgtgtctacatagagtacccaaaaagattgtatctaaccgagggagtcagttcacctcaaaattctggcagaagctgcaggaagaattggggacccgtttaaatttcagcacggcctatcacccgcaaactgatggtcaaaccgagcgagtcaatcaaatcttggaagatatattgagagcttgcgctcttgattttggtggagcttgggacaaaagcttgccatatgcggaattctcgtacaacaacagctaccaggccagtctacagatggcaccgtttgaagctttatacggccggaagtgccgcacacccctcttctgggatcagacaggcgagcgtcaactgttcgggacagaggtattagcggaagcagaagagaaagtcagaatcatcaaggaaaggttgaggattgcccagtctcgacagaagagctacgcggataaccgtcgaagggagctcacttttgaggcaggggattacgtgtatcttcgtgtcactccgctccggggagtacaccgctttcagacgaaaggcaagttggtaccacgcttcgtgggaccatacaaaatcctggaacgaaggggggaagttgcttatcagttagaacttccatccaatatgatcggcatccatgacgtgttccacgtgtcccaattaaagaagtgcttaagggtacctgaagaacaggctgattcggaacacattgatttccaggaggacctaacatacgtggagaagccggttcatatacttgataccagcgaaagaagaaccagaaacaaggtcaccaggttttgccgagttcagtggagtcatcattcagaagaggaagcaacctgggaaagggaggatgagttgaaagccgcccatccgcacctcttcgccagctcctccgaatctcggggccaagattccgtttaa

SEQ ID NO: 28396 - DNA, 263 bp, Oryza sativa
  Clone ID: PAT_MRT4530_329C.1
catgtgcagagtgcagctttcttttagccatgcactggtccatctccatccgtgcatggatgtatgttgtgttcagtttctgcatgtttgttacacctagtttgatcggtttggtgaatgttttctagttgggttcaaacttccctgttaaatttcctgcgtgaataaaatagagcatactcagtatgcatgagcatattggcatccaatataataaatttttttttgaggcttgaagaacactaccattttgttgcccttaa

SEQ ID NO: 28397 - DNA, 800 bp, Oryza sativa
  Clone ID: PAT_MRT4530_32C.1
ctacctggctgcgagttcatcaaacatctgtccttcctgatccttagatctattcatccaatggcttatattaaaagttggatcacccccgtcctttccccaaaccgccgggcgcaccccaccgccgttgggcattccccaccccgtgtcaccgccgtgccttccccgctgcctcctcaactcctcgccgccaccggttccgtgggaggggttctccttggctcctattgctggttcggtttctgtgcgcttgccgcttggttcagctgctgctgcgcctagaggccacgttgttagcaatgacagtggccgttgggggttaattagcaccgccagcttgtggggatcaaagagtaccagtggcagcctcatgtgcttcttgttgatgcaaattttgtttttctcctcccaccgcttggcccagcccacatatgtgactgactgtgtcacagtccccctgaattgaagaaacggctctggagtgcttatgttcttcccctgttggagctggttcttccttaggcctgtagcaatgatccacttcattgtcacatattcaaacaccatgtactcatgaggtatgcagtattttgtatacagtttcatctcagaagaaaaaactaaacttttgcatctaaaaaaatccgcatgccatttggctcataattatattggatagttttttgtttggtgcaacattaatttgatttggtacaaaaatttcttaactgaacttcttgcgcatctattatgaactatggaatgattacaattatgaaacatgtcatgttaatttatgg

SEQ ID NO: 28398 - DNA, 544 bp, Oryza sativa
  Clone ID: PAT_MRT4530_33000C.1
aggggggggagttttttttctgttctttcgataaaaatttgtcttgcattcatgccggtagcacaaatacatcggttttatgatgaaggaaagcaaatttcattgccagatcagtggtgaaatggatcttttttgacctactagaaagagtacattgctgacaacaacgaaatatttcagcgcccaaacaggatgaacgccaggaacagatgtatgcagattatggcaactatttgcttctcttgaccgcacgccttccctggcccttctttggaggacccttcccgcgacgcttaagcatttccagctttgacaaacgcgccttctcctcgcgcgccatgacgagcgggtcgtcgcgcttgatgtcgtaggggtaccactgcgcgagctgctcgccgaccatcttcttccgcagcagcttcgtcgccgcgcgcttccccgtcgggttcagcgcgtgcccgaagatcgccgcccgcgcctccgccacccccgtcgtcaccgccgccgccagcagctgccgcagcccgcccacccccgcgctcat

SEQ ID NO: 28399 - DNA, 2980 bp, Oryza sativa
  Clone ID: PAT_MRT4530_33001C.1
ctctttctctctcctttcccctctctctctctctctatttagttcttttgcccccatgtcagctgcagtctgggggaatctgaggctgctgctcacctgagagactgaaaggaggcagaagcagcagcagcatcagcatcagcagcagagcagatagctgagctgcagagggggaggagagaagatagtagtggtagtagtagctgagctgtgtcaagattgcccttcaaattcatcatcttttgctcttgtgagaaaagcctttttcagctatgagctctgattgatgatgacgatgatggcggctgtgcagctggaaaagcttcttcatccttgtggtagtggtaaaagctgtgggaaatttcatccataaagatcgccgtggccctcgaattccgtttcagtttgtttgtgtcggagctgatcgccggaggtgaacgattcttgcgtcgaagagatgataactttcgtggattccgcggcgaaggagcgggagcgggagagtgacaagtgcttggacccgcagctgtggcacgcctgcgccggcggcatggtccagatgccgcctggtgagctccaaggtgtactacttcccgcaaggccacgccgagcacgcgcaggggcatggccccgtcgagttcccgggcgggcgcgtcccggcgctcgtgctctgccgcgtcgcgggcgtcaggttcatggccgatccgggacaccgacgaggtgttcgccaagatccgcctcgtccccgtccgcgccaacgagcaggtgtacgccggtgacgccgacgacggcattggcgccagccttagcggcaccacctcgccggcggccaccgggaacagctctctcaactggaacaccgagaaaggtgcctcggagggctcgggctccggcgtcatccagaacagccccaccgacaacacgtcgttcggagaggctccagtggttcagggagaacagcaccgtctccgagctcgggctggcgtggtctggaagttccgccacatctaccgcggcacgccgaggcgccacctcctcaccacggggtggagcaccttcgtgaaccagaagaagctcgtcgccggcgactccatcgtgttcatgcgcaccgagaacggggatctctgcgtcggcatccgccgcgccaagaaagggggcgtgggaggcccggagttcctgccgccgccgccgccgccgccgccgacacctgccgccggcggcaattacggcgggttctccatgttcctgaggggcgacgacgacggcaacaagatggcggcggcggccaggggcaaggtcagagcccgtgtccggccagaggaggtcgtcgaggcggccaatctcgccgtgagcgggcaaccattcgaggtcgtctactacccgagggcgagcacgccggagttctgcgtgaaggccggggcggtcagagcggcgatgcggacgcagtggttcgccggcatgaggttcaagatggcattcgagacggaggactcatcaaggatcagctggttcatgggcactgtatcggccgtgcaggttgctgaccccattagatggcctaattcaccatggaggcttcttcaggtttcatgggatgaaccggacttgttacagaatgtgaagagggtgagcccatggttggttgagcttgtgtcaaacatgccggccatccaccttgctccattctcgcctccacggaagaagctttgcgtgccgttgtaccccgagcttcccatcgacggccaatttccgacaccgatgttccatggaaacccgctcgcccgtggggttggtcctatgtgctatttcccggatggcactcctgcaggcatacagggagccaggcatgctcaatttggtatatctttatcagatctccaccttaacaaactgcagtcgagtctatcgccccacggccttcaccagcttgatcacggcatgcagccgaggatcgccgctggtctaattatcggtcatccggctgctcgggatgatatctcatgcttgttgaccattggtagcccccagaacaacaagaaatcagatggcaagaaggcgccagcccagctgatgcttttcggaaaacccatactcacagagcagcagatatccttgggtgatgctgcttcggtggatgttaagaagagctcttctgatggtaatgctgaaaatacggtgaataagagtaactccgatgtttcaagcccgagaagtaatcagaatggcaccacagataatttgtcatgtggaggagttccattgtgccaagacaacaaggtacttgatgttgggctggaaacagggcactgcaaggtattcatgcagtcggaggatgtcgggcgcacacttgatctctctgttgttggttcatatgaggaattataccggcggcttgctgacatgttcggcatcgagaaagctgagctgatgagtcatgttttctaccgtgatgcggctggggcactcaagcacactggagatgaacctttcagcgagttcacgaagacggcgcgtaggctgaatatactaacagatacaagcggcgataacttagcgaggtagggtaaattaaagctattctcaattgtacagctggtggagcacggtggcaattttgaaggcaaaaattgccggtttcctagtactggtgcaatttcaaggaggcaattcagttttctttaattagagctcccagaatgggattgactgtaatccggtacccatatttatcggcagatttaccagactggatctatcctactgtcatgtaaaccgatcatattgcatttgatcgttggtgtgtactcggccatgaaccgttactaaacgaatgcgattacgggaatttttgcgcgcaaatgcgttgaattgtctgaaaaaaaaaactacatctgcatgctctgtttgtagtccacaaaaaaaaaaaaaaaaaaaaaaaaaaaaaaactcgagactagttctctctctctctccctcgtgc

SEQ ID NO: 28400 - DNA, 579 bp, Oryza sativa
  Clone ID: PAT_MRT4530_33002C.1
atggagtccccctgcggatgctctggctccctcaagtacgcgcacagggggtgtgtgcagagatggtgcgatgagaaggggagcacgctctgcgagatttgccttcagaatttcgaaccaggctacactgctcctcccaagaaagctcaacctgcccatgtcgcagtgaccatcagagagagccttgaggttcccaggccaagctacgagccggaggacacgccgttgatcggcgagcaggattacgccgagtgcgccggagcggccggcaggagcgccacctggtgcagatcggtggccgtcacgttcacggctgttctgctgctgaggcatctcgtcgctgtcgtgacggtcggagctgcacaccagtacgccttcagcctcttgacgatatacttgctccgggctagtggaatcttgctgccgttctacgtcgtcatgaggctcatctccacggttcagaagggtcagaggcaataccagctgcagctgctccaggagcaaaggagaaatgcagctagaatgcacaggttgcatggtcaagaagaacaaaatcaacatgccattcttgtccggtga

SEQ ID NO: 28401 - DNA, 225 bp, Oryza sativa
  Clone ID: PAT_MRT4530_33003C.1
atgtctccagggagaggagcggcgaaagcaccgccgtcgtcgtccgtcgaggtctcagggagaccaggactaggttttcactcgacaggccccctagaggagatgggacagcatggcaaggccctcaagagggaaagggacgctcgagaacgccctcgttgccagctcggccaagtctgggctgggttttcacccgctgccgaccacctgtctatccacaactga

SEQ ID NO: 28402 - DNA, 1311 bp, Oryza sativa
  Clone ID: PAT_MRT4530_33004C.1
ttagtcaggctctggtgagaggaggatcttgctggcctcatcatcattgagcgttgctgacatttttgtgttgcgatctttctggccctcagtttttattccactggtatccaatgtagcagagtcacagtcatgatcctctgaagaattgctgctgtggagcttcttcactctgccggcgaccaccctgcacaccagcatcgccctcttctcgccgtccggcgaaacctccgccgtgtcgtgcgcccgcccgctcgtcgccatcgtcgtgatcctcccattgccatccaccctgaatccgtctttgatgatgctgcagagcttgcagtgcagcggcggcggcgacgaggaggcgcagcagagggcggtgccgccggcgaggccgagggagcaggcgaaggtggtgcagtggaacctgaggagctcgttgccgtcggcgacgcacctggggttcctcccggcctcgtcgccggcgctcctcgccttctccttcaccgcctccttgtgctgctcgaacctcttgatggtcttgtccgagctctgcaccttgagtatcctctcgatcctgcacaccggcgcgttcttcttcagccagctcgactggaagatgatctccacgatgttcctgctcgtgtcgtccgccccgagctctgaaactgcgtgtctggttgatctatggagctcgagggagtcgggcttgacgaacacctcgtcgcagtcggggcaggagaagacgacggcggcgagggtgcgcgggtcgagcaccgagtggcagtggaggtagcagccggagagcttcctgatctgcatcgccctgaacgagccgccgatggatgacagcggcgaggacagcgccgacggcggcgaggttgccgacgagctggtggtggtggtggtggtggtcgcggtggcggatgtcgccgccgtcatcacagagttgaacgacgacgacgcggagacagccgccgcggagtcgccgtggtacccgggacccatcagcgacctgctcgacgtgctccctccgccgccgccatcgccgccgccgccgccgccgctccggcggcgccggcctctccccctgctcgacaccgaactctccttggtgctgcagatcgatccggcacacgtgatgctcctgctgatgctgctcctcctcttctccttcttgccaccattcttgccttctgctgcagacactggttggcttctggaggaagaagacgaggagtagaacgccatggatccccagcttccaaccctgctcatcttcttgccatccttgtctttctccttggctgcactagcttccat

SEQ ID NO: 28403 - DNA, 263 bp, Oryza sativa
  Clone ID: PAT_MRT4530_33005C.1
tctggcgcagccgaagcttctctcctctctctcaactccggcgagaggaggaggcggaggtggggcgttcgtcgggagagatccacggccggggggctagggttcggccgttcatataggcggcggctgtggaggacgacgaggaagacgaaggggtgtggatatatgtcaacccccggaaagaaactgctgatgcatgacttccatcggcttgatcaggaccccccctgtggtatcaaatgtgccgcgctcgacaacaacat

SEQ ID NO: 28404 - DNA, 465 bp, Oryza sativa
  Clone ID: PAT_MRT4530_33006C.1
tagaactagtggatccccgggctgcaggagagagagagagaactagtctcgagttttttttttttttttttggaagtttaatggacttttagtataggaaaaagtacgaattacacccctgaacttttgcgacagtatgaattgccctcccgaaccacaaaaccagacatattaaacctcaaactattgaaaccggacgaattacccccctgactcaatccggaacggttttggtcctgcgtggcatacacgtgacgtcgacgtggaaatccaatcagcaataaaataaaataaaataatatagggcccacatgtcatattaaccccttgttctctgtcccttctctgacgttggtgttgggcgtcactgggcgagcaactgcgggcacggcttggtggctctggccgacgatgggcgcggatgggagggggaatcggggggacgccgccgatctgttgctgcgg

SEQ ID NO: 28405 - DNA, 1445 bp, Oryza sativa
  Clone ID: PAT_MRT4530_33007C.1
atggagtatatggtggagatacatggtggggccaggagggagacaatgcgcatcaggagggggagcgtccgatccggctcccccgcgccggtcgcccggagcactgccaccagcttcacagttcatggaagagacgggcgggcgatcaggtttttggggagcgcaaggcgcgactactcactgttcgtcaacatctacttcatcttcaccaacgtgtcgaacactggagacaaggagaaggagactcctgtcaacaccaacggaggcaatactgcctcaaactccagcggaggaccattcttggggggaagtagagatacggtggctcaggaggaaggagatggggaggaagacgaggaggccgtgacgacggtgacgagggagaaagcgaggcgcggccggcgcggcgacagcgaccgcggctgccgcggcggtgggggaaggcggcgagatggaagagggcgccgcgggcctgacgaatcccggcgcggcagcggcggccacgcgagccacgctcggctcggcgaggcggcgaccgcggcggcggttcggccgggcgaaggcagaggcggcgacgtggggtggaggcgctggtggagagcaggaaccgggagggaggatggcgcgacggcggcggcggcgttcgaccgagcgacgcgctggcccgagtgcgcgaggcgtgctcgacgcggcgtgacatcggccgggagagagatgaagacggcggcgacggtggtttcggtgcggaattggtgtggcggcgtgagctcgaggaagaggagcgagggggcggtggtctgggcggcgccgaacggcgtgaacgcggcgcacacgttcggtgtggacgcgcggctgtgggcgacggagcgcgagcacgcgaaggcgggcaaggaggagggaacgcgaccggatttcatcgtggtgtggagcggagcagtgcggcacggctcggggcggcacacgggactgtgcggagggcccacagtacgcgccaagaagccgtcgtcctccatcgccgccgcgctcgagacggagacggagttcgacggcggtgtcaacgggccataccggctggggcacgaaaggcggcggcgctgccgcctagagctcgatggactctttgctgccgccgtcagtgacggcggcgaaatcggcttcttctttgcaggcagtggtggcggaaacagcaacgccttcttcctcggaggcagcggcggcgtgaacagcagcggcttcttctcctcaatcgacggcggcggcggaggcgggacgggagcgacgcagaggcgggaggggagggcgagtgtggcgtcggggccgcgcagcgctctcgtcggccccccccgccaccgcctccacctccccttcctcctcaccgaccgccacgcggcaacgcgagggagagggatggaggcggcggcggggggagctcccatgcgcgtcgt

SEQ ID NO: 28406 - DNA, 364 bp, Oryza sativa
  Clone ID: PAT_MRT4530_33008C.1
aaaaaaaaaaaaagagtctgattgaggatgatgattcagggacagacgggcccaaccacatggaagggaatggaaaaatattgcgttgcatggttagggggaacaaaggggggggtggctgaaaaaaggccccccaaatcggccttttcctttcggggcctactactaaacaacggggaactttgaaaccctttttttttttttttggtcgatcgggggggggaaccaccaatataaccatgggggggggtacttttatggggggggctctggggggcctttttttacaagcatcctcctccatagccggggtttttgaacagctcctgttttatcatggccgggctcatcctctccctttgga

SEQ ID NO: 28407 - DNA, 2421 bp, Oryza sativa
  Clone ID: PAT_MRT4530_33009C.1
atgagaccaccaccaccccacctcctcctcctcctcccccgccgccgccgccacgcctcctcctcctccgccgccgccgccgccgccggagagctcgtcggcgccctctccgccttgccctcccccgactcggcgcgacacctcgacgccctcctccgtcgcatcggcggcggtggcctcgccgccgtcctctcgtccctgccctcccctctccccgcggcctccgccctccgcctcctcctccacctcctctccaggacctcctccacctcctcccgctccgaggatgacctcctcaccccgcgcgtctcggcgctcctcctgccctccctcatcgccgatcgcaccgccatccggacggcgcgccgcctcctctcacgactcctccacgtccacccgctccgcaccgccgcggaggcggtcgccgacgccgcctccaccccctcctcggacttcctcatccacaccttcatcacctccccggcccaaggctccctctgcagggccgccgacgcgttccgcgttctctcctcgcgcggcgcgccgccctccatcaagacctgcaatgcgttcctcgaagcccttgttcgtgcaggtcagctcgatgccgcccgcgaggtgttcgacgaaatgcgtgaaagcaggaacgtcgctctgaatgagtactcgtataccgccatgatcaaggcgctctgcaaggctggaaaggtggatgctggttttgagatgcttgcagagttatggcgggctgggcttcagccaacggttgtgacgtacaatgtgcttatggatgcactgtgtaagagtgggagggtggaggaggcctttcgattgaaagggaggatggaacagggagggatgacaccaagcgtggtcacattcggtatattgatcaatggtcttgcaaggggcgagcggtttggggaggttggcattgtattgcaggagatggaacagttaggggtttcccccaatgaggttatttacaatgagcttattggttggcattgtaggaagggccattgctcacaggcactcaggttgtttgatgaaatggttttaaagaagatgaagccaacagccgtgacttataacttgattgcaaaggcactgtgcaaggaaggggagatggagcgggctgagaggatattggaggatatgttgtcaattggaatgacagttcattgtggtttgttcaatacagtggttgcatggcttcttcaaagaaccagaagattggagtcagtggtaagcattacaaatgaaatggttacacgaggtatgcgcccaaatgatcctctgatgacagcttgtatgagggagctttgcaagggagggaaacatcaagaagcagttgggatttggttcaagacattgaacaaaggtttaggtgttaatcttgcaacttccaatgcgctaattcatggtctttgtgaaggtaagtacatgaaagaagctacaaaggttatacagaccatgttaaataagggaattgaattggatagcatcacatataacattatgattcgaggttgctgcaaagacagtaaaatggaggaagctattaaactccatggcgacatgaccagaagagggtttaagcctgatcttttcacatttaatactttattgcatgcttattgcaatttgggtaaaatggaggaaacctttcatctgttggatcagatgaaaactgagggccttcagcctgatatagtgtcatatggcactataatagatggtcattgtaaagcaaaggatattcgtaaagcaaaagaatatttgactgaattgatggatcgtggacttaaacctaatgtgttcatttataatgcacttattggtggttatggtaggaatggtgacatctctggtgcaattgatgctgttgagactatgaagtctaatggcatacaaccaactaatgtgacttatggtagtcttatgtactggatgtgtcatgctggtctagttgaagaggccaagaccattttttcacaagccagggaaaacaatgttgacctgggagtaattggttacacaattatgattcaaggttactgcaaactaggaaaaatggttgaagctgttgcatactttgaggagatgcgttccaggggtatatctccaaataagcttacttacactactcttatgtatgcttactctaaatctggtaacagtgaagaagcttccaagcttttcgatgagatggtgggctcaggtgttattcctgacaatattacttatggtacactaattgcaaggtgttctgaggtaaattcattggataaggatataggacatactgctgaattgtcctcaggcgctttaacaaaagatgatcgtatgtataacatattatctaatggaattaatgctccttggtgccagaaagaagctgcttccagtgttgaatga

SEQ ID NO: 28408 - DNA, 362 bp, Oryza sativa
  unsure (1)..(362): unsure at all n locations
  Clone ID: PAT_MRT4530_3300C.1
tnnnnccagtccaaatcttatgttttaatccaattctccactcattgttttaggtcccccaaaagggctcaaccgtaaccttttttgtccttttccttaaaaataaaaccctcattttccagttcccatctttttccccttcaaaaccaaattctacccccattggggtttccttttattcccaattcaccattgttttaaatttcaaacctccatcactggcccttttaaaattcacattttgttggtgggaaaacaagattcccccaaaggtttttcccctttgccatttccaccattggccaaaatccttttttcaaaccccccccacccttgaaatggagggccacgggggccctttc

SEQ ID NO: 28409 - DNA, 1220 bp, Oryza sativa
  Clone ID: PAT_MRT4530_33010C.1
cacggagaaggccggagcggtggccagcggcggcacgcgaagccggtggggtgatggcggccggtgcggcggcacccccgccgccgctgactcctcctgctacgccgccacatcgatttgcgccgccaactcccccttcgcatgtcgccgtctccgcctccgcctccctctccgccggcttcgcgcgccgtcaccgccgcactcacacgacgcgcatgggagctccccccgccgccgcctccacctcccctcccgcctctgcgtcgctcccgtcccgcctccgccgccgccgtcgattgaggagaagaagccgctgctgttcacgccgccgctgcctccgaggaagaaggcgttgctgtttccgccaccactgcctgccgctgaagaagaaaccgctaccaccacctctgccgccgccaactccctctcctctgtcttttcctccttgggccagcccgccctttccctcacccaggccggcccactccctctcccccttgaagtcagccggccggccgcacgtgcccgccacctgctcgacgaaatgtcgagccgggcgagcagcatgccgagacgcccccacaccctccgcacagtcccgtgtgccgccccgagcctgctccgagttcaccgccttcgcgtgctcgcgctccgtcgcccacagccgcgcgtccacaccgaacgtgtgcgccgcgttcacgccgttcggcgccgcccagaccaccgccccctcgctcctcttcctctgtttctctcaccatggccgccgccagtgcacccagtcccgccgccgccgccgtcgcgccatcctccctcccggttcctgctctccaccagcgcctccaccccacgtcgccgcctctgccttcgcccggccgaaccgccgccgcggtcgccgcctcgccgagccgagcgtggctcgcgtggccgccgctgccgcgccgggattcgtcaggcccgcggcgccctcttccatctcgccgccttcccccaccgccgcggcagccgcggtcgctgtcgccgccaccgtcgtcacggcctcctcgtcttcctccccatctccttcctcctgagccaccgtatcctcgcggcggacctccccgcccagcgcgggctcgacgtaggcctcctcgccgcggaacaccgcggtgagcgcgcagtcgttttggccatcgagctcctcgacgaggacctcgtcgggtaactcggcggcgcgcttg

SEQ ID NO: 28410 - DNA, 834 bp, Oryza sativa
  Clone ID: PAT_MRT4530_33011C.1
tcctcccagacctcaaatgacgccgacgaggatgatgttggggaggtgcgcaggaaggatggcgtgtttttggggagcgcaaggcgcgactactcactgttcgtcaacatctacttcatcttcaccaacgtgtcgaacactggagacaaggagaaggagactcctgtcaacaccaacggaggcaatactgcctcaaactccagcggaggaccattcttggggggaagtagagatacggtggctcaggaggaaggagatggggaggaagacgaggaggccgtgacgacggtgacgagggagaaagcgaggcgcggccggcgcggcgacagcgaccgcggctgccgcggcggtgggggaaggcggcgagatggaagagggcgccgcgggcctgacgaatcccggcgcggcagcggcggccacgcgagccacgctcggctcggcgaggcggcgaccgcggcggcggttcggccgggcgaaggcagaggcggcgacgtggggtggaggcgctggtggagagcaggaaccgggagggaggatggcgcgacggcggcggcggcgttcgaccgagcgacgcgctggcccgagtgcgcgaggcgtgctcgacgcggcgtgacatcggccgggagagagatgaagacggcggcgacggtggtttcggtggcggaattgaggaagaggagcgagggggcggtggtctgggcggcgccgaacggcgtgaacgcggcgcacacgttcggtgtggacgcgcggctgtgggcgacggagcgcgagcacgcgaaggcggtgaactcggagcagccaggcacagggcggcggcgtcgtggaggagcatga

SEQ ID NO: 28411 - DNA, 1108 bp, Oryza sativa
  Clone ID: PAT_MRT4530_33012C.1
tcaatgccacctgggacggagacctagtcaaacccgccaccaactccctctcctctgtcttttcctccttgggccagcccgccctttccctcacccaggccggcccactccctctcccccttgaagtcagccggccggccgcacgtgcccgccacctgctcgacgaaatgtcgagccgggcgagcagcatgccgagacgcccccacaccctccgcacagtcccgtgtgccgccccgagccgtgccgcactgctccgctccacaccacgatgaaatccggtcgcgttccctcctccttgccctagaagcttccgcccacctcccagtccacaccgtcgcctcctcgcgctcgagctcccgcagccgtgcgtccacgccaaaagcatgcgccgggctcatgctcctccacgacgccgccgccctgtgcctggctgctccgagttcaccgccttcgcgtgctcgcgctccgtcgcccacagccgcgcgtccacaccgaacgtgtgcgccgcgttcacgccgttcggcgccgcccagaccaccgccccctcgctcctcttcctctgtttctctcaccatggccgccgccagtgcacccagtccactgagccaatcgacgcgccacgagagcccgtgtctgtcgtccacaccgaaagcaaacaccgagctcacgccgccacaccaattccgccaccgaaaccaccgtcgccgccgtcttcatctctctcccggccgatgtcacgccgcgtcgagcacgcctcgcgcactcgggccagcgcgtcgctcggtcgaacgccgccgccgccgtcgcgccatcctccctcccggttcctgctctccaccagcgcctccaccccacgtcgccgcctctgccttcgcccggccgaaccgccgccgcggtcgccgcctcgccgagccgagcgtggctcgcgtggccgccgctgccgcgccgggattcgtcaggcccgcggcgccctcttccatctcgccgccttcccccaccgccgcggcagccgcggtcgctgtcgccgcgccggccgcgcctcgctttctcctgctcgggcgcgcgcgcgtgggaaagagaaggggaatcggagagaacgaggaagaaa

SEQ ID NO: 28412 - DNA, 794 bp, Oryza sativa
  Clone ID: PAT_MRT4530_33013C.1
ttttttttttttttttttttagacttttgtcatagttttattcaatcacaggcaatcattttattatgaaaatatatttcagctatttacagtacaggcaagcatctgcgctaattattctacatacaattctcaaatcgcgtgtgtcaaaaagataaaagaaaatcctataaaattgacataaaaggctctatacatgttattatgagccggccaaaaaagaaaaatcttatttgttggcttcaaaacttctttttcagtagctttacttgaactgctcttttttggcaaaatgcttcaatcctatcacaggcttcaagtatcacactagtaggggccccaaagaatatcctaatccagttctttaacccaattacagaaccaggtaaaactaggacagattcttctttaatcaattcacgagcgaagtccatgtcatcttcaacaccgaacagaagtgaagggttgacttcaaccatcatgaacatggagccatgaggttttgagtagcactgcaaagcttcaatctggttcactcttctgtagagagcatcagctgcagactcaagcaagttcacaacgtttcgatggaattcatggtgttcgtttgagagaatcttaggaactgcagcctgaactatggacgcagggcctgaagtcacattcagtagcatttctgttgcatttctgacatgcttgagtgcaccattggggtcacagacggccaaccaaccaagtcgccatcctggcagcccccatctctttgatagtgctccaatggtgccctcgggctg

SEQ ID NO: 28413 - DNA, 687 bp, Oryza sativa
  Clone ID: PAT_MRT4530_33014C.1
tcagtcacccggaacgcccgcgccaatcccggccgctttccatggccgccagccgacttttccgccgccgttcccacctctcccgtgcccggctccctcccccatcctataaaatggaaccccctcgctccgttctatcgttttagccccttcccgagctcccccgtggccacaccacctctccccgcctcctccttctctttcctcggtgccagccaccctccagccgcctgtgccgcctcgcccgtgcggcgtctgatgtcgccatcgccttccccggcactgcgacgccatcctcctccccggcctccccgtatcctcgccggaaactcgccggatcggtgtcctcgtcgacgtttggtggcgttgccggcactgtaccgccccagccgcctgtgccacctcgccagtgcgtcggctgtcgtcgtcgcctcctctcccggcacaacagcgccatcctcttccccggccaggccaccacgttgcccgaatttcgccggaacaccgccgtgccgcgctggcctctccctcggtctcgccggcacccactccggtagcccctgcctccgtgcccgtgtgccggccgacatcgccgtctcctcctccggcatcgcaacggcaaggtcgcccttggcctcgcctccccgtcggctgaaccccgccagtgttcgtcgtcgtcgtctccat

SEQ ID NO: 28414 - DNA, 1588 bp, Oryza sativa
  Clone ID: PAT_MRT4530_33015C.1
tcataggaactgacgcagcttgaggagctggggtgctgcaaataaagttgttgacttgatgacgctgacaccttgccgttgaacaacattcagagaagtgatctgccgtacatcttccatgaatgttgaacactttgcaagaaccactacacttctgaaaaggagggaacaatagcaaggctgagttcaaccaccgtactcagcaagccacaccaacgatgcagacgtgcaagggtattcaagaatgggtttcacccccacctcctaccccagaggtgggaagtcccctcgtgcaccgtggtgaatccggcagttggacaaccggacaccccggccgacccaactccaccacgcccaccctcgccaccggtgcctaggaaagggtcgagctatacttcggatcaagtagttacctactcccgcttgtggtaagcactataatatttatttttggcgtcacgaggggttgaggtggcaccgacatgagggccccacccgtcggtgactcaaagggggcggtccacggtggatcaagtccacgcgcggcacgggcgagagcaccacgtggcgcgcatgggcgccaacggggcaccgacgtggcaaccacgcgggcggacgtatggatggcccagatccgcaccggggcggatcgaacggctgagggggaggcagccggctcaccggccgcggcgggcagcgtggggagcagcgacgcacgcgtgggagcggcggcgcagcgctggcggcaaagaggagaaggaggagggggtcctcaccgagggcacaacgacggagggaggcggccggcagaggaggaagagatggaggcggtggcgcaccgacgacgggcagcgctcgggaaggggccgacaagcggtggctgcattacggagagggagaagaggtgcacggcgaagccgacggtgcaaggggtgtggcctagcggttgcaagggcggtggcagcacgcggccggaggcggcaaacgaggtggcggcctcgggtcgatggcgaaagcggagctctgcggtggactgggcaaacgaagtggcggccggccttgccattgcgatgcaaagccaatggcacaagcggcgagccgcggcgatggttgaagcggcgatggcgggcggctggaggcggcgaatggtggtggtgacgcgggtatgcggtggcggcagggtttcggcagtggattggggaaatggagcggaggccgaggtgtggtatggcgcggcgggccggcggcacaagcggcgggcgcggcgacggcgctagcggtggcggcgcgcggctggaaagctccggtgagtggtggcgcatggctcggcgtggggagagcgggagagagcgcgggggggaaatcgtggccgagaggggcagaatcaggcggcaaccggccggtgacgggggggcgccgacgtggggaggttggcggcagtttggcgttgattttgcggggaggagtggggaaaatatgggggaggaggaggtggggatcgagtccacgcgctcgtgaggtggggtggagcgcgggaggcgtggcgtcagtggaggaagagggaaagtaggaaaatggatttacttcg

SEQ ID NO: 28415 - DNA, 750 bp, Oryza sativa
  Clone ID: PAT_MRT4530_33016C.1
ccggccgggaaatcatttcccctcccccatctctctctctctcaaacgactgcgacggcgccttccccctccccccatcggcggcgacgctccccttccctctccccactggcggcgacgttccacctccctctctccctcccgtctcttctccctccagcggcggtggcaacggtcgagggccgcggtggcgatggctgagggcggatccggtggcccctctagcctccctcccgcggcagatccgctggcggtggcggcggcgtcggcggcagccgcgggtggatttggcggcggcaggcggctccctctgccccctctcgctttcctcccgcggcggatccggcgacggtggcggcgttggcagcagccgcgagcagatccggcggcggcgggcaggtccagcggcggcggctccctccgctccctcacaccgcacctatccccctccgccgcggcggcaccgctcctcctccccatccgacggcggtgccgttcctcctccccctcgcacggtggcgggcgggtgcggcgtcatcccctccgccggatccagcgggagggggaggctccccctctcccaccagcggcggcgccgttcaccctcccccctccccctccccctcccacggtggcgggcagggatggcaccctcccctccgccggatccagcgggaggagaggcaacggcggcccggcgtccctgcaacaacgacgacggcacccttcccttccggtgtcgggcatttt

SEQ ID NO: 28416 - DNA, 249 bp, Oryza sativa
  Clone ID: PAT_MRT4530_33017C.1
atgacgggtgagatagcacgacaacgccctcaggagggggatgacatcgttgtcggtccggccaaggccggactaggttttcactcgccgctcaccacctgcgaatccacgtctgacacaccgatgctccaccaccacacaagctctgccgacatgtgggacccctacactggcgtcccccgccggctagccttcgggcaccgaagaccgcaccacacctaccgccagctcctcctcacacctaggtag

SEQ ID NO: 28417 - DNA, 249 bp, Oryza sativa
  Clone ID: PAT_MRT4530_33018C.1
atgaccggcgacgactcggtgtgcccgccatgccgtgacctccgcagccgcgacgaccggcgactcggcggcgcgtgttcgctgcgccgtgacctccacagccgctacgccggccagcgaatcgatgcgtaccggctgcgccgcgacctccgtagccgcgactcggagcgtgcccgcctcaccgtcaccaacgccggtagtgcagaggagaggagaggtgaggaggatgaggagcgacagaggaggtga

SEQ ID NO: 28418 - DNA, 590 bp, Oryza sativa
  unsure (1)..(590): unsure at all n locations
  Clone ID: PAT_MRT4530_33019C.1
gctaggtcaaatcgatcgatctcgatcgatcgggtggtcgatccgatcagcagccatggagtaccaccaccggccgcattcgccgccgccgtcggacgacgacgtcgtcgtcatccagatgaacgccgccgtcatcgccgccgtcgacgagtggagctccaccaacgaggtggacgacgccgccgccggcaagggcggcggctccacccgccggaccttcagccaggcctacaagatgaagcaccggacgccactggtaaatacgcagtggcaggtggcgttgctgagcttccagtcgctgggggtggtgtacggagacctggggacgtcgccgctgtacgtgttctcgtcgatctcgctggacgaccccggcgaggcggacttcgtcggaatcctcagcatcatcctctggaccttcaccatgatctgcctcgtcaagtacgtcttcatcgtcctcaaagctgacgaccatggagaaggtggttctagatttttatattttgggacgaaaagagtagtagatgaaaaacaaaggcggacttcgtcggaatcctcagnataatcctttggaccttcaacatgatctgcct

SEQ ID NO: 28419 - DNA, 4654 bp, Oryza sativa
  Clone ID: PAT_MRT4530_3301C.1
ggccgaaccctgggctgggccccaatctcgtttgatctccgctataaagttgtggtattcggcaggccagtaatacaatacaaagttctccaaggttttcccctcctggttgcaatttagggtttctacctcataagctcaaaggacgatccatggcggttgctgacggtgggggtgataaagggattgtcactttgatgatcacccacccgaagctgatcggcggtgacgtgggtgtacctgtgggatcggtagatttgggggaacaagagtcgatgcaagcgtcggtggttaaaacagggcttgtgatggattctgataccggggtgtccatgggaccagagatttttacagaaggagaggtgcttgaagaggaggaagatgtgattgaggtggttctggaggaagatgaagttcagaaagcaggatagtggacagttctcgcaaggttccgaatcaggtggctttgttcgaggatatgcggagggcgtcgagattccattcggacatgagctacaagtcgctaagggataacatgtttatcataacctttactgtagaaggtgattatgagtttgtcatccaaggggggccatggatacacagaggagatgctcttctagtggccagttttgatggattaacaagcctatcgtctgttccactagagtttgtacctatttgggtcaggatttatgacttcccacttgtgctgatgacaaaagccagggtgaatcgtatggtagcaaactggggcgtgttcgtgaggtggatgttggtgacgatgggaggaataggcatgacatcttcagaataagggtggatcttttggttaagcgacctttaaagttgaagctggccataaaaatctctgtccaaggcaaggaggtaacacgaaagtttgatctccgttatgagagggttccacacttctgttttatctgtggtttcattggtcactcggataaagagtgtgtgaaacgtactgcaaatgaagatcacccttttcagttttatgcggaactgcgttactcccctctaaaaccttttgagaggaaggtgtgcagggtcaaggctaccccatctgaagggcccgtaacttgttcttttgggggagctgggagcgctagttcttcgtcttcaaggaggaagcaaggagatcatggggctaaggagatcccggctagagtggatgctcatgatggttttgatgtaagagaaagtgcaggagataagaagatagatgaacaattggctaaacatactcagaacctcaaggtagatacaaagcagaagcaaccgagttcgacacatggggaggaacctgtacttcagggtgaaggggttgtgaaatcaactactgctatatcggaatctgagatgattccaactataaagaacattgaccagcaggtttcctctggcgatgggtcatcagaggatatgattagggataaccgtaaaagaagtcaagtgcaaggggtgcgcagaaggctggccgtgtcaagcaagcgctgctagagtatcagcaaacggtggagagtggtggcaactcctctttagaaccggtgagcgcttctcgggctttgaagcggatcaggaaatcggttgaggggacaggtaggagtgatatggaggcaaccagccctggggctgctggagcaatgagttgcctagtttggaactgtcgtggtatagggaacgctacaatagttcgtgatctttgtgccttggtgaaagaggcgggttcccacattgtgtccttaagagaaactagacaaaaagtggaaaaggttagatgtttgcgttcaagattgggacttaaaggttttgtgggtgtcaatagtgaggggatgagtggggggcttgctttgttttggcataagtcagtttgtatggaagttaatgttttgaacgaaaggtttattgatgcttatgtgcgattggtcagtgatggtccggtgtggcatgtaacttttgtatatggtgaaccgagagtggaacatagacattgcatgtgggatttgttgaaggcaattaaacaatcatctcctctgccatggttagttttgggagattttaatgtggcactctggcaatttgagcacttttctgctaagaggaggggtgaatctcatatgcaagcgtttcaggatgttttgcaaacttgtcaattgtttgaccatggtttttcaagagttccctttacttatgataatagaagagaaggacgtagtaatgttcgggtgcgccttgatcgtgccctggctgatgagagctggagggacatctttagcgattcccaggttgttcacttgacatcaccgtgttcagaccgtaaccccataaagtgcttgcattatgagatttgctaggaacgagaagctacatcagaggaaataatcaaggagtcttgggacgacacaggccaaaaattacatccaggtgatattaacgttactctgtctaaggtcatggggacccttcggacatggatctggagggctaagaagaatagaatcacaaaaatccgagttaatgatggtactgtttacagtacgacaaaagaaatggagcaacttgctacagaatatttaaaaacatctatactgcagacccgtctttggaccattccagggtttcacggttatttcaacagaaggttacttctgaaatgaatgtagcgttgtgtaaagattttactgaggatgaaatatcagatgtgctatttcagattggccctttgaaggctcctggaccggatgggttccctataagattctatcggagaaactgggcacatatcaaggctgatgtggtgaatgctgtgaaggagttgtttcaatcgggacatatgccggaggggatcaatgagacttctattgttctaataccaacggtaaatcaaccagtcgacttgaaagatttcaggccaattagtttgtgtaatgttatctacaaaattgtttcaaaatgcttggtgaacagacttaggccgattctggatgagttgatttcagtgaatcaaagcgcctttgtgccgggacggatgatcacgaacaatgcacttcttgccttcgaatgctttcaccgcatccagaagaatagacaacctaataaggcaacatgcgcttacaagctggatctatcgaaagcttatgatcgtgtagattggaagttcttggagcaggcaatgtacaagttgtgttttgctcaccggtgggtaagttggattatgacgtgtatatccacggtgaggtttgcagtcaaatttcatggaacccttctgaacacatttgctccaactcgagggttgcggcaaggagatccgttgtcaccctttctcttccttttcttttcatggttgataggttgtctttactgatggatgaaaaaatttatcaaggagcgatcactccggtgaaggtctgccggagtgcgccaggcatttcacatctgctttttgcagacgacacaattctgtttttccaagcagagaatggacaagcaaagattataaaggaggtgctagctaactatgctacaggaactggataactcattaatccggctaagtgctctattatgtttggtgattcttgccctttagattgccaagaggctatcataacaaccctgcaaattgggagaaggggttttgaggataaatatttggggtttcttacacctgaaggaagaatgcacaaagggaaattttaaagtttgcaagagaaaatctggaagaggattatgttgtggggagagaacttcttgtccagcggtaggaaggaaatcatgcttaaaaatgccattcaagcaattccagtgtatgtgatgagtctcttcaagctgcctgcttctgtttgtgatgatcttaacaaaatttcacgtaattgttcgtggggagtcgataaagggaaaaggagaacccattagaaattttggaatcatgtcacgagacccaaacaatctggtggtttaggcttaaaggattttagattgttcaattaggctctattagctagacaggcttggcgactgatagactgtctagacagcttatgtgtgagagtgttaaaagcaaagtatctccttaatagatacaagcttcggtggtaatgtttcgccagggtggagatcaataattcatggtttggagttgcttaagaaaggaattgtctggcgagtcggtgatgggcgttcaatccgtatctagcgagattcgtggttaccgcagaatcacacacgaagtcatataatagtgaaaaggaactacagagagagatggatgttcggatttgatttccgaaacagggacctaggatgagcaactagtgaatcataccattctaccagttgatgctgaattgatcctgaaaatctggttgtcatctcgtactgaaaaggattttttggcctggcatccagataaatgaggcatcttctcggtgagaagtgcttatagcctagctctgttgttggcaagcgaggagtgtagctctagctcttcggaagtgagtgttaacaaagtgtggaaccaaatctggagctgcaatgttcctcaaaaggtcaaaatattttatgaagagcagccactaattgtttctaaagagacggtaagcaacactgcataaagctaaatggtatgcaattt

SEQ ID NO: 28420 - DNA, 1393 bp, Oryza sativa
  Clone ID: PAT_MRT4530_33020C.1
cagcggcgaggggagcggacgccgaggcggcggcggggttcgtcgatgcgttcgaagatctggtagatcctaggagcaaaccatggcttctaagaaagccttggcaatgcagccaagcaagaaaatttgcatgaccttgttgccgcaagacattgttgaactgatacttctgaggcttccggtaagcactctgctgaggtgccgtggtgtctgcaagcaatgggatggcattattcgggatcctcagtttgccatggtgcacatccagcgtgcgccgcgtcgccccctatttttctttcaacgagagaatttagtccatctcctctaccctagtgaagcaatcctctttgatgaagcatggtcaccatcaaaatgggttgtacctgtgatcgagcctgatgattttttatgtgcttcatgcaatggacttatttgtttacactcggataaatcaacaatcaagatagccaaccttgcaactggtgaatgtatgcatctagtaaaacctgtcaggaactcaaagactgatcacttctcttattacagctttgggtttcacccagtgacaaaacaatacaaggtaatgcactttcttcgtgacgagcacctccatgttggtactagcttcagcataattcaagtttacacactcggtgatgagaaatggagagatgttagaactccacaggctttaagcttgagatgtgtggaaagatctggagttgtcaatgttggtggggcaatgtattggctgactgaagatgaggaaagtgtttggaaacatgcagttgtgacctttgatctcagtgaagaacttttccagtggttacagctcccagcagttgatcctgcaaactatgtgcttggtgatcctgaccagtggctgattacagaggttgatagcaatgtgtctgtaagctattacgagacagggaagctgcatatctggacaattgacagcaagatagagcaaagctggagtcagaagtacaacattcgcttatcaatgcttgaagttccaggaccacattggatctgcggtgataagattatcttgcatgattttaataagaacctatatttctatgagttgatggggaagaattctgagattgagtcgagcaagttagtgaagcaattgagattcagcccccgcaacaacatgcaatgctttatgtttgtgaagtcgcttgtacggttggatgcattcagaaaggctggtgttgaaaatgcagataaaatgggcatggagatcaaactagatttgcagcagacaccagatttggatagttccctgcggctgatcaactggttggagtataggcgggtactagagatattgtgtgttaatctcgacaacatgcatgaagtattaacgggtctctttgtttag

SEQ ID NO: 28421 - DNA, 849 bp, Oryza sativa
  Clone ID: PAT_MRT4530_33021C.1
atggcggcgatgggcggcggcgcgggaggaggaggaagggggccacgggacatgaggctgacgatgcaggaggctgccaagaagctgtccctgtgggactcggccacgttccgcccaatcctcacccacgtcgagctcgagcccatcctcgccgccgccgggttcgtcgcgctgcccacgccgccgccgccgacgacgacgcagggcggcggcgcggcgggcgcggggcagccggtggcgtggagggagtacgcgttcgtcggggtcgcggcggcggggcggcggcggcggagcggcaatgcggcggtggcggccggcgtggggtggctcggcccgcggccgcggctgccgtgcccgcgcgtcgacgcgctccacctccgcacgtaccaggcgttcctcggcgccgtcgagttctacctcggcgccctccgcgtggccagcctcttccacgtcaggtgcatgccggtgacgacggcgcaggacagggtgttcgacaaggtgttccgggtgatgcgaagccacggcgtggaggacgacggcctcatcgtctaccgcgacggcaccctcgacgacgccacctacgccgtctgcagcgagcacagcccggtgcaggacgtcggctaccacgtcatcccggggaacacctgcgtcgagctcggctacctcaagtccggcaggatcgccggcaactgcgacgaggagacctgctgcagaggcggcgccgccgccgccgacatcgctcgtgccaggaagctagagccgcagtagctgcgccagctgctttaatttgatgcagagatcaggaaggtgcttagtcagtgatgactttggttaatcagtgagctagac

SEQ ID NO: 28422 - DNA, 1543 bp, Oryza sativa
  unsure (1)..(1543): unsure at all n locations
  Clone ID: PAT_MRT4530_33022C.1
caacacctagctagcttctgcttgtgtgcgagctactcttgcagctgggtgctatttacagccaaaggtggcgcagcaacagaaattaactgtgtgagacgtctatcagatcgttcgagagaatgggtgtaggaagggttatgaacgatgcgaagccgtacctggcgatgatactgctgcaggtggggttcgccgggatgtacgtggtggccgtcgcctcgctcaagcgcggcatgagccacttcgtcctcgtcgtctaccgtaacctcttcgccaccgccgtcatggcgcccttcgccctctggttcgagaggcgagtaagaccaaggttgaccctcatcatcttcctgaagatcatggggctcgccatacttgagcctgtgcttgatcagaacctgtactacatgggggccaacctgacatccgccggcttcgcctccgctctcatcaacgtcctccccgccgtcaccttcgtcatggccctcgtcctcaggatggagaaggtgaagctgaagagcgtgcacagccaggcgaagatcgccgggacactgttcacggtggccggagcggtgctgatggtgctgtaccacggcccggtggtgcagttcccgtggaccaaggggcagcaccacgacggcggctccggcgccggcggcgcggcgggcggcgggttcctccagggcaccatcttcatcgtcgtcgcctgcgtgtgctggtcgggcttcttcgtcctccagtccaacaccctgcagagttacccggccgagctgtcgctcaccacgctcatctgcctcatgggctccgtcctcagcggcaccgtcgccctcgtcgccgagcgccacaacacccacgcctggctcatcggcttcgacacccgcctcttcacctgcgtctacgccgggatcgtgtcgaggcagaggggcccagtgttcgtgacagcattcaacccgctctgcatgatcatcaccgccatcatgggctccatcattctcaaggaagaaatcaaccttggaagcgtgatcggcgcggtgatcatcgtgatagggctgtacgcgctgatctggggcaagggcgccgacaaagtcgagcagacagacgccggcgcggcggcggcgggcagcaacaagggcggcggcgagctgccattgacggcggtgcccaacggccacggcagcaagcacggcaacggcggccatgtctacgacgtcgagacgccgccggcggcgaacgggcactactagcctaagcacatgcagcagcagtccgtcatcctcggcagtccattgtaagctagttgtggttcgatcgaccatcgatcgatcgagagcgtgacacgatttcttcttcttcgtcgtcttcttcttcttcttcttttccttcttgatttctcctaagaattcttgtgaggtattaaaattttcacataatgcaatgtaatggataaggccaggacgtgtccggaagtgcttgcttaagtaatgaatcacatattattctctctagctctgctgtcttacgtggccgcacctgctattaacntttt

SEQ ID NO: 28423 - DNA, 528 bp, Oryza sativa
  unsure (1)..(528): unsure at all n locations
  Clone ID: PAT_MRT4530_33023C.1
gtaattatgccagctcaagcgtggttgattagttgactgatcacgagcagtgacgagttggttgtgatcgacgagctagttttgttgtgtgcaatggcgatcggcggcgacgcggggcaggtggttggcgatggcggcgccggtgccggcgacgacaacatcatcctgaacccggagttcgacagcgggctggacaactggtccgggagcgggtgcaagatcgagctgcacgactcgctcgacgacggcaaggtgctcgccgtcagcggcaagtacttcgtggcggcgacggngaggacggacacgtggaacggcgtgcagcaggacgtcacgtcgcggctgcagcggaagctgctgtacgaggtcgccgccacggtgcgcctctccggcgccgccgcgacgccgtcgccggccgaggtccgggccaccgttcgccgtgcagaacaccgacgggccggcagcaatacatcagcgtcgccaagtacgacacacgcacacacatctctcgaatcgatcctctcctcgatc

SEQ ID NO: 28424 - DNA, 371 bp, Oryza sativa
  Clone ID: PAT_MRT4530_33024C.1
agccaagagggagaagaggccagcaaatccatctcacccaccggccataaagaaaacaacaaagaaagagcggcatttgagaaagaggagaaactatatataaggaacaatatctccacggaccgatccgaaccgggcgttctcgaaccgacgggtcacacgcatagcgccaccggctccatgggggcatgaacccaaaggcgcactcattagcctacttatcctgggtcatcacaaaagacgggtgaatccaagaagacgatgacggcagcaaaggtggagacaatatgcgaagaagaagaggaagaagatgaagaagacgacgaggggaatggtgtcatcacggtgaccatgtgcgcggtgaaggcgaa

SEQ ID NO: 28425 - DNA, 239 bp, Oryza sativa
  Clone ID: PAT_MRT4530_33025C.1
cacagcagcacagaaacgccgagtggcaccaggaaagactgaagggggccactaagacagcacgtaaaatactgacaaaagggccatgctgattatacggaagttgatttcgccctgacggtgacacggggtacgtgcgagccttcccaggaaaattaaattgggaggggattctttgttttaaactaaaccagattttgggggcccatttctttttggggcttagataatgttggggg

SEQ ID NO: 28426 - DNA, 421 bp, Oryza sativa
  Clone ID: PAT_MRT4530_33026C.1
gctgaaaacctgttatcagtcatttatacataaggatattattgatgaaactgctatgattatgacatgacttcagaatttatacataaacaaccttgccatgaggcaccagaagcatctcaaggctcaacctactttccaatttatatccctacaatcctgcctaaactgaaattacatcaatagggtagtatgccttcttgcgtcgcacaaaaagtggcaataaggataaggattatgtattatctttctgcaaaactagaaaaaattatgtactgccaggaaaagtttttgcagctgcaaatgaccagaaaatatgaatctagtcactcaatcactcatccttacaagccaccaaccttgccagctgaaggtttgttctgtttcatcttggcaatgctgacaggatccccaaagaggg

SEQ ID NO: 28427 - DNA, 267 bp, Oryza sativa
  Clone ID: PAT_MRT4530_33027C.1
atggcggccgaagcgggaggccggagatttgtgtcgagggagcgcgccacctgggccaaggcccaagggaggcggcacgggggctacgtggcgtcgcggcgcggcgtcggatcaacggccgtgagaagactcaaatccttctctgatttcaaacaagacgatgtccgcaccacctgctacacgcttccgatatcccccacatcctcaaggaagcaaccagacaagcaggatccaactgactggatcattggaggcaggagaccttga

SEQ ID NO: 28428 - DNA, 773 bp, Oryza sativa
  Clone ID: PAT_MRT4530_33028C.1
tcatccactcacgccgccaagacccctccatcgccatcgcctcacgacatcggatcccgcggctacggggccgccgaccctggatccggccgccctgagaccggcgtcgccgtccgccatacgccgtcgcctcgcaccgccgagttcccgccgtcgccatgacccagccgccccgaggccggcgcggccggttccactcgccgccgtccgccgcacgtcgtcgccttgcgccgccgagcccccgccgtcgccgtccgccgcacgaggccccgcccccgacgtcaccgtcgccgtccgccgcacgcagtcgcgggagctggaggaagggtggcgggtggcggtgtgccagtaagcccgggggttctccccggcaccaccccgttgaatccacatgtctcttggcatcatggttcccccgattagctaattactcagccaggggtgtcacattccacccatgttgtcgcacttgccttatgttcgaatgaaattccaaggaaatggtcgttaagttcaagagcgggaaactgtactcccggtacgtcccccggtctgcggttttggaaaattcattcagttcgcaagcaccgacccatgtgtcggatgatcaaaggtgacttgccttgcacaaggtcttcattgagcttcatgaatcttcgagaaaacccgcgattgacgaaaatccggtaaccgcgactatacgcaaacaatcaaaaacctaaacaaggacccaaagaaaaatcctatttagactaattaatagtgccattaaa

SEQ ID NO: 28429 - DNA, 558 bp, Oryza sativa
  Clone ID: PAT_MRT4530_33029C.1
ctgcaggaattcggcacgaggccaaaatcaggaattagttttgtgaacataatgtaaacagtacaagtacaagaaatccgagctcgggaaaaaatgagaagcagaacaagatagttttactgccagttgttggtttctcctttcccttggcgaatctttcctttatgttttatatacaattgatgtttagccctgtattacattgtgaatattaaaatttgagcttcagctgttcattaagagtgctatgctgttttactttagaatgcatgcagttcagatttatcttcgtggaactagatactatgccttttcacatacgtatatagggtatgagagaaatggtctcaacgatctctaactgtacaatcacactcgtatgcacaggaaaaatgagacaaatcagctagaaagacttcttaaatttgaattgtttcgtttcttccttcaagatgccttgcattactattgggtaccggttttctgtaccaagtagacaaatagttatttctgtgaacttaatctcttccatagaatcagggtgatacagtttgctaa

SEQ ID NO: 28430 - DNA, 540 bp, Oryza sativa
  Clone ID: PAT_MRT4530_3302C.1
attcctgcagccccatcaaagttaacaattatcctgaacatcaattgtgcctaaaaataggtgttcccataatgcttttgagaaatttagatcagaccgctgggctttgcaatgggacaaggatattgttacaaacttgggtgatagggtgatcgaagcgcgtattataactggttctaatgcgggggaaactgtttatatcccaagaataaccttatctgcgaccagcaaaaaatggcccttcacattagaacgtcggcagttccctgtccgtgtctgctacgctatgactataaataaaagtcaaggacaaaggttacgttcagttggtatttacttgaaaaaccctgttttttgtcatggccagttatacgttgctctttcccgagtcacttctcgcgcaggcttaaaggtgttaattgaagatgacaatggcaattgcactactcgcacttggaacatcgtgtaccgcgagatattttctgctgttagatagtaataatatatgtttttgcctatactatagctgttctgtacaga

SEQ ID NO: 28431 - DNA, 633 bp, Oryza sativa
  Clone ID: PAT_MRT4530_33030C.1
atggagcgccgcgtcgcaaactcgcatggcgtacgtgtggcggccggcagcgagccaaccgctctcactcacctgcacctgcacggcacgcggctgtatggacgacgtgtcgcatcacgtgatgttggcggcagcggcaacaggcagcaggaggaggaggcagcaaaagaggagaacatgagaaaagagatccccaaatccaatgtatctgacatcaagaagaaaaagaaagctgaatacgagaaaagagattcccaaatccaaccgcatcaaccttccattatttctcacatctgcatgctaagcctaagcaagaccataggaattcctcacatctacatgttaagcaagattaggacacaagatccagcaggcggcggcagctgcttcgtgtggacggccggatccaacgatgcagcagagaagacggcatctgatctgacgaggcttcgtgcggttgcgcggctgcataggcttcacttgtcatcgttggcggcgacaacgacctcgtgtggtgtcggcagcggcggctacgctggcatcggcggcgactcgtgtggtgtcgatgcgacactggctaatcccacgccagagggattcaggccaggcgagggagaatacgcgtcaggctag

SEQ ID NO: 28432 - DNA, 603 bp, Oryza sativa
  Clone ID: PAT_MRT4530_33031C.1
atgagaaaagagatccccaaatccaacgtatctgccatcaaaaagaaaaagaaagctgaatacgagaaaagagattcccaaatccaaccgcatcaaccttccattatttctcacatctgcatgctaagcctaagcaagaccataggaattcctcacatctacatgttaagcaagattaggacacaagatccagcaggcggcggcggctgcttcgtgtggacggccggatccaatgatgcagcagagaagacggcatctgatctgacgaggcttcgtgcggttgcggtggcgccagcatcacacgttgtcgtcgacggtggctgtgctggcttcactcattgtcgtcgttggcggcgacggcctcgtgtggtgtcgacggcagtggctacattggcttcactcgtcgttggcggcggcaacgacctcgtgtggtgtcggcagcggcggctacgctggcatcggcggcgactcgtgtggtgtcgatgcgacactggtcagcagcagcatcccgcggcctgtctaaagaggattaggaatgtaactgtagagcgctgctacgcctggagctcaggcgaccgtttttggtcgcctgactcaggctaa

SEQ ID NO: 28433 - DNA, 294 bp, Oryza sativa
  Clone ID: PAT_MRT4530_33032C.1
ctatttttccccaaccccagagtgcgagtatgtgtccgatggcgggttctccgaggagtagacttcgtccgtgccgtcgagggtgcctgtggagtggtgttcccgctgcagttcaagtccaggcttagccccagttatcttttgtttttccgcacgcgcggttccatgtccccacgtgttgacggcgaaccggcatttccacgtagtcactgcaggcgggacccctgtcagctccattcccgtcgcgtcactgcctctcgcgactgcatttaaattcaccaaaccagtgatgag

SEQ ID NO: 28434 - DNA, 366 bp, Oryza sativa
  Clone ID: PAT_MRT4530_33033C.1
atggaccaggttcccagagatgatccacggagagaactgagtgagaccctacgcgtcaaccgtaacaagtgggagacaagcgggcctcacacgaatgccacacgaatgcacgcatgcggaacaatgtggcggccacaagggcacacgaacatagccaccaaacgtgcacgcgaagactgcatgaacgactattgtcgtcagtgcaagagaccagggccgacaatggcacgactagcacgatggcaacaccgagagggcaaggagggcgccttgagaacaatgtccctccaggtttctactactaataaggccttgttcaatttgaaagggattgaagagaattggaggggattgataggggaataa

SEQ ID NO: 28435 - DNA, 636 bp, Oryza sativa
  Clone ID: PAT_MRT4530_33034C.1
atgggggttgattctttcttgcttataagtgaaaatgatgtctcttctcatcaggtggaagtgtggcttcagacatttggaccagccgaaaggacactgatccgcaggcactcatgtgaggaagtctttgttgtattgaaagggaaaggcatacttgtattgaagtacacagggcagcctcgggagattcctgtctttcaaaatagcatatttatggtccctgtaaatgatcctcaccaggtttggaattctgatgagcatgaggtggaagtgtgccttcagacatttggtccaggccaaaggacacccatccacaggcactcatgtgaggaagtttttgttgtgttgaaagggaaaggcacactctttctgggatcaagctcaatgaagtaccctggccagcctcaggagatccctgtctttcagaacagcacatttactatccctgtaaatgatcctcaccaggtttggaattctgatgagcatgaggatttgcaggttattgtggtcatatcgcgcccgcctatcaaagtgtttttctacgatgactggaatatgcctcacacggctgcaaaactgcagttccccatcttctgggacgaggaatgcttaattgcacctaaagatgaactctag

SEQ ID NO: 28436 - DNA, 849 bp, Oryza sativa
  Clone ID: PAT_MRT4530_33035C.1
gatatgcccaactatgagccaccaccgagaatgactatgaataatattcgagccaacaaaccgggaacgcaagtatgttcacaagtagcctactagaaattcatacagactctagacaaagaacagatgcaagccatagatgatctaggttttgccggcttaacaaaaatgaatggagtccagattcgccaacttttatgcaagcaaattgctaggcatgatgatgagcagtctagagctttcaatataaatggaatcatgctagagacaaaccattgaagatgtggatcacatgctcagcgtgccatcaaaaggtgttgaactggttgaagtcccacaagcaatccaagttgacattgatgccccaaaggacagataaaaacgaagctctacaggcaacaaaggccgctatgtttgcattatataaagacaaaagggggactaagataactctgtcagccttgcgggattcattgaatttgaacagatcttctgatgatcactttaaaaggcagtttgtgctatatactgatcctatgtcctacaactgagagattcgtccattcaaattacctaaatctactcataaatatactagatataaagagaaccaactaggctagcttaaccctaaactatctcaagaggtctatcgtcagtttccaacatgataaggagaagtttcgagtgagtcatatagatccttccaccgcacgtgtcagaccactgatacaatactgggatgagaagaaggctagaaagcgtgaaaaaatcatgtatggagtaattcctctggcactacaccaagccatacctaactgcttgactaagttagccagtacagcgcca

SEQ ID NO: 28437 - DNA, 487 bp, Oryza sativa
  unsure (1)..(487): unsure at all n locations
  Clone ID: PAT_MRT4530_33036C.1
cccacncgtccgccgttgtctccaccgccatctcccttttcgccttctccacccgccgccggtctacctcgccgtcgcccctctccgcccaccaccggtctacctcatcatcggcccacnccgcccgccgccgccccgcnccatcctnccggctccatncgccgccgctccacgggtgggatgagagagaagagaggggatgagagaggagaggatcggagagaggggaggggatgaagaggctgacgggtgggggccacgtgggtcccaccgtgagtcagctgccacgtggacaaaactggagtcaaaatcgccgagggacctactttgcactggttttataagatgaaggatgcgctacatccggtgttttgcggttaggggacgatcttgtaactcgatgacaagttgagggacttcggtgtactttttccagtattaaatggtcgacgtcacagttgggtcganaaaaaanaaaannaaaaaa

SEQ ID NO: 28438 - DNA, 2001 bp, Oryza sativa
  Clone ID: PAT_MRT4530_33037C.1
atgaccattatgcagcgccgcgaccggctgagcgatctcccggatgcgacgctggcgcgggtgctctaccacctcggctccgtcaacgcgaccgtcacgtccgcgctgtcccggcggtggcgcaacgtccacgccgccgtccccgtcgtcgacctcgtcgaccccaagaagggcgaacggtggggaaacgtctcgggacagaagacctgcttcgatcatcaggttaccgccgccatcctcggcaaggacttgccgacccgcaagttccggctcgacgcgttctacccgccttacgacctgcgcgaccagtggttcgccatcgtctccgtctccggcctcgaggagttcgacgtcaagctccggtactgggaccactccaggcgcaacctctgtccgtttggcacccaccccaaggcctccgccgacttcgacgaggagatgcgccactcgttcaccgcaacgccgccgcacatcttccggtgcgacacgctgcgccgtctgctgctcaccaactggacgctcgacgtgccggcgggcggcgtctccatgccgtcgctggagaccctattcctcaagaggatcatggcggaggacggggcggtgcagcgtctcatctctggctgcccgaacatcgccgacctgacgctggagcagtgccccagcgtgaagaggctcgtcgtcgccagcccgcgcctcgacagcttcgccatgatctgctgccaccacgccagccacgtcgtgctccaagccgagcgcctccggacgctgcgctacaagggcggcctccccggtgagaacttcttctccatcgccaactgcggtgacgtactggccatgaccatcgacatctgcgaaagcctcctcgggaaatcggcatcggctgtcgtccccatcacaaaggtcatcacccggtgcaccaacgtcaccttcctccacctccaccttcgcccgacaatggcgttccacagcgggactttcacacgcgccctccgccatcttccccacctccggcagctcgctctcaagggcctcctcgacaatgacgaaaccgccttatcagtctccacgttgcttcgcaacacgccgaacctcgacgtgctctcgctgatccctctccgtcctcgccccccaaagcctgactatctttacatgctgaggaagatcaagctgctcaactacaaagggacgcccaacgagaggatgcttgcaaagtatctcctctccaaggcatcagctttggagcaatgctccattaccctgccagctaataaaacatcaacagaagatcgtcgatggaagttgacgaaggagctgaactggcggagggctgacacccacttcttgctgacttgtggggcagcggggcagggcaccatgtcaggtgttggttgcggcagtcagcgcgagaacgaccatcttggcaagggcgacgaacggggcatcaaggcagtgatcaccggtcaaccaactttggctcaagatgtgagaagagaagacggtgagatcattagcgatgtcggtggcaaccgggcggtggccgggcagtggtttggcgggggacggcgggagcagcggttgcagcagggaggtgtggcggcggtggggaggcgcgaggcgacggcgatgagcggatatggtggcgccagcctcggggcggccgagtcacgacgacggcggggcagcgcgcagcggcgggtgggagcggatccggtgccggcggcgccctcccgcatgacgacgatggccccgggcggcgccgccatcccctcctcaccgtccctcccccccccctcctcaccgccacggcggcaggggcggctctgccgcctccggctgccccgccccacgtggatctggcgccaagggtggcaggagcgaccgatccgatgccggcaacgacggtgggcagcgagggtgacggatccggttcgggcgacgacggcaggcgacgggagcgacggatccggtggcagcgacgacggcgggcagcgggggcgatga

SEQ ID NO: 28439 - DNA, 2991 bp, Oryza sativa
  Clone ID: PAT_MRT4530_33038C.1
atggcggacaccgtcaccgtcggcggcggaggagagcaccgggtgcaggtagcagcagccaagccctgcggcgggcagcaacagcaaggcaagaaggcagccgcgccggagaagtggctgaatggcttcgttagcttggtggcgctggtcgagagggtgggcaacgcgctcggcacgctggccttcacctgggctaccgtcgtcctgctcggcggatacccgacgtccctgacggcactcggctcgtacaacgatttttggttcgcgacagccataatcttcctagaatccgccaggatgtttagtggcagcaacaacaggtccgattaccaattgttcttccgaaccaaaggtgctttcagacctcttgactggaactggctgatcgccatcgtctgcattctggatgtttggaagctgttgattccccttccccataagaatgttatggcagctgtagtgctttatgctatgataattctgcttatacttggcaagagtatgactccaaagtttcagccatcactacgcaacccgttacgccgtgccatatcactatggagccccttagctgcgatactgttgatgactccagccatgcagcatgaccattcaagggactttgtcaggaacattacaggaaacggatcgataaccacaagaacgggtggcttcgctccaactaggtccacagtagttgccaaatggatagtatttctactattgctggtatccgtcctcgtggtgacaatcagcaggctaaagttcccaagaatcatcaaattgttagatagtgcttggggcagaaaactagtgtcttggcgtcgatctattcagaacatttgcatgcttgctgcgctagtgatggtagtactgactactgatggcttctttcggttcatgataatcgggatgctagtcattgttgctgtgatggtgtcgtcgggcaacttgcagataccagcagcagtcttgcgtgttgtgttcgcaggcctcgcactgtcacaccttatggcactacataagaacaacaaagaagacgaagagactaacctggtaccatctctcattgtcttctatgcgatggtgacggcccaaggaatactctacaccgtggcatgcaccctcgagatcttctcattcatcccccggagatccctcatccggcgtgctggattcagaggtcagctgggagtggaatatgtcaatctgtattatgcatatgccttggagaaatgcatggaaaaggctgtgtttgctccgaagaaaaccagcctgggcaactttgccatggattccctgaactcagactctcccaagaatcatctctatgggattcaactgatgcatagccttctggagaaggagacgacaagggcgcggctccttgaaaagctcatcacttctacaaagaccatggctaggataataagtatgttgggctggactagcccaaattatatgatggtcagattatatgccgcgaaagtaactgctgagcttgcgaaggacctccaagttatcgctgttcctagggcaatgcagcttgtgtctgcccttctggacaccgatggcaaacttaaaaagggaaatccacttctgcaggtagacgatgaacaagaggagaggcaggatcccattctcagcacagcaaatagccaagaggaaagaccgaatgcaattaggaatgcagatgatcccccaaagcaaagacaacaagagacacttcaaggcactgataacctgccggagacacaaactcgatcagcccacatccatgaacagaactgcataatcagaagcttgcagaagatttcagagtactggacagttcccaaggagcatccattgacataccatgatcaacttcctgcacttggcatgttgattgttgacaagcttgctagttgtgatcaaaataactgtgtggaaattgatagagtaactgacctcattccgaagatcataggatttacaagcttcagaagtgacacaatgaacagtgaagcacagcaaatggtcctagtgaagtcatcactgaaggtgttgcagaggctgacaagcattgaaggggaaatcggcaaagcactgcggtacaagatatcgaagcatcccttcttgttaagaaacctcgcagatatcttgggagacaacatcagagaccaagaattaaaaaagcttgcagtaggaatcctcagaaacatttccattgatggtaacacaaggcaggagattgggaacatgaaggtgctcataaccagactgatgaaggcattcctcgacttacatagaacctccaacacagatgttgatttcttgctaccaaaggtcgccgggcaagcactagcaatgctagcaatggataatgtgcacaactgcttagttatgttgaaggaaccagagttcattactaaactcaaaaatatgatcctgatccaagatgaaaagtacatatatgtggcgccaagcctgttacgtagtatgtgccagcatgcccaagctaagctcacagaattagacctaaaagaactatctcacaccttacgagaggtgttggaaagaataatgaatgctgaaggggcagaactagagattctcattggccttagttcacagatatgcaaagtcaatcctgaagaatttgcccaagagctagatcacggacatattaggcaaagatttgtgaagaggctagtggatgcactgaatgcaaacatgaaaccaagtgctcactgccctgggatccggagggtgatacttgagcaatccatatacatgatggagtgcaattctcactatgccaattgtttcaatgaattccggatgatggacgcactgtcaattgtagaagaaacgccctcaaaggttgagaactacatggttttcttgggtgatgtaggctttatggaatgcggcacacctctctttgctctagtggacagagcaaaagaactgatgggtcgtcaatggttgcaaggaatcaacaactaa

SEQ ID NO: 28440 - DNA, 4317 bp, Oryza sativa
  Clone ID: PAT_MRT4530_33039C.1
atgccccgccggaaggggaaggggaagggggtcgaggacgaggtcgaggtgtacgagccggcgtcccccccggagcgcgtgctcatcatcctcgacagcagcgaggacgatctcgacctgcaggaggtgcgccgctcgctgatgatcacgggccgggggcgcgcgcgggcggcggagcgcgtgggggaggaggctccgcggggttctgggcggcgcgcggcgccggtggttgctagccggcggagacggagacggtcgcggtcgcggtcgcggagcccccgcgccgcccgcccgcgcgcggagtcctcgcggcggcctacggcccgccgtgcccgtgcccgtgcacgtagcccctcgctagagatcatcgacgtcgacagcgggagcgacaggggcgtggtgcgcgtcaaggaggagccgcgttccggaagcgactcggactacaatggtgcgagaggtcgtgcgcgtgcgcgggcgcgggcgccggtcgccgccaccgccgcgaagaagaagaagaggaaacgaggaaaggaagctccaagcagagcccaggagagccgggaggttgtccgcgtcaaggaggagccgaattccgacggtaatggtgcgggaggtcgtgcgcgtgcgcgctcgccggtcgccgccgccgcgaagcagaggaagcgaggaggaagagaagccccaagcagagcccaggagagccgtgtgcccgttcaaatcaaggaggagccgtattccgggagcgattccgacggcaatgtggccggtggccgtgcggtcgtgccggccgccgacgcgaagcaggggaaacggggaaagaaaaccccaagcagaggcaaagggcggcgggtggttgttcgcgagacttccacacccgctgctccgtccaatggtgctccctccgtcggcaggggaaaaggtagagggcctgggagaggtcgccagagaagcaagggcgctgttcgtggtcgcgctactccggtgaaccgggtgagcacgggtgttggttcgagaactcggtcacgcttggcagagcaggggagagcttttgcacaagaggaagaagaacaagtggaggaacgagaggaggaggaggaagaagaagagcaggggagagcttttgcacaagtgaaggaagaacaagtggaggaacaagaggaggacgaagaagaaggtgaggaggagatggagatggaggtggaggtggaggttcgttcagatgacaacgatcatggcaatggtggaatcaggggagaaggtggaggtacggacgatgttgcggagatagaggaggaggaattgggtacggatgaagatgaaaccagtgatgatagcgatgagaacttcagcgatgaggaaggggatgaagaggaattggaggaggaggaggaggaggaggaagaagaagatgatgatgatgatgacgaggaggaggaggaaccgggtgatgcacctgatcaaccgggtgaggccggtgaggaatctcctccccgatcaagaatcatggcaatgccgctgatgggaaagaggatgtttgagggatttagttttctacaacaggtggacacctcgactggcagggatatcagagctcgcacacgatcaaatttcaaacgcaagaaactcctggacaagaaactgctcaagcgtgggacgttcgcgaagccttattgtatcgatgtgtctagctcggggtcggaggaggatgtgccacagccggagcagtcggcgtacggtggggattgtgcggatgacgatggcggcagcgatggcaatgaggagcatagagctgtgaagaggaggaaattgaacaggaggcaaagtgcccatagtgatagcgaggaggatacaacatttgtatgtgatgtcaaggaaggatcaggttctaggagggtacaagaaggagcacctcgtaggcaggttaagaaggagggttccaacaagaaaaaggatggctccactccacaatgcgtcagaaacaatggaccaaaagttgggagacaaacaaatgggctcaatggacagggtggtgtatccttcaagagaaatgtaaagattgctcagaggaggaagcgcaggcaagcaacggcagaccaagaaaagtatggtcatttgctcgaccccatgtttaatgaaatagagagcaaccaatatgagcctgttcctgaagagcaaattgacaggagattgcccctggtattcgcatttggggatgacgataagctggaagagaaatccaaacatgacaagttacaggatgaagatgaactgtggaaagaatttgattttgctttggaatccataaatgtttgttctcacaactgcgaggagggtgaaaaggaagatgagcaagaaatccctgcggacaaagcagcttcatgcatccaagggaagcatgagctcattattgatgagcaaataggacttcgatgcaagcactgcaactttgttgatcttgaaatcagattcgtacttccctccatggtaaagtcctgtactgaaagggacatgagaaaagatcacgagttagacttgttttttgatgatatcctaacatcagcgggatatgaaggaccacgtgattttggtggtaaaaagactggcctggtttgggatctagttcctggggtccgggaggacatgttcccgcaccagcaagaaggttttgagttcatgtggagaaaactagcaggggggacttcaattgaacagctgaggaacaatgcaaacactattgaaggtggctgtgtgatttctcatgcaccagggacagggaagaccagactagcaatcacatttgttcaatcctactttgcgttttttcccgagtgctgtccagtgataattgctcccagagggatgcttgctacatgggaacaggagttcagaaaatggaaggtgaaggtcccttttcatgtattgaactccaaggagattaactggaaagaagacaggaccatcaaacagctggctatcatggatgaaaatttggcccaaagtttggctagaaacaaattggatcacaaatttaggcgaaagttgaagttggcatcatggcgtaaagggagcagtataattggtgtgagctatacgcttttcaggaaactagcgaaccagagcagcatggatgggaacatggtgaggaatctgctccttgagatgcccgacttgttggtccttgatgaagggcacacaccaaggaacaagaaaagtctcatatggaaggttcttgaagaagttcgcaccaaaaagcgaataattctatctggtactccatttcagaatagctttcttgagctctctaatgtcctgtacctgattagaccaaagtttgcaagacacttcgcttctaaaagtttcaagaaaataggccttgaggattactggacatccttgacactgaataacataacagagaaaaagatagatgaaatccggcaaatactcgatccaattgtgcacatccataacggtgacattcttcaaaagtctcttccaggattgagagaatcagttgtgattctgaatcctcttcctcatcaaaaggaaatcatcacagcaatggagaacacagtgacaatggggactcttgatgcagaatacaagatctcccttgcatctatacacccgttcctcgtcacatgtgcaaaactgtcggaaaaagaaacatcttctgtggatgtctctttgctgaagagcttacggccaaacccgtgcgtaggagtcaaaacaaaatttgttttggaaattgtccgtttgtgtgaagccatgaaagagcgagtacttgttttcagtcaatatcttgaaccactatctctgatcatggaccaacttagtaaaatgttcaattggacagaaggtgaggagatcctactgatgagtggaaatgtccttgttcaaaatcgagaagctttgatggaggccttcaatgacatgaaaagcaatgccaaggtaatgcttgcatcaacgaaggcatgctgtgaaggcattacacttatcggggcatcacgtgtggttctccttgatgttgtatggaacccttcagttggaaggcaggcgattggccgagcttatagaattggtcaagagaagattgtgtatacatacaatctaatcacagaagggacaaaggagaaggacaaatatgataggcaagctaagaaggatcatatgtccaaactgctattttcaaaagaaccccatgctgcaggattcaacttgtctcaagaagtgatattcaatgacaagatattggaagcaatgacatcacatagggagctcaaagacatgtttgtgaagattctccattctcactaa

SEQ ID NO: 28441 - DNA, 2565 bp, Oryza sativa
  Clone ID: PAT_MRT4530_3303C.1
atggctacccgtccgccaggtacggaggtcacttgggcggagttctgtcgcagcttcaggaaggcgcaggtgccagacggggttgtggcacaaaagaagagagaattccgcgcactccaccagggcaacaggacagtaaccgagtacctgcatgagttcaatcgcctagtgcgatacgcaccagaggatgtccgcactaacgcagagaaacaggagaagttcctagtgggcctggataacgagcttaccaaccagctgatttctagagactacgccgactttgagaagctgggtggacctaccactatgattgtccgccagcatcgtcctttcaactcaagcagcttccaccagggcgccagtggtagccagaaccacccgggaggtcagcccaaccgcagtgcagctccgcgcccaccaatggcaccaacacaatcagctccatcagcccaagccaaggagactagggcaaagccagggtcctgcttcaactgtggcgagcatggccactttgctgacaagtgcccgaagcccaggcgtgccgggccaaggtttgcccaagcccgtgttaaccacgcgtccgcagaagaggcgcaagcagcaccagaggtcgtactggtcaccttgaccaatgagaaggtagaagcagtggtgtacaagtcaccagtctcactgaagcaggggatctccttaaatcagattgaggtggaaaatccggtggccaccgaggagaagagttcgaggaaattggaagatatccccatagtatgtaagtatccagaggtgttccctaaggacctcactaccatgccaaccaagagagagattgaattccggattgatttggcaccggggactgctccaatttacaagagaccgtacagaatggcagccaatgagctagcagaggtcaagaagaaggttgatgagcaactgcagaaagggtacattcgaccaagtacttcaccttggggtgctccggtcatttttgtggagaagaaggacaagacgaagagaatgtgtgtcgattatcgcgcactcaatgaggtcacaatcaagaacaaatatcctttgccgcggattgatgatctatttgatcagctgaaaggagccaaggtgttttccaaaatagacctgcgatcaggctatcaccagttgagaattcgggaagaggatattcccaagatagccttcaccactcggtatgggttgtatgagtgcacggttatgtcttttggactcaccaatgcacctacattcttcatgaacctgatgaacaaagtgttcatggaatttttggataagtttgttgtggtattcattgatgacattctaatctattccaagtcggaagaagagcatgagcaacatcttcgtctggtactcgagaagttgcaggagcaccagctttatgccaagttcagcaaaggcgacttttggttatcagaggtcaaattcttgggtcacgtcattacagctcagggcgtggcagtcgatccatcgaatgtggagtcagtcaccaagtggacaccgcctaagacagtgtcacagattcggagtttccttggacttgcggagctgaaaaagaatatgagggtcggaaaagcccgggatttccatgaagatgaacacggcacaatctggttgggagaaagattgtgcgtacctgatgacaaggaactaaaggatctgatactcaccgaggctcaccagactcagtactccattcacccaggcagtaccaaaatgtaccaagacctcaaagaaaagttttggagggctagtatgaggagagaaatagctgaatttgtcgcactctgcgatgtttgccagcgagttaagaaaagctacgcggacaaccgccgaagggagttcacttttgaagcaggggattatgtgtacctccgtgtcaccccgctccggggagtgcaccgtttccagacgaaaggcaagttggcaccacgcttcctagggccatacaaaatcttggaacgaagaggagaagttgcctatcagctagaacttccatccaacatgatcggtatccatgacgtgttccatgtgtcccagttaatgaagtgcttgaggtcatccctcgccgccgctcgtcgtcgatcgccgccgctctccgccgttggccgctcgccgccttgcgtcaccgtcgcgtcgcgctgcgccgccgcgcgccactgccgccgggtcggcttgggccctgctcgtgcgcgcccggccgcgagccgcctccgccgtccgatctaccgggcggtagatcggggccgttcaaccccgccgcccacgtggctgccacgtggccgccacgtgtgcgccgcgtcggcgccacgtgtgcaccacgtggtgcgccgctcctccccgcatgatcctgcagagacgaagggatacaaggtcggcttccttgatctcaatcatgatcctgcagagacgaagggatacaaggtcggcttccttgatctcaataattgcctccattggtgttgtcgattggtgcgccacctcctgctcctggcgcaccaacccctgccgctccgggtgcgccaccaccagtag

SEQ ID NO: 28442 - DNA, 1773 bp, Oryza sativa
  Clone ID: PAT_MRT4530_33040C.1
ggcctgaaacaagcatgtttaaagtaaatatagaatggcatagcattggactcaatgaatcaatcaggttgccgacatatggttcactcaacagttccgcttgcccaggtcgatacagagtaaatttcaccgcctgctacaaacaatgtcatggacatcaatgtccattctttttttgctttgtttccaagtttacatcttattccaagacaacagaaagagaccgtcaaaattgcagcctttcctagctagatactatcggaggaggattttcaacaaatcagtgcttggcgttgacaagagccatgtgggcaatcagatccaacacacggttgctgtagccccactcgttgtcataccatgacacaagcttcatgaaggaagagctcagtccaataccagccttggcatcaaagatgcttgaccttgcatcaccaacgaagtcattggaaaccacatcctcatctgtgtaacctagaatacctttcagtgcaccctctgatgctgccttgatggctgctttcacatcgtcataggatgcacttttttcaatccggcaggtcaagtcgacaacagacacatttggtgttggaactcggaaggccataccagtgagctttccatttagctcagggaggactttcccaacagccttggctggaccagtggtcatgagaccttcaacaatgccaaattcctcatggacaaccttggcaagaggagcaagacagttggtagtacaacttgcgttagaaacaacattcattttaggatcatagctcttctcatttactccaacgacaaacattggagcatctgctgatggagcagatatcacaactttcttagcaccgcccttcaaatgtgccgatgccttttcagttgttgtaaaaacacctgaagattcaacaacatactcagctccaaagttaccccaaggaatatctgctggatctcttttgctagtgattgtgactttctttccattgatctccagggttgaatcatccacaaccttaatggagcctttaaatggaccatgagtggagtcatacttgaacatgtaggccatgtatttagcatcaatgaaaggatcattgacagcaacaacttcaatatcatctctactggttgcaatacgcaggaccaacctcccaattcgcccaaacccattgatgccaacctttgtcttctcgccactcgaatattgtgggacggcagggggtgcctgagtagctatcgctctcagcggctcaatgttcctagcaataaacaagaaacgaaccccagcatttgccccccccccccccaacccaaggttcccagattcacggaaaccaagcttaagacgaaatctaggcgcagtatcagcaacacaactagtcacacaacgaacgaagacgtcccaaccctctgccaatcgaaccccgacgcggaacaaaccggaaaattccggagggggggtggggaagaaggtgagggagagggagcacaggaggaatggaagggagggcgataccttggcgggatcggcggcggcggcggaggcgcgggcaaatgaagaggaagctgcgatggaggtgaactgagctgagccagcgcttctcaagcgtaacaccttggcgggatatccggcggccgcggcggcgcggaagggggcggagagctgctgcgccatggggggggcctcctcgcgcgctagggttttgaccgcgccgcggagagagagagagagagagctcgcctttcgtttcgcggcggaggacctcgtgc

SEQ ID NO: 28443 - DNA, 1425 bp, Oryza sativa
  Clone ID: PAT_MRT4530_33041C.1
atggcgcagcagctctccgcccccttccgcgccgccgcggccgccggatcccgcgcctccgccgccgccgccgatcccgccaaggtatcgccctcccttccattcctcctgtgctccctctccctcaccttcttccccaccccccctccggaattttccggtttgttccgcgtcggggttcgattggcagagggttgggacgtcttcgttcgttgtgtgactagttgtgttgctgatactgcgcctagatttcgtcttaagcttggtttccgtgaatctgggaaccttgggttggggggggggggggcaaatgctggggttcgtttcttgtttattgctaggaacattgagccgctgagagcgatagctactcaggcaccccctgccgtcccacaatattcgagtggcgagaagacaaaggttggcatcaatgggtttgggcgaattgggaggttggtcctgcgtattgcaaccagtagagatgatattgaagttgttgctgtcaatgatcctttcattgatgctaaatacatggcctacatgttcaagtatgactccactcatggtccatttaaaggctccattaaggttgtggatgattcaaccctggagatcaatggaaagaaagtcacaatcactagcaaaagagatccagcagatattccttggggtaactttggagctgagtatgttgttgaatcttcaggtgtttttacaacaactgaaaaggcatcggcacatttgaagggcggtgctaagaaagttgtgatatctgctccatcagcagatgctccaatgtttgtcgttggagtaaatgagaagagctatgatcctaaaatgaatgttgtttctaacgcaagttgtactaccaactgtcttgctcctcttgccaaggttgtccatgaggaatttggcattgttgagggtctcatgacaactgttcatgccacaacagccacccagaagactgtcgatggcccttcaatgaaagattggagaggagggcgtggtgctgctcaaaacataattcctagctccactggtgcagccaaggctgttgggaaagtcctccctgagctaaatggaaagctcactggtatggccttccgagttccaacaccaaatgtgtctgttgtcgacttgacctgccggattgaaaaaagtgcatcctatgacgatgtgaaagcagccatcaaggcagcatcagagggtgcactgaaaggtattctaggttacacagatgaggatgtggtttccaatgacttcgttggtgatgcaaggtcaagcatctttgatgccaaggctggtattggactgagctcttccttcatgaagcttgtgtcatggtatgacaacgagtggggctacagcaaccgtgtgttggatctgattgcccacatggctcttgtcaacgccaagcactga

SEQ ID NO: 28444 - DNA, 1220 bp, Oryza sativa
  Clone ID: PAT_MRT4530_33042C.1
atggtggacgagattggagcggcaaagaagggtgagttcttggtcaggttcgtagtcagtatgcctgaatcgagctcagatcctaacaacgggagaggaaagtcatccaagaggaatctcccttcttggatgggttcgaaagacggggaggaaaatccaggcaagaagaagcacatggccacccacgagaaggatggggtggtctttgtactttcagggtttgtgaaccctgaaagaggcacattgcgctcccaagcattggatatgggagccgagtatcgacccgattggacatcagattgcacacttctcgtttgtgcatttgccaatacccccaagtttcgacaagtcgaatcgaacaatggaaccattgtctcgaaggactggatcttagaatctcacagccaaagaaaacttgttgatattgagccttaccttatgcatgttggaaaaccgtggagaaaaaataaagagctagttgaatctgacgaagatcagaagaagccacataaagagcatcagaagcaagttgatcgatctcatatcaagacatctccctctgcaggcatagaggcaaaacattcagatgttactagtaagcaattttctccaacaaaaataaaacaatgggcaaagaatgatttagcacagacaatatcatggttagagagccaagaagagaagccagaaccaaatgagttgaaggcaatagctgctgaaggggttatcacttgtttgcaagatgccatagaatctctcaagcaagggaatgatgtcaagggagtggcggagcagtggagctttgtcccccatgtcatcaatgaactggcggaacttgatggaagaagaaaagagggatcgttatcgaaagaacaactctcccagctagcaatcaaatgcaaaaagatttatcaggctgagtttgcccacatgcatgataatgacaagaagcatcagagcaagcctagatcagatgatgctcagtatgacagtgatgacaccatcgaaatgacggaagaagagattgatctcgcatgcaggcaactccctgggttcttaaaactagcatgtcgaaccgaaaacatcttctccgtagagacttctaagaacaagcagtccaatgggaggaagcacacttcgtccaacagtggtgggagaacacagcaaacacgcccggccttccgaagaagggacttagatccctcattctgttagaaaaa

SEQ ID NO: 28445 - DNA, 314 bp, Oryza sativa
  unsure (1)..(314): unsure at all n locations
  Clone ID: PAT_MRT4530_33043C.1
aacagtttaaccgntgccattganggggaacggtttgggatgttaacaaaatntctagaggttgtnccgctnaccctaattgctgattaaaatcaatngcaagtntcattccatctngaaagttaaaaggccttggactttggatgaatggttagacatcagaggtagatctcctgaagttttacctcttctggatcagaaggtttgatgtcagaaatccttgaaacacatcatacctaatgatggtgatgttgctttaggaatgcataatcggtttcgattttaaaaaaaaaaaaaaaaaaaaaaaaaaaaaa

SEQ ID NO: 28446 - DNA, 428 bp, Oryza sativa
  Clone ID: PAT_MRT4530_33044C.1
cttaaaaccctctccttgttcttcccaacttcgcaagacgcgattcaatggtggacgagattggagcggcaaagaaggggtgaagaggtgaatctctcttttctgttcgtagtcagtatgcctgaatcgagctcagatcctaacaacgggagaggaaagtcatccaagaggaatctcccttcttggatgggttcgaaagacggggaggaaaatccaggcaagaagaagcacatggccacccacgagaaggtgcagaaaggatcggatttctccaaacttttggatggggtggtctttgtactttcagggtttgtgaaccctgaaagaagcacattgcgctcccaagcattggatatgggagccgagtatcgacccgattggacattaaattgcacacttctcgtttgtgcatttgccaatacccccaa

SEQ ID NO: 28447 - DNA, 491 bp, Oryza sativa
  Clone ID: PAT_MRT4530_33045C.1
tcggacgcgtgggtggctattaagtcagtgattatttctgtactgtgctattactgatcgatgcaaatgcccttctgcccgaagctctggagctcggcggcgccggcgccggtgcagccggggagcgtggtcatcaatggcacggtggtcgtcgccaaccacttcggcctctcggctcccggcaagtccaccaccctccgcctcttcagcggcacggaggtcgatcacgagacgaggaaggggaggctgagcgcggaggcggcgttgaggggagggaagaagacgaggcatgggaaggcgagcacgacgatgtaccaggtgacgttcttcgtcgacggcgagttcgggacgccgggcgccgtggccgtcaagaacgggaaccggaacgaccagttcttcctccggcacgtccggctggacctcgccgaggaccggagcatccacttcgactgcaactcctgggtctacccctataagaagaccacctccga

SEQ ID NO: 28448 - DNA, 3168 bp, Oryza sativa
  Clone ID: PAT_MRT4530_33046C.1
ctcttctgtccttccctctcaaagtaagcagcatcagatgcaaggggtgacaccaaaggctggcacacattctcttctctcccctttttttttcctctctgctttctttcttctagcttccttctccaacattccaaatggtgatgctctgatgacctcctggctagcttctacacacactccaagaatcctctccagtgatgtagtatataaacctcatgaggggctaatcccttgtttgcatcaggggatccatctgaataattgatactggctattaagtcagtgattatttctgtactgtgctattactgatcgatgcaaatgcccttctgcccgaagctctggagctcggcggcgccggcgccggtgcagccggggagcgtggtcatcaatggcacggtggtcgtcgccaaccacttcggcctctcggctcccggcaagtccaccaccctccgcctcttcagcggcacggaggtcgatcacggtgacgctgaaagtctgaaaagaattgcagagacgaggaaggggaggctgagcgcggaggcggcgttgaggggagggaagaagacgaggcatgggaaggcgagcacgacgatgtaccaggtgacgttcttcgtcgacggcgagttcgggacgccgggcgccgtggccgtcaagaacgggaaccggaacgaccagttcttcctccggcacgtccggctggacctcgccgaggaccggagcatccacttcgactgcaactcctgggtctacccctataagaagaccacctccgaccgcgtcttcttcatcaacacgagctacctgccagataagacgccagaggcgctgcggctgttacgggaggaggagctcagaagcctgagagggaatgggcgcggggagaggaaggactgggagcgcatctatgacttcgactactataacgacctcggcaaccctgacaacgatgaccatgtccgccccgtcctcggtggcaccaagacccacccctaccctcgccgctgccgcaccggccgccccctcagcaagaccgacggggtgacggagacgcggaagcacaagctgataaacctggactactacatcccgccggacgagcggttcagcccggggaagctggcggaggtgctggcgatgggggtgcaggcggtgacccacttcgtcatcccggaggcccgctccatcttccacggcgacgtcgtcaacttcaagtccacggagcagctgcgcgccgacctctacggcaagccgccgcagccggcggcggacgccagggtcatggacgagctcaagtcctccgtgccgtcgcacaagacgtacaagcaggtttccaggattgtcaaggacaaccccgccaagttccccacccctcaagtcatccactatgacactgaggcgtggaggagcgacgaggagttcgcgagggagatgctggcagggctcaacccggtggtgatcaagcggctggaggtgtttcctccaaacaagagcaagataaccacggacgatatcatgacccagattggaggtctgaccattcaacaggcgatggagcagaaacggatgtacatcctggaccaccacgactacctgatgccatacctccggcggataaacacggagggggtgtgcgtgtacgcgtcgcgcacgctgctcttcctcagggacgacggcgccctccggcccgtcgccatcgagctcagcttgcccgacggcggcgtcggcggcagcgagatcagcagggtgttcctcccggcgagccagggcaccgatgcgcacctttggcacctcgccaagactcatgtcgccgtcaacgattctgggtaccatcagctcatcagccactggctgttcacgcacgcgacagtggagccgttcatcatcgcgacgaggaggcagctgagcgcgatgcacccgatccacaagctcctggacccgcacttcaaggacaacatgcagatcaacaccttggccaggagcatactgctcaacgccggtggcctcctggagaagaccatgtacccggggaagtactccatggagatgtcctccgatatctatgcccattggaggttcaccgagcagtccctgcctaatgatctcatcaagagggggatggcgtccagggaccccaaggcgcgcggcggcgtgtccctccacatcgaggactacccgtacgccgtcgacggcatcgacgtgtggctcgccatcgagggctgggtgcgcagctactgcgaccacttctaccacgccgacgcggcggtggccggcgacgccgagctgcaggcgtggtgggacgacgtccgccgcgtgggccacggcgaccggcagggcgacgccgcgtgctggctggacctcgacaccgtcgcgggcctcgtcgagacgctgtcgacgctcatctggaccgcgtcggcgctgcacgccgccgtcaacttcggccagtacggctacgccgggtacccgccgaaccggccgacgcggtgccggcggttcgtgccgctcccggggtcgccggagatggcgcagctggaggccgacccgggccggttcttcctggagacggtgcccgaccggttcacggcgacgctggggatcgcgctgatcgaggtgctgtccaaccacacctccgacgaggtgtacctcgggcagcgcgcgacgtcgacgtggacggacgacggcgaggtgctgctgctgctggacaggttccgcgacgagctccggcgggtggagaagagggtggaggagaggaacaaggaccccaggctcgtcaaccggaggggccccgtgagggtgccgtacacgctgctctacccggacgccggcgacgtcgccggcaaggagaaggggatcaccgggagagggatacccaacagcgtctccatctgacacgattcatcatccttcttctcttatacttcatctatccgactcgactcgacgcgtgtggaatgtaaagttctctgcttttctttttctttcttttcgtttgagagttttggtgttggggatgtgaaattgagattgattggttggtttggattggagaattgatgagcaaactgtgatgcagaattcaatacatgtaattattgttctaatccaaaagcccggtaaagaaaacacggtcgatggatataggccgatctctcttcagaactgctc

SEQ ID NO: 28449 - DNA, 257 bp, Oryza sativa
  Clone ID: PAT_MRT4530_33047C.1
ccaacgcacgcggcctggaccttatcggggactttcacagtccatggatgcttctgttccgcttgcgtgccaatcgacagacacgaatgcgcatttctcaccatgtgctacagctgccgatacccatggcttttgctcctaagatacaccctcttctgaacaatgcacttacgcacgattaattatatgacaactgggagatcatccggataggttatttatgctcaaagcataatacacttagtatacgttgtact

SEQ ID NO: 28450 - DNA, 432 bp, Oryza sativa
  unsure (1)..(432): unsure at all n locations
  Clone ID: PAT_MRT4530_33048C.1
cccacgcgtccncaacaatcttggcagaagtgtgaacaaagccanctttaatcgtattcggactgctttttcgtatggtgctcagaagcttggtcaagttctcttgttacaaccagaacttattcctgatgaaatttatggatttttcaagaatacattgaataggattggaagtggagtaaggccagacattggagatgaaagctataatgatgcatttcgttgtgagtccttccttggtcctggcaaggcattgtgggatgagatgtcgagcatgaaaatttcctgcaataatcaagatgagaacagaggtcctcaccatctttcaaagtgcttaagttaacaatgactcatatgccaccttgaatgtgcctacacattttcatggagatcacatggtagcatcaagtactgatttgagtctaaaatcgt

SEQ ID NO: 28451 - DNA, 255 bp, Oryza sativa
  Clone ID: PAT_MRT4530_33049C.1
tgttgataactggtacctcatctgatgatcgacaatcattcaggcagtaccttgagcactcagcgcatactcaccaggaggacaccatccagatgagcgggagcattcataccatcaaggagaaaagatcaccttcctatgggcggttcaccgttaaggcggatgcatactacatgtactatgaagactgctaactttggcaacacgtcggagcttgaggacaagataaagacgggagaccatgttcaagcttgt

SEQ ID NO: 28452 - DNA, 2815 bp, Oryza sativa
  Clone ID: PAT_MRT4530_3304C.1
gttggcctccgccccggcggccccgtccagctccgccgccgccgcgtccacctccttctctctcctcgcttgcgctagctgctctctctccctcccatctcgcccttgcttgctgctggagctcgaggggaaccctatcctagcctagcagtgcgtgcgtgcgagcgagcgccgcgggggcgtcccgggggagggcgagggcgtgcgccgccgatccgatccgcttcgccgccctaagttccgaggccgttcgaggtaggtctccgtccgacttctacctcagcgccctctccgccgcatccagggactccgccgccgccgccaaccccgcctccgatcccagcctcttcgaatccgtgacggcggtgtgcgagatgtggaggtcaagggaggcagggacgagatggtggcacggacattcccggtgatgagcagcaggatggtaaatgcaagaagccaaagggacgtataatcccgggctattgggcttttcatgcatcaagaggttgtatggcggatcctatttgatcgattgttcccttgcctaactctgtcaaggataacaagaataatagcctcattaagaaggaaggaagcaacagtgggaagggtgcagcaacatctaatgatctagaaagagaaggaaggaggacactagaccctaagacactgaggaggcttgcacagaatagagaggcaccaaggaaaagtagccttagtaagaaggcttacattcaacagttgaagtcaagtaggattaggctaagccagcttgcacagcaagttcacgtggcaagagtacagatgccttttgatctgttctgtgatatatctcccacgagtaagaattggaagatctgtgcaacaatagcaaggaatgaatcttgtcaggttggaacgaggatcagacaatattcctcgagagattgcgagtgttgtgtcccaaaaattcactttctgcgtttctgtcaccgaaaggagcttgatgcagaggaacatcgcgtttcaagtcaatagcattgaaacttctttggcagacaaggcactattccacaggttagggatcagacattgcaactcacatcatctgtcatttcaccttttgctggtggttcaagtatatgtagagaaagtgagtgtcctgatcatacttcgacaccgcctgcttcttctaatacccctgtgggtgatatggagaaagcccatgctgatagcaggaaacgacgccccattatgcgccttcctctaggtgcatcgaagaagctaacttttgaggtgggcgcgtccgaaggaaaggatatagatacagctgttgtttcagaaagggtgcagaattagcctccattgatgggaaaaaaaagggcaccgtcaatcctgctggtgctcagaggacaagagcttcctatatgaaatagaagctacaatttcacgccatcggtcttcactggcaatggacgcgtttgaatcaagtccttagttatgtgctctgctcttgttctgtgattcttgttcacgcgaaggtcactgactttacggtattggagttggagtagaagatcagctgctccatcatcgacgatggcctgatccacaaagatgaattttggtgctgatacttccagggagatacagccatgaatccacctaggtttttcacggttagactaaccacagcaaaccagcgctatgtgcgcagaccagctgcaatcgcacaaggatatcagctggaggatggccagagactcaaattagtaacaacccataacctaatggtctacattgaactaaagagagcatctggcaaaatatacatcactacaggatggccccagttcatagaagccactggtttgcagcttaaagaatatgtggttttcaaagtcttatcacgctccaagatgcatgtcatcatataagccaagagtggttatcttagatgtccagtgccaagcaaaccaagcaactcacagctaaagaaaaacgcgcttcagaaaccaaaaccaccagaaaaaaagaaccaagactaagccacacatgcaacaccccatgcaacagaaattaaaagccgatatagggtcagcttgtacaggcaacaccaaacgcactatcaatgaaatgtgcttctgcaccggggagggacatcaatctatcaactgaactcaaagactacttcaaagatattgcgcaatttctgcacccctcaaacgaattctatgtcacaaccataaatccaactttcatgaagcaggataagcacttttcaaagcaattctctatgacatacattgcactaatcgtgcggaagaagacatcgcagatcgaagtacggattccagggcactcctcaaccaccatggttcttcaccactccacagaaaagcgctttaacctgaaatcaggatggacccattttccaacaagcaacggcatacaagttggaacaatctgcatctttcacttccaccagactaatcagctgcaagcaacaatagatgtgctgtgagcaagatgctcatgcaacacaagctgttatccttttaatatcgtaggctatattttcactctgctacttctatagctgttagtatcattctttgtatgctttgcatgggtactcaatttccatgtaaaaatcacgcccaaactattatgccagcgtgctgttacagaacaggagctgacggtaccttacgtactgtctttggttgttttgcttgtacttatatgcaaccaaagacaattcaccctgtcctgtatgaacaaccatgctatcatattctgtttcacctttatctttatgtgtatgcagcaccct

SEQ ID NO: 28453 - DNA, 849 bp, Oryza sativa
  Clone ID: PAT_MRT4530_33050C.1
atgaaaaatttcacggtggggaaggggcacccggacgcacctgagcatcgacgtggacttgttccagccgtggagcctctggtgcatagatcggcgggcgcagacgagggggaggaggacggctgcggcgacgacggcgcagacgaggagcacgactaccaccagatcggagaaggggctagaagacatatacgggtgctggaaaaagcaaaaggaatttctcatcgtggcgagaccaacgtggacatttgtcgcaggagatgggcctcggctcgcctttgcagctggcacgcccgcccgcgtgagccaaatggattcccaactttgtcgtggagtcgtgcggtgcgtggagtggagatcccctgcggtgaccaagcgaacacaaacagcggaccggtcagcgtgcagcagttgcaccgctgcgttgcacgccgagtaggagtagaaaggcgggtgaaacgagtaaaaaatgcagtggacgtcgcggagcatgccggcggacggagcggcggcggggctgaggggcgggcggagcgacgacaggccgcaggcagcggaggttgccggcgagtgcgacagctacactccgtcggccgctccgcccgcgatgcccagccggacggcgccgcccctcctcgcttagtagccgtacgcgccacctccctcctcgcccggccacctccgccgacgtcctcgatggtcacatccgggtcggagctgcccttcgtcgcccggccgccgagcgccgcctccctcctcccccggccgccgcgcgtcgcctctcctctccaggccgccaagcgccgcccccctcctagccgcgccgcctccctcctcgccgtagagtag

SEQ ID NO: 28454 - DNA, 233 bp, Oryza sativa
  Clone ID: PAT_MRT4530_33051C.1
attccaaataaattgtatatggtgttatttattaggagcggggggggaccaaaaaaacatcgaacctgacctgtgtcaacaacaaggtgcccgtatgcaggcatgcatgaaacttggggtacaaactagcaacaggtgactccggaagaaaaatgttaattattcacaaattcacacaacatatcatctgcaaaaataaagaatgcagacggaatggcctaacgagcgaacta

SEQ ID NO: 28455 - DNA, 1387 bp, Oryza sativa
  Clone ID: PAT_MRT4530_33052C.1
agtaacatcgccaccaaatatgatagttggtctgtcactgacaagggaattcctccgtgtcaaagcatccacaagtacagtattccttccccccaccttaacgtttattttaagggcaacatttgcaagatactgcttgctcattttaaaaacatgttttgtcaaacaacattggtagaccaatccaagatcagtctcacagattcttttgagatccccataaagagaaccattattgtcaggcagtattacaatcagtaaatcaagttccctgccctgcggtctgagcatgttcattgcatcttgatagcgtgccttcagtgctctttccacatgttcaggtctagcagtaagtgggggcagcacaggttccagtgcaaaatccattccagatatttggcacatgatagccagctcatgacagaagcccctggcagcactatcttgcacatttctagagaagttaatacatgcccagttgttgactctcccaccattgaccattttcttattcatcatgttccactgaccaactctcggcaagtacatccttttctctcccactatcatgggatttaagccttgggagggcagaacacgagcttcacagattgcaagacgctcatcaatttttatgccaaattcctgcgcatactgatcttcatggtatgcattgtgagatacagtccgcagaatatccagttcccgctcttgaggtcgctggcaagtcactttcaatagcgcagtaatctgtttctcgttaagccgcttcgagtagcgctgtccctcagcgatcttacaaacctccataggcagataattgggcctttgctgattgcccacttgaaggcaaggcaaagtggtgtgctgaatactaaaaccatatgtctccagaaaatattgcaccgcagtcttcacagtaccgcgatcatcgacagggaatgatatctcccttgttgcctgtgaagtgagtccagatatacgatattttgtacgcatgtttcctctatgcgtcacctcaaccttcacacctcttagagctttcttatcttcacacgatcagaatcagataatggtctaactgagatgtctctgttcagaagctgagcaacaaagtcaatcacaggtagaggctcaataaatgcagttgatgacatatcaatattcagtgagagacccatctgggtaggccttatgctttggtaaaaaccacgccaactttccaaaccctcaccaagttgctggcgtctccctaaattgggagaataaaatgaccgaccaactggtgagtaccttgtggtaggcaattcacgtaacacaatgtcaaggacttgaagggcttcttgaggagcatctgcttgccttccagctagaaacatagccaaat

SEQ ID NO: 28456 - DNA, 3120 bp, Oryza sativa
  Clone ID: PAT_MRT4530_33053C.1
ctaaggaaagctgaagataagtctttatacttgcagagactttagggtacaacagatgaaacgaaataaagatgccacagatcataaaaaaaaagtacaataatttgtaaatagatcagaaagtcataaaagaaaaaggcacaactgatggagtaggtacaacatatcgataatacaatggcacattgcaattgcggattatgtctagatcatccattattcttttgctagttcgttgtactcatctatcaccacactggggttaggggaattcttagccttttgaatcatgcttgccagttgtttgatatgagatgtctttgccctagtatcttcaggtgcctggctgctgactgttaaaaatacctgttgcagctttgagaggttttccagaccatacatatagtccaccattctgaacctcagctcaagcctctgaagctccggcattgctccttctagaaagctcagagaaggtagcacaggtgccgcaaaatgcagtagcttcagcttttcaaatccctcatccagcacaaagatcttacctctgtctgctgcatggagtgaaaaagtgagagagaataactcaggcaggctactcagaaccacccaagtatctgcctcaagcgaactccggcaggtcgacagcttcgcaaggctgtgcacgcggtcaatccaggaggaccacggctaaccaggtgcctggctgctaaaggtcaaaaatacctgttggagtgcttgagaggttttccaggccgtatacacactcaatgattctgaacctcagctcaagcctctgaagctgtggcatcgccccttctaggaagctccggggtggtagcactggtgctgtaaaactcagcaacctcagctttgtaaaacccccatctgccacaaaagattttacctcctgactccaatgagaggacgcagtgtcctggttgaccttccagagatctcaatcccagacagtgtctgtatagttttcatctttgtgattccttcagttaatctcaatgctctccgcttggttttattgccagccaatagatggaccattcgttgaagcctctccactgatgcaggcaagtttgtgacatccgtgtcccttatgtcaagtacctccaaatactccagcctgcctattttcttcggtatcttgtatatgtccgtcccacgcaagcttaggtacttcatctgatgcatattacatattttcttgagctggtttgacgacaagtccttgcatccttcaagatccaacacctgcagtatctggaatttgagcatagtagaatgaagagctttgaaactctccaacacagtcaaagatcggacatgcgacaacttcatcctctctactagatcagtttcttgcctatcacttttatggacagacaaccgccgcaccttgtagcttggaaacggtgtctgccagtggctaccaattacagtgatgaaattctcatcaccagatttggagacaatgtactcaaggaccatgtcatgaatttgacagctcttcaccttcccattgctgctgttgttgataggccgaatcaagttcctgccaatgagttcattgaagttgtcttctgcaacttcttctgccgtctgcccatgtttgtcagtaacgaacccttcagcaatccatcttcttatcaaacatttcctgctaatattgcggcccttcggaaacgtactcaagtagagcaaacatgtcttaaggtcaggtggcagatttttgtagcagtggttaattatccgcactacttcagtggtgagattgtttcccaactctgcacttaaagccttctccacttcaatcaatttctgatccaacgtctttccaatctttgatttcagttcactagcaatgagccctgacactactattatggccaaaggcagaccaccacacattttcacgacaatctcatcattaatggttggagtgggacacggatcattagcatatattatttgaagaaacaatttgctggagttcactggatcgagctgtttgagcttgtgcacatgaccattttgacggcggcaggcttcagctacagagttaaacctggtagtcacaattacgcaactacccttattattcttaggtaatgaatccctaatactttcccatgctgatacagaccatatgtcatcaatcaagatatggtacctcttgccttgcagttgatcagcgagcttcttcttgagggcttcaactccccattcctcaattccgtgaagagcatcctcagaagcgctgacctgcttctgatggaactggctgacaaggcttctcaaaactgttgggagatgaaacttctgcgacgcgagcatgaacgctctggaatcaaactcatctccaaacttgcggtaaaatgacattgcgagtgtggttttgccaagcccaccggatccgacgatagcaaggtaactgatttggctctgctgctggctgttctgctttgagaccatgaaccatctttgaaggtcgttcatggcgtcgtccatgcctacaggttcagtggtgccaatcagccgggggagaggagctggatggtctccgggagcgccggagttgttgttgccgccaccatttctgtttgctgggaggttctccaccccgtacctggtgcgccgctcgctgacatgctgcgccctgaccttgaggttgccgatgtcggtggcgatgcagcagcgctggtacagcgtggtgagcaggtaccacgtcctcttgagggagacaactgtgccggtcccgcggggctcgccgccgaggcggtggcggacgtcgtcgacgcagtcctcgatgtcgtaggcgacctcgcgcacctgcttcatccagtcctgacgctgctcgtcgtgggcgacgtcccgcttgagcctgctgaggaaggcctgcatgctggcgagctcgtcgttgatgtactggatgtcgtcgcggacgccggagatcagggtgtactcctgcgccaggagggtgcccagcttcccgacgagcgacttcacggcgccgctcgacgcgccgacgaccagatccatcgtcgatctggctcgcttaatcaccggccaaatcaatcgatcaatctcatgtggattttataccga

SEQ ID NO: 28457 - DNA, 215 bp, Oryza sativa
  Clone ID: PAT_MRT4530_33054C.1
gctcgccgctcccagatatcgctctattacgcacccggacagggaggacttcagtgatctcgagggctatcaccacctctacacccacctcacacctaccgtgggatgcggagcaaacaccgaaaatcaactacctagacactgtgtctacgcagttaataacttactttaatgttagctacacactaaagcaatcactatattttactggatta

SEQ ID NO: 28458 - DNA, 329 bp, Oryza sativa
  Clone ID: PAT_MRT4530_33055C.1
ggggaatccatatttgaatacccaccatttgccagatgatctaatgtttatcaacagcttgcaaaaaaaaaatgctagttcacctgtctatccatccacaacacttattacagtgttaccccaccatgatttcctacgtacaggtgcagataggctacacatggcacccctgtgttcattctttgtaagccttctgaattataatgatgactacaacaactctacaagcccacatgaagaaggggggtggcattagccattttactgctaaaggttataactttgcaggattaccaagcgcatatacaagacaggggataactcagaga

SEQ ID NO: 28459 - DNA, 516 bp, Oryza sativa
  Clone ID: PAT_MRT4530_33056C.1
atgcctctcccctacagcccagtcagctttgagcaagctcgagttggatgcggagatgacacggacaatgacaaactcgaagtggtggaggcccagcggcctcggctcttccatcgagcttgtcgtgggctcgaggcctcgccaccggcactcatcttcttcgaccttggcaagggggcggcaggtgctgggtctagggtggtggcggagctagggacagtagaggccttgtggaggagagaatcgaagagccgcaccttggtctcgctctgcgtcgagctagccgccaacctcgtgcttctcccgagcacgacaaagggggtgagctccgcatcaatctcgacgccgaccttgtcatggccgccgccccctcttctctcaagcatgcgagatctccatggccgcctcaagctcggcgagggtgaaggaggaagaaaacaccatgacaggcagggaccgctgacatggcatcctggggtgtaccaaaaccagggtaaaaaccactctggggtgtaa

SEQ ID NO: 28460 - DNA, 378 bp, Oryza sativa
  Clone ID: PAT_MRT4530_33057C.1
atgcccgtccatcaagccccacactacgagatcatggtgtcgccgcacttggcatcccttcgcatcatgggagcccaccacttgtcgatgctttctattgccactgtcagccccgcatgccgcttaccactagcgcctgcgccgcacaccagcgaagttgctggctacctccacctcaacctctgcaccgttgtagcaacaaccctacttggttgccactccatcgttgtcacggactctacagctggatctagcatagaggcgctagattctgtcgtatcctccactccgacagcatggaatctacctgccaccatatacgtgccaaaccgctgcgggggccgatgctgctcccaaatccacctcctcacggtctag

SEQ ID NO: 28461 - DNA, 2206 bp, Oryza sativa
  Clone ID: PAT_MRT4530_33058C.1
ccggccgggctgtcacttctcttccattcctgaggaggaagaacccaactgcatcttgccggatactcctagcttgcagagtcttctgttctgcaactctgaagaccctgatcgatcggtgccattcttttttgctttccttcgtcagttcaatcgtagctctctgtgatacaaaaaaaaaatggctgggggtggaacgagcatcaggaagtatgttggagccctaaaggacacaacaaccgtaagcatagcaaaagtgaacagcgattataaggatttggatattgctattgtgaaggccacaaaccatgtcgagaatctaccaaaggagaagtacataagaggatatcttttatcatctctctgctggaagggctcgagcagatgtagcatactgcatccgtgctcttggtaggcgtctttcaaagacacgcaactgggcggttgcacttaagaccttaatcgtcatacaccgtgccctacgggaagttgatcccactttccgtgatgagctcattagctatggaagatccagtacacatatgcttcatttgtcctactttaaggatgattcaagtgcagaagcttgggattattctgcatgggttcgcaattatgcattgtacttagaagagagactagaatctttccgtgtactgaaatatgacgttgaaaaagatccaccgagaactcgagacctcgacacggttggtttgcttgaacaactgccagcactacagcagcttctttttcggctactcggttgccaggttgctctagagagtgttaggatccatacagctatcaacgatgggatactgaatctggttgacaagttctttgagatgcaaagggatgatgctcttagagcccttgacttattcaaaagagcaattaaccaggcgggacaactttctgaattttatgaaatgtgtaaaaccatacatattgggcgtggcgagaggttcttaaaaattgaactgcctccgacctcattcctgcaagctatggaggagtatgtgagagatgcaccccttgcttcaataaaccaaagaaatcaggctgtactagcaatagagtacaaaagaaaaccagaggatgaagaatcatcaagttcagctcctctgccgccgcctccagtatcaacttcagaatctgaacctgaacctgagcctgagccagttaaagaagtctcacccgtacatgagccaaccgatttgctgggaatgaatgaaccgacccctgacgtgtcaaaaatcgaccaaaagaattctttggctttagcaattgttcaaccagacaatacaccaaaagccgctgctcctactactgaaaacgttgccactagctgggagttggcacttgtcgccgcgccaagttcaaatggcaatgctgccacctcgaacaaactggctggtgggctggacttgctcacccttgacagcctatacaacgaggcgcaccgacaagcgcaacagaacgcaagctacaacccctgggaggcagcagccccagcatcatctggcccaatgatgcagcagccaatgcagaacccgttctacgcctcgaacgccattgctccgcccttaaacgtgcagatggccgccatggcgcagcagcagcagcatatgttcatgctccagcagcagcaacaacagtatgatcagcagcagcagcagatgatgatgatgatgggaaggcaaccgtatgatcagcagcaaggctcttcttccaatccgtttgctagtccatacatgtctgcaggagttcacccgtacggtccggggatgcagctccatgccggcaattcgtacacatactctgggacaggcatgatgtagagtgacacaccatctgctgcttgtttggcagttttttttttttcattttatcgcatttttttgggcggtttatcaaatgtgattttaggaggattagatcggtagatgggacctggtatagagtcaagatgagcattgccgtcgaagttttttcccggctctttgctgacaaagagggcactggagttctctaaaaaaagaaagcagttgtgaagggttgtatacgttgaaatctaatgtaacaactgctgctatttctgaaacataagatgtaaatgaacacttatgtttcaaaaaaaaaaaaaaaaaaaaaaaaaaaaaaaaaaaaaaaagggggggagcctgcagcccggggatccactagt

SEQ ID NO: 28462 - DNA, 1016 bp, Oryza sativa
  Clone ID: PAT_MRT4530_33059C.1
tgtgcccctccgacaagaccccgctccgccgccacgagctccacgccctcgcggtcgttgcggcagcgcatctgcgtgacactgcggtgccactcgtgccacactgccgcatcagaggatggagaagcgttgggcatcagcgatggggtacgctccatcagataccgctcctcccgtccacgatcaaggacatggcgttgaaggcgtcgggcacgtgctggcactgcaagccttgcgtcggcccatcggcggcgggggcttctcattggcaccacccataccaccagggcggcggcttcggcgactccgacgcggcctcaggctccgagcagtttctctacatgtaccacagtactagcacgccgtgagctcggcgcccggcggcctggatgccttggttccacggcagcggcgccctgtcttgcggggaggccacgccgtccatgaactcgaccagggacccattctggtgtccaggggcatttgtgtctgatcatcaggtggaaaaggcaaagcgattttagaaataagagaaaattagaaaatggcaatccaacgagtaggggcttgagattggcattttatcgaatcatgttttgaagatggcataatagagaaacacagttttgaagatggccaaatgtccattttcttgacatgtccattttcactgggcactgccatgagctgggcaactgtaaatccggaattcttgcatttttctcatcttttgttgaaggaaccatcggggacttggttgccatcaaagaatgggtggctgctttcgggggggcccgggacccattcccccctataggagcgattacccccctcactggccgccgtttacaacgcggactgggaaacccggcgtacccacttaatcgcctgagaaacccccttcgccactgggaaaagaaaaaggcccaccgtcgccttcaaaagtggccaccggaaggaagggccccccggaccgcataagccgcgtgggggtcccacggacctcatgcccccca

SEQ ID NO: 28463 - DNA, 723 bp, Oryza sativa
  unsure (1)..(723): unsure at all n locations
  Clone ID: PAT_MRT4530_3305C.1
cccacgcgtccggtctcaaaggcgttcatacagggcagatggtcctcaaagttgtcgaagccatggatgtttatctcgctggaacagtcatgctgatctttgggatgggcttgtacgggctgttcatcaccaatacttctactgatgttccttctgagtctgaccagagctctgcagggatcatccttattcgggatgtttgctttaaaggaaagaccaaagtggatgaagattacctccctggacgaactgaaaaccaaagtagggcatgtcatcgtcatgatccttctggtgaagatgttcgagaggagcaaaatggtgaagataacaacggggttggacctgctgagctactcggtctgcatcttcctgtcgtccgcttcactgtacatcctgcacaaccttcacaggcctgaacaggatgactcggttatgccaaacttgtaaagtcatcgagagttaggaaaagaaaaaaaaatcataccaccatcaaatcatgagctcatgatctgtagcaccggatggaattgtattagtaccatcctgatgtgccaaaagcagggtaaaaaaaagagagcaaagaaccactgaaccaatctctctgtgaaaaggcaagatcaaggacagcttcaaatatagctacaaaaagaattaaagcactgaaattttgtatagaattccttggtagtattcgctatattnatgttaattaaaaaaaaaana

SEQ ID NO: 28464 - DNA, 1248 bp, Oryza sativa
  Clone ID: PAT_MRT4530_33060C.1
atgaaggcgacgatgttgggaaggctggcagcaaagaggcgactggaaagcagccaaaacaaagctaatctgccgaagaagaaaacatccagtcgtccaatacccaaaatcaggaagtcgtccaggaaaccatctgatatcgatccatctggaaaagaccctgagccgactgataaggagaccgattctgcgactgccaaagaaactaggcggactgaagaaaaccggccgactgacagtcagtcggcgaccgacaatgtagagacagggtacgagcccccgactggttcccagttggcagaagccaaaaccagcgccagccaagagcccccgactggagaccagccagagactgagccaaatagagacattccggagaccgagggacaggcgagcagccctcccttaaatgataccaatactggcccaggggtcagttcctttgacaaggtgcaagggcctgctcgtcctccaccgaaggtcataacagttaaatggtgggatgatgagatgcagccacagggaatcgtaataaacaagcagaaagaagatgaggaagtatctttgctcgcaaagacgctcaatcaagctactcgtcttgtaaatataatccatcttcgaaacgaagcaaaaactgcaaccctcgagaaactagtccctcatcttggtactctggaagaaaccagagctaaactccatgagaccaaggaactagctagaaaaacagaacataacctcatggaccgggttgcagcacttcaagaagtcaacttcgagctgagtggttcatccaaagatcgcaagattaaatctcaagctcaattcgaagtcttagtcaacaagattaagaagcttgaaggagctagggatgaggttgccaacgctggcacactactcatccaagctatgtttttcaataacaatggtccaagttttttcgatgctgttaaagtctttgacaagctgagaactgctccggatatatatttcaaaaatattagagaagctgggagcatgggagcaagcatggccttggcaatgactaagtccttgtatccgaagatcgatgttgatgccattgatgactttgcaaacggaacaagtgaagaagacgcccttgagcttatcagtgatgcccagaaagccgcggacaagattgctgttgatgttgtagaaagatttcaagataccaatcttggtccgactggggctgatgtaactgatgatgaaaaaactgaatctgattga

SEQ ID NO: 28465 - DNA, 144 bp, Oryza sativa
  Clone ID: PAT_MRT4530_33061C.1
atggataacaactacatgaaggtggagcaatgtaccatgatcatgtttgtcccccgtaaggcatatatggatcaaaatgcttctgctaatgaaggtcgctttgcctccagagatataacaaatagaaaaatcaatatgttttaa

SEQ ID NO: 28466 - DNA, 624 bp, Oryza sativa
  Clone ID: PAT_MRT4530_33062C.1
atgccaccaaccgccggaacagaatgtcgccgggcatcggcctcaattatgcaccaggccagtagcttctttctctccatcaccacatcatttctggtcccgcacctcgtcttcgtccgctggtttccctccgcatggggcctgctgtggccggagccggggctggtctacaccatcccgctcgctagcgtgcactggcgatcgggagagcaggtctctataaccttcgcctttgacattctgcactgggaaaaggcgggaacttttactatacctccagtggaggactatagttgtgtgtgggtcggaggcggaggcggcaccggtgggtctgcgggctggagggggaggcgacaccagcgggtgtgggggttggagacggagatggcactgacgggtgcgcgggccggaggcggaggctgcacgggcaggtacgggggccggatgcggaggcgcgcggcaccggcgggtgctggggccggatgcggaggcggcaccagcgggtgcggaggcggcaccggcgtcggcgccagttggaggcgaaggcagaggaggtgggagattggggtcggtgatgaaggccgcctctttaggtcccaactccgtccgcccctccgcctctag

SEQ ID NO: 28467 - DNA, 621 bp, Oryza sativa
  Clone ID: PAT_MRT4530_33063C.1
atgcaacagttaagaacaaaggggaagaggatcaccagccgtcgtcgttgccggagcctgctgccatgctatgctggtgtggggatgggaacaggaacgaccgattggaatttggaggggacgaatggaacagacgatgcgggaaaaaaatgtggcgcctcacggtcacggccccagccggatccagcgacctactacctcactgcacctgcggcggcgctcctgccgagagctgaccgagcgttcgtgccccaggcggcgaccgacgcggtggctgtcccgcccccaggaggcggcgtccctccccaggcggctactgcccgcacagcggcgcccctactagtccgccctcagcgccccccctcccacgctggcggctgcccgcacggtggcgcccctgctccaccggcgcgaccgagaccggctggtgggcggcggcaggtgctgcggtcgtgcgcgcctatggggtgtcgacgtgtcgtgccgtcgtgtgcgtgctcccgtgcgcggtggcgcgccgtgtgcatccgtgcggtgcggcagtggcttcgccgcttgggtgatgggggccggcggctaaacggcagcaggagggagaggagaggaggagaaggggaatag

SEQ ID NO: 28468 - DNA, 315 bp, Oryza sativa
  Clone ID: PAT_MRT4530_33064C.1
atgggcccctcatcatcatgggtccatggccgtcgcctcggctgcatagggccagggccggccctgccccccgtcgacgccgtcgccgatattaggtacgtgaaggacactgagtaccctgaacctgccccgggatgctctgccgccgccaagaacaaccagttcttgtacactgggccgccgcctccacgctcactggtcgacaagactcaagaacaacgacgtgcaggcgggagagaatcgagctgcgaagacgagcagcaccatgaactggcgtcggtgagcaccacctcccttctgctcgagctcggttga

SEQ ID NO: 28469 - DNA, 161 bp, Oryza sativa
  Clone ID: PAT_MRT4530_33065C.1
agcagtttagtttctgcctccttctctgatcattcttggggacggatcaatttaagaaccaggtcggggggcaaggaggtggacgtgtccactctcgaggccggtggcgcccgggactacatcgacccgccgccggcgccgctgggcgacttacccccact

SEQ ID NO: 28470 - DNA, 581 bp, Oryza sativa
  Clone ID: PAT_MRT4530_33066C.1
cggcgggtgcgtgccgtcgccgtcgccggcgacgacgacgacgaggggaaccatatggcagacgggaaccgcggtggcggcctggacgctgccggcccccgccgctggcgcagcaatggcgggtgcgacaacggtcggcgcgagatcaagctcgccgccaactccgtctcgttttcccaccgctctgcttaccagtttgaggatgcgcctgatatgcgagatgaggagtccaaagatgagacaagcgccgcagaggtgttcggagaaatgccgcaaaggcagagatgcgtgtctccgtgggcgatgcctgtggcctggcctcaggatcgtgaggagaaggatggcaaaggggacgaaggatcacgcggatcaccgccggcgaagcgaccacgaagctcctgtggtttcgatgacaagcagacatacatgctccaggagatactacgaatgacacagcaacaaaacgagaggatggattatctgtttagggagattcaagagctcgttgaaaaagtttccagccttacagcggtaagaagtggatttggtggttaccatcagcaaatcgctgcacctagtag

SEQ ID NO: 28471 - DNA, 1985 bp, Oryza sativa
  Clone ID: PAT_MRT4530_33067C.1
atggggcagtgctacggaaatcgcgcttcgtggatgatggcgtacgttgagggcgggttcgtgcagaagaactagactctgacgccgtcctactggcgcccgccatcgctccttagcaagctggaggcaccggaaacgtagcaggagatgacgcgcacccggcttcgggaacgggcgcgagggaggattcgagtggtttaggctgcggggctggcctgggggaagtgcatctcggctcggaccgcgagccttcagcgtgcaggggtggcgcagaaactgccgacgtcgacggcgaagaggttcttctcgctgccgtcactgcagccgtcgcaggccaagaagaaacaggcggagatgccgaggcggcttggggggaggttgcaaaagaaaacgacggtactgcagtagccagtggtggtctaggggcgctgccgtgcattcggcgccgagggggtggtgccgtccgggctcttgcagactcaggcccggtcggctcagtggtgggtcctgaagccgcctttcgcgacgcagctgggcggccggtatctaccatacatttgcgtcgtgtgtacagataacggtccttagaattgagccaaaggatatgtttggttcaaaaacaaaactatcatgacatccgcaatatccaaagagaaagttcgtagaaaagaaaaaattttgagagcgttatcagggcacaataatctcgtcaaattctatgatgcatgtgaggatggcctcaatgtctacattgtcatggaattatgtgagggaggagaattgctagacagaatattagccagggatgaaaatgctcccatgaagttgattgattttggtctctctgatttcattagaccagatgaaaggcttaatgatattgttggaagtgcatattatgttgccccagaggttttacacagatcatatagtatggaagcagacatttggagtataggtgtcataacgtacattctgctctgtggcagtcggccattctgggcacgaacagaatcaggaatattccgatctgtgttgagagctgatcccaactttgatgattcaccgtggcctacagtatcagctgaagctaaggattttgtgaagagatttctgaacaaagattaccgcaaaagaatgaccgctgttcaagcactgactcatccttggttgcgagatgaacaaaggcagatcccgctggacatactcatcttcagattaattaagcaatacctccgcgctacacctcttaaacggttggcattaaaggcactatccaaggctttaagggaagatgaacttttgtatctcaaactgcagtttaaactgctcgaacctagagatgggtttgtatcacttgacaactttcggacggcactaacgcgatatttaactgatgctatgaaggaatcgagggttcttgaatttttgcatgcgttggaaccacttgcatacagaagaatggactttgaagagttctgtgccgcagcaatcagtccttaccagcttgaggcactggaaaggtgggaggagattgctggaacagctttccagcaatttgaacaagagggcaaccgagtcatatcagttgaggaattagcacaggaattaaatcttgctccaactcattactccatcgttcaagactggatcagaaaatccgatggcaagctaaactttctcgggtttaccaaatttttacatggtgtcacaataaggggctcaaatacaagacggcattaagcgatttgcaaaagaaaatgtattcttttctcttctaattttaaagccgctcattatgtgaccctgattgatgttttcccctcctgctcctatccctctggtcaatatgatcattattcttgttcgtgctgctgtcggctgttgtcatcatagttttttgtagagaatacatgtaaagatcttttgtaatgaatcgaatgatatgtttgttcaagaaatatagtgtcatgttgttctttttt

SEQ ID NO: 28472 - DNA, 439 bp, Oryza sativa
  Clone ID: PAT_MRT4530_33068C.1
cggacgcgtgggttttgagagcgttatcagggcacaataatctcgtcaaattctatgatgcatgtgaggatggcctcaatgtctacattgtcatggaattatgtgagggaggagaattgctagacagaatattagccagaggcgggagatacacagaggaagatgccaaagcgattgttgtacagattttgagcgtagtagccttctgtcatcttcagggggtagtgcatcgtgatttgaagccagagaatttccttttcacaaccagggatgaaaatgctcccatgaagttgattgattttggtctctctgatttcattagaccagatgaaaggcttaatgatattgttggaagtgcatattatgttgccccagaggttttacacagatcatatagtatggaagcagacatttggagtataggtgtcataacgtacat

SEQ ID NO: 28473 - DNA, 357 bp, Oryza sativa
  unsure (1)..(357): unsure at all n locations
  Clone ID: PAT_MRT4530_33069C.1
gactagttctagatcgngagcggccaccgncctacccnttngttccncaccgcaccgagccagactagcgcacatcgcgtttctcctcgaggccgcgaagagagaagggggagngaggactgaggnancggcggcggtaagaagttgaaggcanacggcnganttgttgcgntgttggcgggttnctgntctcgnacagcaagggcgncncgcgnagntctgtgcggcgntgngcgcaggtcagtgcagcgnacgttcggttgnatttgncgctgagacctcatngcggcggcactttncggtgggancgnctccncacancgagcagtnncactgcactaagcttgngcngnncgt

SEQ ID NO: 28474 - DNA, 1681 bp, Oryza sativa
  Clone ID: PAT_MRT4530_3306C.1
cgcggtatgatctctacttctatacccaggagcaaccgtagcctccggtatgcggacaccaccatttcagagtaacaccgtattctctgtttctctatcttactgatagaattttgggtttcatagtatacgactttggaggaacgcaggtggcatggtcggctaattctgggctggctgcagggttcttgaatggacaagaacttctccttcgtttccagcgtcagatcaacttccaatggtgacaaagcctccaattcaatcaccgaggcatcagagatgcaggagaaattgaacaagctgcaggaagagctgaagaatgagaaaaaggagaaggcgcgtgctctggatgagatagcagggctcaagaagaaaaagaatgagaataaggtgacaagcaatggaggtgatgataagttggaccttgtgcacagattagagcagttagaaggtgaacaggaggcagcaagggattcagagaagaaactgctagtgtcattgggggcccaaacgaagcagcttgaacaaaccaaggtatctctggaggaggccaagcttgagattgcttccctcaaagataataaaaagagctcggaagccttcagtgcactgtcttctaatcctagccaaccggctaggaatctcaggagaaggggaataatgtctttctcctttgctgatcctggtgaggtagagacgtggtcattacagcgtgaactcaagttggctgtcgaagctgaggagaagtgcaagaaggccatggatgatttggcaatagctttgaaggaacagacaactgatgccagagatgcaaaagcgaaactttcattagcgcaatctgagttgactaatgcaagaactgaaatggagaactcaaaggccttgcttaaaaacacagaggagaagctccaggtagcactggaagaggcagcgcaactgaagtttgagtcagatgagttagcagcagcctcaaaagagaaagagaggggactggttgattgcatcaagatgtttgagggggatctcatcaaagcaaaggaggagaataataaattgatcgaatcacaaagggtgatcagagatgagaattccaggttgagagaaatgttgaagcatgcagtgtgtgaagctaatgtagcaaaagaatctttggagattgccagggcagagaattctcagcttaaagaagacatatctgagaaagagaataccttacagagcatcatacaagactatgagtccctcaaggtaagcgagtctgcggcacaaagtagtattggagaattaaaggatatgattgatgctatgttcagttcagagtcgaccaaaacctcagcagaagcatcacccagagataccaagggaaatgaggtgtattatgaccacgaaagaacccagttggaggatatcaggaatcctgcgctgcacaaaaagaggacagttctcagaaaatttgctgacataatgaagaaaagaaactctcaaagtgcaatctaacatccttagacagcaatcaaatacaacttcagattatcttttgctcttcaaagtcgttcacaagacagttggaatgctgagaattcaatctggcaaactgaaatgatatgccttgactaaaccttggcgttgcatgtgtaaacctatgaagcatatgtgtatataatacagatgttggaatatg

SEQ ID NO: 28475 - DNA, 321 bp, Oryza sativa
  Clone ID: PAT_MRT4530_33070C.1
atgggtgatcaagaagatccatggcctggatcaatggcctacattgcacttgcggataatgaggtggatcagacgaactggagcgctgccgaagtagcaacggcgacggtgaaagcggatggtggccaccgcaggggtgtcgtggcgagatatttggtggccgagaggtcgataggagggatggtggctagtcgtgagccggcgatcatggtgaggaggtcgccgtggaagccgccttcgccgatagggcatgtgcccgtggcatgggagaaggggaagcccccttgcttgggcgtcggctgctctcagatcaagggatag

SEQ ID NO: 28476 - DNA, 270 bp, Oryza sativa
  Clone ID: PAT_MRT4530_33071C.1
ttgctcaactttttaagagttggtacaatgcatcttaaaaggtacccaacggtgaagtttttcatagctgccccgctgacttttttatatatagtcaaggcgctgtttgggttaataaagcaattgattggatacgatatcattgctttttggcacccctccacagtcttcatatttggtaaaagtactcgagagaccatggcaaagataattgaagcatttggctttggagtaatctggttcgagagaagattgttttttgactgtgaa

SEQ ID NO: 28477 - DNA, 746 bp, Oryza sativa
  Clone ID: PAT_MRT4530_33072C.1
aaccaaccaaaatgaaacttttataaacaaatgccacatacaagtacttatagccaagcatactccatatacaaacacggctagaacaaaaattccaaaaaaaaaaaaactcgcatgcaacatacatttactcacagaaaacaaatcaagcagaggaaatatataaccaaaagcttgatatcaaatcaaatgacccaataaatgtgtaagcatcgacagcgtccttatgccgaaggaggaggtgccaagaacggcattggcacggatggcatcggcggcagcgtcaccttgggcacggccggcatcgacggcatcggcggcagcgtcaccttcggcacggccggcatgggcggcaaagtcgcggccggcacggcgggcatggcgggcatcggcagcatggtcaccgccggcacggtcacggcatggcgggcatcgccggcaatgtcacctttggcacggccgggatcggcggtaacgtgaccgccgggacgatggtggggatcgtcggtttcggcatggccggaacagcaggaatggcggcagccggcgccggcgccggcgcctcggtcgtgtcggcgaggcgccgcgctgcgtggccggtgttgccgttgcccgctaggagcacggcagccacggcaatggccatcgcgagcaagttcgagctggaagccattgaaatattgcttgctttgcccactgagctagctacacttagcacagctaatatattcagtgttctaattaac

SEQ ID NO: 28478 - DNA, 457 bp, Oryza sativa
  Clone ID: PAT_MRT4530_33073C.1
tagtactgcaggcctaccatggagctcttgcattttctactcggaatctgcagactcgtctgcacttcgtttgaaattaatttccgttgtttcccaatgcagctttgatcaccaatgcttcgtagtccagctgattgtgtgggcgagatgattagagatcaagacccacctaaggttgttatgggttatatttgaggcttggtatttgccaagatctcccttgttggtggttagtgcctacatctttcaggtaaatgtctcggatgtgacctggtttcttcttctaaaagtgaagaggaacagggaatggagctcgtttgccacggtatgaattgttcattggaaaaaagggaacaaattcaagtgcttaccggcaatatggacgactgacaaataagaagatcaacagtttgactacagccttaagacacataaagatgtggtgggctcaatgtca

SEQ ID NO: 28479 - DNA, 463 bp, Oryza sativa
  Clone ID: PAT_MRT4530_33074C.1
cttcaacgcctcgcgatcgatcgccccaaatccccgccgccgccgccgccgccgcgaatcgccggatgcccgccgccgtcgccgccgcgggggcggcggcagcctcgggcaccgcgctgctcgcctacatactcctcgcatgctgccggccgcagccggcgccggaggccggcgaggaggaggaggacggagttcgcggctgttgtcctccggcgcggaagcgcgggggagggaggcggttgatggctgtgagcatgctatgtttgagagccactgactatgttgcggcacatcatttaggtggactcatgttgaatctgtgcttggcctgattgatgagatgcttgcagtacatcgtaggcgagcagaacgtgttctatgatcactctctctctgttgaagacatggacgaaccttcctaacgtaagttttccataattgtacatgtcctatgatgagtgct

SEQ ID NO: 28480 - DNA, 432 bp, Oryza sativa
  Clone ID: PAT_MRT4530_33075C.1
atgaataccaactttattatatatgcaagttatatttattataatgctagcttatctgggagatgcaatggtgtgggtataatgatcgtgtatacgatgactctatgtcatgacgatgatattatagtagtatttggtaatttaagcgtagtgtttaaattactggatatcatcatttaggattatatgctgtggaagcgaagtgggccgctgatggtgacagctcaatacgggtattcctccgcgcgtgtatatagtcctaagttaatttcctggggagggtactcctctgtatttagctccggttggatggtcatgacggattgtcgtaaggaactcagcaatcagggatggcttctcgaagcaccaggagagcatcggaaagaggataccgactcaaggagtaaattctacgtgacacgggatcaccca

SEQ ID NO: 28481 - DNA, 225 bp, Oryza sativa
  Clone ID: PAT_MRT4530_33076C.1
atgcctaaatccagatttttactcaccatcatccttttaatacttctctgcaatgcatctgctggccaaaccatagtgatgaaaaatgatattgctgctactccaaagttgataaaggggcatagtagaaagattctcacagatattcaggattatgactatggaggggcaaactctaaacatgatccacgcagaaggcctgggattggaggcaggagccgctag

SEQ ID NO: 28482 - DNA, 357 bp, Oryza sativa
  Clone ID: PAT_MRT4530_33077C.1
gatcaaaccaactggcacgccttgaacccaaaagcaaaatttaggacctgcactagagtaaagcaaatctctcagaccagttgggaccgacttcgacatatcttcatcatggtggatatcaagtcaactaatgttgacccggacaacatcgtcccgataacgctagacaagttgacagcagaacaaaaggtggacctcgagcagatgatgaaccaaatgcaaaataagtttttgcactcatttgtgttaactagatcagggacagtaattcagaggtataagatagcgatgctatctgatgacgacccagaaacgagttctcctaaagatgccaagcctaaaaatgagaaaccataa

SEQ ID NO: 28483 - DNA, 153 bp, Oryza sativa
  Clone ID: PAT_MRT4530_33078C.1
gccccaaattccgttaaactggccgtggggccgtggaataaggggcccttggccggtgttacggcctcacattggcgacgccttcacaggtgctgggctcgtttccgccgtcgacctgctaaatctccgagcttattaccttattgggctatc

SEQ ID NO: 28484 - DNA, 267 bp, Oryza sativa
  unsure (1)..(267): unsure at all n locations
  Clone ID: PAT_MRT4530_33079C.1
ggacggnantactncatcctctccatctctctagtttctctctctaattaagcattgcaacaattcaaccaaaatgcagctaattcttcttctctcaaagccaagaactctccaacttttccccctcctcctctgcctccttctccttccatgtctctcccagcctctcccctctccttctccttcancttcgccgtcgncttcggggcgccggcgncgncnncatcgttntcgctgtcgtcgttnaatgagcggctngaggcggcg

SEQ ID NO: 28485 - DNA, 711 bp, Oryza sativa
  Clone ID: PAT_MRT4530_3307C.1
gaagctccggctccactcccacaggcagctcaactagggtataagccaaacgtcttctccttcgcaacttgtcttcaactcaggtttgattgattattgcaagaatgagcatatgacatactcaacaagccacacagcaaatatgcaagtgcacaaggataccaaaggatggcataatatagggctcatttgcgaaaccaaaaccgaaaacttttagcggaaataaaagttaccctcgaaatcgacggagatcggtctgaccgagattgatcttccggtctgaccgagtggatgccgccggtctgaccagtgttgaacctccggtctgaccgccgaagtctgtcgcgcctgtcgccgccgccggactgaccaccggtatgccgcctgtctgaccgccggtagatcgcttgttagaccgccgaaactcggtaaacacaaatcgaagaactcttaaagtggatgacgactttattgattctctgtatagtgtccatctagaagtcataatcatgaaataaactcgaatatccaaataaacagcctgaaaccgaaaccgacacagtgccggccggtcagaccgcgggctgcgccggtctgaccgtgcattacacgccggtctgaccggctaccagagcccggtctgaccgtcgacggcgacatggacggcggcttacggccccgacgaggagaggccccggcttctcgctcgcc

SEQ ID NO: 28486 - DNA, 378 bp, Oryza sativa
  Clone ID: PAT_MRT4530_33080C.1
ccctctttgaaggtcccggatttcccccctgattatccaacctccggtgaccttccccagaaagttcccaccccggatgtaccccttcctggtagaaataaatggaccccagagccagccgagtccggctccccccccatattggcttgatagagatacttcgtggtccaatcccccgggcttgtttggccaccaccgagggatataatgcccagagccccctgtgtcgttttttctccatagacccgggcgggccgttaccgagagccctattatttgttagtggagtggagggccccataaccaccgggaaagattcctcctatatggggtgttccccgacatccgggggaagcccaaaaaaaaaaaaaaaaaaaa

SEQ ID NO: 28487 - DNA, 170 bp, Oryza sativa
  unsure (1)..(170): unsure at all n locations
  Clone ID: PAT_MRT4530_33081C.1
gaccactctgcaacgctctggggtttcccgagaccngccatttcgtgggaccgggcgttggatctgcctctgtcgcaggggctatggctgcaacagctgcgctgattctgaagtcgcgacccgctgatgctacgcagctgacccgggtgccgccgtggggatcatttacc

SEQ ID NO: 28488 - DNA, 184 bp, Oryza sativa
  Clone ID: PAT_MRT4530_33082C.1
atgtccccggccgcgtgcgctaaaattaagcttgattcaacatcatacgtgttgacgttctacctaaaggatagagttctgaatgcatggagtgctgagatcctcgggtggaggcctgtgaagcgatgtgaggactgtcttcagtacgggcaccgcactaaagattggaagaataacatggagg

SEQ ID NO: 28489 - DNA, 402 bp, Oryza sativa
  Clone ID: PAT_MRT4530_33083C.1
atggcggcggccgtgtccgcgtgcagctcgcggtgcctccgcctgatcctggggcgccctcctcgagcccgcctcgcgtcggttgtggaggtcgtcgagaagaggaggaggggcggactggtggccgtggcggcgacggaggggtcggcgaagtcgtcgggggaggcggacgagcaggtcccctcgtgggcgcgcccgggctccgacgagccgccgccgtgggcacgcgagggcggcggcggcgggggccagcaggagcccggcgccgtcgagctccccttcttcgcctaccttctcgcctccgccatcaccgccatcgccgccggattcttgtggttcaaggccgtgcagacggcgaacaaggaggcggaggagcaggatcgccgggacggcttctcgtga

SEQ ID NO: 28490 - DNA, 3144 bp, Oryza sativa
  Clone ID: PAT_MRT4530_33084C.1
atggaggaggtggagaacacgagcaagcggaaggcgccggagagcgagcacgccgccgccgtctcgggggagcatccgccgcctccgccgccgcctgacgcggcggcgaagcggcggaacctgtcgcggtcgtgcatccacgaggtggcggtgcccaagggctacgccgcggccaaggacgaggcggtgcacgggacgctctcgagcccggccttccatggcgagatggccaaggcctacccgttccagctcgaccccttccagagcgtctccatcgcctgcctcgagcgcaacgagtcggtgctcgtctccgcccacacctcggcggggaagaccgccattgccgagtacgccatcgccatgtcgttccgggacaagcagagggtcatatacacctcccctctcaaggccctgagcaaccagaagtacagggagctcagccaggagttctccgatgtcggattgatgaccggcgatgtcacgctgcagccgaacgcgacttgcctcgtcatgaccacggagatcctcagggcaatgctctacagggggtccgaggtgatcaaggaggttgcctgggttatctttgatgagatccactacatgaaggatcgcgagcgcggggtcgtgtgggaggagagtataatcttcctgccacctgccatcaagatggtgttcctctctgccaccatgtcgaacgcgaccgagtttgccgagtggatatgcaatctgcacaagcaaccttgtcatgtggtgtatactgacttcaggccgacaccgttacagcactatgtgttcccgattggcggctccggtctctaccttgtagtagatgaggatggccaattcagagaggataattttttgaagctgcaagacacgttcacaaagcaaagtaatcaagtggatggaaggaagggtggtggacctaaagccagtggtcgaatagcaaagggcggaagtgcctctggaaattcggacatatacagaatcgtcaagatgattatggaacggaagtttcaaccggtcataattttcagctttagcagaagagaatgtgaacaccatgccatgtcaatgtcaaaacttgacttcaacactgatgaagaaaaagataacatcgaacaggttttcagcagtgctattctatgtttaagtgaggaagatagaggtttgcctgctatagagttgatgttgcctcttcttaaacgaggtattgcagttcaccattctggattgcttccattaattaaagagctggtggagttgctcttccaagaaggccttgtaaaagctctctttgctactgaaacatttgccatgggactgaatatgcctgcaaaaaccgttgtgttcacgtctgtcaaaaaatgggatggtgatactaaccgctatattgcttctggagaatatatacagatgagtggaagagctggtcggcgtggcaaggatatacgtggaatttgtgttataatgatagatgaaaaagcattgccagaagtggtgcaaaagattacatcattggaaaatgaagctaccttacttgattcttctggagagactgatcttgcagaatatcataaattggggcttgatatatcggaacttgaaaagaaaatcatgtcggagatgattagaccagagagggctttgttatacttggttcctggaaggctggttaaagtgagagatggttcaacagactggggatggggtgtggttgtaaatgtggttaagaaacctccacaatctggtactctccctcctgcactaagtgcatctcgtggtaataactatatagtggataccctgcttcactgttcttctagttcgaacgagaatggatcccgttcaaagccattgccaccacgcccaggggagaagggagaaatgcatgtggtgcctgtaccactacctttattatctggtctaagcagtgttagaatcaacattcctcctgatctacgaccacctgaagcaagacaaaatatactttttgcagtgcaagagctgggaaagcggtacccccaaggtcttccaaagctagatccaatcaaagacatgggtcttcaagaacctgaactagtggagttggttcataagcttgatgatcttgagcagaaactgtgttctcatccacttcataagtctgatcaaagtgagcagcaactgtcatggtatcaaagaaaagctgagctaaatcatgaaattcaaatgctaaagtcaaagatgcgggattcgcagctacaaaaatttagagatgagcttaggaatcggtcccgtgttctgaagatgcttggtcacattgatgctgatggtgtgctccagctgaaaggacgtgctgcctgtttaatagacacaggggatgagctgcttatcactgaacttatgtttaatggtacatttaacgatcttgatcatcatcaagttgcttcccttgctagctgctttataccttgtgagaagtctagtgaacaaatacgcctgagaagtgagctttctacaccaatgatgcagctacaggaggctgcgagaaaaatagctgaggtacaaaaagaatgcaaattagaggtaaatgttgaagaatatgtcgaatcaacttgtaggccctacctgatggatgtcatatactgttggtcaaagggggccacttttggagaggtgatagaaatgactgacatttttgaaggaagtatcatacggctggctagaagactggatgaatttctgaatcagttgaaagctgctgctcaagctgttggtgaggttaaccttgagaacaagttcggagcggccagcgacagcttacgtcggggtatcatgttcgccaactcattgtatctgtgatgaaggtccagcagttgtaacgccgtatgttagcaaagcaaatgtagttattctttttgagaaggcatgaaatgtaacccatatatcagtagaaccctgtaggtttttaggaggtaagctctctgcattagcagcccgtaggtaacgcaatttcatcagcagatcagaggcaatctggtatgcaaaaaacattttgatatatcatgttacctgtaggttttgaggcctgatgattgatatatgatgatgtgcttatgagaatttgtatgcttgttaacatacgagccagagattttgctt

SEQ ID NO: 28491 - DNA, 1005 bp, Oryza sativa
  Clone ID: PAT_MRT4530_33085C.1
cctatgggcgattgggttcctcgaggccggccgggacccgcgtcctatccattccacggttcgtttccaccgcgcgcgccacggcgagctcgccaacccagccagccatggcggcggccgtgtccgcgtgcagctcgcggtgcctccgcctgatcctggggcgccctcctcgagcccgcctcgcgtcggttgtggaggtcgtcgagaagaggaggaggggcggactggtggccgtggcggcgacggaggggtcggcgaagtcgtcgggggaggcggacgagcaggtcccctcgtgggcgcgcccgggctccgacgagccgccgccgtgggcacgcgagggcggcggcggcgggggccagcaggagcccggcgccgtcgagctccccttcttcgcctaccttctcgcctccgccatcaccgccatcgccgccatcgggtccatcttcgagtacgcgaaccagcggccggtgttcggcgtggtgagccccgacagcgccctgtacgcgccgctcctagggttcttcgtcttcaccgggatacccacctccggattcttgtggttcaaggccgtgcagacggcgaacaaggaggcggaggagcaggatcgccgggacggcttctcgtgactgattcagcatatgaacatacgcatttgcagagtaattaaagtttgtgaattactgcttgtgattcgtggtgttaattaagttggtgacgctgaagaggggagacggatctgcgtattgacgcaatgaggagatgaattagcaaggaagaaatggcgatgttcaattgtacatcaccgaagggagctagctgttgaagtgaaagtgtaaactctgccttgtagttgagaaatattgagtgtttcgagcgagtataattacagggaattatctgaacactgaattatcgccacggattatttggtccatatgcatctgagagaaactgttttcttaaaaaaaaaaaaaaaatactcgagactagttctctccctcgtgc

SEQ ID NO: 28492 - DNA, 1032 bp, Oryza sativa
  Clone ID: PAT_MRT4530_33086C.1
ttaagtgtccgccacggaaaatccgattttaggtggcggaccgtgaagagcaccgccatgtctccttcctccttcctccaccaccgccctctccttcctccttcctccactccctcctttctccctcctagccttctccctcccacctctccccagcggcggccggttgtggcaaacggagaaaggttgcggccggctgcgccctctcgccagatatgggggcgacggcagtggcggggaaggggcggcggctggctgcggcaaagggcgacggtagcggcggggaagggtcggccggctacggtggcaggcgatgagtccggcgaagagctctccttctccctcccacctctccctagcagcggccggctgcgccctcttgccagatatgggggtggcggcagcggcggggaagggatggcaaccggctgcggtggcgggcgacgagtccggcagcaagctccccttctccctcccacctctccccagcggcggccggctgcgccctcttgccagatctggggcaacagcagcggcggggaaggggcggcggcgccgtgggctgccgctagctaggggacggccgaatccggtcgccgcgatgtcggggaggccggatccgccgccgccgacgacctgggaggccggatccgccgccgcgacgacctgggaggccagattttttcctcccattcccctcctcttcgcgcattccgccgccgccgctaccctcgcgtgttccatctcgccactgctcgatccaccgccgccagcgccccactgtgccgccgcccgtctcgccgactggccgaagggcgtcaatggcaccggtgaggccaccctttccgctttgcccccaccgccagcttccgaccccgcagctttagcggcgccgccgccgccttcgccgcccaccgccggaccgtagggtcctctgccggagcctagggtattgccgacgccggagaaaaagaggaggtcgccgaagttggaggagaatgcctgcatccaactgcgtagtagtgtctgcat

SEQ ID NO: 28493 - DNA, 394 bp, Oryza sativa
  Clone ID: PAT_MRT4530_33087C.1
tgtgttctctctcctatctctctctactctggtgttgtctctcctcttgatgcttccattcctcgatcttgcacggggaagaggagagtaagatgtgtgtcgctgaggattgaaaaatcctgtgtgtgagaggagatacaatgtcgcatgggggggaatgacacagagtgagataggttcttgcgctccggctcacaaggacctttagttgcccaagaagctgtttcttgcagatacgcctaccacggcaaagatggcctcgaacggcaccggtggcggtggcagggtactctgttgatctcacgcccaaggcgcagcatccggcggtgtgcgcaagggttgcctttatgagccccctctctgggaacaaggatcacatgctctctaactcgcg

SEQ ID NO: 28494 - DNA, 948 bp, Oryza sativa
  Clone ID: PAT_MRT4530_33088C.1
cccacccacccatgtctccttcctccttcctccaccacccacgtctccttcctccttcctccactccctcctttctccctcctagccttctccctcccacctctccccagcggcggccggttgtggcaaacggagaaaggttgcggccggctgcgccctctcgccagatatgggggcgacggcagtggcggggaaggggcggcggctggctgcggcaaagggcgacggtagcggcggggaagggtcggccggctacggtggcaggcgatgagtccggcgaagagctctccttctccctcccacctctccctagcagcggccggctgcgccctcttgccagatatgggggtggcggcagcggcggggaagggatggcaaccggctgcggtggcgggcgacgagtccggcagcaagctccccttctccctcccacctctccccagcggcggccggctgcgccctcttgccagatctggggcaacagcagcggcggggaaggggcggcggctggctgcggcaaagggcaacgatagcggcggggaagggacgggggccggctgcgggttggtggggcgacgggtcccggcggggggctctccttctccctctccctcctccgctgcccgctagctgcccgtcgccaccaccgccgtgggctgccgctagcttaggggacggccgaatccggtcgccgcgatgtcggggaggccggatccgccgccgccgacgacctgggaggccggatccgccgccgcgacgacctgggaggccagatctgccgctgacgccgacgggggcagcgccgcgacgacttcaaattttttttctgatgcttgaatgcttgggtgaatggaaattttttaatgtaaattgttgatgtaattttctgttgatttttgaatgcgtggttaaatttctgtgaaaaaaaaaaaaaaaaaaaaaaaaaaa

SEQ ID NO: 28495 - DNA, 393 bp, Oryza sativa
  unsure (1)..(393): unsure at all n locations
  Clone ID: PAT_MRT4530_33089C.1
gctgccccagatggtgatagtgtcttggacaccccncatatctgatgtgccacgccctcatagatgaatacccacgccaccacggtgtgagtgacgtgngtgccggccgaatgaccacgctgagaatgtgatgccacggatgtgccacgggatagataggtgttggccacattgtgcacaggattggtgagagctggaaatgggatggcccttgtggttatggtgatgtagaaatgaagctggtgaagcctggtgaagcgtgatatgtgaatgcacgcccgtgcacaatgctggcgagtggtgatgttgctgaagtgttggccacgaaagtgtcgcacgccaataaaaataccaaaagaaggctttcctgcccaaaaaaaaaaaaaaaaaaaa

SEQ ID NO: 28496 - DNA, 401 bp, Oryza sativa
  unsure (1)..(401): unsure at all n locations
  Clone ID: PAT_MRT4530_3308C.1
gtaatgcatctaaccagccttagctggctttccctgtttcccatcgagttgccatttctaattggttcatttcttggcagtgcacatggcaggatgcctcctgtgtttttcttcttaggcatatgttttcatgtgagagtttgtttcacctaatgaatctctgtagggtgcttccttactagtattatatacaggcaacttcaagtttngtcccttttctttcagttaatgttccgtacaaaactatttacatattggaatgatttcctgtttaggtggcacattagtatttcactacctcctttatcaaataggtgccatttngggatgtatgcagccaaactgtacaaactgagtattaatatgcaaaaggtgcaaacatttgtcatgcaaaaattata

SEQ ID NO: 28497 - DNA, 2031 bp, Oryza sativa
  Clone ID: PAT_MRT4530_33090C.1
atgccccccggcgaggacgccgacacggcgtcgtcctgcagcggtgccgacgaaggcgaggcgcaggcgcaggcgcaggggaatgagcagcagcgcgcggagcgggtgctccccaatggggacctgtacacggggcagtggcgcggcggctcgccgcacggcgccgggaagtacctgtgggcggacgggtgcatgtacgagggggagtggcggcgggggaaggcgaccgggcgggggaggttctcgtggccgtcgggcgccacctacgagggggagttcctcgacggcttcatgcacggcgccggcgcctacgtgggcgccgcgggggacacctaccgcggcgcctgggccaagaacctcgagcacggcgccggcgagaagcgctacgccaacggcgactgctacgacggcgagtggcgcgcgggcctcccggagggctgcggccgctacgcgtggcgcgacggcaccgagtacgccggcggctggcgcgcgggcctcatccacggccgcggcgccctcgtctgggccaacggcaaccgctacgacggcgggtgggagggcggccgcccccgcggccagggcaccttccgctggtccgacggcagcctctacgtcggcttctggggccgcgaggcccccggcggcgccgtccaccagaagggcgtctactacccgtccccggcggcggcgggcgagtcccgcgaccccagggaggtgttcgcgcgggagctccccgagtgcgtccgctccagcacggaagggcagtcggcgctgccgtcgctgcgttcgctgaggtggctggcgcggtcgatcagcggccgcgggagctcgtcgtcgggccggagcatcggctccgtggtgggcgtgccgcacctctggggctccgacggcgaggtcaagcccgacattgccgacgactggaggcgccggagcagcgtcagggaggggaggggaccgccgccgccttcgctggcggcgccgccgccgccgccgcacgtcgacaagggggcggcgccgccgcgggtgatgaagcggcagggggtgaccatcgccaagggccacaagaactacgagctcatgctcaacctgcagctcgggatcaggacattgcgcaagctgtttaaggttgatccagctgactatatgctatccctttgtggagatgatgctctccgtgaactctcgtcccctggtaaaagtggaagcttcttttacttgacaaatgacgaccgctacatgataaagacaatgaagaaatctgaaatgcttctgaagatgcttccagcttactacaatcatgttcgggcattcgaggataccctggtgacaaagttttttggcctacattgtgtaaagttggctggagcaaatcagaagaaggttcgtttcgtcataatgggaaatcttttctgctctgatcacactattcataggcgatttgatctgaaaggatcatctcttggccgtacaactaacaagccactggcagaaattgatgagtatacaactctgaaagatcttgatcttaatttcatctttcggttgcaaaaacaatggttccaagagttccaaaggcaagtagacaaggactgtgaatttcttgagcatgagaagatcatggattacagtcttttagtgggtgtacattttagaggtgccgttgatattgatggtgacatacctgcatcaccacgcctttcaagatgggacagggatcactttctttctgacccaaacaggtggtcgaagattaaacttggggcaaacatgctgtcaagggctgaactgacaatcagaaagaatgacactgatgtcgttggacagccaaccgggcagtactgcgacgtgatattatattttgggataatagacatacttcaagactatgatatcggcaaaaagatcgagcatgcttacaagtcttttcaatacgactcgacatccatctcagcagtagacccaagacagtattccaggcgcttcagagatttcatatacaacgcgttccaagaagatcgagcagagagctga

SEQ ID NO: 28498 - DNA, 323 bp, Oryza sativa
  unsure (1)..(323): unsure at all n locations
  Clone ID: PAT_MRT4530_33091C.1
accaccatctcgatcaagcaacgatggctatacttgtnatcacggtgaacatgcaatgctgccgctgcaaggagaagatcgacaagatcctcaactgcctcanatgcaagcattgcatcgagaagatcgagtacgagggcgagaaggtgatcgtccggggaagcttctgcgcggaggagctccgcacgtgcatctggcgcaaggccggctgcaagatcatcgtcagcatcgtcatcgtcgaggtgtggccgccgccgccgccggggtncaaccgtcaattgtcaaggtcgacgtcaccgacacggccgtcgtcgtggtgggag

SEQ ID NO: 28499 - DNA, 802 bp, Oryza sativa
  Clone ID: PAT_MRT4530_33092C.1
tccccgggcgaggaatcggacgaggctttcccctccgtaaatttcttgctcagttcaactaatctagcagctgcgtggctgtgactgtgagccaccgaaagatccaaacgccaccaccaaaaccaaaccaagcaaagcccctctcaatctccgaataatctcgcgtctcttttgcgccttttcttgtacttcccttcgcttgctcgcctttgaattgatccatcaaccacaaaaaagagaggaagagaaaaattttgcagtctccatcactcctgctgtcccatgcgattattttgtcccggtcgtttgatcaatccaaggacaccggggttggagcaactgttgtgtgaggagatcaaatcttgatggtcattattagctgaaaaggattggatttttaccgcagagacagtatctgagctgtgtttctcagtgcctcccatgttcttgcaccaaccaagctagaacttggaaaggaacaccaccatcaccaatttgcaagagaaggttctctcccttgtattataaccacaactatattgattcgagattaaagagaagggcacagtgaggatactggcatttggaggcttgttgaatccaggtgcgtgtgccacctctcccgaaaggccaaaaaaaaccactgctgcgagtgcgagtgtgcaacttttctgcaagaaacagtgagccgaacacaccggctttgttcttggctaaataaaccccaattgcggcgctgtttggattcagttcttcgcaattcttggattccccagcagcaactgttcttccccaccgagag

SEQ ID NO: 28500 - DNA, 3251 bp, Oryza sativa
  Clone ID: PAT_MRT4530_33093C.1
atgaagcccgtcgagcgcgccaagctggtgcggagcctccggcaggagtcgcggcggctgcgcctgctcgtcctcgtcatcggcttcttcctcgtcacactcaccttcgtcgtcatctccaagcccgacgccctcctcttcaaccgtacgccatgccgtcgccgcttcttcatcatcttcttcttctttttcttcttggatccttggatcgatggtaacaccaagcgcctcactcgtttctttgagttcgcagtgaacggccggctgtcggtggatcatgcgccgcgctcgctcctgatccgccagcggatccacgccgactccaggagatccgccgataccttccccgccgccgaggatcccaaggtggtggacgaagacgaaggcgccgaggacgccaccgccaaagggactagtgaggaggagaagaggctactcagtagtgagcccgagcaaggcaagaacgaggaggcggccactgcatctgaggtgttaggtggtggaggcgaagaggataataagaacggcgaggaagaggggcacacacagcatagcaaggtgaccctcccgactgtttccaattataccatccgtgatgctgaagacactgacaatggcaagcaagaagatggcaaaccgaatgaaaaatatgaatttgagatggacgcggacaagggagacaatgtggaaccagaaactgataatgaggagtggaacaagaaaccactatgtgatttctcaaacttcagagcaaatgtctgtgagatgcggggcaacattaggattcatcccaatgcaagttctgtcatgtacatggaacctgccagttcaaagagagaggagatatggaaagttaagccttaccctcgtaaaggtgacgagctctgcctcggccatattacagagataaccgtgaaatcaagcaaagtggcacctgagtgtagcaagtatcacaatgtgcctgcagtggtctttgctctgactggatacactggaaatctattccatgacttcaccgacgtgcttgtccctcttttcacaaccgcaagcgaattcaatggcgaagttcaattcctaatcacagacatggctatttggtggacaaggaagtataaggtggtgtttgataagctatccaagtaccccttgattgacttcaacaatgacgatcaagtgcattgcttcaagcatgcaattgttggccttcatgcttacatggagttcacaattgactcatcaaaagctccacataactactcaatggtggattttaataggttcatgcgcaggacctactcactgcctagggattttgtaactgcgcttggtgagattcccaaagccaagccaagactgctcattatatccaggcagaggacaagaatgtttctcaatcttaacgagatagtggcgatggctgaggagataggttacgaggtggtggttgaagaggccaatgtgagctctgatctctcccattttggcaaggttgtcaactctgttgatgtgatgatgggtgtccatggtgctggactcaccaactgtgtgttcttgccacaaaacgctacattgattcagattgtgccatggggtggactagactggatatcaagaattgatttcggcaacccagcggaacaaatgggcctgcgttacaagcagtatagcattggtgtacatgaaagcagccttactgatcaatatcccctagatcatgagatcttcacaaatcctctttcgttccacaaacatggatttgaattcatcaggcagaccttcatggataagcaaaacgtcaagcttgcatgcctgcaggtcgactctagaggatccccagaggacgagccccgtgccgatgcgctgcaggtgggtgatccccatctccgtgcccgtggcgcgtcgcgcgaacgggatgatgatgtggtcgtagaccggggcgaggaggatgatgaaggtgaccgggaacaccggcagcgacgccggcggcaccttgagccccccgacgcgggtgtccatcgtcgccgcctgctccacggagaaagtggacagctgcgccaggcagctgttgagcatgatggtggagaagaagatcgggagcaccatgagcacgatcttgacgttctccacctcctgcaccgtgcacgacagcgccccgcaccgcggttgacgctgcaccgcccggttcaggaacaccagctcctgcgacggctcggtagccacctcggcggcgccgtcggagacgccgcagatgtcgccgggcttgcagtactccttcatgtccgtgctccccgtggggctgggcgcgcggtcgatgacagcgccgttgctggcgctttgcgcgcccgccgccgaaagcgagcccggcggcgaggaccaccttggcgatggtggtgagcgggctccccgtgggcaccttgttgcggtacagcctcgagccggcgacgaacaccgggatgaagagcaggatggcgatggtgaagatgccgaacccccactgccaccccttgttgtcctccacccagacggcgaacgtgacggcgatgagcgcgccgacggagaggcagaagacgaagtagttgaagaaggtggagcgccccttccgcccccgcggcgcgtgctcgtcgaactgctcggcgccgtgcgacgggagggagcccttgatgccgccgatgcccagcgccgtcacgtacagccccgcgaacagcattgcctttttcggcccagacattggctcgcacgccgcgccggcaaccttggcgcaccccggcggcatcagagacggcgtcctcgcctggatcgtcaggaccaccagccccaggaattccacaaaggcgctgatgaggtagatggcgtaggtggtgaagaaggcgtcggagaggaagccgccaaggagggcgaggaggaaggcggtgcccatgaagttggtcaccgtcgtcgccgactgcgacggcgagtagtgcatgaaattcatcaggtaggtcaccaggttgctcgcgttcgccaggaacgccaggttctcgagcacctccaccacaagaacgaaggaggcggcgagcatgccgccgtgccggccgcgcaccgccggccggttcctccagtcgacgtacccctcccacctctccgcctcccgcgccgccgcaccgtcctccatggccgccgccggtaggcggtgcaacttgcaccgggagcgagcgagctcggtcgcgctaatggcgggtgaacagggaagcagcagcggagcagaggcgagg

SEQ ID NO: 28501 - DNA, 264 bp, Oryza sativa
  Clone ID: PAT_MRT4530_33094C.1
ggcaggttcgcccgcgggtcccgccccggtattactttcacgacccacacatcctttttttcaagcaacccaagccgctttccccaggggggtttttttagaactagaattccttcaccccaaatccctaacatggaaggactaccgggtgatgcctgtccaaaaccctcgcttccgtagccggtacggagaggtttttcctccctacataaggacaactacgctccttgttctttttgttgccccaggtttcatatcttggat

SEQ ID NO: 28502 - DNA, 621 bp, Oryza sativa
  Clone ID: PAT_MRT4530_33095C.1
atggcctcctcctctccgtcctcacgtagcaccgccgttgctatcgccgatggtccttatcgagccaccaaggccacattgccctgtcgcttcggtcaagcctcgtggcacgcagtgagggggtggttctatgcactgggctacgtccgagccaccgatggtcgcctcctcctccccgttgccccgctgcgtcggccaatgctcggtggttcaagcgggttggtggcggtcgtgggtggatctggcggtggtggcggcgtcgtcgttggcagctccctccaccccctctcacctccctccagcggcagatccggcggtggtggcagcttcggtggcagccacgggtggatccggcggtggtggtgtttgctaagggtggatccggcagcggcggctccctctgccgcctctcttctccctccggcggcggtggtggcatcggcggcggttgcgagtggatccggcggtggtggcggcggccgagggtggacccgacggcaggggcgcgaaggtgatgccctccaggcaagcaactctggtgctgctccatctctcccatgtctttctttcttcgccgaccgtgtgttctgtgctgttgtccgctcctcagcctcatgctga

SEQ ID NO: 28503 - DNA, 192 bp, Oryza sativa
  Clone ID: PAT_MRT4530_33096C.1
aacttcgtcttcaactcagaagcactacacttctaaaaagggcgaataatagcaaggctgagtacaaccaccgtactcagtaagccacaccaacgatgcagacatgcaaggggaacacaaggacggtttgtggctatttgcttaaaggaggttgtaaaacattttattgagcaaaacagtaaaactgttgag

SEQ ID NO: 28504 - DNA, 331 bp, Oryza sativa
  Clone ID: PAT_MRT4530_33097C.1
ctgcaggaattcggcacgagggctgaataaaatgtcatgatctttgcacatgctgtcaaagttgcaaattttagctacatgctgccaaaaaatttcatgatctgtgactctgtgtatgtgctgccatgatgaaattcctaagctgctggatttccaatttctttgttcccctactcaatttagaagaagtaagagttgtggtcaaagtgaaggagcgttctcagagtaaatgtgctctactcattttattttaatcaattagtttctctggttttgttttattcaattccaatattatggcatggaattgatagctcaggtacaacatcaa

SEQ ID NO: 28505 - DNA, 186 bp, Oryza sativa
  Clone ID: PAT_MRT4530_33098C.1
atggccgaccaagacacgactaggccgcagcaaccaggtgccgcagatcgtgctcggattcgacacatccgcgtgtgggccagggttcctctgcaagaggtcaacatgcaagttaagatcagcacacaaaatacagcctacggctaccacccggtccacaggcccacaaacagggcccagggctag

SEQ ID NO: 28506 - DNA, 1331 bp, Oryza sativa
  Clone ID: PAT_MRT4530_33099C.1
tcatccaaattcaatacctaattgctgattttcttgaatagtatttggtaataaactgttctcatctttcatctcaattacaatggtctctgagtttatgatcaccctgcatagtccaagatggcctccattaagaaggtcacaattctcatacaaaccatcagctggtggcatgttcaacatgcaagattttggcagcatgatccttttcctttcctgaaggtggttttccttaactgtcagcacaaggcggtgtttcctccctagtaattcagaaacatattccatatcacccatagccaaagcatggcgaacacgactagaagaaacctgccccttgtcgcttgaatttacggaggttgtaactccattataagatctagctgtgtccatgactgaccgtacaataaatgcacttaaaccaaattcttcacatagtttcactagctcagctgcatcgccagatgccctgtagccaaatctgtagttttcacctgctacaacaccttgtattttaagatcccttgataacctctcaacgaattgccgcggagttaggtacctgacctttgaaaactcaacttgatattcaataggcactacattcttacagtatggagcccaagaggtgagcactcgcttccgatcacactgagcaactataggaggcctatactcccagccaagaacctcagcaattcccacaaaagaaagaagaaagggagttcctgccttagaagcatacattgccaattctcgatggccaatgtgaagggcatcaaactttcccaaggcaactatcccatcaatcacacaatcttgatcttccccacaatctattaggagcttatctttcactaaatcttcattgttcagactgatccctgactgtccaaatgagctgaaagttgccaacgagcatctgttttgccctttgttcgtgcctagaagcttgctttgactgcagtatcgagacaaggaggacaaggaaaagggaacaagagacagcagggagctcgctacctgaagcgccggcatgccccggccacgcgagcgggagcgggagcggaagccgaggagaggccgccaatggggcgcggccggggacgtcggggaaggggaaggggagcggaaggtgcatgagagcgctcctgcggcggcggcgcccctctccatatcctcactttgatgcgccgttggcttctcgctcgccgctttgcttcgcaggcggcggcggcggcggcgcgtctctcctctcctccgcttgctgctgctgctggcagtcacgcacgcggcacgcgtcacgggcgagctgcctgcccgttagatga

SEQ ID NO: 28507 - DNA, 1104 bp, Oryza sativa
  unsure (1)..(1104): unsure at all n locations
  Clone ID: PAT_MRT4530_3309C.1
tgcaggaattcggcacgacggcggaagcggacagcagcatcacaatcggcgagatgcaggcggcgctcctactcccagcgcggccgtcggcggcggcgccgcctacgctcttgcggcggggggcggcttctgcgtcctccgcgcgcgctcccactcccctccctgcggggcgcctcagcggcggcgtgctgagcgctgtgcggcgccttaccgtggcggcggcggggtcgtcgtcgtcgtcgtcgggccctctctacccgacgcctccccccaccgagcaggacatcgagcgggccaagttcgagcaggttgtcaagagactggggaaaacagcgaggtatttcaagaatttgggtactcttgggttctggtcccagttggtgtccacagttgtttccgctggaattttgtcattttctacagttattactgggaaggtgacagcaccttttacattctatgcaactgctgctggtattgccgcgggttttatttcagtcttctggtcatttggttacatccgcctttctgaaagacttagaaaaacagcaagtgaacctgctaaggctcctccacgtgctgatgtaattagaagtctgaaaaatggcattgtgctcaatatgctcgggatgggtgctgcagttctcggcatgcaagcaactgttggggctttggtagcgaaggctcttactacctctgcagtaccttactatcaagcaacttcccctggtcaaagtcctgttttggctctagatgttttcctagttcaggcttcagcgaacatcatcctgtcgcatttccttggcctggcgagctccctggagttgctgcgctccgtggccatccctccagcagaagctgctgcggcgtgagcatatcagcgcatatgccaaaggcaagggctcccgttgatcatcttgctcttcatttgctgcttcgggctttggtattcgctaggagtagcaccgctcgtccgcctgtatgtttcttgtccagacaaaatttaaaaaaaatctagctttcactgcgtaaaaaaaaaaaaaaaaaaactcgagggggggcccggtacccaattcgccctatagtgagtcgtattacaattnc

SEQ ID NO: 28508 - DNA, 210 bp, Oryza sativa
  Clone ID: PAT_MRT4530_330C.1
atggcggcgcgcgagcccgtgttcgcgggcaccaacgacaccatggagctgtccagcgacgccgccccgtccccggccaatctctcgaggacggccacggcgatctgctcgacgccggcgttcgccagggagatggtcgccggtggcgtcgcgggcgtggtggcgaagacggccgtggcaccgctcgaacgggtgaacctcatgaggcag

SEQ ID NO: 28509 - DNA, 137 bp, Oryza sativa
  unsure (1)..(137): unsure at all n locations
  Clone ID: PAT_MRT4530_33100C.1
ctgttcgctcncgccagctctgctcttctagacactgtgagctgtctacatctcatgtggcatggacactccaatccttgctgtgccaaaaatccgcccatagtcacccgtaccaccctcacaacccctccattctc

SEQ ID NO: 28510 - DNA, 381 bp, Oryza sativa
  Clone ID: PAT_MRT4530_33101C.1
atggcgttgcagtgcagtggtgcagggatagacaaagggcgaagacgcaatgcggccaggcgacggcgtgaggcggctcgtggcgatcaggcgacggctagatccggtgctcagttggtggttgttgctgatgcgagtaggtgcatttttggcatggcggttggaagattacgggtaaaagctagcctatttgggtcgacaacagcaacgcttgcgggtgctgctttcccttggtgcattgttgcagaatctctcctactccctccctctaatggatttcttcaggtgaaaaccacgtcctgtcccaggacgggtgacgatggcggcattctcggcgtcgtatcctccatggaggcatcgtttgaggttctcttcccatag

SEQ ID NO: 28511 - DNA, 922 bp, Oryza sativa
  Clone ID: PAT_MRT4530_33102C.1
tccctcccgcctcgtctccactactagagtatatggataggattacatagactccgcgaccaccacctaccccaccgatgacgccgtccgccacctgcttaaacccgcggcctccacctcctcccccgccgccgccgccgccgccgccgtcgcggcagtgttcctctctgcgttgctgctcgcctccgcctccgcctccgcctccaggctccctcctcctcgccgtcttcttcccctggtacgcgtacgccctcgccgccgcccccaccttgtccgccccgtccgtccccgccgccgccgcccgcgtgctcacgcagtccgatctggacgagctcgccgccgcctccgcccacgccgtggacccgcggagcagctgccccgaccgcgccgtcttcaacgagagcgccggctcgcgtaagcagaccttctcccgcgtccgcttcgtccccgccgccgccgccgccgctgccgccgcctccgcctccgccgccgccgccgccaagccccaacccaactacgccgccgccacctcatccccccggcgagcgacacggtcgcatcccaccggagctccgaccgccgcagcggcggtcgcctcgccggagaagaagccgccggcgccgccgccgccgtcgccgcctccccttcctccccctccccctccgccgccgccaagctgcccaggggcaacgacaaggaggacagcttcatcgcctaccacctccgccgcctcttcgcgcccgacgacccctcctctccccaaatccaaaccctagctctacccgcgccgccgtctcccgaccccgaccagttgaccaccaactccaaggggacagttttgaatgattgatttttttttcaacatggccttcttgctgtcattctgtggattgcctactttctaaggaagaataaatcttat

SEQ ID NO: 28512 - DNA, 560 bp, Oryza sativa
  Clone ID: PAT_MRT4530_33103C.1
gcccaggaactggcgtgtcagaggcagatgaaaggtcgtgggaacaaaggactggtggtgggagctcattgctccccaatgtccaaagagctggtattgatggggatggtgcagaggtggatggcttgtgtaaagacgaaggtccgccacctgcattagaagaccggcggcctagaaagaggggaagaaagcctgcaaacgggagggaagagccactaaatcatgttgaggccgagcgccagaggagggagaagctcaaccagcgattctatgcactgagagccgttgtacccaatatatcaaaaatggacaaggcatccctccttggtgacgccataacatacatcactgacctacagaagaagctcaaagagatggaggatgaggttctagtccgagtgatgagccccatggaaagccaccctgtcagggccatcttccaagctttcgaagaggcagaagtccatgcaggggagtcgaagatcacaagcaacaacggcacggccgtgcattctttcatcatcaagtgccctggcgccgaacagcaaacgagggagaag

SEQ ID NO: 28513 - DNA, 843 bp, Oryza sativa
  Clone ID: PAT_MRT4530_33104C.1
cagccccgatccacgccgctgccgccagacgcgcccttctcctccctcgcacgccgcacgcctcaccctcaccgccaccccgccgccgccgatctacacactcgccgcccccgcctccgctcccacacgcccttctcgcccctcgcgcaccgatctccgctgtagttctccgcgccgcccccgctctccaccgcccgaacacagtcgctcgcctcgccggtctccactccgcctcgtcatccacttccactcgcccaccgccgaaaggtcagcgtcactggaatttaggctttcaataaagatctcctaaggcatatcaaggctcacgggcaagggatctccctcacagattcttcaaggaggagggactgcatactcagtattgccgtagcgtggtgccgccgcccatccttgagtatccaccgtcaccgactacccttctctgagcgggtgcaaatcctgccaattgaccccatctcaggagaacgtagagccatgcggttccgtgtagtattcctgtagtccactcctgcaatccacccgccctctgttttgtcaaacttctcatctccccttcccttccgccgccatgctgccggccggtagcctcaccgacaagcagctccacttcttcgacgccaatgggtaccttgtgctggggtcgttctcgagcgcggaggatgtgaaggcaatgagggaccgcatggcggtgctcatcgacggctttgacggcgctggcgacgtcttcttcacaaaggatcatcggcaggtgaagaatgacttttctttcagagtgcggagaatatcttttcttctttgaggaaaagcatttgagatgatgat

SEQ ID NO: 28514 - DNA, 2564 bp, Oryza sativa
  Clone ID: PAT_MRT4530_33105C.1
ttttttttttttttttttttagcagaaaagcaggtgacttctttcccaactcatgcatttgacgagatgtactgtttatggttctgccacaagcaataaactaagaacatggtattctccccaataaacaacaaaaagagaaaaactacaccgaccacaaaagcctaccatacaacaatggcagttttaacttgagagctttgtcttccccttggatcgctaagtcagaatctgagctttctttctctgcctacaaacttcttctatcaacagcgctgaaaggtgggtggatgggtgtccgtccaaccgactgcttgctgcttgtctgcaaccagcgaacgaagtaaagctgcctctaccggtggcgcccactccccaactgattctaccctgagttcatcacgcgagacatggcggcaatcaccttctccctcgtttgctgttcggcgccagggcacttgatgatgaaagaatgcacggccgtgccgttgttgcttgtgatcttcgactcccctgcatggacttctgcctcttcgaaagcttggaagatggccctgacagggtggctttccatggggctcatcactcggactagaacctcatcctgaaccacctgaatgtccacctcaggtcgaggcgtccgatccctcggatcgatcattccagactcgataagcctttctcgctctacctccatctctttgagcttcttctgtaggtcagtgatgtatgttatggcgtcaccaaggagggatgccttgtccatttttgatatattgggtacaacggctctcagtgcatagaatcgctggttgagcttctccctcctctggcgctcggcctcaacatgatttagtggctcttccctcccgtttgcaggctttcttcccctctttctaggccgccggtcttctaatgcaggtggcggaccttcgtctttacacaagccatccacctctgcaccatccccatcaataccagctggttttttagtcaaaacaccaggtttggaactggtcccagcactgaaatctatttgcctgggagcttgaggctgcaactgttgctgactcactagttgctgtggctttactagctgatgtgatttctggagctgtggtagtttctgaagtggtggtgctttctgaagctgaaactgtgttgcagtagagctgtcaactcctccattgttgcgcggtgtggcttcattgctcacaatcaatataccgttgccaaacttctgctgatgagaattcaggccccgagcctgactccaagtgaaattctgcaaacctctttggacattggggagcaatgagctcccaccaccagtcctttgttcccacgacctttcatctgcctctgacacgccagttcctgggcctgctgaaggccggccaaggttaaggtccttcccaaaaatctttgccaaacctggtgacttatctgtagggccactcccctcgtgtctctgaactccagctttattgccaattgccccagcaaacacagatcttatggtctggagagtgtcagaactctccgctacctgttgcatcgaacccagttcaagtacaccggtctcaaatggaactagcacaatagttctaaatcctgcagcatttgcaaggtatccccggtaacagtaattggcaggaaatacgttacgttcagtgttgggaatccacaggggcacgcctgctgcaaatacttgaccagggccaccagcacggcgtggaaatgcaaagtacatagatgctagaaaaaacatctctgtgtctgtcacctgatcaatgcctggggcataatcctcctcgtcaacacctccgaatgctgagtgcaatcgctgcagcacacgcttgcgcatcctctgtttggcctcgtcactacctgcagaagcagcaggtcccatctcaccatcatgaggctcacggcaagagccatccccccatccaaggacaaggtcaccggactttgtgcgcgacagctgccagaatatggcatagttccaaccagcaccaggacgatctgattcgacaagctcctggagtctattttgcaagtccactggcaaagatgcagcaacaaggccctcggatatggcaccacctccttttgtcaagtaagcaaaagcatccgttccaagcacactggcggtgagcgctcggtcctcgtcagtccatgtcccaccagttccgccattggcaccatcctcatcagcctccatcttcatcaccataataccgtgctggggctcccgcgcccgaatcggcgccgcggccacggaatccaggacgggcggggtctcctccgcgcccccccaagaagaaagaggcgggcccccccacccgccgctggctgaatccgagcaccctcccccccccccggcgacggcgacgcccggatctccccccacccacaccccacgcgagcgcgagggtcccccgaattcgccgcgcgcgcaggaggcggaggcggaggcggaggcggtggtggtgatggtggtgcctcaggtttctctggttcgcgaggggatttcgggggcggaggaggaaggcgacttg

SEQ ID NO: 28515 - DNA, 1035 bp, Oryza sativa
  Clone ID: PAT_MRT4530_33106C.1
tcgggatccccggccgggctactcgggcagagcacccaacccctgcgccgccacctccgatcgtcagccatgaccttcaagcgcaggaacggcggccgcaacaagcatggccgcggccatgtgaagtacatccgctgctccaactgcgccaagtgctgccccaaggacaaggccatcaagaggttccaggtgaggaacatcgtcgagcaggcggccatcagggatgtccaggaggcgtgcgtccatgacggatacgtcctcccgaagctgtacgccaaggtccatcactgcgtctcctgcgccatccacgcccacatcgtccgtgtccgctcccgcgagaaccgcagggaccgcaggccgccggagaggttcaggcgcagggaggataggcctactggacctcgccctggtggtgctggtggacctggtgcccctgctgctgctggacctggtggcccccctaatgttgctcgcacctaaacagccgtagtcgctcctttgttactctatatcatatcctgttaatggcgccatggatatcatcgttatggtctttcatgaggtcaaagtctttcttggaactagcttgtactttgcgattggcagtgtgacaatggaagtctgaatttttgcctgagttgtttatctattttaaaccgctatcgatgcttttttgctagttatgctttttttttcaaaatctgaagctattaatatgctcatttcttgggctttcattattactaaaccacgagaaaaccaactatttacaaaatttaagagaagagtgaaccaatagacgcataatagacgaaccgaacccaccccctgatctctacagcccttcctgctgcacctcgtgttttccacaccatctcctctaatctcatctctctttcccctattcatattaataagttcctcctaatctattctacactcgcccattgatttggaaggacatcctcttgttgactatgtagagatgcatcgacgtactttgacatctcatacattccgtgtaatattgttatg

SEQ ID NO: 28516 - DNA, 478 bp, Oryza sativa
  unsure (1)..(478): unsure at all n locations
  Clone ID: PAT_MRT4530_33107C.1
gggggcttacnttganactttctttcttaggttgcgtgtganttcgagcgatttggaaaccatgtctcgatttgttaattgcacaaggatgtcgagcaattctgaaatcaatcgaattttttgtcttttttctgcacaaaagaaaagaaaagaaatcaatcgaatttggtagacgattgtgcctttctttcctttttagttttttctgcaaaatgtgttaggcaactggcgatgcctaatatttccgtgacagcgtacaccgaacaacaattaggggttgattgtttgtttcacatgttaatcatgccaagattttggcaaggcttatattgacaatggatcaaaggaacaaggtacncaatatggctgcaagtcctaataataagggcattgcaagtaggtgaaacaggagcaaacttgtctccatttagctgaaaataataaaataatagttatggggtccaaaaaaaaaaaaaaa

SEQ ID NO: 28517 - DNA, 657 bp, Oryza sativa
  Clone ID: PAT_MRT4530_33108C.1
ccgggctgcaggaatcggcacgagggtcagtcaaaccggctatcttgcgatctccaggcaagatgaataaatctattcatggagcagcaggcagcaatgtgagtgctccaccatgaatatattagacctaggcaggatccatcaaaggacgtgcggatttgttaaccatggctagctagtatagctagttccaaagtccaaagagttgccaagaagagaagaacacagctggttgctttaatagtttgctccctctgcctctataattcttgatgttttagtcttttagacatggttgaagtcaaataattataactttgactatcaataacttttaaaatatttagtttatagacactagaacaagacatatagattactattaaaaaatactttgataaaattaaatatttactgttttttctgtattataatagaaaaaatcatagtcaaaaatatgttttggagaacgtatcgttgtccgaaacgagtactagcttattaccatgtgactctgatgtgaaatttttactttttacaagatgacatggtgacttgagatgcagcatgtgcaggctccattttgcatgcatatggatactcagtagtaaactacagagcaacagtttaatggagtatgtcacaaatggccaacaa

SEQ ID NO: 28518 - DNA, 1163 bp, Oryza sativa
  Clone ID: PAT_MRT4530_33109C.1
gcacgaggctcttctgctgcagaggaggtggcggggatcggcacggggaaaatccgccggcggcggcggcggcctccgcctccgccttgaagacctgaccagccgccggccagcatctccatccgccctgccctgcggcttacaccgatttctataccacagaagattgctacgccagcttccagaataaccatcatgggtgaaccattaagaactcttcaaaatgatcaatcagaagctaaggataaggggaacaagatagatattaagtacgagctgacttctgcaatactgagtctaaagcatcaacaagcatctggcaggttgaagatgccttcaagactgccagcaagatatccccataatgtgggacattgtgcagagcttatcatgaatttgggcattggagaagatgttcattgcttaaatgtaatgagatcgtgtaaccatgagaacatattacatcctggaattattaaggaagttatcattggtgacagctcctttaatgtggcctggatggagcgttacactcgtgtgttatcagaatatgtgcaattgctcctgtcaacagctcggtttcatgcccccgttggtgcaactctcttacttccgtcaccccatctccagatggttttgagaggaatatttgacgggatggaacagctgtttctcaacgggtattatcatgggaacttttctctagagaacacatattgtttccttgaatgttctactccagtcgtgaagctcacaaattttagaaagaaagttccagagcaagctatgacctggggtgtggaggaggtgcggagtgatcgatatttgtccataagctgcattgagtgcgaaatttgttcttttgttgcatgttctttggaccaggttgttgggtcttctctcttttgtgtttgagttatataaaagccgatagctttacgatggtggtgtacaaaattctgtgtcgggcacatttaatagtatttaggagaccgtggcacaaatgcctttggcaactctgcgttgtaaggtagataggtgtagatataaaatacattctcaccaaattttaaatccaagcttaacttcgtttgttgcctaatcttaataggagactaatggggatgcaaaaggtactgtctttaaaaaaaaaaaaaaaaaaa

SEQ ID NO: 28519 - DNA, 270 bp, Oryza sativa
  unsure (1)..(270): unsure at all n locations
  Clone ID: PAT_MRT4530_3310C.1
atggtgccggtggcgggggaggcggccggcatgggagaggggaagaggcgggagatggggagagggagcggcgccgatggaggggaggggaggggaagcggcgccgatggggagacggggagggggagaggcggcgtcgggtgcggggttgncgncgggctcggcactgcaatgtcggcgagtatctccaccgtctgttatgttgaccgcgacttcgcaagcacatgttacgtggtccgtgcatcaatcacgctaggcatgatcccctga

SEQ ID NO: 28520 - DNA, 2649 bp, Oryza sativa
  Clone ID: PAT_MRT4530_33110C.1
atgcacccattctgctgcgtgcccccggtccccgtctcccccgccgcctctgccgccgccgcggccacgccggccgcctcgtccgcggtggccggggcccccgccgtgatgccgccgccgcccccgcctctgccgcctcctcccccgcggagcaactcggcgccgccggagcggcgcgctctgcgctgggcggcggggggtggtagcgggggcggcaactccccgccggagggggtgaagctgaacgagatcgtcggcggcggcatctccgggatcctctacaagtgggtcaactacgggcgcgggtggaggccgcggtggttcgcgctccacgacggcgtgctctcctactataagatccatggtcccgaccgcatcgtcctctcgcgcgagaccgagcgcggcgccaaggtcatcggcgaggactccctccgccgcctctcccgaccctccacctcctcgtcttcctccgcgcactccaacggtcaccacctaccccgcaagcctatcggcgaaattcacctcaaggtgtcgtccgtgcgggagagcagatcggatgacaggaggttctcgatcttctcggggacgaagaggctgcacctccgggcggagacaagggaggacagggcggcgtgggtcgaggcgctgcaggcgaccaaggagatgttcccgcggatgtccacgagcgagatggtggggccaggggacaccgcagcggccgtggctgtctccaccgagcgcctaaggcagcggctgcagcaggaaggagtcagcgaggcggccattgctgacagcgaaaggatcgtgcgcaccgagtttgaggtcttgcacaagcagctcatgctccttaagcagaagcagacgctcctcctggataccctccgtcagctagagacagaaaaggtcgatttggagaatacccttgtagatgagagccaaagacagtcaaaagagtacggatccacttctagatcaaagaatgagaagtatagtgaaggaagtgctagtgaatctgatgacttactaatgaaccacaagatccagctgaagacgaaactgacgatgatgagaatatatattttgatacacgagatttcctgtcatcaagttcttttaaaagcagtggatctgatttccaaagatcagaagctggttcggatgatgaggatgattatccaatggatggtattgatacctctgtcaccaacagactctagattgcgaccagatcagcgatgcctagagaatggtgagtatgaaagagcaaatgctgagaagttgaggcttgaacagagacaacgacaggcacggaagatgcaggagagcgggtggaaacctcggtggtttgcaaaagataaagctaccgacacataccgctaccttggtggttactgggaatccagagaaaagggcagctgggaaggctgtccagatatcttcggacaagttcctaacgatttgatgataactgactaggctttgagtaggttacaggtcttctggttctctgcttttattctttctgtgggatcacttgattccagattttttagcggtttatattagagcaattaaacgggtcttggcctgtaaggagaggctgtgcttcagacatattgttttcgtacataataagtgaggttcgtccaaagtgtcgcttcgaatcagtgttttcttgtgaggattgcatgctcacaagttcagagtgctttatcataggccatctgtgtataccagacatgtaaaatgttctgaagcgcaaaagaatgaaattcagcaaaaatatataaaaaacatggttgttacgctgaagcagcaaggcacacagaagaaggcaaggcagtgcttggccttgcctcacaggagaatgaagggtgcaagggccaaggaaaatgggatggaagctgacttgctgtcacagatcccacacactgccatcagatgtagatccagattgcagttgttgcagcttacaactcttgaatctctggtggtggcagtggacagcgaggtacaaggtgttgttcaggaccgaagtggtcgaactgttgctacactctttgggaaatgggatgaaagcatgcactatgtgatgggtgattgctttggaaaaggcaagggatctgaaaatttctcagaggcccatttgttgtggaaaagaagcaaaccacctaagtttcccaccagatacaattttactcgctttgcaatcacattaaatgaacttaccgctggattgaaggaaaaactgccaccaacagactctagattgcgaccagatcagcgatgcctagagaatggtgagtatgaaagagcaaatgctgagaagttgaggcttgaacagagacaacgacaggcacggaagatgcaggagagcgggtggaaacctcggtggtttgcaaaagataaagctaccgacacataccgctaccttggtggttactgggaatccagagaaaagggcagctgggaaggctgtccagatatcttcggacaagttcctaacgatttgatgataactgactaggctttgagtaggttacaggtcttctggttctctgcttttattctttctgtgggatcacttgattccagattttttagcggtttatattagagcaattaaacgggtcttggcctgtaaggaga

SEQ ID NO: 28521 - DNA, 306 bp, Oryza sativa
  Clone ID: PAT_MRT4530_33111C.1
atgggcgacaaagtggaggccgccggcgtgcatgacccgcgagtatacgtaaatacagtggcgtgcgacgagtcgacgacgtacccacacgccgagtccgcgacacgacgcccgccggtgcgccgcgctagcatgcgacgaatccgagcgctctccttgccgccgtcgcgtcgcgtgggcgtggacaccgtcgacgcggtgtccaacgaaccaggcgcgcgaagcgatgggagcacgagggcggacggacggacgtacgggcgggccgggttttacaagatcctagaccctaggatcggtagcttc

SEQ ID NO: 28522 - DNA, 618 bp, Oryza sativa
  Clone ID: PAT_MRT4530_33112C.1
atggacagacagagcggattaatcagtaccttgaaatatacctacaaagcacactccatgaaacgccaaggaagtggccctcttggtttcccattgctgaattctggtacaatacaagtttccacactaccttgggtagctcccctcacaaggcattgtttggcactgaacctagttgcttcagctgataatgaagccactgatatgctgacaacaagggctgcttattctgaatttttgaagaatcagttggctagagaacatttgagaatgaagaatattgctgataaaagcagatatctgctggagtttcctgtgggtgacaaagaatatctgaagctgcaaccttatactgaatcgccagtgaaactagttaagaaaggtaatgctgctcgccttcaagtgcttatcaaatatcaagtggacctcattagctattttagcagcaaggagaattatgatgtccttgtgacaagatttcctgcagcatcagcttggggacaagctgagtctcacggcagtgttgcagctatactagaggcaatgggccagcaaggaggacgcaagcatcatggtgctgagcaagagctagagcatcagctaaagtatctgttgtga

SEQ ID NO: 28523 - DNA, 345 bp, Oryza sativa
  Clone ID: PAT_MRT4530_33113C.1
atgcgacgtctgcaacagcctgaccaagagcttgtgcggctgcacttccttttgggaatgtacgcatttggtaagaacattcaaggacaggagcaagccctcggactcttagtaaaatcccccatgacagggatagctgcgcccattaagaaggcgacgacgcccccgagggcgctggccattacccgggcaaagtcgttcttcccgggcagtggcatatgcaggcccgtccctgtcatgatgccagaggtggtcggcggatgcttagtgcgtatttattacgccccactacgctatcagggtccaccttttcctctggcttggggcctctccggcgctccataa

SEQ ID NO: 28524 - DNA, 357 bp, Oryza sativa
  Clone ID: PAT_MRT4530_33114C.1
aaaaaaattgggttgggccaacgcccggctaacaacagtttagaacagtccaaagagtcaacccacataactggattttgcaatgcaacggaaccggagtgtactgtccaaccaattattaaccagagaactacttattaaccaggtactaatagctttatccatcgacgttatcgagggttgtaccctgggggccgacttcctaatagtacttttgaagggcagccaagtcctcacgggcttttgagaattgacctttttccatttcctcaccaaaggaccaggggacaaacccacgcttagcatacattaaggcgaacttgtgggcgatgcgcgagaaaacctcactaacagcag

SEQ ID NO: 28525 - DNA, 376 bp, Oryza sativa
  unsure (1)..(376): unsure at all n locations
  Clone ID: PAT_MRT4530_33115C.1
ggggcggcagccggagaactgaagcgcgcaggacgcggctgctcctccgcgccaaggccaactcgctggcgcagctcgcaagtacaccagcgacgcgagccccgagcccaaggagggcatgttcgtcaagaactacgtctactaatccgatccaatccaatcaagacagtgaacctctgctgctgctgttacgtatacagctctgctatcctgtagtacctcgaggcactgtagccagtgttcgtcacattacagttgagatcgatgacaaagttaaaactatacgccattaattaattntactgagaacatacgtgnttcatcatgtatttcatcacangaatcntttctagagcgtttgatataaaaaaaaaaa

SEQ ID NO: 28526 - DNA, 191 bp, Oryza sativa
  Clone ID: PAT_MRT4530_33116C.1
tttttttttttttatttccacggatgaaaagctgaagttaaaaaaaaaaggagctacattaaaaaggcaaacaagtttagagattcaggcaacttttggcgagtttgccaataatgcaagacttcaaattttgcccaccgtgtgtaagggatatgcactattagagaaaaaaccaaggtaccggtttcttt

SEQ ID NO: 28527 - DNA, 554 bp, Oryza sativa
  Clone ID: PAT_MRT4530_33117C.1
cccgggtcgacccagcgtccgccccacttgtcgtcttcaactcttccccaccacgccgaattgccgaaaccctagccacccctctccacaacgaaggaggagtaccagtccacacgataggagcccaatccattctcgcaggagcttgagtagagacattgaaaaaggaacaaacggcattccctccagtaacgatgtagatgtgcttcaaaggaacaaagaaagatcacacgatgacaataggaatgatacagaagtgagtggccatctttcatcggattttgagcatcgtaagctgacaaaatccttgaattctccaaacaagccagaaaggaactcgacacgcgatagttctttgaagggcactgataagcacttgcccagtcaggtcagaacagatagcagtggagaagaggagggcagtcgtgcaagagagaatgcacgaaaaagcaaattcatcacgcagaaaaattaaggatttctcagcagatcctggaactaaagaaagcacaatgatgaatttgagcgccttggagaaaaaaatctcccttcac

SEQ ID NO: 28528 - DNA, 267 bp, Oryza sativa
  Clone ID: PAT_MRT4530_33118C.1
atggcgtggtcgtcgtcgtcgtcggcgacggtgagggtggtggtggtggccgtgctgctgatgcagtgctgcaacgcgatcatggcggcgaggctgctggaaggtgacttatttggtagcagcagctggctgcagggccaggtcggcgccgccggcgagctcatcttgcaggtccttgacaatggagggtcgccgccgggaggcaatgattgccaccaaggtcccaatccaggcggctccggatccggaaaatgctggacgccgtaa

SEQ ID NO: 28529 - DNA, 726 bp, Oryza sativa
  unsure (1)..(726): unsure at all n locations
  Clone ID: PAT_MRT4530_33119C.1
gatgaaaattttctaattgtattggatgatgtctggaaccgagaagcatacactcaaatagcagatgcattcccaaacttccaagcaagtcgcataatcatcacaacacgacagggtgatgtagcaactcttgctcagtcagcacgccaactcaaactcaacccattggagcacactgacgcgcttgaactcttctgtagaagggctttctacagaaactgcaagtgtccacagaaccttgagaaactgactaatgatatagtagttaggtgccaaggtctgccactggcaatcgtatctataggtggcctattgtcttcattgccaccagagaatcaagtcgggagatcttagaaactgcttcttgtattgtagcctgttccccgaagatcatgaattatcacgtgagaccgttgtacggttgtgggtcgcagaagggtttgcagtacaaaatgaagaaaacacaccagaggaggtggctttaagatgcatgacctcgtgcgggacctggctctttctattgctaaaaggnagaagttcggctctgcaaataattatgacactatggagaggatggataangaaagttcgtcgcttgtcatcatatggatggaagggcaaacctgtgttgcaagttaaattcatggcgtctccggacccctatgggcacttggaatgaaaacacnctctcgtcacatgttatcctcaatttttgnctgaatccac

SEQ ID NO: 28530 - DNA, 309 bp, Oryza sativa
  unsure (1)..(309): unsure at all n locations
  Clone ID: PAT_MRT4530_3311C.1
aaaaanaanctcccaccaagatggncccccaagcaganggngtccacacgtgggcgttattaccnccatattctntatacaggggngggaacctatgtcaatgggaaacagggttttcctgggancccttagnatcggcattgccctttacaatttncantgaaagtgttttagngtctcagtttcacgtaaaantttggggtcaangcaaanttnccgaactttatgtatctnctggggtcntttcaaaagggggtgttccnaggtnccaaattgtgggttcccgtgtngggnccaggantttttatg

SEQ ID NO: 28531 - DNA, 3036 bp, Oryza sativa
  Clone ID: PAT_MRT4530_33120C.1
ctcgccagctctgctcttcgagatactctcggtctgcacctcagcacacatggaggctgtaatcctcgctgtctcaaagattggttctgttttagtggaggaagccaccaaagctgctataaccaagctatctgaaaaagctacaaatcttaaggaactgccatcaaaggttgaggaaatagaggatgaactgaagacgatgaacaatgttataaaacagatgagtacaacaaatcttacagacgaggttgtcaagggttggattgcagaggtgcgaggtctggcccaccgtgttcaggacataatggacaaatattcataccatgctcttaaattggaagaagaaaattctgtcaagaaactcttcaccacaccgaattatgtcacggttttcagtgaaattgctgaagagattagcaagatagagaaaaaaattgaaaatgttgcaatgcggaaaaaacggtggcagcagcagtctcaacacactcccaatccgcttgcagatattgaaaggaaacggtcccaagactgccttctagctccagatgatctagttgggatagaagacaacaggaaactgttgactgactggttgtactccaaagagcaagataacacaataataacagtatctggtatgggtggattggggaaaaccaccctggtcaataatgtatatgagcgggagaagaacaatttcgaagttagtacttggattgtcgtgtcacagtcatatgatgtcgttgatttgctgaggaaattgcttaggaagattgtgcctgatgatcaaacacagctattagatttggatgctcatgacttgaaaattagaataaaggaaaagcttaaggatgaaaattttctaattgtattggatgatgtctggaaccgagaagcatacactcaaatagcagatgcattcccaaacttccaagcaagtcgcataatcatcacaacacgacagggtgatgtagcaactcttgctcagtcagcacgccaactcaaactcaacccattggagcacactgacgcgcttgaactcttctgtagaagggctttctacagaaactgcaagtgtccacagaaccttgagaaactgactaatgatatagtagttaggtgccaaggtctgccactggcaatcgtatctataggtggcctattgtcttcattgccaccagagaatcaagtctggaatgaaacatacaagcaacttcgaagtgagctcacaaaaaacaataatgttcaagcaattctaaatatgagctatcatgacttaccgggagatcttagaaactgcttcttgtattgtagcctgttccccgaagatcatgaattatcacgtgagaccgttgtacggttgtgggtcgcagaagggtttgcagtacaaaatgaagaaaacacaccagaggaggtggctgaaaaatatcttcgtgaattgatacaaaggaatatgttggaagttcttggaaatgatgagctaggcagggttagtacctttaagatgcatgacctcgtgcgggacctggctctttctattgctaaagaggagaagttcggctctgcaaataattatgacactatggagaggatggataaggaagttcgtcgcttgtcatcatatggatggaagggcaaacctgtgttgcaagttaaattcatgcgtctccggaccctagtggcacttggaatgaaaacaccctctcgtcacatgttatcctcaattttgtctgaatccaactatcttactgttctcgagttgcaagattctgaaataactgaagtgccagcatccataggagagctatttaatctacgctacatcggcctgcagcgcactagagtcaaatcacttccagaatctattgggaagctctcaagcctcctgactctcaacatcaagcaaaccaaaatacaaaagctaccacaaagcattgttaagattaagaagctgaggcaccttctagctgacagatatgaagacgagaagcagtcagcgtttcgctatttcattggaatgcaagcacccaaagagctatccaacttggaagaactccagacccttgagactgtggaagccagcaaagaattggctgagcagttgatgaaacttatgcaactacggagcgtgtggattgacaacataagaactgatgattgtgcaaatctttttgctacactatcaaagatgccacttctttccagcttgcttctatctgcaagtcatgaaaacgagacactttgcttggaagctctcaaaccagaatcagaggagcttcataggctgattgtcagagggtgctgggcagctaggacacttgagtacccaatatttcgtgaccatgggaaaaatatcaagtatctggccataagctggtgccgtcttcaggaagatcctctactcctccttgcaccctatgtgccaaaccttgtctttcttagccttaacagggtgaatagtgcaagcaccttggttctttctgcagattgcttccctcagctgaagacacttgtcttgaagcgtatgcctgatgtaaaccacttggagattataggcggtgccctccaacacattgaaggtttatatgttgtgtcattgccaaagttggacaatgtccctcaaggcattgagtctcttaggtatctgaagaagctgtggctcttgggtctgcataagaatttcaggtctcagtggcaaaaaaatggaatgcaccaaaagatgcaacatgttccagagctgcatgtcaaggactagaaactttgcttacttttgcagtattatttctgtctggtgattatgggctcagccacattatgcatttagtcttttccaacaaatgatcagtttatgacagatgagctagcggcaccactacatcgcaacctcgttattggaaataagtcctgaaatattggctttcatggccatcaggaaactactttgtcatatgtcctattgtttttgcttcacaactttgcagaatttatgaaactggtccttttattgttgataaaaaaaaaaaaaaaaaaaaaaaa

SEQ ID NO: 28532 - DNA, 510 bp, Oryza sativa
  Clone ID: PAT_MRT4530_33121C.1
cgctcggtcgaaggaggaggttctagaaacttctggaagcggcggaggtgtggggagagagagagagagagagagagagagagagaggcagagagccatggcgcggaagaagatccgggagtacgactccaagcgcctcctaagggagcacctcaagcgccgtcgccgctcgacctgtgccggcccccgcgcgtcatcatgcacgccgaccgccggcgccgctcgacctggacccgcgcttgcccccacgtgagagagagagagagagagagagagggaagagggggataggagaaagaggaggctcgtagccgctggcgcgccactcgtcctcgacggcgccacccttgcctccacggtcgccgatctttgcagtcagcctctgccggctcagggtgataattcgtacttttccaactagatacgatccatcggattaaaggaaaaaaaagggtactaatacctcttttgaaatggacattcacagtgatataatatatgtatatatat

SEQ ID NO: 28533 - DNA, 405 bp, Oryza sativa
  Clone ID: PAT_MRT4530_33122C.1
atggtgcccaaagcagaggagttttcttctccgtacccccatcaggtcgttgtattgacgaggccgccggcaaggcaatcctgcctgggcttaagtcggttcatgggccgtggccctttgaacgagccagaatgcctgattgtctctgcacatttgcaaatggcaaattttgttctttcaggcatggttgtagattccagtgaaccctcaactgtttatgacaacgtcgaaatcaggatggtaaaagaaaggaaatacgaagtattttctagctcatcgagcaacaacatgcagcagacatgtccaagcaacaacaaaacaattttagcaggtgttcattcgctgacacgagaccacagctccagtaaggtgccttcagttaatatagctggcaccttgctctga

SEQ ID NO: 28534 - DNA, 342 bp, Oryza sativa
  Clone ID: PAT_MRT4530_33123C.1
acaaaaaaaaaaacaacttttatttaagggggacccctttgaaaagggaaaaatttccaggaaactggaattccaaggttgaaaggatattcctaaggggaaattaggtgggggggggacaaccattggaacaaaataaggttgggggacccctaaactcggggggaaaggccccaaacatttgaaaaaaaaccccgggttcggggggaatggccctgagctttgaacaacgcttccccttggggggcccctagggccaaaagcgagggggtccccctggggggcaacaggggtgggagtcccgggagcaccccttggaataaaaacagggtggtttttttt

SEQ ID NO: 28535 - DNA, 1582 bp, Oryza sativa
  unsure (1)..(1582): unsure at all n locations
  Clone ID: PAT_MRT4530_33124C.1
cgccgccgtcgcgcgcaatggcggccccggcgctcctctccgccccgcccccgccccctccgatggacgaggacgccagcgcgggcgcgcaccacgcgttcccgggccccgcccctccgccgtccccggagggagcccctccgccgccgcggcggaggcggtcggctgtccgcgtcacctcggagttcgacagcgacgcccggctcttctcccaccgcctctcctgccgcgtcatggacggcctcgccaagctccgggtccgggtccaccacggggtcggcggggccggggcggcggcggtggagccgccgccgcccgaggtcgcgctcctcgcgcggaacttctccgtcgccgtcgacaccgtagcccgaagcgccatgctgcggggcgccgccgacctcgccggatcgcttcgcctcagcgccaagcacgacaccaaggagcaaaaaggggaagtggcggtgagagcaaatttgggtgattcaccatgcaagattgagttatcatctgtggttccacctgatggattgccgaggacaaccttcatctttcccaatggtgaagtttcagttaagcagaaatatttggatgaaggtgacaggattttgtcagtaaacggcatagtgaggtctcatgttctgaatggagtttgcactgcattgtacagtgacaatgagatgaacataaaatatcgttacaaggatgaagagttatcatttattccaagcctctctttaccatccaattcactatcctttgcatttaagcgccaattcactccttcagacaagttaagctaccggtaccagtttgacacaaactactggagttttatctataaacacaaggccagtaagcatgtcaagtggaaagctggttatgagtctgaccaaaggcttggatgggcatctctttgggttggagatgcagggggcaagacgaaggaggtgcctatgaaggctaaagttcagttgacgcttaaagttccacaagacaatgtaaagaattcagccataatgttcaatgtcaagaaaagatgggatttctagtttataaactgtgtgttacaacatgtgcacataactaaatttagtgcacaaataaaggaagaataaagaaaaatatggatgcatttgcacgagtccatatgtaatccgttcaggctcatctctcttgcagaatggaatggcattttggtgtacaatcgatctatgaaaataattttgtcgcaaatctgtttatcaaaaaaaaaaaaaaaaaaactcgagggggggcccggtacccaattcgccctatagtgagtcgtattanaattcactggccgtcgttttanaacgtcgtgactgggaaaaccctggcgttacccaacttaatcgncttgnagcanatccccctttcgncagctggcgtaatagcgagaggcccgaaccgatcggccttnccaanagttgcgcagctgaatggcgnatngcaattgtanggggttaatatttttgttaaaattcgngttaaatttttnttaattaggtcattttttaaccaaatnggccgaattnggaaaatcccttttaattaaaaggtt

SEQ ID NO: 28536 - DNA, 2349 bp, Oryza sativa
  Clone ID: PAT_MRT4530_33125C.1
atgtgggcccccccggggccgcacccctacgaggtcctcgacatggaggccccccacaagcggatgcgcgtgggcgatccgtacggcgacgggatgcctcccccgctgcccccgccgccgccgccggggatggttcccgtggagggcgaccggctgctcggcttgatccgggatcacggccgccctccgtttccgccgccgcctgggatgttgcacggcgaaccgtacccacctcctgatcggttcggctatggaggagggagaggctatcctcctcctccaaattatgacaatccctatgcgcatgaaggcagttttcccgattacgagcacgccgggaggtttccacctgcgcatgaaaggcttgccgccttaggttcaagttttgtgcctggaggacctcaggaggggtatttcaaccatgatcaccgctacaatcgcttccaacgctcggaatcgcctgttgcgccgccgctccctccaccggctcgataccctgaggcgagaagccgttatgattcccacggttggcatcctgaggcggatgttccaccaccaccaccaccactggagcctcctgtaccgtcttcctcagattaccatgccaagccacctttgcaggctgtgaaatcatctttgtttcctattcattccggttctccagccgcaactgcgcgcccacctagttctcatactttgcatcaagctcacctgatgcctaatgcaaatcgttacaatggacctatccacaatgaggtaccaggtttggcatatcaaccacacttagagcaacatttaggaggtggaaggcaaacccaagctcagcattccatcaacaatgctaaaatcagtgtaattagtgcctgtgacttgttcaagcagccacttcgtgggtcacggcctgatcatattgttatcatcctccgtgggctgccaggtagtggaaagagctatcttgcaaaggcattgcgtgaccttgaagttgagaatggtggaaatgcacctagaattcattcgatggatgactatttcatgattgaggttgagaagaaagttgaagacaatgaagggtcaaaatcttctagtacatccaaaggaagaaagcagctgaccaagaaagtgatcgagtactgttatgagcctgagatggaggagacgtacagatcaagcatgttgaacgcatttaagaagacccttgatgaagggaattttacatttgtgattgtggatgaccgcaatctgcgggtagctgattttgctcaattttgggcaagtgcgaagaaatcaggctatgaagtgtacctgctggaggcaccatacaaggatccaacaggctgtgctgctaggaatgtgcatgggtttacagtagatgatgtgaacaagatggcagcagactgggaagaggctccaccactatatcttcgactagacatccattcattattcaacgatgacaatctacgcgagcattccattcaagaggtggatatggagacagaagacactgatggggccagtaacacagcaactagtactgaagctgaaaacacacagaaggctgtgtctgaatcactagataatggacatgatcaagacatctcaggagcagggaagaagtgggactcgtcagaagaagacgacctggatggctacaaagagctaggacagagtaaatggtcaaaagattttgatgaggataccgagaagtctgaccatgcagaaggaagtacgcatgctctttctggattggctcaaacctacagcacgcatcgaaaaacagttacctggggagatcggctagaaaagggtggtttttctattggtgcagctaaaagaagactcacttcttcattaatcataggacccggatcagggtacaatttggtttccaaccccttggctgaagataattccaagcaggcaaagggggtaatcaacaccgatacaaagaagcgattcagcgaacaacttcgtgacgaaggtgaatccttcagggcagttttcgataagaggaggcagcgcgtcggagtttttggcaacggagatggcgagtgatcctcgacaagaagcctccaatggcctctctcgatggtcaggatactctaggcatggtttggccatcagttttgcttcggaatcagttttgcttcgttgcaattctgcggctcggaatgtactgctgctgcctggctcctttttcccaatttccccattcacacagttcacggagagcccttgttccggccttgtgccttgtccatgtgtacccctttggtcacaaacagaaggtaacggggaatgcagatttgtggcactgttgtatctgtaagctgtcccaatacccagagg

SEQ ID NO: 28537 - DNA, 354 bp, Oryza sativa
  Clone ID: PAT_MRT4530_33126C.1
atgtccttctgcctcctcgatggtggcggggagggggaagaagaggagcccaagttctacttggacaaggggacacctatgggtataaatacaaaccccctaggaggagaggggacacagaacaatagatcaagacacaagatcaacatacaagccaacatacgtcaagacaagacgccggatatcgacttcagagataagcctacgaaaaccccatatggtacctacgggaaccaaagagaggaatctagcgctatctctgatctcgccgggtacggattcgaggaggaagactaccatgttgccgactacatgatgatacttcagtccactatgtcgacaacagttagatag

SEQ ID NO: 28538 - DNA, 385 bp, Oryza sativa
  Clone ID: PAT_MRT4530_33127C.1
tttgttttttttttttttttgttttttttttttttttttttttaacaagggcagaaactagtttgcactgaactgttattatgttacatgttttttttacttgcccaccaaacaataaccttccttgcttgaaaagaaaagaaaaaaaaaacttactagatttccacatttgcacagattagttggacattgcatttactagatacatgatgaccaagggtaacaaacaagaaactcaaggggggcccctgggaaggtgctcaattcatatgtaccatcacatcagcagcatcagattccaatatttgcttccaggccccttgggaagaatatatcatcatggcaatgcatcattgatatcaattggcatttgccatggatgaaa

SEQ ID NO: 28539 - DNA, 248 bp, Oryza sativa
  Clone ID: PAT_MRT4530_33128C.1
tgtgtgaagaggcattcaattacatatcatcatatctagccctagagctaaattgttatgcctgagcgtgcctactgagcgaactaactcacatcatttgcggtgaactcactggcgcctattgagtgaggaaacttgcattgccagctgcgttcttgattccggctacgcacggggagaggctgtttggctattgggctgctattactctgcctacgtgactggataggtgggctgcgtcttgcggg

SEQ ID NO: 28540 - DNA, 351 bp, Oryza sativa
  Clone ID: PAT_MRT4530_33129C.1
atgggaccgagggtggtgtgccacgtggcgccgacgtggcaccatgcggccggccacgcgggccacggatggacggccacgatctgccgaggagtagatcaggcggctagggacgggcggcaccaaggccgacccgagcatggcgcacggtggcgggcggcgccgtggcgcgacggcgtgcatgcggttagcggcggcgcgcacgagagaggagggaaaggggagggaagggggtcctcaccggcgagctcggaggctggagcggaggatgaaggcggcggcggcggcccgacgacatggaggggcggacgggcggcggtgacacctaaggagagatttgagaggggttag

SEQ ID NO: 28541 - DNA, 439 bp, Oryza sativa
  Clone ID: PAT_MRT4530_3312C.1
tgttgaacactgccctcctccacacgacatggggtctcatgtagagaagacgtgcgttaagtccgcggaggccttgatggcgtgcgaggagctggcacatgaagctagagctacgccgtcgtgcaggggtgtgccgacggtcaaccccttactctactgaaccatgatgaactggctgaatgatccgagcttaaaggagacggatgtacagatcgccagggaccccaggttcacggctatggtggaacgactagataagacatgtgccagcaccgccggcactgtgggcggcgcaagaggctgaggcagcagttgcacctgcgatggacccgagcatgagcgtgtcgaccatgcagtagctgatgcagtaccccaagattgtggatatggcggagcatgtgatcaatgctctgatgcaggacccggacatgtacagcat

SEQ ID NO: 28542 - DNA, 832 bp, Oryza sativa
  Clone ID: PAT_MRT4530_33130C.1
cgttctactctcacacacaaaagttcgctagtaagttacttccaaaaaaattaaaacgatttataacatcaaccggagtagtacgtatttgcaaattgcgggcatgagcaccttcaagcatggccgcagcaacgacgaggcagggaacaatcaagaagtcacaaggatgacatacaaacgttccagtaaacaagtcacatctgcaactggatcgcaacaaccgtctgtcagcgaaccacccgaaggcacaaggatgacatacagacgttccagtaaacaaggcacatctgccgctggatcgcaacaaccgtctgtcagcgaaccacccgctgatcggagaatgatatggagcaagcaatccaggcggtaaacacaatcgcgtacttccccggcccatgataaatacatagcgcgtgagcagcggaagcatgcatagaagatattcatcggatcgaagatggcgttcagctatattgtaataaggaacatataagaatccagccatacttcccggcgcaccatctcatacatgtgtgtatagcatacgtacgtgcgcgcgtataaatatccatacacaaccacattgccggtgtggcaggtaatcactagttcgtatactcgtacacatgtactcgtgggcgtacgcactatactattaaatgtatatgcaatactgttaaatgtatgagttgcaatgtaagcagtgcttgtattatcatctatagttatttgtgtactcgggcagtttaatacaagcactgctatttatgataatacagaaataataaaatacaaaagtttattacaaaaaaaaaaaaaaaaaaaaaaaaaa

SEQ ID NO: 28543 - DNA, 395 bp, Oryza sativa
  unsure (1)..(395): unsure at all n locations
  Clone ID: PAT_MRT4530_33131C.1
cccacgcgtccggctaatcaagctagctaagctaagctaagttagtatagtgtgatacctcttgtgaaggtagagagatcaatggcggcgacattgcgttggggcggcggcgggctcgcggtggcggcgtttgcggcggtggtcgcgttgtccggcctcctcggcgtcgcggcgaactacggcggcggcggcgggttcttgttcccgcagttctatcagcacacgtgcccgcagatggaggcggtggtgggcggcatcgtggcgagggcgcacgccgaggacccgcgcatggcggcgtcgctgctgcggatgcacttccacgactgcttcgtgcaggggtgcgacgcgtcggtgctgctcgacgccgaaggcanctggcggttcncacggagaag

SEQ ID NO: 28544 - DNA, 1609 bp, Oryza sativa
  Clone ID: PAT_MRT4530_33132C.1
gcacgatgtcatccaagcagctcgcgcctccgacccctcgcctcgtgttttttttttttgaagcagcagtggaaagaacgagctgcattctttcattcttcgattagatcgcgcgacgaaggccaagatgaacaaaatgtcacaccttgaacgatcgaatcgagcacttaacaaattaatacagatcttgggaccttaattaatcatcatggcgcacaatatattttgatcagcgccgatgaaacgagagaggagaagaagaaaaaaaaattcaagaaaccaagaagaaaatatgtttgtatggtgatcgtcaggattcaggaggcggagcggcactgcttcctgatattccctttgctgccggtgagcacgtcgatgcgtcccatcttcttcatggacatggagaacgcggcgtagaacttgatcgggttggtgaggtctgccaccatctgcgccgcggcggcgttctgggtgagcgcggcgtcggacgccagcgcgccctgcttcttctgcaggttggcgtagtaaccgctgtcgaacttgagcggcgtggcgacgtcgaggtcgatggtggacgacgacggcgacgggttggggcacgacgacatgagcgccttggcgtaggcggagtcgagcagcgggtcgagggaggtggtgttcccctggtacagccgcggcgtgacgctggagcagctggccttgccgatggtgtgcgcgccggagagcgcgacgaggtcggtcaggttgagcccgcggttggcgaagctctggaggagcgtgctgaacccggcgaacggcgacggcagcgcgccggtgttggacgccagagacacgggcccgtcgcgcctcccggtctccacctgccacagcgacgccttgaactggtacgacacggcgtcgcgcgcggcgagcgccacgatgtccgcgcacgacaccaccccggggcacgcctgctccagctgcgtcttgatggcgtcgatcacctcgtatccccccaccgataggttcggccccgccgtcttctcgctcccggcgttgtccagcaagatcgacgcgtcgcacccctggacgaagcagtcatggaagtggaggcggaggaggcggccggggagcgccgggttggcggcgacctgcgcccaggtgacgctgcggacgatggagtccacgttggggcacgacttctggtagaagttgtacgccaaacccgggttggtctccagcagcccggcgctgccgccccccacaaggccgcacaccaccacggccaccgcgaaccaccacgccaaatccatctctcaaactgaactcgagaaagaaataaagagagaaagaaacagagggggagaactatctgaagaagtgcctgaactctgcagtgattttggtcggtttgggctgctctctgtgtttgtgtgcctgcgtttgtgtggtgagatgacggtatcggagggggacggctgggagccggggatttataggaggagcagctagccagccagccggcgagatcgatcgttcgtttcgtcgtcgctgcagttgacacagccagctagcgaggacggcgatgtgggcccctggctactcgatcgatggatagctcggacgcgtg

SEQ ID NO: 28545 - DNA, 126 bp, Oryza sativa
  Clone ID: PAT_MRT4530_33133C.1
tttacccggaggggggagcaaagtctacagcaaaaaactattggccgtacattgcaggtacctgttgcattaacttcccttcaaggctggggggacaaggctgtactttgcgcctaggttttgcca

SEQ ID NO: 28546 - DNA, 1100 bp, Oryza sativa
  Clone ID: PAT_MRT4530_33134C.1
ctctgccctgctctcccagcaacgccaaccccgatgctagccgccgccgccgccctccgcccgcccttccgccgcgcccgcctgagcacctcccatggaggaggcggaggagtgacgcaccctctgcgcccgcgcctgcagcggcgtgctttggcctgccgggctgacctgcagcaggacgcgccgttcgccgccgccatcggcgcctgcttgctagcctccctcgtgctcccgacgtcgagaggccgacgagatgacgacgaggaggaaggggagtttggcgcgacggacacgaggatgggcgtcatggggatcatctccttgctgccttacttcaactggctgagctggatcttcgcgtggctggacagcgggaagcggcgttatctgttctacgccgctgcatacttggctccttatctgagaacaaatttatcactgtcgcccgaagagagctggttacctatagctagcatctttgcctgcattctccatgttcagctagaggcaagcatcaggactggtgatatcgagaccttcaggtttgttcagagagcttggaggcttattttccctagtgctctgaaggaggatgttcaacatagaaacaagggaaaatcaatcagaatgggcagcggtaacaggagaattccatcagcacatgaatctagagaaaagcttcgtaattcagatatcttcaaaaggagacttgatgagcccaacgacgagaaacaaaacaaatcagattggaactgaactcaaacagtgtcgtcctttctcttgtcaagctgtttaaggaagatccacatccttgtggaaaactcctgtggctgcttgcaaaaccgatgtgcagtatgtcaaattaggcttaggtgtagttagtttccaagttagtccacgaccacgagttgttggatcaagcaggcaaccaggctgatcagagtgaggcacctgctgttttcaggtttctgcaaattatgttttgtttgttgtgtgtagcattcagcaagaataattaacgttgcatgcttgctctatctgaaattctgaatgaaagtagctttaccaaaaaaaaaaaaaaaaaaaaaaaagctcctaaa

SEQ ID NO: 28547 - DNA, 459 bp, Oryza sativa
  Clone ID: PAT_MRT4530_33135C.1
atggctatggcaatggcggcttcgctcgcggcgcaccaccacctcgccggcggcggcctcctccccacgccacgagcgagcgggaggaacggccgcagcggcatcaccatatccatgagagcgcagaccaaagaggatgacatgttgcggtacaagttggaacgtgtccctttcttagaagagaaagtgagaaaagttagggaaaatgggaagatcatatgcttggacatcaaccagctgatgttatctgaagagaatagatttgctttcacaatagaggtggctgaggaagctaactcttatcttgaaaagaacaggcatgagtatggactgaaaaaacctatactacatgtgctcagtgaccgcatgaatgaagctgggttttctcggccggaaggctacctttatccttatcctattaagcctggtccttattttattaaagaagaagggcactga

SEQ ID NO: 28548 - DNA, 1628 bp, Oryza sativa
  Clone ID: PAT_MRT4530_33136C.1
gatcaaatcgccacgagggctatgtgtgttttcatttttcaacattccacgctgggagaagcacaaagtattcaacaattcaagctccaaacggacaaaagtagcagcctattcacccaaggttgccacgtatcgacactgacatcagtaatccactcatctttataggtgccccacaaggagaattaaaaagcattgagatagatactgatgttcgataatatcactgagagttggttgggggagcttgtttggcagtctcaaatgaatccagtatgggcctaacaacagctggaagaaaaagaccgaagccggcgatgaggcaggaggcggcgacgaccggctcctgcaccacgaagaccctcagcttccccatcgcccccatcgctcctcgtcgccgatccaaccacgcccgctttccctcaaccccgttttcacggtttaggctgctcccatttcgctcgccgcgtcagtccagcggggcgctcttgagcctcggtgagtatggctatggcaatggcggcttcgctcgcggcgcaccaccacctcgccggcggcggcctcctccccacgccacgagcgagcgggaggaacggccgcagcggcatcaccatatccatgagagcgcagagaaagcagagcggtgactctgggagtgggaagggagacggcggagacgggcgagtcagcggtcggcggcgagtgtggcgtcgccggaaactgaccaaagaggatgacatgttgcggtacaagttggaacgtgtccctttcttagaagagaaagtgagaaaagttagggaaaatgggaagatcatatgcttggacatcaaccagctgatgttatctgaagagaatagatttgctttcacaatagaggtggctgaggaagctaactcttatcttgaaaagaacaggcatgagtatggactgaaaaaacctatactacatgtgctcagtgatcgcatgaatgaagctgggttttctcgcccggaaggctacctttatccttatcctattaagcctggtccttattttattaaagaagaagggcactgaataaacctcatgctctacagaccagaaaacacaagatgggacctcttttcagaacggagcagtcctgcaggtagttttgctgcgtacactatacggtttgggaggatttggggatacctcgcatcacttccatgatcaaatgccgcctatctccagatctctgatattttgcaagaagttcaccaggcttaatgtacagtaagggcagtggatcctgtcattttgtttggacggtcttctgctttgctttacatgagtccaggactataaaaagtgaacagtgagttctgccgtgaaaaccatgtcaatgggggtagacaaccattttctcatgcatcaagctttgattaatcaaaagatccatcgggtccatgctactgttgtcttcctactgtaccgttgtaatctcaactgatttaccttggacttggctacctagtacagtagtacccagggtgagtctaagcaactatattttgcttctcttttgggtggcaaccatatcctgaatcctaacttttgagaagccaagctagtaaagtcaagatattatactcctgcttgatcatcga

SEQ ID NO: 28549 - DNA, 228 bp, Oryza sativa
  Clone ID: PAT_MRT4530_33137C.1
atgtcgatgaaggagttcatgatgggcatgtccttggacgagacagtggccttggtggagcccataacgccccaagcccctgggaggaaaggcctggtggggcccacaactccccgagctcctaggacattgtgtaaaaactatgagcgctactcctttagcactgaggactgtgaggttcatccagatcatccacccctcaacatcctgtacattgcccaggcttaa

SEQ ID NO: 28550 - DNA, 1750 bp, Oryza sativa
  Clone ID: PAT_MRT4530_33138C.1
tcgaagcgcgagatcccaaaaaaaaaaggggggaatttttagaaaattggagcttgcgaggaacaggagaagcgccgcggcagctagctgccacgtggacctcgccgccgcgcgtggatgcccccgcggagcccgcgcccatggcgtccgtttcgtcgtccccgtcgtactcgtcgcaggccgccgtcctcctcctcctccaccagccgccgcaccagcacgggcacggcggcgcgtgcctccggtaccgcggctcgcagtcgcaggggagggggaatgccgtagctacgtcgctggggctctccgcggcagggcggggcggagcggggggcctcctcctgctgccgccgctgcccgcgctgcgggcggcggaggggaaggatgggcgggccgtgaccaaggatgaggaggaggaggcggcggcggcggcggtggaggaggagggggaggtggaggtgaggagggaggaggacaagccaggggacgatgggtcaagggaggccgcagcgaggggatcggggtcggggcgattctccgccgactacatctcgctcggcatcagggagcccgtctacgaggtccgtgaacaagccatattagtaaatcttggttccttgcgagcaattgctatgcatgaacgcgttcttatattcaattacaacagcccaggaggaaaggccttcttagattcattactgccacggttaaatccaagaaatatcaatggtggaccagcaatgccatttcaacttgaggttgtcgaagctgccctgctttctagaatacaaaggttggagcgaaggctaatgcgtatcgagcctcgtgtgggtgctttgcttgaagttctaccaaatcggttgacagctgatgtgttggagcagcttcgtctaagcaaacaagcattggttgagctgggttcacgagcaggtgatctcaaacaaatgcttattgatctcctagatgatcctcatgaaatccgtcgaatatgcataatgggaagaaattgcacgctcgacaaattaagtgataacatggagtgctccgttcctttagagaagcagattgctgaagaagaagaggaagaaattgaaatgttgttggaaaattatcttcaaagatgtgaatcaatccatggtcaagcagagagacttcttgattctgcaagagaaatggaagattcaattgcggtcaacttaagctcccggagacttgaagtaagcagagttgagttgcttcttcaggttggaacattctgcgtcgccataggagcattaattgcaggaatatttggcatgaaccttaaatcgtacctcgagacaaacgcgtgggcattttgggcgacaactggtggaatagtagttggagcagtggctggatttttcatcatgtactcatacctaaagactagaaagatattgtaaaactctgtagcattcggtactcctaggaatgtaaataattcggttttgatctcattttgaaagctattgatggaggcacgtacagattcatatgagattgctttgatgctcccacgaatgctgtcgtgggcgtcggttctgaactttggaccaagcgttcgctgcacgcctgatgaagctagcagcctagcaccaagaccatagtatttcgcatctcttacataaagccgtggcggttttcatgactgcactgggtgagagtgctgaacagtgtaactctagattgatcaatgttactgattatctttgaaaatatttgcctggatcct

SEQ ID NO: 28551 - DNA, 366 bp, Oryza sativa
  Clone ID: PAT_MRT4530_33139C.1
gaagtcaatcattcaccgactaggatcaggcatatacgtaccacagctgtaacgcactcataccttacgctgccatgtgtcaaaacagcctatacttatactggaaacatgggcttttgacagagctagacaatcacatcgactacctctagagtagcacacacataatcaccattgatagcataatacatgcaactattcaaggaggactgcccacacgatacccataatacatacacattgccactgaccacgaaatcatcagatggatccttaaaaaacaaccccacaagcaatacttgaactatataaatggaaaatacatgcctttacaagctatccctggcaggagctaatatcctatgt

SEQ ID NO: 28552 - DNA, 261 bp, Oryza sativa
  Clone ID: PAT_MRT4530_3313C.1
atggctccggatcttctggctgcccgcggcaacagcgacggcatcgaaggccgtggccgcggccgccatcatgggggagaagggcggggcaacgtggggcttgtggcggacaatggtgcgctggtgaggctccttcgctgcggcggcggcgacgacgtggcgcacgggagcgccagatgctcccacgaccctgtacgagctctgcaagctgctcatcctccattgatgccctctgcaagctgctcatcctcccggagctga

SEQ ID NO: 28553 - DNA, 812 bp, Oryza sativa
  unsure (1)..(812): unsure at all n locations
  Clone ID: PAT_MRT4530_33140C.1
cggaattcccgggtcgaccccgcgtccggccggggacgatgggtcaagggaggccgcagcgaggggatcggggtcggggcgattctccgccgactacatctcgctcggcatcagggagcccgtctacgaggtgatagaagtaaaatctaatgggaggatgtctaccaaaaaaataagccggaggcagctattgaaatcaagtggcctccgcctacgagataccagaagcgttgacccatcgctatggctaatgaattcaatgccatccttgctggtccgtgaacaagccatattagtaaatcttggttccttgcgagcaattgctatgcatgaacgcgttcttatattcaattacaacagcccaggaggaaaggccttcttagattcattactgccacggttaaatccaagaaatatcaatggtggaccagcaatgccatttcaacttgaggttgtcgaagctgccctgctttctagaatacaaaggttggagcgaaggctaatgcgtatcgagcctcgtgtgggtgctttgcttgaagttctaccaaatcggttgacagctgatgtgttggagcagcttcgtctaagcaaacaagcattggttgagctgggttcacgagcaggtgatctcaaacaaatgcttattgatctcctagatgatcctcatgaaatccgtcgaatatgcataatgnggaagaaattgcacgctcgacatattaagtgataacatggagtgctccgttcctttagagaagcagattgctgaagaagaagaggaagaaattgaaatgttgttgggaaaatatcttcaa

SEQ ID NO: 28554 - DNA, 427 bp, Oryza sativa
  unsure (1)..(427): unsure at all n locations
  Clone ID: PAT_MRT4530_33141C.1
ccacgcgtccgaaaaaaaacaagcgaggaacaggagaagcgccgcggcagctagctgccacgtggacctcgccgccggcgtcgccgccgccgccgcgcgtggatgcccccgcggagcccgcgcccatggcgtccgtttcgtcgtccccgtcgtactcgtcgcaggccgccgtcctcctcctcctccaccagccgccgcaccagcacgggcacggttttgcgtgcctccggtaccgcggctcgcagtcgcaggggagggggaatgccgtagctacctcgctggggctctccgcggcagggcggggcggagcggggggcctcctcctgctgccgccgctgcccgcgctgcgggcggcggaggggaaggatgggcgggccgtgaccaangatgaggaggaggaggcggcggcggcggcggtggaggagga

SEQ ID NO: 28555 - DNA, 510 bp, Oryza sativa
  unsure (1)..(510): unsure at all n locations
  Clone ID: PAT_MRT4530_33142C.1
atggcgagcgtgtgggggaaggacagcggcgagtacaggccggagcggtgggtgacggaggacggcaaactgcggcacgtgccggcgcacaggttcatgccgttcaacgccgggccgaggctgtgcctcgggaaggacatctcggtgctgcagatgaagagcgtcgccgccgccgtggcctggaacttcgacctcgaggtggtggccggccacgccgtggagcccaaggtgtcgatcgtgatgcagatcaagaacggcctcatggtgaaggtgaagaagcggtagatcgaccgtgtgccaattaacccatcggtgaaaacatatcgtacgtgtttgtacacgggcatgtacggttttcactatgcatggcctacgtatctctatcaccgtgttgtaaaatgtaaacggtctgttcgatttcaccaggcgagaccctctctgtacgctagttctcacgtgtgttccataaaaacgttagngttgaaaaaaaaaaaaaaaaaaaaaaaaaaa

SEQ ID NO: 28556 - DNA, 510 bp, Oryza sativa
  unsure (1)..(510): unsure at all n locations
  Clone ID: PAT_MRT4530_33143C.1
aagcgggggggcgaggcgagagaggcggacgacgaagcgcggcgagcggcgngaagccggcgccggccgcgcgcagaccagggacaacgagaagnccggggncagcagccgcgncgcccgcgaccgcaggggcgaggaggagcaaggggaangggcaaagagggggggggggacaaaacattttttttttgccgnacgacaccctggcggcgccgccggaggacggggaggagacccgccccccgcncaacaagcccgccgngcgcaagcncaacggcgggcccggcaccaccaggggaggcaccggaccaaaaccggccaccgaagggcgcaacggangcacaggccgcgacncgaccgcgacccagagcgaggcccncaacacgaagaanggcagcaaaggcccaccgccgccgaggaacgcacccaacacccaggaagacaccnggaagaccgcggagaaagacaccaagccgaacaaggaagnccagacccgcaagcagagccaga

SEQ ID NO: 28557 - DNA, 608 bp, Oryza sativa
  Clone ID: PAT_MRT4530_33144C.1
atggtatctgttgttctagtgccagcccgtggagtagaactggatccgggatgaaagaagtgcttggctggaaatctccaagtacattcattgaaataagaagtttccttggtttgaccgggtgttatagatggttcattaaaggattctcaaagatctctaagctaatgacaggacttctaaagaaaaagtttgaatgaatagaagaatgtgagaagagtttctcagaactgaagaaaaggttgatcaccggcctccctagtttaatcgtcctagatatataagaaatgattttgagaaatattgcgacacatgctgaaaaggttaggatgtgtgcttatacaagaagagcaacttgttgcttatgcctcatgagatgagctaccctgtacacattacttgaagttagctgcagtagtgcatgccctcaagatatatatggcgacggtactttatttaggatagatgtgaagtttacaccaactacataagtctaaaatatatttttattttgactgggctcaatcttaggcaaaaagatggctagagagttgatcaaagaccaagactaaaacatacactaccaccaggaaaatgaaaatatagtc

SEQ ID NO: 28558 - DNA, 318 bp, Oryza sativa
  unsure (1)..(318): unsure at all n locations
  Clone ID: PAT_MRT4530_33145C.1
gagctcaaaagacacacattccaaaagcatctgtggccatctcctcctagtcctaggctcgcgtcaatggcggcgtccaccatggcactctcctcccctgccgncctcgncggcaagggggtcgncaatgccaaggtnttcggcgagggccgcgtcacgntncgcaagtnggcggccaagcccaagcccgncgcggcgtcggggagcccgtngtacggcgccgaccgcgtgctntacctnggcccgntnttcggcgagccgcgtnctaactnaacggcgagtttcccggngactncggcttggacaacgccgggcttt

SEQ ID NO: 28559 - DNA, 183 bp, Oryza sativa
  Clone ID: PAT_MRT4530_33146C.1
atggatgcttgcctgcttggcttcgcccaagctgggctcgtgtctgcgtcgtcggcggcttgtgccagattcgccgcggcggtcgcggtgacggggcggccgttcgatctggatcgagaggcccagatcgtgcgcgaggcattaaaacaaaatacggagataaaaggagcaaagataaaatag

SEQ ID NO: 28560 - DNA, 293 bp, Oryza sativa
  unsure (1)..(293): unsure at all n locations
  Clone ID: PAT_MRT4530_33147C.1
ctttgggttttgcgggggttttttttttttcatcaaaaaaaaattttattagcaaaaaacaggggataagtattcccaggccgccttggtgaaggatactaataacttccagggttaaagggaataaagggggcgtaaaaaaaattctagcggacacacaacggggggaaaagaaaaactttttttttttacggggccnaactctatttacttttgaccgtgaggccgttnggttgtccccccccccatattttatgggggaaaataaangggggttttaggtggttggggtg

SEQ ID NO: 28561 - DNA, 1335 bp, Oryza sativa
  Clone ID: PAT_MRT4530_33148C.1
atggcgtccgtacgcgccctgctcgcgctgacctttctcctgtccggcggcgcagccacggcggcggccgccatggtcagaaatggcggctcgccgagcatctatggcggtggtggtggagagggagctgcagtgatcggtagaggcggcaggtcgctgctgcaggcggcggcggcggcggcggcgacgacgcagagcgcggttttcagcctcgacagctacggcgcgcacggcgacggcgagcgcgacgacacggcggcgctggcgagggcgtggagcgccgcctgcgcctcggcggcgccggccgtcgtgctcgtcccggagagcaggagctacctgctccggcaagtcaccctctccggcccctgcgaatccaccatcaagctcatggtgaaggggacgctggtggcgtcgccggacatgtcgaactggaacgagagcaacaggaggtactggatcgtcgtccgcggcgtcgacgggctcgccgtcggcggcggcggcaccatcgacggcaacggcgaggggtggtgggagaactcctgcaagatcaacagggcactcccatgcaagggagctccaacggcgctgagtttccacacgtgcgacaacctgagcgtgaatggtctgaagatggtgaacagccagcagatccacatgtcagtggaggattgcaccggggtggagctggcccacctgtcaatctctgcgcccggcacgagccccaacacagatggcatccacatcacccacagcaagaacgtccaagtcagcgactgcaccattaagacaggggatgactgtgtgtcgatcgaggatgggacccacggtttacacgtcacgagactggtgtgtgggcccgggcatgggattagcattgggagcttaggagatgacaactccagagctgaggtgtctgacatcttcatcgacaccgtgcacctctatggcaccaccaatggagctcggatcaagacatggcagggagggagtggatacgccaaggatatcgtattccagaacatggtcatgaacagtgtcaagaacccaataatcattgaccaaaactactgcgactcagctaagaaatgcgagacacaggagggatcagcagtggagattagcaatgtggtcttcaagaacatcgcagggacaacaatttccaagagtgccatcactctgaactgcagcaagaactacccatgctatgacatttccttacaggacatcaacctggaaatggtggatgacaatggtgccacaggaagtacttgccagaatgcaaaatggaggaaatctggaacagttgttccacaaccatgcaccagcacaaattag

SEQ ID NO: 28562 - DNA, 310 bp, Oryza sativa
  Clone ID: PAT_MRT4530_33149C.1
gtctttatactcccggtcgctctgcctcaggagcgatgcgggtgtgaaacaagccgcgttgtccccgaccctctgctgcgactcccacgcgtcgccacacgccgaggaagctgatcggatgcacagacaggacgggcaggcctctgtctgtccaccgttcacaagggaactggacagggctgccattaaggcccctacgaccaggaagaacccatacgggaccagatccggcgccaggatgcacggacccagtacccccatggccggatctgctgctccggacagatggagcctagtcgcatacataaga

SEQ ID NO: 28563 - DNA, 332 bp, Oryza sativa
  Clone ID: PAT_MRT4530_3314C.1
aggacgcgaacattcaggactgggcgaacattcaggactgggcgaagtacaacgaatttgaagaaaatacaatagacgaggtggacggtgctgttgaagattacgacggtgcagacagtggcggacccaggatttataccctggactcaccgggcgtgcatcgacgttgcttcgccatgtctctaaatgctagtggctgcggctctcgtctccaccgtcgacgctccacactcgccgtccagccaatatcggtgctctggcctgttgactgtcgtgctcttcggtgtcaccgccgccgctcgctgaatgtggaacaacgcctgatgccctga

SEQ ID NO: 28564 - DNA, 719 bp, Oryza sativa
  Clone ID: PAT_MRT4530_33150C.1
cggacgcgtgggtgctgacacagcactcctatctgctcaaccacttgcttggcttcctctgctccggcgaccgggcggccggccggccggcggcgagaggtagcgccaggggcacagggctgcaattggaacctgaacttgaaagcaagttgtgcaagaggacagaaaagaatcagtctgaatatggctgcctcaaagcttcaggccttttggaaccatcctgctggccccaaaacaattcatttctgggccccaacattcaaatggggtatcagtattgccaatgttgctgactttgccaaacctcctgaaatgatatcctaccctcagcaagttgttgtggcttgcagtggagtaatttgggcacggtggggcatggtcatcacacctataaactggaacctctccagcgtgaatgctgcaatggccgtgacaggcgtgtgccagctttcccgtaagataaggcacgattacttctctgatgagaagagtgctactgcgtcgctggaaggatgataggaagaagaagaaattgttgtcatggaatggaacactaatttcattatcagtcgaccagcacagtgttcactgtgaatgtgtccgcttccatgataacaaattaacaatcccatgtgtgtgtatgatcattatgaattgggctatgggtatgaaatgtttttataccctttggtatacagatagtaagcgagtctgaactt

SEQ ID NO: 28565 - DNA, 1472 bp, Oryza sativa
  Clone ID: PAT_MRT4530_33151C.1
atggcctcctccaattccacctcctccgctcgccgtcgcgccgcgcgcgctccgcctcctcctaatttgggcgacctctccggcgtctccgctcccctcccctccaatggcctccacgccccctccatctccacccaccccaccaatgcggcaaccccaaatccctcgccaccaggagctagcatcgtcgtcgtcgtccgccccgcaatgcagcccgcgagtccggtctccggtgacgcgggccccgtggcggaggcggtacctccacgcggtgccccccaggtcctcgtgcgccggcgttccgtgcccttctcccccgactctccgctcgcccccggcagccgcgggggcggcgagaggaggtccacgttccgggaggacgtcagccatgccgccgccgagacgtacctcgtcacgcgcctcgccttcatcctcctccgatacctcggggtaggctaccggtggatttctcagctcgctgccctcataatatatgcaattttacttatgcccggtttcataagagttgggtattattatttcttttcaagacaagttttgaggagcgtgatctatggggatcaaccaagaaataggttggatctttacataccaagagaccccaaaaaacccagtccagttgttgcatttgttactggtggtgcatggatcattgggaattttcctcaaggaacaataagtgacatggttagcgatgcttctgatgggatttcatttgtttgtgagactgttggtgcctatggaggagatcctaatcagatatacttaatgggtcaatcagcaggagcacatatcgcagcatgcgctcttttggaacaagcggctaaagaatctaggggagagcagatttcatggagtgttactcaaataaaagcatactttggtttgtctggaggatacaacattgaaaatttggttgatcatttccatgaacgtggtctttaccgttcaatatttctcagcataatggagggaaagaaatcattgccacatttctctccagaaactgttgccaagaaattatgtcctgaaacaatagctcttcttcctcagattgtgcttttgcatggaacggatgattattctataccattttctgctagtgaaacttttgcgggtgtccttaaacaagctggtgctaaagccaagttactactctatgaagggaaaacacatactgatgtatttttacaggatccactaaggggtggcagggacaaactggttgaagacgttatttctgttatccatgctgatgatgcagatgcacgtgagaaggatgcattggcacctatcccaggccggctggtttctgagtggcaaataaagctggcacaccgaattagtcccttctgaagaggtatcagttgtttacctttttttcacagaagttgtttaacgtatttgatctgccgtgcagtcaaataaatttcttcgtttaaatttggccc

SEQ ID NO: 28566 - DNA, 574 bp, Oryza sativa
  Clone ID: PAT_MRT4530_33152C.1
caactggattagggctattacctgtcaaggggcctgaaccagtataattcttgtcttttgattgctcgatgtcgtactacgtagatccttataccggcgtaccccaatactctctatatccggtctacgggtatcccccgtcgacaccatccattgagcaagctttgcgtgaagaagagattgaagaagatgttgatcaagccgcagccgaagtaagtgacacagaaaaaactccatcggcttcatccaaacaaactcctccaactccttctgccccagctcatttctcaagggtaaacaaaaagaaaactgctgtaagaaattggcagcaacaacacttaaaccagctccaccacctcctcccccatcttcacctcctgtacaacaaacatcaagtgattgaactccattggctataggaagtcaccatgttgaggaagaagaacaaccagccgctcctgccatcccagccttagccgatctgttctctttcgatatcaaagactatcttgatgaacaaacagaagaagacacccccagcaaggccaacttatgaatttctgaagatttaatc

SEQ ID NO: 28567 - DNA, 480 bp, Oryza sativa
  Clone ID: PAT_MRT4530_33153C.1
atgacgaaccagcgaagggagatgcaggtggaggcgccgcaccaccaaacaaaaatcaagaaacaagaaaccaccattagagcccacattctcaaaccaaacacctcaaatcaacaacaacaacaacaacaacaacaacaacaagatttaagtaaaaaaaacaacaagaagaagaaaccccaccgaggtggccggtgggtggggatggaggaggcggtaccaggcgttcagatctacgcatccccagcctcgtggaggtcggatccggcggctagcacggtcggtggcagtggtgagggaggcgtcggtggtgttggcgaccgggagtcggggggaggcgccggcggaggtggaggcgtatgtggcggccagctagcacgggcggaggcagaggcgcggctggaggcgtcgccggcagaggcggcgaaggtggagaccgctgccgccgtctggcctcagccgcctcccctcccgccgtag

SEQ ID NO: 28568 - DNA, 157 bp, Oryza sativa
  Clone ID: PAT_MRT4530_33154C.1
gcccttctccacgtccaactcgggatagaaattaaaggaaactcgaaacatgcctttccgagcaaggaaacccgagacccgacgaaaacatactcggactcggaccctgacggtctgaccgcccacatacctgcggtcagaccggccctactggccg

SEQ ID NO: 28569 - DNA, 246 bp, Oryza sativa
  Clone ID: PAT_MRT4530_33155C.1
acgcccacgcttccggaggaacggcactcgcgagaggagagagatggccgaaaccatgcaaacaggtcgtttgtccacaggactaatggctcccaggaagcaacttgccaccaaggttgctagcaagactgttcccaccattgaaggagttaccaagcccaaccgttaccgccctggaactgtactcctccttgagatacgcaagctccataagagtacttagctttggataaggaacatgacttt

SEQ ID NO: 28570 - DNA, 203 bp, Oryza sativa
  unsure (1)..(203): unsure at all n locations
  Clone ID: PAT_MRT4530_33156C.1
aagaaacgagaggaacgataacgacgtacgtncggagatgcgtcaaactacgacaatgagtacaaatgtccgttatagtcgacgtcgcgtagagtacgacgtcgttgtctatacgaatcgggtacgcactcaagcattccgtcgtcacgtcgtgtcaccttagggagagtagtggcacaagtcgactcttgacgtcagtacgt

SEQ ID NO: 28571 - DNA, 459 bp, Oryza sativa
  Clone ID: PAT_MRT4530_33157C.1
gggggcatacagaaggttctttgatcataatacgacaccagatgcatattcacttgaagaggaaagcgccatactacaatttaacatgagccaaccttaaacattaactgaatgcttaccactacagagggtttctcagagacataacaacgaaaagaatcaccgcggataggctccatgcagatcacttcaagagcgtttacgagtgacggcctgaaccctctgttctttccacctttacggatggcaaacctctattacctgctcacaagtgacctggctggatgagatccacatccatgtggatacggtcaccaggcatgcacatgttatactcctgatccttgttgttcataatctttgtgacattccccgggccattggaggggcttgtgcataactgatggctgcaacaagggtaaaagggtcagggccgtccaaactgaaattcttaattac

SEQ ID NO: 28572 - DNA, 337 bp, Oryza sativa
  Clone ID: PAT_MRT4530_33158C.1
cttggatccctccaccctcatcttggagcctgggcgacccgtcgcgccatccgcccaaaccctagccctcctcctactactcgccatggccaccgactactccatcccgtccccggcgttcctggccggcaacccgaacgccactctctcctgcgcaaacatatctacggttcccgacaaggggtgtacgccagctcatcaccaaggaccgacgtatctgcagcaacatcggcgtagagcaaatcgtacacgtaatcagactcaacccctatcacaagagatactacatttccgtacaaactgggtcaacatgtgctttcactggaatgcactgaac

SEQ ID NO: 28573 - DNA, 1783 bp, Oryza sativa
  Clone ID: PAT_MRT4530_33159C.1
aactagtggatccccggccgccgggttttttttttttttttttttttttttttttttttttttttttttttttttggaccacatctcagtcggaggaatatattattctgatgtgatgtaaatcatcctccattccaaagtactccctccgtcacagaaataaccaacatgtccagattcattgtaataggaagtgtcccattctgaattagatacaacaagtactaatactagctgtctaatcaaatactatagattgctatattttactaggatggaggaagtaccaaataccttgctactagatggccctgtcaaagctgttgctgccttaaacgatataaacagtcaataaagcaattggcgtaccaattcataagatgggaatgtactaaactgattcgagaagctttgactacattcttctcccacatcatcaaaccctactagagatgtagacagatctgtacggatacttgcctacccagtcccacgtacaaatgatgctcatgtccaaatcagccatgacaaaaatgataagattgaaaacatccaaccaacgtccctaccgtgagctcaaggcaaagaaaaaacaaattcctatctaggatgaaatatagtcataaaaaaggggcagattcgcaaggattccacgataaataagtgtagggaaattcctgttattttatgacgctgatagaatattttttgtccatgttgtttaccaatcttcgcatgggataccaacctaccatgtcatggttcaccgcacaggcttcgctgggctgggagaattcggcagcagggctgtaaatttgaagttgccagagaacatagcttctttatctgtcagtgataggcaagttgcctccctccgagtgtaccgtgccaatgcctggatagcagggacagctgctgcatccatagcctctgaaccttcgtcggcatacacattcctccagatgacatttacaagatcatcctgacgtgcttctgggcttattgcagagtcatatttcacaatgttcccatagaatatcttctcaagttctttcatccattttgtcaagagcaagttaaccccagctttcgaaactctaagctccacatcatgattgtaaatttcatagatgtactgtccaaatttaacaccatccttcccttcttctttcaagcgacgtagaataagccacatatggagaacaagtaatgaaaatgttgttttaaatgttttctccaactgaaaaagcgtgtagaacagcaaaagcgtgagcatcaaatgcttaatgccctcaaactttggatcttccactcgaagaggggagtcaggaggcaatgccagcgagcagggctttgacaggaacatagaattcagtctgacctgaaattgagataaactaatcagtacaatgaatggaaatgcaagctcgggcctcgccccagcggcagtggcggtggtggtggctgcggctgcggcagggccgcgcgacgacgcggcggcggcggcggaggccttggagaagcctctgcacgggggctggggagcgggcgtccccaccctcgagaaggccctggagagcagccgcgattccgccgcggccgagatgcgcgcggcggctgcgcgccacctcgacatggccgattccccccctcgcgctcgcgctcgcgcccgcagtcgcggctgcggaaaccgccggcgagaagtcggcggcggaggcgcaggcggcggagaaggctgcggttgtagacacgcgacgcagagtggagccacaggagagttatc

SEQ ID NO: 28574 - DNA, 297 bp, Oryza sativa
  Clone ID: PAT_MRT4530_3315C.1
atgaggaagagagtaacgtcatcgccggcagggacatcatcgtggcttcacgggcagcgtgatgacctccctcgcccgatgatgtgtttggttgatatgggcgctggtggcttggtagtgttcccggtggctttgatgagacctcgtttgtcgggcacagttgatagcgtccatgatgtcgcgacgacgtgctccggcgaggaatgcttagaccaactagctcaccatgggattcactttaatatagtccttaatgtttatgatgctgttatatcatcttggtatatggttaattaa

SEQ ID NO: 28575 - DNA, 694 bp, Oryza sativa
  Clone ID: PAT_MRT4530_33160C.1
agctttcgaaactctaagctccacatcatgatgtaaatttcatagatgtactgtccaaatttaacaccatccttcccttcttctttcaagcgacgtagaataagccacatatggagaaaaggtaatgaaaatgttgttttaaatgttttctccaactgaaaaacatcaaagatatcagacttgtcaacttgagaagtgatgcgatgataaacaacatttgctcctctaatggacttgctttgcttactgtagaacagcaaaagcgtgagcatcaaatgcttaatgccctcaaactttggatcttccactcgaagaggggagtcaggaggcaatgccagcgagcagggctttgacaggaacatagaattcagtctgacctcgggcctcgccccagcggcagtggcggtggtggtggctgcggctgcggcagggccgcgcgacgacgcggcggcggcggcggaggccttggagaagcctctgcacgggggctggggagcgggcgtccccaccctcgagaaggccctggagagcagccgcgattccgccgcggccgagatgcgcgcggcggctgcgcgccacctcgacatggccgattccccccctcgcgctcgcgctcgcgcccgcagtcgcggctgcggaaaccgccggcgagaagtcggcggcggaggcgcaggcggcggagaagactggtggg

SEQ ID NO: 28576 - DNA, 125 bp, Oryza sativa
  Clone ID: PAT_MRT4530_33161C.1
ggcttatgacatgaaattaaatttagttcggttctgaacctcgatcggtcatacatgcccatataaaactaaatcttagctccccagagccgacagccagttctcaatcattcagttgatgccct

SEQ ID NO: 28577 - DNA, 4278 bp, Oryza sativa
  Clone ID: PAT_MRT4530_33162C.1
atggcctccgcctccgcctccgcctcgccgcgcaccgcgcggcagctcgccgacgccctcaccgcgcacctctccctctaccacgccgcgacccctccccctccctcctcctcctccccgcgcgccgcgatcctccggtggctcgcctccctctccccgccctgccgcgccgcggccgcgacctccctcctcacccccgccgcggccgccgcgctcctctccatgctccgccgcctccgcgctcgcggccactcctccttcttcgtgctgcatcctccttccccttcttccgcggcggtggccgaggagggggcggcggcgcccaccgtcctctcgcggctctcccgcggcctcctcgcccgcgccgcggaggcatcccgcgggcaggggctcgtcttcgaccacctcctcctcttcccttcctcccccacgtcgtcgtcgcgcctcgacgcgatcacggtcgcggaggaactcctcggcgacctcgacggtttcgtcgcggccatggacgagatctcgggtgggaggttcctatgcggtgacggggaggtggacctggtggcaatggtgggggaggagttccccgagctgccctggctgaaggccaaggggtactacgtgatcgaggagttcgtggcaaattgggtggagatcgcgctgcggatgtcgtgggcggcggcggggggaggtggtggaggtggaggtggggggaggaaggcggtgagggttgggaagggtgtcaaggagaaagctggattggcagcaaatgcgttctggagggagaaagggtatgtggattggtggatgaggctggagccgagggtgagagcaaggatcatgggagcattctttgggaagggcactacagcactggagatagtgtacttgaagagcaatatttctaaccgtagtggtgatgcaatctttttcactaaattaatgtcagctggtactgttgctgaccatatactcatgaaattacgaggaattctcatggtggtgtcaacggaaagtataaatcttgaactcattggggatgaagcaccaaaggctgccaaaaagaaagatgttgaaaagatcagcggtggttctcgaaaaggaaagaagaagtccagtagcttgaaaaagctaataacatcttctaagcaaatgaaggacatcggatgcagtagctcagatagtcatgatcctaaggttttgccagatcaacagggtccatctgttgtgtgcactactattgaacatgcatctgaagataatctttgcaaggaaattgcaccaacgccaaaggtggagcaaactgttgggttgggtgactgcaagaaccaatgtaacagcaaaaagagaaataagcgtaaaggaaaaactaagctccataatctgatgaaaactgagaaccctggatctggcacattgaagacagatgctcctcatattgctacagaagctccaaataaacctgttgaagcaacacatgtctcacctcatctcccatcatatgtccatcagtccaagagttgcattcccaaagcagtgaattgctgtgactcttccattgcacttaatggaacagatgtaaaaggcattggaaacacaaaactggaagataccttgcattctcccagagtcagctcgttgttgactacagaatgttctcagagtgtgaaaacatctgatggctttagtatgaatgagcaggtcatatcgcagaatggccagaatgaatctacactccaaccatcttcttgtttgccttccagaagtgatactgttgatcgtaactctgtagtggcaactgaaaaaatattgccacctgttattcctactaatatgtttcacagtgctataagcgacaatggcggggtaatgaaaactggaggtgaatattatgtgtacaacagaaacacactgggtggaacatcatatgagtggcctagtgtagcaccacatcattttgtttcaccggaaatgcaacagcgccctgctacaacagataggttgcatcttgatgttggttacagatggccagctcaatttgaacagcctttccttccacccaaccatcagatgagaaatccgccagttgaagctggatgcaatcaagtgctatcctctctttcagtgcccttaagttttgattggcctcctgttttcagaggttatggtaaattgaatcaaaacaatgctttaggatatgatccattatatactccgcagatgcaatcttccgcttggtcagggtttcatgctccactaattcaaagaggtagtatttgcaatgagaaagataggaaatattttggtgacagtgatccaagaaacaaatcagatgttggggatgatactgaaagctactggttttctgaagaagaatctgatggccgcggactttccggaagagatattaatcaatattttggaggaggagttatgtattggagtcctgcagagcatgccggaactggtttttctaggccaccatctcttagctcagatgacagtgcatgggcttggcatgaggcagatgttagtcaagttcttgatgacatacctgttgggattccttgtacatataatgcaaatagtgtgtcttcaccaccttccacttcaacagtcctgaagataaaactatttccagtttcaaagagtgtatcttgtggcagcgaagtgataaagggagatacattgccatatgcaatgctgcggccaatagttgttccaatatcacgaagaccatcaagatctgaatttaaggggggtcatgatcacaggagcccatgtgtgccttcaaacaggagggatattcctcttgtacgaagacctccatcgccagtagtacttagtgttcctcgagtccctaggccgccgcctccttctcctgtgggagagtcacgaaaacgaggattccctattgttagatctggcagctcaagcccaagacattgggggatgagaagtttgtttactgaggacaaaattttgaacagggctcagttttgcttggatggtcctgaagtcgtatggccttcatggggaaataaaggaagtcctgctggtactctggggcaatcaattgaggatactgtcttgcaggatcaccttgttaagatttcacagctttctcgtgatcaacatccagatgttgcgttgcctctgcaaccaccagatatgttaaactgttcttctagcaaggcatccctctctttgatgcacaatgcactacacgaagagatagatcaattctgtaagcaggtttctgccgagaatctggtgaggaagccctatattaattgggctgtcaaaagggtcacacggtgtttgcaagttctctggcctcgttcccgtacaaatctatttggctcaaatgccactggtttggctcttccaacaagcgatgtagatcttgtaatttctcttccaccagttcgtaatttggaacctataaaagaagctgggattttggaaggcaggaatggcatcaaggaaacgtgtctccagcatgcagcacggtgtcttgcaaaccaggactgggttaggactgattccctcaaaacagttgaaaacacggcgatacctgtgatcatgcttgtagctcaagtgccctgtgacacaaatttgtccagtgaatattcttctgttctggatagctcacacgaacaattatccatcaatgtgcttggagatcaagggagcccttctcgttctgacaactctagttcagaaggtagcagcatgccaatgtgttcaagaataaacaaggatgatggcaatgttgtgcagtcaattcgtcttgatataagtttcaaatcaccatcccacacaggactccagacaactgagttggtctgtgaattaactcagcaatttcctgctgctgtgcctcttgccttaatactgaagaagtttttggctgaccggagtttggatcacccatattctggtggtctaagttcatattgtttggtactgttaatcgttcgttttcttcagcatgagcatcatcttggtcggcccattaaccaaaatctgggcagccttttgatggatttcctatacttttttggcattgatccaatacacattgatgatcctctttgccctgccaataatgtgggcaggaactgtttccgcattcaccaatgtatcaaggcttttgctgatgcttttactgttctagaaaatgagctgctgcagttcagtgcagaatgttacacacctgtgtcatcattcaacctactgaagaaaataatgccaagtattgatttcgatgagctatag

SEQ ID NO: 28578 - DNA, 1797 bp, Oryza sativa
  Clone ID: PAT_MRT4530_33163C.1
atgcctttccattcctcggctacaatcaatctccgtacctcgtacctcgagccggtggcgtcgcgcacgtacggtggcaacgtgcacaggttcccgagccccaggggttcttcctcgtggggattccacaagttcatccgccacgacgagctcgagaggtcgggccacctcaccggcgaccgcttcgccgtccgctgcgacgtcaccgtcatgagggccacggagctccgcgtcgagccggcgtgcctcgccgtgccggagccggacctgcgcgcccacctccgccgcctcctctccaccggcgacggcgcggacgtcacgttcagggtcggcggcggcgagacgttcgccgcgcataggtgcgtgctcgctgcccggtcgccggtgttcaaggccgagctctgtggtcgtggcggcgcggccgccggtagatgcgtcgacgtcgacgacatgggcgccggggagttcggggctctgcttcacttcgtgtacacggacacgttgctggagatggcctcgcgcgacgtgccagccatggcgcggcggttgatcgcggcggccggcaaataccaagtggagaggctgaagctggtatgcgaggacatgttgcgcaggcgcgtcgacacgagcatggccatggcgacgacgacggattcggcagctaccaccgacgatcagcttagccagcgtccatggctgacgcagcttttcttcaagtttgcatcacgcatggtcggtggcatggtcgtcgacgcgttcacacctgagcctcccactgccgccgagaaatccggcgacgcctcgccgtcgctatcgccatcgccgtcgtgctcgaccgtcgccgtctccgaggcgagtggtcaccacgtcctgaggatagagggatacaagaggacgaagatgatgatggcaaccggcgaacacctcaactccggcgagttccacgtcggcggctacacatggcgtctccggtactatccaaataggtacgaccaggagttctccagctcgatatccttcgctctggtgcggaccggccgcgacgacgacgatgtcgtcgtccgagcacgcgtcaagatcagcttgctcgacgtcgccggcgagccggtgacacggtacagccacagcgacaacaagtgcacgttctacgagggacatgatctctgggccatcaagagcttcatcaggagggttgatctggaggattccgggcatctcgacgacggcggcggtggcggcgactccttcgccgtccggtgcgacctcaccttcaacgtcccggacatccgcgtcgacgtcgacgacgcggccgccgtcacggtgcccgccgtgccgccgcctctcctgcatcgccacctcggcgacctcctcgcctccgaggcggcggccgacgtgaggttcaatgtcgacggcgaggcgttcgcggcgcaccggtgcatcctggcggcgcggtcgccggtgttccgggcggagctgttcggctccatgcgggagcgcgccgcgagggccatcgtccgcgtcgacgacatggacgccgacgcgttcgcggcgttcctgcacttcgtctacaccgacgagctgccggagatggacgacgatggcgaggaggcggcggcggtgatggcgaagcacctgctcgtcgccgccgacaggtacggcatggagaggctgaagaaggtgtgcgaggacgtgctgttcaggcacgtcgtcgtggccacggcggcgacatcgctggcgttggccgagcagcatgactgccccgagctcaaggacgccatcttgaggtttaagctctag

SEQ ID NO: 28579 - DNA, 1344 bp, Oryza sativa
  Clone ID: PAT_MRT4530_33164C.1
atggagaggaccggcgcccacggcggcaaacgcttgctgcctcgcctcctcttcctcgccgccctgtcggtcacgccgtggcttctcatcttctgcctccacttctccgtcttcgatggcgcaccgccggtcagctcgccagcggcgcgccagtcgctcgtcgccgtcgtgtccgagggcggcgaggactcgcagcgttttctcctcgagcaagaggagcagctcaggaggctcccgtccgcacgcgacgtcacgacgacgacggcggcggcggtggctggggacgcgcacgcctgcgaggggcggtacgtgtacatccacgacctgccgccgcggttcaacgacgacatcctccgcaactgccgcgagtggtaccagtggatcaacatgtgcgtgtacctcagcaacggcggcctcggcgagccggtggacaacgcggacggcgcgttcgccgacgaggggtggtacgccacggaccacttcggcctcgacgtcatcttccacagccgcatcaagcagtacgagtgcctcaccgacgactcctcccgcgccgccgccgtcttcgtgccgttctacgccggcttcgacgtcgtgcagcacctgtggggcagcaacgcgtcggtcaaggacgccgcgtcgctggagctcgtcgactggctcacgcgtcgccccgagtggcgctccatgggcggccgcgaccacttcgtgatgtccgggaggacggcgtgggaccaccagcggcagacggacagcgactcggagtggggcaacaagttcctccggctgccggccgtgcagaacatgacggtgctcttcgtcgagaagacgccatggacggagcacgacttcgccgtgccgtacccgacctacttccacccggcgaaggacgccgagatcttccagtggcagcagcggatgcgcggcatgaagcgcgagtggctcttcaccttcgccggcggcacgcgccccgggcacgcgcttctgcctgcagccgccgggcgacactacaagtggcacctccccgacgtgcacgaaacctactcggtgttcatcgccgaggaggacatccgcagcggcaacgtgagcgtagaggagacgctccggaggatcccgccggacgtcgcggagaagatgacggagacggtgatcagcctcgtgccgaggctgctctacgcggaccctaggtcgaagctggagacggtcaaggacgccgtggatttgacggtggaggcggtcatcgagagggtcaagaagctgaggaaggagatgcacggcgccggcgcgtcgtcgcgactctcaacggcattaggtgcaaacaccaatggaggtttccaatcgagttag

SEQ ID NO: 28580 - DNA, 567 bp, Oryza sativa
  unsure (1)..(567): unsure at all n locations
  Clone ID: PAT_MRT4530_33165C.1
ggcagatgttagtcaagttcttgatgacatacctgttgggattccttgtacatataatgcaaatagtgtgtcttcaccaccttccacttcagtatgttcccaaaatgaatctccagatcctctccctcagtctgttggtcattcaatgacagcaaatggcatgaacagtgagtcgttgcagtctccatcttccatgcaagacagtcctgaagataaaactatttcagtttcaaagagtgtatcttgtggcagcgaagtgataaagggagatacattgccatatgcaatgctgcggccaatagttgttccaatatcacgaagaccatcaagatctgaatttaaggggggtcatgatcacaggagcccatgtgtgccttcaaacaggagggatattcctcttgtacgaagacctccatcgccagtagtacttagtgttcctcgagtccctaggccgncgccttcttctcctgntggagagtcacgaaaacgaggatttcctattgttagatctggcagctcagcccaagacattggggatgagaagtttgttactggagacaaattttg

SEQ ID NO: 28581 - DNA, 568 bp, Oryza sativa
  Clone ID: PAT_MRT4530_33166C.1
tatatttaatttgttgccaaaaaccggaattctcacaaccaagataatttactcagactcccaagccctgactgatgaatgccgccattggaaattcatttggcacaaccgtgcccctccccgagtccaattctttctctggctcctcatcaaagaacgcctccctactaaggctcacaagaagcagattgttcaatccccgcgatgcgccctctgtgatgctgcggatgaaacaacgatgcatctgttatttggctgtcagtttgctcaacatttttgggggtccattgatgtcacccctgccgtcgcttcagtgcaagatatttcagccctccgccctccaagccgtctacctcagcagcatttccaaattttttacattctttgcttatggggtctgtggaatcatcgtcatgatgttgtattccgttctctctctgtttcttttccccgtgtagttaagaaatgtattgaagatgcttctctatgggccgagcgtattcgtagagacgataggccggttgtttatgcctggaagtctctcctatcctccgctgtaaggtctcac

SEQ ID NO: 28582 - DNA, 621 bp, Oryza sativa
  Clone ID: PAT_MRT4530_33167C.1
atggacgccggcgagccctccacctcggactcgctggtccttgccactgccaccaacgatcgagcatcttgtgtcggactcgttgagttgctctctgaaaaccctgctgcgcttgccaggtaccctgtgggcactgagtacgattgggaagatgaggtcacgcccgcgtccgacgtcggtgacgcggagggtgccgggtccgacttcgacctcgacttcgcgttcgcgccgccggtatcagcggccaagttggtgccggccgacgacatcttcgcgcacggccgcatcgtgcctgcgtacccggtgttcgaccgcaacttcctcgacctctcacctggcgatgtggcagagcctgcctccacggcagcgccctccaccgacacctactgcgcgtggacgccgcgctcggcgccgagctcgcccagcctcgacatcgcagcgagatcaacgagggggaattgcaactccgagacgacggcgaagggtgttcctgctgcatctacagtggtggagagagaggggaaggggaaagagaagagaggggaggaaggtggggcccatgtgcggttggggctaattgggatttttgacggaaaatgtgatggagtggcatggttctaa

SEQ ID NO: 28583 - DNA, 408 bp, Oryza sativa
  Clone ID: PAT_MRT4530_33168C.1
agataaaaaagggtgtgggacattatgcatcataacgcaagaatgaataatgtgtgcaaaaacaagaacacatgcgtgacatttggcataaaagactatgcacatgttaatgagcatgacgcacgaatcttgaaggatataaacagcgtcgtattctgcgagaatgtagcgaaggaccctgtatcaacctaaagatctaggtgtgatgatatttgatacaactgtggatgaacctgaaggggactgcatgatctggataccagcagattgctatgtgggggcaatggtcaccatgggaagaggcatgcgctggcactgtcggggagctcttcaccaggagcagacaaccttcgggtgatccttcttatggctgagatatgctacgatagtaccggcacagtatagttc

SEQ ID NO: 28584 - DNA, 2348 bp, Oryza sativa
  Clone ID: PAT_MRT4530_33169C.1
gcaatagaccattaaacggacagaatgctgtactgatctcaaatgagcgcaacgaatctcaggttcacatttgctgggacacaagagaatgcctgacagccaaaaactaagcaacagaattgcagtttcgcatgctttaatttaacatgaaacgaacttggcaccaatcaccagcaaagctactcctaaactctaaactaaccaccaatgtgttgccaacatcattgctctgctgtatactgcattctccaggagccagcaccatgcagctcatatggcctggaatcaagtcatatctgactagctcgaccttttggccggtggtagagttacccttcagatgatggcatgttgggatcagctgcagggcctcctccctgacctgagctcaagatggcgttggcccagttcgacgatctgtgaacaattctcgacgggatgcgatcgctgtcctcgcctcctgatgcttcatacccatcgcttgtcgatctcgaaaacttgataccactctgagctggatgcgggatcgctccctgcatctcatcagctgtgcacgaggaaaggcggaacgggtgaagatcaggcgagtcgaagctgctttctggggatgaggcggcatttcttgtggatgccgcagcactcggttggaatgcgctcctcgcttcgaactgcaatggggctagattcccagatgtttctattgctgtgtcactgacgttgctttcagtaccacttgcagatagtcttgtaagggggtcgagggaaagttcggctgggaatcgtccccttttatcaggtcttctgttgttgtcagccttgggaactagtttaccaccaatgtttatgtcatggccgattggaacatcgtgtcttgcaattggcttcagaattttggatttcttctttgcctgtgcagctgcccttgacacttcctctgcattaaggcgtgccagtgtccaaggactgatttttactgtcccagttcttcgccttgctccttcatcttcctttgttttcttactcccagagttctgcagcatgccaatctctggagggatgacatcaaactgatcttcaaggaacaatcgtggtggagtgcaccatgaaccacgatgaagtggaccaaaagaacttgcagtgctaaatccagtaacagagctaataatagacatctgcggactttggtgcccagcagtctcttcttgttgatcctcctcttgctctcttaaagctatgatgtaatcatacgtactaattcccacaacaattataaacactacagttgagaagctacttcctaacttggagacaatctgtctggagaactcccctcgatccacaatgcagagaatcagcacaagggctcctgacagccaaaggagtacagcagaagtcattagaaggaagaaacctttgtagttccttttccctatgcaattgttgagccaattgttaagaggactgagggtataaccgttaggaaagacaaaagaagtgtatcgtactctgcaatggtgatcaaagccatcaacacacttgtcacatactctgcaatgcttactgttcttcaggacctctgcttcacacaagctgcagaagaacattccttcttcactcatgtgctgttcagatgactgattatccgcatggaagcatcttttgcaaaggcaggaaaaggggaaacaaagtatttcagaaaatgtgggccaggaatgtgaatcattttgctcaagcatgctgctcaatttctcgctgttatctacagcattaaaaccatcacttgacatctttcctccttgacttaacccatgatctgaatttttctgggatcgccttccatccttcaattttggatgctctgccgacttgaaaatgccagggtcaccaggatttgtagcagcacaccaaatgtataacacgacaacagatgtaatcaggggagtgtagagaaccatagctacatactggaacgccttcctccccacgaacggcacgaagaagacgtagaaggcaaatcccaatgccaagaacaccgctatcgccaccacctggagaggatggtaaggcagctgccacccatgcttcctcatttctggacggattaagcctcactctcacagacagacagacagcaacgccgcctaaacgagggctaccaagaggatgatgccgcaagaaccatgcttttttttttctctttttctttactcaagcaagtggctactaccactacaagaacaaagaaccccagcgacgaggagagaccaagaggtcctccaaaaaccaaaccttttctctttctttcccactttttctctctctttttggctggaagaattggagtttct

SEQ ID NO: 28585 - DNA, 1098 bp, Oryza sativa
  Clone ID: PAT_MRT4530_3316C.1
cccacgcgtccgcccacgcgtccgcccacgcgtccgcccacgcgtccgcccacgcgtccgctccaaactcaaacactcacaccaatggctctccaagttcaggccgcactcctgccctctgctctctctgtccccaagaagggtaacttgagcgcggtggtgaaggagccggggttccttagcgtgagccagaaggccaagaagccgtcgctggtggtgagggcggtggcgacgccggcggcgccggtggcgagccccggcgcgggcacgtcgaaggcggacgggaagaagacgctgcggcagggggtggtggtgatcaccggcgcgtcgtcggggctcgggctcgcggcggcgaaggcgctggcggagacggggaagtggcacgtggtgatggcgtgccgcgacttcctgaaggcggcgacggcggcgaaggcggcggggatggcggcggggagctacaccgtcatgcacctggacctcgcctccctcgacagcgtccgccagttcgtggacaacttccggcgctccggcatgccgctcgacgcgctggtgtgcaacgccgccatctaccggccgacggcgcggcagccgacgttcaccgccgacgggtacgagatgagcgtcggggtgaaccacctgggccacttcctcctcgcccgcctcatgctcgacgacctcaagaaatccgactacccgtcgcggcggctcatcatcctcggctccatcaccggcaacaccaacaccctcgccggcaacgagttccaccggagattccacgaggagaccgggatcacgttcgcgtcgctgtacccggggtgcatcgcgacgacgggcttgttccgcgagcacatcccgctgttccggctgctgttcccgccgttccagcggttcgtgacgaaggggttcgtgtcggaggcggagtccgggaagcggctggcgcaggtggtgggcgacccgagcctgaccaagtccggcgtgtactggagctggaacaaggactcggcgtcgttcgagaaccagctctcgcaggaggccagcgacccggagaaggccaggaagctctgggacctcagcgagaagctcgtcggcctcgtctga

SEQ ID NO: 28586 - DNA, 694 bp, Oryza sativa
  Clone ID: PAT_MRT4530_33170C.1
acgcggccatggattacaccttctaatccacaccaccaccaaaccatgcaagaatcgtagcgtaagcgggagtgagcagcgagttcatcactagcccaacctgaaaaaagaaaaatcgaaaactacacagatcctgaagtcctcttgatcttgatttctctcttgattaatcacttgggatctgcgtagttttcgcttaggaaaaaaaaagaaggggattagaggcgttgctctactgttaattgttgttactgcgactgaatatggtcatggtaattttggtttttagcttggattaatcaaatcactagtaacaaggtttactaattaagtagatctccacacgtttgcaagatgcagcgagtgtgagacgagaataacgtgagtatgtcatatactgctgtatcactaactctagtcagtagataatttaatcagtgggctttgtcaaatttttaattttcctttttaggtgtttgtcaaatactcaaaaggtgggagtacatatatatctgtttgtctaaaaatttgtagtaaaaagaagaggttaatgtaataatttgcctgtgaataaaatactcaaatgtggagtataaataccctgccaggaattggcatcggaaaaaaaaaaaaaaaaaaaaaaactcgagactagttctctctctctctctctcgtgccgattcctgcagcccg

SEQ ID NO: 28587 - DNA, 177 bp, Oryza sativa
  Clone ID: PAT_MRT4530_33171C.1
ttttattttttatattttttgattatccattttcgacaacggggggcatttttaaactagcctgatgaccccaaaaacccatttcatttcaacactcataaatttaacatccaacttatcacaattgaattaaccaacgtctacccaaacaaaaccatactttctaaccaaaatcaa

SEQ ID NO: 28588 - DNA, 594 bp, Oryza sativa
  Clone ID: PAT_MRT4530_33172C.1
atggacgagtgggaagaactggcgcggagattgccggtggcgctcatgcgcgtcagctctgggatggaagacgtcaagctgatcgaagtcgccctcgcgaagttccagaagcgctctgctatgatgggcagaatccttgacgggacaccggcggccattgccgagcaagagctcgatgatcctgcaccggtaggagaacgccccaccgtgagccttgagaaagcgtaccgcgagatctcgtacagcgccgctcgccacgccatggcccgcggcgtcttcttcctctgcgccgtccaccaccgcacgcaagacgagccgccattcctgcactgggacgcgcggcatcaggtcgccatcggacacttcgagcgggcgatgcaaagtattacggatgccatggggcattacgcggctgccaaggacgtcgtcatcgtcaacgagaccttccttccgcaggaggacgtgtggcgacggtgggcatcggcggccaagctcctcgtcgaccgcgccgcctccctcaccaccctggctctggacgaggcgcgccagcaaagccacaagctaaaccagatcgtgttccagcgctctaattag

SEQ ID NO: 28589 - DNA, 228 bp, Oryza sativa
  Clone ID: PAT_MRT4530_33173C.1
atgccggctaggttgctgctgctgctgctcctcacgccattaatggaggcacgcagcttcgcgctgatgcggctgccgctgccgacgccggcgcacgcgcttcacgcccaatcacggtgtcaactaacaggatttggggacatgagagaaaaggagaaatgtttgctttcagattctaacttaacacgtgttgcgcaagaggctaatgctgtggtcgagaggagataa

SEQ ID NO: 28590 - DNA, 1626 bp, Oryza sativa
  Clone ID: PAT_MRT4530_33174C.1
atggttgacattaagcaaactgaggttgaccctgagaatatcatcccaataacaatggatcaacttacaccagaacaaaaggcagagtatgagcagatgatgaacaacttgcagaatcagtttttacattcatttgtgcaaactcatttaggtacggttatccaaaggtataaattgaaagtgccatccaatgatgacttagaatcaagtaccaccaaagatggcaagcccaaacatgacaaacccaaggatgaaaaaccggaagaagaagagcctcaagagttcaagaacttgcaggatcagattgattatgttgtttatcatgcatttatcaaccagtcaggggtgcttgtcaacactttaactaacatgattaagtctgtgattgatggttcaattgccaaacatcaagctaagagtccgacttttcttcctgatggcgtgtttcctccatataggaatctagtgaccggcaaacaacaacccgtttctggtatagcaccggagcagccgatggcatcaacttcggcttttgggaaacagtgcgcatcaacgtcagcacaaggacagctagggtttaatcctcatgtactggggaagcaatcagttgttgacccgattcagcaaataccaattgggcagcaaacacctattgtacagcaacatcagcctattggtgctcagtttattcctgatcagcaagttcataatgtgcatcaatctcctcaacattatgctggtggtaatatgaactttcagtatcagccttattcaccccagatacagtatcagccagggggatcacctcagccccacatcttgcctcggtataatcagcttgaccacattcaacaacagatgcaaggaatgcctcaacagaagccttgggctgatatgattgcagatgtgatgagggagcaatttggtcttaaaccaaagaatattgggaacttgtatcaaccccgatatccagaatattttgagggggttccattgccgaatcggtacaaggttccagatttttcaaagttctcagagcaaaataatgtgtcgacttatgagcatgtcagccgatttttggcccagtgtggtgaggcatcggctattgatgctttgagagttagattattccctttgtgtttatctggatcggcattcacatggttttcttcattgcctgatagttctgttcaaagttgggccgatatggaaaaacaatttcataaatatttctacagtggaaatcatgagatgaaactttctgatctggcagcaattagacagaggcatgatggatctgttcgagattatattcagaggtttagggacatgaggaatagatgttatagcttggctttgacagattctcagttagccgatcttgctttccaaggtttggcaaccccaattaaggagagattctctgctcaagattttgagagtttggcccacttggctcaaaaggtaacactacatgaacaaagatttgcagaagccaaaaagaacttcaagaaggttaatcatgtatatctgttgatgcgaaaaacacacactgccctgggagatctgcttagctccagtgcaggtctaaatcttggtgagatgcaggcgtgccaattagattga

SEQ ID NO: 28591 - DNA, 1521 bp, Oryza sativa
  Clone ID: PAT_MRT4530_33175C.1
ccgggctgcaggaatcggcacgaggcctcgtgccgaattcggcacgagggccacatcctctgccttccgctcgtcatctatctcttctcttcttctcactactgaatctacttcttcctcctcctcacacctgcacacacttgcacacttgcacccaccctctctcctccatccagcaccgaccatggccgccgtcacggctgcggccgtctccacctccgccgctgctgcagtcaccaaggcatcgccgtcccccgcccactgcttcctgccatgcccgccaagaaccagagccgcccaccagcgcggcctgctgctgcgcgcgcaggtgtccaccaccgacgccgccgccgtcgccgccgcgccggccaagaaggagaagatatccaagaagcatgacgagggcgtcgtcaccaacaagtacaggcccaaggagccctacgtcggcaagtgcctcctcaacaccaagatcaccgccgacgacgcgcccggcgagacatggcacatggtcttcagcaccgagggtgagatcccctacagagaggggcagtccatcggcgtcatcgccgacggcgtcgacaagaacggcaagccgcacaagctcaggctctactccatcgccagcagcgctctcggcgacttcggcgactccaagaccgtttcactctgcgtcaagaggctcgtttacaccaacgaccagggagagattgtcaaaggagtctgctccaacttcctctgtgacttgaagcctggttctgatgtcaagataaccggaccagtaggcaaagaaatgctcatgcccaaagatcccaatgctaatattataatgcttgcgaccggtactggtattgccccgttccgctcattcttgtggaaaatgttttttgagaagtatgatgactacaagttcaatggtctggcttggctcttcttgggagtcccaactagcagttctttactctacaaggaggagtttgacaaaatgaaggcgaaagcgccagagaacttccgggtcgattatgctgtgagcagggagcagaccaatgctcaaggagagaagatgtacattcagaccaggatggcagagtacaaggaagagctgtgggagctcctgaagaaggaccacacctatgtgtacatgtgtggactgaaaggcatggagaagggtattgatgacattatggtgtcattggctgcaaaagatggaatcgactgggctgattacaagaagcaactgaagaagggcgagcaatggaacgtggaagtctactaattcttccaattttcctcacatctgtttcttttttttcttccatttgtatctgtgtgcacatctgtgcctgtgatcactctataatgttagataggcgtatatatatactgtttgtcatgttggttaaattcaagcttcatataagaattactacttatgtctgatccaaatactactatggtcaagtcaagagtaataataataataatgcaatgcagttcactcaaaaaaaaaaaaaaaaaaaaaaa

SEQ ID NO: 28592 - DNA, 401 bp, Oryza sativa
  Clone ID: PAT_MRT4530_33176C.1
gctgcaggaattcggcacgaggggtggccaaaagttcttgctctaccattttcagctgtcccaactagattaactcagtggattagttgtgtgagttgtgtttactttagtcatgcaatctgttgaacttcattgtatgcttttaagcaacgtggcatgtgtgcctatccttctaagctttgcatttcgatgtttaagggaaaattcatcattaccttctatattttgagtatcttctggactatatttgcatgcctcagaacaagatagaaagtgaattgattggaacttctcatagtattatgttctgtctctgtagtcagtcgaagtatttgctgttctgtttagtgcaatcatgacccattcttcaatcccctaatctgattgttttcaccattttt

SEQ ID NO: 28593 - DNA, 680 bp, Oryza sativa
  Clone ID: PAT_MRT4530_33177C.1
cctccatccagcaccgaccatggccgccgtcacggctgcggccgtctccacctccgccgctgctgcagtcaccaaggcatcgccgtcccccgcccactgcttcctgccatgcccgccaagaaccagagccgcccaccagcgcggcctgctgctgcgcgcgcaggtgtccaccaccgacgacgacggcggcggacgcggacacagacgaaggcagcagcgtcggtcacggcgaacgcagacgagggcggcaagccggcaacacctctctcctccatccagcaccgaccatggccgccgtcacggctgcggccgtccccacctccgccgctgctgcagtcaccaaggcatcgccgtcgccgccgcgccggccaagaaggagaagatatccaagaagcatgacgagggcgtcgtcaccaacaagtacaggcccaaggagccctacgtcggcaagtgcctcctcaacaccaagatcaccgccgacgacgcgcccggcgagacatggcacatggtcttcagcaccgagggtgagatcccctacagagaggggcagtccatcggcgtcatcgccgacggcgtcgacaagaacggcaagccgcacaagctcaggctctactccatcgacagcagcgctctcggcgacttcggcgactccagaccgtttgctctgcgtaagaggctcg

SEQ ID NO: 28594 - DNA, 458 bp, Oryza sativa
  unsure (1)..(458): unsure at all n locations
  Clone ID: PAT_MRT4530_33178C.1
ggccgctttttttttttttttttcggatcagacataagtagtaattcttatacgaagcttgaatttaaccaacatgancaaacagtatatatatacgcctatctaacattatagagtgatcacaggcacagatgtgcacacagatacaaatggaagaaaaaaaagaaacagatgtgaggaaaattggaagaattagtagacttccacgttccattgctcgcccttcttcagttgcttcttgtaatcagcccagtcgattccatcttttgcagccaatgacaccataatgtcatcaatacccttctccatgcctttcagtccacacatgtacacataggtgtggtccttcttcaggagctcccacagctcttccttgtactctgccatcctggtctgaatgtacatcttctctccttgagcattggtctgctccctgctcacagcataatcgacccgga

SEQ ID NO: 28595 - DNA, 2424 bp, Oryza sativa
  Clone ID: PAT_MRT4530_33179C.1
atggccactcttcgatttcttggtcttactggaaacttgctttctggaagaataccagtatccctagcaaatatttcatctctaagttccatactgctaggacaaaacaatttatcaggaccaattccagaatccttgagtcaaatcgcaaacctgaataagctagatctgagtggaaacagattatcagggtttgtcccagtcacactgtacaataagtcgtcgcttgaattttttggtataggaaacaacagtcttattggaaagatacctcctgacattggtcacacacttccaaatctcaaatcgttggtcatgtctctgaataggtttgatggatcaattccaacttccctggccaatgcatcaaacctacaaatgcttgatctctctagcaatttgctaagtgggcttgtaccagcattaggatccttgataaacttgaataaacttttcctaggaaataacaggctagaagctgaagactggtcattctttactgctctgacaaattgtacacaactgttacaattgtcgatggaagggaataacctgaatggtagcctgccgaaatcagttggcaacctttcaacgaattttgagtggtttaaatttgggggcaaccaaatttccggaagaattccagatgagttagggaacctcgttaatctaactttactcgacattaactcgaacatgctgtcaggagaaattcccttgactattgggaacttgaggaaattgtttatactgaatctatccatgaataaattgtctggacaaatcccatctacaattggtaatctttctcaacttggcaagctttatctcgataataataatttatctggtaaaataccagcaagaatagggcagtgcaaaatgctaaatatgctaaacttatcagtgaacagcctagatggatccataccagatgaacttgtcagtatgtcttctctttccttgggtttggatctgtccaacaacaaactttcaggctcaataccacaagaagttggtactctgagcaatcttgccctcctaaatttttccaacaaccagttgtcaggccaaattccttcttcactcggccagtgtgttgttcttttgtccctaaacatggaaggcaacaatctcattgggaatataccaccggcattaacttcactgcatgccattcaacgaattgatctctctgagaacaacttatccagtgaagttcctgtgttcttcgagaactttatcagcctagcccacctaaatttatcatacaactattttgaagggccaattcccatcagtggtatctttcaaagaccaaattctgtaagcctggaaggaaataaagggttatgtgcgaatattcacatattgaacttgccgatatgccccagctcaccagctaaaacgaagaacaataaacgactgctactgaaagttattccctccattactattgctttattctcagctctatgcttaattttcgctcttgtcactctatggaagagaaggatgatttcgttctcatggttcaattatgggcatagacagtgcactgatgtgctcagacaattcagtggcatgctcaacatgctttgttcgtccaatccaaagagaagggaagtgccaacaactccaatcaacaatgagacgctgaagaaggtctcatatggtgacattcttaaagctactaattggttttcttcagtccatacaataagttcaacccatactggatcagtttatgttggtaggtttaagtctgacaaaagcctagttgctatcaaagtattcaacttgaatcagcctggtgcatatgagagttactttattgagtgtgaagtgctaagaagcacccgccataggaatctaatgagacctttgaccctatgttcaacattggacaaagaaaaccatgaattcaaagcgctaatcttcaagttcatggttaatggtagccttgaaagatggttgtactctgagcagcattatggaatcaaagatagagtgctatgcttaggtcagagaatatgcatagcaactgaggtggcttctgctctggattatatccacaaccatctaacaccccctttggtccattgtgatgtgaagccgagcaatatcctcttagacgatgacatgaccgcgcgtctaggtgattttgggtcagcaaagtttctatttccagatctggtcagtctggaaagcttagctgatataggaggaactattgggtacattgcaccagagtatggaatgggctgtcaaatctcaacaggaggcgatgtgtatagttttggagtgctgcttctggagatgcttacaggaaagcagccaactgatgataccatttgcggatggcagttagcattcataactttattgactccatgttcccagatagagttgcagagattctag

SEQ ID NO: 28596 - DNA, 755 bp, Oryza sativa
  unsure (1)..(755): unsure at all n locations
  Clone ID: PAT_MRT4530_3317C.1
tgcttagcctgctgcactcctcaccggctgctgattgttgctgtgagtcatgttggcctccacttgcttctccgccccgccgccctcctcctcctccccgtcaatcccgacccacctcgccactctctgctgctgcttcaggcctcccgctcgcccaccttggcctcgctctcttcttcttcttggtgccttcccaccgccgacccgccccctcccccgcgcctccgtctcgtcatcgaccgccccagcgaaagattacgagtttactgatggtggcggagaggtggagctgaggctggacataggaaagctcggcattgagaattcaagagatgtatttgttgacgtcgatgatacgtctctgttggtcagagccaagtcggatgggacactgcggactttgatcaatgttaaacaactctttgataggattaagtcttctgagactatatggttcattgatgaggatcaattggtagtgaatctaaagaaagttgagcaagagctgaaatggcccgacattgatgaatcttgggaatcccttacttctggaatcactcagcttttgacagggattagtgttcatattgttggtgattccacagatataaacgaggcagttgctaaagaaatagctgagggaattggttaccttccagtctgcacaagtgagctgctagaaagtgccaccgaaaagtctattgacaaatggttngcttcggaaggagtggntcggtagcagaagctgaatgtnt

SEQ ID NO: 28597 - DNA, 1324 bp, Oryza sativa
  Clone ID: PAT_MRT4530_33180C.1
gacgagggtcgcgtgtgcgcgcgatatctcttccaacttccaaaggcgcacgccgcgccacgtgcgagccactcgctccgcccaccaccaccacccgccgccgccgccgcaaggctcgccggcgatcatgctctccctcctcctcccgcccgcgcggccgcgcgccgccgtctcccccgacgcgcgtgtcgtagtggcgcaggggctcgggaacaacacggcggactacgcgcggctcgcggcggcgctgcgggacgaccacggggtgccggccgtcgccgtcgcgcgggtgtcgaggcccgactggctccgcaacgccgccggcctcgtcgaccccagctactggcgatgcaacctccgcccgcgccccgtgcttgactggtacctgaaaagagtcgatgaagctgtatctgaggcgagagaactatctcctaatgaaggcatatcattgatagggcattcagctgggggctggctggcgcgtgtgtacatggaagaatttgatgcttcagacataagtttactgctcacacttggcactcctcacttaccacctccaaaaggtactcctggggtaattgaccaaactagaggactactgacctatgttgagaagaattgtgccccagcagtttacactccagaactaaaatatgtgtgcattgctggaaggtacattcaaggtgctcctttaactgggcacaccatcgctactacagatgatattctcgctgtggatactccatcagatatagctgaagcagtcatggtcagtaccaacgacaaatctactcaatcaggcccaaccttgagagcccgcttcattggacaaggctacaagcaggtctgtggccgtgctgatgtgtggggagacggcgtcgttcccgaggtgtcggcgcatctagaaggcgcactgaacataagcttcgacggcgtgtaccactctcctgtaggttctgacgatgagcagaggccgtggtatggttcaccggcaatcctcaagcagtgggtacatcatctcctcagttgaacggttgatggctttgatgcagagaagctgacgatctgaaagtttgtagacagaaatgtattgcatgccgccaggtgagggttaggccaggggaaaactacacatttttcagtgaattagagggtagccaatgccattctatacacaacagtacaacacacatgcgatttttcttctcccaaagaatttgtaacagtataaatattgctcaatgtgcagaggtaattcatcacatacatgattgcaggttgtaatagctacacatacagtatgatctataacaaacttcattcc

SEQ ID NO: 28598 - DNA, 382 bp, Oryza sativa
  Clone ID: PAT_MRT4530_33181C.1
tttggttttttttttttttttgtttttttttttttttttttttttttttttttttttttttttttttttttttttttttttaaagggggcaaaaaaccctccaaaacattgaacagggaacatttttccaaaaggggggggccccccctaaaaaaaagggaaaaattcccatttccgggctggccaaaggggccgggctttcgcaaaagggacccccccaaaaaatgcaaaaaaatttttaggcccaaaagggtaaaaaaggggcccaaaacaaaaaagaatccgggttttattgggcatttgacctgggcgtaatggcaaacaaaataagggcccccaaccgggaaattgggaacaatttgggcccaaaaaaggggggggg

SEQ ID NO: 28599 - DNA, 4255 bp, Oryza sativa
  Clone ID: PAT_MRT4530_33182C.1
aacagcgtcggcaatcctttctctggtcaagccgttcctgagaagttgaccaggacgaacttccttctatggaagggacaaatcctccctgtgattcgcggcgcgcgtatggaagggtatctcacaggcgcaacacaagctacgccggctgtgattgacgccaaagatggagaagctactgtcaaggctgcaaatccggcgtttgaaacctggattgtggcagactagcaggtgttggggttcctcctctccaccctatccaaggaaatcctcacacaggttattcacttggaaactgcagctcaagtatggaaggccatcaccgagatgttgtcttcccattcacgcgcgcggtccctgaacacgcgcttggcgctggcgacgacccagaagggcgatctcagcgtctcagactacatcagcaagatgaaggtcctcgctgacgagatgacatccgccggcaagccactcgatgatgaggagttgatgtcctacatccttgccggtctcgacgacgattgggaaccggttgtctcctctcttattgggagaccggatgtcgtctccttccacgagctttactctcaactccgcagcttcgagtcaaggtaaaagctgcggcatacggcggcgcaccagtcctccgtcaatagcgccaagcgcagtggaaggggcggcttcatccccttcaatcgcggcgggcgtagcggtggcaatggagggcgcggcggcaacaataatggagggcgtggtggtggtcgtggcaaaccacgtccaatctgccagctctgtggaaaaacagggcacgttgtcgccgattgttggtataggtacgatgagaattttgttcctgaaaataaaatggctgctgcagcttcatatggcgtggatacaaattggtatgtggataccggagctacggatcacattactggagagttagacaagttaacaactcgggagaagtataacgggaaggaccaaatatacatggcaagtggtgcaggtatggacattaaacatattggccattccattattcatacccctacgcgcaatttatatcttaagaatgttttgcatgtccctaaggccaagaaaaatcttctttctgcacatcgtttagcccttgataatcatgcttttgttgaagttcactcgcgcttctttgccatcaaggatcaggtcacgaggaatcttcttcttagagggccttgccgcaacggtctctatcccaatccaccatcgtcgtcatcttcgtccaagcaagtttttggagtcatcaaacccactatttctaggtggcatagtcatttgggtcatccatctttgtctatcattcaaaaggttgtgaacaataataatctcccatgtttaggagatcttaatgagttaggtgtgtgtgatgcttgtcaaaagggaaagagtcatcaacttccctatcctaagtccttcagtgtgtctaataatcctttagagcttgtgtttctgtgatgtatggggtcctgctcccgactctggtggtggcaaaacatattatgtcagtttcatagatgattttagtaaatttacttggatttatttgcttaagaaaaaatctgaggttcttcagaaatttcatgactttcaacaacttgttgagagactttttaatcgcaagataatcactatgcaatctgactgggggggagaatatgaaaaattgcattccttttttaccaaaattggaatcactcatcatgtttcatgtccccatgctcaccaacaaaatggttccgctgaacgcaaacatagacacattatggaagttggcctctctttacttgctcatgcttctatgcctcttaaattttgggatgaggcttttcttgcagccacatatctcattaatcgcacacctagcaaagttatacaatactctacgcctctagagcgcctcttgaatcaaaaaccaaattattcctccttgagaacttttggatgtgcttgttggcctaatcttagaccctacaatactcgtaaacttcagtttcgctcaaagcaatgtgtttttcttggctatagcaacattcataaaggattcaagtgtcttgacattgcaaccggccgagtttatatctctagagatgttgtctttgatgaaaatatttttcccttctcaaaacttcactctaatgctggagctagactaaaatcagaaatcctactcttgccccccacactgttgaatcctgaaattgctagtgggggtatgcaaggcaatggtcatatgtctaatgatccttctaatattcctgttgagtttgtatctgcacaggaggaagcagaagacggaacaggaaacaatggtggtggcgacacaggttctgatgatggcagcacagaacctggtggcaatgatttttctcctggtcattctgatgttgaaattgatgcagccagtgctagcgctgattctgcagatgcaggcgcaggtggtgcaggtcctgacataggtgctgttgttcctggaacagccaataccacggcagcaagcagcagtaccacggcaggcgacactagcacatccgcaggcagtagcagggcagctggttcaggtgatgtgacaaataatcaatctgactctacgcaggttcagcatcagcagactagacccacgactcggctgcagaggggaatacggaaggagagagtctatacagatggtacataaggtacaattttttagcctcttctagtggtgaaccacaaagtttaagtgaagctttagctgatccaaattggaagcaagccatggatactgaatttacagccttgattaataataaaacctggcatttagttccaccgcataatgataggaatattattgattgcaagtgggtatataaaattaaaaggaaagctgatagtagcctggatagatataaggctcggttggtagcaaaaggctttaaacaacggtatggtattgactatgaagattcttttagtccagtggttaaggctgctactattagagctgttttatcagttgctgtatctaggggttggtctcttcaacaacttgatgtacagaatgcttttcttcatggtttgcttgaaagaggaggtttacataagacaaccacctggatatgaagacaagagtaagtctgattatgtttgtaaattagacaaggctttatatgaattgaaacaggcaccacaagcatggtattccaggttaagcagtaagttgtgtgaccttggtttcaaggcatcaaaggctgacacttcattattcttttatagtaaaggaggtgttactatttttgtatttatttatgtggatgacataattgtagctagttcaactcaaagtgcagcggaagcattgttaaaggacttgaagcaagattttgctttgaaggatataggtgatttgcattactttctgggaatagaggttaacaaggtatgtgatggcattctgttaactcaagaaaagtatgcgtctgacttgttaaaaagggctggtatgtcaggatgcaagcctgttgctacacctatgtctaccacagaaaaattgtcagctcacagtggttctgtattaggagaacaagatgctactaaatatagaagtattgttggagctttgcggccagatatttcctttgtagtaaataaagtttgtcagttcttgcatggtcctactttacagcattggatggcagttaagaggatactgagatatattaagtcttctattgatcttggtttaaggattaacagatcttcttccactcttgttagtgctttttctgatgcagattgggccggatcagtagatgatagaagatccacaggaggctttgcagttttccttggttcaaatctggtgtcatggagtgccagaaaacaggctacagtatccaagtcaagtacagaggctgaatataaagcagttgcaaatgccacagcagaggtaatgtgggtgcaaactcttcttaaagagattggagttcaagttccttctatggctagattatggtgtgacaacttaggagctacatatttgtcagtcaatcatgtgtttcatgccagaacaaagcatatagaagttgattatcattttttaagagagagagttgctaggaagcaattagagataaaatttatagtatctggagatcaagtagcagatggttttactaaaccgattactgtacaacaacttagagattttagacgcaatcttaacttagataagtta

SEQ ID NO: 28600 - DNA, 642 bp, Oryza sativa
  unsure (1)..(642): unsure at all n locations
  Clone ID: PAT_MRT4530_33183C.1
ggaattgtaatacgantcactatagggngaattgggtnccgggnccccccncnanttttttttttttttttttttttttaatanaataaaccctttattacttaatattattggnaataagccacacacatnaattcagggtncganaananacttaagcacacccanaaaaattcaacatccaacttattaacctatataattgggtatagctncaaattcnctacaacaaacaaaccactggttcattcntctctcatccatatactgntatattaattaatcnctccatatgttnatttcanggntcntcnagggancagccacgttctccttggngancggngcgatctcgtcgccttcgattccccgngcgctgccggngaanncccaagcccaagaacacantctcccanttcttcncanggcccttcccaanaaaaggtcctggttcatgcanttccngaacatctccnncntaccccngngtnccganaaacttgantgggcnctcnnggtggcgccaccttcttcantttcttnggtccncaccttgcatcaaactnaaangccanttggaaacanttttctcaanangnttccnaaccccggggaancaaccgggttcttttctccngggtt

SEQ ID NO: 28601 - DNA, 354 bp, Oryza sativa
  Clone ID: PAT_MRT4530_33184C.1
gagagagaactagtctcgagtttttttttttttttttttgactcctcgaactattaaaaccgtttaaaatgactccctcgactgttttaagggtggttttcgctgatgtggcgtacatatggcagcctagtcattaaataaattaaaaaaagttaagctggcccgcatatcatcccctccctctaataacctctctctctctctcctcctttcttcttctcggcgctggcgacagtggcgctcggcggcaagggcgcggcggtgagggcccgatggcgagggcgttgcttgcggctgctgggcccgacgacgatggcgttggatcccaggcccgcctcctccatcgccgtcctc

SEQ ID NO: 28602 - DNA, 1797 bp, Oryza sativa
  Clone ID: PAT_MRT4530_33185C.1
atggcggctctcaccgttgggcacgcggcgatcgtccatgccaccacgcgtctcgaggacgcccggtccaccggccgtcggcggcggcggcgggggatgatcacggtgcgcgcggcggcggcggcgacgagcgggtgggagccgggcagctggagggcgcggccggcgaggcaaatcccggagtacccggacgcggcggcgctggagggcgcggagcgcgagctggcgtcgttcccgccgctggtgttcgccggggaggcgcggaagctggaggagcggctcggggacgccgccatggggcgggccttcctcctgcagggcggcgactgcgccgagagcttcaaagagttcgccgccaacaacatccgcgacacctttcgcctcatgctccagatggccgtcgtcctcacctttggcggccagatgcccaccatcaaggtcctcctcgcctactcccatggcttcatcttctcaccatttctccttctccaatccatccctaacgatctcgttggaaggatggctggccaatttgcaaagccaagatcaaacccaactgagactatagatggagtgacacttccttcctatcgaggtgatattattaacagcgatggttttgatgagaagtcgcgtgcaccagatcctgaaaggttaattagagcctacagccagtccgcgagcaccctgaatcttctgagaggatttgctcatggagggtatgcagatctgcagagagtcacccagtggaatcttgacttcttgagggacagcacgcaaggggacaggtatatggagctgtccgagagggttcacgatgccatcggatttatggttgctgctggtctgactcctcagcatcccatcatgacgacggctgaattctggacatctcatgagtgccttcatttgccatatgagcaagcattgactagggtggactccatttctgggctttactacgattgctctgctcatatgctttgggttggggagaggactcgacaactggatggtgctcatgttgaattccttcgtggtatttccaaccctctaggtgtaaaggtgagtgacaagctcgaaccttcagagcttgttaaattgtgtgagattttgaatcctcacaacaagcccggaagactgacaatcatcacaagaatgggtgctgagaacacgcgcgttaagctcccacatatgatcagagcagtccgccaagctgggttgattgtcacttgggtcagtgatcccatgcatgggatcaccatcagcgcaccatgtggtctcaagacaagatcattcgacgcgatcaggtgcgagctgagggctttcttcgatgtccatgagcaagagggaagctaccctggagggattcacctggagatgacagggcagaacgttacagagtgcattggtggatccaagacggtgacccttgatgatctcagctctcgctaccgcacgcactgcgaccccaggctgaatgcatcgcagtcgcttgaactggctttcgccattgctgacaggctaaggaagaaacgagacagggcttggaataggttggtgtacagggcggtagcttaagatatctagctcggaattttggccctacaagaagagatagtatctagcttggagtagttcattcttttttttttccctttgaataataaaaaaaatagagccggcgtggcgacgtcagtactctcttctgcttcatttcttcactagtagttaactttgtcgaagtttcttttcttcaataagacgacttgactatcaaaagaataattaggagct

SEQ ID NO: 28603 - DNA, 107 bp, Oryza sativa
  Clone ID: PAT_MRT4530_33186C.1
atttatgaaacttctacaataggactagaggaacaccttacatggagggattgacacttttcacagtaacaggagtctggagatcgaggcacgaacaaggacaggca

SEQ ID NO: 28604 - DNA, 180 bp, Oryza sativa
  Clone ID: PAT_MRT4530_33187C.1
atgctgcctgcagtgcagcgcacggtgcgtgcgtgctttggcatctcgaggagggagggggcgccgctgcctgccggcttggcatcgcaggtggaggcgcaggtgggggtgcagcgcctgcagatgccgcagatgccgtgcggtgcccgcacggagacgggggagacaggagacggctga

SEQ ID NO: 28605 - DNA, 342 bp, Oryza sativa
  Clone ID: PAT_MRT4530_33188C.1
aaccaaaaatttgaaacggtttattttgggacggaaaaatccatccaaaacatttaaaaaggcccttggtccaaaccaaaaacaaatatattaacaaaaagcaaaaaaggggtgggttttccagcgcacttaaaagggccaggttaacttcgtggctgggattcttccgggctcccagatttaaaacggaaagacaagggttatttcaccggggaaacgttatttaaaaccttataaaggcgaaaaaataagcgtgccattttgaagagcttcggttttggggcattttgggatttaggaaacaggggcttagcaataatgccccaaaattcctttgcaaac

SEQ ID NO: 28606 - DNA, 669 bp, Oryza sativa
  Clone ID: PAT_MRT4530_33189C.1
atggagatgctgattggtaatttggtgaagaagcgcgtgcggtggctcaagtacatgagaaaaagatatcttcgcagatatgccgcccaggcccgccggccgcgtctacgccgcctagcgcctcccgcgcgagcacgtgactctagggccacgcacgccaccgactttgccaccgtgctatcaatctcgttcccgtttggccgcagggggtcggacttgcctccccagatccgccgtggcctcttcctcaagccagaagcggcgccgtcggcgcctccgttgcccgatctggagtttctaattgggagagaaaaggcattctccagtgaggagacgctgaggctgtaccaacagccgctacagctcggcatcaagccactgttcctgagtgaccgtactgacgacgaccagagggagctcaccaccaacaaccttctccagcagggctactgcaatttgggaaagcttgtgctccaaccagaagggctagagacctcgacgctagcgttcaagacatgcgagcggcagaagctggtgaatgacggatacatcatcgtaggcaacatcgatgaccagtggaactatatttcgtcgctcatcgcggagggttgccggcttgccgcacctttaagttccctaacccatgtactacatcgactagctagctag

SEQ ID NO: 28607 - DNA, 260 bp, Oryza sativa
  Clone ID: PAT_MRT4530_3318C.1
cgaccacgcgtccgtggactcgtggtgtagtgtccaacacttcaattttctgcaactgttcctgatgaggtacctctaagtatgctacattgccatgtaatgagatcttgtatccgtgcacacagtattataaggatgccagggaacacaatcactggtgaagttattacatatagcttgaccaatggtcatactgtcacatatacaagattgaatattatctgaccatatgtgagaaaatgttgactacactgcgttat

SEQ ID NO: 28608 - DNA, 342 bp, Oryza sativa
  Clone ID: PAT_MRT4530_33190C.1
atggagcagaagcgcagaacaggaccggatgtcatggagcagaagcgtggaacaggaccggtcccgtggagcacaggagcgggaccacctcgcttccgcggccctgtcctgcgtggtggagagtggccgatgcaccatattgcctgccttggaaatacatttgaacgggcggacaacttaaccggcctacctgtgggccacctaagcacctgcatgcagagattggaggaggtcaagctagattggtggcgcaatcttgatggtctgctcaccgccgatagtgagctcgagcgcggcccgggcaacgctcaatgcagctccagtgcaaggtggtactggtga

SEQ ID NO: 28609 - DNA, 753 bp, Oryza sativa
  Clone ID: PAT_MRT4530_33191C.1
atggacaccatatctggcatgttccggccggtgttcgaccggatcaggccgtccattgcttccgccgccgagctcagcttcagccgcgtcgtcagcttcaccggctccttcaacagccggaccggcctgctggcggccggcgacggcgaggaggagacgacgcccgcgcagacggcggcgttcgacatcgaggcgccagcgacagcgacgacaccagatcaagctgtccgtgatgatgccgccgctgcccaggaaggggaggctgccggcgccgccgccgccgacgacgacgccgacgagccgaagcgcgtgtccaagatcgtccagacagtctgcctgttcgtcgcgtcggcgtcgctggccatgtccgtgaacctcccggcgagcggggccggcggcgcgctctacggcgcgacgctggcgttcgtctgcctcggcctgttcaccagcctcggcctgttcaccagcctcggcctgtccatgtacaccatcgtgtccaggcccggcgacgccgcggtggcgatggtgcagaagtgggcgatggtgctcgccatggcgtccgtgcccgcgtcgttcacgctgcgcctgtgcgccacgctccccgcggagacgctggagtcggcgtggctcatcttcttcctccttgccggcgccgccgcgctctacctcacgctggcgtggaagctggccggcggtgtacgggcccagcaccggagcgtcaacgaggagcgggtcgccggcgaccatgtctag

SEQ ID NO: 28610 - DNA, 115 bp, Oryza sativa
  Clone ID: PAT_MRT4530_33192C.1
cacggtgagcatagggcagctcatcaagttgatgtgccggagtgaggtgagcccctgcatggactccaagaagggtcgtaaggacaggcaagatattgatcataaggtcctctag

SEQ ID NO: 28611 - DNA, 464 bp, Oryza sativa
  Clone ID: PAT_MRT4530_33193C.1
gcagagggatttttcaggcgtatcggcgtcgggcagtgagaagcgtttcttccaccacacggaggagatgatcaacgcgcaccctgaattcctcgaccgcgcgacgccgtcgctggacgcgcgcctggagatcgccgccgcggccgtccctgagctcgccgcgacggccgcggcgagggccatcgcccagtggggccgccccgccaccgaggtcacccacctcgtcgtcaccaccaacgcgggcgcccacgccccgggcgccgacgtccgcctcgccgcgctcctcggcctccgccccaccgtgcgccgcaccatgatccacctcaacggctgctccgcgggcgccgccgcgctgcgcctcgccaaggacctcgccgagaacagccgcggcgcgcgcgtcctcgtcgcctgcgtcgagctcaccgtcctcaccttccgcgggccggacaggccccacaccgtca

SEQ ID NO: 28612 - DNA, 234 bp, Oryza sativa
  Clone ID: PAT_MRT4530_33194C.1
atggcgctgggacgaggcttgttgggccagccttggcccagactcacgacgcggctgacctgtatttctgggcggacggcccaccatccctctactctctttcttgccggaggaggagatgcgtgggaatgttttatccttcacgtgctcaagtccaaggacgaacatcagtacatcatggccgccgggttcatccggtccggcccgcgtgcacgtctggcgctggtgtactag

SEQ ID NO: 28613 - DNA, 798 bp, Oryza sativa
  Clone ID: PAT_MRT4530_33195C.1
gccaggggtctgtttttattgtgctcgtatagtttctctgcggatacatgcgaagagatgggcatgaagatggtgaaaggagtcaaggaatagaggattctcttatgtttgggccagacgatgataatggttcaaatattcctactcaagttgagacacttgttaggggtactgcgacggttgctactccagagtataagtcgattccagatctagattacctgcaggagttgctggctattcagcaacagggaccgcgggctataggtttttttggtacccgtaacatggggtttatgcatcaacagcttattgagatcctgagctatgctatggtcataacgaaaaatcatatattcacatctggtgcttctgggactaatgcagctgttatccggggtgctttaagggctgaaaagccagagttgctcactgtaattttacctcaaagtctaaagaagcaacctcctgaaagtcaagagcttttatctaaagtacaaaacttaattgagaagcctcaatatgaccatttgccactaattgaagcgagcaggttatgcaacatggacatcatctcgaaggtccaacacgtgatttgttttgcattccatgacagcaagctgctgatggagacctgccaggaggccaagaatctccggaagatcgtaaccctattctacttggattagctcctcaagggcttcgcccccatttttgtctgtaggctggttggtgatagaatatttggatcaattagctgtgttcaactctgaaactcagaaatgacccacccgaata

SEQ ID NO: 28614 - DNA, 1338 bp, Oryza sativa
  Clone ID: PAT_MRT4530_33196C.1
agcctcgtcaattcttgagggcgccgccaacaccaacaccaccaccatcgggtcctcctccccttgcggattggttgcctgaccctcctcctcctcctcctcctcgtgtagattgattggttcttggtggtggtggtggggggatcgggtggctttggctgagatggtggtggtgacggcggcggcgccgcctctcggcatagcgttggtggggccgacgcgggcgaggcgtggaggagggttgtcgctctcctcctcctcctgctgctacctgtccatgtgcggccgtggcgtcctgcgagggggatgcgcgaggatgagggagccgctgccgccggccccgattgggctggaccggtttctctgcggatacatgcgaagagatgggcatgaagatggtgaaaggagtcaaggaatagaggattctcttatgtttgggccagacgatgataatggttcaaatattcctactcaagttgagacacttgttaggggtactgcgacggttgctactccagagtataagtcgattccagatctagattacctgcagaatgatcttattcacttagtggtaatgcaggagttgctggctattcagcaacagggaccgcgggctataggtttttttggtacccgtaacatggggtttatgcatcaacagcttattgagatcctgagctatgctatggtcataacgaaaaatcatatattcacatctggtgcttctgggactaatgcagctgttatccggggtgctttaagggctgaaaagccagagttgctcactgtaattttacctcaaagtctaaagaagcaacctcctgaaagtcaagagcttttatctaaagtacaaaacttaattgagaagcctcaatatgaccatttgccactaattgaagcgagcaggttatgcaacatggacatcatctcgaaggtccaacaggtgatttgttttgcattccatgacagcaagctgctgatggagacctgccaggaggccaagaatctccggaagatcgtaaccctattctacttggattagctcctcaggggcttcgcccccatttttgtctgtaggctggttggtgatagaatatttggttcagttagctgtgttcactctgaaactcaggaatgacacagccgaataggtgcaaccttcaaatcggggaagatcctttcgaccattgttttgaattttgtataaaccaaataagcttgtcgatatgtctggttcatcattgaatggaataatttaaagttcttactatttctgaaaaaaaaaaaaaaaaaaaaaaaaaaaaaaaactcgagactagtctctctccctcgtgc

SEQ ID NO: 28615 - DNA, 221 bp, Oryza sativa
  Clone ID: PAT_MRT4530_33197C.1
atgtcgaaggaggaaatcggggagtccatggcagaaaacaaccaaagcggcccggccaccgtcatccaccggcaaggggcaaaagaaggggacacgcatcggcgagggcgccatcatagaggttgctgtacatcctcgaccatcctcttggtggccgctggtcattcgcaagacatcgtggggccgtcactggcttcaccgttgtcgtgccaactgcgctg

SEQ ID NO: 28616 - DNA, 4128 bp, Oryza sativa
  Clone ID: PAT_MRT4530_33198C.1
atggcaccagatcaatcctcctcctccacgcagccatccactgatgccgacgcactggcaaagcttcaggaatccatggcgacggtgttgagcggcatttcgcttttggcctccaaaagtgacctcgccgatctcagccgttctgtcgctgtcgcgacctccagcatcaccgccttggagcagtcttcctccacttcctctggtccacgtctgaccggcggtggcctccttaaatcaccaccaccaccacccccaccacctcccccaccacccccaccaccacctccgccgccacatgccagacacggcgcacatcacgatgccaactccggcaacgcagttcctcgcttttacaagctcgaatttcccaagttcgatggctccgacgatcctctcaattggcttaatcactgtgaacagttctttcgtgcacagcgttcgccggatggggatcgcgtttggttggccacataccatctcactggtgccgctcaggagtggtatttccactacgagcaacacaaagggccgcctgattgggacacgttcaaggagctatgctatgcccaatatggtccaccaatccgcaacaacccgttgggtgaactcaagcgcctctcacagtcgaccacggtggccacctaccagcagcgcttcctcgccttgtccagccgtgtgacggatctcctcaccgaacggcagcaagtccaactgttcacggtgggcctccgcgatgacatctgcatcgacgtggagctccatcagcctgaagatcttcaggaagccatggggttggcacgtgcgtatgaacgcaaagccaacttcagcccatcgcgcaccgtcagcaagcagttctttcgtcgtctgacaccggcggaactcgcggagcgccgcaaacaagggctctgctacaactgcgacgagaaattcgtccgcggccaccggtgcgcacggctcttctacatcgagtacgacgacacggcggatgatctcgacgacgactcggccgacaaagatgaggacactgagccacacatatcgctgaacgcaatcttgggtgttgatggcgccaacacaatgcgcttggcaacccgcctcgcgaacgaacaggtggtggccctcgtcgactccggctccacccacaacttcatccacgctgaccttgcgttccgcctcggcattccgctgtcgctggtccgcgatggtgtccgtgtggtagtggcaaacggagatcgcctcaccagccccggcattgcgcgtggcctgaacctgcgtgttgccgacgaggtattcgacgtcgactgctacgcgctccaccttggatgcgtcaacatcatcctggggacacagtggctacgcactcttggaccgatactgtgggacttcgtcaacatgcggatggcaatttggcgcggctgccgggaggtcatgctatacggcgtcctcgacgaacgcctcgcgtccacatgcgctgcgatccacgctgacgatctccttctgtccctattggcggaattcgacgacctcttcgcgcttccaaccggtttgccgccggcccgggccgtcgaccaccgtattcacctcaagactggtgtgtcccctgtcgcggttcggccgtaccgctatccccagctacagaaggacgagctggagaagcaatgtgctgagatgctggcccagggcatcattcgtcccagcacatccccgttctcgtcgctagtcctactcctccgcaagcatgacggttcttggcgcttctgcatggactaccgcgtgctcaacacggtcaccgccaaggacaaatttcccattccagtcgtcgacgagttacttgacgagctccacggcgcgcacttcttctccaagttggaccttcgttcggggtaccatcaagtccgcatgcacgccgatgacgtccacaagacggcgttccgcactcaccggggccacttcgagttcttggtcatgccattcggcctgatgaacgcacccgcgacgttccaggcactgatgaacactgtcctcgcgccgttcttacgaaggttcgtccttgtgtttttcgacgacattctaatttacagaaggacatgggccgaacaccttcagcacatccaagcagtgctcactgtcgtccgcgccaacaacctcgtcctcaagcgctcgaagtgccacttcggtgaacgccagatcagctacttgggtcacgtcgtctctgccgacggagtggccatggacgcgcagaaggtttgcacggtggccgactggccgcgtccgcgttctgttcgcgccgtacgcgggtttctcggcctcgccgggtactaccgcaaattcatccgcaactacggcacgatcgcggctcctctgacagccctcctcaagcgcgacgcattccagtggacgccggatgcagcccgcgccttcaccgagctcaagcaggccctatcgacggcgcccgtactgcaactgccggacttcgccctgccgttcatcgtcgaatgcgacgcgtcggggtctggcatcggcgccgttctgcaccagggggcggggtgcacgaatgttgtggccaacgccctgtcgcgtcgcacagaagacgccgaaatcgccgccctggcgctctccggcccaacattctcggcattcgacgaccttcggaatgaggtggctaccgacggcgacctcatcaagatcgccgccgacatcaccagcggcaagctgagcgcgccttgggcactccgtgatggcctcatcctccgggacaaccgcgtctacgtctcggcgtcttccccgacactgccggcattgctcgctcatgcccacactggccacgaaggagtcaaacacacactccaccgattccgggcggacttcttcacaccccatgccaagcaagctgtccaggagttcgtacgcacatgcgccacttaccagcggaacaagaccgaacacctgcacccggtgggcctactccagtcgcttccggtgctgacgcaggtctgggaagacatcgccatggattttatcgaaggtcttcctcgcgtccacggcaagacagtgatcttcaccgtcgtcgaccgcctctccaagtacgcccatttcattccgctcgggcacccctacatagcgacgactgtggcgcgtgccttcatcgacgaggtggtccgtctccacggcatcccaagctcaatcgtcagcgatcgcgacccgggcttcaccagctcattctggacggagctcttccacctggcgaatgtcaagctcaacttgagctcagccttccacccccagagcgacggccagtcggaggcagccaaccacgtcatcggcatgtatctatggtgcttgactggtgatcgtccccggcattggctacgttggctgccctgggcggaatattgcttcaacacggcattccagagttccctgcgttcgacgccgttccaggttgtctatggcaggccgcctccagcgctgcgggaatatgaccgaggctcggcacgcgtctgcgcagtcgaccaagccctcatcgagcgggatgactttttgggggaaatcagggagcgtctactccaagcacaagactactccaagctgtactacgacgacaagcatcgggaactcgcgttccaggttggcgactgggcgtgggtgcgccttcttcaccgtcaggctgcgtccctgcccaggttccgtcgtggcaagctggcaccaaaatattacgggtcgtaccaggttagcgaccgcataggcgatgtggcttatcgtctcaagctaccggccggcgcacggatccacgacgtcttccacgttggcctgctcaaggaattcaagggtacaccgccggaccaaccgcctgctctgcctgcattgtccaatggccgtgttttgccaatgctggcgaaagctattcgtgctcgtttggcacgcggtgtgcgccaggttctcatccagcgggaaggcaagccggctgcagacgcgacatgggaagacgagacagaattcaggcacatgtatcctgcgttccagctcgaggacgagctatttacgaaggaggggagagatgtcatggtcggcatcacgtatgagcgcagacggcgcgcggtgaagacggacgagcagcgtgtcagatga

SEQ ID NO: 28617 - DNA, 309 bp, Oryza sativa
  Clone ID: PAT_MRT4530_33199C.1
atgtcgatggttggacagaccgagatactgggccagtcggtctgggctggtccagaaggttggctagcccttttggacaaggccagacggaccaagctccagggccaaatcggtccagggatgtccaaaagctatgtccggtcccagggcatatatggccacatgggtgcctttataagtctttttttctcaaaattagatgacacgagagatgataattgttatctagctgttctgacagtgacaaacaaatgttgcttccttaaaaaggacttaatcaaggggacaatggtaggcagtggattttaa

SEQ ID NO: 28618 - DNA, 1489 bp, Oryza sativa
  Clone ID: PAT_MRT4530_3319C.1
aactagtggatccccgggctgtagtgaatccggcacgcggagcaaaaggacaccagaaacatagtacacttgagctcactccaaactcaaacactcacaccaatggctctccaagttgcaggccgcactcgctgccctctgctctctctgtccccaagaagggtaacttgagcgcggtggtgaaggagccggggttccttagcgtgagccagaaggccaagaagccgtcgctggtggtgagggcggtggcgacgccggcggcgccggtggcgagccccggcgcgggcacgtcgaaggcggacgggaagaagacgctgcggcagggggtggtggtgatcaccggcgcgtcgtcggggctcgggctcgcggcggcgaaggcgctggcggagacggggaagtggcacgtggtgatggcgtgccgcgacttcctgaaggcggcgacggcggcgaaggcggcggggatggcggcggggagctacaccgtcatgcacctggacctcgcctccctcgacagcgtccgccagttcgtggacaacttccggcgctccggcatgccgctcgacgcgctggtgtgcaacgccgccatctaccggccgacggcgcggcagccgacgttcaccgccgacgggtacgagatgagcgtcggggtgaaccacctgggccacttcctcctcgcccgcctcatgctcgacgacctcaagaaatccgactacccgtcgcggcggctcatcatcctcggctccatcaccggcaacaccaacaccctcgccggcaacgtccctcccaaggccgggctaggcgacctccgggggctcgccggcgggctccgcgggcagaacgggtcggcgatgatcgacggcgcggagagcttcgacggcgccaaggcgtacaaggacagcaagatctgtaacatgctgacgatgcaggagttccaccggagattccacgaggagaccgggatcacgttcgcgtcgctgtacccggggtgcatcgcgacgacgggcttgttccgcgagcacatcccgctgttccggctgctgttcccgccgttccagcggttcgtgacgaaggggttcgtgtcggaggcggagtccgggaagcggctggcgcaggtggtgggcgacccgagcctgaccaagtccggcgtgtactggagctggaacaaggactcggcgtcgttcgagaaccagctctcgcaggaggccagcgacccggagaaggccaggaagctctgggacctcagcgagaagctcgtcggcctcgtctgagtttattatttacccattcgtttcaactgttaatttcttcggggtttagggggtttcagctttcagtgagagaggcctgtcaagtgatgtacaattagtaatttttttttacccgacaaatcatgcaataaaaccacaggcttacattaaaaaaaaaaaaaaaaaaaaaaaaaaaaaaaaaaaaaactcatgcggccccccccgtcatagctcttaaatcg

SEQ ID NO: 28619 - DNA, 335 bp, Oryza sativa
  Clone ID: PAT_MRT4530_331C.1
gcaacatgttctcgtactggtgcgaacacacaatgctggttcgcaagactgacatgtaaaatgctatcatggtactgactcggatggtcacactagtatgatgatcatgccactgattgagtacacactagaatgttgctcttggagcgaaaataattgcgtgtaacatggagataatcgatcttggtgatagatacaacatggtggaacatcgacatgattgatatgacagtgacattatgtacatcttatggcataatctacatctcaagcaaacaagggatctctactttgattggaatatgaataaagctgaaactgtggtggatttcaac

SEQ ID NO: 28620 - DNA, 376 bp, Oryza sativa
  unsure (1)..(376): unsure at all n locations
  Clone ID: PAT_MRT4530_33200C.1
gggaacaacaaacacggataaacaaacccaacaaaaatcttataaatccatcaaggtccagccacagcaggaaataaaaggcaaagagcagggaagcccaaagaaataacccgcagtttaccgggcaagggaaccggtttttaaaaggggcgcacgcgcccttaacaaaaaactccgggaaaaaaataccaggcggacaacaccccacacagttcaaaagcaagcaggccctggaacgggagcagcagccccgggggccggggctagccttacacctgggnacattatttacgcctatccccccatagttggggtatagaaaggggggggtcaagagccccggaccttcacggggcttgtttctccctgggggggg

SEQ ID NO: 28621 - DNA, 3459 bp, Oryza sativa
  Clone ID: PAT_MRT4530_33201C.1
atggcaccagatcaatcctcctcctccacgcagccatcaccagatcaatcctcctccacgcagccatccactgatgccgacgcactggcaaagcttcaggaatccatggcgacgcgttcgccggatggggatcgcgtttggttggccacataccatctcactggtgccgctcaggagtggtatttccactacgagcaacacaaagggccgcctgattgggacacgttcaaggagctatgctacacccaatatggtccaccaatccgcaacaacccgctgggtgaactcaagcgcctctcacagtcgaccacggtggccacctaccagcagcgcttcctcgccttgtccagccgtgtgacggatctcctcaccgaacggcagcaagtccaactgttcacggcgggcctccgtgatgacatctgcatcgacgtggagctccatcagcctgaagatcttcgggaagccatggggttggcacgtgcatatgaacacaaagccaacttcagcccatcgcgcactatcagcaagcagttcgcgcgcacggctgcgtcatctccggccgctagcgcctccccggctccgacggcagtggccgccgtgcccgatgtgaactctcgccagtttcgtcatctgacaccggcggaactcgcagagcaccgcaaacaagggctctgttacaactgtgacaagaaatttgtccgcggccaccggtgcgcacggctctcctacatcgagtacgacgacacggcggatgatcccgatgacgactcggccgacaaagatgaggacaccgagccacacatatcgctgaacgcgatctcgggtgttgatggcgccaacacaatgcgcttggcaacctacctcgcggatgaagaggtggtggccctcgtcgactccggctccacccacaacttcatccacgctgaccttgcgttccacctcggcattccgctgtcgccggtccgcgatggtgtccgtgtggtggtggcaaacggagatcgcctcaccagccccggcattgcgcatggcctgcacctgcgtgttgccgacgaggtattcgacgtcgactgctacgcgctccaccttggatgcgtcgacatcatcctgggcacacagtggctacgcactctcagaccgatactgtgggacttcgtcaacatgcggatggcaatttgtcgcggctgccgggaggtcacgctatacggcgtcctcgacgaacgccccgcgtccacatgcgctgcgatccacactgacgatctccttccgtccctattggcggaattcgacgacctcttcgcgcttccaaccggtttgccgccggcccggaccgtcgaccaccgcattcacctcaagactgtcctactcgtccgcaagcacgacggttcttggcgcttctgcgtggactactgcgcgctcaacacggtcaccgccaaggacaaatttcccattccagtcgtcgacgagttacttgacgagctccacggcgcgcccttcttctccaagttggaccttcgttcggggtaccatcaagtcctcatgcacgccgatgatgtccacaagacggtgttccgcactcaccagggccacttcaagttcttggtcatgccattcggcctgacgaacgaacctgcgacgttccaggccctgatgaacactgtcctcacgccgttcttacgaaggttcgtccttgtgtttttcgacgacattctaatttacagcaggacatgggccgaacaccttcagcacatccggacagtgctcaccgtcgtctgcgccaacaaccttgtcctcaagtgctcgaagtgccacttcggtgaacaccagatcagctacttgggtcacgtcgtctctaccgacggagtggccatggatgcgcagaaggtttgcgcggtggccgactggccgcatccgcgttcgcgcctggacgccggatgcagcccgcgccttcaccgagctcaagcaggccctatcgacgcgcccgtactgcaactgccggacttcgccctgtcgttcgtcatcaaatgcgacgcgtcggggtccggcatcggcgccgttctgcaccagggggcgggtccgctcgctttcttcagccgggcactcgcgccacgccacgccggactcgccgcctacgagcgggaactgatcggcctcgtccaagcgatccgccattggtgcgcgtacctgtgggggagggcgttcctcgtccgcaccgaccactacagcttgaaatttctcctggatcagcgcctctcgacaattccacaacatcgatgggtaagcaagttgattggctttgatttcactgtggaatatcgcccagggcgcacgaacgttgtggccgacgccctgtcgcgtcgcatagaagacgccgaactcgccgccctggcgctctccggcccaacattctcgacattcgacgaccttcggaatgaggtggctaccgacggcgacctcatcaagatcaccgctgacatcaccagcggcaagctgagcgcgccttgggcactccgcgatggcctcatcctccgggatgaccgtgtctacatctcggcatcttccccgacaccgccggcattgctcgctcatgcccacaccgaccacgaaggagtcgaatgcacactccaccgattccgggcggacttcttcacgccccacgccaagcaagctgtccaggagttcgtacgcacgtgcgccacttgccagcggaacaagaccaaacacctgcacccggcgggcctactccagtcgcttccggtgccgacgcaggtctgggaagacatcgccatggattttatcgaaggtcttcctcgcgtgcacggcaagactgtgatcttcaccgtcgtcgaccgcctctccaagtacgcccatttcattccgctcgggcacccctacacagcgacgactgtggtgcgtgccttcttcgatgaggtggtccgcctccacggcatcccaagctcaatcgtcagcgatcgcgaccaggttgtctatggcaggccgcctctagcgctgcgggaatataatcgaggcttggcacgcgtccgcatagtcgaccaagccctcatcgagcgtgatgaatttttgggggaaatcagggagcgtctactccaagcacaagactactccaagctgtactacgacgacaagcatcgggacctcgcgttccaggtcagcgaccgcataggtgatgtggcttatcgtctcaagctaccggccggcgcacggatccacgacgtcttccacattggcctgctcaaggaattcaaggctacaccgccggaccaaccgcctgctctgcctgcattgtccaatggcggtgttttgccaatgctggcgaaagctgttcgtgctcatttggcacgcggtgtgcgtcaggttctcatccagtgggaaggcaagccggctgcagacgcgacatgggaagacgaggcagaattcaggcacatgtatcctgcgttctag

SEQ ID NO: 28622 - DNA, 316 bp, Oryza sativa
  Clone ID: PAT_MRT4530_33202C.1
gctttgctggagcagcgagcaccgtagcagcagcagcaggagcctcctggtacacactgcactacacagcgcagcagctagcgatagtgtatcgcacttactggatacgcagtcgagcatctccagcagcagcagcagcggagtgatcagcgatggagagcagcttggtcgacacagccgccgtcactctctgcctggcggcggccgtcggcgggcggtgccgtgccggcagcttcttgaactgctcgtgctccttcaaagagtacagggtgagcgcatcctacttcattgggcggtttctgagcggcgcgcggtt

SEQ ID NO: 28623 - DNA, 372 bp, Oryza sativa
  Clone ID: PAT_MRT4530_33203C.1
actcatatggaaagctgtacacctgccgtaccgttccctaataaccgacatgatccacgtgctttataactcccaaattacatactaaaaatcagaaatagagccgttgaactcattagtatcaatcaggaatggagcacataagctcatcggcacaggcggggttggaggaacacaagctcgcccatatcggatgtccgtggcctacagcaacgccgcacattcgtggcatacaggcggaggtagacgcccaagattcgactgtaccacgccaggcttgactcgcatgccctcacctatactactctcgatggtgctatgtctaacacattactactacaacactacatcttataccaacaacagtcgccg

SEQ ID NO: 28624 - DNA, 531 bp, Oryza sativa
  Clone ID: PAT_MRT4530_33204C.1
atggctatggcgggctgctactgcgtgcgcgagcaccagcttgaagacgacgacgccgtcggccaccggctcctgccgccggagatcctggtggagatcggcattattgctgctgccgatcacaccgccgccgtccacgctcgccgcgacgccgtcgtcgaggagctcgccgcgcgcctcgtcggcatcctcggcctcacgtcgccgccgtccgccggcgcaggcagactgggagagaaacgtgccgcggctgcgacgacgacgacgagtagtggcggcgccaccccgccgtacggccgctcacatgtgcgccgccgcgagcagcacctcgccgccggcggcggcggcggcggcgtcatcgacggagggatggcgcggtaccacgcgccggggttcgggacgacacagtggctggcgccgccggcgtggtgcggcggcggcggcggcggcaccggcgtgttcttgccgcgtggcgaggtgtacccgacgagaaccttgaaccctcccaggaaacagacgaatatcacttaa

SEQ ID NO: 28625 - DNA, 276 bp, Oryza sativa
  Clone ID: PAT_MRT4530_33205C.1
atgagcgtgaggagcccgtcgctagatgtcgacggcagcggcgctgagagtatatttgggtcgggtggcatcggcgggttcgcggctatagtgttggagcctccgtcggcgtgctcctcattgtctccaccgccgcactcaccatctacttatgtagcagcacagaactacggcgatgctgacgttctctgcgtgctgccgaacagcggcaacctgttccagctgacgccgctcgtcaaggtgacgccgctgtctcttggcattgctctatcgtga

SEQ ID NO: 28626 - DNA, 423 bp, Oryza sativa
  Clone ID: PAT_MRT4530_33206C.1
gcatatgaagcagcctgttggatcagcttcattttccatcctagagtgtcctccggtattttatttagtatgttctacagtgaaattatagaatttgaaagccacattaattaaatataagcagaaaattaaatcatttctactgctcgtccccctttctcctggcttgataaaatgggacatagtagcgggacgcacaaaaaagaacggtacataccgaatgcttcaggaatgatgatatattacttgttaatctgtttagtgcttctaaaggatgtcttccacttttcatgctactcaatgccatgtcaacttcattgtctgccctcatgatcaggaagaacagaagaagcggatgcagagttattaaacaggaaatgtgacaccttatgggaaagtacagaaattaaatgatgaaaactg

SEQ ID NO: 28627 - DNA, 332 bp, Oryza sativa
  unsure (1)..(332): unsure at all n locations
  Clone ID: PAT_MRT4530_33207C.1
gcgacgcgtggtccgactgctaacacctctcaacgaaagacctctaacctatgtaccctaacgtgggcggtttgttatgcagatgagagcttaacgggttgtacgcatggttcctctagcgcagggacacggatcgagcgtaggctcgacgtcgatactgcatgatcggaatgtagggcgagcacaaactgacgcatagcacgatcgaggtactcgactgcacgcacgcgtacaccattctgttcgtgagccccatgcgaagacacggtacgcacaacgtgcaggcggtggccgtcgagcaggcggncggcacctgcgacgcagtacaatgc

SEQ ID NO: 28628 - DNA, 1114 bp, Oryza sativa
  Clone ID: PAT_MRT4530_33208C.1
gtccgctctcgacgacgagctcgaagcggccgccggcctccatccagggccatacatccatccgccatctgctacgcttctccgcaccgatggagcagctcaacgccaagctctaccacaggtacaccgccctcaagaagcggaagctgctcgacgaggggctggaccagaagcgggctgccgacatcaacgagctccgccaagccatgaaagattgggtggccgagctccagagcgagaacgagcgcctcgttgccaagctgacccaaaaggagcagcagcttgtggaggcacagacgcttttacttgatgagactcggaagacaaaggagctcaatagtgaaatattgaaacttcagtgtctcctggctgagaagaatgatgcaaaccatattgcgacagggtctcctgacacaaccgccgaaatgactatagaaaatcaaactccaatttcacctgcaaagaagacgccaaagtcaaacagcagggagagaaatattcgctccattgaaaaagcgattgttcctcgtaatggctttcaggaggaaggaagagatcttgattcctgtagaagacatatgagcatctcagggagtgcgacagaagaaagttccagtacctgtatgtttcatctgctggctgaatcaatggttgggatgaaattttcagtgaagaacgaaacagaaggattttcactttcagtctcccatgaagctagtggttacaacttcactctcacatgggtagaccaacctggtggcagtgaatggtcatatcagtactcctcgttgggcaccctggacaggatagctatgggctggatgaaggaggacataaaattcagctcgaccatgtgtcctgtattcttcaagcagatatcgcacatcctcaggcaatgctaagctcaactgggaagcttagtttggattttagaggtcctgacttctgctagacagtggactgaaactgacttgttttaggagtgacacggggctttatgtatcctttcgtttggcctttgttgttcctgttgtgaacataacaattagcaagtgattcgagatgttggtcgcctggttgccgtatgtctttatgtatagcccctgaattgaac

SEQ ID NO: 28629 - DNA, 2250 bp, Oryza sativa
  Clone ID: PAT_MRT4530_33209C.1
agacacgaatcaccgtgatgttcatcagtcaccaccccggttagctactttgcttcaatataaaaaggagataaaccattctggttctgggtatcgaagtctccaggcaaaatgtgagaacatctgtggactcagggaaccagaggctctttgcaaaaagtgagacgccttggacaaaacgtgtaggagaggaccagggcgccttgcccaccttgcaaacacccatgctgttcacctagcctccgtgcttgcagatgccttcaaggacgccagagcttcccgtaatgcatcctccatctcagagttccctggatccaacttgaatccatcgtaaagtgtttcgcaagcactctcatagtccttcagtagcatcagagcagcaccctgtcggtagtaggccttcagccagtcaggccgcaatttcctgcattcataagcatccaacaaagccttgtgtccatcacccatgtgatgccagcaaaggcttctatttgagaacaaggttgcatcatcagggtaaaggtacagtgccttactgtagaatcctgttgcagatagataatcctttttctcgaccgccttattacccagtgactttaaatctgttgctttccttttattgacaggctcaccattatcagaaatgttacagttggcaccagtctcttccattaagtaattgaagcactctgtagaaccactgttttcagcagttaacatgcgatcttcactgacaacagcaccaaccttaatcaggagatttatgcattttaattcaccagaatccatagcagtatcaagaggtgtcagaccatctaccatcttgttaaaatctgcattgtggtccaataaaatcttcatagcaccatctcgcccttcagtagcagcaacatgaagtggtgtcccacagtaagctactgggtccacacaagctccttttgcaagtaatagctgtaccattccacattctcctaaacaaatggcgaaatgtataggggtgaggccgttatggctggctttgtttgcgtcggcaccacgatcaagaagatactcgacagtgcttacatgattgaagactattgcaataatcagaggagtcctacctgtcaagcacacagaaaagcttattgaagcaaagtaactctgtattacattaaaagaaacaatatcagtttttattttctttgaaatatatcgccataaaaagttataatggtaacaccattttctgagagcatggcatctaaaagttgctcctcaagataataaagtatgagaaaaataaaattttaggtatcataggaagtagaaatgtctgactgagtgcacgagataacattgggcagcctagttattatggaacatattgagtattataaccatgggaacataacagaatatggaaatgaacccattcattttgcaagttaggtgaaaattgatgcctattaaacattgcttcacagtgccatgcataatcttatcaaacacaagacaatttgagtacaacctaccatgaagttatcattgagacacattgatcaacaaaacaagctactcaacaagctagtgccccgcaccaatgtttttttagaaaaaaaaggcacattgtagattgtttaaaaatggtgtttttttttataacgctgaaaaggattaataagaacttaagagtacgtgcacgtgatcattcataacggtgcaaaaaggaggggttttgtatcgggcgagagaatgagagatggacttcctggtcagcgtcatccacgtccagccgcagctcctcgacgaggtagcggcacacctccagcctccctttgccggcggcgaggtgcagcgcccccatcccgcccatcggcgcacctctcaccctggccgcctgcaccgcctccccgattcgacccctcccatcatccagcaacgtcgccatccccctgacgatgtagaggtccccgttgtgagccgcgtcgaagagcaacttctccaccattccgtcggctgcacgggggagcgaggagcagatcgaattagtcgagttagggtttggtaagggaggcgcttaccgtagccggtgggggcggaatccgatgccatggaggctggctggtggagagcagagtgggtggtaccgtggtagggttttggggctggaggagagaagggagaaggggaaagagagagggggagagaggaggcgtacgcgggaagccaagggaagtcacggggagaagtatagtgtgtcatcagttc

SEQ ID NO: 28630 - DNA, 4098 bp, Oryza sativa
  Clone ID: PAT_MRT4530_3320C.1
atggccgaccacccatccaaccatcacggagaaggcatggatgattttgtggctgagttggctcgcatgaccttggtggtgggctaccccaacgcaccggagtactcgaccgttccaccgctcagtggcgagcttccccaccgtgttcgtctggaggttcatggctttgtgggcacctgcctcgctaacatggtggttaaggcatctggaggcaccgcagatcacgcctgtcaggaggcagcatacctgatgatggccaggcttcgtgatcaccacagctacatcttctgcaacacggcgtaccgcttcgaccctcgccgagcaagtggcgatgatgtcagcacctttcgcccgacggccggcgagaacgacaccaccttcggccacatgtgtgccgtgatgatgggaatggacaggatgcactctgacctgcacaaggcgtccaaggccttgaatgatgggaagcttgtgaggatcatagctctgaaggatgagatagcgcgtctgaagaaggagaatgctcaactgaagggtctccccgctcccggaggagtccggatccgcaccacgcctcgcaagtcaacgactgcacccgtgcgcattcagcttgcgcccaggaacccacctcctcccgcagctcctccagcacctcccgcagttcccgcagcgcccgtagctccagctccagccccagctcctgttccagcgtcagctcccacgtccgctctctcctgcgctcccgcgtcagccgccaggggtccagccagtggcaacggagtttgtgtgtttagatggtcaacaccaggaatggcagtcgtgcagcaggtgagggcagcaacgacgaagaacgcaccgacggtggatatcccaacagcgcctctggcaacgtccgccacagctccccgagaatccgactcttgcacaagtgatggcccatcagactcagatgatggcggccatgatgcagcagatgcagcagcagcaccagcagatgcaccagaggatgcatgcaataatcaggagaaggtcgccttcgccacacaccagctccagggtcccgcatcagcttggtgggacaatcacatggctacccgttcgccaggtacggaggtcacttgggcggagttctgtcgcagcttcaggaatgcgcaggtgccagacggggtcgtggcacaaaagaagacagaattccgagcaattcaccagggcaacaggacagtaactgagtacctccatgagttcaatcgactagcgcgatatgcaccggaggatgtccgcactgacgcagagaacatcaccctttcaactcaagcagctttcaccagggcgccagtggcagccagaacaacccgggaggtcagcccaaccgcagtgcagctccgcgcccaccaatggccacaacacaggcagctccatcagtccaaggcaagaaggatactggagcaaagccagggtcctgcttcaattgtggcgagcatggccacttttctgacaagtgctcgaagccaaggcgtgccgggccaaggttttgcccaagctcgtgtcaaccacgcatccgtagaagaggcgcaagtagcaccagaggtcgtactgggtacgtttcctgtcaactcaatttctgcaacagtacttttcgattctggtgcaacgcattctttcatttcaaagaagtttgttggggtacatgggttaataagagaagaactgagtacaccaatgcgggttcatacccccgagaatagctccacctcggttcaattcagcccttctgtaacaatagaaatccgaagatcaccatttctagccaacctcatccttctcgaatccaaagacctagatgtcattcttgggatggattggctgaccaagttcaagggtgtcattgattgtgtgaatcgcacggtcaccttgaccaataagaaaggggaaacagtggtgtacaagtcaccagtcgcactgaagcagggaatctccttaaatcagattgaggtggaaaatccggtggtcaccgaggagaggagttcgaggaaattggaagatatccccatagtctgcgaatatccagagagaccgtacagaatggcagccaacgagctagcagaggtcaagaagcaggttgatgagcaactgcagaaagggtacattcgaccaagtacttcaccttgggatgctccggtcatttttgtggagaaaaaggacaagacaaagagaatgtgcgtcgattatcacgcactcaatgaggtcaccatcaagaacaaataccctttgccacggattgatgatctgtttgatcagctgaaaggagccaaggtgtttcctaagatagacctgcgatcaggctatcaccaattgagaattcgggaagaggatattcccaagacggccttcaccactcggtatgggttgtatgagtgcacggttatgtcttttggacttaccaatgcaccagccttcttcatgaacctgatgaacaaagtgttcatggaatttctggataagtttgttctggtatttattgatgacattctaatctattccaagtcagaagaagagcatgagcatcatcttcgtctggttctcgagaagttgcaggagcaccagctttatgccaagttcagcaaatgcgacttttggttatcagaggtcaaattcttgggtcacgtcattacagctcagggtgtggcagtcgatccatcgaatgtggagtcagttaccaagtggaccccacctaagaccgtgtcacagattcggagttttcttggacttgcaggttattaccgtcggttcattgaaaatttctctagaattgccagacctatgactcagttgcttaagaaagacgagaaattcaagtggacagccgagtgtgacaagagttttgaggaactcaagaagaaattagtgtctgctccagttctgattctgcccgatcagacgaaagacttccaagtctattgcgacgcgtcccgtcacgggcttggatgcgttctaatgcaagagggcaggcgaacatggttggagttaatcaaagattatgacatgagtattcactaccatccgggcaaagccaatgtggtggcagatgcattaagtaggaagagctactgcaatgctttgtgcaccgagggcatgtgtaaggaattgcagcaggagcttgaacatctccacttgggaatcgtagaacacgggtatgtggttgctctagaggcacggcctacgctcgtggatcaagtcagagcagctcaagtaaatgatcctgagatagctgaactgaaaaagaatataagggtcggaaaagcccgggatttccttgaggatgaacgtggcacaatctggctgggagaaagattgtgcgtacctgatgataaagagctgaaagatctgatactcaccgaggctcatcagactcagtacttcattcatccaggcagtaccaagatgtaccaagatctcaaagaaaaattttggtgggcctgcatgagaagggaaatagctgaattcgttgcactctgcgatgtttgtcagcttgttacaacctcttcagatcccggaatggaaatgggaagagattggaatggatttcataacaggtctgcccaggacatcatcgggccacgattcaatctgggtagtcgtggatcgacttaccaaagttgctcatttcattctagtgcatactacttatacgggcaaaaggccagtctacaaatggcaccgttcgaagcgttgtatggccggaagtgccgcacacctctcttctgggatcaaacaggcgaacgtcaactgttcggaatagaagtgctatcggaagcagaggagaaagtcagaaccgtcagagagaggctgagaattgcacaatctcgacagaagagctacgcagacaaccgccgaagggagctcacttttgaagcaggggattatgtgtaccttcgtgttactccgctcaggggagtacaccgtttccagacgaaaggcaagttggcaccacgcttcgtgggaccatacaaaatcttggaacgaagaggagaagttgcctatcagttagaacttccatccaacatgatcggtatccatgacgtgttccatgtgtcccagtga

SEQ ID NO: 28631 - DNA, 892 bp, Oryza sativa
  unsure (1)..(892): unsure at all n locations
  Clone ID: PAT_MRT4530_33210C.1
gtcgtcctacgccgccgtgtccctggacaagatcaaggacctgaccgtgcacttcacggcggagttcgtcggcgagctcaaggcccgcgccggcggccggtgcagcacgttccagtgcctgctcgcgcacgtgtggaagaagatcacggcggcgagggacctgagcccggaggagttcacgcaggtgagggtggcggtgaactgccggggcagagccaacccgcccgtgcccatggacttcttcggcaacatggtgctctgggcgttcccgaggatgcgggcgcgcgagctcctccgcgccacctacggcgccgtcgtgggcgccatccgcgacgccgtggcgagggtcgacggcgagtacatccagtcgttcgtcgacttcggcggcgcggcggcggcgggcggcggcggcggcggggatctcgtggcgacggcggcggcggcgggcacgatgttgtgcccggacctggaggtggatagctggctcgggttcaggttccaccagatggacctcggcaccggctcgccggcggcgttcctgccgccggacctgcccgtggaggggctgatggtgttcgtcccgtcgcgcgcggcgaagggcggcgtcgacgtgttcatggccgtggcggagcaccacgtcgaggcgttcgagcgcatcatctactccttggaggaaggacatgggcatcatgtcggcccgtgtcacctctagacaacgatgcataatgcattagatcactctaaactctactacctctgtcccaatttaagtgtagtcgggtatttcgtgttcaagtttgatcgcccatcttattaaaaaaatagtttcacattnaaaanannnnnnnnnnnnnnnannnnnnatatanntaatatnnaaanttnttnaaaa

SEQ ID NO: 28632 - DNA, 624 bp, Oryza sativa
  Clone ID: PAT_MRT4530_33211C.1
atgccggtggcgagcccaaggaggcagccgatgagcagcagtgcccactccggcggcgcccaatccccgagctcctccccgaccctctccctctgctgcggcgacgatgtcggggacggctcggagcgattgagctgctgcggcggctgctggcttcgacgcccggatccgcgcgcggagagggggaggtcgaggtgctgtaggaggccgcgcacgccgccgctgctccgcctcggggaggcggtgacggtggccccccgcgcgcgcgcgcccaccctcgccgcagccgctgtcgcccttgcagcggcggccgccgcctcgcgcacgccctccccgtcgccgccgcgccacgctctcgccgctatggggtacaatgatgtgctcctgcatgagcacgttgccgatgatggaggggccttgcgaaatccggttgaagccgaggcagacaacccccgggacgacctccggaacgacgatgctctttgcgtcggcggccagcctcgcatccccggccatctcgatgctgaaactgggtatcgtcacgttgtgagccgggtccaccccgtcaccggcgaaggtccagttgtagcagtactcgaagcccttgatttcggccttaggcag

SEQ ID NO: 28633 - DNA, 369 bp, Oryza sativa
  unsure (1)..(369): unsure at all n locations
  Clone ID: PAT_MRT4530_33212C.1
gcccggtncccantccncccnanantnattcgtataacaatccacnggccgncnttttacaacttcataactggnaaaaccctgccnttacccaactttaanccccttgcacaaatccccctttcnccagctgggntaataacnaaaagcccccaccgatcncccttcccancatttgccccncctgaatggcaaatggccaattgtancctttaatnttttgtnaaaattccccttnaaatttngttaantcacccnttttttaacccaatagggccaaaatcggccaaatccccttttaattccaaaaaatnnancnaaaatngggtttaaatttttttccnttttggaancaaaaaatcccctttt

SEQ ID NO: 28634 - DNA, 3819 bp, Oryza sativa
  Clone ID: PAT_MRT4530_33213C.1
ctacctcccaaccgtatcgagtccgcagcgtatggacagctttgtagcagcaacttctgatgtctttgcatatcttgctagtctgatggtaggcatcgagcttgcagctttcagcaggggaagattcagttcaggtaacgcgataagcgcatcctccactgtcgcggctaagatccctggcatcccgacggtccagttaagaggaagaagcctgagatcagaaatagcccaggtcaggtgtgtatatatgtggagcatgacgaacccatccttggagaaacgccctgccgtcggcttcaagcccaccacaccgcagagcgcggctggcatgcgaacagatccgcctccgtcggctccaagtgcgacggggcagaggccggcgcagacgacggcggcggacccgcccgacgagccgccggccaccttgccggtgttgtacggattcctcgtcgatccatggtgcgggttgatgccgctggtgccggcgccgagctcgtgcatgttggtcttgccggcgagcaccgcgccgcacgcccgcagctgcgccaccaccgccgcgtccttagcaccgttgatgatacctgatcttgtgatgttcttacctgttgttgggtatggcaggcagtcgatctcgtctttgacggccaccaggacgccatccatggcagagagaggagctccttgctggtatctgagggtggatgcctcggcctgtctgatgacgtcctgaggattgcagctgatgaacaaggccatgttcagatcagggcctgaacactccttcactgcagcgagaaatctcctcgcaaccatgacaggagtgatctctcctgagatgtaggcactggtgaagtcccggattgtccagcgcctgaaccccggcgatggcgggtcagcgagcaccgattcgaggcgagccgggaggcagacgacggcctcctgaacgcgctcggccagcgacatgtctggcttcgcaagttctgaattctgcacaaggatctctggcccggtttgagcttcagtgaactctggtggcagcgatctatctgcctcctttcacaaggggtagattcggttcacgctgtaagtggcttggttgggacttatcagcaatagctgcaccggcgatacgcgcgtcctcctctgtcgcggcaaagctgcatggcatgccgacggtccagttaagaggaagtagccctcccttggagcaacgccctgatgtccgtttcacgcccaccacaccgcagtgcgcgcctggcttgcgaccagcacggatgccatcggctccgcgtgcgacagggcagagacaggagcagactatggctgcggacccacccgacgcgcctccggcctcctttccagtgcagccaggattcctcgtagatccttggcgcgggttgatttcgctgctgccggcgccgagctcgtgcatcttgcagtggccaacgagcaccgcgccgcaagcccacagctgcgccaccaccgccgcgtcctgcacgcacggccgcatcctctgcagccatctcgttcctcctcttgttgggcatggcaggcagtcgaactcttgattgacggccacgaggacgccatccaaggcagagagaggagctccttgctggtatctgagggtggatgcctcggcctgtctgatgacgtcctgaggattgcagctgatgaacaaggccatgttcagatcagggcctgaacactccttcactgcagcgagaaatctcctcgcaaccatgacaggagtgatctctcctgagatgtaggcactggtgaagtcccggattgtccagcgcctgaaccccggcgatggcgggtcagcgagcaccgattcgaggcgagccgggaggcagacgacggcctcctgaacgcgctctgccggcgacatgtccggcttcgtcaggctcacattctgctcagggatgtcttgccaggtgtgagctgcagtgaacagtggtggctccgggatttcggcatccgagacaagcttgttgacaagattgtctctcttgaggatgtagagcacgattgagccgatgatcggcgcctcaagaacccatgcgaatatcttcaccagaagcccagcaacccgtggagctttgacgttggggctgatgtagaactcgttgctgtcggcgccgagattgacctccgacgccggcttgtacaccttcggagccgagctgaagacacccatggatggaagctgatgagctgagctgagctcaagaagaacaaagacctttgcttgctccacaatgcgctttcctgtgattccagagatcccctcagtttcccgatatccgcatgtgcggactgcagttgtgcctctagtgactttttatctgcatctgccatgtctgcatatgctttgtgctgcaaagacagagttctctcggcatcaatctgctcttgcaaggatgccactgtcttgcaaagatccgctaactctacagaagttgactctaactgtgactccagctctttcttatctgtactttcttccaacgaagccacaactgcctgaagtttctcaacttctattgacttcgactcaagctgcaatgccaaagatcctctctcagcatctaactgatcagcttgtcccaaagcagcaattttagactcatttgccaagttgaactgcatttgtaattctgccaacttgttgttggctgccatcagggcatcacacgacgcgtcaagctggactctagcctctgcaagggccatttcaagatcccttttctcagtctcaagcttttcaacctttgcctgcaaatctgtgacctggctctttagtgtttcagtttcgacttttgaagctttatctatagccacagcctggtcagaatcagtttctgttccaaagctagagcttacacgttctacttcagacaatgcagccagcttttccatctcaaggaaatcatccatcaggtcaatctcaacatgattgtttacaacatctcttgagctggcactactgttcttgaactgatcaagttcggctatcagagccgaggcccatgaatcagaatttctcatttcactgtcaacagtcagcatacgctccccactgtcagactggctatcagtgagagattccatgcaagcattgttaggcgcaggcctagaatcattggccaaggaagttcttcgtgtcagatggcgcagcttacggcattctgcctcaacccttgcaatctttttcacactttccaaatgttgtttacttgccccctctgctgcttcattgctcagatctctttccagtgacagtctcttcaagtccttggctagcgtgagcagctcgatcttcaggcccttgttttccttctctgcagcctgaagtttatcctgcagatcatgctggacagccacagtggcagcttctaatttagcggcttccagctgctgctttagctcataaatatggttctggagctcagacttgtgagaatccaattcttgagtcttcttagcaactgcatcacgaattttctcctcttgttcttccctagcttggcgaagctgcctgacacattctttgagagcatcatctaggtggttcacttgatcatccaaagaggcattcttctgagttgaagcttcgagtaacctcttcagggtactaacttcagcttcagcttgttcccaacctgcaacagcctcttctgcaacctttgtatgctgcttcaccaagtcatctttagcattgatagtcaaaagggctgaagcaagcttctcactcaaactcttcacagaatcttgcatatcttcatctttgacatttgtgaagacatctggcat

SEQ ID NO: 28635 - DNA, 2448 bp, Oryza sativa
  Clone ID: PAT_MRT4530_33214C.1
tcaagcgaagcaactagcaagtagattggaccataggagatagaatccttgtacttttggcctgatgtttgcaactcttaagccctgcttgaccttcaggtcaccatttgtgttggccagtcgccaaagccttgcctcccgactgtctcttgacagctgagcctctaacttgcggcattttgcttcgtactcctctgacagcagcttctcctgctcaatcttaccttgcagcaagcttaccctatttgtaagttttgtgatttccagtttagctccttcaagttggccttccattgccttccttcccaccgctgcatcctcggccttggcagtgaattctaccaacaatgcagtctggtccttaagtcttacttccaacaatgagatcttctcctggagcttcatggtttcctggtgtgaactctcaagctcagactccaacatctttcggatgccttccactgcctctagttgcatcttcagttccgaagaaaatgccttctcctttgctgcatcgcactccagatcgttcactgttccatgcagtttcgcaatttctgagttcactaccaggagccgtgcctccaatgcttctttggcagattccacgccaagttttttctctgattcaatcttcattgactccatttggaccacaagttcttcatacatggttttctctttttgcaactcgctctccagtgtttcaatagatcccctcagtttcccgatatccgcatgtgcggactgcagttgtgcctctagtgactttttatctgcatctgccatgtctgcatatgctttgtgctgcaaagacagagttctctcggcatcaatctgctcttgcaaggatgccactgtcttgcaaagatccgctaactctacagaagttgactctaactgtgactccagctctttcttatctgtactttcttccaacgaagccacaactgcctgaagtttctcaacttctattgacttcgactcaagctgcaatgccaaagatcctctctcagcatctaactgatcagcttgtcccaaagcagcaattttagactcatttgccaagttgaactgcatttgtaattctgccaacttgttgttggctgccatcagggcatcacacgacgcgtcaagctggactctagcctctgcaagggccatttcaagatcccttttctcagtctcaagcttttcaacctttgcctgcaaatctgtgacctggctctttagtgtttcagtttcgacttttgaagctttatctatagccacagcctggtcagaatcagtttctgttccaaagctagagcttacacgttctacttcagacaatgcagccagcttttccatctcaaggaaatcatccatcaggtcaatctcaacatgattgtttacaacatctcttgagctggcactactgttcttgaactgatcaagttcggctatcagagccgaggcccatgaatcagaatttctcatttcactgtcaacagtcagcatacgctccccactgtcagactggctatcagtgagagattccatgcaagcattgttaggcgcaggcctagaatcattggccaaggaagttcttcgtgtcagatggcgcagcttacggcattctgcctcaacccttgcaatctttttcacactttccaaatgttgtttacttgctgtctctgctgcttcattgctcagatctctttccagtgacagtctcttcaagtccttggctagcgtgagcagctcgatcttcaggcccttgttttccttctctgcagcctgaagtttatcctgcagatcatgctggacagccacagtggcagcttctaatttagcggcttccagctgctgctttagctcataaatatggttctggagctcagacttgtgagaatccaattcttgagtcttcttagcaactgcatcacgaattttctcctcttgttcttccctagcttggcgaagctgcctgacacattctttgagagcatcatctaggtggttcacttgatcatccaaagaggcattcttctgagttgaagcttcgagtaacctcttcagggtactaacttcagcttcagcttgttcccaacctgcaacagcctcttctgcaacctttgtatgctgcttcaccaagtcatctttagcattgatagtcaaaagggctgaagcaagcttctcactcaaactcttcacagaatcttgcatatcttcatctttgacatttgtgaagacatctggctgtggtgactgacaatgctgtgtggaagaatcatctgacacagtttccaacactagcttttcatttaaagattttgctgttgcagttccttgagtctcattatctgtaattcttgagcaaattttaggtgattggctatgatttggggaagcaccattcggaataggcttttcgcccggagaagcaattcctccctcctctctcat

SEQ ID NO: 28636 - DNA, 2052 bp, Oryza sativa
  Clone ID: PAT_MRT4530_33215C.1
atggagtactacataagctgtggcatggttgcactctatcgcacactcgaatcgtctcccattgttgagcaagcaaaggtctttgttcttcttgagctcagctcagctcatcagcttccatccatgggtgtcttcagctcggctcccaaggtgtacaagccggcgtcggaggtcaatctcggcgccgacagcaacgagttctacatcagccccaacgtcaaagctccacgggttgctgggcttctggtgaagatattcgcatgggttcttgaggcgccgatcatcggctcaatcgtgctctacatcctcaagagagacaatcttgtcaacaagcttgtctcggatgccgaaatcccggagccaccactgttcactgcagctcacacctggcaagacatccctgagcagaatgtgagcctgacgaagccagacatgtcgccggcagagcgcgttcaggaggccgtcgtctgcctcccggctcgcctcgaatcggtgctcgctgacccgccatcgccggggttcaggcgctggacaatccgggacttcaccagtgcctacatctcaggagagatcactcctgtcatggttgcgaggagatttctcgctgcagtgaaggagtgttcaggccctgatctgaacatggccttgttcatcagctgcaatcctcaggacgtcatcagacaggccgaggcatccaccctcagataccagcaaggagctcctctctctgccatggatggcgtcctggtggccgtcaaagacgagatcgactgcctgccatacccaacaacaggaggaacgagatggctgcagaggatgcggccgtgcgtgcaggacgcggcggtggtggcgcagctgcgggcgtgcggcgcggtgctcgccggcaagaccaacatgcacgagctcggcgccggcaccagcggcatcaacccgcaccatggatcgacgaggaatccgtacaacaccggcaaggtggccggcggctcgtcgggcgggtccgccgccgtcgtctgcgccggcctctgccccgtcgcacttggagccgacggaggcggatctgttcgcatgccagccgcgctctgcggtgtggtgggcttgaagccgacggcagggcgtttctccaaggatgggcttcttcctcttaactggaccgtcgggatgccagggatcttagccgcgacagtggaggatgcgcttatcgcctatgcagctattgctgatcagtcccaaccaagccacttgcaggcaaatgctcgaactttgtattttctcttacacgtttggatgttcagtgagactgaatttgcagaagatttgatattttttgtttgtttgcagcctgaactgaatcttcccctgctgaaagctgcaagctcgatgcctaccatcagactagcaagatatgcaaagtggttcaatgactgttctgaagacatcagaagttgctgctacaaagctgtccatacgctgcggactcgatacggttgggaggtaactgctgatgtgacaattcctgaaattgaggagatgcggctcgcgcattacgtgacaatgggttcagaatgcaccgcctccttcgataagtatctgaagaagctgagcaagtctgagattggttgggatgtgaggatcgcgctgagcgcctacgggtcgttcagcagcagagcttacctgaactcgcaacgaatccggaaccgtcagatgtacttccacgacaagatctttgagacattcgacgtgatcgtcacaccaatgacaggagtgacagcgcacgaattgcaggacaacgcggggcacaccggagagctggactacataaacggagctgcgctggtgaggtactcgatcgccgggaacttcctggggttgccggcgatcaccgtgaaggttgggtacgacagggaagggctccccgtcgggctgcagttcatcgggaggccgtggtcggaggccacgctgctgcacctcgcctacgccatgcaggaggcgtgcggcaagaactacaggaagcccatggtgtactacgatctcctcaacaagaacaaatactag

SEQ ID NO: 28637 - DNA, 1164 bp, Oryza sativa
  Clone ID: PAT_MRT4530_33216C.1
atggatctcgacaagtccacctccaccaccgcgtccctgaagaaactgcaggacgacggcaccctccctggtcgcgggaccatggagagggaagcaggaggcctcggatgcatctcccccgccccagcgaaggcagaggctagtgacacttggcgagaagcggtgcgagcaaaggcggcgcaagacgggtctggtgcggcctccagtgcatcccctgcagcggcctcgacagatgtcgtggtcatgactaggcaccaggaggtgacaccaagcggccccgccggccgcgagatcgaggaggccaggacggcggcgtcgttggcgaaccagcgcgccgacaaactagcacacgacctggcggaggcccgcgaggacctcctgaagatgagggagctggtggccggcaatgaaaggcagcagcaaggactcgagcaccggatgtcggagctcgagaacaacttgtcggagatccgtggctcactgcgggtgtcatacaccggcctacatcagctcgccggggaatgcggcgtcacgactaccatcccggcgaaccctgatcagttctcactgacgtcctcgcttgcgaagctggctacggcgatggaggagatcccctccaagcatgcggccaggatcggcgaggagacgtccaacgggatctacactggggtgtgccacgtcctcacgtgcgtgagagatgtcgatattgaggatgtccagcagcgcaggcagcctgagacaccggtaatcgttccggcacttgcgcttgagccatacgtgccgcaggatgacgtcgatcaaagcctgtccgcggagacgaacatggcaataacgtccttagacctcgagagcgcgttggccgaccgagatcgtcgaatccagtactggaggacgaagttcgaggtggccaaactcgagaggaccacggtggaagtgaagaaagaccaagccgtggaagccctccgaggtcgcgaggtgtggttccacgcgtacctcaggagctattgtacggcaatggctggagtctgtagggagctccaagtacctcgcaggaatcccgaggagtcagcggccggatatatctcgtggttgaatagggcctgcacccaactcgaaggcatcggcaagcgtatcgacgaggccctgaaacaggagtgtcgttga

SEQ ID NO: 28638 - DNA, 294 bp, Oryza sativa
  Clone ID: PAT_MRT4530_33217C.1
atggcggtgtccaaccagcctccatccgccatcggcctccaacgaaataatcgatccgtatcacgccaggttggaaaggagcttgccccggttcatggtgtccatccatggagtccggaggttgctgctggagtcaccatcctcttaggcaatgcagaagacaaaatgactagccatgccaagttgctgtcagtgatgctctcccaagctcgccatcgacgtgtcggccaatgtcaggttcaaggttgttcttggcacaacaagaacaacaacaattcagagttggtgtactag

SEQ ID NO: 28639 - DNA, 244 bp, Oryza sativa
  Clone ID: PAT_MRT4530_33218C.1
ggcgaagaaggcggcgaggccgacgggggggactatctgacaggccaggtgggtgttccccggcgcggtggacgccggatctacctggacgggttcgttcgtcggcatactactggcatttgaacccagtccggccctcgggacagccggtcggagtaccctgccagttcgaggcaggacatcgctaggactcagaactctggcacaagaaacacacgccggtcgagaatcattcggccacccg

SEQ ID NO: 28640 - DNA, 405 bp, Oryza sativa
  unsure (1)..(405): unsure at all n locations
  Clone ID: PAT_MRT4530_33219C.1
cgcccacgcgtccgctttttgtgggttggcttctcctcgggctctttgccttttcctcctcggttcggttccgtggttcgtctngggtttcgtgggttgcgttggcggcgccggttgtcgngtaccgctgcttcgtcggcggcctcgcctgggcccccgncgtccgctccctcgtggccgccttctcctcctgcgtggtgggcctcgtctgcctgttctttctcgcccgggtgtcggggtggtctcgtgggtttggcttcgtccccttctcctccgngccgtcgctgcgccgcgccctcgtgggcttgctcggcttggtgctcgtcggtcgcctcgtctcctgtcttgtggccccctcccgccgctccggcggcgtcggcggggcctcctgcggtggtggtggcg

SEQ ID NO: 28641 - DNA, 375 bp, Oryza sativa
  Clone ID: PAT_MRT4530_3321C.1
atggagtatggatggaccgggaggcggtccatgctgcttccggattcatctaggcacgagcggggactgcccatcgcctatatggggatgggggtgaaaccagaggtgggtgtgttggttaggggtggttatatggagggttttgtcacgatttccccctttgcagtatcgtggcagtactttggggcatggatggaggaagtatttcatgagctgggtgagcttttagggagtgatgaggagtcgacgatgaggatgaattgtttactattgacagtcagggcggtcttaattattgagatcgaagacattgtggggtataggtggattactggcaggcacgagctattaggccgcacagatgagatgcactaa

SEQ ID NO: 28642 - DNA, 834 bp, Oryza sativa
  Clone ID: PAT_MRT4530_33220C.1
atgtctgacacgtcgaagggtatccctcaagagcagctgccatcacaggagctccacccgccgccaatgccagtgatcaaccttggccacctcagtcttgatgatcccacggtgcggtcccgggtggtcaacgatatcgccaaagcatgccgtgatctgggatacttccaggttataagtcatgggatcagtcaatcagtcatggatggtgctattgaagctgcttcagaattcttcaaactgccaaatgagataaagaaagaggaatacatggcaaaatatgccgtagaagtaagggtggtggctctgaaactgatggaagcaattctagaaggcctaggcattggcaaggaatacatgcaagagaaatttgaggaaggcttacagctattgtcagtgaattgctaccctaaagtgtctcaaagtgatacgtcaataggtctggcagcacattctgattatgggctcctaaccatcttgctcacaagttgtcagggccttgaggttgttgaccgcagcagcaacagctggaaagtggtccagcaactcccacatgcattgcatgtccatgtaggagaccacatggaagttctaagcaatggccgaatcaagactgttgtgcaccgcgctgttctgaatcctcaagaagcaaggatttctctcgctagcattcatggttttgcactgcatgagaaggtctccagtgccaaagagctggtcgacgaggaaaatccacaaaagtacaaagaaagcagctttaatgacttcctagagcatctcactgccaatatggacaacaggcaaaggaactttcttgagagccttagaatgtaa

SEQ ID NO: 28643 - DNA, 342 bp, Oryza sativa
  Clone ID: PAT_MRT4530_33221C.1
atggccaagcccaagccgcgggttctgaactccggcatgatatcgccattctccaatctccacccacccagttcagtccacttccctatgccaactgccaaaggccagtggcgaccggagaccgcgcgcgcacgagcttttgcactgcacacgccgagagccgagcgcgacggcgacgacgacgattcttcggaagatccgacacaatcctcgcgcccctccgcctaccgctctacgcatggaaacttccgtctgttttgttgtgcatggctacatgcagtgcgggtgttggttgaagaagtgttggccttgggtgtgaatgtgattaagaattttttttag

SEQ ID NO: 28644 - DNA, 626 bp, Oryza sativa
  Clone ID: PAT_MRT4530_33222C.1
cctttttttttttttttagcatcttaaacggatcgagcaatcgttttttttttttttttttttttttgcacagcaaaaaacgatcatagttgcttgcattttattacattttttctcttaacagagggctagtcctgcccagccacgtcccagcacaccactcactaagattttatggctttttcggcccagtaaaaccaacagtattggagaaaaaaactgggcctgtaagctgggccgcggggtggaagcgctagtcgctgcgggccgagctgtacttgagcccgaactcccggaagccgatctccatgtcggcggcggcgacgagcagctcggccgcctgcgccggctcgaggatctccaccgcgcgcttcacggtgcgcagccggagcgcgtcggcgcggccgagcacgccccgcacccggcccactatcccgtcgacgtcgatcccgccgccgacggcgaccgcgccgtggccctcctgcaccagcgccatctcccgcgacagcccgtcctcctcggcgacggtccggcgctggaggtcgtcgatctgcgccaactgcgacgggctgaggtcgccgaggttgcccgagctgacgccgaggaggagggtcgggagctgcgcc

SEQ ID NO: 28645 - DNA, 286 bp, Oryza sativa
  Clone ID: PAT_MRT4530_33223C.1
gacagcaaattagttcggtaactttgaaacttcacagtacaaaacggcgttttagaggtccagacaaagagcattaaagcaagaatgatgagaaagacatttggaattacataaaaagatggtctaaagcacactaaattttattacaaccgccacgaacctgtttttattcgtactgactttaaggtgcaaaatacaaaatgggcatttaatcttttgcggatattccgctctttaaagggctttttattccttagcaaatcccagtttcaaaaagcttgaggtg

SEQ ID NO: 28646 - DNA, 687 bp, Oryza sativa
  Clone ID: PAT_MRT4530_33224C.1
gacctcttggcagccttgattccaaaaaagttttcttcaataaagtttttggctccgaagatcaatgtcctcctgagttgaaggaggtgttaaacacaatcctagaaaaatgtggtggtttgccacttgcaatcatcagcatagcaggtcttctaggaagccaaccggaaaatccagtgctatgggactatgtaacgaaatatctgggctccaggttgggtacaaatcctactttgaaagacgtggtgaaagaaacgctaaaccttagctacaacagtcttcctcatccgttcaaaacatgtctgctatatcttggtatgtatcctgatgggcacataatgttgaaggctgatttgatgaagcaatggtcagctgaaggttttgtctctgccaatgaagcaaaagacacagaagaaattgtagataaatactttgatgagcttgtcaacaggggaattctagaacctgttgagattaacaagaatggcaaggtgttgtcctgtaccctgcaccacgctgtacatgaccttgtcatgcccaaattcaacgatgacaaatttactatgtcagtagattactctcagactattacaggaccttctaccatggttcgtcgtttgtcccttcatttcagcagtaccagatacgcgacaaaacctgcaggaataatattgtcacgagttcgat

SEQ ID NO: 28647 - DNA, 276 bp, Oryza sativa
  Clone ID: PAT_MRT4530_33225C.1
atggtggccagggtacttattcataagaatgaagaaaagagtagtgaaaccgaccccgacagaaaaagcaatcaaggaaaggagataacctgtgggaggagctcgtccggagagaacaccgtccacctcctacacattccgtcgaacagagaagaaacaagagggcctccacgcatcggcgccgcctcacctcactcgccgtcgccggagaagatacgctccccgcaccgccgccgctggcacaccaccgtcgcgcgctgcggtgcgctgatctga

SEQ ID NO: 28648 - DNA, 225 bp, Oryza sativa
  unsure (1)..(225): unsure at all n locations
  Clone ID: PAT_MRT4530_33226C.1
gctgatcttggatgccacctagttcaaggatggcgccgccgccgctcgccggcntggtggtggtcgccgccgcgctcctgctcctcctgccggagccgnccgagccccgcactctcctctcgctcgacgacttcggcgccgtcggaaggtgtcgcagacnanacgcaggcnttggtggacgcntggagcgccgcctgcgcaccggnaccacaccttcntccacgt

SEQ ID NO: 28649 - DNA, 423 bp, Oryza sativa
  Clone ID: PAT_MRT4530_33227C.1
atggcgacggcggctatcgccggcgagcaaagaggggtttctcgccggagcgacgaggggtcaattcgccggtgctggagcatctacgcgagcgggagggattgtgaggaggggctcggctttatagcggaggcgaggtcggttcgaggcgggagcgagcggcaaaggcggttcgtgggcgacgtggggacggcgacggcgtggatgcaagggacgatggaggcggtggatcggacggcgaagaatcgggtcacgagcgcgggaggagcaatatggcgcggtcaaggcggcgaccacgcgggcgcgcgcgcgcgctacgcgagggcgcggcggaattcaaaggcggtggcgaaaatcgattcgcggcgcggacttcgaggagaaggatttgatggcgacgagagggatcaaggacagatttga

SEQ ID NO: 28650 - DNA, 1106 bp, Oryza sativa
  Clone ID: PAT_MRT4530_33228C.1
ttttgtttcagtctcgaacaaggcacacaaacagatgttgatataatggcaatgttcttattagctagtcccaacactaaaccattggcaaacaatgcaacatttttcccatgctaagtttcttattttttgtcacaagtactgcaccttaaaattacagctgcagcaatccactagatcatcatattaaccataacccacaaaggattttcaagtccacatgagtcaatcaagcagctccacttttatttcttactggttgcaacattggaactgcccactgacaccccttcaggtggatcacttggatttggctggggctgggagcaactgatagcaagcaatgagtgagctagcaaatccaaacgcccctgtcacacgcggagtcactttcttgggagccagttgaagcagccctatagcaacaactatgtcgaggctcgatttgatgagagcgagacgcctctcgttgcacttctgcagtttcatctggtattgctcgttctttaacagctcctggtgtttaagctccttctctagtttcttcatcgacttggatagccgctgaagctcggctacctcaataatactagtacatgtgttagaacccaggaagcaataaaatgctatcttgctgaggaattctgctcgctccttgttcttgtatattcctgtccttccagcccatacaatttggtccagaaagaggaaagttgatagcagtgcattcttcgactttccaagtaagatcaggggtagtggagttcctttggcaggaggactaatcaaagcatgcagatcattaacaaacttaaaaagtcggaaaactttacgagctagactagtcgacttgtcaacattctgtgcaggccctggttgtccattactcacaaatttcgagccatattgtatagctctacagatcttatctcttgcttcagccttgtttaggtataaaataagcagagcaagatctgctcttgcactctccagtgaactcatactgtatagctggtgactgacagaggcgatccgctccgcgcgcaggagatcggcttcgacggcggcggcggcgtggtgcttgcatgaacgcgcggctgccaaaa

SEQ ID NO: 28651 - DNA, 433 bp, Oryza sativa
  unsure (1)..(433): unsure at all n locations
  Clone ID: PAT_MRT4530_33229C.1
cccaattctctgcacgccctcaaacgcgccgcccgcattccgcgatcccccccccttctccccgcagatctgggatcctcctccgccgccgccggatcccccctccgccgcctcccgtgcctcgccgcgccgcgtgatccgatcccggcctgacctctctacccccccgccgccaagttggcgcctcagcgcaggtcgcagcgcctcgccggcggcggcggcggcggcgcaggggccgccgcgcagccgccgggcgcgcagcagcagcagcagactgcgcccgggggcgcggggatgggggactccggggacgccgtcatggcgcggtggctccagtccgcggggctgcagcacctcgccgcctcctccacctgctcctgctccgtctncaccgacggtggtggagtggacccgcgcggcgggggtggtgtct

SEQ ID NO: 28652 - DNA, 4509 bp, Oryza sativa
  Clone ID: PAT_MRT4530_3322C.1
atggctcagttgagtgccacattaaaggtgagaagggcgacgaacaatgcgacctcgccgcgatcgtggccggcgggctacaccttcgccgacgtgctcactgcggcggcgtgtgctccagagggcaagccacgcggcgtgctcacggcggcggcgtgtgccccagggggcaagccacgcggcggtaatagggctgagggggtcagctttgaccagatcaaggggaaggcgccattggaagcgttcggagaggtcgcctcctcctcggcgacggcgaactcgtcggctcttccggcaacgagccactgccatgagggcccttctccgcaattcccacgagagaaacttgacgcgtgttcgttcaatatccatgccgattttggcgcgattcaagagacacgtggcggttgctatggggataaactcgaggacctctttccccgagtctccagaggcttccgtgagtgggtgtgggtgagaaagggttcgctctctccgcagctagggtttccggcgagaagcgaagaaatccggcgatttggcgactccgcacgccggatctggagagttctggagagaaggtgtgatcaccgcactttcgcgcaagtggtgatgaagcgacgtccccctccaggccgtccggattggcaagcgaacaagaggaaggcgatggagtcgggagacggaggtggtgattggggtcgacaagctggaggcgactgggggaagcaagctggtggaagttgggcgcaccgtgaggaagaggaacttcgcaagcagcttctagcaaaaggaaatcaagttgtgggagatccgcgtcgtcctggtcgccctggccaagagcgtagggattggggagatcgtggagcggggggatccaagccggcgatgaaatgcttcaagtgcggccgtgaaggtcatcaccaagcctcgtgcacaaaccctccgctctgctactcctgccatagctcaggtcatatctctgcaaacttccctatgttacagtcaaagagaggtgtgaagctatgtggttttggtattccgggtcagggtttctacagtttgcaggtagatgtttctgatgttgagatggccaaacaccctgccagtgtggttgaaacaggaatgactgaagatgctattgatgaattggctgttgtttgggttaaaatctttggggttcctaaattggctagatctgaagagcatattaaagctattgtggagcttgttggtgaatttgagatgatagatttgagcactcttagaagggatggtccagtcagagaaagattagcttgtaaggatccaagggaacttcactttgctatccatgtatacattaacaaggtggggtacatgataaggtgggaaccagagggttatcctccttatgataattcacaattccccccggatgatggtgatgataaggacaagaagggtaatggtgataatgatgacatgaatgtggatgaagatcaaaatactcaaagcccagctagaggtagatcagcccatgatagaagatctttcatgggaggttccagaggtgatgttcaatcagcccctcctgcttacaaagggaaaaaggcattggaagagacatgcctgagtgagactcagcagtgtcctactaagagggctgcctgtaaaaaacaaagtctgctggtggtggaaaaggagagtatggtagatcaagagggtgactctaaagcaatgatagtgtgggagggaaacacaacacaagatgtagaatatgaatctcaggagattgatttccctgtcacacaaaaatcgactgaggaaggtgataatgaggatgtgttgactggaatcttagagtttgaaaaatgtgacattccatctttatttgacattgcaatacagagagaggaggaagagttggatgaggaagatagctttcaggaggtttcctacaaaaagaacagacctaaaaaatctgaacctgcgatcacttctagaatgagtttgagaaacagagacatggcctcagtccccattcctaagatagctgagctgcttactcaaaagaagaacctggagactggaggtaactctaacccctttgttgtttttcaaattattgatcctgttgagctgaatagtattgctatagctgctaatatctctctaggaagtaatgaggaagaaattgcaaataccattgagaccattaaggctaaagagttggttcaagctaaattagctgagatgagatggaaaaaagagaaggaaaaggagatgacagatgttgactctttattgagaaatgagaaagagctcccagacaacatgggggaagaggttgacaatttaaataccccttctcaagagatgaataatatggagatatcttctgagagtttagagctgaagaagagaggtttgggaaacattgctaggaaaaaacaattgaaagaggcttggaaatcttctagaggtgcttctggtggcatccttattggtaccaatgatgagttgattgagaagttaggtacccacgctggtgcattcttccttagtgttgagttcagatataaaaaagataatagtgtttgggaggttattgtggtttatggccctgtgttagaatccttgaaacctgattttctgaatgagcttagatgggttggttctgaccattcccctcccattcttaatattggtgaggatattgagagacccccaaagtattttagatttgaatcagcctggctaacaatggaaaattttcatgagttggtaagacaacacatgattccaagagatggttcatatattttagattactcgaataagaagcaatcctttctgagaagatttttgaaaggctgggaattgaatcttagacaggagaagaaccaacagaaagctgttattctaacccagatccaagagttggatgcccaagctgatattagagatttaagccctgatgaatggaataaaagatatgagatggaggctgaccttgaacatatctatgaaatggaggaattgttttggcacaagagatgtggggaaatgactttattacaaggtgacagaaatacagagttctttcacagaatggctaatggcagaaggaggaaatgcttgatcctctccctagaagatgagggtagagagttgacctccaaggaagatctgaaatcccacattattgagtattataagtccttgttcagagctgataatctttctacggtgcatctttctccccaaatttggcaatctgagctgtgccttaatgctgaccaaaaggaggctatcactagacctttttctatggaagaacttgataaagtcattagggaggctaagttgaatattgctcctggtcctgatggccttaatatccatttttacagagctttctggcctgaaatcaaaaatgatctgtttgaaatgttattaatgttgtatgagggtaaactagatttaaagagacttaactttggtgtgatttctttgattcctaagagctctgaccccacaaatatcagacaatttagacccatttgtgtcctcaatgattgttttaaattccttagcaaggtggtgactaacagactttcagaggttgctccctttgtgatttctcagacccaaactgcttttatcccagggagattcattttagaggggtgcataattctccatgaggtgcttcatgaattcaaattgaaaaatcagcagggcattattctgaaaattgattttgaaaaggcttacgatagagtaagctggaattttctttttgaggtcctagagagaaaaggctttcccaagatttggattgattggatcaaggcttgtgtgatgtgggataaagtttgtgtcaacattaatggtgagaggtctgacttctttagaacttataggggcttaagacagggtgaccccctttcccctctcctgtttaacctagttagtgatgctttggcagccatgctagatagtgctaagagagatagtattcttactggccttgtccctggtatcttccctgggggaatcacccatttgcaatatgctgatgatactgtcattttcattccttttgatgtcagacaaatagtggccaccaaatttttgttatattgttttgaagagatggctgggatgaaaattaactaccataagagtgaaatcttcactgtgaggttgatagatgcagaaaatgaagaggttgctaagatgcttaattgtcctagaggcaaatttcccatgaaataccttggtctgcccatcagtcctgacaagattctcaaccaagagtttaattttcttccacataaaatggagaagaggttgtctctttggaatgggggtaacctaacttatgctgggagagctgttcacataaatgcgtgtttatcttccattccttcttatgcaatgggcttttatcagcttcctgagggaattcaccataagtttgattctttaagggggaaatactattgggctggtaatagataa

SEQ ID NO: 28653 - DNA, 540 bp, Oryza sativa
  unsure (1)..(540): unsure at all n locations
  Clone ID: PAT_MRT4530_33230C.1
gctgtaagtcctactctagcaagcatgcgcgccgccgnccatgtcgtttccatcgccggcttgctggtgatggccatggcgccactggcctcctcgtacccatggccgacctgcaacggcagcagcaactacacggcgaacagcgcgttccaagagaacctccggatcctgaacgccaccctccccagcaacgtctccacctcgccgggcctcttcgccaccgccaccgtcggcgcggcgcccgacacggtctacgccctcgcgttctgcccgccagtcgacaaccagaacgcctccggctgccgcgcctgcgtcgccggcggcttccaggacgcgccgagactgtgcccctccaacagggccgtctacatcctctacaacttctgcgtcttcaccttctccggcgtgaacttcctcggctccgccaccaacccggcggaccaggaggcgcagctctacaacgccctcaacctcaccatccccgacgtcggcgccttcacagggccacctacgagctcctcaacgccacggtcgattacg

SEQ ID NO: 28654 - DNA, 1450 bp, Oryza sativa
  Clone ID: PAT_MRT4530_33231C.1
gcacgagggacatgtcaaagtttccttccctttttgataaaatgtccagtgtgatagagatattgcgacctgtcacctccacaagagctacttagcagagacgcgcgttggattccaagacaagtgatgatcagccttcagttgcttcccacaccccaccaactcaacaagcttttctgcctgtgttgaagctataagcagagcagacttcccgcccatgtctgatggatatttctggtcaatatattaccagtatgaaggtgccgtgaatgagggccaacgtggacctaccatatgggatactctcacgaaaagaccaggtcgggtgattgatttcagcaatgcagatgttgctgttgatcactaccatcgctacaaggaagatgtggagttaatgaatgacatcggcatggatgcataccgcttctctatctcatggtcacggatctttccaaatggaacaggtgaacctaatgaagaaggattgagttactataacagcctcatagatgccctgttagataaaggcatagaaccatatgtaactctcttccactgggaccttccccaagcactcgaagacagatacggaggctggttgaactcagaaatcatcgaggattttgttcagtacgcgtttacttgcttcaaggaatttggagatagagtgaagcactggatcacttttaatgagccttacaactttgcgattgacggctatgaccttggcatccaagcacctgggagatgttctattctgtcacatgtgttctgtagagagggtaaatcatcaactgaaccatatattgtagctcacaacatacttttagctcatgctggtgcttttcgtgcttatgaacaacatttcaagaatgaacaaggaggcctcattgggattgcgcttaattctagatggtatgaaccgttctcaaatgccgatgaagacacagaagcagcagcgcgagcaatggactttgagcttggatgtattactgacttctctgcatgcactatggcagcttatagacatgggaagaaaataggagaaacggcagcatcaagttggctgcacatagttccatggggtatgttcaagctgatgaaacatgtgaaagaaaagtatggaaacccgcccgtagtcattactgaaaatggtatggatgatgccaaccacccattttctagattagaagacgtcctacaagatgataaaaggatacagtaccacaatgattatatgtctaatctcctggatgctataaggaaagaaggttgcaacgtccatggttactttgtatggtccctgctcgataactgggaatggaactcaggctacacggtgcgattcggtctctactacattgactacaagaacaacctgacgaggatacccaaagcatcagtccaatggttcagtcaggttttagcccagaaaacagctatcatatag

SEQ ID NO: 28655 - DNA, 1610 bp, Oryza sativa
  Clone ID: PAT_MRT4530_33232C.1
atgtggtctggggacaaaggagtgatgctgggaacgaagggttcgggtggtggggatgtgggagaatggctactagtgctaggttttggggggtcgatttggaagggtttggttcatgggagattggggaagaggggtggggatctgtgcgctggtgaaattgataagaggctgttggaacttggaagctgtatagttcaggtcgtcatggctcatcaaaagcgtgaagcaaccagcgacaacggcggtggcgatgaagagtgggcatcaaaacgccccaaagttgtcggcgctgctgctgaaaaggagcacattctgacatctgacgcttcgcatgaaacgaatggcgatgaagctcaaggaggagatgcctctcgaaaggaaaacacggtgtcgacaaacccgtgtgtttcagatgagaaagcagcaaccaactcgaatgtttcaagtggccatggggtgattttgactagtgtggaagctgatgctgcagaagacaagggttgcaggcatactatggaagatgcatgggtgctgcttcctgatgctagcatggaatctccgggaaacctgaggtgcgctcatttcgcaatatatgatggacatggtggtcgcctggctgcagagtatgcacagaaacatttgcatcagaatgttattgcagcaggattaccacgtgagttgatggatgttaaagctgcaaagaaggccatcattgaaggttttcgtagaactgatgagtgcttactgcaagaaagtactaaaggaaactggcaagatggtgcaacagctgtctgtgtctgggtcctggggcagacggtggttgttgcaaatgctggagatgctaaagctgtattagctcgttccacatcagctgatggtgaaggtgcagtggatgatgccaaaagtcaactgaaggctattgttttgaccagagaacataaagcaatctttccacaagaacgtgctcgaatccaaaaggctggaggatctgttggccctaatggcagattacaaggtcgcattgaagtatctagagctttgggtgatcgtcagtttaagaaggttgggctgattgctacaccagacgtccactcctttgaagtaacgagaaaagatcattttattattcttgggtgtgatggcttatggggagtatttggaccaggtgatgctgttgaatttgtgcagaatcaattgaaggagacctcgtcagcgactctggcagtgcggcggctcgtgaaggaagctgttcgtgagaggcgttgcaaggacaactgcactgccgtgctgatcgtcttcaagcactagaattcttttcacccactgcgaccgttttcgttttttcaccaagctgaactggggaaacgaatcatctgacaacgaacaatatctagttctattgttaccttatcctgcactgcgacgttctggccgtgtctgtattgtgatcgagacccttgtgcactgctgtagccgtgtatgtattgtgatcgagacctttgtgcactgctgtagcttatgcggttatgccacctctggaatgaatgaaatattggagcccctccactacaaaaaaaaaactcgagactagttctctctctctctcc

SEQ ID NO: 28656 - DNA, 150 bp, Oryza sativa
  Clone ID: PAT_MRT4530_33233C.1
aaaaaaggggggttaaaaatcttctatactcaaatataatgataagcgacaataaaaaatcatgtaccgttacataaacaccttcctacagccagcatacataacgcaaatgaaaacttaaggcacacaatgcagctaatcacattctga

SEQ ID NO: 28657 - DNA, 203 bp, Oryza sativa
  Clone ID: PAT_MRT4530_33234C.1
catgtaaccctactcgcaattttgttgcagagctcgggtcgctctagaaggttaatgaccaatggagacctggtcagcaatgcgcactcgcaaagcatcaaccagagattgctgaacacactattgaacttaaacccgtctcttagaccaggcgagacgttcaccaacttagatagctgcacgtaaccacaaagactcggttc

SEQ ID NO: 28658 - DNA, 265 bp, Oryza sativa
  Clone ID: PAT_MRT4530_33235C.1
ggaatattattattggtttccgcttttttcgaatcataaaagcttttatagacgccatgtaactaattaataattaagttaggcccttcactggggacatgacgaacaattccttacacgctagcaatataaggaaagatgaacagcaaaaacaaacggaaaaaaatgggcaggagggaagccaatcaatcttttaaagggtggaccgaaccaaaggtaatgagaaaaaccgacagtactggagggtaaaacaaagggacgaacc

SEQ ID NO: 28659 - DNA, 189 bp, Oryza sativa
  Clone ID: PAT_MRT4530_33236C.1
atggagatgatgttggcacaccgcccaccagaatttactgctttgcccctggcctggacggctgagttgtgggtccaggctgtcagtgagagggtgcttgatgtaaaaagtcctcagaggctgacctgtagggcccacctgcaacttcaaggcgtccagcaaagcaagagcttttccaacgaccagtga

SEQ ID NO: 28660 - DNA, 144 bp, Oryza sativa
  Clone ID: PAT_MRT4530_33237C.1
ggacaccggatttggcggcgtctccactactcccaaggcgactctagccacgctctcaacgccatccacaccattcttcatagagacggggagttccaacaagagctctgctagaaccgcaatttataaacaggatcacccaca

SEQ ID NO: 28661 - DNA, 379 bp, Oryza sativa
  Clone ID: PAT_MRT4530_33238C.1
cgggctgcaggaattcggcacgagggtatctccgccgccacccccgctcgccgccgacccatggagccaccgccgcggggaaccaagcgcccgctccccgccgtcgccgacgccgacgccgacgccgccggcggagacgacgacgacggcgctcttcccggggagcgcaagccgcggttccccaaggggaagaaggccaagtaccgggaccccgccgcagccgccgcggcggagggcatcgacggcttgataaaccccgagctcgcggcggagcggcgcgcgaggcgacgccaccgcaaggacgaggatgaccagcagggagtcgcctccgacgtcaggggattcgaagtgcgatacgaggatagtgcaaatttggttg

SEQ ID NO: 28662 - DNA, 354 bp, Oryza sativa
  Clone ID: PAT_MRT4530_33239C.1
atggcagggtcgaccaacaccgtcgtccaaaccatcagcgtcaccgccgcggcaacaggggtccacgacttccgggtgtctctctaccccgttctcctgagcagaccggcggacgatgatggtcgcgtgcacgcgtcgttcgcgtgcacgctgctggacaaatccggcaagccggcgtcgccggagtccaaggacactgcggacaagattaaagttaagtctctggatccaaacaccacccttagtctcaggaaggaggccgtggagaggttcgatgactgcttcgttgtgcggtgcacgtctctgtgctcaagaagcccatgtctccgccagggtttacgttaccgccgatag

SEQ ID NO: 28663 - DNA, 3429 bp, Oryza sativa
  Clone ID: PAT_MRT4530_3323C.1
atggtctacaccaggaatggtagtcgcgcaacaggcgagggcagcaacggcgaagagcgcactgatggtgtgcatcccaatagcaattccggcaatggtccgccaccacttcccgagaatccgacgctagcccaagtgagggcacatcagggaagtcaccagaggccgcgcttcactcccgggcagcagggtggacctaccaccatgatcgtccgccagtaccgcccgttcaaccctagcaactttccccagggcgccagtggcagtcagaaccaccatggaggtcagcccaaccgcggtgcagctccacgcccaccagtggcaccagcacagtcaggcccgtccgcgcaagccaagaaggagactggaacgaaaccagggtcctgcttcaactgtggcgagcttggccatttcgccgacaaatgcccgaagcccaggtgtgccgggccaaggtttgtccaggctcgtgtcaaccacgcgtctgtagaggaggcgcaagcagcaccagaggtcgtactgggtacgttccctgttaactcaatccctgcaacagtactttttgattctggtgcaacgcattctttcatttcaaagaaatttgtggggatgcatgggttaaggaaagaagagcttagcacaccaatgagggttcataccccgggaaatagttcaacctcagtcagttttagcccttcagtgctaatagaaatccaaagatcaccatttctagccaacctcattcttctcgaatctaaagacctagatgtcattcttgggatggattggctgaccaagtttaagggagtcatcgattgtgcgaatcgcacagtcaccttgaccaacgagaagggagaaaccgtggtgtacaaatcactagtctcaccaaagcaaggggtctccttgaatcagattgaggcggaaatcccagtggacaccgtggagaagaatttgaggaaattggaagatatacccatagtctgcgagtatccagaagtgttccccgaagacctcactaccatgccacccaagagagagattgaattccggattgacttggcaccgggaaccgctccaatttacaagagaccgtacagaatggcggccaacgaactagcaaaggtcaagaagcaggttgatgagcagctgcagaaagggtacattcgaccaagtacttcaccttggggtgctccggtcatttttgtggagaaaaaggataagacgaagaggatgtgcgttgattatcgcgcactcaacgaggtcacaatcaagaacaaatatcccttgccgcgaatcgatgatttgtttgatcaactgaaaggagctaaagtgttttctaagatagacctgcgatcaggctaccaccagttgagaattcgggaagaggatattccaaagacggccttcaccactcggtatgggctatatgagtgcacggttatatctttcggacttaccaacgcacccgcattcttcatgaatctgatgaacaaagtgttcatggaatttctggacaagtttgttgtggtattcatcgacgacatacttatctattcaaagtccgaagaagaacatgagcaacatctccgtctggtactcgagaagttgaaggagcaccagctatacgccaagttcagcaagtgtgacttctggttgacggaagtcaaatttctgggccatgtcattacagctcagggtgtggcagttgatccatcgaacgtggagtcagttatcaaatggaccccacctaagaccgtgtcgcagattcggagttttcttgtacttgcgggttattaccgccgattcattgaaaacttctccaggatcgcccgtcccatgactcagttgcttaagaaagatgagaagtttaaatggacagctgagtgcgataagagttttgaggagctcaagaagaaattagtatccgcaccagttttgattctgcccgaccagatgaaagacttccaagtctattgcgatgcatcccgtcacggacttggatgtgtcctaatgcaacagggcagagtggtcgcgtatgcctcgtggcagttgcgtccacacgaagggaattatccaactcatgacctggaattggcagcagtggttcatgctttgaagatctggaggcactatctgattggcaaccgctgcgaagtatatacggaccataagagtctgaaatacatcttcacccaaccggacctaaatctgcgacaacgaagatggttggaactaatcaaagactatgacatgagcattcactaccacccgggcaaagccaatgtggtggcagacgcattaagcaggaaaagttactgcactgccctatgcatcgagggcatgtccgctctggaagcacggcctacgctcgtcgatcaagttagagccgctcaagtgaatgatcccgaaatagcagagctgaaaaagaacatgagagtcggaaaggctcgggatttccttgaggatgaacacggcacaatctggttgggagaaagattgtgtgtacctgacgacaaggaactgaagaatctgatactcaccgaggctcatcagacccagtactccattcatccaggcagcaccaaaatgtatcaagacctcaaagaaaagttttggtgggtcagcatgaggagagaaatagctgaattcgtcgcactctacgatgtttgccaacgagtgaaggcagagcaccaaagaccagcaggtttactccaacctcttcaaatcccggaatggaaatgggaggagatcagaatggactttataacaggtctgccccggacatcatcgggtcacgattcaatctgggtagtcgtggatcgactcactaaggatcagacaggtgagcgtcaactgttcgggacagaggtattagcggaagcagaagagaaagtcagaaccatcagggaaaggttgaggattgcccagtctcgacagaagagctacgcggataaccgccgaagggagctcacttttgaggcaggagattacgtgtatcttcgtgtcactccgctccggggagtacaccgttttcagacgaaaggcaagttggcaccacgcttcgtgggaccatacaaaatcttggaacgaaggggggaagttgcttatcagctagaacttccatccaatatgatcggcatccatgacgtgttccacgtgtcccaattaaagaagtgcttaagagtacccgaagaacaagctgattcggagcatattgatatccaggaggacctgacatatgtggagaagccggttcgtatacttgataccagcgaaagaagaaccagaaacaaggtcaccaggttttgccgagttcagtggagtcaccattcagaggaggaagcaacctgggaaagggaagatgagttgaaagccgcccatccgcacctcttcgccagctcctccgaatctcgggaccgagattccgtttaa

SEQ ID NO: 28664 - DNA, 359 bp, Oryza sativa
  Clone ID: PAT_MRT4530_33240C.1
ctagatactactaaactaaacttgagagaatatgagagagctttgcttaaggtgtgtgagtgaagtgagaaggtgatgggtttatatagtctcccaatgacggttgtgacggttggaatggtcggaaataccctccaaccgtcattgggagctaatccacaccgtccaaaagaaaccctgcatccaacggcgcctgggagggtttggccgaacctcttggttcgactgaaccaggggcccgcccaaccagcccaggttttggctggcggccttctctgttgatcctctccttaaacttgtgaattttggcccaattcatcgtagagaaaaagatacccacctctgcaagaccaccacaa

SEQ ID NO: 28665 - DNA, 400 bp, Oryza sativa
  Clone ID: PAT_MRT4530_33241C.1
gggccgaagcggctgggatggccccttgggccttcccggagctggcctcgatatggcgaagtcatcctccttcggcgtatactcttcgcccttcgaccttcgcccaggatttgcatggtttcggcaggtctggtcgaagggtctcatgacatatcgccaacaagcccctcacgggcaagggtgagataggagcttcggccgagaccgtgcaaaccgtgtggtatggtatgaggcgccccctttcgaccgatgctcctaccgaaactaacgttggaatcctgcaaagaacacgcagtaatgttttgcagctttcgccttctctcgtcactgtgcggctcggtcaagtggaatttaccgtttcgcctacccttatgatacgtggtgggtcgtgattgggtgg

SEQ ID NO: 28666 - DNA, 684 bp, Oryza sativa
  Clone ID: PAT_MRT4530_33242C.1
atgccgggcgctctctctcgtgcaaactgcaaagtgtgcggcagcggcgagctgagggggcacagggcgacggcgactgagggggcgacggcggcgatttgctggggcggcggcggcgatttgagggggcggggcggcgacgatctgaggggcgacggtggcggcgtgaagcaaagccccgccgaggcccccttggtggagaaggagcggcggcgagcagaaggagcagcgtcgagtggcggctgcaccgagcggaaggagtggcggctgctcgacgacgacgaggaggagcaacggcggtgggtcggcgatggcggagcggcgagcgtgctcggacggggtggcattggtcgcggcggagatggcgaggacggcggccggcggagtggagtgggcggcggcggcggtggacaagcgtgcggccggcggagccacccctcactgccggcaccgtgcccgtgcctgctccgcgaggcgtggggcagccttgacgcgctcgtcggccgcctccacgccgccttcggggaacacggcggccacccccaggccaacccgtttcgcgcccgcgccgtccgcctctacctccgcgaggtccgcgacagccaggccaaggagcccacccacctggtcttcttactctcaggccgccgccgttgccacctccccggcgagcccagccgctag

SEQ ID NO: 28667 - DNA, 563 bp, Oryza sativa
  unsure (1)..(563): unsure at all n locations
  Clone ID: PAT_MRT4530_33243C.1
tgcccgcttccacccaagggaccaggtacccagcaacgtccggccgggagctgcgcatgcgaccaagccaagaaacgtcgcccgtgccctccgcccntgacgcccgncccggcgtccagccacgacctggaggcgtacctgcacactcatcgacggttcacggggacaggccgccantgttccggcacnnacgcgccacagcagcgtgatccaggctnctncagttcgcagagggggaacgtgaagaaggagtacagtgaaccagcagcccagggagctcggcagtcgacccctcggcancacaggtggacagtcagcccaggaccatggcagtaccggggaactgcgcccgtcgcgagcccactccctccgtgagacgaccgagattgacgtcttcttgccaagagccacttaattatgtaaatttttgtagaagcaagacctacaattgctttcgttagtccagggggtgtcagcgggaaaaaagattttcccttgtcactttgacgtatgtatgtacaagtacataccnaactattatacttgcaaaaaaaaaaaaaaaa

SEQ ID NO: 28668 - DNA, 354 bp, Oryza sativa
  Clone ID: PAT_MRT4530_33244C.1
gcttagagctaacccttcattcaattcaagagccattggaacatagcaagtgatcgagccgccccagtttccaactttctgccatctttttttttcctagtgatgttcctttctcaatatcataatgatagaacattacattcgctctctctctctctctctctctctctccaccttgctactggcagaaatgcagaatttgtaccctcctggagaagaggtctcagaaaccggagaattgattttgctgagattgctgaataacctgaaattcagttcctgtagggctgacattctctgtcgcaatgaagttttcgcgaggacgtgaaacccagagggagctgagagcacgga

SEQ ID NO: 28669 - DNA, 1383 bp, Oryza sativa
  Clone ID: PAT_MRT4530_33245C.1
atggaggcggcgtgcgtgctcgccgtggtggtggtggtgatggcgttcttgtccccggcggcgcgcggcggcgtcacgagcacgtaccggaggagcctgcaggcgctcccagacatgccgatcgacgccgacgtgttccggccgccgcccgggttcaacgcgccggagcaggtccacatcacgctgggcgaccagaccggccgcgccatgaccgtctcctgggtgacgccgaagctccccgacagcaacgtcgtccgctacggcctccgcgccgacaacctcacccacaccgccaatggcaccttccggcgctactccttcgggcgcaagtaccggtcgggattcatccaccacgccaccctcaccggcctcgactacggcaccaagtaccactacgccgtcggctccggcgacaccgccagcgccaggtccttctccttcacgacgccgcccaagcccgggcccgacgtgccgtacaagttcgggctcatcggcgacctcgggcagacgttccactccaacgacacgctgagccactacgaggcgtgcggcggcgacgcggtgctgttcatcggcgacctgtcgtacgcggacaaccacccggggcacgacaacaaccggtgggacacgtgggcgcggttcgtggagcggagcgtggcgtaccagccgtggatctggacgacggggaaccacgagctggacttcgcgccggagctgggggagacgacgccgttcaagccgttcacgaacaggtacccgacgccgttcggggcgtcggggagcacgcggccgctgtggtactcggtgaggatggcgtcggcgcacgtgatcgtgctggcgtcgtacgcggcgtacggcaagtacacgccgcagtggaggtggctggagggggagctgaggcgcgtggacagggcggtgacgccatggctgatcgtgtgcgtgcactcgccgtggtacagcagcaacggataccactacatggagggggagtcgatgcgcgtggagttcgagcggtggctcgtcgacgccaaggccgacgtggtgctcgccgggcacgtccactcgtacgagcggacgcggcgggtgtcgaacgtggcgtacgacatcgccaacgggatggcgacgccggtgttcaaccggtcggcgccggtgtacatcaacatcggcgacggggggaacatcgaggggctcgccgacgacttccggtggccgcagccggactactcggtgttccgggaggccagcttcggccacgccacgctgcagatcgtcaaccggacgcacgccttctacgagtggcaccgcaacagcgacggcgtcaaggtcgtcgccgaccatgcctggttcaccaaccgatactggtttcccaccgacaccaactag

SEQ ID NO: 28670 - DNA, 696 bp, Oryza sativa
  Clone ID: PAT_MRT4530_33246C.1
ggaataaactcgagccctgttgctctcgatccaattatgtactacaagggaaaccaagtcattctagaaaaacattacacaacaccaagtggaatcgcatgtttgaccagcaattccaatcttttgcacaccctacttccaattttctactgtgctatcgtgcgagtacaattcacgctccatgtatcgtgccagccgacgccgcctcgtcgtcgtcatcaaaaaccgggagagtaaacttgtagcgcccgctggttattctgattgattattccgaatcagatgcatgttagcttctcgactcgtggatgtcgctttcagctcatctgctacgatgctgcgcctttgaagacgaggaacctgagcgcccccagcttgaagtagatgaagcttcccttgctgtgcgtgaagtagcagccgaagctggcgcccaccacgcactgccatcccggcccgtggatcatgtcaaactccttcttgatgtgagcggcgatgctccggcagtcgaggacgtcgaagcggtcgagggccttgtacgccgccgacatcgcctgcagctgcatcttcaccggcatgtcggtgtcctccaccatcgccttcccttccaacatggtggtcgtctcttgtgactccttcctgcccagccttctctgttgcaatgctcgaaatgaacccacgcgtccgcggacgcgtggg

SEQ ID NO: 28671 - DNA, 1446 bp, Oryza sativa
  Clone ID: PAT_MRT4530_33247C.1
atggtgctctccaaggccgtctccgagagtgacatgtccgtgcactccaccttcgcctcccgctacgtccgcgcctccctcccaaggtaccggatgccggagaactcgatcccgaaggaggcggcgtaccagatcatcaacgacgagctgatgctggacggcaacccgcggctgaacctggcgtcgttcgtcaccacgtggatggagcccgagtgcgacaagctcatcatggccgccatcaacaagaactacgtcgacatggacgagtaccccgtcaccaccgagctccagaaccggtgcgtgaacatgatcgcgcacctgttccacgcgccgctcggggaggacgagacggcggtgggcgtgggcacggtgggttcgtcggaggccatcatgctggccgggctggccttcaagcggcggtggcagaacaagcgcaaggccgaggggaagccgttcgacaagcccaacatcatcaccggcgccaacgtgcaggtggagctcaaggaggtgaagctccgcgacggctactacgtcatggaccccgagaaggccgtcgacatggtcaacgagaacaccatctgcgtcgccgccatcctcggctccaccctcaacggcgagttcgaggacgtcaagctactcaacgacctcctcgacaagaagaacaaggagactgggtgggagacgccgatccacgtggacgcggcgagcggcgggttcatcgcgccgttcctgtacccggagctggagtgggacttccggctgccgtgggtgaagagcatcaacgtgagcggtcacaagtacgggctcgtctacgccggcatcggctggtgcatctggcgcaacaaggaggacctgcccgaggagctcatcttccacatcaactacctcggcaccgaccagccaaccttcaccctcaacttctccaagggctccagccaggtcatcgcccagtactaccagctcatccgccacggcttcgaggggtacaggaacatcatggagaactgccacgagaacgcgatggtgctgaaggaagggctggtgaagacggggaggttcgacatcgtgtccaaggacgaaggggtgccgctggtggcgttctcgctcaaggaccggagccggcacgacgagttcgagatctccgacatgctgcgccgcttcggctggatcgtgccggcgtacaccatgccgcccgacgcccagcacgtcacggtgctccgcgtggtcatccgggaggagttcagccgcaccctcgccgagcgcctcgtcctcgacatcgagaaggtgatgtaccagctcgacgcgctcccctccaggctcatgccccccgtgccgccggcgccgctgctggtggtcgccaagaagtcggagctcgagacgcagcggtcggtgacggaggcgtggaagaagttcgtgctcgccaagaggaccaacggcgtctgctag

SEQ ID NO: 28672 - DNA, 1923 bp, Oryza sativa
  Clone ID: PAT_MRT4530_33248C.1
atgggtgccaacggggtggcatcggcggcggcggcggccacggcggtgctagtgtacgtcgcgctctcctcctccggcggcggcggggaggcggcgaggctgcggaggccggaggaggaagatgaagaggaatccaagaagcggtggccggagagggcgccggcgagctggagggaggcggcggcggtggcggcgaggacggtggggttcacgtaccgggagacgctggggaggtggccgctcggggacatcgcgttcgggatcaggcactacatgcgaatccagggcaatctgcagcacgagtacactggtcgcagttgtgtgcccctagaaggccctgtaacaaggcaggagctgattgcaattcttagatatctgagactctgcatgtttttcgcgaagaagccatacgaagtgttcctggaatttggtggatatggccagagtgatatcctcataaggaaatcaaaggcaagggttatgaagccctcattcacaattgtccgcgataaaagtactaaatccttcatccttttcattcggggcgctacaagtgttaaggatcgcctgacggcagcgactgctgcagaggttccatttcatcatgtggtgttaaaagaaggccgtgtttctaatgtagttgttggccatgtacattgcggaatggttgcagcagctaggtggattgcagatcaggccattccctgtctcagcagagcagttgagcaatttccagactacagaattaagatcattgggcattcaatgggtgccggtattgcagcaatcttaacatatatgctacgtgagaacaagaaattgtcatcatcctcatgtattgcctttggaccagctgcttgcatgacctgggatttggctgagtcaggcaaagagtttgtgaccactgttgtcaacagaaatgacctggttccatcatttggtaaagtgtcagctgccaaccttcacaccgaggtaatagggtcatcttgggcacatgatctcctggagcaaattcaacagacaaggatcttgggttttgttaaccgttctgtgaccttcatgcaatcccagttccctttcatatccaatccaaggtctaaagttgcagatgttgatctgatgctatctggcacatccgaggctgagacgatactttcagtagatgcgcgcgccgcaatcaagaaacattctacattatccttctggccaagtgctccttcaaacaggaaaactctcgagtcatctttgatgaacccaacacagagcattgcagcactgatgtccacctatgttggaactgacaaagacactgaagaacacaagaatcagaattcagacaccaaagaactctacaggcaagacaaagaagcagatgcagagaagaatttggagcggtttttagaagcgttgcgatcatcgccaagcgcctcgcaggagcctctccagttctaccctcctggaagaatcatgcacatggttgtgctgccatctccaaaagagcctagcagcattgatcaatgcagtcaggatgagtgtgttgccctctatgagactcctcgcagcatgtatagtaagattcggcttgcgagatctatgataagagatcattacatgcctaggtatataaaggatgtattaactcttgtaacaaaaaggttcttcagggaacataatatgaggggaagccataacaaggatgtactgacttttggcaggggaagccgggagaacacttggtgggtcgtcggcaatgagatcggcctcgtggcctcggtaggctggactacctcggtgtgcgcgcgacgactaataactggaggaaaccagaagtggcttggaaatttcactatttgccatctaattcacaaccctatcacaatttaccactcaatccgttgctatattatgggacggatggaataa

SEQ ID NO: 28673 - DNA, 1353 bp, Oryza sativa
  Clone ID: PAT_MRT4530_33249C.1
ttttttttttttttttaaaatccaatagggcagtttcaccattattgattgcttagaatacatcagttcattgctccggccagtactcaactcttggctatgaacaatctaatgtctaggtaattgaacagatacttttccgatcaacgattttgagtttttgacgccttgtccctctaccaccgatccaaagtgatgaactgaacaaatttgagttcatcacttaagtacggggattacatatgagccggctgcagatatgatctctcatagaggcccatcacctgatcagccaccgcccacattatagcctgaccaggtggaatcctcataagcctcggaagcaaacctttccaaagggctctgagaccctcttcagtgtatattgtgcgtatcgcgtggaccatacccttgtacttgatgtcaccagttctcccctgggccatcagtctagtcttcacgacatcgaagggtccagtgcagatcggacctgcagttcctgcaagaaaacctgaaatcattgactgccatggctggagaaccttcccatctccttcatgcttcttccagagaacaatatcaaatgtattcttggcagtgaacattgcggcttggtttgtgccattacgcatgacggttggtaatgctccagcccacaggccaaaaagaccctcctcagtaacaatcgtcctagcacaatgtattggccccttatatctcagcaggtcagggcttagacctttttgttgctgcaacctgattttaaccactccaggtaagtaaaaaaggaacagatgcaggggtgatcttgcctcgaagggggtgacgatgaggagggcctcgaggacgccggcgccgaacccggaggcgaggcggccgtgcgcggagaccttgcccgtgccggggtccttgaacgcggactgcagcacggcgttggagccgaggcggagcgcgtacttgagcgtgaggtgggtggcgaagggcgtgagccccttccagagcgcgcgcacgccctcggagcgcacgacggtggtgccgcagtgcgcgatgccccggtacgcccccgagcggtctagctgcagccgcgtcttgatgacgtcgatcggctgcaggcagcacgcctccatcacgccgccgaccgaccccgccgccgccttcacgtagggggggaccggtgccctcccgccccgccgatcctccgccggcgaagcggcctgcggtgccggcgacatcggcggcggcggcggggaagaggagggggacgcggcggcggcggccatttcggaagaagcggcggcggccttagcgggtgtggcgcacgaagcgggttttggatttgtttccgtgggttgc

SEQ ID NO: 28674 - DNA, 271 bp, Oryza sativa
  unsure (1)..(271): unsure at all n locations
  Clone ID: PAT_MRT4530_3324C.1
cccacaggttttggttccattgtgttggaatgaggaaccatgagtggtgctgatgatgcggatgtgtggaattgngttgtgcgaccacgtgttgcactcgcatatgcggtctgaccaatgatagacccgcgaccccgagcacctttgggcctgtgtgcttgtgacagtttgatgagcttgttggggtgggcggtgcaagtctttggtgcgggtgccttgggcaaatggannaccatgcatagtctggttttgacttcgtctgtggctctat

SEQ ID NO: 28675 - DNA, 154 bp, Oryza sativa
  Clone ID: PAT_MRT4530_33250C.1
atatgggcaaaaaacgaacataatcctcgacgagaactattaatggagagggtaaaggaaattgtataatattatggtacaagaatcgaactaggaacacggaataaagtggcaaatgcgaagttggaggcaaaaaaaggagcaaaaacactgg

SEQ ID NO: 28676 - DNA, 315 bp, Oryza sativa
  Clone ID: PAT_MRT4530_33251C.1
ggttcattctttgatgggaaaaacaaagggaaccataaagatactaaaaattcaatccaggagttacataatgcataataaaataatacttgaagaagcaactagaaacttaaccctgggtcacaagccataacatagggagtcacaagtaacaaggttttatgacccattaatttcatcaaaactaataatgactaaatgatatcatcgagatctgaatcatccaaaactctatttggaaactcataatagactactaacagaaaaaggaatgtggatataccgagtacatatagggaaacatgacgtgcacct

SEQ ID NO: 28677 - DNA, 458 bp, Oryza sativa
  Clone ID: PAT_MRT4530_33252C.1
aggagagaggaatgccaattttggcgttcctctctccccacgccaaatcgcaaccgccgctctcccgccaacatccagagttcacagcggcggcagacaaagcgggcagaggaggaagaagggaggtagagaggtggcaccagccagatctgggccgggaaggttatcggagaagaagcccgcccgcgaccccaccgcccgtgccgttgctcctccgcccagtgactgtcgcgccgctcctctgcccatgacccaccgcctgcgccgccggtcctccacccacaagctaccgccgtcgcccctccgctcgtgagccggcgccgagatgctgccccttgctaattctacttatcatccatttaaaaatgctactccctccatctacttttgataatcatatttcatcttagcacacagaccaaggataagtgatactacttatcatccatttaaatatg

SEQ ID NO: 28678 - DNA, 452 bp, Oryza sativa
  Clone ID: PAT_MRT4530_33253C.1
gcctgcggtagcagcgctgatcgacctcatggcgcggcggaggggccagtcagcagccaacgggcccaagcccaccaccctggagctggtggaccagcatgatgaggcaccacaggaggacagcgaggatgatggatacggggccggagacgacctagacttagatgacagtgactacggcctgccaggtgccatgtcagcactggctctggccaagaaggccacaggcaggccagggacagcaggcagcggcagccccattgcagcagtgcagcccgccaaggccaagcccgtgcagggccctgttcgtgtgcggtcctggcctgctggtcccctgccctccgagcacagtgatgacaagagtgagaagggtgtggccaagcctaaggacaagatcaacaggcagattggcctggggcccctactggctgagctcaagatcaagggacaga

SEQ ID NO: 28679 - DNA, 485 bp, Oryza sativa
  Clone ID: PAT_MRT4530_33254C.1
cggggtaactgagtttgcattagtttggcaaagctgccatccagaaatcatgatttatactgaggtggggttatcggtcgtctggttgatgtaaagaaaaacaccagcattgatgctttgttgcctcaatggtttacaagctttcaagtgttctatttgatccaggagggatctgcatagaggacatctgatggtgagcataactgattagtccttttcccctgtgttactgttccagtttccttgtagtttgttgtttgcatgtgattaaagttgttaatttgcaagtgggcatgtcttttaccaaatgaaaagggaaagaatgacatagaagatcccttcccattcattaatgacaccatttggagttcgatcaccattagattaaaatggtgccgattattaccgggttaattagaaccaatttattttgctgttagtttctaagcacatcatgaaagttgaatattcattcttataaagct

SEQ ID NO: 28680 - DNA, 224 bp, Oryza sativa
  Clone ID: PAT_MRT4530_33255C.1
tttctaagcgaacaacatgtcaacgatatgcagcccaccagatatgcaaagtctaacaggccatggtacaaccataccgaaaccagattgtgacaattaaccatacacacagataagtatatcctggaagaagacccggtgaagccacccaaacactgaccggaaagacaaggacataaaccaccgcatgccagaggctaaacagcacaactgtctcacacggc

SEQ ID NO: 28681 - DNA, 1764 bp, Oryza sativa
  Clone ID: PAT_MRT4530_33256C.1
atgcagtgcacgcctgcgacgtgctatcctggccggggtggcgatcgcgcaagtcgtggacgcgtcacgagctggcgcgaccccaggctgttcatgtcggggcatgcaggaaggcgcgagatatggacaggcggcaatggatgtatcattcgccgaggtatttggctttatatagggaagaaatgtaaatttattagtattgtgaaggcacacgctgaacagaacaatatgacgaagataatttgtctatgtgctgattgtaagaatgaaagggcctgggaagatgttggtaaagtaaaggaacacttagtaactcgtggatatatggaaaaatacgaaatatggacacgtcatggcgaacaagaagtggccgggcctgaaaaagaagttccgacagaagttgaagacatggtgtacggcgttggttgtggtgaagacaaaattgatctagaggaaatgttacgtcatgcagaacctgaggtgctgattgggtcggctagaggtttaaataactttgaaactttacagaaagcagcgaaggaagttttgtacgaagagtcaaagggctgtgacagtgagttctcaacactacggccagttcttgaacttatgaggttaaaggtgagatatggattgtctgatagtagtttcgacagtctacttgaactttcgaagaacatgcttccgaggcgtaactcattaccatacaacacatatcaagcgaagaaactcatatgtcccctttcacttggtgtagaaaagattcatgcgtgcgttaatcactgcatactgtacagaaaagagtacgcttctttggatgaatgtccaacttgcggtgctagccggtacaaatcaaatagaaatactttcctagaagcgtctaacatattcaagggaactaagagaaaaatcccgcagcgtgtgatgtggtactttccagtcaaagaccgcattaaacggatatgctcaaatctacgagatgcagatctaatgcgctggcatcaagaagggcgcaagaaagatgggatgctccaacacccgacagatgctcatcagtggataaactttgatgctaagtacgaagagtttgctaaagacccacggaatattaggtttgtccttagtactgatggacttaatccttttggagacatgagtagctcacataatacagcggatttatggaaagaggggttgaaagtgtgggacgagtacttgagagaatacttcacagtgaaggccatcatcttcgtgatcattaacgattaccccgccatgttttcagtttcagggcaaattaaaggtaaaacaggatgtgtgatctgcttgaatggaacgtactataggtaccttccgggttccaacgagtttgtgtacatgcagcaccggcggttcctacgcacagatcacaagtaccgcaagatgaagtcagaattcgatggcattgaagagagtgatcctccacaaaaatatacatccggggagaaagtatgtgaaatgacagagaaaatagtttgcgaatttggaaaagggactaagaaaccttcaaagggtacaaagcgcaagaaacctgacaagaccaagaaaccagaagatagaaagaagccaggtgatcaactccctcccccattcaagaaacattcaattttctttaagtacctcccgtactggaaagatctagaggttcggcatgccatagatgtcatgcatctagaaaagaatgtgtttgacaacgtaattgaaacattgttggacataccatag

SEQ ID NO: 28682 - DNA, 765 bp, Oryza sativa
  Clone ID: PAT_MRT4530_33257C.1
atggcccctgcccggataaggggagacgaaggcatcggcaagaacagctgtaataaaacgtggaggaagaagatttcgaagaagcaatctgcgcagcaaggaggtgtaaatcagcctttggttgtacctcaactcttcaagttccacaagtttatgaggctctttactctccaagagatgctctttctgcgtcgaagaaagagtaaatgggagcaacaacaggaggaggtagaattgttctcagaagaggaggaatgctccactacacgcttttggagggatccggatactgagttctgcaacatctgtggagacgacaagggaaaccatctggagctgatgtgcccctacaactatctttccccggctgcgtacttcccatgcagagcgcggctcgctctctggggcaactacacaaccacgctccgttacaagtgctcgcggcacagagaggaagagcaaagcgagcccccgatgcacgacgaagcgaacgcgaggcgtctcgggttcctgcggtgcctcgtccgcgtgaacaacctgtcggagttgtgcccaccggagcagctcgttgagctgttcggccggttcgggccgctgtggatgtggtacgtcccgacgcgaggctccggggggacatgcaagggattcggctgcgtcgtgttccagcgacatcggcacgcggaggaggccgtggaggcgctcaactgctgggaattcggtggccgcaagctgcgagtcgattgggcttacccttgtctaaactga

SEQ ID NO: 28683 - DNA, 343 bp, Oryza sativa
  Clone ID: PAT_MRT4530_33258C.1
gttcttcatgaaaaaaccactatatcatgtcggcattcaacaatgaccagttacatggttccgtcttttgataacaatgggcttaaaaatcccccaaatgaaccccacctatgatacaacatatccggatcttctgagtgactcatcaaatctgcttcacaacagtgaaaagaaaaatagtaccctgatttccctcggaaaactggccttagggtcaagagcaatgctttggagtttgcaaccataaacccgaaaacacgatctgctattatgaactaatgcgtgcaacttgatatgtaaaatacacttctgatttgttagagcctatgaatgctagcgatgt

SEQ ID NO: 28684 - DNA, 3181 bp, Oryza sativa
  unsure (1)..(3181): unsure at all n locations
  Clone ID: PAT_MRT4530_33259C.1
agatcttgcgtgattcttggttaattaaaacaaagttgggcgaggtggaagaagggaattatactaatcgcctctcagatcagcaaggacaggcagcaattaacaggtagcagcaggaggaggtggggttgtgtcagctttgtgctttgtgggtgttgtccctcctggctccttgcctccctctctctctctctctctctcttcatataggagtagtttacttccattgaggtgcttgtgctcctcaccattcttgcctcattgcctacgatagcagcagcatcagcccgcataagtaggttcaacttggagtgtgcttgaagcagcagtttgagtgctgtgctgctgttgctgttactggcttgctgctagccgcatcagggcctgctactatctcgtagtctgttcttgttttccgttgtacgaacgatctcccgggcacgttgcaatattcggtcgccgtctcagccgcagccaccagcagggtgcagcaagttgttctgctccttgtacttgtttgctcctgngtactagttgcttcgcatcttgtgtaggttaatatgggctagtagtggagttgttgcattggttgcagcgttgttgttgtgttagtggtggtggtggtggtttgtgtgtttgggcgtcgatccagagagataagatttaagatcagcgcgtgtgcgtctgttctttgcctgtttcaagatgaaattcatgaagcttggatcgaacccggatacttttcacgatgatggctatgaagcagaagcggaggccggagagaactggggagaggagacgaagcggctgcggcatcaggacttcggcgatacgagacgacgcagactcttggacgagaaaccgaccgggttcaggccgggtttccgtcagttacccggcccaagcccgaagaggacgaggacgagcgcacgcacgcacggacacggaggctgcagctggaaagacggacaggcatcgagagccacgcaccggcagcacgtcgccggccatccgtcctactaccaccagcagcaacagcagcagcagaggcaggctggaccgcggcgagagagctttctattcccctctcgaaatcggcagcgaaagacgacgtcgtcctcgtcccacccgcgcccgcataaacgctacagtggtggtggcaccctgcaccgcccaacgaacgccaaaagcaggctgctcatttcaaaggcggaggaggaggaggagaggagacaggaaagccttccatccaaccatcgctgcccccttgccccttcttggcctcttgcgcctggtcgactcgtcctacctcactgcagcaacactactggcattgcgagggtggcgtggtgagctttgtgtgggcactcgaggaggcacgctggcccggcttcctgactcctgggtgctgcggccattggaggaggacggagtacaccaccctgcaaggccactgagcattgtggcaactgaattagtgagcgatgtcactgttcgcatagggactacaaagttttaccttcacaagaagatgatcccaactactggtgatgaaaacattgagattcacatccatgatattcctggtggcgccaaggcttttgagatctgtgccaagttttgttatggtatgattgtcacgctcaatgcctacaatgtcattgcagcccgctgcgccgcagagtacttggagatgcatgaaactgtcgacaagggtaatctcatctacaagattgaggtcttcctcagctcaagcattttccggagttggaaggactctatcattgttcttggtactacaaaggctcacttgccttggtcagaggatcttaagctggttagccactgcatcgactccattgcttcgaaagcctccactgacacctccaaggttgagtggtcatattcatacaatcgcaagaagctcccaactgagaatggccttgatttggaatggaatggagtcaagaagcagcagtttgtgccgcatgattggtgggtcgaggatctcgcagatctcgacattgattcatacaagcaagtcataacagcaatcaagaccaagggtatggtgcccaaggatgtgattggggaggcaatcaaggcttacacatacaagaagctcccttccttaagtaaggtttcaatggtccatggcgacgcaaaagttcgggccatgctagttaccatcacatgcttgttgccatcagagaaaggatcagtttcatgcagcttcctcttaaagctactgaaagcaacaaatttgctaaaatgtggagagctctgcaggaaagagcttatgaagcgtattggacggcaactagatgaagcgtccgtgtcggatcttctgattcctacagtggatggggagaccacagtttatgacattgacatgatactcagtatagtggaagaatttgtcaggcaagacagtaagaatgctcagaaacataatggtggtgaagtggacagtcatgtccaagcacctagtgcatccatgatcaaagtggctaaagtggttgatgggtatcttgctgaggttgcaaaagatccaaatacacccattttgaagttcattcatctagccgagacaatgtcgataaattcaaggccagttcatgatgggctataccgcgccatcgacatgtatctgaaggagcacccaagcttgggaaagaatgagaagaagaagctgtgcagcctcatggactgcaagaaactctcaccggacgcgtgtgctcacgcggtgcagaacgagcggctgccactgaggaccgtggtgcaggtgctgtaccacgagcagacgagggcttctgcggcggtcaccatccgagccgacagcatctgcgtcggctcgtacgagagctcgaggtcaggcgccaccaccaacacggaggacgagtgggacggcgtcatggtcgtggaagacctcagcctgtccaccaagaccaccaccaagctagacggcgcagccaatagccattgcagcaacggcaaggcgaagaaaggcggcgcgtcgacgccgaagaaggcggctcaccggaggacgacgacggtgccaaccggcaaagggcagtccggtgagcgcagcagctcggactcgtcggacagtgcgatcttgcagaagctggagcttcccaagaggaccccctccaggagcacgaagccggctgctgtgtag

SEQ ID NO: 28685 - DNA, 275 bp, Oryza sativa
  Clone ID: PAT_MRT4530_3325C.1
accaagaaatcaaatatattaaagtggttccatagatcatacatcttgtaacatatatatgtgcgtagtgttatacattattgatgcgtagtgttatacagtatacaatatttagctaacaacaatcaacaaaacatttttactagcaatcactaattttgagccttatcaagcatcaataatttatttgtgggtggtctctcaagataaactttttatccaatctaaggtcgtcttatctacttttatagccttaacaagaacattatcctagt

SEQ ID NO: 28686 - DNA, 351 bp, Oryza sativa
  unsure (1)..(351): unsure at all n locations
  Clone ID: PAT_MRT4530_33260C.1
acaaaccagacaacacaacaacacaacacacaacacacacaacaacaacaacacaacacaaacacacaacacacacaaacacaacacacacaacacaacaccacaacacccccggctcctagtcgccctagttccccgggcgtccccgtgcgaggccccacccgcatacgccccagccatctggccagtcctcgggagtccgaaggatgttttttgatagtcgcactggaccctccgatgtgagttcacgccacgatccattcatgatgtctgtaccattcgtgtcctataaagcacaacctcatgggcattcttttctcccggaagttcggcnttcgtaacgtatagcct

SEQ ID NO: 28687 - DNA, 999 bp, Oryza sativa
  Clone ID: PAT_MRT4530_33261C.1
atggctgagcagaacaagaggagctcgtcggcggcggagaacggccacgccggcggcaagaaggcgagggccaacgtcgaggtgaagcaggaggaagaggaggcggaggaaggagagatgagccaagaagaagagagcgcaaagacggggcctctggtggtggccaccgccatggacgacccgcagatcgacgtcaggatcgccgtcggcttgctccactgccatgcctgcctcctccccctcaagcctcccgtcttcaagtgcgaggcggcgcacgtggtgtgctccggctgccgcggcaaccacggccagctctgccgccgcgccgccgcgtacgcccactgcgccgagctggacgccatcgtcggcgccgccaaggtggcgtgcgcccacgcgccgtacggctgcgacagctacgtcgtgtacggcgcggccgccgagcaccagcgcgcgtgcccgtgcgcgccctgctcctgcccggaccccggctgcggcttccgcggctcgccggcggcgctcctcggccacttcgccaccgaccacccctggtccgtcacgcagatcagctacgcgaagccgtgcaggctcgccgtgccgctgccccggcggtgccacgtcctcgtcggggaggacgaccgcgccatgttcctggtggtgtccccgtccccgtgcggcgtcggcgtcggcgcggcggtgtgcgtggcgtgcgtccgggcgaacggcgacgacgcggcggcggcgcagtacaagtgcaagctgtgggtggaggtgccgaccaacagcgacaacatggtgatgatgacgtccaaggtgaggagcagcgacctctccggcgggttcccggcggcggagcaggggatgttcttggtggtgccgccggagctgcttcacgaggtgtccggcgagacgccgatcctcagcatccgcatcgatcgagctgctcccgccattgccaagcccaccactccacgagccaggtccctgaggagattgcagtga

SEQ ID NO: 28688 - DNA, 390 bp, Oryza sativa
  Clone ID: PAT_MRT4530_33262C.1
aaaattgaaagaaacattgatgtagattagttttacaccattggtttatctggttacagacaaaggagcgtgattgttttttagtatcctgacctagtattccgcaccaattgatttcgaggtcccacggccagtggtaagggtactaggagaacctgtgcagtctcgggatagaacctgatctatgggggatgttcagggcgcaaaaagcctggaggttgagcttgactctgtccaaagtacactcttaggaaactggtgaagcacgtaggtgcatggagaagtccaacatacactgctcatggcttgctgtagatactgtcaaccaagtattctaaggtggaggaactgctgctgctgtatgactccgcagttagttagcggacgcag

SEQ ID NO: 28689 - DNA, 2207 bp, Oryza sativa
  Clone ID: PAT_MRT4530_33263C.1
ttcttaattagctagctagccgctcaagtcatatatatatatatatatatgctagctagagggacgaccaaggagctagctagctaggagagggcgagagatgagcagcagctagaagcagctgagcgtccgatctatctatctatctatctatctatctatctatggagagctcactcatgtatgcatatatacttggatctcctctcctctccggtcatctcatatatacgtatctatatcgatatagatcgcctgccggtttatagttagatatgcatgtatcgatcgggatactattactaatatataggtagttaaaccaaattaagatcgatcaaatacaatatatcgatcgatcatgaggggaagtagcaataatcacaagtcgaagtcggaggaggaaggcgtggccttggtgcaggtagcggaagagggcgagacgacgacgaagcagcagcagcagccggactcaaataaggcggcggcggaggaggaggaggaggaggccggctacggctacagcaattggtggtcaacgtgggtgtcgtcggcggtgaagaagcgagtgcgggcgccgggtcgcgtgggtatcgtcgtcgtcgtcggcggattcgtcctgctggccttgctcgccgccgtcgccgccaccaccaccaccacctggccgcaactcgtcgatttcaccggcgccgtttcgtcgttcctgcagtttggcaatggtgacggtgcacggcgccacaggcctcaccgcactagtctcgtttccattccaattccattcacctgcggcagcggcaatgacacgggcacatgcccccgctatgcggcgtcagctccggcgccggcgcctgcatcgatgtcgccgccgccaccacagacgtcgacggtggattactgtccgtcctacttccggcacatagagctggacctggcggcgtggttggcgtcaggcatcagtccggaggcggtggagcgggggcggcggcaggcgcacttccggctgctggtggtggggggccgcgcctacgtggagacgtaccggcgtgcgttccagacgcgcgacgtgttcacgcagtggggcatcctccagctgctccgccgctacccggggcgcgtccccgacctggacctcatgttcaactgcgacgacatgcccgaggtgcgcgccgccgcctaccccgaccgggccgccgcgccgcccctcttccgctactgcaaggacccctccaccctggacgtgctcttcccggactggtccttctggggatggccggaggtgaacatccggccatgggcgccgctgctcgcggagatggcggaggagaaggcgcggctgccgtggagccgaagggagccctacgcctactggaagggcaacccggacgtgtcgccgctgcggcaggagctcctccgctgcaaccactccctcccccccgacgacacggtcaggttgtaccgccaggactggggcttcgccaaccgcaacgccttccgcgactccaacctggcccgccagtgtcgccaccgctacaagctgtacgtgcagggccgctcctggtccgtcagccgcaagtacatcctcgcctgcgactcgcccgtcctcgccgtcgccacgccctaccaggacttcttctcccgaggcctcgccgccggcaagcactactggcccatcgacccctcccgctccaagctgtgccgcgacatccgcttcgccgtgcgatggggcaacgcccacccggcgcaggcgcagcgcatgggcctcgccggcagcgccttcgccacggacgacatggccatggactacgtctacgactacatgctgcacgtgctcacgcgctacgcctcgctgctccgctacaagcccaccgtgccggaccgcgccgtggagctgtgcccggagtccatggcgtgcccccgccgaggccgcgaccgcgacttcatgatgcagtccagggagcagtacgtggccgactaccagccctgcaccattccaccgccgccgctcaccgccgatgacgccaccaacatggcccacagggatgccgaggtgctcagcaacatcgacaagatgatcataacggaggacaagcacaattaaccaataataacatatttcttaattatgtgcttgctgctgtaattgtttccttcatttcataaataaatatgatatattaccaaaaaaaaaaaaagtactcagggcg

SEQ ID NO: 28690 - DNA, 159 bp, Oryza sativa
  Clone ID: PAT_MRT4530_33264C.1
atgggcgacccgcggaggttgtgtggcagcgacgacgtccctcacgtcatcggcggccggactgccgacgccgacgcaaccatggacatggacacggacacctcacaattcctctttggcggcgcgacggccgaggtggtcaccggagaggaaggcgtg

SEQ ID NO: 28691 - DNA, 3510 bp, Oryza sativa
  Clone ID: PAT_MRT4530_33265C.1
tttgccgttgatttcctgcgctgaagcagttcatcgtccagtttcttgggcaatcgtttctagggaagcaaatgagatgtctctgctgctagacgcgagctctgttcctcgtttttaccattctcagaacttgacgattgagcatggcagattagggtcgtagagaaaacggtgttcgtgtcagcttcttgaggtcagagagccaagaagccatttgggtttttcttggttcatggaggaaatgggctctgctcagctttctgccctagctgtgtgtgtctgcattttcggatgcctagccatggctgatggccagaacgtcactggaggtgatggttcaaggccagctgagctgcgcatcggtgcattattcacatttgattcggttatcggtagagcagtgatgccggctattgagcttgctgttgcagatgtcaatgccgatccaggtgttcttcctgggacaaagttgagcgttataacgcaggataccaattgcagtggctttcttggaaccatggaagcgttggagcttctggctaaggatgtagtcgctgtattaggtccacaatcttcaagcattgctcatgtcatttctcatgctgttaatgagttccatgttccgcttgtctccttcgcggcatctgatcctaccctttcttcccttgaatatccttactttgtgagggctacaacaagtgattatttccaaatgagtgctatagctagcatcatcaatcaatatcgatggagagaagtcattgccatctatgttgatgacgactatggtagaggtggcatcacagcattaggtgatgctctagcaaaaaagaagtctaagatagcctacaaagccaaattgccacctggtgcttcaaggactaccatcgaggatatgttgatgcatgtgaatgaaatgcagtctcgcgtctatgttgtccatgtaaaccctgactctggcctggcagtttttgctgctgcaaaatctttgggaatgatgagtactggctatgcatggatagcaacagactggctctctgcagtgttagattcatctgatcatattagcactgacagaatggaacttactcagggggttattatgcttcggcaacatgtttctgattctggcattcagcattcgttggtttcaagatggaacaatctgaccaggaatggaggtcattcaagctttagttcttacagtatgcgtacttatgattctgtatggttagttgctcgtgctgttgaagattttttgagtgaggggaatgcggtatctttttctgctgatccaaatttgcaagatataaaaggaagtaaccttcagttagattccctcagaagtttgaacaatggagaaagattactggagaaagtttggcacacaaatttcacaggggtttctggcctggtacaatttactgcagaacgagatctgatccacccagcttttgatatcttgaatattggtggtacaggtttcagaaccattgggtattggtcaaacatttctgatctttcagttgttgctccagaaaagttgcattcagaaccactggactcttcaacaaacaatatagagcttcatggtgttatctggcctggtcagacgtctgagaaacctcgtggctgggtgtttccatatcacgggaagccgttgaggattggggttcctctccgcacgagctacaaagagtttgtgatgccagataaaggacctgatggagtaaaggggttttcagttgatgttttcaaagctgcagtaggcttgttgccctaccccgtttcattcgattttattttatttggagatggtttgaagaatcccagctacaatgaccttattgagaaggtttctgacaaccactttgacgctgcaataggggacatcgctattgtgacaaatagaacaagacttgttgattttacccagccatatacagaatctggacttattattttagctccagcaagggagattgaatcaaatgcctgggcttttctaaaaccattcaccttccaaatgtggtctgttctaggtgttctcttcctttttgtgggtgcagttgtttgggtacttgagcatcgtactaatactgagtttcgtggacccccaaggcaacaaattatgacagtatgctggtttagtttttctaccatgtttttcgcgcacagagagaacacagttagtgcacttggtagatttgtgctgcttgtctggctgtttgttgtgctcattataaactcaagctacacggcaagcttgacatcacttcttacagttcaggaactcacatcagggatacaggggctcgatagcttgatatcgagtccaagttcaattgggtatcaagttggatcttttgcgagaagctaccttgtacaggagctcaatattgccgagacccgattggtaccactaaacagcccgtcagattatgcaagagcgctagagttaggatcaggaaatggtggtgttgatgcaataattgatgaacttccatacgtggagatcttcttgtcaaaatactgcaaattcaagacggttggccaggttttcacgaaaagtgggtggggatttgccttcccaagagactcccctcttgctgaggacttgtcaacagcaatcttgacattgtcggagaatggcaatcttcaaaggatccacgatgaatggttaactgggacagaatgcagtgcagatgacaatgaggttggctcaaaccgtttgagcctttcaagcttctggggcctctacctcatctgtggcttttcatgtgtccttgctctcttaattttcttcttgcgaatatgctgtcaatacagtaagtacaataaccaggttggacttgactctcctgaaccagagattgtaactcgatcggcaaggttaactactatcaagtcaataatctcatttgtggataagagggaggaggaggtgaagaatgctctcaagaaaaagcctaatgacagtctgcagccaaggacaggaagcacaggagaacaatctacattaccaccatgacacatttatcactgcctgactgacatattcaacaaaatgcataattttgcactgggcttgctggcagcttcagaaacccggtgatgatttgttctggttctgaaggtcaaacctgtaggagctcctcagagtattttctctgaactctgaagcatgacaggaacattctgaattgtgcccaacagtaacatgtctgaatctccttccaacagctacttccaggagaagtagagcattggttgcaagttcaatttcaaactagttgagaagtttgaacctctgtcaagttgagaggccccttttttcgttcggaagcaacctctgacaagttcttgtagctacaatcttaagcatcttccaaataagttgagaagtttgagtctttgtttggtgtggaaacaaaaaaaaaaaaaaaaaaaaaaaaactcgagactagttctctctctctctctccctcgtgccgattcctgcagcccggg

SEQ ID NO: 28692 - DNA, 264 bp, Oryza sativa
  Clone ID: PAT_MRT4530_33266C.1
atggcgacacccggctgcagcgcgcttagttggagctggagccttggaggatcggaaaggaagatgcgtgctaggctcccggtcatcgttgaagagaaatgctataccacgggataccgtcccgagtgcgtgggacgatatcgcctcctcccgacggggcgagatggcaagagaatgagtatgttcacggcgagtaggtggcaagacgacatgatgatggcttcatggtcgcggtcgccgcctgctcatcgctactgcctatga

SEQ ID NO: 28693 - DNA, 334 bp, Oryza sativa
  Clone ID: PAT_MRT4530_33267C.1
ttttcttaaagaaaccaattaagtacgccctcgggtactctgctgactgagcgggttgtattggaccgcttaccgttcaccttcatcaacctcactcaagtcaagtatctacatgaagattctttcacccccgcgcatctggcacctccgagagccccgcacgttcgggctcgtctcacgcagaaatcctgaacgggacctcttctatatccttcttcttaccagctccgatccgtttattgccgacaactagtgctacgatctgtggtacgcagtctacaagatttgattgccgatcaacgtctacccaacattgacctggctgacactggcc

SEQ ID NO: 28694 - DNA, 621 bp, Oryza sativa
  Clone ID: PAT_MRT4530_33268C.1
atggcggactgttacaatggtatagtgaacccacatgactcaacagaggttgactccaatgcttgcatgttgtataccacgaggtccttcgaccggacctgccgaaaccgaaacgctagcgaggattcaagccgaagatatgcggcgaagaccgcggggacgccgacgcggctacgatccatacccaagaaggctgcatgggcgaaagccatatggcaaaagccatgtcgcgaagcaaacggacttcgtcggagatggacctcgccagaagaaggctacatgggcgaaggctgtatgacaaaggccatatcgcgaggtagcacaacgagtgaggttggcccacgtcaacttgccattgcacctggagtcggtggatgccatcaccaagaaattgtctgtcttggggttcttcatgaggacctacctaccctgatcgcactggcgaccagcgtgtcgctgtcattgctcaccgtgtggatgttgttcctagcccacaaccttgccaagtctgtcgctggcgtcgaggcgaccatcccgaggttcctcgacctcacgctgatcaagtcgtttaaggccgtggtagacaagctcggggagaacggcatcatgcactcatggtga

SEQ ID NO: 28695 - DNA, 777 bp, Oryza sativa
  Clone ID: PAT_MRT4530_33269C.1
atgcagcagcagctggatcagcagcagcagcagcagcagcatcagtacgaccacttcttctccggccacggccagttcaactccgagacgctggaggccgtgctctgcaggccgccgcgcggcgccgccgcggatcctgctgttccggcggcggcggcggcggcggctgttctgacggcggcaagaaacggtggcggcggccatggcagggcgaggaagcggccgttcaggacggaccggcacagcaagatccggacggcgcagggggtgcgcgaccgccggatgcggctgtcgctcgacgtcgcgcgcgacttcttcgcgctgcaggaccgcctcggcttcgacaaggccagcaagacggtggactggctgctcacccagtccaagccggccatcgaccgcctcgccgccgacccctcctcctcctcccaccgcgccgccggcgacacccgcatgtcgtcggccgagcgcggcggcgatcaccacatggtcgcggtcggcgccgccggatcagggaaaggagacgcggacaaggcgaggggccccagaggtggtagatcggcgcccatggagctcggctgcgagctcggccgcctcgtgccggcgccggtgctcggcgagtactactacgagctcgccgagatgatgagcaacaacaccggaggagaaggagacgacgacggcgactacgacgacgacggcgatttcttggacgactctgggtttctctgccactatcgatcgaagaagaaatttagcataaaggacatttcttaa

SEQ ID NO: 28696 - DNA, 186 bp, Oryza sativa
  Clone ID: PAT_MRT4530_3326C.1
atgggcagcaacaatgttctcggcgctttctctggtgatgggatacctgagtcttgcaatgataaaatggttaataatatcactaaagatgttggtgatttctatgatttgtttgaaggacctatggttacggtttctaggtcactctatgctcaggctgttcctatggttaagtttactagttaa

SEQ ID NO: 28697 - DNA, 1011 bp, Oryza sativa
  Clone ID: PAT_MRT4530_33270C.1
gatagagtggggagagagtcaagagaggggcgtgtagcacacgtggaagctgacgataaatttttttcccccaattccgcctctttgctttgcgtgcgaatttgatctcgaagcttccgccaagcagcgagctctcccgatccgcgggggcgtcgaatcctatggcggccaacgccggcaacaagatccgcaacgccaaactggttcttcttggagatgtgggcgcaggaaaatctagcttggtgcttcgttttgtaaaaggacagtttgttgagtttcaggaatcgacaattggagcagcatttttctcacagaccttagcagttaatgacgaaaccgtgaagtttgaaatctgggatacagctgggcaggagagatatcacagcttggctcccatgtactataggggtgcggctgctgccatagttgtctatgacatcacgaatccggcctctttcacccgtgcaaagaaatgggttcaagaacttcaagctcaaggtaactcgagtacagtggtggctcttgctggcaacaaagccgatttgctagagactaggcaggtgcaaatagaggaagcaaagacatatgcacaggagaatgggcttttcttcatggaaacatctgcgaaaactgcaacaaatgtgaatgacatattttatgaaattgcaaaaagattgcttcaaggacagccagctcagaacccgcaggccggcatggtcctctcccagagaccaaatgagagactggtcagctctgcttcatgctgctcttgaagcatagtttcggccgagtattgtcattataaaatctaggagaggaaaattcaacaaatatcccagaagttcttgtgtggccaccttcatggctatatactccagccttcacgcttatttcttttcattccttgtgtcatgtaaatgtcaatacaagaatgccacatcagaggcttgaaattggtaccgaaatgttaattgtgctctatcattgttactgttaaaaaaaaaaaaaaaa

SEQ ID NO: 28698 - DNA, 554 bp, Oryza sativa
  Clone ID: PAT_MRT4530_33271C.1
tgacagcgcgagggtcaacgataccgaaggaactctaagaagtagataaccaagtcaacaggcttagttttctgcttctctcagtcatcttgaagagcactgctgcgagatgagttgatgttcttcctatccaacaaattccattggccattgaagaatgaagaatgacgtccacagttccaagccaagagagagagggacgacgacaaatctctttcttgattttgtaggtgtagtctttgttcctcctgttgtcgctctggagagtggagacgctctttgagaggtgatttttcttcactcatggagtgggtactggcgtactgcaacaagatggatacacctgtcgaccctgttgcaagcattactgcagcacgaaatttgcctcttggagtgtgaaatcacttctatcgtttacccctacagcttcggtattcaaatgttcgatgtgatggagtataaaattttcgtgtgggaactaaacagggccttacattgtaatatattttctctcgtgactgatctctgaatttgcttatgaccagtgcaagatg

SEQ ID NO: 28699 - DNA, 267 bp, Oryza sativa
  Clone ID: PAT_MRT4530_33272C.1
atggttgcactctgggtggccgatacagagccgccagagccgaagtcggtcagaccgagctggtggcgagctagtgtggcacttgatcatctccgagccgcgtcattgcttgttactcttgaaggttgctgcctcgtagacagcttgtggaggagttgcccgtcctctccgtgggccgactcccgccttgcccaccccttgacaaagggggcgtgtggtggcttcgtggttaagcggtggagttgggctcgcctcaacggggagtag

SEQ ID NO: 28700 - DNA, 468 bp, Oryza sativa
  Clone ID: PAT_MRT4530_33273C.1
atgaggcaaagatattctgctgatctactccagagtgaaaaaacaaaattatctaggaataacaaggtgatcttctctaagaattcacatctacaggaagttttggcacctcggatgttagcccttcaccaaatacaagaggttaggctaaaaaccattgtgacgagacatgccccatgtgatgctgaggtcaacctcaatagattagcaaaagctatgggatttagaaaaaggattgccaatttggcatgtgttgtctacggcagagaggtgagcagtctctctgccaagaaggaattcagacatttcttctcatggtccattgcttcgacattaatctctgcaatgttgtacagatggacaaggagcgaaaggacaaatgtatcatctgccgtgcttgatgctcccttgcgtcttcggttgagggagcaattagcaaataatacaataccttcagatagtgattaa

SEQ ID NO: 28701 - DNA, 225 bp, Oryza sativa
  Clone ID: PAT_MRT4530_33274C.1
atgctagtctccactacaagcaccaccgacgaggctgaatggcagggcgggcgaagtctatatgaagacgtcaccaacaccggcgcatggaccgacgaggtcgtggaccgttgccgacgcccacacacatctacaccaccatcactgtcatgcatgggagaacgtgaagcgaagatcgacgacgacgaccagcgcagcttaatcggaggtttctcacgagtttaa

SEQ ID NO: 28702 - DNA, 363 bp, Oryza sativa
  Clone ID: PAT_MRT4530_33275C.1
tttgggcccttgaaccccctgtgtttttaattttttttttttttttcattttttttgaattctgttaaaatataccccaatatggaaaccaagcaatacaaacgggcaaatctccggaatttttttccccatcttataccaaccaacccaggcttatgataaacggagtctaagcaaggcacctaacactctctcacttgattttaataaaagctcttaaagaaaggccccctggcccaaaactaaattttggatgacaacttccacaggaacaattgaaaacaaccgccccaaaaaaaaaaaaattaatctcgacgaacagtctcaggggtgaccaaaaacaagcgtagaacacctgcagaa

SEQ ID NO: 28703 - DNA, 1668 bp, Oryza sativa
  Clone ID: PAT_MRT4530_33276C.1
cgggctgcaggaattcggcacgagggccggatctctcctcactcctccgccacctcaaagctctccgttcaaaccgtcccgcgccgccgcggccagctgcaacccgcgcgcgcggactcctgcctctcggtcgaaggagatggctgaggttgacaccttcctcttcacttccgagtccgtcaatgagggacaccctgacaagctctgcgaccagatatccgatgcggtgcttgatgcgtgccttgctgaagaccctgaaagcaaggttgcctgtgagacctgcaccaagaccaacatggtcatggtgtttggtgagatcactaccaaggccaatgttgactatgagaagatcgtcagggatacttgccgcggcatcggctttgtgtccaatgatgtaggccttgatgctgaacactgtaaggtgcttgtcaacattgagcagcaatcccctgacatcgcacagggtgtccatgggcacttcaccaagcgcccagaggagattggtgccggtgaccaggggcatatgtttggatatgcaaccgatgagacccctgaattgatgccactcagccatgttcttgctaccaagctcggtgcccgtctcaccgaggtccgcaagaacggggcatgcgcatggctgaggcctgatgggaagacgcaagtgacagtggagtaccagaacgacaatggcgccatggtccctctccgcgtccacaccgtgctcatctccacccagcacgatgagaccgtgaccaacgacgaaatcgcggctgacctgaaggagcatgtcatcaagcctgtcatcccagagcagtaccttgatgagaagaccatcttccatctcaacccgtcaggtcgcttcgtcatcggtggacctcatggagatgcaggtctcaccgggcgcaagatcatcatcgacacctacggtggctggggagcacacggtggtggcgcgttctccggcaaggacccgaccaaggttgaccggagcggagcctacattgcaaggcaggcggccaagagcatcgttgccaatggcctcgctcgccgctgcattgtccaggtgtcgtatgccattggcgtgccggaaccgctctcggtgttcgtcgacacttacggcacgggcaagatccctgacagggagatcctcaggattgtcacggagaacttcgatttcaggccaggcatgatcatcatcaacctcgacctgatgaggggtggcaatggccgctacctgaagacggcggcttacgggcacttcgggagggaggaccctgacttcacctgggaggtggtgaaacccctcaagtgggaggagccttctgcataaacaaacacttgcagcctctaaaactgttttggaaatgtttccattgattttggagatgtttttatctacacttcagcctctgaacttaatcagaccgtcactacatgtatctattttcactgccttagtagcaggcaggtatgtttaaggtcttatgcttagtgttcttgtgttaaagaagcttgtgtggtgagtggtgaggggatgatgaaactataaagaaactgaagcctctcattggtccttgtcttgtgcgcagtgcacttctgtcccaaatggggtgtcttgcttgatctctgaataattaagcaagctctcttgcaaaaaaaaaaaaaaaa

SEQ ID NO: 28704 - DNA, 580 bp, Oryza sativa
  Clone ID: PAT_MRT4530_33277C.1
ggggaaacaaattggaaaaaacaaatccttttaaaagcaacccttttggatcctgggggaggaaaaaaaaccccgggaacaaactcaaaaacccttcccccgaaaaaaataagttaaacctggcccccccccccaaaaggggggggccaggccccaaatttttcctacggacccaactttttaaaaaaaaaaaaaaggggggctttttgggaaaacccccaaaacccgggaaacggggaaaatttggccggggggcaaactaattttggccctttccagggggagcatttttcctgggccccccggggggtttggccaggaagatcgggccaccccggagaacagtacaggcagcttccggaaagttttttaaagggaaaaacttggaaacaaaagggccccattttttcaggatggaaaaatccttgaaaccccctttttcaaagaaaaaaccaattgtttgttttccccccagcttgttcagcataagagggaaaattttttctccataacactaaccccagttttttcagccgggggttttggggaaccttttaaaaactttaagcaaatttgggaa

SEQ ID NO: 28705 - DNA, 273 bp, Oryza sativa
  Clone ID: PAT_MRT4530_33278C.1
ggaggccgcgggggccgccccgggaatcccggcccggccccgggggggaccccatctttccctttgggggggggttttaaagcggggcgcatcctgggaaaaaggagtccccggagaaaaagggttccccgccaacaatcccacaaaacaaacaaaccgaaagtttaaggggtcaggccgggggggcctaaggaggggcctaactcaaattaatggggggggccccacgaccccctttccaggaaagaaaacccggcccgcctgtcactttaa

SEQ ID NO: 28706 - DNA, 250 bp, Oryza sativa
  unsure (1)..(250): unsure at all n locations
  Clone ID: PAT_MRT4530_33279C.1
agctagaacactcacactaccatgagatatatgattcgggtggagagccgtacatcaaaacatgaacactcacacaagccggcaacccatgcattccaatacatgcatgcagganacaattgccacaacacacccantcagtctgtatttcataacatgcatatatgcttataaactgcccacaagggattaacagcctatacatgcatacttcacaaaaaaaaaaaggaggaacaaggagagaacctct

SEQ ID NO: 28707 - DNA, 1629 bp, Oryza sativa
  Clone ID: PAT_MRT4530_3327C.1
atggccacccgcccgccaggcactgaagtcacttgggcggagttctgtcgtagcttcaggaaagcgcaggtgccagacggggtcgtggcacaaaagaagagggaattccgggcactccaccagggcaacaggacagagaaattcctagcaggtctggatgatgagctaaccaaccagttgatatctggagattacgccgactttgagaggttggttgacaaggcaatccgtcaggaggatcagcgcaacaaaatggaaaggaagaggaaggcggcgcagttccggtccaaccaagggagccaccagcgaccgcgcttcactcccggacagcagggtagacctaccaccctgatcgtccgccagcaccgccctttcaatgccagcaacttccatcagggcgccagtggctgtcagaaccaccatggcggtcagcccaaccgcagtgcagctccgtgcccaccaatggcactagcacagtcagctacgtccgcgcaagctaagaaggagactgggacaaagccagggtcctgcttcaactgtggcgagcttggccacttcgctgacaaatgcccgaagcccaggcgtgccgggccaaggatggcggccaacgaactagtagaggtcaagaaacaggttgatgagcagctgcagaaaggagctgaaaaagaacatgagtcggaaaggctcgggatttccttgaggatgagcatggcacaaactggatggggggaaagattgtgtgtacctgacgacaaggaactgaaggatatgatactcaccgaggctcatcagacacagtgttccattcacccaggcagcaccaagatgtaccaagacctcaaagaaaagttttggtgggccagcatgaggagagaaatagctgaattcgtcgcactctgcgatgtttgccagcgagtgaaggtagagcatcaaaggccagcaggtttactccaacctcttcaaatcccggaatggaaatgggaggaaattggaatggattgtataacaggactgccccggacatcatcaggtcacgattcaatctgggtagtcgtggatcgactcaccaaggaagaattggggacccgtttaaatttcagcacggcctatcacccgcaaactgatggtcagaccgactaccaagccagtctacagatggtaccgtttgaagctttatactgccggaagtgccgcacaccactcttctgggatcagacaggcgagcgtcaactgttcgggacagaggtattagcggaagcagaagagaaagtcagaaccatcagggaaaggttgaggattgccctgtctcgacagaagagctacacggataaccgccgaagggagctcacttttgaagcaggggattacgtgtatcttcgtgtcactccgctccggggagtacaccgttttcagacgaaaggcaagttggcaccacgcttcgtgggactatacaaaatcttggaacgaaggggggaagttgcttatcagctagaacttccatccaatatgattggcatccacgacgtgttccacgtgtcccaattaaagaagtgcttaagagtacccgaagaacaagctgattcggagcatattgatatccaggaggacctgacatatgtggagaagccg

SEQ ID NO: 28708 - DNA, 295 bp, Oryza sativa
  Clone ID: PAT_MRT4530_33280C.1
cccgtcacctttcgagatctcgatccatcgcctccggtgggggctagaatgaaggtcatcgcacctcttcaggcatagctatagactgtgaacactgagggcgcagcaatgagaacatgcagcggtcctcaaacatccagatggtaaaataacctactgctgattctgtgttgcttactccctccgagccatataaaatctgcctcggaccggatgtgacacatactacgactacgactctggacatatctctatgcacattcactatactagaagaccttgcatccggtactag

SEQ ID NO: 28709 - DNA, 660 bp, Oryza sativa
  Clone ID: PAT_MRT4530_33281C.1
atggtggtgctggaactggtggaggtaccgcgtccacggcgctgcgacaggagaagacacgcatcttggactgcatccgatcgaacgtcagcccctgctcaacataactcaagtgcaaagcagcgtctaacctggataccacgagttaatgttggcactgacagctcgtgcagcgtcggcctattagagacatacgtaagcatgttagtaccaatcggacaaaagaaaaagaaagaattgagcaggagttcgacttaccccgaggaagtagtttcggtcacagtgcgtggggtactcatctgtgacagcggcaacatgcggctatggcacggtaggagtaaaggtctattaatagtgaaatttggtaagccacaaaatcatcatcgaactggagtcagtatcggcttcagaatcctgaatcggctggtgggaattatcaagtcaccaatagattatgctcaaaggaaaaagggtgttcctgttcaaattcggaccgttctttctaaaagagattgcatattttcccagggagaatttaacagattgcagagattgttaatcattaatcatcatggttatgtgctgggatataaaccatttccattatctaaaagaatcattgtggttaggtacagtcagtggaggatcttggtaatctga

SEQ ID NO: 28710 - DNA, 471 bp, Oryza sativa
  Clone ID: PAT_MRT4530_33282C.1
atgcccattcaccggtatgagaagagacaccctaatatcaatgcgaacattaatttccccatgctttcgtgtgagggaacgagatcatgtgatcatcgggcagtgcaggccactgtccaagattgcgaggctcaatgttttgaaggtcatcctaagctcctagtggggtcaaagaagggtgcaggaaagaaggcattcactgttgcccgaagaaaggtttcatcggggtttcagtcggatcaaactgactggcacgcccgcacttcatcaagatttggacctgcactggagctaagcagatctctcaggccgatgtgttcgatttttttcgtcaacaactaccccatggaaacacgtaaccaagccatgaaaccatccaaggattggaaccccatggaaacacgtaagcaagctataaaatcaacgaaaaggacgttcatgtttccggatatccgatgcaataggatttag

SEQ ID NO: 28711 - DNA, 561 bp, Oryza sativa
  Clone ID: PAT_MRT4530_33283C.1
atggggcttgaagaacgagtgagcgggcgagcagtcggcgagaagaaggggacgaactcgcccccttatccttttatccccgcctcgcccgcgctcgtctcctcgtttcacgcccccgcgcctggccgcgcggcggcaaccgtcaggattccccgtcgggcccacaacctcggcacgggaagacgtgaggcgccacgtcagactgccctcacaaggccgatgtccgacgtggtgccgggggctactgtcggagatatgggcccggggaagcggctggggggcctcggggtgccacgtcatgcccctcgagctctcgcgttgccttgccccgaggccctcccccagctgctatgtggcggggggagcgaggggaggaagcccaggctgaacagccatcaatgcgcggcaccccaactatccctcaccgcgtttaatgcgtgcccccacgtcgcctctgtatccggcgaagtggaggcggggggggtgcgttgggtcccgctcaaggacggactgctgcttagcttccgggcgaaggcacaggtcgcagtccggtcaaggtag

SEQ ID NO: 28712 - DNA, 1158 bp, Oryza sativa
  Clone ID: PAT_MRT4530_33284C.1
ctaaaaggtcctggagtatttcttgatctcatataagatagaggatatggaaaccaggtccttgttgagagcagagccaccattgatcttcttgacacactcggtgatccttgtatagtacagcagcagctgcgtgagtgccgctttcaggatctccattccgcagaggaagttgctaaaagatgtaatgacatccttgtgcataagctcaattgcagctttccaccgaccggcaaaatccttgactaatggctcgacatcactaacactggccttgtccgagcttgatgctgtgtcttcagacgggcgagatttcacaaatttgatcaaatcactgaaatgctccagtagaagttcctccttcagtatggaaatcgttaaatcatagttgtttatcaggaaaacagtttgcaacttttgtttagggaacatcttagccaacttaacaagcaattcctcaacagccatccgcaaccgctcgagattaagatcaagcttgtctaagtaagagtccacacatgggattcgccgcttaaacatgattagctgatgctgatgaattattcggatcataagcattatgccgattgcgtcataacagttcaggagcacagcattgaaatgttcatcaacaacttggataggtcctgcaaatatgtcattaaacagtgattcttcaccaaagaaatcatcagagaaaaggtactctgaagtagctgtatcaatcaaaagtttttgcaagcttctgaaaagaacttcatatggatatttttgagacttggcttcagctatgtgaggtatcaaggcaggctgatcaatttcctttaatatgtttatcctttcacccaaagcaaagacagaagaacgggtcttcagagattcttttcccatggagaaaaggaatcctgtacttctagtttcaactccaagtaagtcggtagaggttgctatgtccagttgtagtttctctaatgcttgaatatacgcacggaaatgtgcactcagcaccttgttcatggtatcaatataagctgcacgaacttccgcatatatctccttagcatgttccttaagaaaaactatcgtgtacttgtatttaagaagaacactctgctgtagaatctgaatatttgttttcggttttctcggacgcgtggg

SEQ ID NO: 28713 - DNA, 2741 bp, Oryza sativa
  Clone ID: PAT_MRT4530_33285C.1
acagtcacagaaatgttaattctttcgatttgttgatagatggcaaaatttatgtgtttctattcacttatccacaggcggggataagtttctacggtcccaaacaccgccagacaattaaagaacatctgaatggctatgactacaattaaagaacatctgaatggctgactgataggcagctaatcgctaatcagctcaacgatctaccacaaacagccattactttcaatcgaaaaactattttagatacacccccgtgtaatttcttaacatctgccaaatagcaagagaaacagagttccgtgtcaaacccaaccaacctgcatagcatatatcaggattttcgttacatgagaataatacaccagtgtacatggcaggaccagtactgactaaaaggtcctggagtatttcttgatctcatataagatagaggatatggaaaccaggtccttgttgagagcagagccaccattgatcttcttgacacactcggtgatccttgtatagtacagcagcagctgcgtgagtgccgctttcaggatctccattccgcagaggaagttgctaaaagatgtaatgacatccttgtgcataagctcaattgcagctttccaccgaccggcaaaatccttgactaatggctcgacatcactaacactggccttgtccgagcttgatgctgtgtcttcagacgggcgagatttcacaaatttgatcaaatcactgaaatgctccagtagaagttcctccacatatactgaaatattgctcttaagaacctcctcaaagtgaacttgtgcttttccaccctcagtgccagcttccttcagtatggaaatcgttaaatcatagttgtttatcaggaaaacagtttgcaacttttgtttagggaacatcttagccaacttaacaagcaattcctcaacagccatccgcaaccgctcgagattaagatcaagctgaccatctccatattcaacattgagatgcacgagggatgctgtaaattcagcatatctcctcatgacatagtgaggatgaacatcatcctcccaaagagtcttaacatttgcatttcgtaagctgttcaaatgcaaatcaaacaccatcttgaagcgaggccagagtgataagttaaccttgtctaagtaagagtccaaacatgggattcgccgcttaaacatgattagctgatgctgatgaattattcggatcataagcattatgccgattgcgtcataacagttcaggagcacagcattgaaatgttcatcaacaacttggataggtcctgcaaatatgtcattaaacagtgattcttcaccaaagaaatcatcagagaaaaggtactctgaagtagctgtatcaatcaaaagtttttgcaagcttctgaaaagaacttcatatggatatttttgagacttggcttcagctatgtgaggtatcaaggcaggctgatcaatttcctttaatatgtttatcctttcacccaaagcaaagacagaagaacgggtcttcagagattcttttcccatggagaaaaggaatcctgtacttctagtttcaactccaagtaagtcggtagaggttgctatgtccagttgtagtttctctaatgcttgaatatacgcacggaaatgtgcactcagcaccctggcaatgagtgggacacaaagctggaccaggatccaggtcatacattgataatctaataccttgttcatggtatcaatataagctgcacgaacttccgcatatatctccttagcatgttccttaagaaaaactatcgtgtacttgtatttaagaagaacactctgctgtagaatctgaatatttgttttcggttttctcaaggcatagaacttttggatgacaaattcaaaaatctttgagactgctttctgcctaagtctctcaacctcaggttgaacatcctttagagccttggacgatttaaccattgcatcaacttcaatgaacttgatttttctgcttagagtctcaagtgttttcatgtattcgtcattaacctctccatcgacaattatgtcaatcattcttggaggcactattatatcctcaacaaattttgacaatttagactctgcagccttacgatttttcaactttaatcccatgtccatagatttctcctgaaggacctttatctccgaacttatagaaccaatttctgtctggaatccagtcagaacagtttccatttgtgacaaaatgttatcacagtcacgaatctgatcatgcagcgataccaagttttcactttctccaatgtaatcctgtatagaatccagctcaatttggcgaatgttgttctcgacgccttttgtgtaatcacgcagtttgatgccgttagccaggatatttgccacttcctcgtcgtccttgcagtcgtcgagctcctgcctcaacccctccagcgactcgtcctcatcactggcgacatcctcgtcgagggcgaggtcgccgaccaacaccccgaggtcgaaccgctccctctgcccgtcgtgcgcctcggcggcggcgggggcagcgtccatgtcgtcgtcggctgcggcggcggaggggctaccgatgggtggcgaggatgccggggatcgccggcggcggggtggctccgatccagatctaccaccggaggcggtggtgtcgggatcggatcggatcggaggacggacggggggggagggaagtgggtcggatcggtcgccgcg

SEQ ID NO: 28714 - DNA, 299 bp, Oryza sativa
  Clone ID: PAT_MRT4530_33286C.1
gctcactcttgctagtgactaccttacctacagcactggttgctagctaaattagggttgcaacatggcggggacggactgaccagcaggtgcggttgacgatggacgtgcgggtgtggacagcgccatcaccggcgcgcgtgtgagcgtgctgcgagcacatgctgtagacagagctctgatgcaggcaacctacaactttaagctgacacaccagacgggtacggagactgacgtgccggtcgacgtgtacatactggaccaggcggtgtaggaagggatcgacctgccttactctg

SEQ ID NO: 28715 - DNA, 221 bp, Oryza sativa
  unsure (1)..(221): unsure at all n locations
  Clone ID: PAT_MRT4530_33287C.1
aatgggnnaatttttagttcccacnnncgaaggagaactgtctggtaggtccaatctcccatcacatacctatcaacaatctctaattgcaagaaggtttcaggccacacatcccaatggtcgggtgacacgaacattactaagggtactcatggggaatccagctgtcaagcatgagacttgacacaaggatttagccggtcctttcggcctcaggggga

SEQ ID NO: 28716 - DNA, 187 bp, Oryza sativa
  Clone ID: PAT_MRT4530_33288C.1
tccacgcgttcgcaccggtgaggctcccgtcgccgtccgtaccccggctcccggcgaccgcaccaccaccacccagtgtccccgcttcctaagcgaggggggaagacgagaccaccccattgggttctgggaagcctttctcaactggctccgcattttctttttcaaacaagagatggagcttttc

SEQ ID NO: 28717 - DNA, 1467 bp, Oryza sativa
  Clone ID: PAT_MRT4530_33289C.1
cgatctcaatgggaatttcattagggatatgatcgttcatggcacaacacatttctcatcagcaacgcagaatgatgagaccaccgttttctcgataagtacaatccaattttgacagcaacaattaaattaccgtacataaataatcatcaagttctgctaaaagtttgctgtccagctgaagggggctgtgtagggggaggtgggggaagtgacatctgcatttgcatcggcatgggcatctgcgctagaacaccccggtcaccttggccagaaagatccctacctggtatgcctgaattcattgagccatcaggcatgactccgaaaccaccttgcaggaaaaccattccgccacctccctgaggttcacctgcaccttcaggcattccctgtccaagtggcatcgactgaaatgggttgcccatcaatcccatgccccatggacgctgaagcccctcagggaagcttaaaggaccaggtggcgtaggttggacccccgaggctgagccttgatccagtccaacatctggtagttgcatctggaaaggggcactgaagaactgtggatttccatcttgttggagaggataattgaatgatgtgttggacattaatggctgattcatattcatgggcatcatgaagtttggctgatgaggcattggaggaaacatgaaaggcgcattaggcatcatttgctgtttgtcttgactaccatgctctgattcttggcggactggagtcgccccaggtgcattttcatgagcccagttgtagggccgatcaaatccttgaggcgggttgttctcacttggagtatcccctggtggataagagtgacgaccatggaatgatggtggtcttgatagcatagggggcctctgtggggtctggtctctggaatggtggtagcgagatcggtcatcacgatcttgcacatgagaacttgaagagggtgaaacaccagtccgaggaggagcacgtgcagtagacatttcaggcatctgagattgtctttgatcacccccagaagcacgggaaatgttaggagcatctggctcattacgttcttccctctctggagtattgtgcaggaggttggcatgaacttcaggtatatgagaatcaaattcagatctcttaaggaaagacttgagacacataggtgcagcacagataaaaatcccttccatcattttcacagtttgaatcttctgaatgcgctcatcacaaagatagcagctggaatcacttctagcacaggctaaacagaaagcatgttcacaaggaatgaggcggccgtagagggcgatggggaactcgcagcggcagcagatgtggacgcgctcgccgagggggcggcgggagcggcggccgatggtgcggcgccgctctagagatccaagcttacgacgcgtgcatgcgacgtcatagctcttctatagtgtcacctaatcaatcact

SEQ ID NO: 28718 - DNA, 3761 bp, Oryza sativa
  Clone ID: PAT_MRT4530_3328C.1
atggtttacaccaagaatggtagccgcgcaacaggcgagggcagcaacggcgaagagcgcactaatggggtgcatccccacagcgattccggcaatggtccgccaccacttcccgagaatccgacgctaccccaagtgatggcacatcagactcagatgatggcatccatgatgcagcagatgcagcagcagcaccagcagatgcaccagcggatgctgcagcacgccgaacagcagcatcagcagtttggtccccctccccctcagtccaagttgccagagtttctacgtgtcaggccacccaccttctccaacaccaccaaccctatggaggcgaatgactggctccatgccatagagaaaaagctgaatctcctgcagtgcaatgatcaggagaaggttgctttcgccacacaccagcttcaaggtcctgcgtcagcttggtgggacaatcacatggccacccgcccaccaggtactgaagtcacttgggcagagttctgccgtagcttcaggaaggcgcaggtgccagacggggtcgtggcacaaaagaagagggaatttcgggcactccatcagggcaacaggactgtgacggagtatctccatgagttcaatcgcctcacgcgatatgcaccagaggatgtccgcaccgacgccgagaagcaggaaaagttcatggcaggtctggatgacgagctgaccaaccaactaatatctggggactacgtcgactttgagaggctggttgacaaggcaatccgtcaggaggatcaacgcaacaagatggacaggaagaggaaggccgctcagttcagggcacatcagggaagtcaccagaggccgcacttcactcctggacagcagggtggacctaccaccatgatcgtccgccagtaccgcccgttcaaccctagcaattttcccagggcgccagtggcagtcagaaccaccatggagggtcctgcttcaactgtggcgagcttggccatttcgctgacaaatgcccgaagcctaggcgtgccgggccaaggtttatccaagctcgtgtcaaccacgtatctgcggaggaggcacaaacagcaccagaggttgtactggattgaggcggaaatcccagtggacaccgtggagaagaagttgaggaaattggaagatatacccatagtctgcgagtatccagaagtgttccccgaagaccttactaccatgccacccaagagagagattgaattccggattgacttggcaccgggaatcgctccaatttacaagagaccatacagaatggcggccaacgaactagcagaggtcaagaagcaggttgatgagcagctgcagaaagggtacattcgaccaagtacttcaccttggggtgctccggtcatttttgtggagaaaaaggataagacgaagaggatgtgcgttgattaccgcgcactcaacgaggtcacaatcaagaacaaatatcctttgccgcgaatcgatgatttgtttgatcaactgaaaggagctaaagtgttttctaagatagacctgcgatcaggctaccaccagttgagaattcgggaagaggatattccaaagacggccttcaccactcggtacgggctatatgagtgcacggttatgtctttcagacttaccaacgcacccgcattcttcatgaatctgatgaataaagtgttcatggaatttctggacaagtttgttgtggtattcatcgacgacattcttatctattcaaagaccgaagaagaacatgagcaacatctccgtctggtactcgagaagttgaaggagcaccagctatacgccaagttcagcaagtgtgacttctggttgacggaagtcaaatttctaggacatgtcattacagctcagggtgtggcagttgacccatcgaacgtagagtcagttaccaaatggaccccaccgaagaccgtgtcacagattcgaagttttcttggacttgcgggatattaccgccgattcatcgaaaacttctccaggatcgcccgacccatgactcggttgcttaagaaagatgagaagtttaaatggacagctgagtgcgataagagttttgaggagctcaaaaagaagttagtatccgcaccagttttgattctgcccgaccagatgaaagacttccaagagtttgagcatctcaacgtgggaattgttgaacacaggttcgtagctgctctggaggcacggcctacgctcgtggatcaagtcagagcagctcaagtaaatgattctgaaatagcagagctgaaaaagaacatgagagtcggaaaagcccgggatttccatgaagatgaacacggcacaatctggttgggagaaagattgtgtgtacctgacgacaaggaactgaaggatctgatactcaccgaggctcatcagacccagtactccattcatccaggcagcaccaaaatgtatcaagacctcaaagaaaagttttggtgggtcagcatgaggagagaaatagctgaattcgtcgcactctgcgatgtttgccaacgagtgaaggcagagcaccaaagaccagcaggtctactccaacctcttcaaatcccggaatggaaatgggaggagattggaatggactttataacaggactgccccggacatcatcgggtcatgattccatctgggtagtcgtggatcgactcactaaggaagaattggggacccgtttaaattttagcacggcctatcacccgcaaactgatggtcagaccgagcgagtcaatcaaatcctggaagatatgttgagagcttgcgctcttgattttggtggagcttgggacaaaaacttgccatatgcggaattctcgtacaacaacagctaccaggccagtctacagatggcaccgtttgaagctttatacggccggaagtgccgcacacctctcttctgggatcagacaggcgagcgtcaactgttcgggacagaggtattaacagaagcggaagagaaagtcagaatcatcagggaaaggttgaggattgcccagtctcgacagaagagctacgcggataaccgccgaagggagctcacttttgaggcaggagattacgtgtatcttcgtgtcactccgctctggggagtacaccgttttcagacgaaaggcaagttggcaccacgcttcgtgggaccctacaaaatcttggaacgaaggggagaagttgcttatcagttagaacttccatccaatatgatcggcatccatgacgtgttccacgtgtcccaattaaagaagtgcttaagggtacctgaagaacaagctgattcggaacacattgatatccaggaggacctaacctatgtggagaagccggccgaggcccagccaagccgcccctccctctctccccgggacgccgacaggtgggccccacctgtcggaccagtccctttcctccagctggcgctgtcgcgccagcaaccgccgccgcgcccacgcttccgctttttttgggccacgtcagccacgtccgcgcgcttccccgtcgccccctctcgctttttccccatttcgccgaactctcccgagctccccatcgctcccgcgccgtgcaaccacccgccgccgccgtttccgctactccagccgccgctagccgccgctagggttgccgccgcaccgcgccgtccccgccgtcgggttcgcgaggataagctctaccccggccgccccttccccgtcgagtttcgtcgccggaattcgcatcccctcgcgctccg

SEQ ID NO: 28719 - DNA, 480 bp, Oryza sativa
  Clone ID: PAT_MRT4530_33290C.1
ctaacatctctctcctcctttcttcttctcggtgctagcgacggcggcgttcggcggcaagggcgcggcggcgagggcccgatgacgagggcgttgcttgcagctgctgggcccgacgacgacagcgttggctcccggacccgcctcctcagtcgtcgtcctcctcgtcgaccaccccgccatcgccgccaacatctcggccccaccgcgcgccgtccgctcggccccgtcgtgcgccgtctgctcgcgtctgcgccggaggatttcgcccccgccgccgatggtgctgggctggtagcacgctccggactgcatgatctgggtgcagtcggcgctgcgccaacacgcgtagtcaattgccttctgcatcgccgccggactctggtcgggcttgaacacgcagaacgccccatctgcccgccgctgagccagtggacatggccaacaagagcagcagcgcagcagcagcggaatcaccat

SEQ ID NO: 28720 - DNA, 830 bp, Oryza sativa
  Clone ID: PAT_MRT4530_33291C.1
ggagagagagaactagtctcgagtttttttttttttttttttcctcaactcacaaaagctcacaatttattaatagacagaaattcttggtagagtttatttacgtatatacaaaacatctggaacaacaactgaataacacatttaaagaaactcagcttggtgtgatacatatcatgcattgttgcttctcagctttttcttaatcagtcttgcacctagcaatagtatatatgaactctgaagttcttaagccacagaatgtactggtgactttattctatgtctgaatgatatagctgccatcagagttcactgaaggacatcactgccccatctgttggccttgggtgcggaaggtaaacaatccctgcgtcaggattcagcaactcccatttgtaaccacaagagagatgatggagcatgatggtgagctgcagccttgccagcatgttgccggcgcagatcctctcgccgcaccgaacacctggtacgtgcctagctccgctgatttatcccatctatccgggcttaaaattaaccgggtggcgtagcgtcctgggtcgaccttttacttcgatcgagtaataaattatgtacatgaacgaccacatatgtttagttacgttctctttcaaatttaaaaatagttatcgttttgataaagatacggtctccacaaaataagttttcactatttctattgtaatatataaaaagtatcagtaaatatataacattattgaagtacattttaagattaatctatgcatgtgttatatacgtatatcagtaattatttatagtcaaagtttttaagtctagcattg

SEQ ID NO: 28721 - DNA, 397 bp, Oryza sativa
  unsure (1)..(397): unsure at all n locations
  Clone ID: PAT_MRT4530_33292C.1
atgggatggtcgatggtgggtcactggctcattgccgtgtagaggctgatgcatattcattacagtgcnnnntagtcttgggctattgaactatcaggtncntgatagttaattactgacttgttagtagaagtagatgagtgcctgctgggtcnnactaggtttatccaacagttcttttcattatcatgtagtatgagacaaccaatctatcatgcataacacttgtttgatagcaagccccatttcttggtaatgagcaaactgattcactaaaagatcgtggatcttgtannnnnngctntgccactcgcgctgacacctgatgatgatccaagaaaggaagaactcaagaagctgcagacacagttggaagatataaacaagctcgcacaca

SEQ ID NO: 28722 - DNA, 204 bp, Oryza sativa
  Clone ID: PAT_MRT4530_33293C.1
atggaggaattgaaggacaccattctgtacgttaactggtacgaccagccggaagcccggaatcaaagcatgtgtctgaccggtgaagttgagaccaacgatgtggaacattcctacatacccatggacacaaggggcatgttggtggagctggaaaaatttagttgggctccagctccaaaaactctgccatacagaccatag

SEQ ID NO: 28723 - DNA, 336 bp, Oryza sativa
  Clone ID: PAT_MRT4530_33294C.1
atgccccggcgcctcgccaccgccgcgccgccgttcccgccgtcggtccggggcttcggctatgtgttgccagttggtggtaggaccaccaacttgaccacagaacaaaaatttttccagccacatcaccagaaaagctatgtgttctctgggggacataggacctgtacccatattcatggtgatatagccagtccagccacctatagtcctggttttgaaagagaacttgctcttggtattcatactgactgggttagccgatggtgtgatgtccaaaccagtgatcataactatgtccaaaagggttggtgtcatcggtccttggttgaataa

SEQ ID NO: 28724 - DNA, 1571 bp, Oryza sativa
  Clone ID: PAT_MRT4530_33295C.1
tcggtgacgaaggtgaaagggaagcgcgtggccgccgtcgatgttgccgacgacggttctgctcatgggactgcacagtaccctggttgcactgtggccagctcggcggcggcggcggctgtggacgtggagaaggcagctaccaggcaagttcgaacatagaaaacgaacagaagttttgagtgagaaacttgaacagttgaacttgacgtcatgcattttcccacatgaaagaaagaaatggtctttttttgtcggtgggactgtattctgtactcctatgttcgaacttgcctggtagctgccttctccacgtccacagccgccgccgccgccgagctggccacagtgcaaccagggtactgtgcagtcccatgagcagaaccgtcgtcggcaacatcgacggcggccacgcgcttccctttcaccttcgtcaccgacgacgacgaggatgatgacacttccacctgggtgctatccggcgttctcctcgacgacggggagaggaaagacagctttcctgacaaagaatttgagagaaaagatgaccatctgcccgaccgcgaaaaccgggggctgcaccgagcgcccatgccgaccccttccccgagtctcctcccgcggcgcacgctctgctcccccgccgcgaccatctccctgtgtacgtgctccggcagccgcagcgtgtaccgctctaggtcgccgtcgagccggacggcgagggagtggccagtggagtgcgaccggggaagcttcgccgccgacgtctttggccgcagccccgaccgtgaccgcatcgcgcggagctgggtgcctatcgcctgaagctctagctcctccttcctccgctcctcgtcgtcctcctcggtgaccacgtcgatcaccacggctgctgggtgcgccccgtcttcttgccgtatcacaactatttcactggaggtgctgttcggatcggcggcggcggcggccgggatgatcacctcttcggtggtgtccttgttagggtcgagattgcggcggcagacggggcaggtcacgtggctggcgagccactggccgatgcagtccgggtggaaggcgtggctgcacttgggcaggaacctgagcatctcgtcgtcctcgaactcgctgaggcacaccgcgcactccagcgcggcgccggcgaccttccccacccgcagcgccttcgcctcggcgtacttcatggtggggaacatccggaccaccgacgagtcgagcccgcgcggccgccgctgccgcctcgagacgaagctgttggcagggaggatcatggaacggctcccgccgacgccgccgccctccgtcgcggggtcgtaaccggtgcagtggcggaggtagatggtggagatcgcgatgaacaggaaaaccccgacgacggcggccagcagcacgatcatcgtcgtgctgacgtgcacctgctgcccggacacgtcgccgtaggcatacccctgctgccccgccggctgcgctccggccgtcgacgacgacgccgcgagcgcgcacgcgaggagcgccgcgagcagcgcgtgctggtgctggtgcgcgtgcat

SEQ ID NO: 28725 - DNA, 262 bp, Oryza sativa
  Clone ID: PAT_MRT4530_33296C.1
gcttggggttgtttccttaaaaccctttttgttgataagacttcgttttgttgggaccattttccaattcgttggggtcaaaacaccacccctgccaggattttaagcaaagggttttttttttaaactccccatgaataatgcgggtccaagctcttgctggggggaaggcttttttgccgccgttgcccccgggggatccagctgggttgaccttcaggccgttgaacctcacagtttttgacaggggcctgcactggcc

SEQ ID NO: 28726 - DNA, 2471 bp, Oryza sativa
  Clone ID: PAT_MRT4530_33297C.1
ctcatagaatggacgctcatgatggtgaggccgatgagttgccgccgcctcctcccgtacctgcaaatgtggtgcctattaaagctgatgacgttgagagcgaggtgccagcaaacaaaccagcaaaacctaagcggtttccaatggccaggcctggtttagggagaaaaggacagccaatccagctcttggcgaatcattacaaagtttctgtgaagagtagtgaagaatatttcttccactacaatgttattctgaagtatgaggatgatcgaccggttgatgggaaaggggtaggtcgaaaggtgattgataaactgcagcaaacctaccgttctgagctttcaagcaaggactttgcctatgatggtgaaaagagcctgtttacaattggtgctcttccacaagtaactaatgagttcacagtggtgttggaggatgtttcaactggaaagactgctgccaatggaagccctggaggtaatgacagccctggaggtagtgacaggaagagagttaggagaccataccagaccaagactttcaaagtggagctgtgctttgcagcaaagatccctatgaatgcaattgctcaggccataaaaggtcaagaatcagagaactcccaagaagctctcagagttcttgatataatattaaggcagcactctgctaaacagggctgccttttagtacgccagtcatttttccacaacaatcctaataactttgttgacctgggtggtggtgtgatgggctgtcgaggattccattcaagtttccgtggcacacagagtggactttctctgaatatcgatgtttcgacaactatgattgttaaacctggtcctgttatcgattttcttcttgccaaccagaaagttgatcaccctgacagaattgattggcaaaaggccaagcgtgctctcaagaacttgaggataagaaccacccctgtgaattcagaattcaagatcattggtttgagtgacagaaattgcaacgaacagatgttttcgttgaggcagaggaatgggaacaatggggatgttgatgaagttgaagttacagtctatgattactttgtgaaaaacaaaggcatagagctgcgctattctggcaatcttccttgcataaatgtggggaaaccaaagcgtccaacttattttccaatagagctatgctctcttattccactacaaagatacaccaaagctttgtcaacactgcaaaggtcctcccttgttgagaaatccagacagaagccccaggaaagaatgtcagtccttaatgatgcacttcgacatagtaattatgattctgatcccatgttgagggcatctggcatttcaattgcccaaaattttactcaagttgaaggaagggtcctgcaacccccaaagctgaaagctggcaatggtgaagatatattcccacgcaatggtcggtggaacttcaacaataagcaaatggccgaaccttttgatgtgtttgaagagagcccctcattgaggcgagcacctgtatcaagaagagtagatgatatgtttgaacagataaaatcgaaacttcctggagctccgaaattcctcttgtgccttcttcctgagaggaaaaattgtgaagtttatggtccttggaagaggaagtgtcttgctgaattcggtattgtcacacaatgccttgctccacaaagagtcaatgatcagtacctactcaatttgctattgaagataaatgccaagcttggtggaataaactcattgctgcaaattgaagcatccccttcaatacctcttgtatcgaagacacctaccatcatcttaggtatggatgtgtcacacggtcaaccaggacaatctgatagaccttccattgctgcggtggttagctctcgccaatggcctctcatctctaaatacagagcatcggtgcacactcagtcacctaagctagaaatgatgtcttccttgtttaagccacgaggaactgaagatgatgggctcattcgggaatcgctgattgacttctacactagttctggaaaacggaaaccggatcatgttatcgttttcagggatggagttagtgaaagccagtttactcaggtcattaacattgagcttgatcagatcattgaggcatgcaaatttctcgatgagaagtggtcaccaaagttcacagtgattgttgctcagaagaatcatcataccaaattttttcagtctggatctccagataatgttccgccaggtatcagagaagcacaacagccatatcagttgttctcttcggttgctccgatttgctatgcccatcttgctgctgctcaggtgggcacattcctcaagttcgaagatatgtcggacgcgtcgtccagccaaggaggtcatacgtctgtcggaagtgtaccggtgcctgagctgcctcgcctccatgagaaagtgaggagctccatgtttttctgctga

SEQ ID NO: 28727 - DNA, 3201 bp, Oryza sativa
  unsure (1)..(3201): unsure at all n locations
  Clone ID: PAT_MRT4530_33298C.1
cgtaaaagatggacgctcatgatggtgaggccgatgagttcccgccgcctcctcccgtacctgcaaatgtggtgcctattaaagctgatgacgttgagagcgaggtgccagcaaacaaaccagcaaaacctaagcggtttccactggccaggcctggtttagcctgaaaaggacagccaatccagctcttggcgaatcattacaaagtttctgtgaagagtagtgaagaatatttcttccactacaatgttattctgaagtatgaggatgatcgaccggttgatgggaaaggggtaggtcgaaaggtgattgataaactgcagcttccctaccgttctgagctttcaagcaaggactttgcctatgatggtggaaagagcctgcaattgcagtaccgagctttactttatgactgctgccaatggaagccctggaggtaatgacagccctggaggtagtgacaggaagagagttaggagaccataccagaccaagactttcaaagtggagctgtgctttgcagcaaagatccctatgaatgcaattgctcaggccataaaaggtcaagaatcagagaactcccaagaagctctcagagttcttgatataatattaaggcagcactctgctaaacagggctgccttttagtacgccagtcatttttccacaacaatcctaataactttgttgacctgggtggtggtgtgatgggctgtcgaggattccattcaagtttccgtggcacacagagtggactttctctgaatatcgatgtttcgacaactttgttgacctgggtggtggtgtgatgggctgtcgaggattccattcaagtttccgtggcacacagagtggactttctctgaatatcgatgtttcgacaactatgattgttaaacctggtcctgttatcgattttcttcttgccaaccagaaagttgatcaccctgacagaattgattggcaaaaggccaagcgtgctctcaagaacttgaggataagaaccacccctgtgaattcagaattcaagatcattggtttgagtgacagaaattgcaacgaacagatgttttcgttgaggcagaggaatgggaacaatggggatgttgatgaagttgaagttacagtctatgattactttgtgaaaaacaaaggcatagagctgcgctattctggcaatcttccttgcataaatgtggggaaaccaaagcgtccaacttattttccaatagagctatgctctcttattccactacaaagatacaccaaagctttgtcaacactgcaaaggtcctcccttgttgagaaatccagacagaagccccaggaaagaatgtcagtccttaatgatgcacttcgacatagtaattatgattctgatcccatgttgagggcatctggcatttcaattgcccaaaattttactcaagttgaaggaagggtcctgcaacccccaaagctgaaagctggcaatggtgaagatatattcccacgcaatggtcggtggaacttcaacaataagaaactgattcagacctgttctgtcgataagtgggcagtagttaatttctctgcacgctgtgatgtgcgaaatcttatccgggacctcataagaaatgcatctgcgaaggggattcaaatggccgaaccttttgatgtgtttgaagagagcccctcattgaggcgagcacctgtatcaagaagagtagatgatatgtttgaacagataaaatcgaaacttcctggagctccgaaattcctcttgtgccttcttcctgagaggaaaaattgtgaagtttatggtccttggaagaggaagtgtcttgctgaattcggtattgtcacacaatgccttgctccacaaagagtcaatgatcagtacctactcaatttgctattgaagataaatgccaagcttggtggaataaactcattgctgcaaattgaagcatccccttcaatacctcttgtatcgaagacacctaccatcatcttaggtatggatgtgtcacacggtcaaccaggacaatctgatagaccttccattgctgcggtggttagctctcgccaatggcctctcatctctaaatacagagcatcggtgcacactcagtcacctaagctagaaatgatgtcttccttgtttaagccacgaggaactgaagatgatggcctcattcgggaatcgctgattgacttctacactagttctggaaaacggaaaccggatcatgttatcgttttcagggatggagttagtgaaagccagtttactcaggtcattaacattgagcttgatcagatcattgaggcatgcaaatttctcgatgagaagtggtcaccaaagttcacagtgattgttgctcagaagaatcatcataccaaattttttcagtctggatctccagataatgttccgccaggtactgttgtggacaaacaagtgtgccatccaaggaattatgacttctacatgtgtgctcatgctggaatgattggaacgacgaggccaacacattatcatgttctgcacgatgagataggtttctcccctgatgatctgcaggagcnagtgcactcactctcttatgtgtatcagacaagcacaacagccatatcagttgttgctccgatttgctatgcccatcttgctgctgctcaggtgggcacattcctcaagttcgaagatatgtcggacgcgtcgtccagccaaggaggtcatacgtctgtcggaagtgtaccggtgcctgagctgcctcgcctccatgagaaagtgaggagctccatgtttttctgctgatcgtgccgcctctcgatcaaatgctcgccgacgttgagaaatccggtgatcggcctgggggaactactagtacttttgcttctcataattaggaacatgtatggaacctatgtacctgcccttggcatgctgcctgtgtcatggattatctgctggtaggagtatcctttaaccaaacccttttagcttttaagttaggtttaatggactgctgtttagtatgtggtgtggtgttagtaagtttccagacttcgacattgtgcagctatgcctattgctggttatggtcccttcccttctatgtagcatgtgccgtttccctttgtctgagttgattttagaaatagtatctgatctgttcgaggttggggatgaaaaaaaaaaaaaaaaaaaaaaaaaa

SEQ ID NO: 28728 - DNA, 292 bp, Oryza sativa
  Clone ID: PAT_MRT4530_33299C.1
gtttgttctcagagcaaggtttgttccggaggtcgtcggggcaccggcggtgccctaccgccagcgctgcaatcccatccaactcgcactgccacttactagcagcagcaagcccttctcgtggagtcacatcatctccaatttcaaccaaaatccaaactttggatccatccaaacacagcctatatggtgcatcatcgtggtcaaccgcggcgccatccgccgcgtgcatccgtcatgttcactgtctggcctcgcccatggccgccagcggccatcatcagcacctatg

SEQ ID NO: 28729 - DNA, 3474 bp, Oryza sativa
  Clone ID: PAT_MRT4530_3329C.1
atggtctacaccaggaatggtagccgcgcaacaggcgagggcaacaacggcgaagagcgcactgagggtgtgcatcccaacagcaattccggcaatggtccgccaccacttcccgagaatccgacgctagcccaagtgatggcacatcagactcagatgatggcagccatgatgcagcagatgcagcagcagcaccagcagatgcaccagcggatgctgcagcacgctgaacagcagcatcagctgtttggtccccctccccctcagtccaagttgccagagtttctacgtgtcaggccacccaccttctccagcaccaccaaccctatggaggcgaatgactggctccatgccatagagaagaagctgaatctcctgcagtgcaatgatcaggagaaggttgctttcgccacacaccagcttcaaggtcctgcgtcagcttggtgggacaatcacatggccacccgcccgccaggcactgaaggtaacatgactgtgacggagtatctccatgagttcaatcgcctcgcgcgatatgcaccggaggatgtccgtactgacgccgagaagcaggaaaaattcctagcaggtctggatgatgagctaaccaaccagttgatatctggagattacgccaatttcgaaaggctggtggacaaggcaatccgtcaggaggatcaacgcaacaagatggacaggaagaggaaggccgctcagttcagggcacctcagggaagtcaccagaggccgcgcttcgctcccgggcagcagggtggacctaccaccatgatcgtccgccagtaccgcccgttcaaccctagcaattttccccagggcgccagtggcagtcagaaccaccatggaggtcagcccaaccgcggtgcagctccacgcccaccaacggcaccggcacagtcaggcctgtccgcgcaagccaagaaggagactggagcaaaaccagggtcctgcttcaactgtggcgagcttggccacttcgctgacaaatgcccgaagcctaggcgtgccgggccaaggtttatccaggctcgtgtcaaccacgcatctgcggaggaggcacaagcagcaccagaggttgtactggtcaccttgaccaacgagaagggagaaacagtagtgtacaaatcaccagactcaccaaagcaaggggtctccttgaatcagattgaagcggaaatcccagtggtcaccgtggaaaagaatttgaggaaattggaagatatccccatagtctgcgagtatccagaagtgttccccgaagacctcactaccatgccacccaagagagagattgaattccggattgacttggcaccgggaaccgctccaatttacaagagaccgtacagaatggcggccaacgaactagcagaggtcaagaagcaggttgatgagcagctgcagaaagggtacattcgaccaagtacttcaccttggggtgctccggtcatttttgtggagaaaaaggataagacgaagaggatgtgcgttgattatcgcgcactcaacgaagtcacaatcaagaacaaatatcctttgccgcgaatcgatgatttgtttgatcaactgaaaggagctaaagtgttttctaagatagacctgcgatcaggctaccaccagttgagaattcgggaagaggatattccaaagacggccttcaccactcggtacgggctatatgagtgcacggttatgtctttcggacttaccaacgcacctgcatttttcatgaatctgatgaacaaagtgttcatggaatttctggacaagtttgttgtggtattcatcgacgacatacttatctattcaaagtccgaagaagaacatgagcaacatctccgtctggtactcgagaagttgaaggagcaccagctatatgctaagttcagcaagtgtgacttctggttgacggaagtcaagtttctggggcatgtcattacagctcagggtgtggcagttgatccatcgaacgtggagtcagttaccaaatggaccccacctaagaccatgtcgcagattcggagttttcttggacttgcgggttattaccgccgattcattgaaaacttctccaggatcgcccgtcctatgactcagttgcttaagaaagatgagaagtttaaatggacagctgagtgcgataagagttttgaggagctcaagaagaaattagtatccgcaccagttttgattctgcccgaccagatgaaagacttccaagtctattgcgatgcatcccgtcacggacttggatgtgtcctgatgcaagagggcagagtggttgcgtatgcctcgcggcagttgcgtccacacgaagggaattatccaacccatgacctggaattggcagcagtggttcatgctttgaagatctggaggcactatctgattggcaaccgctgcgaagtatatacggaccataagagtttgaaatacatcttcacccaaccggacctaaatctccgacaacgaagatggttggaactaatcaaagactatgacatgaacattcactaccacccgggtaaagccaatgtggtggcagatgcattaagcaggaaaagttactgcactgccctatgcatcgagggcatgtgtgagaaattgcagcaggagttggagcgtctcaacgtgggaattgttgaacacgggttcgtagccgctctggaagcacggcctacgctcgtcgatcaagttagagccgctcaagtgaatgatgccgaaatagcagagctgaaaaagaacatgagagtcggaaaggctcgggatttccttgaggatgaacacggcacaatctggttgggagaaagattgtgtgtacctgacgacaaggaactgaaggatctgatactcaccgaggctcatcagacccagtactccattcatccaggcagcaccaaaatggaaaggttgaggattgcccagtctcgacagaagagctacgcggacaaccgccgaagggagctcacttttgaagcaggggattacgtgccgaggcccagccaggccgccccttcctccctctcccgagccactgaccggtggggcccgtttgccggcgccgcgccccgccttgatgacgtcgtcctcgcgacgcgctgccaccatcggtggccgtccgaccgggtcgctgccgccgcgctccgcgctccgtgcccgcgccgttgccggtggtgccgggcagacggttgccgcctcccccttgccgcgccgcgccgctgctctcgcgtgcgccgctttcgcccgcgggagctgtcgccggccgtcgccgcgggtggccgcgccgccgcgcgccgtcgtttggccagccgactttgtgccgtgctgtgccccagccgcgccgcccctggcagcctgatcggcttgggccgatccggaccgtcggttcccgtggaccggcggtggaccgcctcggtggtcccggtccacggtggaccggcgcccttgtgccgctga

SEQ ID NO: 28730 - DNA, 1608 bp, Oryza sativa
  Clone ID: PAT_MRT4530_332C.1
atgagctcgccagtgttcgtggtggtaggcttctgtctcctccgtatgttcattctcttccctaatcctgtttaccatgttgccgctttctctcagattggcaacaatcgctccgagaatactaaggagaaatataatcacaaggtttgtaaaccgcgagtttgtccaggaatttcgagcccacgatggcccatgaattgcccagcgttaggccggcaaccagcccattatcgtggtagagtattcgttcgttcgttcgacttggagtcgacttccaagttggcgcgaaccgcttccctcttcgcctctccacctcgccgccatttaaatttatccatcgcttggctagatctccccatcgatccgtgcaccacgcaacgtaccgtctcctcgatcgatcgccttgctttcacctccgcctcaacgggatcgattatggtggcggcgctgccggacgacgtgctcgcggaggtcctccgccgcctcgcgccgcgctgcctcgccgcgtgccgctgcgtctgcaagccatggcgcgacctcgtcgacgaccgccgcctgctgctgctgctgcgcgccgaggagctcctcccgcgcccgctcgccggcatcttcctcaacttctttggcctcttcaactcggagttcttcgcccgccgtccctcgacgggagccgccgccgccatctccggcgatctcgacttcctgcccacccgcccccccgacggtgcccgcgagtgccccctccaggatcactgcaacgggcctcttgatcgaggacgccgacactacgaggtgctcctgatcccatccttccgccggaagcccgggccaaacgattatctctacgacaagcttagaggcgaagtggaccccgtgctggaggcatcgacatggccaccggcatcgtatgccattccggtcttctcgtcaagaacatggttgtggcaagagaggagtttcgcccgcgaaggaggagaagaagcagcgagcaccgtcgctgagatgcggtcgagttggtcatcagagttctccgacaacagatactccgacttttatcttggaaagtcaaagaagggtgtgtaccttgcattttgcagagaccaatgtcttaaagtttggattcttgatgaaacatttggcgagatgaagtgggagcttaaacatgacaaggatatgagacatattctgcttgggtgtaataatcgacaaggtataggctcatggattttacaggatatcaactatcgtaaggattcttatacgtatgaagatgacaacatggaagaactggaccaaaagaaggttgaatgtgaacccaacaaggaggcagcattggagaagtttgaatggatctcagacgatgaaaatgttcttgacaatgaagatagagttacaggggcataccatggatacattgacatcattgggtttcatccatacaaagagattatatttttaagcgaatcgttaaagagaggactagcctatcatttaagcagctcaaaggttgaagatatcggtaacttatatccaaccagctataacattcacttaattaatgaacggtttataaccgcttcttttccatacacgccctgctcgatgtga

SEQ ID NO: 28731 - DNA, 738 bp, Oryza sativa
  Clone ID: PAT_MRT4530_33300C.1
atggtgtctctggatattgtcaggagagacgaaagtgctatctctgatctcgctgggcacggattcgaggaggaagactaccctgttgtcgactacgagtcataccttcagaccgccatgtcgacaacagttaacaagtttctctcacttcgggttcattttagacaacctcactttggatttggatcacttaatgtgacattcatgttgtatcaattcttcctgcatggtttatcttgccattggtatcacgctaaaccataccaccccatgagcacattctggttcttttcaccactaagcaaacaaaaccaactgagggtctttcacatgggaaagtacgagccagaggcgccaattgccacagtggaagatcccatatcatcgcatgataagttagaaaacactgagatggtggccagcctagagatgctaggtaatatgactgacaaaccgttagcgccattggagatgctacccaaggtcaaattaagcgtggagactcctcctgctccaatgagtctacctatgaggtttggtaatggaggttgtcacattgatctgaatgatcaaccaccagaggtagagaagttagttgatgaaactctgaagatatcaggagaagagatcaaagccaacatagagctgcctgctccagttagccctccaaggagctttggcactgggggttgtggatgtgatctcaatgagatgccagaagataatgatgagtcctaa

SEQ ID NO: 28732 - DNA, 517 bp, Oryza sativa
  unsure (1)..(517): unsure at all n locations
  Clone ID: PAT_MRT4530_33301C.1
cggnaaaacccggggcgacccacgcgacgcacctttgccgccgcncgccgccgngcggccccgccgccaccgccgccgccaggagggaggggcaccgcgacccacancgggcaggccggnacccaggncgggaacgcgngcngggagcncnanggccncgagcacggcacccagccggagggacagangcccggngacaagaccgnagggggaggagaagaagcttttgctgtgtctncagngagacnggngcngggaagcangncccccgggcggncnncgccgcccccgagccgaccgnganngangaggngaggacnggngacnaccgccagcgcnaacaaacagaacagcncancagnggcaaggaggangcagccaacaancgggcccgnggggcacgacaccagggcaaggagaaaggggancngngccnngaccgcancaggaagcnggccgacaacggcacaggncnccagggncgcccggggnncaacgcngnnggaggaggaacggg

SEQ ID NO: 28733 - DNA, 275 bp, Oryza sativa
  unsure (1)..(275): unsure at all n locations
  Clone ID: PAT_MRT4530_33302C.1
aaggtgtgtgtgtgtttgttcccgtgttgttgccgtggccactgcgntcncttantattanccatgtctactgtcncattgtattagctactactgttgnccanttgtttcttttgattaattaanttgctgctaatgatgcagctattgtatttgggatttttgnccctgtaaggttttgtttgtttaancccttctacaannggatcgagggggatttgganaaaaaaaaaaaaaaaaaaaaaaaaaaaaaaaaaaaaaaaaaaaanaanana

SEQ ID NO: 28734 - DNA, 155 bp, Oryza sativa
  Clone ID: PAT_MRT4530_33303C.1
acgggacaccatcagtgatatcagtcgagtgggcaatgacatacctgatgaggtaccccaggttgcagaacaagatccaggaagagctggaacgcattttcagacgctaccttatcatgtcggagaccgacttgcagagctttcgttacatgaac

SEQ ID NO: 28735 - DNA, 270 bp, Oryza sativa
  unsure (1)..(270): unsure at all n locations
  Clone ID: PAT_MRT4530_33304C.1
cggacntgggctnccactccactctcctctactaccaccgccgctctcgtntcgtcgaggnctcgactcgactcgcattgcgcctgtnctgtgctgtggtggtggccgcgcggggggcgagatggccggagaggtgggggagngggagnggcggcgcggcgcgaagcacgacgagctnacgccgaccccgtcaagnccagctcccggcgtctcctactnataacagcctctcccgtggctaggcattntcttggttcacatatctggtat

SEQ ID NO: 28736 - DNA, 558 bp, Oryza sativa
  Clone ID: PAT_MRT4530_33305C.1
ttaacaacatggagttatctatggaatcattaattaaattacctaatggtaaaatttaggaatcagttgcaaaaataattaaagtaaggagactagcatcatttagaagatagtgtaaagggagcaattgtgtgaaatggcaattgccctggacacacttaataattacaaacacttaaatgcattattggttccaaaatggccccttgtagagtacagaaatgagacaacatgccttctccagagactcttttgaattcctttccagaaataagttgtgtgtattaatttataaatatatattaagactggatcaggcagataaaattatcacttctgaaatataaaaccactcttgtgtttttaaaacaatgacgggcaatatcttggtcattggtttgatccatacgttgcatcaattcattggtctggttaaagaaaagctgcagcatttctttttctttcacagaacttcgtctagatactcatgttgcaacagaacaaagggtggggaaaaaatgtaattgtaatgtatacatgtaaggataacttgatccc

SEQ ID NO: 28737 - DNA, 1203 bp, Oryza sativa
  Clone ID: PAT_MRT4530_33306C.1
tcactcctgggtatcaggcatacggtaaacatggggaagccggcaaggttcatcgtctacaaggcctgccttcttgtaggattcgacgctgtcggcgagcgtctcctcaagtttcctaggtttccagcccaactttgtcggtttctccgatgtcaattcgaccttgttgcccacatcaaccaataaaactatggtaataccaaattttggtaagttaaagttaggtggtgtatggcctttcatgatgtagaggagaactctgctgctggtgttgagttgcatggtatgcaacagtgggccaaagacaagggcagggcaaactgtaatgacatgcagtccatttttctctgaatattccagggctatctcttcagcttcggtcttggcaaagctgtaccagttcttattttctctgcagaactccttgtctgaccagcaagtctcatctctcaccctgtcttgaggccagctcgggtaaagcacacagcaccaatggaggagaccatgacgagtttctgaacaccggaagctgagcaagcctcgagcacatttttggtgcctttcacagcaggaaccatcatctccttcgtctcgtcttccggcaccgaagtgccggtatggaagaccccctcgcagccggtgaacgccaccgtcagagcgtcgccgttgagctcgtcggccttgaacaggtgcaggttccccggagccaatgtccagctgcttcagaaacgcgtccctgggatcatctgaaacaagaacacgtataatcaccatacctgactcctgagcatctggtgcacggtaaagatggggaagccggcaaggttcgtcatctacaaagcctgccttcttgtaggattcaacgctgtcgacaagcgtctcctcgagtttcctaggtttccagcccagcttcttcagcttctctgatgtcaattcaacactcgtagtcatatccacatcaaccactttggctgtgtagctgtagttagggtacatgctcttcatcaaatccaacaaatccctcatgtccatttgttcttgagaacagatgtatcgctcagatggccctgccttgtcgtacactagaagtaaagcatcggcgacatcgcggacatcgactatgggaaagaatttgttgcttagtgcatcagggcctcctagtctgagacccataagtatcatatccgatacaataagtgccat

SEQ ID NO: 28738 - DNA, 1017 bp, Oryza sativa
  Clone ID: PAT_MRT4530_33307C.1
ggccgctttttttttttttttttttatccaaaagtttaggacgccggccggcgtagaaataaattagcattttgattaatacatttgttgtgtatatatatcggtggctactagtactacttagtagtaataatagattagtatttgtatatgtgtcgtggatggatggatggatgaatgaatttggacgagttgtacttgtacagactagagataatgaagcaagcatatgtatggccttggttaatagtcgaggatagagtggtcgtcggcggtggcggcgttgagtaggtccggggcgtaccatccgagctcctgggcgacggcggcgatcctctggctctgccctcttgaatcgccgacggcagtggtgaaggggtagacgaagatgaccttggtggcgacgcatcggtacgcggccaccacctcctgggactgggactgggattccttgaggaggaactccatcacgtcgcggcctgcgccgccgtcgacctccgcctggatgtagtgcccgtacgccgtctcctcgtcggctttgatcaccgcattcctctgcgtcttgaggatagcctcgcgcagcgaagcggcggccttgtccgttggtgtattagcggggacgatgagcggggaggccaaggagcaagatgcgcccaccgtggggtttgtggacacgcatccggggttcgtcgacgggcacgccctaatcctccctttggcgtcgaggccaaactgctgctgcgattgggattgggagtaaggggtggacggcggctgcggcttcttcacgttggtgccagcgaaagggtaggcttgcccacacggggtctggatgagaccgctcgtcgcagccgccgccgcctctgcggagaagaatactaagagaagcctccgcctgctgctgcgaactactcgtgcagtactagtgtgtggcgccggcgccggaggaggattacgacttctactcttgcaacaagcagcagcagaggctgtggatgatgataatgatgacgtcat

SEQ ID NO: 28739 - DNA, 443 bp, Oryza sativa
  Clone ID: PAT_MRT4530_33308C.1
gtaatataaaacataataatattatatagttctgattaatgggatagtaacattatttgttaacactatgcctgctgatttacaccagaacatcaacatggacagccatctaagattggaattacaattgacagaactaatactccagcaaagtgcttcttgactgctaggtggcaaacatagtaatgtagcaggaactaatacaggtaacttccaagtcttcacatagggtacatatgaacagcaaagccaaccatattgggacttgcatgttccgcagacatcattgtctaactttgttcctcaagaccatcgaggcttgaagagaagtagaaaactagagctcatgaaagcggaaagggattcggagggtgtatgatgatttgaataaatgttggtactaaatgcatattgtgcatagacatgtctctcaaccctcgtgc

SEQ ID NO: 28740 - DNA, 346 bp, Oryza sativa
  Clone ID: PAT_MRT4530_33309C.1
ggtggatgcaaaacaaaaacggggtgatccttcttttttttggggaagcccttttagccttttttttgccggggggaaaaatgcttcacttttggggtttaacccggcacattaacgggggtttgccccggttcttcctttcccttgtaaacctaacgcgggttattcccggtttgtttttttttttcccctaataaccctttttcgaagaccccttgggggaatacccctgtttcgaagaaaaccccttggcggcgtagttttttgaaaaaaaaaaaaaccaactttttttcagggggattgggattcttttcttgtagcttctaaccatccggggggggggggg

SEQ ID NO: 28741 - DNA, 126 bp, Oryza sativa
  Clone ID: PAT_MRT4530_3330C.1
atgggctctaccgacactgaccccgggagcaatgcctgcctcgggcccggcgatggagactccggggcgcactcctttatcctgggggacgcgctccacggcgagcggtatggtactaaaaaataa

SEQ ID NO: 28742 - DNA, 1216 bp, Oryza sativa
  Clone ID: PAT_MRT4530_33310C.1
cccattcgtccgcaaagcaaaccttccccctcctcctcctccggccaccgcggcgagaggccccgatggcgccaacggtggagatcagccacctctccttcacctacccgggcatcgacggccgcccgccgcccggcgcgccgccgctcatcgaggacgtctgcttctccctcgacgccggccaccgctgcctcctcctcggctccaacggcgccggcaagacgacgatactgaagatactgggcgggaagcacatggtggatccgagcatggtgcgggtcctgggcaggtcggccttccacgacacggcgctcacatcatctggcgacctctgctacctaggcggtgagtggaggcgcgatgttgcctttgcgggctaccaggtaaatatacagatggacatttcagcagagaagatgatatttggtgttgtgggcgttgatcctcaaaggagagatgagcttatcaagattttggatattgaccttgcctggcgcatgcacaaggcatccgatggtcaaaggagacgggtccaaatttgcatggggcttctcaagccattcaaagttcttcttcttgatgagatcacagtagatctggatgtgttggcaagagcaaatctattgacatatttaaagaaggaatgcgaggaacggggtgctacaatcatctacgcaacacatatttttgacggacttgatgattggccaacacacattgtgtacattgcccgtgggaagttgcaactagcactgcctttagagaaggtgaaagaaatgagccagttatctctcatgagaacagtggagagctggctgaggaaagagagagatgaggataggcggagaagaaaggaacggaaggagaagggcctcccagagtttgacaaggttactgaggggagtcgggttataggtgatcccgctgccagagcggtgaacaatgggtgggcagcagggaggctcgcctcaacggttgctggtgaagagaatttcattttcagctctaacagcgttcttaggcaataatcctaccctgcaatttggctttgtaatgatgaataacgatcctatagatccaatagatcacaccatcccacaggagtttttgcagtaacagcctaacaggctaacagcaaagttcttgtatacaactgctcaaagattattttcaaaaatttcgccttcttttatgtatacaactgtaatttgggttt

SEQ ID NO: 28743 - DNA, 1167 bp, Oryza sativa
  Clone ID: PAT_MRT4530_33311C.1
atggcgccaacggtggagatcagccacctctccttcacctacccgggcatcgacggccgcccgccgcccggcgcgccgccgctcatcgaggacgtctgcttctccctcgacgccggccaccgctgcctcctcctcggctccaacggcgccggtaactccactaccctttcaggaccgtccgtcctttccttcctctctccggttcgggttctctggtcgcggggtctgattttgggtggatgctggggggtaggcaagacgacgatactgaagatactgggcgggaagcacatggtggatccgagcatggtgcgggtcctgggcaggtcggccttccacgacacggcgctcacatcatctggcgacctctgctacctaggcggtgaggtgggggctggtgttttacggagttacatttctatgttttggcggtggaggcgcgatgttgcctttgcgggctaccagctgatatcattaggtgaagcatgggtaaatgttactgttgtgctacaaagaattcatattttggatattgaccttgcctggcgcatgcacaaggcatccgatggtcaaaggagacgggtccaaatttgcatggggcttctcaagccattcaaagtttgtttcatcttgctggttatggaaaagatgtgccatgtttgtaatttgtatccaaacaacaaggttcttcttcttgatgagatcacagtagatctggatgtgttggcaagagcaaatctattgacatatttaaagaaggaatgcgaggaacggggtgctacaatcatctacgcaacacatatttttgacggacttgatgattggccaacacacattgtgtacattgcccgtgggaagttgcaactagcactgcctttagagaaggtgaaagaaatgagccagttatctctcatgagaacagtggagagctggctgaggaaagagagagatgaggataggcggagaagaaaggaacggaaggagaagggcctcccagagtttgacaaggttactgaggggagtcgggttataggtgatcccgctgccagagcggtgaacaatgggtgggcagcagggaggctcgcctcaacggttgctgagcaaccgtatttccttagcaagaagatgagcatcttagtacatgttgaacttgaactcaggatgtaa

SEQ ID NO: 28744 - DNA, 464 bp, Oryza sativa
  Clone ID: PAT_MRT4530_33312C.1
gtttcggatggaatgtcaaggagatcatgattttgaagatctttgattaggagctttttttcaggaacaccgcaacgtaatctcctaggctattacatcatcttgacaatactcatcatggtgtttcaaaacaagcatcaggttgcgatgctccaagagacttgtataaactcaaccatagtactacagaaattttgtttactttgtggtatagtgattcgtagttctgttcagatagaagtgattcatatttttcttcaaatagattactcatttagaagttgacttttgggtataatgatttccttgtaagactgcacatcagttttaatgtgttaccgtgtcaagcatgtactctaaggtgaagcttgagatgagtttattgtagcactattctgcagttgatgctatggtaacctagttgattcatataaaaaaaaaaaaaaaaaaaaaaaaaaaaaaaa

SEQ ID NO: 28745 - DNA, 177 bp, Oryza sativa
  unsure (1)..(177): unsure at all n locations
  Clone ID: PAT_MRT4530_33313C.1
aggaatccactaatcaattgtgattttattaaaaggggatgatccacaacaacttcatcatataactcataanatcactagctaagttactagtagaagatagcacaaacacaaactatctccattttatattttttaaatcgattggcctaccaaatccccaaatttactctaact

SEQ ID NO: 28746 - DNA, 332 bp, Oryza sativa
  Clone ID: PAT_MRT4530_33314C.1
ggttgtggggttttttttttttttttttttttttttttttttttttgggggttcgccacaatggccttccgcagaaaggggttgttaaaaggccacttccaaccgatgccaaaccggggctttgccatattggccatttcacaagatttggggggggggtcctacttcaatggaccaaaataccccccctttcccctggaggttttctccttctccggggaataaaagagggggcgttgtgcgaggaggggcgcgccgggccgcccctccccgggtccccaccgggccgccgcctttcccagccagccgcgccgctggctttcaccgccagg

SEQ ID NO: 28747 - DNA, 482 bp, Oryza sativa
  Clone ID: PAT_MRT4530_33315C.1
caatcggccccccagcccaggcttcagccccaaccaagccaaacccaccgccacgtccgcccaggcacacagggcccacaccccagccaaaccaaaccaaatggccacagttccgccccagccgccccagttggagttttcttccaaagggggaaaccagccgccgttgggacccacaggagccaaccacagtggccacagtggggagtggacagtgttgtcgccccaccacggacggacggacggatggacgtccaaggccccaccccatgggaccacgtgtactaatccatggcaatttcttggaccctcacttccctcccaaccctccacctgggatggtatggccaagcttagctccaagccaaaattaatccaatggacctgccttaataatgggatgtgcccactggacctggatgcccaccaggaggtcatcaccatcggagataattagtagagaaatttgccaggctgtcaaa

SEQ ID NO: 28748 - DNA, 3370 bp, Oryza sativa
  Clone ID: PAT_MRT4530_33316C.1
catccacagtcacagacgcagctcaatacatgccggtttcctcactgtccaaaataagaaaggggttctgtaccaaatgacatggagaccaaaagtttcagtcacttatcttcactgaaaccgagctcaacttaaggtgaagccaaattcatttacaagctacaaacagggctcagtggttggatgctaccagtgcatctctgcattcggtcaccaatcaccatggccacattatttcttattgctcatcaccatgagaagaactcaagctaaaaataaaacattggtgccaaggccatgtcacccctcacatcaactgtttgccggactgcggggcgaaattgatgaggaatgtgcgtatctccatggggcccagatcaacgacgagcttggaaggatctacggggcctccccggacgatcttttcatcagcaggagggccttccaccttccacttcagcctctttttctccatggctgaacgttcttggttcgctgataggcttgtctcaacaatcttgacaatcttcttgtctggaaatactctcttcaggtcgacgctagctagagctgaaagatccttgtgctctccagcctcgtataggtgagccaaccgaagaagaacagttccgtcttcaagttcctgaagagtaagcaatgcaacattatcaggcaagctgtaggccggatccattgcagagaattttgtaacgtgtgaattcacccaattacctccatcctgctctgcaaaagcaataagaagaggggagtatatttcctggccaaatgtccgccgccacctagctccttcaccttgtggatcaattttgagataatactttccttgaataactagtccttcacattgattatcaaaacaggttgtttcatttaatgcctctgcaacaccacgaccatcatcatgaagtagtctcctgtgtagcattagctctatctgtccatcctttatgctggcacctccaacagacctgtctacaagtatagataactctctgcttccatcttccacataaatgccaagattaacaggataatagtttccagcgataggctggtgcacttcgatcttccactctgaccggtaatcccgtatccttttgatgaagtcacgtccactggaatcagtgtaaaatgttttgtttgttgccatgtttgtaacgacttcagtggatagttcttttccatttccatcatccactggtattggtccaactataaattcagtctccacatagtcctttcctttgtaaactctgttgatctgatatatccatggattaatctgctgatgcacttcgtccaatatggacccacggagaactgtcagaggaacctgtccatcagtcttgataggaactgtgccattagggcgaaatatgtatgctccagaagcctgaggatcacttccatttccatcctgtcctatgtaatacttgtacttctgctcaaaatttgcttcaacctgggtcttactattggagtacagagataatgctccagctgcattgtattgaagtttcaactgtccttgcccaatttgcatgttactattttcacttccttgagatgagtgcagagtggacatcaaagagactgatgctgatttcttcccgcttgatataaagtacgtattgaaaccaagaggtggtacagaaactggaaaagcaagccaaaacttgggttttgcagctggtaacatgcctaggtaagccttgacatgtttctcccgcatgtacaaagatgcattagctataggcagaagttgtgattcaacttctcttccctcagaatcatgaacaacaattgagtcactgatgaccggtatgcgaaggacatcctcccgtttccacccaagagagttgtacacaagcacaaccaaacttttcccttgagaaaggtccatctcggaaggggggcaatatgtaatatttaggagcggacactgttcaaaattcgttgtttgggacggacaatgtgattttgagcctgactggctcaagcaagagagagaggatgaaaccagcttctcggcttgtgtatagccaattgataatctctttgcatagtcatttgcgacatgttgcttctccgttcctgtaacagcatcatggtgctgagcaagagctagagcatcagctaaactatctgttgtgagatcagagttgcttctccctttaaagaattccaactgcctagctgccaagtaatatccactcataacacgaacgtatcgttttaaggcaggtctgcttgtgaagtaacctgtccaatatgcatttgggttgtctgcatacgggaaaaaatcattagtcttgagaggccatggcacattttcagcatgttttgcatcagtataaatcgaaggtgtggaatacagagcattgacacggccatccttattaacgtagtgaattaatttgtccatctgtctgaaccaactttctgcatattgatatttgaagtctgtgcccattgtaaacataacgtgatttgtccttgtaatatttgcctgtgctatagctgcagcaacaaagtcatccacccgttgctccacattataatcaaaaagaaggggatcatcctggacgattggggaagtatcatcaacttcgaagtaaaactgaccaggaggtggttcataattttttgggaagatgccagcaaagatgtcagctgatgagccgaaggtcttggagcccctccacacaacctcgagctcttttgttcccttccgtgtgtcacggtcttggtaatcaatccggaaaaaataaaaagcatcgaatcctacttctgtgcctaggaggtaagcctgaactgcggagtgcccaaacggatcaatctgccaaccaatccttggaatctgaccaaactcctccttgatgaacctgtgcccgagcgtagtctggtctatcatgtcaatgtagtgcacggtcgcttcatcatgcatgcacattcccccgtttattaattccaatcgtccagtgctgatgagccccttcactatatccttaatcatgtcgctctgctgtctccaccatctctggaagaatgcctgctcaacatagacgaacttgcggttctcatccttgagcagcgctggcacgagcgaatccagcacattctgcacgcacgccccctggatggagttgttggatccgacgtagtactggtcgacggtcttgagccacccgacgtcgtcgtgggtgtgcggcaccacgtgcacgttgagcttcccccccaccacccccgccgacgtgttgtaggggatgtacacgcactccccgacggcagcggcggcggcgaggaggagcaggagcagcgccgcgaggcgggcggcggaggcgcccat

SEQ ID NO: 28749 - DNA, 309 bp, Oryza sativa
  Clone ID: PAT_MRT4530_33317C.1
cacacgcagccgaacacgcctccggcgatcgaaacccttgccgctgaagtttataattactgcgcaaagatggtggacgattataatactttgaactactgggacatcatcaactacatgctgtggctggagcaaagagatggaagatcactctacggtgcgcaagctgattatggacccttaggaactccagcgcaaaactcgctaccattgattacagctgaccacattttgggaagtaacatatctactactacgctttgtatgtcatggggaacggacaacatttggacagatataatgtcaatc

SEQ ID NO: 28750 - DNA, 1691 bp, Oryza sativa
  Clone ID: PAT_MRT4530_33318C.1
atggcctggcctggaggacacaccaaaggtgcggttgcccgtgccgtctcgtactctctcgtgcaggctaacgttggaatcttgggaggggagatggcggtcgtggcatcgaggtgtacggggctgctcctccccgacctcggcgcgagcctcgccggcttccgccgccgccgctcgacgccggcttcttctctcagcctccgcccgcggcgggcccgtcgacggctcgggtccctctcctgcatcgcgccgcccgattcggcggagccgcagacggatgagccggccgccaaagatgactcgactgaagataaggctgaggcaagtagtgcatcccaggatgctggaaatccaacttttcccaataaagatctcaggcagaaggatagcactggcctccacaattggagctgttgggcctctttgcagaacaaagactggactttccaagcgtttcgctggaagaacttgcagcaaatgctgcaccgtatgaagaggctctcgattgcgggcgacgtggcggcgcgtcggccacccacatcatcatcgtctccacctccgggcttttgactcgggctaacgttggaatcttgggaggggagatggcggtcgtggcatcgaggtgtacggggctgctcctccccgacctcggcgcgagcctcgccggcttccgccgccgccgctcgacgccggcttcttctctcagcttccgcccgcggcgggcccgtcgacggctcgggtccctctcctgcatcgcgccgcccgattcggcggagccgcagacggatgagccggccgccaaagatgactcgactgaagataaggctgaggcaagtagtgcatcccaggatgctggaaatccaacttttcccaataaagatctcagcagaaggatagcactggcctccactattggagctgtgggcctctttgcatatcaaagactcgactttggaggcgtttctctcaaagatcttgcagcaaatgctacaccgtatgaagaggctctctcaaatggcaagcccactgtagttgaattttatgcagactggtgtgaagtttgtcgagaattagcaccagatgtctacaaagttgagcaacagtacaaggaccgtgtcaactttgtcatgctaaatgttgacaacacaaagtgggaacaagagcttgacgagtttggagtagaaggcattcctcattttgcctttctggacaaggagggaaatgaggaaggcaatgttgttgggagacttccaaaacaatattttcttgataatgtggttgctcttgcttccggtgagcccactgcggtggtggcgacggttgcgggggcggcgcagctgggcgaggtcgcgggcgcgtgtgagcgtcaccaggcggcggttgaggctttttgcccggaagccggcgaggatggcgacgcagggcaagctcgtggcagtggcggagcaagctcatggcggtggcggcaccgcggagctcgcatcgacgtcgtcagcggcaacggcgcgggagcacggggcgacggcgacggtggcaacggcgcggatttcatggcgacggtggcgtcagcggcttgtcgacggcgacagcacgatggctggttgacggcattggcggctgtcggctgctgtggcattagagctctcgcggcggaggcagcggcgcggaacttgtggcgacggttgcagtag

SEQ ID NO: 28751 - DNA, 477 bp, Oryza sativa
  Clone ID: PAT_MRT4530_33319C.1
tcggcgaggcgcctccccgtgaaccaaccaccggtgctccacggcggcctttgccgtcagcctcttcctgtcgccatctcatcaaaggcaagcagccgaaggttaacacaccgccgccgagtctgcacccctcgggccgccctccctccgtggaaggcaaaggaaatcacacatgaagatgcatggaggcggcgtgtcacgcccagaaattcccgaatagaatttcaagcagaatgcatcctcgacggcacggacgaagtctactcctcggagaaaccaccatcggacgcatacttgaactctgagggttgggagatagagcaagaactacccactgtactcagcaagtcctaccggaatggagggtatgatgcaaggtttcacccccagtcctcgcaaggcagcgggcagtcccttctcgtgcctaagtgaatccgaaagcggcataggccgtcgcagggcccatccgaactccat

SEQ ID NO: 28752 - DNA, 3762 bp, Oryza sativa
  Clone ID: PAT_MRT4530_3331C.1
atggtcgaggtcctggaggaggaggcggtgatgttcacccccactccgtctgggagtgaggatgctagcgagagctgcggccctcgtcaccgccgccgcaactctccaactcctccccgccgcgatccctcgcggagggaggaccccacccattcgggtggttcggccctctccccgcccccgggcggagggaggccacaacgcgtcagggcacggcgccgcctcacttatggtgacggcggctcgccccgaggcgcgcttcaagcagtgggtgtccttctgcggcatccccccgtgaactcggagccagagacccctgtccagcgctggttgggcgacgtggccaacttggtcactactgcccagtggcagttggccgcgggcggccgacccgccgtcaccgtggcagttggccgcgggcggccgacccgccgtcaccggtacgtcgcgtaccctcattatcctctcctcgtcagcaaggagagggcccgtcggtcggccacggcctcgaggcggtccacggatccaacatcgttgggggcctcaggaagccggaggcgtcacgacggtctctacggggagcaggacgctcgaatcaatatcgagcgacgccgggacgagcgccgagctgcccgcatgggggaaggcgcctcctcatctggagtgccacattcctcctcacgaggcggccctccccccacgctcacccctggagggacaggttgtagggccttcgtggcgagtctccggaatgtccggtggcccccgaagtttcaccctaacctcacggagaagtatgatggcagcatcaatccctccgagttcttccatatctacaccacgatcatcgtggcggcagggggcgacgaccgggtcatggcgaattatttccccatggccctcaagggtcaggcgcgcggctggttgatgacccagccccccgactccatctactcctgggaggacctgtgccagcagttcgtcacgaacttccagggcacatatccccgcccaggagaagaggcggacctgcacgctgtgcggcggaaggacgatgagtccctctgctcgtacatacagcgcttctgccaggtccgcaacactattccatgcattccggcccacgcggtcgtttatgcatttcggaatggcttgcagcataaccgcatgctggagaaaatcgctttcaaggagtccaagaccaccgctgagctcttcgagctggcggacaaggtggctcggaaggaggaggcgtgggcctggaactcccctggcatcggcgcggcggctgcggctacccccgagtctattccccgctctaagcgtctcgccgactgccgctcggtcaagaatttggccgagcggttccggaaagccgatgaggagaagcggcagggtcgacgagagggcaaagcccccgcgaccccagccgatgaccggcgaggggaggccaagaagaaggcccccgccgatgatggcgatgacagcgaggatctggagttccagatacctcagggaaccatcgccacgcgcgatgggggggggggcttgcgctcacacctcccgccgaggcttcaaggccatgcggcgagaacttctggccaccgttccaacccacgaagcggcttggaaggcgcgctggtcagagctgccttcgacgcgctcaaggccccggggatgaagctccagccgtcgctgctgatcatcggcgtgactccgggacacacgtggcccctcggccacgttgagctcctggtaaccttcggcgactccaccaacttccgtaccgagcggatcgacttcgatgtggcggacctcaatctgccctacaatgcggtcctgggcagacctgcgttggtgaagttcatggccgccacccactacgcctacctccagatgaagatgccgggccctagtggtcccatcaccgtctttggtgatgtcaaagtcgccctcgcctgcgcggagcagcgcgccgacaacctggcggtggccacggagccacaggccctggaggcctccgcgtcccgcgcctccaagaagcacctcacctcggctgacgaggttgacttcatccgcgaggttatccatccggagtggctggcgaacccggtggtcgtcccgaaggccaacgacaagctccggatgtgcatcgactacacggacctcaacaaggcatgccctaaagatcccttccctttaccacgcatagatcagatagtcgactccactgcggggtgcgaccttttgtgttttctagatgcctactcttggtatcaccaaatccgcatggctagggaagatgaggaaaaaactgtcttcgttactcctatgggcaccttttgttatacaactatgccttttgggttagagaatgcaggccttacttttcagcgtatgactcgtattactttgagtaatcagatagggcccaatatagaggcgtatgtcgatgacctagtggtaaagatgcgccaccaggacacgttgttgcaggatttggccgagactttcgacagtcttaggtccacacgcgtgaaactgaaccccgacaagtgtgtattcgccccggggctagaggaaccattgctgctctacttggccgtgaccccccatgtggtgagtgccgccctagtattcgagcgtgaagagaacggaccggaggcccccttgactcgcgatggcccttcgtcccccgaagacccgatgcccgaagcccccagcccctgggaggaccccgaggcccccgtgggaggaggggaggctttggcaagtggtcctgaggcatatgatcctgacatgattcgagaccccccggggcccctgagcaagggcgccccagatcatctgcccctgacaacacggaccggccccaccgaaaggtgcaagtgccggagtcacgctgacttcgccaagcggggacgtcctcaaatacgtcgttcggctcgacttccgagccacgaacaacatggcggaatacgaatgactcctcgcggggttgagggcggcggccggaatgggcatccgccatcttctggtcctaggcgactcccagctggttgtgaatcaagtatccaaagaataccagtgcaccgacccacaaatggacgcatatgtccacgaagtgtggcgcatggcatcgatctcatagccgacacccatcaggacatcctcggaccattcaaagcggctcgaggcgggtatcaacacctgtacatcgccatcgacaagttcaccaagtggcccgaagcttatccagtcgtcaagatcgacaagcattccgccctcaagttcatcaggggcatcacgtcccaattcggagtgctcaaccgtatcattacagacaacggcacccagttcaccagtgagctgttcggcgactattgcaatgacatgggcatcaaattgtgctttgcctcgcccgcccaccccaagagcaacggccaagtcgagcgagccaacgccgaaatcctcaaaggcctcaagaccaagacgtacaacgtcctgaagaaacatggggattcgtggctcgaggagttgcccaccgtgttgtgggcaaatcggaccactccaagtcgcgccacgggggaaacgccttttttcctggtgtatggcgccgaggcggtcctaccttcggagctttccctgggatcgcctcgcgtcgcgctatatgatgaggccaaccaggatgatcttcgccgcgacgacctcgactatcttgaagagtggagaaggcgcgcggccctacatgcggcgcactaa

SEQ ID NO: 28753 - DNA, 501 bp, Oryza sativa
  Clone ID: PAT_MRT4530_33320C.1
atggttttgtacctcttcggcattaaccactcaaagaaggaggtggtgaaggcggcaggagcgtcaggtgctacgcgaggtgatgaaagcggtagcaacatcgagtgctccgggtgcgacgatccagcagccctgacccttggaggggtggatcctccgccgctggccttgagtgtgaacagaggcggcggcggggaggacgcgtggatctgccccggtggtggcacggggagcacgcggcgcgggcggcggcggctcgtccccggcgtcggatggtggcggctcgtcctcggcagcggatggcggcgacagcagcggttcatccccagtggtggagctgacgacaacgaccgcaaccgtggtgacgacgatgaccgcgatgctgccggcaagcgtgtttttgtgtgttttggttccgcgaccggtagatggcagcgacggtggctcgtcccgatggcttcggcggtggttctctttggaatttttggcggggtgggttga

SEQ ID NO: 28754 - DNA, 150 bp, Oryza sativa
  Clone ID: PAT_MRT4530_33321C.1
tttatatacgccaacgatgcggcgcgaaggtggagggattgattgaacaagacggtggtggaaggcacgcgcatggcggcagtatggccagccgcggacctgagggagctggctgtggccacggtcgccggcgtcgtgctggaccacccg

SEQ ID NO: 28755 - DNA, 567 bp, Oryza sativa
  Clone ID: PAT_MRT4530_33322C.1
cacaaaaacacgcttgccggcagcatcgcggtcatcgtcgtcaccacggttgcggtcgttgtcgtcagctccaccactggggatgaaccgctgctgtcgccgccatccgctgccgaggacgagccgccaccatccgacgccggggacgagccgccgccgcccgcgccgcgtgctccccgtgccaccaccggggcagatccacgcgtcctccccgccgccgcctctgttctgccgccggcggtggcctcctcccctcagacagatgggagaggaggcgatgggagggcaggggcggcgcggggagtcgccggtcgtcgccgccagagccgccgccgttgccgtcgctggtcgacgcccccagagccggcgccgatcgtcgccgctagagccgccacctccgtcgcagatctggtgaaggggaagctgccgcccgccgcctccgccgctgcccgccgcctttggggggagggggaggagatggggaagggggaaggggaggagaggggagggagagaagggggtgagaatgagaggggaggaggagggggaggagataagatcgaaggt

SEQ ID NO: 28756 - DNA, 270 bp, Oryza sativa
  Clone ID: PAT_MRT4530_33323C.1
atgtggcaccaaccaaacaggcccgcactagagcagccgagcggcgacgagtcacaccgccgttgcgcgccgctgtcggggcttgtctctccaagtcgcacgccgctgtcggggctcgtctctccaagtcgttcgcgagatatgcaattttctccgcacatcgacgacagcttttatgagtcgaggtcgcgctcgagcttcacgacagtcacggtgattcactatttcactacgtacaagccgcccatgctcaagatcactgttgactgt

SEQ ID NO: 28757 - DNA, 181 bp, Oryza sativa
  Clone ID: PAT_MRT4530_33324C.1
ggacctcgaggagatgatgatggaggtagagcacggtgagacccacatggaggtagatcttgccgcagggcagggacccaacgctcaggacaatgcaactgacaatagcaaggtcacggaggaggtggagcttggtgctggagacaacggtgttgatctctaccaccgaggtcgagcctag

SEQ ID NO: 28758 - DNA, 264 bp, Oryza sativa
  Clone ID: PAT_MRT4530_33325C.1
ggcgacctccttccctgccatcctctggtcgtagcagaaggtggcggcatcggctgcgacgagggagggcgcgggggtggtcccatcggcgtggcgcggggtggcggcggccccatcggcgtggcgcaggccggcgaagcgcggccgaacaaccgggggccctccttctcctcctccccctcccctctcctccccctcctccccttcccttctccgtcagcagaggcgggcggcaccggggatgatttgtggatgattttgtga

SEQ ID NO: 28759 - DNA, 466 bp, Oryza sativa
  unsure (1)..(466): unsure at all n locations
  Clone ID: PAT_MRT4530_33326C.1
ttttnttaattttttttttttttttttcttttttttgggggttttttaaatttttgatgggggtttcctcaatttatttacatgataagcaccaaattcaggaaggaaggaaaaagagagccgggggaaacaaaaattgggggcggccaaaaatggaaaaacgggcccaaagaccacaaaaaattgggtcttaaggtggaaaaacaaaggccgaaccgaagatcaaaccaaaatgggaattgccaaagggggagggggggcaagcacaaaaaaacgcgcaggggggcttgcgcaaacccggccggacttgcgggacacccaaaaacgccggggaaggagaagcggatgtaccgcggcgaaacgacgacagggaagagggggaagacgaggaggaatggactttcgccccgactggtctcacacccaaggcgacgttgcagaacgccgacacggacacccgcgccgc

SEQ ID NO: 28760 - DNA, 337 bp, Oryza sativa
  Clone ID: PAT_MRT4530_33327C.1
tctctctctccacatcacaagtcgccttccgggtgcgcccccgaaatcccctggggaaccaaagaaacctgaggcaccaccatcaccaccaccgtctccggctccggctccggctcctgcgcgcgcggcgaattcgggggaccctcgcgctcacgtggggtgtgggtggggggtagatccagacgtcgccgtcgccgggggggggggagggagctcgggttcaaccagcgggggaggggggggcccgcgtgtgccttatagggggggggctgcggagacccctgccgtcctggagtccgagagcgaagctccaactctggcgcgggaggcccagcac

SEQ ID NO: 28761 - DNA, 2226 bp, Oryza sativa
  Clone ID: PAT_MRT4530_33328C.1
atggacaccttgaaccacatcggcgccggcgacaagctctacggcgacaacggcaccctcgcagtggtcttgcaccacggcggagcgagctgcaagaagaacagctccatcccccagacggggaccttgagccacatcggcgcgggcagcggagtgagctctgatgagagcatgctctacgacgctgtcatcgccaagccgggtgcgggctccggcgacgagctctatggcgacaacagcgccctcgcagtggtcttgcaccatggtggagcgagctgcaagaagaacagctcgatcccccagacggcgaccttgagccacatcggtgcgggcagcggagtgagctctgatgagagcatgctctacgatgctgtcatcgccaagccgggtgcgggcttggacgacgagctctaccacgacaacggcaccctcgcagtggttctgcaccacatcggagcaggccacgagaaaaacaaggcgtacgacgttattgaccacaccgcaaccataaaccacatcggcgcggacggcaaggatagcatggtcaatgatcacgttggtgctggcggtgaccagaacaaggtgttcgacaacattggtgcacttggcatgccagcagcacaacaagctccaccgtcgacaggcaaagtgaaccattatcagtccagcgaccacctcggcaacaactaccatcacgatgaatcgtccgtccggcaacttctacacacccgaggccgcctctgcactaggccaggccgcatcctcgtccctggtggccgcggcgcccatctctatgccgcaccgagctacacactcgcagcggccgatcaaatccacaacctccaactcttcggcgtgaacaacttcgctgccacaggcatcatcgactacttcggcgctggcgctgatgatctcggcactgcgtcgtccgtgttcgacgctgcggacgacatcacgctcgcgcactacctcgccatggccaccgtgcagagcgtgtggcaggagaattgcatggagcaattcaagctcgtgctggaagcgcttcatcaacctcatcgcaacctctacatcgccgtcgacatggagttcacagcggacgccgccaccaacatgagccataggccagtaacctccaccagctgctaccaacacgtgcgtaggtacgtgaacggaggtgacatagttcagatgggcctcacatttgcattcgtcggtgatgtcgaaggcgaacaagccccctcgccgccgatagcactggagatcaacttcgacttcaacgtcaattcgcctaagtaccatggcgagtcgatacatttcctatccagccaaggccatgatctcacgcagcacagcaaaagaggcgtcacgccggagtttgtttacgaggggctcctgcgccacctcccgttcggcgacggctccgtcacctgggtcgcctatcacggcgactatgacttggctttcctcctccgcttgctgcaagggggagaccatggctccgacgcgctgcttacattgtcctgtttcttcaagatcgtcagcctttcaggtcaccagatgcaccgcatggatgctcggcggggattgcttgctgggttggaggagtggaacatggctatcaaatgtgcacgccatattgacgaccatactggaagcatctacgttgtcaagatgctaccacataagttggatgaagaggcaagacgaattgaagagctgcgctcctacgcagttgaagcccaacaaaattatgaactcatcaagacatttcttaaggattctgacttgtacgaaatcatcgtcacatttatgaacgctgaaggaatgttggcttacagtcgtgcctggaaattctgcatcagttccagggcagacaatgcctgtgtgcatcctcaacagtttgctaagtttatggcatcttgtggggcattgggtgaccccaacatatcttgggtgacatttcacggagcacatgggatcgccaggatgatcagatcctttgacatcatcacaattccttggattgagtgcaaaggaggcctgttcgatgttgctcaagcactgaacctgaaggaaattgaggctgacatggaggcagccagggttcttcttactctgagatgctatatgagactggcagaacgccctgatttcccaggcacaaagatggctgtccaagggctgcttaaggagagttgctgttggaaatgcccagcaaattgctga

SEQ ID NO: 28762 - DNA, 531 bp, Oryza sativa
  Clone ID: PAT_MRT4530_33329C.1
atggcggggcggggctcgaggcagcagaacaacgggaacggcgacacctcctctcctcgtcgccacctccacatccgcgccctcaccgccgcctcctctcctctccctccccgccgcgttgatggcgacgtccaggttgatggcagcgtcgacggtgttggtgtcggcagccaggagctcggcgaagcggtggaccggcgggagcagcaagacacggtcggagaggagagtagcgaagtggcgggagcgaagcagggaggtggaggagacgtggaggttgatggaggggcggtgatcctcgctggtgtcgaaatccacattgtaatcggggcaaggggtcaaggtggaggcggaggacgaggtcagtgttgggaaggagaacaaaggaaaggaggcggcggtgtggggagccagcaaggacgggagggaactaagccggcgtgcggagtcgtcccctttgccgagattgacgtagcagcgcttgcgcgccgtctgctgcggagagctcatccgccggccctgctggcctag

SEQ ID NO: 28763 - DNA, 416 bp, Oryza sativa
  Clone ID: PAT_MRT4530_3332C.1
gagctaaagtgttttctaagatagacctgcgatcagcctaccaccagttgataatccgggaagaggatattccaaagacggccttcaccactcggtacgggctatatgagtgcacgcttgttgtggtattcatcgacgacatacttatctattcaaagtccgaagaagaacatgagcaacatctccctcaaggtgtggcagttgatccatcgaacgtggagtcagttaccaaatggaccccaccgaagaccgtgtcgcagattcaaagttttcttggacttgcgggatattaccgccgattcatcgaaaacttctccaggatcgcccgacccatgactcagttgcttaagaaagatgagaagtttaaatggacagctgagtgcgataagagttttgaggagctcaaaaagaaatta

SEQ ID NO: 28764 - DNA, 294 bp, Oryza sativa
  Clone ID: PAT_MRT4530_33330C.1
atggagaatgcaccgagattggtaccgcaacggatgagcgatgttgttgctccctccttcctcattgctgttgcgcctgagagcatggagcggtgccaccaccgtcccgctgaggatgggggagcgtggccgtggtcgtgccacgcggggggggggggggatggggcctgtttggttggtgacctgagcaccacgcctgaagaatttgcacgcctgagaggcatccaacaaactcatgggttctacctgaccaggcagcctgacgagttgcttgtttggtttgctgttgctgcc

SEQ ID NO: 28765 - DNA, 272 bp, Oryza sativa
  Clone ID: PAT_MRT4530_33331C.1
cgaacaaagaatgtcaacacacccatcagttaacatgtgagagaagcaaagcaatttagtagagatccaacatccattacatcactaactggacagacttgttcggaattagtacataggaacttgagagcaccaatgtgaagggaatgaaaggcgaatacaagaaattgagcaggtaacagcttgatatggaacaggggggaataaaaactgtaaccgtaacgtgtgcagattagctaagcacaaccaccatgtaaccagcctatagtgca

SEQ ID NO: 28766 - DNA, 298 bp, Oryza sativa
  Clone ID: PAT_MRT4530_33332C.1
ttatgctgtgtcggcttttttttttttttgggtttgtttttgaaaagaggattccttttctctacacagacttgcaaagaaatgatgcttcaaccacaagtacaacaaattgcatttctgcagtccaagaagttatcatatactagcagagaggagtttatgaaaatgtatcagaagggaagggctttgaaaaatgttacagacagacatattgcataacaaacaatgacccagaaaattagattgccttggaagaactttttgcttaaattctgcaccaagctggaccaataagtct

SEQ ID NO: 28767 - DNA, 744 bp, Oryza sativa
  Clone ID: PAT_MRT4530_33333C.1
ggccgccgccgcaatggacgacgtcgtcggccgcgtcgcgcggcctgcgcgccccagcgcgcgcgccatcatggaggggacgcacaagcagatcagctccggcggcgcctcgggcggctactgcaccgtgccgtggtgcagcatctgcaccgggaataacccgttcgccattgccgagttcttgctgtgctgcaacctctgcggcgtccctctcgccggccgccccagcttcatctacattggagagaaggcgttctgcaaggaggagtgcaggtcgaggtacgtggtggaggaggcgctgcgcgaggcgagggaggagaagcgccgcgccgccgccgccgccgccgcgtcgccggagaagaagaaggaggcggcggcggcgaggaagggcggggaggagtgcagggaggggagcatcttcttcatctgcgccgacgacctgtgaagaatgtgatggatatgatgcatcatgcgtgcattgcatggcggatgataatcggagcttggctgtaataataatcgatctccaccataatataatacaatagtaatatacttagtgtactgtaatgaggatgaataaaggggatcaaatcaaggccaccatgcatggctagtcgataaaaaaaaaaaaaaaaaaaaaaaaacttttttttggaacaaattaaagtgacatgcataaagacaaacatagtttttcttaaggtcccaaaatacttttaatttggcgggcggcgttttagt

SEQ ID NO: 28768 - DNA, 202 bp, Oryza sativa
  unsure (1)..(202): unsure at all n locations
  Clone ID: PAT_MRT4530_33334C.1
cacaagtaaagctcccaaaatcaaattaaattaaagagnaaaaaangaagangagaagggcaaatcgattcgccatggctngcttcccgtangtctctccccctngtccttctnctnggtttccgtcgcgctcctcgcggggcctcccctntngncggnggccganaccggtgtcgcngggttcnacgnccntcnggcacct

SEQ ID NO: 28769 - DNA, 682 bp, Oryza sativa
  Clone ID: PAT_MRT4530_33335C.1
aggagtacaacactcttgcaacagcacccaacaatttggagactgcagagaaaagggtgttcttactagctaaggaattttcaacatggcagttacagcttgaaccacctttaattccagggcagcttacttctactattaacatgattcagaagtcggccgagttaacccgccggagctgattctttggctcctgttgcggcacatactgcactaccggttcaggtgccttgtgcatcctgagccgcttgttctcctcctcaagccgcgagatcttgttctccagctcgttcgtgtacgcctgcttcctggcgcgcgacctcgctgccgactcgcggttcttgatcatccgcttcttccgccgctccaccgtcttctccgcggcggcgccctcacccgcggcgggggcgcgcttactccctgacaccgggccgtcgtggtacagcgcgtccagcaccggcccggcgcccagcccgacgtccaccgtcttcctccccgccgccgccgcccccgcccccgccccaccgccacccgtacggagcaggtcgtcgaggttcacgccgtgcagctgcccctccacctcgctcagcgcgaggccgcacagcgacccctgcctcgacacgcccccgctcccttggtgcgacgacaaaccagtctcaaccagaaattgcgccagcacaaa

SEQ ID NO: 28770 - DNA, 2291 bp, Oryza sativa
  Clone ID: PAT_MRT4530_33336C.1
ggatgaagtcggccgtgcaggcgcggaacgcgtgggcggcggcgcactcggcgtacgccatgtcgctgcgggacacgggcgccgcgctctccgagttcgcgcacggggagggcgtgccgccgccgccgccgccgccccaaccgccgccgctcccggagttctcgccgtcgcccgcgaagatccaccggtccaagagcatgcccctgcccccgcagaccaagggccccgcggtgctccacagcgactcgattagggaggatgacgaggaggaggcggagatagaggaggaagaggacgaggacgagcatcttgatgaccggcggcggaggctgcgtcaccggccgcaggtaccgccgcttgtgtcttcgcccgcaccgggaacgccggtgacgcctcagcagccgccgccgccgccgccgcctccaccggactcgaagcccggagttgacacgtgggactatttcttctccatggacgaggggatggcctccattgcccccgacgacgacgagatcatccaggagccagaagacgagaagtatgtccctgcctcgccgccgcgccctcccctttcccctcctaccccggtagcagcgccggcgccacaggaggagtttgaggaagagccacggacgccggagatggtcacgccgccgccatcgctcccgccaaggccgcctgcggtgtcgtccaagaagaagaaggggaaggggaagcatagggcggcgcaccaccagcacacggagtcggcgccgccggtcacattagtcggcggcggcgggggaaaggccgggaaggtggtccccgtcgagttgccgcgcatcgatcttctgcgggtgctcgccgagatcgacgacaggttcctcaaggcgtcggagagcgccggggaggtgtccaaggttctggaggccaacaggatgcattaccactccaatttcgttgacacccgagggcacatcgatcattctgctagagtcatgaaaatcataacatggaatagatccttcagagccatgcaaaatggagatgatgggaaggacgactttgaaaatgatgaatgggagactttggcaactgtcatagataaaattttagcctgggagaaaaagctctatgacgaagtgaaggctggggagcttatgaaacttgaatatcaaaggaaggttgctttgttaaatagacaaaagaaacacaatgctgccactgaggttctggagaagactaaagctgctgtaacccatttacacacaagatacatagttgatatgcaatcaatggattcaactgtgtcagaaattcaacatctccgtgataatcaactttatccaagacttttggatcttgctgacaggatggcaaaaatgtgggaggacatgcacctgcaccatgaaaaccagctgaaaactgtgttaaatctgaagtcagttgacatttctgattcccatattgaaacaagtgatcatcaccacagccacacacgccagctgcgtgatattgttgaaaagtggaccacaaattttagcgatctcatgagttatcaaaaggagtacataaatgctctatatagctggctgaaactgaaccttatacccatagagagcagcttaaaggagaaagtagcatctccacccagggtgcagcaacctcctgttaaagccctcctccaagcgtggaatgaacatctaaccaagctgcctgatgatcttgccaagactgccattgtcagttttagggcagtcctggacaccatattaagtgttcaagatgaagagttgaaacaaaaggagacttgtgaacacactcgcaaggaatacatgcggaaggctcgggcttttgaggattggtatcacaagcacgcacagcgcagggcgttcgacgttgatccagagagtggcgaggggacaagccaaaaggacacagttgcggagaagagatttgccgtggagagcttgaagaacaagctggacgacgaggtcgaagcccacaacaagctgtcgaagcaagtcagggagaagtccctttcgatcctgaaagcgcacctgcctgagttgttccgtgccctcaccgacttctctcttgcttctttcgagatgtactcgaagatgaggttgatgtcactcatgcaggatcaggatggacagatggagccgacacatcagattgaggacttgcccgttatttacgtgcggaaaaagggcacttcaggtcgctcagcctcaagtatagtcccagttttattcatgtcactcaaccgcaaaaagaccgggtatcgagtctcccttgacatctaa

SEQ ID NO: 28771 - DNA, 341 bp, Oryza sativa
  Clone ID: PAT_MRT4530_33337C.1
gaaaacctgatcttatatttttaatttccccctacaattttgaggaaacccaatacaagaggggggggagggttgtaaaactacccggagcactatgggaaaaaagggaaaaaggatctgtaaatgggggggtaaaaaccaacagtgcttgcgctcccgcggggttacggcccacgcgaacgcgggcgcaagggccaaacgccggcaattccggacccgactctggggcacaccagggtttgcctatggggagccccacgagaacttggggggatcacgggcatagctaaaacctgtgttaaaaggggatgcgttaaaaattgcacaaaacatcggatccg

SEQ ID NO: 28772 - DNA, 449 bp, Oryza sativa
  Clone ID: PAT_MRT4530_33338C.1
agcgacgggagggaggaggcgctcggcgtggttcgggcacgcgcgggcagagcgagggagagagtctcactcctcgtatccgtcgtcgttcattgctgcccgccggctcggtggctcgctgctgtttgctggccctgccggccatcgcctcccctgccagccgccgccacctctgctggccgctgtcgccttccttcttcaacgtcggccatcggcgcaactcgacaaggagggcgacggagccggcgtccaccgtcggccatcgtcgcgtgaaacagcagtggcgccgccggctccccatccactcgccccctagccttgagccgccgcctcctcatgcactggttgggaagagggccgtcgggtgggtggggatggggaaggggaaagatgtggactgtggagaaagagaagggaagaagaaggctataattttcatccgcatcaga

SEQ ID NO: 28773 - DNA, 556 bp, Oryza sativa
  Clone ID: PAT_MRT4530_33339C.1
gtggatccccgggctgaggaattcggcacgaggcataaaattttatttcagttcatcggtgtgtgacaaagctacatgcactttaaacaatgtgagatgggacatgctatatgttccaatagggacgtactgggatattatttttcttctatacaagcgttattcctgcttttgtttttcccatctcgacatggttttggaattttctaatgacccatccttccgaatttatattatttgctgggtaaatatgcttacagagttttcattatcaaccaacttcaagatatgatttcattaatttgttttctgtttaatttattattgttctgtttgctccttcttggaagacatagatgtttcaacacagtttatttgacaagtgttttgtcctacctgtcatatatactcatcacatggcaatatatagatgatatccaaacatgcccttggacataattatgtatgggatacctcagtactcagtggtgctatgcaaaggaggtaccagttcatctactaaactgttgcaagtacgtaatgtgatgtggtgatg

SEQ ID NO: 28774 - DNA, 414 bp, Oryza sativa
  Clone ID: PAT_MRT4530_3333C.1
atggagcctacgagcgacgacgacgacaactactgcgccactacgacgactaccgccggccacgtcgctgcccctctccgcgacccctcctctcccagatccggcggcggctcggcggggagggccggcggtggtggcggttcggcggggaggtccggtggcagctcggcgaggctcggtgacaagggtcggcgccgacaaggaggtcgatggaggcggctcggcgaggcaaggagggccggaggcagctgctcggcgacgagggacggcgccgacgatgaggtccagcggcatatcccctccctggtgtggtcgtcccctccatccctccctcttccactcagatcggcccggaggagggatgggtggaggccggtggcggtcgtggcgtggtcctcccctctggagcagtag

SEQ ID NO: 28775 - DNA, 535 bp, Oryza sativa
  Clone ID: PAT_MRT4530_33340C.1
agcacatcaggttgcttgacatgacaaggctgggtgcattgttgtgctgcaggcagctgcaaacacaacaatggttttgtgagtgcaatgctgtatcaagggagtctgcaggcagcacatctcagatggtttgggggcaacacaccaattgtctacagaggttggtgtgcaccacagtcttgcacaggagaggggatcattggggagcagcagcaggcaggcagagcactgcacacagcagtgtgcttgcaaacagtgggacaatgcacacacaatggggacaggtgggtgttgctggctgactgggctgaggtgtgatgcactgaggaccacacagaggaactgggtgcactgagggctgactgaaagctgagctggtggtggtgatggactgctggtgggggttggctgatatgaactgagtggctgtgtgcatgtgtgtgcacgggaagcaatgatgatgagcaatgatggggtggaatgataaatgggatggaacctgtgcaatggttgctgtgctggaagaaaaagggag

SEQ ID NO: 28776 - DNA, 252 bp, Oryza sativa
  Clone ID: PAT_MRT4530_33341C.1
atggaagccgaggccgcgtccctcctcgccgccctcgtctcgcgcaccattgccgcctatcgcgctgcctaccgccgcccgccgccgacccgtttcaacattgctaccgcagcttctgccagtggccctcgcctagactacagcgtaacagcgctgttctccgccacccctagcgcgtgccgtctcggtcacctgctgctcctctcccgcgctggtgacgccattgctaccgttcctcctgctccttggtga

SEQ ID NO: 28777 - DNA, 1486 bp, Oryza sativa
  Clone ID: PAT_MRT4530_33342C.1
atccatcgtcctagctatctcacgtagtctccctctcccggtcttcgcgacgacgctagctttacacgttcgtgataatggcggcgctgctgctgctggcggcggcgatggtggtggtggtgttcgcgcacgcggcggcggcgcagcggtacaatgctatctacagcttcggcgactccatctccgacaccggcaacctctgcgtcggcggctgcccgtcgtggctcaccaccggccagcccccctacggcaagaccttcttcggccgccccaccggccgctgctccgacggccgcgtcgtcgtcgacttcctcgctgagcactttgggctgccgctgccgccggcgtcgaagggcggcggcgacttcaagaagggggcgaacatggcgatcatcggcgccacctccatggacgccgccttcttcaagtccatcggcctcagcgacaagatttggaacaatggccccctcgacacccagatccagtggttccgtcagctcctcccctccgtctgcggcaacgattgcaggagctacctgtccaagtcgctgttcgtggtgggcgagttcggcggcaacgactacaacgcgccgctcttcgccggccgcgccatgacggaggtcagggactacgtgccacaggtcgtcagcaagatcatccgtggcctcgagacattgatcaggatgggcgcggtggacgtggtggtgccaggggttctacccatcgggtgcttcccgatctacctgacgctctatggcacatccaacggtgcagactacgatcgcaatggttgcctcaagagctacaatagcctctcctcctaccacaacacgttgctcaagagaagcctctccaacctccagaggacgtacccacatgccagggtcatgtacgctgatttctactcgcaggtcactgctatggtccgctctccccaaaacttcgggctgaaatacgggctgaaggtgtgctgcggggcgggagggcaggggacgtacaactacaacaacaaagcgcggtgcggcatgtccgggtccagcgcctgcgccgacccggccaactacctcatctgggacggcatccaccttaccgaggccgcctaccgctccatcgccgatggctggctcaagggcccctactgcaaccctcccatcctccactgatttattaatcctacatgtataatatctgcagagagatgagatgtgacccaattaattgtgcactgtttgcttaattaggccgaagtgtgtgtttgtatttgtgtgtgggttaattaatatttgttcatggggtttacttaattagagtttggttgtgatttggagagggtgattttaagcctgatgatgtatttagttggggatcgaatcaaactgatccaagtgaataatgaagctcaaacaagggcttttccattttaaaaaaaaaaaaaaaaaaaaaaaaaaataaaaaaaaaaaaaaaaaactcgaatagctctcgtgc

SEQ ID NO: 28778 - DNA, 459 bp, Oryza sativa
  unsure (1)..(459): unsure at all n locations
  Clone ID: PAT_MRT4530_33343C.1
ccatggatataataatagccatgaaaactccattaacatagaggtagatggtgactaaaacatcactggtttaacatgacagacagcaagagttcaaaaatccttcaagaaaacagaagtggaggttctcaaagaaaaactaaacgatagaacggatagtagcaagaattcctgccacatagaaccaaagggncatgtgaatttcagtaatcttcaaatcgtcaccatcatctcgcatggccaccaccaagcagaagtgttgaaggtcgaagccactaagtagaagaaccagatgtgggaatccacacaccctgatcgcgtaaataacttgttatcatccttaagaggtcaccaccttaacagtatctcttagtctattcacataagcctttaaatcatccaagtcctgcttctgctccaaccaattaagacgccggagtggccttggatgctgatttg

SEQ ID NO: 28779 - DNA, 471 bp, Oryza sativa
  Clone ID: PAT_MRT4530_33344C.1
gtatttcttacgaccacagataaatccgcaagcgcacggaataccgctgtagcacttcaccttcgggtgaccccaaaaggatatcgaacttagggaacgattactaggacaggatttagggctgtcaccacctgccgtctacctctaacaaatccgtgggatatacaacaaacaaagagaagtttctccgaacccagagcagagtgtatcacagctccggtactcctccagaattcctcctagaaagctacatttgtcgaggtagaagtcggagggagcgctaaacttccgggcactcctttagagcttcccctcactttctacctattttctaatgtacaaaaaatacaatagagcctcttttaattcaggtcaaagttgtatgagtgaagtgagatcagctcctccttttatagcctccatatgacagttacagctatgagaattgtccaaaacgccctcaaccgtcat

SEQ ID NO: 28780 - DNA, 529 bp, Oryza sativa
  Clone ID: PAT_MRT4530_33345C.1
ccagtcctcactcctgcatcagctagagtagtgactgaatgacaatgtcctccttctgtgagtgggcgaaaaccgacgacggcgtctttcacctgaagctcaccggagtcgatggccatcactacctaaccaaggaagctctccatgagctcaggcagaagctcgcagagatccgcgagctcgcctcgtcgtcgccggagccatgccgaggcctcatcacctcctcctcctcctcctcctcgccgtcgtcgccgacgacgggctccttctgcgacggcatcgaccacaagagtctccgggccaacatggccgctccggtggccgagcaggccagggtcctcgccgacggcatggccgccgtggtgcgggagctcctcgccatgccgatgcccacagtgtgcgcggccacgggggcggcgcggtcgctgggcctcgccctggcgctcgcgcacgacgacctcgtcgtactcagcgacgcctactacaagctcggcaacgtcgagacggcgttcgcgtgccaccgtacgtg

SEQ ID NO: 28781 - DNA, 117 bp, Oryza sativa
  Clone ID: PAT_MRT4530_33346C.1
atgaggaccccaggcaagtgccacccatcaccaggacggcatatgacacagcaacaatgtgacaacattggcatattgtctttcagattcatcgctctcagtagaaaatattatatg

SEQ ID NO: 28782 - DNA, 633 bp, Oryza sativa
  Clone ID: PAT_MRT4530_33347C.1
cccacgcgtccgattcatcggagcatgttggcatagttcctgatgattatctaagagattgcccccaagatggtgacagggaagccattgcaatttcgaagttcatgcaaaatttgaagcatctcgtaattaggttctcaaagctatctgttgttggcctcaacgcaatatcaggaggatgcaaggaattggaggttcttgacttgtatggctgcgcaaatttgacactcaggggtatacaacaggctacttctaatatgaagaacctgaaggaactagagaatcccaacttttacattcccaggtcctccttccacatgggtaggtatgggcactggcagttatacgatgaaaggtttcagacaaatgtattccagatataaaaacagcctcaagttcaacgatcacctcaggtgtttgttctctgacatatggcttgtatttattagtactgtgaatgttgtatttgtgttgtgttgtggaaaaataatgacaataataccctgtatagtgctgctttactcatcttttccatgtacccataagaaaattgtcatgcttcagtaataatttgtaaggtcacctacaatgattcttcaaaatttcttagtatcaaatttcttaaatcaaata

SEQ ID NO: 28783 - DNA, 146 bp, Oryza sativa
  Clone ID: PAT_MRT4530_33348C.1
cctgatccgggctattccaacatgcacggataacaatactcaaaactttattggagctcctgaacggtgataacccaacgctggcgggtaatactgacactactcatggtgacattgctaatttgcctgccagactgtgctacccc

SEQ ID NO: 28784 - DNA, 322 bp, Oryza sativa
  Clone ID: PAT_MRT4530_33349C.1
ggctatactggtgattctgctcgcagaatatgggactctgtctacaaagaaaactgtcccaaaatccgtctgaagaatgtgtcaggagaagaagcactgtccagctaattcagggtgcactcctcattcagtcacatgctatgatatctctagagaactgcaactgggggcataacttcttgctgataccggtctgaatcccggcggtcaaattgacttactacctgtgtcttggctggacaagtcctctttcctgcttaaacaactcttgttgctgactcagactcaggtaaacgcatttctgtctaagctgctgatatat

SEQ ID NO: 28785 - DNA, 3279 bp, Oryza sativa
  Clone ID: PAT_MRT4530_3334C.1
atgatgcagcagatgcagcagcagcaccagcagatgtaccagaggatgcggcagcaagccgagcagcagcagcagcagtttggtccctctccccctcagtccaaactgccggagtttctacgcgtcagaccacccaccttttctagcaccaccaaccctatggaggcaaatgactggctccatgccatagagaagaagctaaatctcctgcagtgcaatgatcaggagaaggccgccttcaccacacaccagctccagggtcccgcatcagcttggtgggacaatcacatggccacacgtccgccaggcacggaagtcacttgggtggagttctgccgcagcttcaggaaggcgcaggtgccagatggggtcgtggcacaaaagaagagagaattccgagcactccaccagggcaacaggacggtgacggagtatctccatgagttcaatcgcctcgcgcgatatgcaccggaggatgtccgtactgacgccgagaagcaggagaaattcctagcaggtctggatgatgagctaaccaaccagttgatatctggagactacgccgacttcgagaggctggttgacaaggcaatccgtcaggaggatcagcgcaacaaaatggataggaagaggaaggcggcgcagttccgcaacttccatcagggcgctagtggcagccagaaccaccatggcggtcagcccaaccgcagtgcagctccacgcccaccaatggcaccagcacagtcagcttcgtccacgcaagccaagaaggagactgggacaaagccagggtcctgcttcaactgtggcgagcttggccacttcgctaacaaatgcccgaagcctaggcgtgctgggccaaggtttgtccaggctcgtgtcaaccacgcgtctgcggaggaggcacaagtagcaccagaggtcgtactgggtacgtttcctgttaactcaatccctgcaacagtactttttgattctggtgcaacgcattcattcatttcaaagaagtttgtcgggatgcatgggttaataagagaggaacttagtacaccaatgcgggttcataccccagggaatagctccactttggttcaattcagcccctcggtaacgatagaaattcaaagatcactctttctggccaacctcatccttctcgaatccaaagacctagatgtcattcttggtatggattggctgaccaggtttaagggtgtcattgattgtgcgaatcgcacagtcaccttgaccaatgagaagggagaaaccgtggtgtacaagtcactagtctcaccaaagcaaggggtttccttgaatcagattaaggtggaaaaccctgtgaccaccgaggagaagggaactgcccctatttacaagagaccgtacagaatggcggccaacgagctagcagaggtcaagaagcaggtcgatgagcagctgcagaaagggtacattcgaccaagtacttcaccttggggtgcaccggtcatttttgtggagaaaaaggataagacgaagaggatgtgcgtcgactatcgcgcactcaatgaggtcacaatcaagaacaaatatcctttaccgcggatcgatgatttctttgataagctgaaaggagctaaattgagaattcgggaagaggatattccaaagacggccttcaccactcggtacgggctatatgagtgcacggttatgtctttcagacttaccaacgcacccgcattcttcatgaatctgatgaacaaagtgttcatggaatttctcaacaagtttgttgtggtgttcatcgacgacatacttatctattcaaaatctgaagaagaacataagcaacatctccgtctggtactcgagaagttgaaggagcaccagttatatgccaagttcagcaagtgtgacttcttgttgtcggaagtcaaatttctgggtcacgtcatcacagctcagggcgtggcagtcgatccgtcgaatgtggagtcagttaccaaatggaccccaccgaagaccgtgtcgcaaattcggagttttcttggacttgcgggttattaccgtcgattcattgaaaacttctcgaggatcgcccgacccatgactcagttgcttaagaaagatgagaagtttaaatggacagctgagtgtgacaagagttttgaggagttcaagaagaaattagtatccgccccagttctgattctgcccgaccagatgaaagacttccaaggcagagtggtcgcatatgcctcgcggcagttgcgtccacatgaagggaattatccaactcatgacctggaattggcagcagtggttcatgctttgaagatctggaggcactatttgattggcaaccgctgcgaagtatatacggaccacaagagtctgaaatacatcttcacccaaccggacctaaatctccgacaacgaagatggttggaactaatcaaagactatgacatgagcattcactaccacccgggtaaagtcaatgtggtggcaaatgcgcgaagcaggaaaagctactgcaatgccctatgcatcgagggcatgtgtggagaattgcagcaggagcttgagcgtctcaacttgcgacttgttgaacacgggtacgtggctgccctagaggcacgacctacgctcgtggatcaagtcagagtagcccaagtgaatgatcctgagatagctgaactgaaaaagaatatgagggtcggaaaagcctgggacttccacgaagatgaacacggcacaatttggatgggagaaagattgtgtgtacctgacgacaagttggcagagctctacctctcgagaatcatgtgtctacatggagtacccaaaaagatagtatctgatcgagggagccaattcacttcaaagttctggcagaaattgcaagaggaattgggaacccggctgaatttctgcacagcctaccatccgcagacagatggtcagaccgaaagggtcaaccaaatcttggaagatatgctacgagcatgtgcactcgactttggtggagcatgggataaaagtctgccttatgccgaattcttgtacaacaacagctatcaggccagtctacaaatggcgccgttcgaagcgttgtatggccggaagtgccgcacacctctcttctgggatcaaacaggcgaacgtcaactgttcggaacggaagtgttaacagaagcagaggagaaagtcaggattgtcagagagaggctgaggattgcccagtctcgacagaaaagctacgtggacaaccgccgacgagagctcacgttttaa

SEQ ID NO: 28786 - DNA, 231 bp, Oryza sativa
  Clone ID: PAT_MRT4530_33350C.1
atggcgtacttcggggtcgccatcaccatcaccaccgcgcccatgacagagacggagacggagacgaaggggagggcagcaaggtcgtcgccgaggaggaggtggagtaccaactgccaaaggcattatttcctgcacattcccagtaacgagaggctgtgccgcttggcgaacgtcgcggcggcggtcagcggcgagagtcacgtcggcgggaagagggaatggcggtga

SEQ ID NO: 28787 - DNA, 276 bp, Oryza sativa
  Clone ID: PAT_MRT4530_33351C.1
atgtataaatcatcaattcaagctggaaaaactggctcccagcagataaaccaacaggaatgggagatggaagaaaggaaaggatcaccctgtgcatgggtccccagcctgcgcagctaccatccctaccagataaaggaaaagatgttaagtggatggtcggtgtaccagtacgttgatcaaatgttggcaatacgggcaccagtgttggcctgggagcacctgtattggtacctcaacatcatcagcccaatgaagggtctcaagatgtattaa

SEQ ID NO: 28788 - DNA, 444 bp, Oryza sativa
  Clone ID: PAT_MRT4530_33352C.1
aaacaagttattctcatgggtatttccaagggaactatggttcaacctcaaattcacaaaagttcccatgggtaagctaccattcattaacagaagcaaaacacaacagtgacacaggggttcataatctacactcagcaacaaaccctagccctgaacgtgttcccacaacagttttccctattactatcagtggatttttccaattcatcaaaacctaacaggctatttccagaacttaaagcgtggtcacgaaccagaagagcaagcacaacaattcgaatcgaattcgtggcaattggggtgtggattaggggaggggatgtggctcctcggtgccgaaattctgtggcctcggaggggcccaaattcccttataggtggagtctgtattaaaattcgataatcagtggtcaatagctggtttccgggtggtgaacatgg

SEQ ID NO: 28789 - DNA, 3177 bp, Oryza sativa
  Clone ID: PAT_MRT4530_33353C.1
atgtcgatcaataacgcggattctagagtaacgcggattccagactattcctccgtggtctactttatccagcgttggaaacccgctcctacacacacacacacccactaccgctctccgcaattcagccagactgcagttgcagcaacagcaaggatggctggtggagtcggggaggcgctcgtgtccgccgtgctgaaggaggtgctgggaaagcttggctccgccgtcggggaacagatcgtgatgcgatggaacctgaagcaagatctggagagcatcaagagcaccctgggtatgcttcaagcggtgctcagggatgccgagaggcgctccgtgagtgacgaaggcgccagcctctggctgaagaggctcaagaacgcggcctacgacatctccgacatgctcgatgaattcgaagccaagttatcggagacaacattctctagctcggtggccaagttatttatgggcaaaaggttgaagaatatgagggtaaggttaacagagatagcagcagaacgaacacactatggattcactctagatacctaccctagggatctggaacgggaagagatcagcaagagggaaacaacatcaaagatcaataagtcagctgttgttggaagaaacaaagagaaggaggaaatattagcattgttagaatcggacaacattgaaaatttgctggtaattccaatttttggatttggaggtattggtaagaccacactagctaaattggttttcaatgatgatcgaacacaaacttttgatttgcgtgtatggatttatgtatctccaaattttgatttaaaaacgattggcagaagtataatttcacaaatcaaaggacagagtgactgtttagatgatctacagtcaataagtaactgtcttgaagagatattggatggtaaaagttgcctgattattttggatgatttatgggagaacagctgtttccagttgggtgagttaacattgatgctaagcagctttaaggcagaaagcaggcttaggatcgttgtcacaacacggaatgaagaagttgcaaggaagatatgtacagttgcaccatacaagctgaagccattgtctgatgaccattgctggacattgtttaggcagagtgctatcctgtctagttgtacttttcaaggaggtgataaaaatgtgttggaagagataggatgggagatttcaaagaagtgcaaaggagttccattggcagcccagtctctcggattcatcttgcgcaccaaagatgttgaagaatggaaaaatgtgagagatagtgatgtatgggatggatcatctccagaagatgttgtgctgccatcgctgaagcttagttattaccagatgcctccttatttgaagatttgcttttcttattgttcaacatttcctaaaggttgtgagatttatagtgatgatctaattcaacagtggatatcgcttggtttcattcaagaaagacctaataagcacatatcgcttgaaaagataggagaacagtatgtaagcgagctattgggaatgtcctttcttcaatattcaagtcttgtccctgattacacgggactacgggaggatgctaagtgttctatggtactcagcatgcatgatttgatgcatgatcttgctagatgtgttatgggtgatgagctacttctaatggataatggaaaggaatacaactctggagaaggcaattgtcgtttgcccaagtcttttcataggctaggtgaactccagtatctaaacttgtcacgctgtttatcattaaatttaatggttgacatcaatgctgtgtgctgccttacaaagctacagtacttaaacctgtctcgttgctcaagtctcatccacctacctgaaacaattaggggtctaaaagatctccacactttagatatctcaggatgtcaatggatagagatatttccgaaaagcatttgtgagatcaccagcctcaaatttctgctaatacaaggatgctcaccctggttagagaagcgtgtgagggagtctcagttcaagaatgatatgctagcattgcccaagtttattgttcaaagagcagcttttggcatgtgtagcaatatttcgcggcttcaatctgtacatcctgctgagctagaaattgaatgccttgagaatgtaacaagtatcggagaagtggatgttgtaaacttgacgtataaatcagcactatcaaaattggcattggcatggactcctgcagctgagcgttttgtggaggatgaagatttgctgcggaagttacaacctcctgacactctaaaagttctccagatacaaggctacatggcgacatcatttgctagctggatgatgaacttggcatcacgtctgccttatctagtccgaattgagatggtagatttaccaaggtgtgaatatttaccaccatttggtcaattacaacatctggaactgttgattcttaggagaatccttagcctcaggaaactgggaggagaaatttgtggtggtaatggagcattcaggaaattgagggaatttacattggtaaagatggataacctaaatgagtggatcaccaaagtatcggctaatggtgaattcatgttccccagtcttcacaagctggaaatttctcagtgtcctattttaaggttaaatccatgccttcctagagctcttgaatggagaatagaagcaagcgatcaaattatagcagatttctatcacacaggctcgtcatcgtctttggtactatcgaaaatgcatattagaagctgccgcctgctgcccaatgactggaaactgcttcagttccttcctgatcttcaggtgttggaacttacacactgttggttttacgaattgccaaagagcattgggtacctgacgacactccgatcactgcggatagatggctgcgatagcatgacgaaactatcaaaatggttggtcagtctgtcattgctacatgaattaattattactggttgtttgaatctggtatatttgccggcatttgtacaaaagcttagtgccttggagaaattggaaattaatgataatgatgcactgcagagatggtgcagaaacagcgacagctggatctcagagaatggcataaaaaacaaggtaaacgcttataacattctctgcaaataa

SEQ ID NO: 28790 - DNA, 217 bp, Oryza sativa
  unsure (1)..(217): unsure at all n locations
  Clone ID: PAT_MRT4530_33354C.1
acctnnncccacagtcaagccctgaaggtagtttttttccaaataatctcccaaaccacaaattgtattactcctaaacacctgtacataatagactagctagtacaaccaaaccatacccatcttttaaccccaaccttgaaactcacactaactaaagacaactttcaaaaccacctttaaagtcctatttaatttataattaaaacaactggta

SEQ ID NO: 28791 - DNA, 1764 bp, Oryza sativa
  Clone ID: PAT_MRT4530_33355C.1
aacccccctccccatcgtcagcatctttctttctcttcccatcccactcccttccccacacgctctccttccttccttccttcttcgcttcttccgacgccacttcacctctccttcctccctccctcgccgccgcgggctgcttcctccctccctcccgccgcgtcccgccattcccggctgattactcgagccgccgcggggcagatccgtgccgggataggcctctcgctcgcgcttcggtcccccgtctcttaccggcggataaaccctaaccggagaggaggaggagggggaggccatgagggggaagaagccgcacaaggagctcaagctctccgtgcctgcgcaggagacgcccgtcgacaagttcctgaccgcgagtggtacattcaaggatggtgaactgcggcttaatcaaagaggtttgcagcttatatccgaggaaactgcagatgaacctcagtcaacaaacctgaaggtggaagatgttcagttgtcaatggatgaccttgagatgattcaagtcattggtaaggggagtggtggtatcgtccaactagttcggcacaagtgggtggggacattatatgccttgaagggcatacaaatgaacattcaagaggcagttcgcaaacaaatagtacaagagctcaaaataaatcaagcaacacagaacgcacatatagtcctttgccaccaatctttctaccataatggtgtaatatatcttgttctagaatacatggaccgtggatctcttgcagatatcattaaacaagtcaaaacaattctggagccatacctggcagtactttgcaaacaggttttggagggtctactgtatcttcatcatgaaaggcatgtgattcacagggatataaagccatctaacttgttagttaaccgtaaaggtgaagtaaagattaccgattttggggtaagtgcggtgctagcaagttcaatgggtcagcgggatacgtttgttggaacctacaactatatggcgtttctacctttcttcctagttcagcctgagcgtattagtggaagctcctatgactacaagagtgacatatggagtttgggcttagtaatactcgagtgtgccattggtcggttcccctatataccttcagaaggggaaggttggttaagcttctacgaattattagaagcaattgttgaccagccaccaccctctgcaccagcggaccagttctctccagaattttgtgcatttatctcctcctgcatacaaaaggatcctgcggagcggatgtctgcttcagaactcttgaatcatcctttcatcaagaagtttgaggataaggatttagacctgcgcattcttgtcgagagccttgaacctccaatgaatatatccgagtaacttgtcattgggaggaatgaggttttgtcggtctcttggtagcggcacatgttccctgcatgcgatgtagtgtgtatgatgttgaaaattcgggaggagttgcagtaatgtatcggtataatttttctttacctaaggcccttttgttgcctctttttatggtcctgtgacttgcgagcatgacaatagagggaatcatgatttcaccttcgtattgcatggtgtcttaaaaaaaaaaaaaaaggcgggggggtggtccccaatgtccttttgatccgtggtcttgcttattgtcggctctacttttggattcagtaccgaaatattacgtgctgtttgaagaacacaacgtgttttaatgcagcaggaat

SEQ ID NO: 28792 - DNA, 127 bp, Oryza sativa
  Clone ID: PAT_MRT4530_33356C.1
gcacaggccatagccttggcatcggcaccagatacgggtatcttcgtgccagaggattgcctgatgtgtccaacaagatcgctgcgatgggctctgacgggaccgcctctcttaggcagaatttcct

SEQ ID NO: 28793 - DNA, 193 bp, Oryza sativa
  Clone ID: PAT_MRT4530_33357C.1
aagccatgccgacgacgatgaacacacctcggccgagtgccctccctcgccgttgactctcagccggaagccctccctcgccgtcgactctcagccgccctcccacgccctcactcaccgtcgactctcagccgccctcccactccctcactcgccgtccaggggaaaagagagcagaaaagagagggctagg

SEQ ID NO: 28794 - DNA, 642 bp, Oryza sativa
  Clone ID: PAT_MRT4530_33358C.1
atggcgctcgcatgcctcctcgccgccgcgctctcgctcgccggctcggccgccggagacatgagggcggcggtgacgaccaccgcgggcggcaaggtggtggtccgccacggggtcgacgcggcggcggaggcgcggcagctgacggtggtggcgatgaagaagtcgacgaggctggaggacgtcgtcgcgccggagctgatcggggcggacctggtggagctgcaccagcgccggcgccgcatcctcggcgaagacgcaaacatcgtcgacagcgtgctcgtcggcgacaggcagggatgcctcgggccgtgcccgccgcgcggattcccgttcaacacgccctcgcggggctgcaacccgaagtacggatgcaacaccggtcacaacccgcccgaccggcaaaagcctctgtcgtcgatacgttattgcgggatgcgccgccacctcccgcgggtcgccgccacctcctgcaggcctccaacgacctggacaccgccgccgccgtcgaccaagaagaagcgcgccgggtggaaggatatgtgggtggccggtgacgccctcccctctaccggactaaaggagttgcaaaccgggagtaaagatggattctccatcagtgtttctattactgtgaactga

SEQ ID NO: 28795 - DNA, 523 bp, Oryza sativa
  unsure (1)..(523): unsure at all n locations
  Clone ID: PAT_MRT4530_33359C.1
agctcgtgnntaatncggcacgananctntcntggnancgcttgctgtcacggntgnagnggaaaatacaanacnattgactnctgttcttaatgggatacagctcggtttcctcggtagnttgagcncnctancacctcttgnngcngatntttacancatganaaaaattggtcagattncnngggcatttgtatatgctgcaacctcctncnttctcncntttgtgcgaggaantctnatatactcnctgcccgtgtgggtagaacattactgataacatcgtcacantngcagaattggaacctnaganggtntaacnttttgctcctccnagtanctnngattatacaaccnacaaacgtgcntgcaaagaaaatcttggagcgcnggaatgtcatttctnctgccacgacggaatttactactggcnccgtnncaaaanaatgcntgtttcttgttgtaaaatgagtatgtatacagcattnctggaattggagagttgggaatacgnacgttcgtt

SEQ ID NO: 28796 - DNA, 112 bp, Oryza sativa
  Clone ID: PAT_MRT4530_3335C.1
acacacactggaaggactggtttatttccacagggggtccttaatttccgtgggtgcgacataccttatcaccatttattgatcttagtctaaacagcaacaagcatgagta

SEQ ID NO: 28797 - DNA, 519 bp, Oryza sativa
  Clone ID: PAT_MRT4530_33360C.1
atggcgtcgagcacgtcgcgacaacgacagtggcaacggcgtggagctcgtggcgaaggtggtggtagcggctggacgatggcgacagcacagtggttggtagacggcactgccggctgctgtggcaacggggcgcactcacggcggcgacaacggcgcggagctcgtggcgacggtcgcggtagcggcgaggtggccatcggcagtagtggctgcaatggtggtgaggcatggcggtctcggaaggctagccgggggcgtggcagacggccgcacctggccggtgcggcagtgattggaggggtcggaggccggcttggcgtagagaggcacggctgttggcagtggaggtcggcaaggcgcgagaggcatggccggtggcaaggaggccggcatggcgtgagaggcacagccgatggcaggaaaccggactggcgcgagaggctcatccggtggtggaggaggacggcgcggcgcgatgaggcacggccggcggtaaaggaggcgaccacgatgtga

SEQ ID NO: 28798 - DNA, 680 bp, Oryza sativa
  Clone ID: PAT_MRT4530_33361C.1
tggatccccgggctgcaggctgatattgagcaattctccaaaggtttttcaagtcataaacacctttcgtcatgggtatctacaacaaactcgcggatgacattgatgaagtagatattatcatagccggaggtgggacagcaggatgcattatagccggtcgactcgctgaagatgacccatctctttctattctcgtgattgaaggtggcgcaaacaacaaagatgtcgccagcgtcgtcaaccccgtcttctacctacagaacttgctacctaccacgaagactgctctcttttacaaagggaataagtctaagcaactcgctgatcgtgagcctatcgtgccatctggcggtacgctaggcggtggtagttccatcaacttcatgatgtacacacgagcacaaagatcagactttgatagctggaacacacctggttggtcagctgaagagatgtggccgcatctaaaaaagctagaaacctatcatgggccgggagccaaagagcatcacggtcacagtgggcccatccatgtctcagacggaggctaccgcgcaaaagccgcggaagacgacttcataagcgcagctgagaaggtcggctactccgagatcgacgacttgcagaacttggacaataacaatggcattgcgcggtggcaacgctacgtctccccc

SEQ ID NO: 28799 - DNA, 347 bp, Oryza sativa
  Clone ID: PAT_MRT4530_33362C.1
ggttgcgaatagcgatcgaatttgacttgggaaaaactaaagaactcaggcatatgcctgcacagaaaacagaaacgttgcaatttgttccaataggcacacaataacactacgttcaacgttcaactctaccaaacaaataaaacaggaaagatgatgcactgacgccagaaactaaattgttggatcgcagtcgaagacaaggctatcctgatcaatcatttgaaaggcccatgagcttactacctcccaaggagcacctgctttggatctcggatattaaaactacttcttgatgacatctgcaagatcaccgtcactaactggaccaacaaagtgcacccact

SEQ ID NO: 28800 - DNA, 2821 bp, Oryza sativa
  Clone ID: PAT_MRT4530_33363C.1
ctacctgcccttctctcgaagagttgatagggcgacgatggtatcagctgcccgagcgacattgcccttggtgactgcattaggtgcttgagagtgctggctttctgagaccatgcctgctattggagatgcatcgtccttaggctccttacttgatgctggagggtcatggacattcggtgcaatactcagagatagagaaccacgggcctcagtggccaaagctttaggatttccatgcccgccctttggcctgataccgggaggtgtcactcttggtgcagaattgagaccttctgcacctgcacatttggaattccccagtgccaaactaggagcaatagattcaccgccctttggcctgatacccggaggagtcactcttggtgcagaattgataccttctgcacctgcacatttggaatttcccaatgccaaactaggagcaatagattcaccgccctttggcctgatacccagtggagtcactcttggtgcagaattgataccttctgctcctgcacatttggaatttcccaatgccaaaccatgaacaagagattcaccgccctttggcctaatacccggaggtgtcgctcttggtgcagaattgagaccttctacaccttttggtgccagagaatcatagcccttggaaatcatgcctgttgcaggagtatcacatcctttggtgcaaagactggtgctgttttcagctactgcatttggggcatgagaatcaccatgcgcaacactaacaattaatgaacaattcccagtttgatccaaagacctgtcttctgcagctgtcctcgcaggatcagaagatgctattttgccagcagatttataccataatgatggcatctcctcacgagttattttgttttccttcagctcttcataatgatggaagagcaattcccttgctaccgatgatatattttcttgaatcatggcaaaaagaactctgaaggatatccaaggggaagttggtccctcagcatttccactcattataggtacaagagtagaaatatccaccgcaacttcctttggtgatgggtgaaaccataaacccttcaaaccaagtaaataatttcgaactttcgaggaaagcctgaaactaacaagatattctaaacgaatatgggtgctaagatgagatggccacatgacgtagcactttggatttgagcaatcatcaacaccagaatcatatatgtcactgcttggaaaagaatcttgtgatccaggcatgacagcctccatgttccccaaaatcaaccggcagagcaacatatattgcactcctttttcgtcaacatcacaaagaccaacactggaaaatgctcggtcttctggtgaaagataaacaccagcactcaagcctgccttctcagcaggttttccattgttaccaaaaccattaattaggatcctaactatgtcattcttcctagatcccagccatccataccttacatttgcatcaccacgttcttccttggtggacatcatttgtttttcaaaagcttgaagtctacactgtgcagtgatatcattcggagagtagcggtggatgtgcagtatattatttggcgttgcaaatggacccatgccagagaggaaaaggtcctgcgcaaaaagaaagccttcactgcctcgttccacagatgcgatctttttgcgtaatatgtctgcagtggcaggcttctgtggaactggaggactagattcaaggacaacttgcttcaccacttctggtggagaatttgcaaccttatccaacattattccctgtgtggcgccctcaaaatcaccgcctactttagccacttcatcagcttcctcatcaaagaatagagaaggataaaagcacttcccagtgtcatcaaaccatgccacagaccgctgctttctagattttaggttgaccagggtcatcgacaagaaatcaacaagaacaggctcatcgtccatcacagcaacaacactagatttattgcttctaaattcttcaatgagagacttcattatctgctcaggaaaattgtgccaagaaccctgtttgtaaaacataacacggctgggcactccactttttaggtaattgacacaatcactggcaaggttaggtcgagtgcaacagcatttgcagcgcttggcagatgaatcagatgatggtcccttctcagttttgatgcgacgagacttgcactcttttgacaggcagtcatcaacaagcttgcgcaggccgacggtcttccgaaacaccggcgaggcgacgtcgaggccccccagagagcggagacgcacgcccccgtcgcctgactgaacggcgcggcgcttgttgtcccgatcccggtgagagacggcgccggcggccttaataataagtttcttcaccaagtcatcttgttcctgctcttcaccgctcctcctttccatgcgatttgagcccttgcgagatagggctctagtcatttttggacttccagtgcagcatttatcaggttgctgaggcagcccttcaatatccaataccacatttgctgccttgtccatgcttgtcatctggccgtcaaaaatactcttagtgctcgcctcaccgatcagccgcagcctgtcctgtacctcaccacagttgaagccaaaagaggcgtgaacctggtccacagagccagaaaccccagttgcctcggccggtggtacatactgccatggacagcgtccagccatatctaaacctgagattgctgggtgctagctccgatggaatggcgcaaaagattgagccgcgcgcggggagaggagtgag

SEQ ID NO: 28801 - DNA, 403 bp, Oryza sativa
  Clone ID: PAT_MRT4530_33364C.1
acataccgtaagaaaggattgatagtacgccttatagttcttttcggagtaaagtccatcaccggtccctaaacttataccgctgtgtcatcctggtccctaaactcgcaaatcgaccgttcaggtcctcaaacttattcgactgtgtcatcccggtttctaaacttgcagatcactcgtttaggtcctccaacttgttcagttgtgtcactccggtccctaaacaggacggtctaaaaaatttatatcaaaaatttagagaccggggtgacacaactgaataagttggaggacctaaacgagtgatctgcaagtttagggaccgggatgacacagtcgaacaagaaggccgcagaggggcggcgagggtggaagggcgagggggcggcggcggcggctgacg

SEQ ID NO: 28802 - DNA, 570 bp, Oryza sativa
  Clone ID: PAT_MRT4530_33365C.1
atggtggcagacagcgcggtcggcgtgcacggcagtgcggccgacagtgggtcggtgcggtcggcgcggacggcggcagagagggacgcggaggcggaggctacgcgggacacaaaggcagcggcggtggagccgccagagtggctgcagaccctgcccgtggcgccggagtaccacccgacgctggtggagttcgccgaccccatcgcctacatcctcaggatcaagcccgaggcgtcccgcaacggcatttgcaagatcgtgcccttgctcctccagccccccgaggatgacaccatccgccgcctcctccaatgccgccaacccctccccgaccttccccacgtgcctccagcaggtcggcctctccaccaagaaccgccgtgccgccagccgccgagtgtgggagagcggggagcgctacaccctggaggcgttctgcgccaaggtgcccgagttcgagccctcgaggcacgccgcactgcccaagaaccccacccacctccagctcaaggccctcttctaggccgcctgcacctccaggcccttcagcgtcgagtacggcaatga

SEQ ID NO: 28803 - DNA, 2856 bp, Oryza sativa
  Clone ID: PAT_MRT4530_33366C.1
atggctggacgctgtccatggcagtatgtaccaccggctgaggcaactggggtttctggctctgtggaccaggtccacgcctcttttggcttcaactgtggtgagggccagatgacaagcatggacaaggcagcaaatgtggtattggatattgaagggctgcctcagcaacctgataaatgctgcactggaagtccaaaaatgactagagccctatctcgcaagggctcaaatcgcatggaaaggaggagcggtgaagagcaggagcaagatgacttggtgaagaaacttattattaaggccgccggcgccgtctctcaccgggatcgggacaacaagcgccgcgccgttcagtcaggcgacgggggcgtgcgtctccgctctctggggggcctcgacgtcgcctcgccggtgtttcggaagaccgtcggcctgcgcaagcttgttgatgactgcctgtcaaaagagtgcaagtctcgtcgcatcaaaactgagaagggaccatcatctgattcatctgccaagcgctgcaaatgctgttgcactcgacctaaccttgccagtgattgtgtcaattacctaaaaagtggagtgcccagccgtgttatgttttacaaacagggttcttggcacaattttcctgagcagataatgaagtctctcattgaagaatttagaagcaataaatctagtgttgttgctgtgatggacgatgagcctgttcttgttgatttcttgtcgatgaccctggtcaacctaaaatctagaaagcagcggtctgtggcatggtttgatgacactgggaagtgcttttatccttctctattctttgatgaggaagctgatgaagtggctaaagtaggcggtgattttgagggcaccacacagggaataatgttggataaggttgcaaattctccaccagaagtggtgaagcaagttgtccttgaatctagtcctccagttccacagaagcctgccactgcagacatattacgcaaaaagatcgcatctgtggaacgaggcagtgaaggctttctttttgcgcaggaccttttcctctctggcatgggtccatttgcaacgccaaataatatactgcacatccaccgctactctccgaatgatatcactgcacagtgtagacttcaagcttttgaaaaacaaatgatgtccaccaaggaagaacgtggtgatgcaaatgtaaggtatggatggctgggatctaggaagaatgacatagttaggatcctaattaatggttttggtaacaatggaaaacctgctgagaaggcaggcttgagtgctggtgtttatctttcaccagaagaccgagcattttccagtgttggtctttgtgatgttgacgaaaaaggagtgcaatatatgttgctctgccggttgattttggggaacatggaggctgtcatgcctggatcacaagattcttttccaagcagtgacatatatgattctggtgttgatgattgctcaaatccaaagtgctacgtcatgtggccatctcatcttagcacccatattcgtttagaatatcttgttagtttcaggctttcctcgaaagttcgaaattatttacttggtttgaagggtttatggtttcacccatcaccaaaggaagttgcggtggatatttctactcttgtacctgtgaggcaacctagttttcttcgtttcttcttttccattgacactctgataatgagtggaaatgctgagggaccaacttccccttggatatccttcagagttctttttgccatgattcaagaaaatatatcatcggtagcaagggaattgctcttccatcattatgaagagctgaagccatcattatggtataaatctgctggcaaaatagcatcttctgatcctgcgaggacagctgcagaagacaggtctttggatcaaactgggaattgttcattaattgttagtgttgtgcatggtgattctcatgccccaaatgcagtagctgaaaacagcaccagtctttgcaccaaaggatgtgatactcctgcaacaggcatgatttccaagggctatgattctctggcaccaaaaggtgtagaaggtctcaattctgcatcaagagcggcacctccgggtattaggccaaagggcggtgaatctcttgttcatggtttggcattgggaaattccaaatgtgcaggagcagaaggtatcaattctgcaccaagagtgactccactgggtatcaggccaaagggcggtgaatctattgctcctagtttggcattgggaaattccaaatgtgcaggtgcagaaggtatcaattctgcaccaagagtgactcctccgggtatcaggccaaagggcggtgaatctattgctcctagtttggcactggggaattccaaatgtgcaggtgcagaaggtctcaattctgcaccaagagtgacacctcccggtatcaggccaaagggcggtgaatcttttgttcctagtttggcattgggaaattccaaatgtgcaggtgcagaaggtctcaattctgcaccaagagtgacacctaaagacaaggagtttctttcattgagtatttcatcacaacaaagcccagttcttaattcagggcatggaaatcctaaagctttggccactgaggcccgtggttctctatctctgagtattgcaccgaatgtccatgaccctccagcatcaagtaaggagcctaaggacgatgcatctccaatagcaggcatggtctcagaaagccagcactctcaagcacctaatgcagtcaccaagggcaatgtcgctcgggcagctgataccctcgtcgccctatcaactcttcgagagaagggcaggtag

SEQ ID NO: 28804 - DNA, 443 bp, Oryza sativa
  unsure (1)..(443): unsure at all n locations
  Clone ID: PAT_MRT4530_33367C.1
ngggtttttataacatggggggggaccaaatcgcattatgggggcctatacgctcacatatactccgtctcgtgcatagacggatctgaccacacacaaagaagctgcctgaatgcacgggcgactcgagacggcgccaaacaaaagacaagctgcttcgtctgcatgcacgatccatatgcatgcaacacatcgatgctagccggcaacagtaccatgcacgcacgcggggcgagcgcaaacccaagcatgcctccgtagggatactcgcatgtgtgacgtgcacatatgcggcatggtttgggtcacctaaaatcattgaggacgtttgcatggcaagatatatggcatatagttttacacaggggtggagtcgccggccttgagcaattggagggcgctcttgattgtgggcagccacccggcggagtaccagaagtaga

SEQ ID NO: 28805 - DNA, 650 bp, Oryza sativa
  Clone ID: PAT_MRT4530_33368C.1
atggtaggtgccgtgctaggaaagttgttagtgcctcgtaattgcctttgcccttttaccatacctgtgaatgacgatggtgtgttcagtgattggcacttttcaatggcatgtgcttcaaagacaatctctattggttttgccaacagtggtctatatggagaggcaaggctactgtcgccaagctacaaaaactacccaaggagatcctcttacaaatttatcaaagttcgtgcagtacagggaaatgatggtcgtcgaaggctagttgatataatccgaaccatccctgaactctctagaaactatttcagaagccggtcaaggagagctctttttggtggtatctcacttctgggaggcttttatgtggcgcagacaatatctctgtctttcggagcgttgggtgtgaacgatgtcatagcagcagttgtgtgtgtcctgcttactgaatacgtaactaagttctactacagccggcctaaggttaccttcccatttgctctcctcaacaacttcaagatgggtttcacatatggcctgtttattgatgccttcaagcttgctagctgacctgcaattcttcctataggtgctttgacatgttatgttcttgaatcttgaaaaacagcaaagatggtgaaaaaata

SEQ ID NO: 28806 - DNA, 749 bp, Oryza sativa
  Clone ID: PAT_MRT4530_33369C.1
accagccatgacaaagtttactgccagggatgtgcaacgattcacgttcaagtcgacaaggtgacaggtaacctacaacaaacgaatccatccaaccggtttacaccacctataagttaaacggaccgacccatggaccatggtacgacggtaaacgctttttgggcaggacggtgtataacattcacatcacatgtacagcactagagaacggcccagcaaaaagcaaagagcgatcagcacaaggggctgcaacatctacctgcccttctctcgaagagttgatagggcgacgatggtatcagctgcccgagcgacattgctgctgctagcatcgtctggcccagacgattgactgtgcactccactctgtaaatgctggccttttgactccttaggtatgggtgtgggagcattataccccttggtgactgcattaggtgcttgagagtgctggctttctgagaccatgcctgctattggagatgcatcgtccttaggctccttacttgatgctggagggtcatggacattcggtgcaatactcagagatagagaaccacgggcctcagtggccaaagctttaggatttccatgccctggtgcatgtactggacgtgcggcacctgatgtcccatcatggcctttacctgaattaagaactgggctttgttgtgatgaaatactcaatgaaagaaactccttgtctttaggtgtcactcttggtgcagaattgagaccttctgcac

SEQ ID NO: 28807 - DNA, 5019 bp, Oryza sativa
  Clone ID: PAT_MRT4530_3336C.1
atggtggttgaggcgtccggaggcacagcagatcacgcctgtcaggaggcagcatacctgatgatggccagactacgggagcgccacaactacatcttccatgacatggcataccgttttcaccctcgtcgagccagtggtgatgatgtcagcaccttccgtccgacaaccggccagaacgacaccacctttggtcacatgtgtgctgtgatgagtggattggataggatgcactcggacctgcacaaggcgaccaaggccttgaacgatgggaagctcatgaggatcgtcgctctgatggacgagatagcgcgcctgaagagggagaatgctcagttaaagggtcttcccgcgccaggaggagtccggatccgcaccacaccccgcaagacgacgacggcacccgtgcgcatccagcttgcgcccaggaacccacctccatcagcagctcccgcagcacctccagttccgcccgcagttcctgcagctccagctccagctcccgcgtccgctctctccttcgctccagcatcagccgccaggggtccagccagtggcaacggaggttgcttgcttgggatggtctacaccaggaatggtagccgcgcaacaggcgagggcagcaacggcgaagagcgcactgatggggcgcatccccacagcgattccggcaatggtccgccaccacttcccgagaatccgacgctagtccaagtaatggcacatcagacccagatgatggcagccatgatgcagcaccagcaccagcagatgcaccagcggatgctgcagcacgccgaacagcagcatcaacagtttggtccccctccccctcagtccaagttgccagagtttctacgtgtcaggccacccaccttctccagcaccaccaaccctatggaggcgaatgactggctccatgccatagagaagaagctgaatctcctgcaatgcaatgatcaggagaaggttgctttcgccacacaccagcttcaaggtcccgcgtcagcttggtgggacaatcacatggccacccgcccaccaggtactgaagtcacttgggtagagttctgccgtagcttcaggaaggcgcaggtgccagatggggttgtggcacaaaagaagagggaattccgggcactccatcagggcaacaggactgtgacagagtacctccacgagttcaatcgcctcgcgcgatatgcaccagaggatgtccgcaccgacgccgagaagcaggaaaagttcatggcgggtctggatgacgagctgaccaaccaactgatatctggggactacgctgacgttgagaggctggttgacaaggcaatccgtcaggaggatcaacgcaacaagatggacaggaagaggaaagccgcacagttcagggcacctcagggaagtcaccagaggccgcgcttcgctcccaggcagcagggtggacctaccaccatgatcgttcgtcagcaccgcccgttcaaccctagcaactttccccagggcgccagtggcagtcagaaccaccatggaggtcagtccaaccgcggtgcagctccacgcccaccaatggcaccggcacagtcaggcccgcccgcgcaagccaagaaggagactggagcaaaaccagggtcctgcttcaactgtggtgagcttggccacttcgctgacaaatgcccgaagcctaggcgtgccgggccaaggtttatccaggctcgtgtcaaccacgcatctgcggaggaggcacaagcagcaccagaggttgtactgggtacgttttctattaactcaatccctgcaacagtactttttgattctggtgcaacgcattcgttcatttcaaagaagtttgttgggatgcatgggttaataagagaggaacttagcacaccgatgcgggttcataccccagggaatagctccacttcggttcaattcagcccttctataacaatagaaattcaaagatcaccatttctagccaacctcattcttctcgaatccaaagacctagatgtcattcttgggatggattggctgaccaagtttaagggggtcatcgattgtgcgaatcgcacagtcaccttgaccaacgagaagggagaaaccgtggtgtacaaatcactagtctcaccaaagcaaggggtctctttgaatcagattgaagcagaaatcccagtggacaccgtggagaagaatttgaggaaattggaagatatacccatagtctgcgagtatccggaagtgttcctcgaagacctcactaccatgccacccaagagagagattgattccggattgacttggcaccgggaaccgccccaatttacaagagaccagaaaaaggataagacgaagaggatgtgcgttgattatcgcgcactcaacgaggtcaccatcaagaacaaatatcctttgccgcgaatcgatgatttgtttgatcaactgaaaggagctaaagtgttttctaagatagacctgcgatcaggctaccaccagttgagaattcgggaggaggatattccgaagacggccttcaccactcggtacgggctatatgagtgcacggttatgtcgttcggacttaccaacgcacccgcattcttcatgaatctgatgaacaaagtgttaatggaatttctggacaagtttgttgtggtgttcatcgacgacattcttatctattcaacgtccgaagaagaacatgaacaacatctccgtctagtactcgagaagttaaaggagcaccagctatacgccaagttcagcaagtgtgacttctggttgacggaagtcaaatttctgggccatgtcattacagctcagggtgtggcagttgatccatcaaacgtggagtcagttaccaaatggaccccgccgaagaccgtgtcgcagattcgaagttttcttggacttgcaggttattaccgccgattcatcgaaaacttctccagaatcgcccgacccatgactcagttgcttaagaaagatgagaagtttaaatggacaactgagtgcgataagagttttgaggagctcaaaaagaaattagtatccgcaccagttttgattctgcccgaccagatgaaagacttccaagtctattgcgatgcatcccgtcacggacttggatgtgtcctaatgcaagagggcatagtggttgcgtatgcctcgcggcagttacgtccacacgaagggaattatccaactcatgacctggaattggcagcagtggttcatgctttgaagatctggaggcactatctgattggcaaccgctgcgaagtatatacggaccataagagtctgaaatacatcttcacccaaccggacctaaatctccgacaacgaagatggttggaactaatcaaagactatgacatgagtattcactaccacccgggtaaagccaatgtggtggcagacgcattaagccggaaaagttactgcactgccctatgcatcgagggcatgtgtgaggaattgtggcaggagtttgagcatctcaacgtgggaattgttgaacacgggtttgtagccgctctggaggcacggcctacgctcgtggatcaagtcagagcagctcaagtaaatgattctgaaatagcagagctgaaaaagaacatgagggtcggaaaagcccgggatttccacgaagatgagcatggcacaatctggttgggagaaagattgtgtgtacctgacgacaaggaactgaaggatctgatactcaccgaggctcatcagacccagtactccattcatccaggcagcactaaaatgtatcaagacctcaaagaaaagttttggtgggtcagcatgaggagagaaatagctgaattcgtcgcactctgcgatgtttgccaacgagtgaaggcagagcaccaaagaccagcaggtttactccaacctcttcaaatcctggaatggaaatgggaggagattgggatggactttataacgggactgccccggacatcgtcgggtcacgactcgatctgggtagtcgtggatcgactcactaaggttgctcacttcataccagtacataccacgtatacgggcaaaaggttggcggagctttacctttcgagaatcatgtgcctacatggagtacccaaaaagattgtatctgaccgagggagtcagttcacctcaaaattctggcagaagctgcaggaagaattggggacccgtttaaatttcagcacggcctatcacccgcaaactgatggtcagaccgagcgagtcaatcaaatcttggaagatatgttgagagcttgcgctctcgattttggtggagcttgggacaaaagcttgccatatgcggaattctcgtacaacaacagctaccaggccagtctacagatggcaccgtttgaagctttatacggccggaagtgccgcacacctctcttctgggatcagacaggcgagcgtcaactgttcgggacagaggtattagcggaagcagaagagaaagtcagaatcatcagggaaaggttgaggattgcccagtctcgacagaagagctacgcggataaccgccgaagggagctcacttttgaggcaggagattacgtgtatcttcgtgtcactccgctccggggagtacaccgttttcagacgaaaggcaagttggcaccacgcttcgtgggaccatacaaaatcttggaacgaaggggagaagttgcttatcagttagaacttccatccaatatgatcggtatccatgacgtgttccacgtgtcccaattaaagaagtgcttaagggtacctgaagaacaggctgattcgaaacacattgatatccaggaggacctaacatacgtggagaagccgattcgtatacttgataccagcgaaagaagaaccagaaacaaggtcaacaggttttgccgagttcagtggagtcatcattcagaagaggaagcaacctgggaaagggaggatgagttgaaagccgcccatccgcacctcttcaccagctcctccgaatctcggggccgagattccgtttaa

SEQ ID NO: 28808 - DNA, 911 bp, Oryza sativa
  Clone ID: PAT_MRT4530_33370C.1
atgaagaccgcgttcaggagctgaaatgggcagttgatgacttggagacggacactcacaggatacttgtgtggcacattgcgacgtgcatctgcgagatcaacctctccggccggaacatggcacccaaggtctccttgctccaggtaaggccactcgtcgacagatcagcggctccagaagctgtgtggccacactacgcaacagcttcaactttgtccaactactgtgcctacctggttaccaaggggcttgtcccggacaatggccttgttaatggcatggtcttcagagaggtgcgttgggaaaccatgcgtgcctgtttcagcagaagatcatcactgtacgacgtgcacgatgagctgaggaagaagggcgaggagatggtgaaaaagcagaagcagctggtggaaaagcagaagcagcgagtggagcaagaggaggatcctcctgccactcacggtggttcttccaccacaatcagtgaacaccagggagaggaagatgacgagatcgacgaggcgcaggatggcaatggcgatcctgtgcccatcgaaggaggagggcaccaagaaaacaacaattcgcaagaagaggccggaaacggcgacgacgcaatggagaattccatagtcctaatgggtgcaaagcttgcggttcagctgatgaattcgtatgaaacagacagggagaggatgtggagggagctagcagagttctggacaggcttcctcctccacctggcggcgtccaccagagcagccaagcacaggacgcacctcgtctgccgcggggagctcatcaccattctctgggctcttctgtcccatgccggattcctcgggaggaccagccatggccacacactcctagacccagaagacctcgacgccgccgacccgctcagctga

SEQ ID NO: 28809 - DNA, 294 bp, Oryza sativa
  Clone ID: PAT_MRT4530_33371C.1
atggggcccttcgccgacagctcgcgctgcgcgtctgctgaggggccgatctggacaccgccgcctagggaggaaactcgtcgaagagggggacaagcggtggcggggtcgcttcttcgtcgcaaagctctgaatcttgatcgaactgatcttccactgtgcttcatgctaagtgttgacgtagaatcgcgccgtcacactttgagcatgttatgtgcaacccgctacggtacccaaagacgcatcgccataggagagggtagatgccgctgtggatggaccctgtcagggtga

SEQ ID NO: 28810 - DNA, 506 bp, Oryza sativa
  Clone ID: PAT_MRT4530_33372C.1
gcgacattctcacgccacgcatctcgttttgcgtccgcttctttacagctacgagaatctctgtactctctcccgcttgcatatcgctcggtattcgcacccttcggtgtccgtctcctttgtgggtagcagggaaccgaacggatagatgaatgtggccgatgaccggacggtttgaaactgtcactaggagttctccaaggtgctcaggcggccagaggttcatacgcccaccaaaccgccactccataacattcggaggggaaggaggtcagaattgatgtggcggagaataagagaaaatggtacggagtggatcaacgggcacgaggactacttgctgaccaatgagttcctcgaccacaacctcttcttcgaggagaacaaggccgccatggtcaccaagagcgatctcaacgacgagcaggattgcttggccaagctctaccgtcgactctccgggtcttgttggtgactactgctagcgctgatgcgcctgccaaggc

SEQ ID NO: 28811 - DNA, 285 bp, Oryza sativa
  Clone ID: PAT_MRT4530_33373C.1
tcagtgcaccaccagcctagccgatggcaccagcttcggctcctgcgccagttgcaccgtcatcggcacagaggcaaatgaccaatcccagattgctgaccagagaacgaccatagcatgagtcaatgctggttcagtaaacaccaccaaggcagcaagtagtacagccgattcaacaacaggtggttcagccgattcagcagcaaatggtgcgacaagtgccaactgggttgaggacacctcatgtccagcatcaacaaggtggatcacctcaattgcagacat

SEQ ID NO: 28812 - DNA, 362 bp, Oryza sativa
  Clone ID: PAT_MRT4530_33374C.1
gctcggtacccctctcccaaaccaaatcaagaacagaccagacatacaccaagaaaactgaagtactgaacgaacccccaagaatcaagcagcagctacaagggcacaaacctagccgggcaaccgccggcgggcgtcgagcagcgaggaggaggaggcggatctgcgcctcagcgcctcctccgccggtgagtcgcgccgccttcgatccccctgtccccgcctgcttggagccgtgcgcccacgctaccggcgcgccgcctcgtcgtcattaccccggctgccgtggtgccacccgccgcgcccacgtgtcggtgcctgtgatgcaagcgctaaggccggagagcgagattgggagctaa

SEQ ID NO: 28813 - DNA, 495 bp, Oryza sativa
  Clone ID: PAT_MRT4530_33375C.1
caccacacaagaggtgataaattatataactcccagtggctgcgcgccgcggtgctgggcgccagcgacggcctcgtctccaccgcggcgctcatgctcggcatcggcgcggsgcgccccgccgacgcgcgcgccgtcctcctgtccgggctggscggcctcgtcgccggcgcctgcagcatggccatcggcgagtacgtctccgtccacgtgcagctcgacgtcgagctcgccgacctcgaacgccggcgccgccgcggcggcccggctccggctggcctgggactgcacgcggcggcggcggcggtgtcgcgccccggccaggccgcrrccgcctcggcgctgtccttcgccgccggcgccgcgctcccgctgctcgcggcgtggttcgtcgccggcgcctacagggtgagggtggtggtggtcgtcgcgacggcgagcctcgcgctggcggcgttcggcgcggcaggggcgcggctgggccgggctcccggt

SEQ ID NO: 28814 - DNA, 461 bp, Oryza sativa
  Clone ID: PAT_MRT4530_33376C.1
tgctgccaagggcagggtcctgccgctggtggcggtggcggcagcgctcgcggcggcgctcctctaccgcgcgcccttttccaagagcctgggcggtgaggggtgcagccttctcccccacgaccacttctggatcgccagcgagcgcgtcgacacgctcggacgggtcggccccgccgcaatggaggtgaagggagggctgatcaacgcgatcgccgtcggggattaccggagctcactgctccggcgaccggtggtggactacggtgacgcggctatcatgcccggactgatcgatgtgcacgcgcatcttgatgagccaggacgtgctgagtggcaggggttctccactggcacaagagcagcagctgcaggtggcattacaacattagtggacatgccttttaatagctaccacgcaactgtgtctgaagaaactctcaagccgcagctggatgcac

SEQ ID NO: 28815 - DNA, 1134 bp, Oryza sativa
  Clone ID: PAT_MRT4530_33377C.1
ctagtggatccccgcgcggcgggtcagctccggtcctccggcagccgcaggaaaaggaatggccatgcttgtccgctctccaacttctaccctccccgcagcgaatcaccggcagaaatccggcgtgctcctccggcgtccaacgcgccgctccgctcgccgtttccaactgcacgcggagaagcccgcttcccctggcgcgggcaacgagacgtcctccagctcggagaacgccgtcctcagggccgcctggtacggctccgagctcctcggcatcgccgcctcgttcttccggccgtcgcagccgcctacggagggggacagcgccggagccgtagaagaagcagcgtcggagcctcagggccgcgctcaggtcgccgaggctgtcaaggatgacttcgcgcggtcatatttcgtcacagggaatctcacgctgaaggcttatgaagaggactgcgagttcgccgaccctgcaggttcgttcaatggcctgcagcgcttcaagagaaactgcacaaacttcggttctctcttggaaaaagctaacatgaagctcaccaaatgggaggatctggaggacaaatcaattggacactggcgtttcagctgcgtcatgtcgttcccctggaggcctattctgtccgcgaccgggtacactgaatattacttcgacgctggatcaggaaaggtgtgcaggcatgtcgagcactggaacgtccccaagatggcactcctgcggcagattttcaggccgagtcgatgggtatgggagaaacgcaccgaagaatgaagcatcggtgttcatcgtgaactaggattatgcatgattatactcaatggtacctggttaggggcattagtagtactagtaccttgcatggaccgcatggtagcctatcaggttaaggctgctcgctcttgttgtacagactacagactacaagcagtaatagatcgaaccataatcattttagttctgggagattaaaccgtattgggcatccccgccaggtttcccaaaccgtcagggccgggattaccacgtccctgcggaatcggaatcctcgaaatcaattgaaaactctgatccccgcaatccaggaatcggaatcctcgaaatcaaatggactgtaa

SEQ ID NO: 28816 - DNA, 1788 bp, Oryza sativa
  Clone ID: PAT_MRT4530_33378C.1
atgggcctctgtgggccaattcagcgcaataggctgacacagagaggcctctccaaagaacaccaccttggccctcgtgccaagcctcgccggaccgccgccgcgtcctgtccacccttcgctagccagatccacatgagaagaggatgcacccaagctctaagcagaagagttgttggagataatagaaatgtgatgtcagagacaggaacaaactactccaaaccatactccgcatcgatgatcttgttggagcagaattttatgcgagctgagatcctagagtgggtcggagatttaaactccgaccccgtgcacactgccgcttcacgccagcccgataaactaataagaaacaacagggtcagtgttcttgatggaacctacgaggtttggcatacttttgagttctcagtcaaggaacagcgagtctttggtggtgtcgatatcatcgccttccttggcccttgtccttttgtcgccgtcgacgaggacgtgcatactttctccatggagaaaggcgggggatcgcagaagggtggtggcggcggcggcggcgaggcgaggaggatcaacgtggtgtatttcttgagccgcggcggcaggacggaccacccgcacctcttccgcgtcaaccaccaccgcgccggcgtgcgcctccgcgatgttaagaggtggctgtcggagctgcgcggccaggacatggcggacaatttctcctggtcctacaaaaggaagtacaaggctgggtatatatggcaggacctgatgatggacgacgacctcatcacccccatctccgacaacgagtacgtgctcaagggctgcgacgtccggcgagccaccgaatcgccaaaggagaagtcgtcttctttagctgaagagccaaagaaactggacagtcaggaagtgaaggtcgcgtgcgatcagaagcaagtcgaggaggtgacgacgacgacggcgccagattccgacgagagatcgccgaagacgctgccgccggtcgacgaggactcgcccggcgagccggcgagccgtagtacggcgccgttgaagaaagacctgccacgaggccttcgcgaggagcggaagaagcagcagcgagaggtggtgaaagtggtctccaaggcggtggtggtgccggcgccggcgccggagcagaaggtgaaaggagcggcgagcggcaggatcagcagccacacgccgccggcggtgggcagcgcgcggaggatgcacctggcgcagctgctccacaacctcctgacgtgcggcgcggccgacgccgacgacaccgcgctccgccccgtcctgcggcacggcgccgacgacgacggcggcgactggcctcctacgccggtgtgccccggcatcgacggctgcggcctccgggtgggcaagaaggtgaaggtgcgaagaggcaggaaagacaaggcgaagccgaagcgagacggcggcgattcgcacaagccggcgagtttgccgcgttgctcgcagtgcgggaaggagttcaagccgcaggagctgcactcgcacatgcagtcgtgcagggtcttcagggagaagatgaggagcagcaccagctcccgggtcagcgtcgacaggggccggacctccgccgccgcgaggcccgaacaccggaggacgagaagcaagggcgccgccgccgccgccgccgcccccggcgacacctcggaccgaccgtccgccgtgctcctcctcagggactcatgactgatgatcatttcgatcgaacttggaagttcctttgtgaattttgccgcacacgct

SEQ ID NO: 28817 - DNA, 380 bp, Oryza sativa
  Clone ID: PAT_MRT4530_33379C.1
cgacgagggctctctcccccacgctgctctctcgccgcgatggccacgctgcagctcaaccacgtcgcgcgggagaccgacgacgtgcgccgcctcgccgccttctacgaggaggtgctcggcttcgagcgggtcgcctccccgaactacccggccttccaggtcgcctggctccgcctcccggggacgcccggcgtcgcgctccacatcatcgagcgcgaccccgcggcggcgcccgcggccgtcgccccgggcgccgcgggcgccccgcccgcgcagctgcccaggcgccaccacctcgccttctccgtcgccgactacgacgggttcctcaccgggctgaaggcccggggcacggacgtgttcgagaagacgcagcc

SEQ ID NO: 28818 - DNA, 459 bp, Oryza sativa
  Clone ID: PAT_MRT4530_3337C.1
atgaaggcggatgcgctttggtgcttgggaaatgcacagacctctcatggattcttcacttcagacactgtcaaggccaatgaattctttgaaaaggcaacccagtgtttccagaaggctgttgatgtggcgccagaactgcacatggagattcataggcaaatggcatctcaggcttcacaagctgcatcctcaacctcgaatacaaggaagatttggcataattttcacatggtagattttaaaatatatgtagacaatgatcctacattttccatccctgcaaagaacccatacccaagtcaggctcgtgattctgaaatcctttggcaatcaaggaagaagaagaaggatagcgacttctggtatgatgtcttcgggtgggtggttcttggggttggcatggttgtctgggtgggtcttgccaaatctaatgccccgccccaagctcctaggtga

SEQ ID NO: 28819 - DNA, 255 bp, Oryza sativa
  Clone ID: PAT_MRT4530_33380C.1
ctcaatcgttcacacttagatcgggagggggcttccgatatccaaagctcctaggagcatgcgttggataagaaaatttggcaccagcttaaatatcgacacatggtaagataagatcacacttctatcgaagctgtgttgtgtgtcgagtgcactgatgggaactatatctctatacagcatgtgctatagaagtatgaccaggacatatgtgaaccttatgcagatgaagatgacgaacaggcgaacactgat

SEQ ID NO: 28820 - DNA, 930 bp, Oryza sativa
  Clone ID: PAT_MRT4530_33381C.1
cccatatctcgcctttcacagaccgcccacttctcctatccacaggtataccttagcgttccattcagagatttggcatgttctcttccatgcactgctgcctcccttgatgtgcagcaggagctgttcatctttactcctttaggagttcttcagattgatcagaggcagtagccagcccattagacaaggttacgcattcaggcgccatggccacctcctcctcgccgctcacagccctatactcctcgttcctctcatatactccttccacgccatccatggcggcgctgccccggcggcgaagggccggctgccgctaccctcgtatccaggccgtcgatctcgaccagaacacgatcgtggcgatatcggtcggcgtcgtcagcgttgccatcggcatcggtatcccggtgttctacgagacacagatcgacaatgccgcgaagagggataacacacagccgtgcttcccctgcagtggctctggggcacaggtgtgcaggttttgcaccgggaagggaacagttactgtagtgatcggcggaggcgagactgaagtatcaaactgtgtcaactgcgatggggttggctcgttgacatgcaccacatgtcaaggctctggaattcaaccacgctatcttgaccgcagggaattcaaggatgacgactaagggttttgttattgctaatgatggtatgccatattattgtctgatctgacaacgccataatctggagagcgtctgaaaaaaatggaggccctttataattccagcagagaaaaatggctgttctccagtggacaatgccgatgactcaagttgtagtgttaaacattctgcaaggtactgtctgttttgacatgtctttatgagtgttagcctacaacaatagtgcaatacaaccttttgatgccttctttttttt

SEQ ID NO: 28821 - DNA, 239 bp, Oryza sativa
  Clone ID: PAT_MRT4530_33382C.1
ccaaacatttacaaacgcgtagatgagagcgttaatgacatataacatgtataattgagtggaatactgaataaaggatatttcaataaaaaaaaaaaaaaataaataaaaaataaataggacttaaaattgaagctgaaaactttgtgttttacaatttttttacaggtggattcttgtttgttaggacaaaaattttagcaatttatacttacataaaagaaatgatgttgtataat

SEQ ID NO: 28822 - DNA, 418 bp, Oryza sativa
  Clone ID: PAT_MRT4530_33383C.1
gtgtcaactgcgatggggttggctcgttgacatgcaccacatgtcaaggctctggaattcaaccacgctatcttgaccgcagggaattcaaggatgacgactaagggttttgttattgctaatgatggtatgccatattattgtctgatctgacaacgccataatctggagaggtgcacatttgagaattgatctgatagttttgtgttgtattatatgtccatttttggtaaatatgtatgtatgtcttctgaagcgtctgaaaaaaatggaggccctttataattccagcagagaaaaatggctgttctccagtggacaatgccgatgactcaagttgtagtgttaaacattctgcaaggtactgtctgttttgacatgtctttatgagtgttagcctacaacaatagtgcaatac

SEQ ID NO: 28823 - DNA, 383 bp, Oryza sativa
  Clone ID: PAT_MRT4530_33384C.1
aaacccaagcggggatggggattacccccccaaagggaaaaaaaccccgaaaggggggaaacccccgggagtttttcccccgggaaaagggttccccccaaacccccttttttgggggggccccagcccctgaaagggccccgcaggttagctgaccccgcccgggctttggggggcccaacaaaaaccggaggctccttggacccggggccccagaaaagatcgcccccccccaaaaaattaattccccattaaaaaaccccaggggcccccaaacatggggggacaaaaaaaacccccccccccccaacaaggggaatattcaatccaacgggggggggccccgggcccggccctggaccccccagcctaaaagggggggg

SEQ ID NO: 28824 - DNA, 543 bp, Oryza sativa
  Clone ID: PAT_MRT4530_33385C.1
atgtggtttaaaggagcttgctgcgatgctgagatagcatgttttgttgttgaatcttttgaagcagctgcagctgtacttctggttgtgatagttgttgcagttgcagttgctgttgctgttgctgactctgtaggagggcctgctgatattcggctgcttgctggacttgagatgtctgagttagtgtgggctgctgcaaagaacctgcaattgatggtgggaaaatctggtttaacatttgtgcttgtgaggcaacctgcccacctgaagtctgttctttcagcttgtgctgttccactgaatgcagacttgaagcagccttcaactgctgtgccggttgtgactgctgccgctggagatgttcttgctgctgctgcaagtgaatggcgttctgctgcagcaactgggcttgatgttgctgtaaaaccacagaactttgctgcgatggctggacctgctgctgttgtgatagttggtgtggctgctgttgatgttgagacattacagggtgatccacttttgagccaacctgtaaattag

SEQ ID NO: 28825 - DNA, 3168 bp, Oryza sativa
  Clone ID: PAT_MRT4530_33386C.1
atgaaggatcagggatcatccggtgtgtctcccgccccaggggaaggggagaagaaagccatcaattcggagctatggcatgcttgtgccgggcctcttgtgtcgctgccgccggtgggcagtctcgtcgtgtacttccctcagggtcatagcgagcaggttgctgcttccatgcacaaggagctggacaacatccctggttatccctctcttccgtctaagctgatctgcaaacttctgagtctcaccttacatgcagattctgaaactgatgaagtttatgctcagatgacacttcaaccagtcaataaatatgatcgagatgcaatgctggcatctgaactgggcctgaagcaaaacaagcaaccagcggagttcttttgcaaaacgctgacggcgagcgacacaagtacccatggtggattttcagtgccacgtcgtgcggcggagaagatatttccaccactagactttaccatgcaaccaccagcacaagagctcatcgccaaggatctgcatgatatttcatggaaatttcgacacatttaccgaggtcaaccaaagaggcaccttctgacaactggttggagcgtctttgtcagcacaaaaaggcttctagctggtgattcagttctgtttataagggatgagaaatctcagcttctattaggcatacgtcgtgctaccagaccccaaccagctctatcgtcatcagttctatcaagtgatagcatgcacattgggattctagctgctgcagcacatgctgctgcaaacagtagcccatttactattttctacaatccaagggcaagtccatcagaatttgtcattcctttagcgaaatataacaaggctttgtatacacaagtatctcttggaatgcggttcagaatgctgtttgagacagaggattcaggggttcgaagatatatgggaacaatcacaggtattggtgacttggatccagtgcgctggaagaactctcattggcgaaaccttcaggttggttgggatgaatcaacagcatctgagaggcgcactcgtgtttcaatatgggagattgaaccagtcgcgacacctttttatatttgtccaccaccatttttcaggccaaaacttcctaagcagccaggaatgccagatgatgaaaatgaagttgagagtgctttcaaaagagccatgccatggcttgctgatgactttgccctgaaagatgtgcaaagtgcattatttccaggtctgagcctagtccaatggatggctatgcaacagaatcctcagatgctaacagctgcgtcccaaacagtgcaatcaccgtacttgaactccaatgcattggctatgcaggatgtgatgggtagtagcaacgaggacccaacaaaaagattgaacacacaggcacaaaatatggttttacctaatttacaggttggctcaaaagtggatcaccctgtaatgtctcaacatcaacagcagccacaccaactatcacaacagcagcaggtccagccatcgcagcaaagttctgtggttttacagcaacatcaagcccagttgctgcagcagaacgccattcacttgcagcagcagcaagaacatctccagcggcagcagtcacaaccggcacagcagttgaaggctgcttcaagtctgcattcagtggaacagcacaagctgaaagaacagacttcaggtgggcaggttgcctcacaagcacaaatgttaaaccagattttcccaccatcttcatcgcagctacaacagttaggtttacccaagtcacctactcatcgccaagggttgacaggattaccaattgcaggttctttgcagcagcccacactaactcagacatctcaagtccagcaagcagccgaatatcagcaggccctcctacagagtcagcaacagcaacagcaactgcaactgcaacaactatcacaaccagaagtacagctgcagctgcttcaaaagattcaacaacaaaacatgctatctcagctgaacccacaacatcagtcccagttgattcaacaattgtctcagaaaagccaggaaattctacagcaacaaattttgcaacatcaatttggtgggtctgattctattggtcaactcaagcaatcaccatcgcagcaagctcctttaaaccacatgacaggatctttgacgccccagcaacttgtcagatcacattcggcacttgctgagagtggggatccatccagttcaactgctccatccaccagccgtatttctccaataaattcgctgagtagggcaaaccaaggaagcagaaatttaactgacatggtggcaacaccacaaattgacaacttacttcaggaaattcaaagcaagccagataatcgaattaagaatgacatacagagcaaagaaacagtccctatacataaccgacatccagtttctgatcaacttgatgcatcatctgctacctccttttgtttagacgagagcccacgagaaggtttttccttccctccagtttgtttggataacaatgttcaagttgatccaagagataactttcttattgcggaaaatgtggacgcattgatgccagatgccctgttgtcaagaggtatggcttcaggaaagggcatgtgcactctgacttctggacaaagggatcacagggatgtcgagaatgagctatcatctgctgcattcagttcccagtcatttggtgtgcctgacatgtcctttaagcctggatgttcaagtgacgttgctgttactgatgccggaatgccaagccaaggtttgtggaataatcaaacacaacggatgagaactttcactaaggttcaaaagcgtggttctgtggggagatcaattgatatcacaagatatcgagattatgatgaacttaggcatgatcttgcatgcatgtttggtatccaaggtcaacttgaagatccatataggatggattggaagctagtctatgttgatcatgagaatgatatccttcttgtcggcgacgacccttgggaggaatttgtgggctgtgtgaagagcatcaaaatactctcagctgctgaagtacaacagatgagcttggatggtgaccttggtggcgtccctccacaaacacaggcctgtagtgcctctgatgatgcaaatgcatggagaggttga

SEQ ID NO: 28826 - DNA, 855 bp, Oryza sativa
  Clone ID: PAT_MRT4530_33387C.1
atggagagggcgggctacggcgtcggcgtcggcggcgcgggggcggtgggagccggggtggtgctgtcgcgggaccccaagccgcggctgcggtggacgcccgacctgcacgagcgcttcgtcgaggccgtcaccaagctcggcgggcctgacaaggcaacccccaagtcggtgttgagactgatgggcatgaaaggtctcaccttgtaccacctcaagagccatcttcagaaatataggcttggaaagcagaacaagaaagatacaggcctagaagccagcagaggagcatttgctgcacatggcatcagttttgcctctgctgcacctcctaccatcccatcggctgaaaataacaatgcaggagaaacgccactggccgatgcgctgcggtatcaaattgaagtccaacggaaactgcacgaacagcttgaggttcagaagaagcttcaaatgcgaattgaggcccaagggaaatacctgcagacgatactggagaaagcccagaacaacctctcctatgatgcaactggaactgcaaacctcgaagcaaccagaacgcagcttacagatttcaacctggctctttcaggattcatgaacaatgtttcacaagtgtgtgaacagaacaatggagagctagcgaaagcgatatctgaagacaatctcagaactaccaatctaggctttcagctctaccatggaattcaggattccgacgatgtcaagtgttctcaagatgagggcttactgctgctagatttgaatatcaaaggaggaggatatgaccatctgtcctccaatgccatgcgaggcggcgaatccggtctgaagattagtcagcacaggaggtaa

SEQ ID NO: 28827 - DNA, 2645 bp, Oryza sativa
  Clone ID: PAT_MRT4530_33388C.1
atggatttgttcctgtcggcgacgtccatcgtctccaacgccaacgaatggttcgagttcctcggcacggccttctccgccgcgtcgttgctgctatcccggtggaggcgtcggcggcaaggggacgaggcggagaggaggcagctgcagtggaaagggcaggacgcgaagatgaagcagctccactactgcatgctccagctcccggatctgatccaccatgccgagtggctcagcttcgtcaaggacgacaaggaggtggccaagctcctccccgagctcaaggccagggtgcacgacgcctacgacctcctcgaggagttcaatcaccaccaccatcaccagcagcagctccaactggatctgggtcaggacgccgccgcggagaaggccggggacgatttcttgcagagcatcgccggtggcaacacggtgagggagatcctggatgatctcaactgcctgaggaacacgcttgagggtgtcattgaccgccatgctcgctccgagccgcatcagattggcaagctgctgaggccggccatgacctctttctatgacaaatccaagttccgcagccttgaggatgaggtgaatgagctgctcgagttactcggggtgaagatctgctcggcacggccacacaagcggcgaatcaaaggcgaaaccgcttcggctagcaagaggaccaagcggaacagcggtgtcccttctgcatccaccaggacatcatgcagcaatcaggaaattgcatctgacaatgtaactgtcttagcgatatctggcattggtggtgttgggaaaactactttggctcggcaagtttacaatgatgagagggtcaaggggtattttgatgtcaggatctggatttctgtctcggatgatttcaatgtcaagagattaactaaggagttcatagagttcgctcttgcgaattggatgcagtctgataatctgtgtaacctccagcagagtctcactgaaagcattgtcaagtttaggttcttgcttgttcttgatgatgtgtgggacgatgtatatgctaatcaagacaacagatggcagaatttccttgagccattgaagtctgcccaacaagggagtgcgattctgttgacgacaaggtctcaaagggttgcggatctagtgaatgaaaacaggcacttccgactggaaggtctgccgcctaccattttcgatgaattttttgaggcgtgtgcatttggctcagatcgctgcggtgttaatccagaactgaaccccattgggaaaaggataattccacagctgaagaggtgtcctttagctgctgaaactcttggacgtttactgaagcctatgctggatagagagcactggaatcagattgcaggaagtgagttgtgggagctgaaacaggagaaatatgacattttgccagtccttcgcttgagctatctgtatctaccttcctatctgagaaactgttttttgttttgctccatgtatcctaaaaaccatcagtttgacaaagatactctggtgaacagttggatagcagctgggttagttgagtcctgcaagggtggcaagctagaaagcaatggataccaatattttgaggatctactgcatagatcccttcttcagaaggaatcaaacagcccaacggattccaagtatgttatgcataagctgatccatgatatggcacaactgatttctgagcacgagtgcttcattgtaaaaggcgaaactgatctgacaaaaatccctcaaggcgttcgccatctttcaataattggcagtagtagtctcagtgaaaccaacctaataatggtatgcaagtacaaaacgctgcgctccattgtgtgccatggtgttgagacttacatacttactgctgtagcgaagtactggtttgaagaacttaccaaaatacgaatgctgggtttcctgtcctgtgaggtgaactctctgcctgagaacattgacaacctgaagcttctccggtacctgaatatcagcgattgtactttcgaagagcttcctcaatctttttggcgacttcagaatttacaaattgtagatgctcagaaatgccgtgtccaacaaattcctgatgacttcaatcgattgggtaatttgcagagatttaagttgaggggtagaattatcaaacaacccggcacttatgaactttaacttacaagatatcccgtgagattgatgaattacatctacgagcttattgtacagtgtaagtgatgatccaattgtaccgtaaaagtcctcttcaaaataggtggacatgtataactgcaacatcagtggtcacctgtgaactctgtaatattgttatttgacgaaagtaggatatatggacagttgctccggttgatcttccacatatccagccctaacttcgtatcgatgtaaaattgtaaagggtataaatttcgacttttgagtattaattacagaattatgatgacaagaacatactcttagggtaatatgtttcatgttcctcccctcgtgcgcagacttgagtagtgataattccgttatcactatccctatggctgcacttaattctttttctcaaaaaaaaaaaaaaaaaaaaaaaaaaaaaaggcctgcagcccgggggatccactagt

SEQ ID NO: 28828 - DNA, 246 bp, Oryza sativa
  Clone ID: PAT_MRT4530_33389C.1
atgaggaggagctcacctagagcgaagagggcgggtttcggaagagtggtggccgggcttgccctcgtccctgcgaagccgaaggaggtggcagcgcaagtcggcgtcgaccggagaggcggcgcgacgccgttggagtcggcaatggcgacgaagagaggtgggctcggggcaacggggcggcctgggagaggcggcaaccggcggcggagtgggatgccgacgtggggaagcaagtggggttag

SEQ ID NO: 28829 - DNA, 5950 bp, Oryza sativa
  Clone ID: PAT_MRT4530_3338C.1
ctaaccccttttatcatgtccgctaggtggttccggagaccgtccaccgttcgtcgtcgcctcccactcattcctcgccgccgttcgccgtcgcccctccgtgccggccgaatcctcggtgagaaccccgtcgtccttcccctcccctcctagcgctgccgcccctcgccgctcggggtcgcgccgccgccgctcgccgtcggtcaccgccgtttgctgccgccgccccgcggtagcgccgccgtgcggcatggccaccgtgccggcttgagccgcccgtgcgcgccagccgcgcgctcccgccgccgtctgatataccctcgggtagatcggggccgtcggttcggccgcccgcgtggctgccacgtggccgccacgtgtgcgccacgtcgacgccacatcagtgccacgtggtgcgccgctccttccccggtccgtggacccggtccaccgcagaccgccacccgagtcattctttgtcttctctagatggccgaccacccacccaaccaccgtggagaaggcatggatgattttgtggcagagttggctcgcatgaccctggtggtgggctaccccaacgcgccggagtactcgaccgttccgccgctcagtggcgagcttccccaccgtgttcgtctggaggttcatggctttgtgggcacctgcctcgctaacatggtggttgaggcctctggaggcacagtagatcacacttgtcaggaggcagcatacctgatgatggccaggcttcgtgatcgccacagctaaatcttctgcaacacggcgtaccgcttccaccctcgccgagcaagtggcgacgacgtcagcaccttccgcccgacggccagtgagaatgacaccaccttcagccacatgtgtgccgtgatgaggggaatggacacgatgcactctgacctgcacaaggcatccaaggcctcgaatgatgggaagcttgtgaggatcatagctctgaaggatgagatagcacgccagaagaaggagaacgctcagctgaagggtctccccgctcccggaggagtccggatccgcaccacgcctcgcaagtcaacgactgcacccgtgcgcattcagcttgcgcccaggaacccacctcctcccgcagctcctccagcacctcccacagttcccgcagcgcccgcagttccagctccagtcccagcttccgttccagtgtcagctcccgcgtccgctctctccttcgctctagcgtcagccgccaggggtccagccattggcaacggaggttggttgcctgctactcacagtggcagccacgaccacagcagcagcagttccagtggctcagagccgggcaacggcgagacgtatctgccagactccaggagccgctcagagggacctggcctcttccttcagatggtcaacaccaggaatggcagccatgcagcaggtgaaggcagcaacggcgaagaacgcaccgacggtggatatcccaacagcgcctctggcaacagtccaccaccgctccccaagaacccgactcttgcacaagtgatggcccatcagacttagatgatggcggccatgatgcagctgatgcagcaccagccctagcagatgcaccagaggatgcagcagcaagccgagcagcagcagcagcagtttggtccccctccccctcagtccaagctgccggaatttctacgcgtcaggccacccaccttctctagcaccaccaaccccatggaggcaaatgactggttccatgccatagagaagaagctcaatcttctgcagtgcaacgatcaggagaaggtcgccttcgccacacaccagctccagggtcccacgtcagcttggtgggataaccacatggctacccgcccgccaggcacagaagttacttgtgcagagttctgtcgcagcttccagaaggcgcaagtactagacggggtcgtggcacaaaagaagagagaattccaggcactccaccagggcaacaggatagtgactgagtacctccatgagttcaattgcctagcgcgatatgcaccggaggatgtccacattgacacattgaaacaggagaagttcctagcaggtctggatgacgagctgaccaaccagttgatctccggggattacactgacttcgagaagctggtagacaaggcaatccgccaggaggatcagcgcaacaaaatggacaggaagaggaggtttcgacagttccggtccaaccaaggaagtcaccagcgaccgcgcttcactcctggacagcagggtgggcctaccaccatgattgttcgacagcatcgcccttacaacccaagcaacttccaccccggcagcagtggcagccatcatggccaaggtcagcacaaccgcagcgcagccccacgcccgccaatggcgccagttcagcaaactgcacccgttcccccaaagaaggacaccggaggcaagccaggagcctgcttcaactgtggtgagtccggtcacttcgccgacaagtgcccgaagcccaggcgtgctggacccaagtttgtccaggctcgggttaaccacgcgtccgcagaagaggcgcaagtagcaccagaggtcgtactgggtacgtttcctgttaactcaatccctgcaacagtacttttcgattctggtgcaacgcattcattcatttcaaagaagtttgttggggtacatgggttaataagagaagaacttagtacaccaatgcgggttcagacccccgggaatagctccacctcgattcaattcagcccttgtgtaacaatagaaatccaaagatcaccatttctagccaacctcatccttctcgaatccaaagacctagatgtcattcttgggatggattggctgaccaagttcaagggtgtcattgattgtgtgaatcgcacggtcaccttgaccaatgagaaaggggaaacagtggtgtacaagtcaccagtcgtactgaagcagggaatctccttaaatcagattgaggtggaaaatccgatggtcaccgaggagaagagttcgaggaaattggaagatatccctatagtcggcgagtatccagaggtgttccctgaggacctcactaccatgccacccaagagggagatcgaattccagattgatttggcaccggggactgccccaatttacaagaggccgtacagaatggcagccaacgagctagcagaggtcaagaagcaggttgatgagcagttgcagaaagggtacattcgaccaagtacttcaccttggggtgctccggtcatttttgtggagaagaaggacaagacgaagagaatgtgcgtcgattatcgcacactcaatgaggtcaccatcaagaacaaatatcctttgccgcggattgatgatctgtttgatcagctgaaaggagccaaggtgttttctaaaacagacctgcgatcaggctatcaccaattgagaattcaggaagaggatattcccaagatggccttcaccactcggtatgggttgtatgagtgcacggttatgtattttggacttacgaatgcaccggccttcttcatgaacctgatgaacaaagtgttcatggaatttctggataagtttgttgtggtattcattgatgacattctaatctattccaagtcggaagaagagcatgagcaacatcttcgtctggtactcgagaagttgcaggagcaccagctttatgccaagttcagcaaatgcgacttttggttatcagaggtcaaattcttgggtcacgtcattacagctcagggcgtggcagtctatccatcgaatgtggagtcagttaccaagtggaccccacctaagaccgtgtcacagattcggagttttcttggacttgcgggttattaccgtcggttcattgaaaatttctccagaattgccagacctatgactcagttgcttaagaaagacgagaaattcaggtggacagccgagtgtgacaagagttttgaggagctcaagaagaaattagtacctgctccagttctgattctgcccgatcagacgaaagacttccaagtctattgcgacacgtcccgtcacgggcttggatgcgttctaaagcaagagagcagagtggtcgcttatgcctcgcggcagttgcgtccgcatgaaggaaactatccaacacatggcagcggtggttcatgctttgaaaatctggaggcactatctgattggcaaccgctgtgaagtatatacggatcacaagagtttgaaatatatcttcacccaacctgatctgaatctccgacagcgaagatggttggagttaatcaaagattatgacatgagcattcactaccatccaggcaaagccaatgtggtggcaaatgcattaagcaggaagagctactgcaatgctttgtgcaccgaaggcatgtgtaaggaattgcagcaggagcttgaacatctcaacttgggaatcgtagaacacgggtttgtggctgctctaaaggcacggcctacgctcgtggatcaagtaagagcagctcaagtaaatgatcctgagatagctgaactgaaaaagaatatgagggtcggaaaagcccgggatttacttgaagatgaacatggcacaatctggctgggagaaagattgtgcatacctgatgacaaagagctgaaagatctgatactcaccaaggctcatcagactcagtactccattcatccaggcagtaccaagatgtaccaagatcttaaagaaaaattttggtaggccagcatgagaagggaaatagctgaattcgtcgcactctgcgatgtttgtcagcgggtcaaggcagaacaccagaggcccataggattgttacaacctcttcaaatcccagaatggaaatgggaagagattggaatggatttcataacaggcctgcccacgacatcatcaggccacgattcaatctgggtagtcgtggatcgacttaccaaagttgctcatttcattccagtgcatactacttatacaggcaaaaggttggcagagctctatctctcaagaatcatgtgtttgcatggagtacccaaaaagatagtatctgatcgagggagtcaattcacctcaaaattttggcagaagttgcaagaggaattgggtacccgttcgaatttcagcacagcttaccatccgcagacagatggccaaaccgagagggtcaatcagatcttggaggataagttgcgagcctgtgcgctcgattttggcggagcttgggataaaagtctgccttatgctgaattctcttacaacaacagctatcaggccagtctacaaatggcaccgttcgaagcgctgtatggccggaagtgccgcatacctctcttctgggatcaaataggcgaacgtcaactgttcggaacagaagtgctaacggaagcagaggagaaagtcagaaccgtcagagagaggctgagaattgcacagtctcgacagaaaagctacgcagacaaccgccgaagagagctcacttttgaagcaggagattatatgtacctccgtgtcactccgctccggggagtacaccgtttccagacgaaaggcaagttggcaccacgcttcgtgggaccatacaaaatcttggaacgaagaggagaagttgcctatcagctagaacttccatccaacatgatcggtatccatgacgtgttccatgtgtcccagttaaagaagtgtttgagtttacccgaagaacaagccaattcggagcacattgacatccaagaagatctgacttatgtggagaagccagttcgcatccttgataccagtgaaaggaggactagaaacaaggtcaccaggttctgtagggttcagtggagccaccactcagaggaagaagcaacctgggaaagggaagatgagttgaaggccgcccatccgcacctcttcaccagctcttccgaatctcggggtcaagattccgtt

SEQ ID NO: 28830 - DNA, 392 bp, Oryza sativa
  Clone ID: PAT_MRT4530_33390C.1
atcttgttaagttgccagatgcgttcacaattttccatggataaagttcccgaaaggagcaaacgcatttttcacaataggaccagacccaaaccacatagtagagaacattcaaatgtaaagtcacggtgtaaacatttggccctttttaataaacggcaacaggggatctacaaattaatccgggaaaaagggtaactacatatttgctccatttaaaaagggaagtgattttaccatttcccacatttatatagatggtaaagaatttaaataaatttttttgtttaaattcataaacttcaataagaggggggaaaaggctagaatgcctaaaattgtgaaatgggggggagacagttagtagttttaaactggtaaagaaggaaaaa

SEQ ID NO: 28831 - DNA, 452 bp, Oryza sativa
  Clone ID: PAT_MRT4530_33391C.1
cggcgagaggaggaggctgcggtggggcgttcgtcgggagagagaccagggccggggggctagggttcggccgttcagagaggcggctatcggttcaggaggatatgaagaatgcagcattcagagttatttcgctgtctggttcttatcttatcatccctataatagtactaccacaagatggactgtattcaaatttatcaggttgattccagcagctaagtaaaagcaaacttcataaggcaattgcgcctttgcatttgcatcacatattcacatggcaacccttaaaatgtatgtatgtctgtactcatatgttgcggtgggtgaaccttacgaagtagtcagctgctctatactttcatattgcatatgtgaatgacaagatctgtcatggtcataagaatcggcttttgttggtctacggttatattaacatcacggggtgtgca

SEQ ID NO: 28832 - DNA, 273 bp, Oryza sativa
  Clone ID: PAT_MRT4530_33392C.1
tttttatgtctgatcgtcagctagaaggttaacatagggcttgttgtccaatcatgagggatgacatcatcccttgaatgacaacctatatacgctcgtctaaatagaatattactgagtccacatatttaaaggaagtggattccgacatgcaccaatcttcatactttaaaacctgtgcaattgtagcatcccgcaggatattaagctcggtggaccaggatcgactaatcaacaacctctggcatgcactatgtagcaagatgaggagac

SEQ ID NO: 28833 - DNA, 347 bp, Oryza sativa
  Clone ID: PAT_MRT4530_33393C.1
gtgatgaaactacagccctgaagttgctcgtgtgagactgttcggtagcactgcaaacttggttattgaaggccgcatacccaaaacttaagtgccgcttataatttatttggtggtttgcccccccatttaaaatccttttggttctgccaaaagtaaaacctggcatggttcaagggttacagaaaccataaccccattggacaaacttttcaaaggccattttccagggttgaacccaacccccaagtgtggcttgataataggcgaggacaccggtcctgtggtccatgtgggactctcacagtaggggtgaaaccttatggggtattgtggcggtgtcacac

SEQ ID NO: 28834 - DNA, 466 bp, Oryza sativa
  Clone ID: PAT_MRT4530_33394C.1
atacgggggaagttgcatagaagatgaccaggactcctaattaattcggatactggtattatagaggtattgtttcagtaggatatgaagaatgcagcattcagagttattttgctgtctggttcttatcttatcatccatataatagtactaccacaagatggactgtattcaaatttatcaggttgattccagcagctaagtaaaagcaaacttcataaggcaattgcgcctttgcatttgcatcacatattcacatggcaacccttaaaatgtatgtatgtctgtactcatatgttgcggtgggtaaacttacgaagtagtcagctgctctatacttgcatattgcatatgtgaattaaaagatctgtcatgtcataagctatcggctttgttagttctctggttatactagcatcacgggtgtgcatccaaattatattgattactgacttcaactgtaaca

SEQ ID NO: 28835 - DNA, 440 bp, Oryza sativa
  unsure (1)..(440): unsure at all n locations
  Clone ID: PAT_MRT4530_33395C.1
tcgcgatctagaactagtctcccggcggcgaagcagtggtggtgtagtgtcgaggcctcgaggcgaaccttctagaagtttccgggcgggcgcgctgccctccaacgaggccgccgcggtggcgccgcccgcgacgcagccgtcgcagggactgtcccgccgcagcagggccggccccggggagcggcagcagccgggggaggcggccagcctcgccgtggccctcgcgcgggagcggatcaggcgcagcggcgaggcggaggggganggaggaggggcccgtgccgttctggcagaggacttggttcctcgcgctgctgctggcgatggccgccgcgtcgttcgcgatcgcgctgctgctctacctcggcctcgacctccccgaggcgtcgccggcgcagtcctacgccgccgacccggaccacgtcgtcgagattacc

SEQ ID NO: 28836 - DNA, 543 bp, Oryza sativa
  Clone ID: PAT_MRT4530_33396C.1
ggatccccgggctgcaggaatcggcacgaggcacatttgtagatgcttaattgttttcatttccttgcgtcgccacaaaagctaaatcatgtagtatctcaatcgttcggtattgactaatctcctgaacttcattgtcgttttgctgatgtacatttgattgttgactattacaatcacaaatgtatgtggtgttcatttgtcaaggggtgcttcattccaattgctgttgtatatgagttttgttgtacaaaaaatgagcagttgctggacagagcttgctgtacatgcatgtccacagctgttatcatctgagtatgctttcagttagttcatctttagcgagctgcggggagaatttacatatctgaagctagtattcatcatgatgctgcaaccagcaccaacctggccttggaaggggactggtgtcatgatggaagatacaaggcgatgtcctgatggtgagtctggcgaatctggaatttgttgaggaagacacaacgcgaaatgggtaatcttaaagaagctgttcctatggtt

SEQ ID NO: 28837 - DNA, 2274 bp, Oryza sativa
  Clone ID: PAT_MRT4530_33397C.1
atggcggccaccatgcgtggtggcaacgtagcactcgcgatcatcttcctgtgcttcacctgtagcaacaatgtcttcctcctccgttcgtcgtcggcgtcgtcccccatcgacgacttcctccggtgcctctccggcaagattcccgcggagcaagtgttcacgcagagctcgagcgggttcatggcggagctcacctcgtccgtgcagaaccccaggttcgtgacgaacgccacggtgcggcccgcctgcatcgtggcggcgtccgacgcgtcccacgtccaggccgccgtgcggtgcggccaccggagcggcgtccgcctccgcgtgcgcagcggcgggcacgactacgagggcctctcgtaccgcgccgtgcgcgccgagacgttcgccgtgctcgacctcgccgggctccgcgccgtgcgcgtccgcgccggcgacgctacggcgtgggtggactccggcgccacgctcggggagctctactacgccgtcgggacggccaaccccgggttcgcgttccccggcggggcctgctcgacggtcggcgtcggcggctacctcagcggcggcgggatcgggctcatgatgcgcaagttcgggatcggcgccgacaacgtgctcgacgccatgatcgtgaacgccgacggcgagctcctcgacaggggacgcatgggggaggacctcttctgggcgatccgcggcggcggcggcgagagcttcggggtggtggtgtcgtggcggctgaagctctcgatggtcccgcccacggtggcggtgttcaccatcgccaagaccgccggcgacggcggcgtcggcgacgccgccgccctgctcgccaagtgggagacactcatcctccagccgttcctcccggatctcaccatccgcgtcgtcctccagggccggacggcgctgttccagtgcctctacctcggcagcggcggctgcgcccgcctcgccgccaccatgcgcgcctacttcccggagctcggcatgacagcctccgactgccacgacctcacctggctccgcgccatggcgttcatcagcctgggcgcagccgacgcgccgccggagggcatgctccgccgcaccaacaacctcggcacctacgtcaagagcaagtccgactacgtccgccgccccatgggcgccgccgcgtggtccgccctcttcgcggaccacctcgccagcaacaacgccggcgtcctcatcctcgagccccacggcggcgtggtcggcgccgtgatccctgacatggccacgccctacccgcaccgcgccggcgtgctgtacaacatccagtacggcgtgttctggtggggcgacgacgagggggagagctcagcggcggcgaggcggtggctggacgcgctgtacgcggcgatggaggcggcggtgagcggcaaccccagggaggcgttcgtgaactaccgtgaccttgacatcggcgagaacgcggtggtcggcggcgtgacggagtacgagagcgcgaggagtggacagtggtctcaaccctccacgtcagatctgagcacccgtggcagtgtggagtgtggttccatgaactcttgccgtgcctgcagaggtcacagttgcctcgccgcggttcggcttgggagcgcttggggaaaaagagaggtcgaagagaacttgccgtggtggtcatcgccgctcgccgccgccactgaggtcgcgttgccgctccacgttgccaatgaggtcgcgtcaccgctccaagccgccgctgccaaggtctctgacgttcactggtgtcgtagatccaatgaggtcaagcatggattcagccagctcgtggctggatccgctactgccggtggcccctcgaccgccacgagaaggggatgggaggggagaagtcgacagacgcggccagatctgccgcacgtcgcccaaagagaaggagagggggagagcagcgtggcggtggacagggagaagaggagagggggagagccaccctcgaagtttgatgtggtgaatggggaggaggagaatggtggtgggaaagtgcgacatggcagtggaatgggaggaggagaatggggagggggagaaatggggagaataatggcgcagtggtggatggggaggaggggggagagtcagcactgtgagcgtcagaagaagaggcagcgatttggtggcgaaagaggaggcggcaacggcgagatgtcgtggattagttttggtggccagtggggaatcgagagaagagagagagtccggtccgcgagccgtgaatcatca

SEQ ID NO: 28838 - DNA, 844 bp, Oryza sativa
  Clone ID: PAT_MRT4530_33398C.1
cgaaccgaacccggttaagctcaaagccgacgcccgccgggcagaggcaaaggggagaacgagcaggcgacgacggcgcccagccccatcggttcctggtaaggatggccgccgccgtctcgttggcgagccctttccggcgagtccttcacgtccctttcgcacgccgcgctatccccacatcgtaccacttcttccctagcggacggtgtcacgcggctctctccttcgccgcggcagcagcaggagattcggcggttaaggcgagcttggataggaatgcagccgaggaactcaggagcatcctggatatggcacaaagggcttcccaacggagagatgttttccacaccaattttcttactccacctatagtgaaggagtgcatgctggcaattgagaagttagcagacatcaaagcggtagcacaggggggctacccacaggctgagcgagaggtgctcaggtccttgttgatcctgaacttgttgactatctgacttccacacttgaaaaggtggggaaagttggagtttcatgcacacagattcctttgcttgctctagaatatgaaccaccaaggaccaagtcatttaaaactgtagaatcatcactcagggttgatgccctgggtagtgcaggatttaaaatctcacgtacaaagcttgctagcttgatcagtgctggggatgtccgtgtgaattggtcaccagtttcgaaaaatggagtgactctcaaggctggggatgttgtttctgtcagtgggatggggagattaaagattggggaaattgtgactacgaggaaaggaaagtacgcagttgagctgattcgatatttgtag

SEQ ID NO: 28839 - DNA, 480 bp, Oryza sativa
  unsure (1)..(480): unsure at all n locations
  Clone ID: PAT_MRT4530_33399C.1
cggacgcgtgggcggacgcgtgggccaaccaccacccagcccgccagccgtgcgagcgcagctttcctatttaagccgcgcctcgctggctcgctgccgctgcccctgcctcttccccgaatgctggtctctcgtcgccccgtcccctggaatctctccctttctaccttggtccgggaccgcggctcctgaaatctctctctgtccctagaaatttctgcgcgcgtcttccgttcttctccccggtttggttggttcccgagcctgtgacctcgggggcggccgaaaggttggattttgtagagcaggctttacttgcatctgggcaaagattggattttttttgtggagcgattttggggtcgttgttttttggtgcttgtttgctgaagtttggattttgggaggagtttgggggggggggggcnnctgcanaagagtgctcatgtgaccggggaacagggtggccctgcattggat

SEQ ID NO: 28840 - DNA, 2411 bp, Oryza sativa
  Clone ID: PAT_MRT4530_3339C.1
ccggccgggaatctccacgcccacctcctccggccgggccgtcctcctctctctccccaaatcgaacatcgagagagagagagagagaggtctaaaaccctaacccccgaatcgaatctcgtcggaagccgccgccgccgccgccgccgacgacgacgcccgcgacgccatggacatgggagcgatgagcgatcctgagaggatgttcttcttcgacctggcatgccagaacgccaaggtcacctacgaacagaacccgcacgacgccgacaatctcacgcggtggggaggcgcgctgctcgagctctcgcagatgcggaacggccccgagagcctcaagtgcctagaagatgcggaatccaagctggaggaagcactgaaaattgatcccatgaaggcggatgcgctttggtgcttgggaaatgcacagacctctcatggattcttcacttcagacactgtcaaggccaatgaattctttgaaaaggcaacccagtgtttccagaaggctgttgatgtggaacctgcgaatgatctttacaggaagtcattggatttgtcatccaaggcgccagaactgcacatggagattcataggcaaatggcatctcaggcttcacaagctgcatcctcaacctcgaatacaaggcaatcaaggaagaagaagaaggatagcgacttctggtatgatgtcttcgggtggggtccgccccgccgtgcacccctttttccaccagcacttgccgtgccttcctctccccactccgcccatcgcgagtgctttagcgggttctcctccactcctctcgtctcgcgtgagtactcgcgacctcaccgccggcggcgacgagcggcggcggcggcggttgaggaaggaagggggagggagagcaggaaatgcggatgctgtccaaggcgtgctcgctcgtggcctcctccctcccgcggtgctcatcctccgctgcccccacgatcagagggcagccgtcgttgctgccaagcgtgcgcaaggaatggcttggcaagccgctgctgtacggaatcggcacgctgctcgtcatgcctctgaggacgctgcacggggtgggacggatgtttggcgctgggcggttcctctgcaacatgaccagcgtctcgtcgtcgctgcaaattgagctcgtaccctgccttcaagataactatgcttacatcctacatgatgtcgatactggaacagttggagttgtggacccttctgaagcaacgccaatcataaatgcactagaaaaaagaaaccagaacttgacctacatactgaacacccatcatcactatgtctcaggctgcacaaactgcatccactgcatccgaatatatggtccataaagattggtagtgcgaaggatagggatagaattgtaggctgtcttctgatggttggttcttggggttggcatggttgtctgggtgggtcttgccaaatctaatgccccgccccaagctcctaggtgagatcggttcgtcttataacactacctgcagaaggcagcgtgcctatgttaggtgcctcagacttcaaatcttgctaggggctagttaatcatgtagtcgtacttggtgtttccatgtaacacttttggtcaagattttcatatgcctgatatacttatccagcttgagcaaggtttagattagtcataaatccatacttactgagacatgaagacttacgggattacgctgcaaatgccgcttatttccgcaagaggaatacacccacggtgccaacaacaattgggagagagaagcagtgcaatccttttctgaggacctcaagtccagagataaagaataccctgtccatcccagaccattttgatgatgcacgcgttcttgaagttgttcgacgagcgaaggataacttttaactaaccataaaaaaggaaaatttcacgtccatgacccaattgtcatgttgaggagagaagcagacaaagaactccacaagagaaacaaaagaactacaaggtatatgatgactacataagatcgagctagtttgtttctaaaatgcttcggcaaaattgtgtcgcggtgtatgtagcttttggcagtggttgtaaaatgtcgtccaatagcagctggtgattctttctatcaactacaaataagtgtgatctgttatcatcaactctgtaaaaagaatgcgagttagagattgatagttctcccagaatctcaatcctgtccttatgactcatttcatttgaagtgtttaagagtcagttcttacggagtaggcagttggtgcgctttttgtgacttatttaacactggagtgtacctgaatgtgttgacatggtaacacactgacactgatcactcgatcaacttcattgcaagtgatcaacaacaaaaaaaaaaaaaaaaaa

SEQ ID NO: 28841 - DNA, 463 bp, Oryza sativa
  Clone ID: PAT_MRT4530_333C.1
attggggaaaggcacaaggacactgatcattgttactacaaagtcacaaacttaattagtaattcctgccccataaatatattacaatccaacgaaattgcaacaaacttccagcgatccaaaatttcgtgtgcattgcacagttccaagatctctcatgtccagctattcatggtcgtcatcgtccccaacgccggcatcgccgtcgccgtcgccggcgtggaagaggtcgaggcggttgtggctgaggcggagcgtgtacatggtcctcttgtactccgcccaggtgaaggccctgtaccggcgcggcgcgccggcggccaccgtctccgggagagccgagatcctggcgtgcagcggcggcgccgcgaagtagatggtcgacagcctcggcttgccggtgccgaccaccaccctgtgccggatactcaccagcctcccgtttgtcaaagcctgcaaaaat

SEQ ID NO: 28842 - DNA, 460 bp, Oryza sativa
  Clone ID: PAT_MRT4530_33400C.1
cggacgcgtggccagcacaggtggtccacacctttggttttcccggagggtggaaggggccggattttgggccaggatcaatcgcggtattcaagttttcccttgaaaccaccccaaccggcatttggaatggacccaatggtggcttccaatttgaccaggttggcagtaggaccggaggttttggcaaaaaagtggccgaaccttaccgccagggtggtaccaccattattggaaggaggggatcctgtggccgttgttaaaaaggtggaagtggcaaatgtattaaccacattttaaccggaaggtgtgcctaccttgaacctgttgaaaggaagggaccttcctgaatcatttgaccttattaaagctgtacctggggccgtttaaggctaagttcaatttggttgcaccttcttaaggtaccattctaaactggcttttttctactcctttttgg

SEQ ID NO: 28843 - DNA, 806 bp, Oryza sativa
  Clone ID: PAT_MRT4530_33401C.1
atggcgtaccgggcggacgacgactacgactacctcttcaaggtggtgctcatcggcgactccggggtcggcaagtccaacctcctctcccgcttcacccgcaacgagttcagcctcgagtccaagtccaccatcggcgtcgagttcgccacccgcagcatccgcgtcgacgacaaggtcgtcaaggcccagatctgggacaccgccggccaggagaggtatcgggcgattacaagcgcatactatcgcggggcagttggcgcactcgtcgtctacgacgtcacgcgccatgtcacctttgagaatgtggagaggtggttgagggagctccgggatcacacggacgccaacatcgtcatcatgcttgtgggcaacaaggctgatctgcgccaccttagggccgtctcggctgaggacgccaaggccttcgccgagagggagagcaccttcttcatggagacgtccgccctggagtccatgaatgtggagagtgccttcactgaggtgctcacccagatctatcgcgtggtcagcaagaaggccctcgacatcggcgatgacccagctgctccaccaagggggcagaccatcaatgttggtggcaaagatgatgtctctgcagtgaaaaagtctgcttgctgttcatcctagtagtgtatgttgcttctattgaaagaggtccattaattttcattttgttgtggtgatattgacagttagattgttccaactttcagttatcccatttcttgaaagtcttaactcaagacagctcctttcgtcagattggttactgtattcgccat

SEQ ID NO: 28844 - DNA, 362 bp, Oryza sativa
  unsure (1)..(362): unsure at all n locations
  Clone ID: PAT_MRT4530_33402C.1
gctgctacgcctacagctgctgagcctggggaggctgtatcggaagacaacagtgtatggcgcatacaccgacctgaccaaggacaatggctgacacataggtggctacgacagctgaaaccaagctagagggaggtgcatccgtagccaacacgcttgagagaggcccatccatctctagctaaaacgatggaagctgatccctcactgtagagctcatgatatgtcaccaattaactggggggaagccaatacattaccgataagctgaaaggaggctgatcaggaaatggatcatagggagtagatccgctatgtggtctataggatgtganagaatgttcttcttgttatagctattt

SEQ ID NO: 28845 - DNA, 321 bp, Oryza sativa
  Clone ID: PAT_MRT4530_33403C.1
cgctttgttcctggaccccttttcacagtctgctctttctggttgttgccttgtcatgtgtctgcgttgccgcctgcaagagctcggagtgccagtgtacgcgttttgttggcctgcgatcgcgctgtgcaaacccgactcacaaaagcatgtaagagcctcatgtccttttcactcccccccggctccccgttctttttcccggggccccgggcttctatcatcacccccgccctccccgacgggggaaactcgggcccacaccccccccggggggggatatgcctcccggcccccaatcacccacggggtgcacccccc

SEQ ID NO: 28846 - DNA, 286 bp, Oryza sativa
  unsure (1)..(286): unsure at all n locations
  Clone ID: PAT_MRT4530_33404C.1
gacgccgccagcacgcggacgggaagccggagcccggagagcggccgcccnnnnnnnnnnnnnnnacaaaaacaacagcaacggacnngacgaaaaancacncgcancccggngagaaaaacaaccgcgaaaaggcagcacgccgagacgcgnaccaggcacgcggacaacgacacaagncgaacaggacgcaaaacaaaagggcagacagcacacgacaacgcgcagcgcggagcaacacngaacnagccgggaccacccagcaacgcacgaccacagccagcca
